United States Patent Application Publication US 2024/0009291 A1 - sequence listing, part 3

SEQ ID NO: 5719 - protein, 807 aa, Methanobrevibacter ruminantium
MEGEQNNLRPYIEDFFRDLQLYDDYKNGHHYKDLLEGSIILFLEKENTYTAYEIYENFFMIYQITDEDKSHGHKTESIDISESNSLLKLVNVMKDYEENTGDLIEKQRDHFIHSVNVFILGLAIYASNHKYRNAFEAYVTDSPYKKYYKTADGEFSAEEFLYRWGIASLFHDIGYPVEIIGKQLSKFINDSSQSISQKYKVNTAVNFKNFNELNSIIKLDPKFPIIYRMDYPETNFIDVYKPTNLMAHQIFTDLYVDSDIRAIDEFDELNEYLYKLVVHLDGFVDYMTSNNFIDHGFFSSIFVLNSYGAIMQKHYLNDDEEKFDYYINKYAYFFYPVLNSATSILLHNYFRGTLNEKESKTDEFNLGKLEPMQNPLAFLLIFCDELQEWNRRPIGLKDKAKNHVHDIKININENQVLVDYIVKNSALGLNFSENKEELINNLLDVTSIFSNGLKVNITPYLDEKYPLEDISLSEVETPRILLRHVEEIARASHNRYNEIGKAHGNPDEPYESLSPKRKLSSIRQTKEFPMKLNLIGCEMVSENDPRDEYSLSDDELDFLAEREHEAWCREKRNVGYISHHDAFKRGLIDDAEYDRLCRTNEEGCETNKHNKIESPERNLYVHSNIIPYDELNQYSKNKDRRPFEDLPDNLKLIKNNPLKIVENRYKLFTVAMHNEYMDYIAGKKEVPEFKDLPFELQQINYKQTYLIAKYLNEIGYEIVEKDDERPAVTKFENNKETGYLAGREHNAWYLRKLNDGCTNGKNKDGTDNPRINPWDELDYSLKKPNMNTFKKLPKLCLKADLKIIKNK

SEQ ID NO: 5720 - protein, 264 aa, Methanobrevibacter ruminantium
MNDKLIELPNYGRLMVVSDLHGNLNDYEKYIDLWDCQDPDFHIVFLGDLIHSPYFNDKSVELLDDVIEKDKKYSNFHVLLGNHEWAHIVHRDIFKNGENIREDFEYLISYKKGTIEPAITEYIRFFKSMPFFVKTENGLFLSHAGPSRKVKSIEDFNGIFDGDYHNPILDDFLWLRPKRNLYGRRNILTDSNLYDEGDIFNFLNIVGANCMVVGHSPVDGYKQYGNQLIISSSFQTEDKVYLDIDLSKEIKHMRDLLDCIRYFD

SEQ ID NO: 5721 - protein, 119 aa, Methanobrevibacter ruminantium
MIDSFRYALNGIAVSIKDERNLKIQMIVMMLVIIAGFLLKISRTEWIICIILFALVISAEMINTAIENAIDYTREMTVDKDNDLARIAKDVSAGAVLVIAIASAIVGLIIFIPKVLLLL

SEQ ID NO: 5722 - protein, 84 aa, Methanobrevibacter ruminantium
MEEIIQTLKEIEKENNIEILYAIESGSRAWGFSNEESDYDIRFIFKRPIKDYISLKNNKDALDITIDDYDIVGWDIKKDFKPPL

SEQ ID NO: 5723 - protein, 147 aa, Methanobrevibacter ruminantium
MGNCDFLNELPDFDKDVLKYHYASIAFNVWKEALDREEMDRKSTKRYLYCIRCILAWKSADLGKDSSISIFELMEDSEINDDLKSDINTLIDYYKSLCKNELDEELIDRLSIWIDDTVKNIKDHYPKKEKKDMSLYDDVLFKVLEIE

SEQ ID NO: 5724 - protein, 277 aa, Methanobrevibacter ruminantium
MGFKEDNKDKYLDPFKRVTVDVGSSFNRINVSADVIGNRIRITVPKDKSGNLTGTIVENIALENSTWIFEPVADEIMEDRIDRKLSPRKYMDLSKFDFERGFLPKEILDDLVYPINYRKDYSPFAKKVLEHPNDEIRKIALGYIDDEDVLASIILFSKDKDLSLFVLEHIKDKSILLDIVRNDFNYYYFTGAVDIFYDMDKLPLKLFDLDIRKAALERIDDKELLFDLAFDCEEWFKPIDMIKDNNLLSKKELDSLNLYAQNREIREIIKSRLKNEL

SEQ ID NO: 5725 - protein, 579 aa, Methanobrevibacter ruminantium
MCGIVGCILKDKQKSVAPILLECVENLDYRGYDSVGIATFDGSIHVKKDKGKIPEVDEKLDLADMPGNFGIAHVRWPSTGIASKENAHPQLDESDSIAVVHNGSLKNYDELKGELIADGFKFKSTTDTEVIPHLIRKYMNEGLDLEHAFRKTIERLDGSYAIAVISKEESNKILATRYQSPLKIGISDDAYFISSDIPAIINYTRKIILPAEGEMVILDEDGVHVHDEDGNEIEKEILVIPWTAQMASKGDHPYYMIKEILEQPDAVEFTLGERENIQRIVDDLGDIKNICFVACGTSYHASLTGKYLLQHLAKIKTDVVLASEFKYTADTLDKDTLVVFISQSGETLDSMNALRIAKETSPTLAIVNNIGSSMTEEAKYTIITQAGPEKGVAATKTYIAQLTAIYLFAGLLANDEKLINELYNVPGYIREVLKKSSEIEVLSKRYSFADDLFYLGRGFSYPIALEGALKLKEISLIHAEGYASGELKHGPLALINHKIPVIVILPPGSDYEDTMVNLEEVKARKAIILSICAEGDAKAECKSRDVFTVNSKVSETIAPLVYTVPLQLLAYYVTLEKVA

SEQ ID NO: 5726 - protein, 1034 aa, Methanobrevibacter ruminantium
MIANSPKEIKSRLIEIYNEELLNLNIFIKNRDELKGNKDLRYLLLERIKEEFDYLDDEELFILLSFYQTIPSFYRKTFNKILEASIDKNYIEIQDELLKLVEIIKEEISNIDGAIEEQNLKIEEKLLKSLYSKDNQNGENSDINHLNEGKSLDINNLTDEEILELYNISDEEFSQLQDYYEWEIFESDFLNEEILEDYDESAFLDIAYNHKDAEVRGFALGMVLKPYVWLDFLFNDPDLFVRKSALFYLFKERYLNDIEDIDYLGKIPIEIDFNLDYSDAIDDFKIDESLFNRHDKIIISEISIKDDDLIVKTDPKNSYEHAVSKIRSQDALKAIANYHNQWSVRYIAVNKITDIDYLYDIALNGFNKDAKPRHGILYYPGEISEGDVLKSLLNRLLRLKNLSDEDSQSFLKELFYKSKDSIIKRYCLSKIEDDVFLVNLANTEANPSFARVCLDTIKDEDYLILLSIAIITNPRFKGKNQDLYDGLCEGGIGDEDSFIRESQFDEIDYHNIRAYASKILIALPRKTLNETLESFSLKLDIPNLKEHRVFKPIINKRITDILGDLAKIDESPLVRSIAVLGLEDTNDLMSIALDDEDDKVSFNAIKKLNDDNFIEYYLKETNRKAYYLVEGNLVKDQSLLKKIALNDSWGPTRSEAVRNIKDEDLLIGIAKNDPEAIVRREAVLKIKNQSALIDIAYEDEDDLVRDFAISNIDDEDVLEDLIYKNEDSNILRTILSKLDNEEIIKDFAYNHPRGIVRNAAISNIDDNRVLVDIAKTDEDWTVRRNIIARLVGKFIKSSVDVYEDKYLNHLKRREYYNSLIKGDNEKFKSENKVKSSENEKNEYADASSIVLYEDDEPYTLQDLLVDRALNDESEKVRAFVVSYIDDEYFLFYIVSNDKSIKVQLSAIDGIKRNELLAKIFIKSKNHHVYRKAISRIRYEYILLKLVCLKNYYGELWPKRQMAEARMEELGFKSPLIKKEDNRKNKFFRPIFDIRDYQRDLELLDRLDKEYKNRSNNSDDSDGSSDDFQFKRIVF

SEQ ID NO: 5727 - protein, 153 aa, Methanobrevibacter ruminantium
MKLMFVCTGNTCRSVMAEYLFKTMISGDIEISSAGIMAKDGSSPSLNTIDVCKKHGLDVSNHKATNVKRSNIKDMDLVLTLEESHRNTLLNMYPNLSIYTIKEFNDVDYVYDIEDPYNQSLEVYEATFNEIKESLEKIDPDKLLSYGFNVEKD

SEQ ID NO: 5728 - protein, 126 aa, Methanobrevibacter ruminantium
MIMDNMWIEALKNKYRFEFKGLINVEDLFDLKLEDLDYIYKNLKRDENDLQVDSLLDANKNPLKGELDCKINIVKSIFQMKVAEIEKAKIAMANKAQKEKILAIIENKQDQELSEKSIEELRKNLR

SEQ ID NO: 5729 - protein, 670 aa, Methanobrevibacter ruminantium
MRDRLFNHFNENMAPRKLFIVDRDWEELWNMYLDGFPREMNPIYRERRELDCSACRSFFKRMANVVALDEDTGDFISLFAGETNGEKEVFRALDEYVKSAKIKDVFMSDTQRVGIESNHEMLDSGSVHTWYHFYVDVPSEYVGNLSQKAIYRNNRIVLENSTQRISQDAVDTVLELIASNSLYRGDQWEDALKSFKDYLKEYEANDMDEDLFYWIKSIELGSLLVRIKNHSIGVLLMDVTQGVPLDEAVSNYERIVAPTNYQRPKPIFSKRMLEDAQEKINELGFGESIYRRYANMADLSINDVLFANRDYTSEIQDNQNFFDKLKELTVNRARNFDKVQEISLEDFVESILPTALEVELYLSYDLSNNFMSLIAPVNRDAPSMFKWDNPFSWAYKNNIADSLMKERVKALGGDVDVDLRFTIQWNDNEWDKNDLDAHCTTPEGEEIYFSHMRSSKTGGWLDVDIINPEKNVPAVENIQFKDRNQMIPGDYLFRVHQYTYRGGDDGFKAEIEFDGRIFNFIYPMRLYQNEYVDVAKVSLGEDGNFTLNSFLDNQTASAKEWNLNYNRFVPVSLICYSPNYWGDNAVGNKHIFFILKDCLNDGRPNPWFNEYLVSELRDHRKVTEALATIAKVEESDEQLSGIGFSFTQKNKVTLKVKSENIERVFNVVIG

SEQ ID NO: 5730 - protein, 394 aa, Methanobrevibacter ruminantium
MGTLPLGNDNDLDDSQFYNRAEEISFISENLELTKKGSTPTILLTGIRGVGKTALMKKLKKDFQKDGYIVVYMELSGMNKYKKDSLDRFCFMKLFYESIINAYKESNILSINTQILKYIKTRNFKIDKISSFEKIPIPIITTEEDYSKFAGFVMDLPQMIYDDFKDEINGVLIFMDEFQILKQLDEDVNGFLWYIRSIIQSQKNIGYIFSGSMSLKDDLIADIAGQKGAFGGRILNYEIKRFSYETTKNYLNEKADYLNFTEEGFERFYHCTKGNLYYVNSFARLLPPNIELNEEKVNSEFDKSLPYLVIHLSSEWYKLSNQEQRIVIALIEGPLKRIEIANKLQVTSGAIGSSLKTLQNKMLIEMDNNKYQIYDSIFKAWLKKEYREKGDYPF

SEQ ID NO: 5731 - protein, 1479 aa, Methanobrevibacter ruminantium
MGFFDKLKNALESGNKSHDKRESQKNEAISDNPRGDSLSDNKNRNSLPDNQNRNSSDNNNVRNFKYLDDLIHSGQKDIVLDCDIVLADSEIESYKRGIDIGGSNITLDGNGHVVDGRNKAEIFKVSSKNLAIKNLRIENGYSELDSIIDVFSKGELHLSNCSFFKNSNESHRIFGDNLVCIGSIIRNMGELTIHHCHIRNNSSRGQGGTIKNTGTLNISDSIFEYNLSLEDGGAIFNEGLLKLSDSRFEFNHSNKRGGAIHNEFNGETIIENSSFDKNGGRKSANDISNRFNLVLKDMHSDLKIDNEWTVFIEKGKSFDIDNKGGIIEFAPLNNDEKSFTFLKELLDGNDSQIDLMHDIKLDIANDEQLYFPDGINFNRDNLIFNGNGHTIDALRMRNIFTLAGNDIIFRNVNLENGFSKLSNGAAISMKEGFLKIYEVEFRDNAAYNGGAISIKDASVSIDSSIFRHNAANAIKFETGGGAIYNENGSLSIIDTLFISNSSLWGEGGAILNKSGALSLNNCDFTDNRSVKNGNDISNYDSLRICKCSFESDKANNSNSDSGEITNSNLGSKINNSNSDSGEISIFNNNLSKLYDSNFNHSIIINKGLLKIDKDFPIKSAQIKNSGKLKAYNFNDKQIEGIDINNEDGGKLVFVIDGVEVLNTVEISQKWIEIKIFISSTFKDMHSERDYLITEVFPELSKWCKERRILLTEVDLRWGITREDSRSGNSINICLQYIDKCRPFFICFLGQRRGRIPEKGERKVTEETFINFPKVSNLVGHLSVTEMEIEHATTLPLFKLLENDFDNEHAKRALFFLRENPFEDVDLSPAQRDIYLNRKPEDDEKLSQLKDLIREKCIFFDYSCIWDENMELYELSSSKGGLTDFTCNGRPLSEVIIAEVKKQIENEFPDYKPVKTDDIFLDDAMLQNLEIMSISHDFVGKQKEIDYINEFIESDNERLLLVKGAEGIGKNTLLSRVHALLNEKGISSIMRISNATAKSNSSSNLSLSIGSEIGLFNGEEALYKGVKHALDDEFLKQLSDSGVRVLIISNADKLNDRLVFNEIPDNLHIILSCGESYEIAILHKELIIEGFEDISEREQLINEYLNHILKNLNQAQKELIISNPASKSPLFLKILLNELKNFGSYENLVEKIEGFGDSTLSAFEELLRALENDASFANGFARDTLLLLIYSKHGLNEEELVFGLESLSHIDARSKLRLFLYRMGDYILAIEDRYFIKFDEFKKAILGLYGDCEQRIREILVEIYKNNILKSPDSLANGSDEILYNLELLKDYDGIMNVLNDDRLINGIHPSCIFLGYKYGKFYGPSKEYLGFTMIDSKDKFEFFSQIALVLAKKSADSLKYAMKAYPHPHTQWPRKFRNENDSESFMKYQDAFYAIPMFIEAACRYANKAIKDEEDLDKLREFKSEFDKRINGVDSFLNYMSNFGSSQLDLGYKVEALADDAIFSLDNLNEYYNGGVSEK

SEQ ID NO: 5732 - protein, 731 aa, Methanobrevibacter ruminantium
MSRRDKMIAKIKELMYKPEYIRNIGICAHIDHGKTTLSDNLLAGAGLISEDLAGEALGMDTKKDEQERGITIDAANASMVQEYEGEQYLINLIDTPGHVDFGGDVTRAMRAVDGAVVVVCAVDGVMPQTETVLKQALRENVKPVLFINKVDRLINELKLGPEELLKQLTSIIVEVNALIKSLAPKDKKNEWMVNVEEGSVAFGSAFKNWAINIPKMQETKFTFKDIIDYCNEGKEDELKQLLPLTEVLLNMVVKHLPSPNVAQVYRVPKIWDGDIESEVGQTMIKMSPDGPLAGMITNVAVDKHAGIVATCRIYGGTLEKSSEIYLVGSHGKARVQQAGIFMGAETIDTGKVPVGNIAYLTGVKGASAGETICSADCIIDEFEPIDHISEPVVTVAVEAKNTKDLPKLIEVLRQVSKEDPTIKVEINETTGEQLISGMGELHLEVVTNRIINDKKLEILVSEPIIVYKESVLGHSPVIEGKSPNKHNRFYIDVQPLDKPLYDALIEGDLKEGRIKTKETAQDFIELGMDKEEARRVWDVYNRSMFINMTRGIQYLDEVKELLLEGFEAALKDGPLANEEAVGLKFILSDAKLHEDAVHRGPAQVLPAIKKAIYASIMSANPCLLEPIQKVFISAPLEYMGNCNKDIQNRRGRIIGQETKGVIAEMDFEVPIAKMFGFAGDIRSATGGKGDFSTEMKGFETLPIYLQDDIVRQIRTRKGLSPEPYGPEHYSA

SEQ ID NO: 5733 - protein, 661 aa, Methanobrevibacter ruminantium
MTIPVMYDLDEERLRALNKDEKKEDRLFSISLLNPFYPLDSLVTDEEEDLDIRIAALDCLDLFGVTLYHIDIDSVPKELALAVIEMLDDGSKLKEIALNHNDIDYRIKALENKHLTDEDALKYIIENESAPKLRSLAACHPCLNDSKFLEGLALNDDDEDVRAAAVSNYSTKGVDVLKKVISDDEDIVRIPALKNLVFKYNLFNPSLNKKFNFKKKFHDMSWHMISSIDDYVPKEMDNDEGIRDLIDFELLDQIYISSANECYNELIDKLKIFFEKALYHYEIHNPFDESKLENDSYRKKMYDKLKLAEGDQRSFYLYQMAYDGGHAYLNFYLDYLNGLDYDSYLGDSDSSNEDSDLKKLFNESNDSYSLDKEIEESYFIDLAYADSNCEMVRLAIEAISDNSVLFDFAKNGKTSDIRKTAIKRLTDSAYLLDLAVNQIDKDIREANFYDDDWICDYISDNSNDYFDIFNTYDFYSHDLEHYERLFDNRLDSFYYEKVAWNYYRNTISFCLLERIDNYLDLVYAIKNTRSFVLRDLVIYKIENPLFLTDIALNAIDERIRYTAFGRIESKAFLKYVYLNSNDFRIKLLYLSKTTDNAILEEAFLNEENDVLRKYVLDNSNFKISPKVIEHCINEESVISDYAENKFAEQFVNYRLMDKKFL

SEQ ID NO: 5734 - protein, 123 aa, Methanobrevibacter ruminantium
MGFIMIINKLFNMNEDNEIYLVIILVLAPLIFSIIDFTSCLVDHGVITWFNCYTFKTYICFIPILLICSIIAKVIWREKSLKDVLEIAFAPLFFWLIEIGFALFVSLFIGVFIDMIIGIEAMV

SEQ ID NO: 5735 - protein, 158 aa, Methanobrevibacter ruminantium
MANWCENKLTVKGTSEELVKLIEEHVIDGELSYKTFATEHRLFGENHFDLDEILNERISEIVFWFSTKWSPVPAEKVCEEINQTYPTLKAELSFFSAESGFWGQYSDYGGEEYYELKEEDIEKTSEEFFKFGLEEGFLEKTESGKYAFTHDVPTFRLL

SEQ ID NO: 5736 - protein, 1587 aa, Methanobrevibacter ruminantium
MSLMEWKYATIFISSSFIDMHAERDYLIKKVFPELEEWCEEHKIHLSNIDLRWGVPEEISNNKSTIEKCLINIDESRPFFLCFLAQRRGWIPDFAEDISDDTFKRYEEIAAYSGLSATEMEIEHALLSPLKDFLNDDDELPENLRTRHSLFFIRDKSSLDEITDAQKRVYTNYGLVDAEHGEFIPGEYDSEGNCIREPKIIDDLSLKTKEIIEDADNSSQKIVDRIIKMKGDCDLPEDEKKVHIEITKYTGDWNRNLKIPEIEALTNKDKDDPEKKVRRYNDYEWMGRLSNFKEVKEDYKDISLIKKSENIESKIGRPLKDVIIEQMKRQLELEFPENFKEDEDLTEEERILQNELNQQDNFAYLNSQGYIPIKKDTDILSKYIEDADESRICLVSSEAGFGKTMLLANLAIQLEKKYTNKYDETRPNQKAIYKRFCGASNLSSKAFSLWDTIIQEAGLTEDDDFKIPKNLDELKKSIDKILDKISQKGESVIIIDAVNQMPDGLEMLKWLPAPESSNLKIIISCKEDNEDKELCLESLKFIKDRNAICPYFEDGHEDELGGEYKNYSFELKALEDCKNEKTKIINAYLKNYLKELSNKDIETICSFDASKNPLFLKVLLAELRVFASFEKLRDEIQEFIKDEFADESKLTSEDSSNHSDDSEGSKKQSQGSPKTAFNHVLERLEHDEDLVEGEALVPLIFALLANARVGLSRDEMASIIKAAKPDLDDEYIRDTINLNLRQVKPFMARKEGRDDFFYESFKLAAQERYAPKNIPKNERLNEYFKDKEDSDKLINVNALLADYFLKDALGQDSADSNDKTLDLSTIDGFNFKGENIRSYNELPYHANESRDFDRLKDILSSYSFIKNKINLSDINNLIVDYQFKDFEDAQHPFIKDEEDHSIVLIGRALELSAPILSDDKSELPAQLYGRMVDLRDDEVISPLIDEIEADYEMVLKPKSNSLYSPKSSIIKRPKVNGTKSTSSIEITDDKLLISANEDGTLNLFDLESNDLEILEEPHDSKVIRIIPTDEGQNMLMASSNGQINKWDINNRSIFKDDDNIYPKINANITDIYLSGTYNKIYASSHEGIFTIDLDTKELCEEKEIEHKKYNQILVPRRNEAILVCDEKEVDGWDVYEKRKAYNRQHQQNPAGEESSTQLDSSEEIRFMGLNKRFLTLISENGQMKFWNTLKNSGGGESIDEAQVCSPHDKFAQAITLEKEDQIITISDMGVLRVWNIPRPRQPKFEIAKIEGSDIPMDIQTGIKSPTAIDYFTDGDERWVIVANENNDISVIDLNKKVEANKETKHSESVLSIKIDGNHMITASDNGEIFAWDLNKEECINKFASEFRVNSISYDRDKSQLLLSGVKKEKDGNKIYKIASRDATDMWEPIKVQDDGSDSKKSKKLIDLNADDRDNPNPVIDIAQISDGMVFIEEKKISMPDYEAGFDKKATSLATQFDSNLAFVGFEDGSISSYPRETEFDAGINSPVVKIRVSGDRLVAGFKDGSVVIFDLSGTKTASFKAHDKAITNIYLDESRLITISEDKTLKFWKNDECTYTYFLDIFATSVSVNDGKLILGDTLGNLRFFEL

SEQ ID NO: 5737 - protein, 761 aa, Methanobrevibacter ruminantium
MMRQIRRNTIDFAIDLGTSDSVIACFNGQESEIIKNHSTGEDHTPSAVYIDSLGEIHVGRIAKEAVLKCPSNATSEFKLNMGFPIPFLFESSQIKMYPEQLSAELLKDLRKSIYHQTNQNIEEIVITVPANSNPLKTKATKEAAELAGFKSVYLILEPVAAAIAYGLRAKKEDTGIWMIYDLGGGTFDVSLVKANGQEIEKLATSGEDNLGGKLFDWKIVDDYFTPKIIDDLNLTDFRRDNPNYLKVFSILKNEAEKAKIALSGSDNDIKDYELSIEKLIEIGDKSYDFNYILGKEDLMNIMKPFLKITFNHCYEVLEESNLSIDDVEKIILVGGSTLSSILRDSLKDEFDRPLEYGINPLTVVAQGASIYAGTIEKQFIECENHRFALILDYEKIGFKDNIDINGKVFALDEKYSFLDYSIEITGSNGEIIYIEDSKTGNPTERIDLDIDGNFRLNLNVKDSYNEFLINIYDGNGDLVELDENSPNSIHYKKALNPGYPILSSSISLYLDEDSSLILKNSEDLIDLDTENDFIIEYSKRFNSSYPIASKGDIIPMSRKEILHTSKIIKKGDGDSFIKFSFYFGELILANYNTLLGQIVITGNDIIDDLPKDSEIELNININESNMIDFEVFIPYLRQSFNNSFSFNNYNNYNGFIDNYDNLKSKHDEIIKKYNKIRDFARDEDKKELFLKNGIYQSIERVYENIEEIEEKEIIDYLDILVDMARYDKIAVYPSLEYLNYLDDVLDECKFFLTIADVELSI

SEQ ID NO: 5738 - protein, 552 aa, Methanobrevibacter ruminantium
MVLLNYNQTKDMIEDYFHGQYEVLKFLGEGSFAQVFLVKQNFLNDKRAMKIIKEPLSNTKNIDHIFHEVQIASQLHHENILDIYDAGLIGDIAYFVLEYVSGGDLEDYRTSYLKANRPIPIHISLDIIKQILMGLGTLHSSNPIIIHRDLKTKNILMNYGDERLIVKISDFGFARELSSNADDFEVGGTKPYMAPECFNGVFSTRSDVYAVGVIFYLLLAGEFPYRLSDYVIGDIVDGKPWKIDLKPPSHFNQNVPKFVDKLVLKALDVNPNKRHIDAKDFENDLDKAIEKFKEYSYYKEYLNELKGLEELDELDNLGKLGELGEFGELKELEESSRIAELKESSKLGESNKDSKDQDHILNDNILEAFRLAKTEDGLDEASSILEKEVLKDYEIRKTYGKTLRLWKGDYPDAKLISEAFTVTLKGENYKLAIDLLREAFAYNPILKDTYGYYIDLWSIFIDLNKNKDFIISINRLENLMDRNDKIRDIYKDSIDTLKSYDEDRILNEAIDLADRGNLIDASKLLELLVVYDDEIRKDYAYKLSLWKQDLSM

SEQ ID NO: 5739 - protein, 381 aa, Methanobrevibacter ruminantium
MKKKLEYIQTEKIKNKNYEFYRNIENNKTVIFRKTKFGKREKVNIIDSDDLTEQIINLSYNKSSRNKKIQFPYDKICKFVFKNNFQACNIVFKLGIDFNYFLDTEVINQIFESTRSDIVICAKEEIIYIIEFQKDKLKKKDKIRFGNYQTNLHNYYHGRKVIVFVISFDPNEELGDIPYGYDKEYGFTMHVKSFNELDAEETINIINKRIRTRAKINFIDIVLLHFLPFMKSHRSQEELLRIAVDLTNQIRTLNEDKILELKITQTVLAQEILSEEEFEELFKVIKMEDTGLVEEVRQLYWEHKIRNDMNELNQMRNELNERSNQLNERSNQLNERSNELKEEGKIEVAINLLKLKQPFDLIAKATELSESTIRSLQKTIL

SEQ ID NO: 5740 - protein, 267 aa, Methanobrevibacter ruminantium
MSEEEIDYTEFIDFEDSNLISFKLAAINNKVRFSILEILRDFQKLNMNKDKTFKKDPYYSRELNEILLKKYDINISLQMLGQHMKQLLTAGLIEEVPLKKEVPNKIGARNVKGYILKPDAFEELFLEINFLSDELLSFFDLYKINQKFHDEDYCILTIFNGADKGKTFKVHKDDTVLIGRKADFSKGDLASFAILLDNSYTAVSNVGKPHLKLFYKDDSWCILDEGSTNGTFIGQNEVATGRITPLKKNSFLKLSRGEGGAVIYCSF

SEQ ID NO: 5741 - protein, 256 aa, Methanobrevibacter ruminantium
MNIRPSYSYASILNVFIEEKYKDNLGCFRNTNFYDVLDFQSDDSSFYYDMAFFSFYYGDYKSSFFLSQKAMILGHDEGDLKLLRLAAFNELSPIKKLLFDSIKEEFSNIIKEDDEELFLFYLEDMHYLEIALNQKDINVEEDFLNLISNLYIQVKYMDYVDYYAMINLYQFFYINKFYSEALLLINEILARNLNVFNLNRKLDVLFNINDIPGAYDVYQDIRLLDPNYFDSSPNREEMYLEVFTEHFFKNSLGKLE

SEQ ID NO: 5742 - protein, 238 aa, Methanobrevibacter ruminantium
MTNLELNILDLSLNELLRTVNKTESILKDQYDEIKEFRDIILTARNLRFDNGNDATIFLAGSGRSGFVAKFFAMRLMHLGFHVYVFGETLVPPVHDGDIILFISKSGGENAVTDSIESTKLENIKKSKSSPSKNNMIFENVKILSVCGSFDCYLASHSDAKIVIEAERDRKSTKEESERFDSLGFNSNELVIMGTGFEDSALLILDALVVEMMNNLGLCEEDLENNHENINRPKVSKK

SEQ ID NO: 5743 - protein, 370 aa, Methanobrevibacter ruminantium
MFELSGKYNTAKVFADNIDNDSVSQIIQFLNQPIAKDQSIRMMPDVHAGSNCVIGTTMTITDKAVPNLVGSDIGCGMETVYLDTDEIDFNRFDEIVRKYVPHGYDIRENPHPYIKKLRLTEMRCYFDLEAGSQGNFSLGTLGGGNHFIEVGKDKEENLVLVVHTGSRRIGADVCEYYQNQALKSFKRMHKTATNKELIYCEGQLFEDYIHDMKIMQEFASWNRKAIIETILSHYGMDYTDSFTTIHNYIDTDHNQMILRKGAVSAYKGEKLLIPINMREGSLICKGKGNKDWNCSAPHGAGRLMSRREAKDKISLKEYENAMKGIFTNSVNRGTIDESPMAYKPIEAIVNNIQDTVEIIDIIKPVYNFKA

SEQ ID NO: 5744 - protein, 244 aa, Methanobrevibacter ruminantium
MEVEGDKMNFKEFEELINSGVKEISLNEDISLEDKTQAPIEIKTDGLVIDGKNHIIDGNNKLPILYIKASNITLKNIIFKNGFSEDYSGAITNYSNDLKVEHCQFIDNSTENAGDLYGGAIYNGENSKLTVEKSIFKENDSDFGGAIFIDSDSTVKINNSVFELNISEFDGGAIYNKGELIIDKSIFNQNMAFKGGAIFNENSLTINDSHFKNNKASDGNDIQTENEDISISNSLCEFINNDNY

SEQ ID NO: 5745 - protein, 370 aa, Methanobrevibacter ruminantium
MNFTEFEELLGGEAKEISLYEDVILESDEDYRRGIELKRDGLVIDGKGHVIDAMERAKAFHIQGDNITIKNLKFKNAVSHKGNGGGAIENVGKELSIKNSHFFNNCSLGPLGGGAICSFEDMNINDCIFESNTSVRSDGGAIYLETFFKPNVTVIMKNCSFKNNYADGGFKDFGSNAGAIFNKNANLYLFDCNFEDNGVVSAYDSSSESIQNKNGIITMDNCCFNTRESHSIFNLGFLLINSSRFYHHPENLEIQGSIFNRGFVGLLYGERNQYKVELDGKVLDSSDIGDLINEYKKTYNLDTKEVGFIFKKNIIESINDLSSDNFNLEDFNLGDINLSDYKDDEYLMDLLKNKIDLIYSGDFEDSDESI

SEQ ID NO: 5746 - protein, 136 aa, Methanobrevibacter ruminantium
MLYYRGAGWADWDLDNFGSRISYIDDFPFNILKALLSYFETGDEQSVEFNAEGWFYTFKFSSDVRVGERVIYESTIDFANDFICEIEERMGLWAFFPSRRTSDEDYYELVDLIVKIRTELLDKDLINKWIDIISQS

SEQ ID NO: 5747 - protein, 586 aa, Methanobrevibacter ruminantium
MMGDYMNTDYLKEFEELNHTTESLFDLGISGLLIILKDGTNLTSWSELSNPDDILYLSADFRCKENYTEFSNFKNAKVLILQNYVRPNFGVGSLFFKEADLITKLSTWHSLVAFYGINWDISSTDSLKNMFANCLSLEYAYFEDWDTSHIRNFWGMFVACCSLKAIDGMENWDLSSAENMESMFESCMSLEDISFLSDWDMSNVENIFEMFRDCYSLKDASCLNWKFKNLKNGDNLFANCRKLESFPSWYDDEFINQFGIRNQLNLIDDDSFFYKIAGGFDPQDIFIAVGYIRDEECLKRLLRDSSVHFYARRAALLNPNLNDTEILEEFADSKDYVERAYAIENPNFTNIGIIRRLANNDKSHLVRFKAENKLKELKSEGLEIIEDYPREFKQAFEGHDRERASLVLSQWRGYDSTDANFILAKVISDSSDEEIEFSETFEAYIISMEEKPQDPSLFNWFSSTAVECMEKRVDEDIGFSQLFNNMYKSHMNSTDYATAFLDFFQDILENDRVEKLNLLRGLVDSWDTDCPDDANMHCAYVILNIKKISKDELEDRIAKAKVCIPENLNSYPKLMAFMNAVLEADK

SEQ ID NO: 5748 - protein, 314 aa, Methanobrevibacter ruminantium
MELEERIEEALEYIQNDSNYALELFNGILKEDPHNINALNGKGSALMKLHRNQEALDAFNDSLSVEENPSAYLNKGIILKINGDYRNALKSFDRALNYNPRLASIVSLLKNEILEIFEKESTDISLLYDFNESCTALIKKAYGYKNQGLLWDALDCLEEAVKQDPKSENSINDIIKKLILTIKKEFLYKEINSKSTKIDKLKFQTIKSIIVEDNPHKTLLLTNKIFEINENDLDALNYQGIAYFSLGEYIKSIESFDKCLSINPNYTYCSFNKGLVLRRMGLLNESLDCFNKVMNESDFLNKVKPFQEEVLTKI

SEQ ID NO: 5749 - protein, 200 aa, Methanobrevibacter ruminantium
MKTIAKPFQNSIDIKKSQFICRLFPAQTEKEAKDIIKEISEEYKDATHNCTAYVVSDGEGYDDNGEPGGTAGRPMLNVLKKNEINNVVAIVTRYFGGIKLGAGGLVRAYSKSVLECLAIAEIVEMELYELFRFTFEYQDIKAIDAEVRAKNLAVIEKQYEAQVIYFVATDNVGIVKSVQDKLAKQVKIEHLGSRYLEKIV

SEQ ID NO: 5750 - protein, 169 aa, Methanobrevibacter ruminantium
MEDRKAKFIVYVVVCLLAFICSSTVFSMTGGLSDWIVSNVNTNEDANNNGYIDSSEGQYYSDSDGQYYSSSDSYDNSNGGSGFLDGLFSSSDNSESNYYSSSDEEPDFLARLIREFIGGSSTTDSYYDSSDSNYYYEDTSNGYDLGNGFSYDLNELFTKTDNKLNQLFN

SEQ ID NO: 5751 - protein, 1170 aa, Methanobrevibacter ruminantium
MIVLNKRKKSWEIYPIGSPKGALNTKRQAEFVGILRFMEGEDGLSIKRFLIKSDKEEKPLAPSKAINLLRSQAVFLAQKDDEMEAFLEKNNVKVRFTNICQHCSYEGYVTIINSDFSYNYHDQLICKSCAEETIKRELQLRGYDKKVFRNFKKVLEKTGSLDDVLEMLSPRFDPLAHTDLTLFDTIKVHEDKIPKIAMKRLKVPKEFRDVLLKDNQYLLPVQYLAIREGLLKDENLLVVSATGSGKTLVGELAGVPKALNGKKFLFLTPLVALANQKYRDFKKRYEPLGLKVAIKVGMNRIKAKGELKLPDSNIADADIVVGTYEGIDFLLRSGKSDLLNDLGLVLIDEIHTISDEERGLRLNGLIKRIEHLFPNTQVIGLSATIKNPKTLAQDFNMKLVQYKERPVPLERHIVFVNGDVQRRLLMRKLVQREFYSTSSKGFSGQTLIFTNSRRKTHKIANFLSGKGINASAYHAGLSYFKKEKIEKDFSKGKIAAVVTTAALAAGVDFPASQVIFESLLMGNKWISPNEFSQMLGRAGRPSYHDRGIIYLVPEIGSEFDGESEESVALDLLESDVENIIVDYTEDGSLEQILADISSRSLTKVRDVINFYKDIPVPIDINTALEELRDKKAIEIHADDTIDVTRFGKAVAMSFLSIDDGVIIKDSINDKNYLSQYYSKPFFKTNLRELRRLSDRIDEENEEILNRNRKIQHKLDQLKKNESQKKEDKDKEDKTDKKNKKSKKNKSKKSKDSKKDKGKDNSKKSKKSEDSKKDKKNKNNSNKSKKDKSENKNKSNKSNKSKKDKSENKNKSNKSNKSKKDKSENKNKSNKSNKKNSSNKEFKDSKKDKKSKNSKDNKSESSKKDKKSNKSNKYNKYNKSNKYNKSKKSNKNNKNSSSKNKNDNSKDSNKDKTNHKESKSESNQSKNLEKDSHPISKDYKNSNASVSDDLKDYSKKVMYNKRINMSKKQHKTIEDKPILVNKLNFKENIFSEINPRMSKKEVNANNLLKVQSIALDLELFENAYLAPVVHKQIVSALKVNFSTRLFSESTLDIISSGEAIAKLDIKFQDALLKLQIDFLRCDCNDRPFCECLQRGISYYILNQRLNKRDPIDISKSLLKEYQIQAYPGDIFSWLDAYVRNLDAIKRVAQAYGKKDIVKEADKLIKIIETGK

SEQ ID NO: 5752 - protein, 322 aa, Methanobrevibacter ruminantium
MNILINGTGAIGIGLGASMISQGANVSFFAREETANAIRKNGIKRTGIFNHYSFGPESFKVYTDYKDIPDNEFDFVLVSSKTIANDDISRKLNEHKSILKEDAKIIIFQNGFANDEPYLRFFPKEQVYCARVITGFKRPERYISEVTVHTEPILLGSLQKDDDGEFIDSRPVSIISKMINDSGIPSETTEELDKFLWAKMLYNCSLNPLGAILNGNYGKLMENEYSVKIMNELIDEIFEVIKASGYRTNWDSPEEYREVFYSKLVPDTYNHRSSTLQDISKRQKTEIDTLNGKVIELGEKYGVDVSVNKTIYNIIKTIESEF

SEQ ID NO: 5753 - protein, 162 aa, Methanobrevibacter ruminantium
MIIVTTICVILILIVLFYGLFPGLTNSNDNSDNNLIIQNQTSHFTIDIENGTYLSGEGKSKMVDSNYSTLESYENFTISGYEAYEIELDNGSWYIVSLYKVDYNTPSSDWVYNSDVDEDGNAYIFFNSKGEYYGYFINIPSSSDPSTFENLSFLTSIFHYNH

SEQ ID NO: 5754 - protein, 80 aa, Methanobrevibacter ruminantium
MSDVGKTVITTIITLVTTAFGLVAGLAWNDAIQKLIDSVMGPGDALTGLFTYAVIVTILAVVVTIILARIAAKMGVELEE

SEQ ID NO: 5755 - protein, 128 aa, Methanobrevibacter ruminantium
MEEIVFKPIGYIKSKYETVENMPKSPREGMEDEAELIVNEEYLESMSDMKAGKEYMVIFYFHKSNGFKQRVPFRGDGPITGLFSTHAPNRPNPIGVSIIKVKEINGNVIKFNGVDMLNGTPVLDIKDA

SEQ ID NO: 5756 - protein, 112 aa, Methanobrevibacter ruminantium
MKRVVAVFRQQKFEDVKRALLAIGCEGMTISEVKGRGRQLGVKESYRGSNYCIDLIPKTRLELIVNEDDLEDVIDTIIESARTGEIGDGKIFVSDVEEVIRIRTGERGSKAV

SEQ ID NO: 5757 - protein, 403 aa, Methanobrevibacter ruminantium
MVVLSAGDTAWVLIATILVLLMSIPEVAFFYSGLTKRKNVLNTMFLTFIAFSIASIIWVVYGYPFAFGDVSISGLIAQPAHFFMSGIGIEDLTGTIPTILFIVFQLTFAGLTAALISGSIVGRMKVSAWIVFIIAWVTLVYVPIAHWVWGGGFLMQMGSLDFAGGTVVHINSGVTALALALVLGRRKDTSLLPHNLGYSVLGAGFLWFGWMGFNGGSALAANGLAASAILVSNVAAATALITWVIIDIVKVGKPTMLGAITGGVAGLVAITPAAGFVDVPAAIVIGFVTTFVSYFAIYYLKTRFGYDDALDVFGVHGLSGIWGAIATGIFAVPAVGGAAGLLYGNPGQVTIQVISVIVTIVYAFTISFILAKILDKTMGIRVDEKTEIEGLDTKIHKESGYRL

SEQ ID NO: 5758 - protein, 139 aa, Methanobrevibacter ruminantium
MKSDKRAKFAIFFSIAILALGLSNIAAVWTGDLISGSLPVINETDKLIALDNDNFSPASLNTVYEEKKVVEVVNDTSDANDTDSTPNNADSNTESDDTSNSNNNNNNQNSNGNGNQNTNPNNNAEPSSGGSAGQTETEE

SEQ ID NO: 5759 - protein, 189 aa, Methanobrevibacter ruminantium
MEENKKFAQKVKDIRERQQMSIEELAEKSGVKLEVLQAMENGEIIPSLTPLTKMAKALGVRLGTFLDDTEQLGPVVVRDGKMENTLYFSGREDVANATNLEFHSLGAGKHDRHMDPFMIDIDHDDEYELSSHEGEEFIYVMEGEIEVVYGQDSITLSKGDSIYYDSVVPHHLHAKAEKAKILAVLYTPF

SEQ ID NO: 5760 - protein, 554 aa, Methanobrevibacter ruminantium
MSELFTELPIGKFFEMQVEKQPDHEFMVYPDRNLRFTYEQFNERVDNLAKGMLSIGIEPGDRVGIWAKNVPEWLTFMFATAKIGAAIVTINTAYQSHELEYVLKQSEMKAIAMTDGFRDTSYFDIIYGLVPEIKERERGNLKSEEFPYLEYIIHVGQEKHRGMYNTNELLLLGMNYDNDKYQEIKDAVTQYDVINMQYTSGTEGFPKGVMLTSRNILNDGYYIGENMNYTEKDRLLLQVPLFHCFGTVLGVMAVITHGSTMVVLEEYDPLLAISPIQKEKCTSVYGVPTMFIGMMNHPMFDMFDMSSLRTGIMAGSTCPVETMKDAINKMNMKEITSVYGLTEAGPGFTQTNAADSFEKKISTVGRKFPNIEVKIVDPETGEELGPGETGEIMCRGFNVMKGYYNMPEKTAETIEPDGWLHSGDLATVDEDGYYSIVGRIKDMIIRGGENIYPREIEEYLFTHECVQDVQVAGIPDEKYGEIVGAFIIKEPGYDDITEADIRDFCIGSIARYKVPKYVFFVDEFPLTTSGKIQKYKLGDIGLKLLEERRERGEL

SEQ ID NO: 5761 - protein, 292 aa, Methanobrevibacter ruminantium
MTLVLIGPACEDLIIIGNEKSSRIGGASYFQSFVYEEFYDDYIAIVNAQNTDLINEFPDMSKTELILKDDTHYFINEYPDKDNRDIRKQSTNFADIPILADDLKAIFNNLGLNEDNIDAFVINPLNSNDIPLETLEYLNSFNLPIFISLQGFLRFKDKDNSMVLKSYEDLDYIFNIAEAIFLDEKELKIVSDEDKSDSKIEIQDIGFDEKTNTIFIITNGSKGSRITDFKGINIKIDSVKCDNIVDATGCGDSYMAAFISNLLNGNDLKDSGDFASLIASKKLEFFGPYRTD

SEQ ID NO: 5762 - protein, 183 aa, Methanobrevibacter ruminantium
MNILNLPLNILIGNGISFFASIALILSCVVNDKREAYKYQVIEALILTVSSAFFLSWTGILTMLIAAARNYLVMNERLSSRLAIIFIIITLIICPLINTMGLIGLLPMIGIIQLTICNYYLKTIKWIKVAFIVNVLIYAVYFIGIYDLVSCATQVITAIIGFISLVKLIKDEKEGNIDSQPNN

SEQ ID NO: 5763 - protein, 90 aa, Methanobrevibacter ruminantium
MSDDELYRRAERKVDEKIGFYKHLYSYIGVNILLFAINAITSFGKWWFYWVTIFWGIGIVIHFLKTFVLTGKLEDNREEMIQKEMEKMKK

SEQ ID NO: 5764 - protein, 316 aa, Methanobrevibacter ruminantium
MKRLFKLVEKYFFIIIIIAVAIAVVFPGSFDWVMGEFMGINIINILLGIILFGMGTTLKIENFVNVFKRPKEILLGVGAQYIIMPLVAIGVASLFGLNEALTVGLVLVGTVPGGTASDVITFLAKGDLALSVSLTAVSTVISPILTPLITLILIGNNIAFNPVDMFISIVQIVILPIAIGLLLNYKFPDFCEELKDYLPAVSSLVIAIIVAGVIGANKQAILGSSVVIIAAIVVQYFIAMLLGFVIGYLSGMKRKQMVTIAIELAFQNSGLSTSLAKTHFPALSLATVPGALYSVWQNFAGSILAYIFRKYFTDEE

SEQ ID NO: 5765 - protein, 938 aa, Methanobrevibacter ruminantium
MSENRCYDPDCDAEDCRNPQHYNYICFDPDCNDEKCLNEEHYNKQLLRDYQESTDLSVYDHREEIDYDEDVDISLCGCPDCADDHDHNHDHDHDHHHHHDHDHNHEHSHEHEHSYSHEHEHEHSHEHGHEHGDEHSHEHSHDHDHGHDHEHEHGDEHSHEHSHDHEHESEDTCGCGCDDDDCHDDLEEHSHEHDHSHDHHEHDHEHHHEHEHDHHSHEHEDEHHHNEEHSHEHEHSHEHDHDHEHHHEHSHDHDHSHDHHGHDHSHHDHDHGDSCGCGEDHDDDDFSLCACPDCADDDDDDHGQEELLAEGKPLIYNRPIQIMVSSGILFITGHILEFLSFSPTIVTIIYMLGALIAGYEIAILAYKSLVKRHTVGPALLVVIACIASFIIGHGEEGAAVALLYYIAEFLEDLAEHRAKRSIKSLVEIAPETARVKVGDGEESRRIEEVKVGEIVLVKPGDKVPLDGEVVYGTSSINQASITGESLPVTKTVGDEVFSGTVNEDGYLEVVVTKEAKDSVINKIVTLVKRSQLNRSTTETMVEKISKYYTPLMIIIAACVAFVPPLVFGQDLIDWIYKALSIMVISCPCAFLISTPIGMVSAITSATKKGVLIKGSTYVEEMRNVKAVIFDKTGTLTEGKLELNDINIINDEYSEEEIVRIAASLENSSSHPIAQAIVNYANEKEIGFEEIEDFRNVPGKGIIGNIGGKQYYAANESLIEGSQFNISQEEINQYSAEGKTLIFIGDEQSVIASITVMDRIRDNASEVIKDLKSQGVKTFMLTGDNKIAAGKVADEIGLDYVYSNLLPEDKLNILDTLRNKFGDVAMVGDGINDAPALARANIGIAMGAAGSDVAIETADVALMQDDISKLPYLFSLSQKTMNIIKQNITLAIVVKALFVILAILGLITLMMSVGIGDLGLTLVVILNSFRIAMVKDPLF

SEQ ID NO: 5766 - protein, 127 aa, Methanobrevibacter ruminantium
MKDYKEPTNDNHNDDLCEVFHPHEESIERAKKHVLSEEEYSDLAEFFKIFGNPTRLKIISLLSFEDLCVCDICESLGLNQNAVSNQLRILRAHNIVKFEKEGKSARYSLTDLHVEMIYKMGLEHMTE

SEQ ID NO: 5767 - protein, 212 aa, Methanobrevibacter ruminantium
MGKVFIMSYIFIDESGDLGTKKSSSKYFVMAGIKVEDSQKLDRVIRKIKRDDKKNIITSNEIKGSNLPHDIKIKILKKLDSVNYQVFIIIFEKINRYKVNDGYDNIKLYDLLACELAKQIDISSSSKIFIDKSKNKKEEIVNFNKAFLENLNNFKKFPIKLEHANSMSYKGLQIADLISWAIFQSVEHNNNEFIDLIKNKKIKRVFEEKKNL

SEQ ID NO: 5768 - protein, 60 aa, Methanobrevibacter ruminantium
MNSEFIILFSHILPLILGFFSILLMINGIMDKQKVITAFGIILFLAAAFSPFVVLPILGV

SEQ ID NO: 5769 - protein, 231 aa, Methanobrevibacter ruminantium
MLEIIPVIDLMNSVAVSGKSGNRETYTPLQTIYASSSDPLEIALSLKSAGAKEMYIADLDFIERNGNNNIFKIKEVNSVLPVILDVGVDKLETFEFLLEFAYKIIVATETLESIEELGKIFEKYPKERIIVSVDVKNNELYAKNMDLDLEGFKEVLRRIDPNEIILLDISSVGTEGGFNKPLLESFEEFKDKIILGGGITPDEISQLDALGIRKALVGTALHKGQIRLNPF

SEQ ID NO: 5770 - protein, 207 aa, Methanobrevibacter ruminantium
MEKSEIEHYLRDIWVREYERGEKLVVDEFNADDIELLAKKEYIKTDDGFVNLTENGEYLGRSLVRKHRIAEKVVADLFLADMDEMEELADQIEHVMSAEVEENICRILGNPENCPHNNPIPKGDTTPGISKEYSVPLVSCHSGESGEVSHIKTEDARKLRKIMNLGLIPGSRICLIQKFPNYVFQLGNTQLAVDKELANEIFIKLDE

SEQ ID NO: 5771 - protein, 72 aa, Methanobrevibacter ruminantium
MDENDNKSQIIKCEFCGFTFQKCDGISCDSCPINCKTVRCPNCGYEILPESKSYKFLEDGVKKIRNRLFKSI

SEQ ID NO: 5772 - protein, 682 aa, Methanobrevibacter ruminantium
MSESITPNGGAKYSNNKNKALASKKGNDSYYKNVLLIGSPNVGKSLTFNKLTGMTAMVSNYPGTTVDIDEGNFTYENKTVHITDPPGLYDLNTITEEERVAKLLVLDKRFDLMVHVVDAKNIEKSIDLTLQLIDAGKEVILVLNMMDELEKMGATVDAPSLSHELGIPVVLTAAAQNRGLDDLKHTIVNYDSIENQILSESKTLLDVDYGRSIEIAISEIQRNIKGNYPVSKRYLAVSLLEGDEDSEDLLMESEDWDNLSQVIGAQKAKFDQPVKYLTKLRLADYAKHIKSSFTTIDSVNIQDTDSLGEKLSRIMIHPFYGLIILACVLFFGLYLIVGVLGAGILVDFLENTIFGQYINPAVTSVVVQYIPWVPIQNLFVGEYGIVTLGLTYGFGIILPIVSLFFIVFSILEDSGYLPRLALLVDNGFKRIGLSGRSVIPFVLAVGCGSMATMVTRTLETKRERNIATMLMALTIPCSAQLGVIMALLSARPRSIWIWLAVIVFNFVVIGYLAKRFVPGAQPSFFMELPPLRWPKLSHIAKKTWTRLVMYIKELIPIFILISVIIWALDLVGIFQWIIACVTPIVNAIGLPGSTSSSFVLGFFRRDFGAAGLMTIQNQLTGVQLLVASVTLTLFLPCVAQLMIMIKERGVKLAGLIAVMSIVLAFSMGFIVNFILTSLNVVL

SEQ ID NO: 5773 - protein, 398 aa, Methanobrevibacter ruminantium
MIETDVLVIGAGPAGSAAAKHAALGGADVILIDKKSEIGTPKRCAEGIYDHGLKWLGIEPDPAWAVQRINGGTLIAPDKTRLTLDETILPEKGYIIERKVFDKYMAMDAARAGAQIMVKTQAKSIQRGEDSKGSFYTVDCEQMGEIIEVKARIVIAADGPESRVAKAFGVNSTTKPKYMMSGVQYEMVGVNCERMDLIELHLGAFAGGGYAWVFPKGDDIANVGIGISSESDRPAIDYLNEFIESYPPLKDAKPVELNVGGDPIGGLIGQIYSDNLLVCGDAAGQVDPITGGGIILGMLGGMTAGQVASRAIKDGDYSKERLKEYDELYDEYTQGAIPKLAVGRDVYLSLSDDDLNQIIHAFEGLDYKSMSPKDILKVFFKLSPRLALKFRKLFKVVL

SEQ ID NO: 5774 - protein, 302 aa, Methanobrevibacter ruminantium
MFNKKMVLAISLLAVIFASMCIVSADDSGEGSFKELAKLVSGDNKTGVITLTKNFANTDGYDADGIKITGDNLVIRGEEGKDITIDAKSAGRIFNANGTKNVTFENIHFVNGNSSDAGGAVLLGEEPSSSVKNCQFDNCYSDAFGGAVDGNAIGCTFEDCSANYHGGAIFDGSATNCTFNDCFSKSCGGSKFPIIRQPIANFTDCYSYWQGGALYEVEAIGCDFKNCYSSEGGSMCGGSAFNCNFQDSLAKNGNGGATLNTTAKGCSFSGCSVTNGEGNAMYGGTATDCKLDKADAVKVNFK

SEQ ID NO: 5775 - protein, 146 aa, Methanobrevibacter ruminantium
MANLSFINNNFKMIVGILSIILAIVVYFITPPYIEFYLIFVFLIPAIALIVPNDAIKNSRAIGALTFILVIIVAYFAISGMLGAYDVLTNMYVNGLINSTPSTSDISACSNGYLMVLIYALFNIFCGALFFKRTSSIDDVDDEDAF

SEQ ID NO: 5776 - protein, 468 aa, Methanobrevibacter ruminantium
MQLDFNHVLTRISDYEKPIVLNHDVVLTRSEAHQFKKGIEIKRDNIVIDGNGHSIDARGKNRIFNVLSKNVVIKNFTFKNGFSEKFGGAIRVAGECKLINCTFENNRAKKGGNDISNGSELSICHCNFSDADGSINNLGTIYLLKDEEHEIKPLISNNGEIKRIIPKHDVSFLINGDKDHIKGALIRIGDKSGFSNDEGACVLEGIEEGKHSLEVSAEHYISFNGNIDVSENNVLFDIQLERLIQRHDIKILVKHKGEPVSDAIVSVGGIKGSTDENGECIFDDVEEGEISVKVNSNEYENQKYTITVSDNKTTFPINLGFTHLITPFPASDEDPYIFASYSHDDANRVFLELKRFHDCGLNIWYDEGIESGLGWQGVVESKLKACTLFIAFISANAVESINVRREIFLAINKKIPVVPIYLEKTELQYGLDLQLSPVQAILKYAMTEEFYVERCRRAFVMYGLMDEE

SEQ ID NO: 5777 - protein, 252 aa, Methanobrevibacter ruminantium
MAKVTSIFFSPSETTKKVVNQIAENFKEEKSICDLLYFNDKKEFESDDIVIVGMPVFAGRLPKTASERLSKLTGNNTKAIAVANYGNAHVNDALIELVDILNENNFDVIAAASTVSHHSIFDGVALGRPDEDDIEKINDFAQKAIEKIENGGSLESDIPGNRPYTDYKQLPFVVACDVDKCVFCLECVSVCPEKAIPDDDPADIDLEICSRCTACINICPEDARSFAGDAFLSKKPLFEEANAERKEPEFYF

SEQ ID NO: 5778 - protein, 98 aa, Methanobrevibacter ruminantium
MEAKLKKLTQEDIDDISDFFAGVIDKKIASSVKSQKEILAMDIDIEVAYNDENEELMVDVDVDITTDELSNLSDEKVNQLIEDSYVELDEYINDNYRK

SEQ ID NO: 5779 - protein, 115 aa, Methanobrevibacter ruminantium
MEIPQNVQHQLNQFQQLQQQAQAVTVQKQNVDIQLRETETALDELKKTPEDAEVYKSAGNLLIKVERASTLEDLEDKVETLKLRQQTMQRQEERVMKKLEEMQASIQQAMQGLQG

SEQ ID NO: 5780 - protein, 44 aa, Methanobrevibacter ruminantium
MELTLDGNSIKIKIDAEDATSFRASINSAIKWIKLAVEINELVE

SEQ ID NO: 5781 - protein, 163 aa, Methanobrevibacter ruminantium
MLISTSRKPSQKTRTFCKNFSHAFGFDYTNRGKSSLRDLLVKAKQLGHDGLVLVYQIKGNPSKLTFYDLEENERLALLISVNTTNERLHIKPEELKIRSTVPELDILAEVLGIEVTKEPQDSNYIRISYADYDDESNFAILYFINKKGEQIDFRINVKKIVEP

SEQ ID NO: 5782 - protein, 43 aa, Methanobrevibacter ruminantium
MYKCPECGEEVDHKGYMENKCPKCRYRILFKKVPEVRKLVKAR

SEQ ID NO: 5783 - protein, 89 aa, Methanobrevibacter ruminantium
MARTKKVGITGRFGARYGRKAKRSVKNIEENMKKKHVCPKCDRPYVKRVSAGIWECKKCGVVFTGGAYVPETPMAKSATRSIKRVVGGE

SEQ ID NO: 5784 - protein, 263 aa, Methanobrevibacter ruminantium
MDIVPEITRKSITRLINDGKRADGRAFDERRDIFIEPNVIDKAEGSARVKLGDTQVIVGVKPTIGEPFADTPNLGVLMTNCELLPMAAPGFEPGPPSPESIELARVVDRGIRESELVDLEKLCIEEGKKVWMLFIDLHVIDYDGNLFDCANLAVMSALLNTKLPVAEYIDDEVVLSEDETMDLPVRDKLALSTFVKIGNGLILDPSLEEEEILDARITIGVTDEGNHICSMQKGGEEPLTRDDILDAVHLAFETKDDLLSYLD

SEQ ID NO: 5785 - protein, 236 aa, Methanobrevibacter ruminantium
MFFIISENEKLRGDGRAYDELRPIKIEAGVLKRADGSAYLEVGGNKILASVYGPRESYIRRLLKPNTGVIRVRYNMAPFSVDDRKRPGPDRRSTEISKIAADALRPALMLESFPRSMVDVSIEVIEAEGGTRCAGITAAAVALADAGIPMKDIVVGCAAGKVNDEIVLDLSEKEDKEGQADVPIAIMPRTGEITLLQADGNLTEEEFEEALDLAIEGCMKISEIQHEALKTRYSSQ

SEQ ID NO: 5786 - protein, 491 aa, Methanobrevibacter ruminantium
MGSICMIYVNEKDLVVPGELLAEDDYYSGRGTFEDDGKICSKLLGLVSLRNKKISVIPLKSKYIPKKGDVVIGKIDDVRFSMWGVDINSPYSGILPASEVFGREKKELSRVFDIGDVLFLRIVDVDEVKKVKLGLKGRGMGKFRGGVIVDIAPTKVPRLIGKKGSMINMIKDKTGCKIVVGQNGLVWVKGNEDMEQIVKNTIKLIEREAHTSGLTDRVKNKLCLLIDGELPEEETEVMEEKEEIVEESFEEGLKKPEIQDFRDEVEKEIAEEMALEESEEDLDEEFDDSEELDDSDEEFDDSEDISDDEDFDDSEDDLDSEEEIDYADSEDDEDELAIEELEEKVETEEFMDDSDEDSDFIEEDIIELDEDAESLNEEDDEEEFDVLEESEAEIFDEAEVLDGAEEISDDELEEVINEAISEDEESQDDSIEDESEDEEEKEKEEKSKKPKFLDTFEYINEQKKKNKSSFDLSRADNSDSPTLNISQRRGI

SEQ ID NO: 5787 - protein, 234 aa, Methanobrevibacter ruminantium
MVNIDDAIIARLESYGEKFEILVDPDLAADFRNPDNEKEIDIEEILAVEEIFKDSKKGDKASEESMRKVFDTTDVLEVAEQILHKGNVQLTAEQRRQMQEDKRKQVVAKIAREGINPQTGLPHPAVRIENAMNESKVKIDAFKSVDEQVQTTLKAIKVLIPIKFEKIKMAVRLPSTAAGNGYSAIRPFGTILNEEWQQDGSWIAIVEMPGGLQDDFNHKMASISGGEAETKVIK

SEQ ID NO: 5788 - protein, 47 aa, Methanobrevibacter ruminantium
MSVKKLIIKKVILSKTARKTAKKGIMFVVPSDFFDRHRHLGKIVDMM

SEQ ID NO: 5789 - protein, 294 aa, Methanobrevibacter ruminantium
MQPLQQQNAGYDRAITVFSPDGRLFQVEYAREAVKRGTTSLGLKSKDGVVLIVDKRTVSRLVEAKSIEKIFQIDDHIGVATSGLVADARALVERARIESQINKITYNEPILVGGLAKKICDLKQLYTQNGGVRPFGSALIIGGVNGEETRLYETDPSGALIEYKATAIGSGVQAAVDVFEERYEEDLSLEDAINLGLDALYEATEGRTTEDSVEIAVIEVATQAYRKLSDEEVSGYVKDLLERNAEEEEPEEEAEEEAVEEAVEESEEAEDAAEESEEETSEEEASEDKDSAEE

SEQ ID NO: 5790 - protein, 747 aa, Methanobrevibacter ruminantium
MNFMKTNLKKTTIILALLMAILILSIGAISANDLTSADSNVDMNNDLNTNLDSNDIIANSNSNSIDAEIDEANYSNQRADAKEKLKESNSLIENENTEGNTQIEDENSSPSNKTDTSISIETNSIERGSDLTIYLKDINGTGIANEKLSIQIINKTYTRTTDSKGSALFKINLASGKYPIAISYNGSEDYESSSDDFNISVSPMKTKINMLSNSIVNGRKLTIELLDKNNNPLKYKKISIILNKKLYNLTTGKDGKVSLNINLNPGKFPIQITFSGDANYHTVSKSSAIDVYKLKSSFTVPKTSIIKGKYLYVYLKDSEGKAIPSAKVAFKINGVSSTKTTDKNGRISQKIGLKVGNYTVQLNYNGDKSHLKKVQSFKIRSCNSKTKFTVANYTVVRGKYLSVYLKDSENANLANKKVTFTYLKKSYTKTTDSNGKASLKMTEAGTTTVNLQFKGTGPYLKSSANVKIKVLKNTTADIIAKNQTRHLNGSSTIRYYVKLTDNNGNPIENETIELKVRCNNITTGSGNKITKKTIVLSSDNIINKSEDKKLLNEMAKILRAKGYKVIVSGIGPNYHVSDVRDYSNVCVFSLVGGVDSGMFVDMSHSYYKNYLKKYKNQFVLGCVAPPVYLNLGNMTWLKRAHDDDYSPKSFKGLYYPGKYFNTVTKLDYVYGDGAEELVNNFLNYAKKGKSIDLGQSVPKTTTTYKLTTDKNGNAYVDLQVGTYTISSSILGNNYKVDTQTSKVNVIK

SEQ ID NO: 5791 - protein, 125 aa, Methanobrevibacter ruminantium
MKLKVLPPTLRKNHHYLILDVKSEVKLSKDDIVHYIWDACIRYWGENHSSNFNLWVMRHYPIEETIYNNEPVFNYKTVLRCQRSYEDDVRSALATLNRYNKKKISINTIGISGTVKSGINKFIDE

SEQ ID NO: 5792 - protein, 323 aa, Methanobrevibacter ruminantium
MKFHDLNIRGTDYNNDLALIKEAYKFGWDYLNLNYSQDHYKEALSYKDDLLEEISLFEWKDSYRNKYNSQSIEISMGINIQNANSNEIRKIVNKYRNNCSYMSALGGDLKVNRSVCENHRMDVLSRPYYKRRDSGMNHVLAKEAARNNVAIELCFRDVLKNSLKFRANIISSFKEIMMFHRKYNFPIILTTDSKSIYDIRSTKDIVGFFKSIGFSDKEIYNGFYYYPREIIDFNRQRKNMVIKGVKVIEGASDFTEIDSKTPKFEESECFDEAISQKEDDFFDCDESEDDFSDYDEEDEVFVGESEDEFTDVEFESLEKEDLL

SEQ ID NO: 5793 - protein, 146 aa, Methanobrevibacter ruminantium
MIHNIRYRVFIYENEDKDKVLEALLNILPTAEPEAEEAEGLLEEKMLILTGAISKKRETKEFLNTLIESIGEDQLIKLYNDLDRKMDEKGNLFLRLSKEKALDEEWEILDGGDSIHLKIKIAAYPAKKEVALKKIKEVFPEDIINA

SEQ ID NO: 5794 - protein, 183 aa, Methanobrevibacter ruminantium
MMYKYIRDAWKNPDESYVRELMWQRVPKWRKQPAITRIDRPTRIDRARSLGYRAKKGFVVVRVKVRRGGRRKTRFKHGRRPKRMGVNKITMAKSIQRIGEERVAKKYPNMEVLNSYWVWSDGKYKYFEVILVDPQSPSIKNDPKINWICEKQHRSRALRGLTSAGKKGRGRRNGGKGSEKRLK

SEQ ID NO: 5795 - protein, 139 aa, Methanobrevibacter ruminantium
MIKCDNCGLKFDDDTEICPNCGNKLDSTQSVQETEEASKKCPSCGSLIGINEFICPSCGNKIEELKIIRTCPNCGVNLDDDAVFCDNCGANLSSTSDQIQEFNKSLIESNKSLMDQIADLLTKFGKFIDDLFSSFKKDK

SEQ ID NO: 5796 - protein, 306 aa, Methanobrevibacter ruminantium
MVKCSNCGAEVGDASFCFSCGEKVDGGNVDSNICPKCGTENSKGTVFCVGCGQKFDNALVPESVARKQKEWELRRQQIIERYDQLADEFGIKDKDYFLTSVVRVNMLEEKTTKHKVWGSVGSYGGNKTTIDGFFLIEDDKFVFMEIDNRDWKKVNAGINNFYFDKIVSMRITKRLGDISRYEDITKRTSLNSAHAIKRAIQNDIQSLKATRFKDLIVNNDSADMFDRLLIKLVDNTSFEIRLPSFEFGENLVALFEISRNSPQTVVIETDSKPSKADLLKEYKELLDSGAITEEEYDELKKEVLSS

SEQ ID NO: 5797 - protein, 177 aa, Methanobrevibacter ruminantium
MLVRNLDFLSIPKEFSKVELDIYEGKSIVLVYIENKGYSLVLKKNNENDSIFLLKTDLAPDNIDSDKEDFINVIKMLLDKIYEGAEIKEYEKQHHEHVFLQLMDLLIEGETVETITEESKIYADIEKGFMKLELDIMDNKINSLNSAIGEISGNLNNLGSKVEDSKIENRLKKTFSQ

SEQ ID NO: 5798 - protein, 182 aa, Methanobrevibacter ruminantium
MKDPNMDRILEDNRKLMEENRKLKEDLKELKNEFYQFKKNSRPGKPFNLENNDDYKPSGNYYFHNNFKEEFDDANIKYNSKDNPEGSFHNDSANIVDMSLISFLARSNKRVEILKSLNQGDKIPSTISKEIDDSSHHVSKYLSSLKEKELVVCMNEEDKRFRFYRITAKGKYYLEIIQNNQY

SEQ ID NO: 5799 - protein, 181 aa, Methanobrevibacter ruminantium
MADLKGTKTEENLKAALAGESQARVKYEFYASQAKKDGYVEIKDIFQESSDNEKEHAKIWFKLLNGGKVPDTLTNLADAAAGEHEEWTSMYKEFAETAREEGFDDIAALFDAAGATEKAHEDRYNALTDKIKADKVFKKDEEIAWKCNNCGYIHYGKDAPEVCPLCDHPQAHFRKQDTSYI

SEQ ID NO: 5800 - protein, 325 aa, Methanobrevibacter ruminantium
MCTASEYLTENHYFGRNFDYEISYKERVCITPRNYEFKYRKIDDMKSHYAIIGIAAGIDEYPLYYDACNEKGVAIAGLNFAGNAIYREMEEDMVNVTPFEFIPYLLSQADSVEDVKELLQNLNLVNINYSENLPLSPLHWMISDKDSSIIVEPLEDGLKVYDNPVGVLTNNPKFDMQLFNLNDYRNLSVKTPENTFSKNLNLDDYSRGMGAIGLPGDLSSASRFVKVAFTKENSFSGTSESESVSQFFHILGSVEQQKGLTFINDPDLYEYTIYSSCYNTNKGILYYKTYDNHQITAVDLNREDLDGDGLIIYPLINEAQINFIN

SEQ ID NO: 5801 - protein, 181 aa, Methanobrevibacter ruminantium
MKILALIGSPRKHSNCEAIVDEIAKGAEENGHEVIKYIIQDLDIAPCSGCELCRKGKDCRYTDDGTEIIDQLADGASVILASPIYFGQMSAQAKTIVDRFYSIFNNPNKSFSKDAKAAIVLTHAYPGDYDAYLQLTIAQPFQNNTEMEFIGAIDAGDLKFPGDVKDKPEILREAYELGKKF

SEQ ID NO: 5802 - protein, 258 aa, Methanobrevibacter ruminantium
MASCNIGKKFIAELIGTFFLVFFGTGAAVVTLLISDSVTPGKAGIGLLGGLGDWIAIALAFGLTVMACIYLFGKISGAHLNPAVTIGLLASKNISAIDSIYYIVAQVIGACLGSLLLYVCLGAQAVTIGGLGATAPGMGVGYLPALIAECIGTFFLMLVVMGVAVDEKAEPGFAGISIGMTVAAVIIVLGAFTGASINPARTFGPYLMDTLLGGTNFWGFFPIYLIGPIVGAVLAAILYGYLAKGNDACALPQPFFEE

SEQ ID NO: 5803 - protein, 498 aa, Methanobrevibacter ruminantium
MKELYEKMINESVAALQADIDVISANRYNDFKIVDAKPYADAVAGMTCIDGQAKSVIDLHKKSVESHYKVLTSVAETIRPEDDPFIEHYQTPPILEILCEEDGEFADSMATFIQAIADSETLITRESVRRYGGFYGPTCVVDFALMPGSTSNVVNQILKTIHIPVMHKQAILSAKSWGMNTSYGIGDSFAHAIENGATAAEAAAKEVESMQMIYKEPVEAQGKLMDDAGHSSFDVRAFMEGYKKEMRPVVKAAMDDGVHYGNIVTVPAYCVGDIGHHIGQASYNMCKDDVTLAIIQATAKVMEASLKDNIGKFMHPSQVLNLATGSTACATEYILELDGFNSTMVVDLLTKRFHNFVQQYPTRGAAAELHNCDFMDMIHRGSTYISAARKARSSAKIDLVPKVNGFAVDLGAITHNEVLMNPQRYTYPACGITVRFSSLMRLADYPCLLTPEPVTATMMTNIIALNKEVPGSPVRGCKNCASCIIDAKHEYCQWKESV

SEQ ID NO: 5804 - protein, 208 aa, Methanobrevibacter ruminantium
MNEIVLNHPLITHKLAILRDVNTGTKEFRELVTEISTLLCYEATKDAKLEEAEIETPLAKMKTGKLNEDNYAVVPILRAGMGMVEGIINVIPNAKVGHIGLYRNEETFEPVEYYYKMPDGIGDRIAMIIDPMLATGGSVSATIDKLKADGVKQIKFLCIVAAPEGIRALEANHPDVQIYCATVDEHLNPNAYIVPGLGDAGDRIYGTK

SEQ ID NO: 5805 - protein, 395 aa, Methanobrevibacter ruminantium
MNSTVGEPVLSVPVALITSGIGTLIYVICTRNRSPVYLGSSFAFIAPMVAGYAIGGKSSIFSALMVVGLVYVAIAIIIRATGKEWINKLLPPVIVGPMIMVIGLCLAPTAIQEIGLDQAVVPINNIIVALAAFLTTAVIAIRGKGVLKVIPFLIGIIVAYVVAALLGMVDFSGFFSASLFEVPEFYMPFINYSFNPTALLTIVPIALVTMVEHVGDHKVLGEIIGRDLIQDPGLNKTLLGDGLATFFAALLGGPANTTYGENTSVVGLTRVASIYVIGLTAVFAVIFAFSGHLTALLAAMPNPVIGGVAILLYGFIAVNGVKLLIQEEVDFNNNKNIVVAATMLVLGLGGATLSVAQGDLSVSISGMALAAIAGVILNLIIPERKEDNKFVPEVK

SEQ ID NO: 5806 - protein, 159 aa, Methanobrevibacter ruminantium
MAKLTFRNASEEDVPLILEFIKKLADYEHRLDEVIATEEALKYWIFDKQQAEVIFALEDGKEIGFAFFFLSFSTYIANVNMHLEDLFIDPEYRGNGYGKALLRELAKIVKERGYGRFEWTCLDWNQPSKDFYKSIGAKQKDWNVFHFTGQELEDFINED

SEQ ID NO: 5807 - protein, 574 aa, Methanobrevibacter ruminantium
MYIKSFFNDLNLTKKDGIYLLALTVFSILYTVHLIDVNYTLNFKSDPFVYLINGLVYAGMQGHIENYSYGMFLTPVVSFLTSLLFRMGIVDKIAIMIVSGVISILGEIGLYLLFKTKFNEVYSFFGCILFASFHIVLTIWGGGGIDIPVCAFSIITFLFMVLAVDKNPKYYIPTSIFLIISIFTKYDALFIIPILFLYYLTKHDFFNLVDLALSDRDELKIVIKNYIKSEEFKYIVISLIIAVVLFILFCEVIWSYGANLTFLTQSQESLNGFNSAKAARSHFYYNDKKFYIRNLYTFFYPQISQEFSLIIPAIIAIGTVFNFANIIRRRKEYPMVRDYKTPHFKYLLVGLIIILIPIAIIGFKYISHMVTNVALLTICVCLLSLADKFDIDKRTFNLDIFFLAWIFVFAVFFSFITIKGQRYLIIALPAVVYFVLRTIEEIFNKFKDSNILKITLIIIAAIIIVYSLSFTFTDGNFDTERNNTAIQEVYDYLVEYDPDYLNKNLSSDYSYGSRFGTWTLKKDVRYVKLGVIDQSESDYLIVKHDNVSLANYTEIYRAGKIKLYQNNMYDNSSI

SEQ ID NO: 5808 - protein, 244 aa, Methanobrevibacter ruminantium
MSIVSANDLNSIDDSIEADNLNSIEIEDIQVDSVESDDLEKSNIDEKVLSDGESDGDSGNETETLSSGDENNESDVSSNPNEGVATNLELDNDADKENVKIGELVTWTLEAKNYGPYDAENTQVYDELPEGLEYVSHTVTKGEFNPETGIWKIGDLKVGEKEYLKIVTKAVTTGEKVNKANLTSDTDIIDPDECYEEEEIDVEDDDDNHFEKVIHSKQLPRVGNPIFLLILSLLTVLGLNTRKK

SEQ ID NO: 5809 - protein, 484 aa, Methanobrevibacter ruminantium
MDYDVIYIGSGNASWQGARFLRKEGLKILIIEKSLYGGTCANRGCNSKALLDAPYEIKAFADNFEGYGKSGNFEVDWPALMKLKRKRIANMAPFLDGKYKEYDLDVAHGEGYIVDEHTVRVGDKTFTTDKIVICTGLKPIIPDIKGKEYLHDSTDFLDIEELPKHAIIIGGGFVGMEFASILAEAGLEADVIIRGNMALKFFHQPYVQNVIEILKEKNIRFHFNETVNEVIKDDSVVIENPEERVNIFENAQNTDDDLRDPDAKVDNKAYENAFTVNCDSGLSLTGDYVIAAMGRTANVDTIGLENVGLDYTKAGIKVNNYLQTAVPNIYACGDIADTGIAKLVTVAIHQSKYLGKALLGDAEEIVYPVVPAVAYTIPRIATVGVPAYIAEQSDEYDVHRIRYGKSYSLELKNDTRSEAKVIVDKDLNIVGAEIYAADAENVANMFTFIINQKITLEELDNMIYAFPSSSSVCLYKLHNIHYKF

SEQ ID NO: 5810 - protein, 397 aa, Methanobrevibacter ruminantium
MKILVVQESDWLKRNPHQQHHLMDRMVLRGHEVKVIDYPIDWPKEDSKGLIFHREVHENVSKVKPEADIEVIRPSFIKEPGLNYASLYFTHKKEIKKQIDEFKPDIIMSLGLLNAYTGSKLAKQHGIPFVYYLIDVLYALIPEKAFQSFGKKVNMKAIENSDLVITINQKLKELAMELGSKPETTILIDAGIDLNDFDPQLDDSNIRNMYNISEDDTVLFFMGWIYEFAGMKELAMELGKNKEKYPHMKILIVGDGDAYDRMVEIKEEYDLGDQLILTGKQPYERIPEFLASADFCLLPAYIDEEIMQDIVPIKLYEYLAMEKVVIASELPGISKEFGYGNGIEYVQKAEEVLETAQRILDEGRYEEISKKGREYVKSNDWEAITDKFENALEELIK

SEQ ID NO: 5811 - protein, 179 aa, Methanobrevibacter ruminantium
MRICVYGAGSTQIKSKYTDEAYKLGEEIAKRGHDLVFGGGSTGIMGAVSKGAIDNHGKVLGIAPEWMEEFEGICKDCDEFIYTESMDERKKLFLENSDAFIIAPGGIGTLDEFYEVIVLKKLNRHDKKIVIFNMFNYYDHMLEMIDFMIEEGVIRAGRDKKTFKIADSIEKVFKILERE

SEQ ID NO: 5812 - protein, 163 aa, Methanobrevibacter ruminantium
MSHPHVESINNMNASSLIGIMEESKITYVRENLDIHLHASQIKLLKQVRKHEKPHHKRIRVKRYEQAEKSDLFNLHLDLYLNNYKKLAKKGLIEIDEDPENGLPYDCALTEKGKEVLDDIDRLEKDWEKVVHIDDNDLEALKRIALDSFEISYQHKKKQNFIF

SEQ ID NO: 5813 - protein, 106 aa, Methanobrevibacter ruminantium
MGEKVFYGKGIRRIKEEDPQLYDSIENLDKNIWNANSLDYRTQKLIAIAISATNPESSSFLKQLSKAKKELDISRDEVMDVLKVVLLTSGMMPFNKALEVVNKLYD

SEQ ID NO: 5814 - protein, 111 aa, Methanobrevibacter ruminantium
MRVSIMKEEVFYGKGMERVKKEDEGLYQAIVGLNEAVWNGKVLDYKTQKLIAIGIAASNADSRATERQIMSAKKELGVTRDEVVDVLKVVLLTSGMQPFNKALQIANKVFE

SEQ ID NO: 5815 - protein, 251 aa, Methanobrevibacter ruminantium
MNSKGKYLVLFLILILSFSIISASFAYTGTGFSHDIPFSKYSSQSNSDILNKYNNTDCHSEIKGICTYVADGDTIDVEGVGRVRFVGVNTPERGVTAYICSKRFVQKFCLNKEVSLDVDDSKRNDRYGRTLAVVIVDGKNLNEMLLKEGLAEIMYIPPSEFYPYDWSSDSTTSSSYTSGSSSSNSGGSYSSSSFTSGSTVSAPYVGSANSHKFHYSTCKWGKKISDKNRVTFNSRSDAISQGYAPCKACQP

SEQ ID NO: 5816 - protein, 137 aa, Methanobrevibacter ruminantium
MKMPEKIDNMMFAPCGMNCKLCIKHISKSNPCPGCLIDSPNKTKNALKCKIKKCLETKRVKYCGRCSEFPCKLMKKQDKNYKKRYNYSTLDNAKRITYTGINRIMLEDKLNWECPSCGGIISIQERVCSDCGLNKED

SEQ ID NO: 5817 - protein, 170 aa, Methanobrevibacter ruminantium
MAAIICPRCGKMNDGSLDFCIYCGTYFDDYNEEDNNDNLFFIRSMTNDGRPGKKQVVRLNEMPDNLQKPKHRLAILLGYLFAILGGLIGFVFAIYLITRKDKNARRHGLIQLVILLIEYALIGVLILNGQLDINMVLDPFNMTRMNNITQLYNSSQMNVSGSNISSLFGF

SEQ ID NO: 5818 - protein, 613 aa, Methanobrevibacter ruminantium
MKKNLSLKNILILSLIFLFVLSIGSSFATEDLNTTGDNNLIDDNAMADTLSDEKEISYQKPLMSDENSNSNNGSDEEKVISSNNSKSESFLIIRPNESSITVLGGNFQDLQDAIDYASDNYTIYLICNMLGEGKPIIVNKSVVIEGNGHTLDANYSSRIFCILSDNVVLKNLELIHGYQRAYDSYKLRPYDSKNFDNAPALTQEFFDYSVPPLNSTDDIEYGWGPAIKWLGNNGTLIDSAILNNKIDYANDIGEGKAVSWLGTGGRIINTFMVSNEYHHFFVPWGIVGYQQKSEGKVLDTSPHGVYYGNIEGNVYFLDVALNVLPNLDVKNVTSYYGEGKKISFNLNHGNASFVNESLELSILSKKYNYTFNVFSDENGNFEFNLPKNLSVGSYNLIVGFNDGKNNISSNTTVKINKATVSVSAPDFKAQYYSGAKYTLKLINAKTKKPISGMKVNLNVYNGEKVKTYTVKTNNKGIATFDKFTLPSVIYDAGKHKVTISVDKSYDLSKKEFTVQISKAKTDIKLSKTSFKYKKSDNLKISIKNQIKKTAISGLKLKVKVYTGKKYKTYTLKTDKNGMVKINTKILSKGSHKIQITSEDKRYLVSKTTSIKVA

SEQ ID NO: 5819 - protein, 985 aa, Methanobrevibacter ruminantium
MKRNIYFIILLVTLFLISMSVVSAANDADVSYIDDEIVSDEYLELSDSEMGISDIDYDDIESDMLENEIKENGLSDNNDVLKSNLPENEFKESNYNEYYEDIMNSNSQKYGEFINFLINNKSFEFRENSLSEDGYFLYATKNYTLRLWDGVNYTILKDDYYFASTAEKSGYFVNESFYDDIIYYHEYNYYLDEEFLGWLMWNANYKKVFVSGSIEDKVDISSVVNPEKGGSPKSGNLPSSYDLRDYGFVTPVKDQGNTANCWAFATMAALESHLLKTENTSYTLSPQWDFSENNLKNVMSSLGRNGTDKLVNSGGNMLMSLAYLIRWSGPINESDDPYNSNYTNISEDVYPLKHVQGVKFIPNRQNYLDNDYIKESVLENGAVYISMYWDSFFEKNDAYYFYNGSGYNFNSNYMHAVTIVGWDDNYPKNNFLIQSEGMGNGAFIIKNSWGTNAGNNGYYYVSYYDQMLGFDNTYAGFAFTNVENVTNYDYNYNYNPLGFTNVFPVNSTSAKFANQWAALKSGTLKSFGLYVVSPSICTANLIVNGISIGNTTSYLSSAGFHTILFNQAAYVNVGQTFRVEITLQHIGSSHTYIPLEERIENYSNVVSGYNQSFLWLRKNGVDQWVDLKTEVDNANICLHVYTECIEGLLETHVRSNNLVTYFNTSSLNATLVDGSGNPIANKLIYFKLLNVTYNRTTDSNGKVSLPIHLNPGSYKFLISFLGDSIYHKSNRLVNVKVNKMHTNINQNVSTVHQGEYLGLILKDSNGKALSGQKVAFCLLSVTYNRTTDSAGKAKLLIRLNPRKYTFTLKFFGTAGYYACNKTFNLTVLSAKSGQSYEMGIDDYDGKNIDENIIINNETFESSDVVNNDIMYMYNDTQYYNIINEDKGYYNNHSNDINFELLDNDQNYIYSDLNLLELLNNDQNDICFDLNLLEYIDFDKTDYYNDNLYNLEHYYMKDSLTENEDLYICENKLNIHDLNQIKIGGI

SEQ ID NO: 5820 - protein, 331 aa, Methanobrevibacter ruminantium
MSKYNEYQDKTILVTGGAGCVGSNLTRKLAELGAEKVIILDNMSSAYEWNVPTNENVELIQGDILDDEELKRVFKMKPDYVFHLAAHFANQNSVDNPETDLMVNGIGILKVLQYAQLTGVERFVYSSSGCGVYGLDSKMPFEEHDISISLHTPYQVTKLLGELYTNYFHNLYDMPIVNARFFNVFGPGEVPGKYRNVIPNFFYWSMTKQALPITGDGTETRDWTFVGDIVNGLLSMGVEEEAIGEAINLGSGKDHRVIDMANKVNQLTGNEEGIAYVARRNWDAKTKLLSSIDKAKDILGYKPTVSFDDGLERVYGWFTDNWEDIERDAEF

SEQ ID NO: 5821 - protein, 257 aa, Methanobrevibacter ruminantium
MEIEHTHELIKDVFGMNMKEARLLDDLLKTNDLSEILELGFAHGVSSCYFASTLKDMGKGHLTTIDNTTAKTRNPNIEELLKKTGLEEYVTYYFEAVSYNWRLMKLIEENNGPIFDFCYIDGAHDWNNDGFAFLLVDKLLKPGGIIIFDDYNWSFSRSPSMSQSPRVLAMSKEEQETPQIKKVYDMLVKTHPNYHNFKILNDNSWALAQKKEEEDLFENQVNKLESENRKLRKKQKEIMSSNSWKMTKPLRQLRNKK

SEQ ID NO: 5822 - protein, 211 aa, Methanobrevibacter ruminantium
MKAKEMMDKKFVYVSKDDTIEAVSIKMEESKRFTAPVLDKDMKLEGWITSFNITKGLREGKKLISEVMDPVENILAIKEDEAAKNAVIEISKHKLISVPIIDDENKVIGVCRSVDVVDSMSSLYDIKVSKIYEAMEKELKGVTWDELMEASAKISTRTTGVKITAEEYEKNIQNATFGEAIWATGGLEKFFAGLISVGEIVIARKVGRARR

SEQ ID NO: 5823 - protein, 275 aa, Methanobrevibacter ruminantium
MEIKLKKQIETLEREITLKSVDLDEDIEDFNVDIHSYEDNDKLITISPRCVRCNLCVEECPINVISSSTWLKRAKIGEGCVQCEICAQTCPVSCIYVWDGETVIKEDDSVEYTLKELKVPHRNLKMEDISINREVCIGCGSCLKYCPTNAISLRSKEFIEAHGEECPEVGAIDSEHGHMYSYIDKDRCCGCGSCANLCIQGAITLKRDLGPVVIYSHLDVNQDICVACELCEDNCPVGAIKVVDGEIVLNNDKCIRCKECSSRCPVGALNLVSDN

SEQ ID NO: 5824 - protein, 342 aa, Methanobrevibacter ruminantium
MDEKDLKSSNNVTAEDLGVDEIVYDAINVDVIGFGALNVDKLYRVGHIAEIDEESFIKGEEQSPGGSAANTIIGLSKLGCSTSYIGKIADDEEGDLLEYNLMVNNVYLTNLIYADSGNSGKVLGFVSDEGDRALYVDPGVNDDITIDEINPLNVNACKILHYTSFVGDSFNAQKELLNVLGDDIVLSFDPGMLYVKKGVLELKEILERTNILLINENELKILFEDHYKEKLSVSKDLTFRDLAVFIRDDGIDTVVVKRGENGVYAINKDDDEVKAPAFKCEAVDTTAAGDSFNAGFLYSYLKGYDLAKSCLIANWVASRSVQAIGISGLPNLEELEEFISSL

SEQ ID NO: 5825 - protein, 296 aa, Methanobrevibacter ruminantium
MVNYDKVEDTFFESFDGMYIRALITAEDELTVKEAAYDATATPSAVIGRVEAGVESFVSGDKTPDGRPGAIVQFWLTDDLAKFEKELSYRIRQDILVKPFTRVFSITENPVGSIPMMESVGHCGDGYEWEIEEYGRKMINVPIAVPDFQIESELAYAEGIMGGNFWYMCSTKEAVLKAGRIIIDTIMEVDGVCTPFGICSAASKPETNFPEIGPSTNHPYCPSLRERLGKESKVPEGVNYIPEIVINAVSQEAMNLAIKKAVDAIIDIGGVERISAGNFEGQLGEHKTNLLDILKE

SEQ ID NO: 5826 - protein, 368 aa, Methanobrevibacter ruminantium
MVKKVFITDCEGPLTLNDNAYELAAEFIEDGDKLFKIISRFDDYLVDEVHLENYHAGDTLKLIVPFYKLAGLTNEKMIEFSRNNIYIVDGSKDTLKLANELMDSYIVSTSYGQYIEALCNYMNFPFENTYHTQLDIDGATNFNQSDKKSSTIGVKSPLFIEELKKVEEFRKIILEHGDENEDDFNVLYDIFFNEFPKLEINKYIQSVKTVGGKGKQIAVEDIVERLSLEEGSIIYMGDSITDVEPLQYARDNGGLSVSFNGNEYPLNVAEIAVISDNTIVSSILIDLHSRFDKDYVIDFVKAYAEKGPDDAFKDFEVDYSLVEEFEKIFYNRQAPIIDIITDENRDYLLGLSKKMRNGIRGKDIGGLG

SEQ ID NO: 5827 - protein, 37 aa, Methanobrevibacter ruminantium
MIHKKYYMKNEFYLLIKEINQNMMFIYSKEYYPKTGR

SEQ ID NO: 5828 - protein, 483 aa, Methanobrevibacter ruminantium
MVTVNPIPRPLRDVHIEYEIDNEKCINCSDKPCLGVCPIDAVYQDENTKLIKLDEHCFGCVLCSNACPYDAIHIKKTLSEPIRENVPNINKKLCRACGACVNACKSGAIHLKSTGGEEMHSEIDENKCIRCGYCFRACPTDAIKYGEILPKTVKEGKTLCIDHDQCIGCMTCTRICPSKGAINVGKTNKLPFIDPAYCARCEECMHACPTYAIDYVEREEAFESFNKIKTLEIASEILDRDINKISKGITNIDNVLVKLLDDISKDYHFDDFDYENSMDIRDVPRGMEFSDVEIFTCTNCRSIVVNVTEYLNERLNAQLNKDLDVVKVLDLVEFFPPSLGIEVVEENCISCGLCMDVCPTKSISLDGPNPIKIDTDNSCVYCGLCAEACNFEAIKLAEEFFTNRNHEIFFIKRDLRGRRNGTVEINHSACQLCEVCIKNCPVDAMSVEDDMITVNHDECISCRNCEGICPVNAARVSTIWQFL

SEQ ID NO: 5829 - protein, 344 aa, Methanobrevibacter ruminantium
MSSIIWYIYEFARKTWIDGFFDAKSKEDIAHKPDRFRDFPNVIKENCIGCGSCTASCPSPNAIKLIRDSDTEDAFGLIYPVINKASCIRCGFCAEVCPSTPKTLECGENHFIREEFNIIPSKRKYIVDDYLCIRCHKCMDACEVGAIEEFDDRVSVNQSKCISCGKCLEACPVKGAMRGVFVNNLEEQKKIINLAVTTLEDYIESKQDDLIQLGTDKLFLDELPFKPIFDKSLNILNDKEVVHEVLEDAINRLKIRIITWDSENCKKCQMCIPDCPTGAISFDYDKDTIVRDKEKCLRCSICYQTCPFGVIKYFLAKFNLDKNDNDEEVIHISVKASQLAERRA

SEQ ID NO: 5830 - protein, 375 aa, Methanobrevibacter ruminantium
MILPIGPIHPGLKEPLRLKLQTQGEKVIKAEIDYGYVHRGIEKIMEGKTWQKCIYLSERICGICSYEHTQTFAETLEGISGVQAPLRAQYLRVITNEIDRIQSHLLANSTFFKTLDHETLFMHVLALREYAMDSLELLTGNRVNLGWNVVGGVRMDADERHFNAILENMKKIEDGFDRHVALFEEAPIVALRAKGVGVMTKEEAIKGHAVGPIGRASGIKHDLREEHYTYKDHFDFKPIWRKEGDNYARTLNRLYEVEQSIDLVRQAIENMPKGDIRTPVDIPSGYGEWRNEAPRGEVRYMAETNGDLIKRISIRTPSIMNIDSCARYMLKDVATVADAVSTYASSDPCIACTERVAITDIDSGKYTTKDFFEVK

SEQ ID NO: 5831 - protein, 153 aa, Methanobrevibacter ruminantium
MLKKLKDIVRKSSIHVCIVNCGGCNGCDVELVALLSPRYDLEQYGIYVHNNPREADVLLVTGAVTEQWRDNLRRIYAKAPEPKIVVAVGNCPQSGDVFAQEGGRVLAPVSDFIPVDAAIPGCPPRPSEILEAVLTVAPGAIAAKGRAQDARKD

SEQ ID NO: 5832 - protein, 127 aa, Methanobrevibacter ruminantium
MNSEEKYEMMKLRVLHSFKWEKDLTIPLSEEFGISKEEFEEILMNRFDMSDLENMHATFEIANREKIKRQMHLDLRLYWLSDVAKLISEEDADRICHQLTKDVIQHGKKYEDALDEGRAQIVELLRE

SEQ ID NO: 5833 - protein, 110 aa, Methanobrevibacter ruminantium
MEELYYMIYIIVFIVGSILGLLLSYKKHMEPFIISEIDVLTLVLAIVGWFLLLNHGLIGFVSSVILLTIAFFCIGLAIGRRPGYGRKETAIGILVAVIVWILTSGVIFKF

SEQ ID NO: 5834 - protein, 51 aa, Methanobrevibacter ruminantium
MNDEKGMRVLTFISCFRSLYCCRFSSILPKHSSISYGYNRFNIRSIYIDAK

SEQ ID NO: 5835 - protein, 286 aa, Methanobrevibacter ruminantium
MNLMAQILINVVIAFLAGSLLLGFHRKVMARVQLRPGPPIIQYLLHSLKFFFKETSFPKTASMPFYVGITVILAGIWVTGVIVGPVCKGSLMIIFGIYAIHKIVEHNAGSSSGSPYGKLSCVRAVFSAAGELPLFAVIAVVFLLTGTMDIGGIIQYQAANGPLAFKIPLAAIMFFTLIVTKSPYSPFAITKGKEIITGFETEHFGMLRGYIMFSESIAWYILLWLFLTIFFAPIGVVGYLIGMILICVITGFINATTPMLNPNHSVMAQISIAVICVVGSIIMIII

SEQ ID NO: 5836 - protein, 71 aa, Methanobrevibacter ruminantium
MKKMEMASYIILIASVLAILYALIFNPADWIVYAIAIVCIPFLVLSFGLLTMSKPIKEEEEERREEPFTGY

SEQ ID NO: 5837 - protein, 222 aa, Methanobrevibacter ruminantium
MLIENLGGDFLGTIPLGDIVLYLNPLHIFLFVTILLFTALIAISRTETQVEAMFGSLDENKVAVGLKEFKHRRFLAIICGIATAGAMITGDLFNFTLFMALIGIVNIGIVSAVKQVEVLNSAYQYGLIAMMCGLPLFGGAAIILAATGTLSLFELASIPANPMMIFGALVMLIGVCGESGIAPFFASKAEMFRTPGSPFILIIHLSSLFLIVRFIEILLTIL

SEQ ID NO: 5838 - protein, 225 aa, Methanobrevibacter ruminantium
MVASVIPQVVPAFYSSMYTTALYGGLIVAFIGLIGVAMEKRDIQILILTDIVGLAMLIVVAAVGTDLSEALILPGLVVELAEIMAISEILISREMRKADKDTSFSPMPLDIDMEIMTTAPNFIALLLIGYGIFLSGFTGGAVAGGGIVIYVLSRKVRGLPIFVLDGVGAISGISWCLWIIGFIFFFILPQYWLLSLFLAALGLLLKVASKIGLIGILMREEYGRK

SEQ ID NO: 5839 - protein, 199 aa, Methanobrevibacter ruminantium
MPKIAKLWNKLADPKNIPRLFAVILGLLLIAGFLIPMGLNTDQIYTRPAPQSQMDAGLPLAPYDRGGEVLESPGITEAQYPENAENLGWINSYMTPIAEMLKGISPYFGTSICSSPGGLIDEILYYTRGFDTILESSILMMAFIIASWLAINFTMDRTKDERDIAEDVKRAIASSDRLANEVEESNRKAREKQAKKEFR

SEQ ID NO: 5840 - protein, 86 aa, Methanobrevibacter ruminantium
MFNLAIWVYLGLALAIFGSLATVWGPGVKDPVIRTINTEVASVGVSLILLCYNSTLALLTLIATTIIVTLILFRAISRLEEIGADV

SEQ ID NO: 5841 - protein, 113 aa, Methanobrevibacter ruminantium
MLEFINIETISMALMIIGAIGVVLLKKPLDKIIMVSVLEAGLFLAIVSFKYLDVAFLTAVLDPLSIIVFLLALIKINKVRKSKLEDYSTLDKLNISTENLEEKSLDKNSEGGK

SEQ ID NO: 5842 - protein, 92 aa, Methanobrevibacter ruminantium
MYIEIIGVITILMALRAVITKNRAEKLLYINVIGFCVSAIIALYIKTTFGFVLAAAFFISSTIGSNAIAYSLKDLEDEISYDKDMEERDEEN

SEQ ID NO: 5843 - protein, 166 aa, Methanobrevibacter ruminantium
MDMIIGIILAAVISWINFVVVDTFLGLPEAPGVKGAETVGYSIKERKGDLAGGFFQGNILCSPDASAGTLIAAIGVYALGIQGGLIAALLVYIGNRLCADPGYAGTCGALTMTLLIFIFSFVGIEVEMFICGMVIAIFTIQGIHHPTSSRLLGKIAKSFGRYTKYE

SEQ ID NO: 5844 - protein, 108 aa, Methanobrevibacter ruminantium
MISIGANGFQLLINYIVAIVVAVIIAFALRLPLLPERPIRFSWTTSALFPTPIFAIGILAIFYSLNVYWIYDGLILSVIVGLASALFVKYGFDYIFPKPPQIEDGGNV

SEQ ID NO: 5845 - protein, 311 aa, Methanobrevibacter ruminantium
MKDKNVVVTGGLGFIGSHIVDALIDDNKVTIIDNLSSGKMENLNNPNHENLTIIKEDLMDADLEKILKDKDYVFHLAALASVPGSVAEPLRYNQNNIDASLKLFIACKNNNIKKVIFSSSSAVYGENPNMPLKESENFLPCSPYAAQKASCELYLKSFHESYGLDYVALRYFNVFGPRQDENSPYAAVIPKFISAILNGESPVIYGDGEQSRDFIYVKEIAKANILSAESDYNGVINVALGKSMTINRLFEIISDVLESDIDVKYLDERPGDIKHSLADISNLDKISFKPDEDKFEEQLRETVKWFISQME

SEQ ID NO: 5846 - protein, 497 aa, Methanobrevibacter ruminantium
MKIEVLDTTLRDGEQTPGISLNTIKKLRIATKLDEIGVNSIEAGSAITSEGEREAIKAITSQGLNAEIVSFSRTLIKDVDYCLECDVDAVNIVVPTSDLHLQYKLKKTQDEMLEDAVKVTEYAKDHGVKVELAAEDSTRTDIQYLRKIFKATIDAGADRICPCDTLGILTPLKSFNFYKQFTDLGVPVSAHCHNDFGLAVANTLSAIDGGASRFHATINGLGERAGNAALEEVVVSLYTLYKDESNERKYETDIKIDQIYSTSKLVSRLSNAYLAPNKPIVGENAFAHESGIHADGVIKNSATYEPIMPELVGHRRKFVIGKHVGTKGLNNRLEELGLEVNKKQLNDIFYKVKDLGDKGKTVTDTDLEAIAEHVLNIEQEKKINLDELTIVSGNKIRPTASIKLNIENEEVIEADVGIGPVDAAINAVNKGIKSFADIQLEEYHVDAVTGGTDALIEVIIKLSSGDKIISARATEPDIINASVEAYIDGVNRLLENK

SEQ ID NO: 5847 - protein, 174 aa, Methanobrevibacter ruminantium
MKYNKELANLDNVEILGFKGTIESIPKTLEEIDNIRNSCCDVGTIQLMNADAIAGPKHLEHGTIHAMNAFERGDNLANDLGIEILLRTSAQRQISKAFKILGLKEGEMNIAVVMIDCPDYFIDELSNIFIRDDSVLEADESKLMKIYDIPEKELKTIHLSDILIDKTSKLIIAQ

SEQ ID NO: 5848 - protein, 480 aa, Methanobrevibacter ruminantium
MFAIVSLSAVSASDDFSSSLADDSDSDILAIDDIAQKDSSHKLMDEEDISVEFEIDDGDDDTSYDSYYDDSPGDDWSNYEDYDPELISEDAILTKIEVLNVPSHYGDDNISFRLIDLNTGLPIPDVNLGLQDSYDYDVYSFFTDEDGVVVYPIPVKVGDFSIVIGFYEDMMVVNELDDMVCNFTKLNVSIPTVPASIKITKTGTYYNDTVLKVSLVSSVKEVLSNQKINLTFSNGKKATVKTNSKGIANYALKFAPGNYSVTAALVSDGIVEANKSSLKNIKIIKAPGTLSPTALSTTYASGKYFQIKLTNSKTKKAIGGVKLNLKVYTGKKYKTVTVTTGSNGIAKFSASTLSVGTHKVIVTVKDTKYVSASSKTSSIKISKASRAISAPKVTAKYKSSSTFKVTVKNKASKKILSGVQVSLKVYTGKKFKTYNVKTNSKGVASFNTKSLTKANHKVIVNIKASANYNAASATSYINIK

SEQ ID NO: 5849 - protein, 500 aa, Methanobrevibacter ruminantium
MEENPIDFKDNSINSKALKDSDYEHASDELSQDLYNRIINAKENEIILIEPGTYKIHKVHLTKNITLQGTGDPREVIIDGEQLGSVFFINDINVTAQFYNLTIINGLSDNFGGGICIETGNTYVDNCIFINNTALNITNGGAISNYGNETNRSYLFINNSLFIGNHADHDGGAVTTCYAISDIYNSVFINNSAVRDGGAIRVSVYGYGNVQDCIFIGNHADEWAGAYYSWAGNSSIDRCIFLNNTAGTNGGAVMVSGSLNLTNSLIVNNTGGETGGSFYIQQPMFDAKTVINVNNNIITNNSSPLGKEIFVKWNATQLLFPNFNNNDWGDEDPTGPDVVDPNNVSDRIIPERTKRITVLYDKLNWGLLDRYTDVLDDYYGKSSSSDSKANSDTKTNSSGLKFDTENKTNDDSKEEQGSILNNSNGFALLNHNNSSSSNSTAGGGLEKKDNSTFVSPKDYQKMVELFEDNPSASKSTDIRYFAVLAFILLVFLVGLARKRK

SEQ ID NO: 5850 - protein, 337 aa, Methanobrevibacter ruminantium
MNLKFKKPSRESQMAMSKVAIGEDNIDYHNMAEEKLSNATNHQYAKLVNSGNAAILTAMNSIDGAILIPDQGAWNGFKQIANFLNKDLITVTTNQCIIDLDYLQESINQNDDNIDLDDENNKSALFLTSFAAYTAEQDIKEIAKFLHKYNILLAEDASGAICDMKGDLANGKYSDIIIGSTGSPKIINVEDGGFITTNDNSLLEKSRLILKTSKCSNITACGISHEIEYAKDNLNKTIDFTLNLKEKLNDSTDFEVFHSNKRGINLILKTNDPKSLSYKLRQEFALDSHGMITKCPNYNRLKEKAVAIEIKNLDISCLNEHNSNQIFNTIKKYEDFA

SEQ ID NO: 5851 - protein, 397 aa, Methanobrevibacter ruminantium
MRTSKATKNAYLAKLTEKIQMQSVNVGRDLDGSTPPSVFIGRWSYPKVYAGPMMVAQTGDTAIMDSPESWIGQNKTQEDIIGYRMNLVRGKQLISIKDLENPFVEKLQDISLAAKSIDSEATFGSRPSGAMFNEESMPHGPSAVIEKFDIDAVKWDRQLEKSFYDTDLKARDAVMNLHNKDVPFSAMQKAFSVGAFGIKKNRRLVPTRWSITACDSTIADSLLKEVRHYNIMDSYRVYEFSSLKNYYAIILTPTEWQYEWFEAFIKILGKEEMIFSDYETNTDKREYSCVGGCYYTAKMAVLDKLAKLKLQSGVIILREAYSGYVPLGVFNVRENIKYAMNGDYKEFESLKDSLAYCSTKLKIPISKYVKQSNLLNELLHSQQTTLDAFFKKSPDLQ

SEQ ID NO: 5852 - protein, 308 aa, Methanobrevibacter ruminantium
MLEPKEFISDAIAKIKEEIGDEKTIIALSGGVDSSVCSVLTQEAIGDNLTAVFVNHGLLREGEAEQVCSVFEERLNFKYIDASDEFLSELAGVEDPEEKRKIIGRVFIEVFEREAQAVDAKYLVQGTIAPDWIETEGEIKTHHNMALPSGMVLKVVEPVRDLYKDEVRLVGTELGLPDSIVQRQPFPGPGLGVRVVGDLTRENLAVCRAADAIVREEVEKAGLDKELWQYFAVLTDTKVTGVKGDERDFGYLVIIRLISSIDAMTATVPEMPWEVIRTISKRITSEVSEVTHVALSISDKPPSTIEFC

SEQ ID NO: 5853 - protein, 79 aa, Methanobrevibacter ruminantium
MFDNADDFKKKALDNKDELKREYINIPIGEDEQSFRISGIGEKAIKIEKYVKYDDMVDAVESGKEEGLEAVIMKFVEEY

SEQ ID NO: 5854 - protein, 188 aa, Methanobrevibacter ruminantium
MKILVINNKGQYNHRIQRTLQNLKIPSELVKNKLSISEIEEKEPIGLILGGGPSIDGVGNAAEYIKHFDIPILGICLGHQLIAKTFGGEVATSDTESYAQVKININEENPLFKGLTSPMDVWSSHKDEVHSLPEDFDIIAESSLCDIEAMKHKEKEIYGIQFHPEVHHTPKGEYIFKNFYEICQNYNE

SEQ ID NO: 5855 - protein, 48 aa, Methanobrevibacter ruminantium
MEIDELITYLIIIAVVAILIKIFSWLLPIFVILAVAYVIYLYITENNA

SEQ ID NO: 5856 - protein, 481 aa, Methanobrevibacter ruminantium
MKRRYKVLFLLAILTIISINAISASEIGLDDNNAIDENDGFKIKQDIMSEKIISDNEDADSNNANDVNTDSSDEVNEDNVIEQNTDTDTVDEDEEDPIIPVDTRLFNPDSVIKGNDLNIVLKDIDNNPLANQTIKFNINDKQYQRTTDKTGTAKLKINLSPKTHTFFIEYDGCDEYYPTNLVFDLKVIKPVQTKLSVKSTIVYKNNKLMVYLKTSDNKALANQKIKIGLPKKTYTRTTDKNGLASLNINLNPKTYSINLSYDGKGKYLPTSKKIKIHVFENELLGSTYYGKVELLKGIGNSSSKVKIAYVVGLHVLEHQIHDEVYNIMKQKTSMHYSYNVYKITLTKKSGNYNTDRMRGQILAKNYIVPHVNKQKYNLVVDVHSTTGVYYKKSYFIHVPQNRHKPSLNLANKAIKIINTLDKQSKIVYWSPDSQTSPPYLTLPIMKAGTPTFVFETLTSEPVSRSKYRANILINAVDKLFG

SEQ ID NO: 5857 - protein, 315 aa, Methanobrevibacter ruminantium
MIFMENYDIIIVGAGPAGLTAGMYAGRQNSKTLIIDRGFAGGLGLEVPLMQNYPGFDLISGMELIQKMKAQTENYCEIKENETIQSIEKTEDGFLLKTRTSPLLMSEESDEIREFKAKAIILATGASHRHLNVPGEAEFLGRGVAYCATCDGMFFIDRTVLMVGGGNSAAQEALYLKNLGCNVKLVHRRDQLRCEHHLQKALEEKEIEVIWNATVEEIKGDMVVESVRLNRNGQEEDYKTDGVFIAIGDDPSNEIAKELGIDLDEDGYIITDKRQATSVEHVYSAGDITGGVKQWVVACGEGAVAAISAYNDLNL

SEQ ID NO: 5858 - protein, 615 aa, Methanobrevibacter ruminantium
MMGLEIHQQLNTKHKLFCPCSTELTDDEFDDGIIRNLRPTQSELGQIDRAALQESLRHMTFKYESFNNHTCLVEMDDEPPHALNREALDICITIASLLNMKMVDEFHTMRKQVIDGSNTGGFQRTGLAATDGYLDTPYGRVAIESLGLEEDAARRIDSDDEFTQFRLDRLGIPLAEITTDPSMHHPEQIKEVAYMIGQVLRSTNVKRGLGTIRQDVNISITRGARVEIKGVQDLDLMPEIVEREVQRQLALADIKDELIARNASVDDTIYDLDEVFKDTSSKILSKANCIKGIILRGFDGLIGKEVQPGRRFGTELSSYAKKMGVSGLFHTDELPAYGIKADEVDAMKEFLKIGPQDAIIIVAHDEDIAINALNEVIRRAEMAFDGVVEETRKALDDGNTEYMRPLPTANRMYLETDIPLFQITDDMVEPIKNNLPELPDAKKERIKAEYKLSEDLASQIVRRLLGDTFESLLARVKVDPTTVASVLVSDLRDLKRERYNVDVLTEDKLVEVFSLLEANKISKDALKDLLVEVCKNPDENVEKIAEDANLTLLSEEEVRAIIHEIAQNNESMIKERNMGAMGPLMGMSMKQLKGKADGSLVNKIVREEIQNILNG

SEQ ID NO: 5859 - protein, 435 aa, Methanobrevibacter ruminantium
MTYKEISKEFLDKANVTIGDVIKVTKEDISYEGILLDRSEDAKDAYIVIKLDSGYNVGVNIESATIELIEKGDQPKIGFEGDTIEKDPNKQNISIISTGGTVSSIIDYKTGAVHPKFTAEDLLRANPELLDLANYDVKALYNILSENMKPEYWVKAAESIADDISSGADGIVIAHGTDTMHYTSAALSFMIKTPVPIVVTGAQRSSDRPSTDAFLNIYNSCGAALSDIAEVTVLMHNSLDDGDCALHKGTKVRKMHTSRRDTFRSIDSEPIALLRDGKVKSVNLPYVKRGENELELNTDIESKVALIKSFPGISSDIIDYHIDKGYKGLLIEGTGLGHVPDYMVDSLQRANDEGIPVVMTSQCLYGTINMNVYSTGRLLQDAGVISGVDMTPECAYVKLAWALGQSDSLDEVKKIIQTNIAGELNESSSLKYFLN

SEQ ID NO: 5860 - protein, 279 aa, Methanobrevibacter ruminantium
MELTSYLSQIIISVIIFIILCLLANQVKKIIEKHYGIHLNPNDFLPIEEIKSLMQLYFLLIILLIYICIMNFFFNNFGISGELIFINSLIDIILSVFLVTIYYDGSTRGKIISIFLLPIVSISYILFGGSLIRYWDFIRIPILLYLVVIFYNKFIDYTERNNLGKTILILLSIIYTGILLTIVLEKQNPIDAVAMVTNAITSNGYAALGDSEGGVLTSVFLAWGGYIISGVATATLAADIIHRNSRKKFRNMETKIDNLENKIDNLERIIVESQKENEE

SEQ ID NO: 5861 - protein, 142 aa, Methanobrevibacter ruminantium
MADKFSKEKRSYIMSRIRGKDTKPEILVRSYLFSKGLRFRKNDKRYPGSPDVVLPKYNTVVFVHGCFWHLHEGCKHAKIPKSNVEYWEKKLYGNRDRDKRNKKELEDMGWNVITVWECNLKKDKREKTLFELYNQIISEDED

SEQ ID NO: 5862 - protein, 204 aa, Methanobrevibacter ruminantium
MVAALCTEALGKDRVIGVLMPNGVQSDIDYAKLLVSHLDIKHYIINIRDAVDGVLSQMTKSGIEISEQTRINLPPRIRMSTLYAISQSNNGRVANNCNLSEDWVGYATRYGDGAGDFSPLSNLTVSEVKEIGRSLNLPSEIVDKVPIDGLSDQSDEEKLGFTYDVLDKYIRTGEIEDKTTKERIDYLHDLNKFKLELMPSFEYK

SEQ ID NO: 5863 - protein, 497 aa, Methanobrevibacter ruminantium
MTDIKVDKNVEKAKSSQVEERVIKKPESLYDSFPRKGNDIYNTHYCAGCGHGILHKLIAEVMDELNIQDRCVMISPVGCSVFGYYYFNCGNVQTAHGRAPAVATGISRAEDNAIVMSYQGDGDLASIGLNETLQAANRGEKIAVFFVNNTVYGMTGGQMAPTTLVGERTVTCQNGRDPHYAGYPLHMCELVDNLKAPVFIERVSLANPKLIRKAKIAIKKALMIQKEGKGYSFVEVLSPCPTNIRRDVKGVEDFLINEMGKEFPVKRFRDLSKERAPVERNVSDFSIESLDKAFGVDRTKEIAEVEDDFEDCKVKIVGFGGQGVLSTGLTLAQAACSEGKEVSWYPSYGPEQRGGTSNCSVTISAKTIGSPVVEECDVLIAMNKPSLEKYSIDVKEGGTILYDSRAGNYTNDNLDVKDNVKIISIPAREIATEIGNAKAMNTAILGALMELGKDSPILSQDAFAEGIKETFAAKPKLIDINLKVLDAGAKWLRENIN

SEQ ID NO: 5864 - protein, 388 aa, Methanobrevibacter ruminantium
MSNQIVKGNTAVIIGALYAGCDCFFGYPITPASEILHEASKYFPMLGRKFVQAESEEASVNMIYGGASTGHRVMSASSGPGISLMQEGFTYLAGAELPAVIVDVMRAGPGLGNIGPEQGDYNQIVKGGGHGNYKNIVLAPNSVQEMCDLTMKAFELSNKYRNPVVVLADAVLGQMAEPLKFPEEAVEPVIDNSWSVRGSKETMNNLVTSIFLDFNQLEDFNFQIQEKYEKIRENEVVYEEYMLDDAEYVIVSYGTSSRLSRTAVDIAREKGIKLGLLRPITLFPFPEKRIKELADEGVQFISVEMSNGQLREDIKAAANYDEVHLVNRMGGNVIELKDILNEIYQMVGSDERHKVDSEDKEFDKSYLSDKDYKEELDNDNYHNHRMVD

SEQ ID NO: 5865 - protein, 84 aa, Methanobrevibacter ruminantium
MKVNQIKPYPIISKNNCKACLRCITACKEGCLKLSEEINDSGYQYAEYTGEGCIGCGDCYYTCPEPLAIEVHIPKRLRKSAGDA

SEQ ID NO: 5866 - protein, 554 aa, Methanobrevibacter ruminantium
MTSLIGNFVNRVDFKSYKDFYDNFEFNVPKDFNFGFDVVDEYARIDPDKKALIWCDDYEKRVFTFLDMKKLSNQTANFFKSQGINKGDAVLLTLKNRYEFWICMVALHKIGAIAIPTTHMVKLHDIVYRVESASIKMVVTVEEDQLLPDFEQCEKELDIELKKVLVNSFRDGWFNFDNEIAKMSEEFERPTGDEATHEDETFLIYFSSGTTGNPKMVAHAHTYAIGHLITAKYWHNVVEDGVHHTSADTGWGKAVWGNLYGQWIAGAAIFIYDYVRFNGLDLMEKIIENKVNTFCAPPTIYRFLIKEDLSQFDFSDIQYATTAGEPLPPEVFKRFKEFTGLEIKEGFGQTETTLSLATFIWMESKTGCVGKPSPAFKIGLLDEEGNPVDIGSEGEISFDVSGGRPVGLFKEYYRNQEKTDEAWYNGYYHCGDTAYVDEDGYYTFVGRNDDIIKSSGYRIGPYEVENAVISRPSVLECAITGVDDELRGQIVKATIVLAKGYKPSEELKKEIQDHVKHETAPYKYPRMVEFVEELPKTISGKIQRKIIRTRKSIY

SEQ ID NO: 5867 - protein, 186 aa, Methanobrevibacter ruminantium
MIEMSDVNKDIGMRIRELRELSDITTEDMANELDVDEETYISYEDGIIDIPASFLYQIAHIFKVDLALILTGEETRMTYFDVTRADKGFAVDRRKEYKYENLCKKFVHKKAEMFIVTVDPKEDAMPSLNSHAGQEFNYILEGTVKIFIKDNEIILNEGDSIFFDATCEHAMVALNDETAKFLAVIM

SEQ ID NO: 5868 - protein, 122 aa, Methanobrevibacter ruminantium
MVNREDCVIFKQEYGNELLVNQQYVKIRAKEEGFMSFNLRVPKEDMEGIENFFKGFKIPEPILIDIACTGNIHCYFKGISPIINKPEYSFISVSVQELKKEIVEEEQEIGIPAHECVGCGLH

SEQ ID NO: 5869 - protein, 365 aa, Methanobrevibacter ruminantium
MSFLTLILKNPFRSKSRAILAIIGIGIGIATIIALGAITDGMIASADDTLHAGGCDFTVSGKIESTSSQMATFGTSTIDEDYIDKIANVTGVKDAIGMYMTVLMTTNSPYFAVVGLDPEDYQVSDLTITEGRMYKNDTNEIVIGKIASENEEKGVGDTITLDDKKFKIVGIYESGNTLQDQGGFTAIKNSQKLSKDEGKISSIYIKVNDGEDVDKVRDRITDKYGDNLTTISSLSDLEMTKNMIDMLNGASLAISLLAIIIGAVGIINTMLTSVFERTRELGVLKAVGWSDEKILLMIVGESIVITIVAGIIGSIVGVIGVELLAASKIMQLLNPVYSVDIFVKAFAIALFVGIIGGIYPALKSH

SEQ ID NO: 5870 - protein, 238 aa, Methanobrevibacter ruminantium
MANIIEIKNLVKSYENGNIKALNGIDLTIEEGEFVSIIGPSGSGKSTLLNMLGALDIADSGSINVAGYDLTVNKNLNKFRGEKIGFIFQLHNLIPNISVVENIEIPMYSQGKSSKEMRKKALELLDMVDLKDKANMKPNKLSGGERQRVAIARSLANDPSIILADEPTGSLDSKTSTKILEQIHKLHKEKNITLIIVTHDMTVAKLADRVIEVLDGKILNAEESTLLDNKIEIKVNLF

SEQ ID NO: 5871 - protein, 459 aa, Methanobrevibacter ruminantium
MQTNKNIESIIGDPKKAINRLTYPTILSMLLMFANNLIDSMWVSGLGAEPLAALGFMSPLYLVIIGFGSGVGAGANSLISRLIGAKRYDESNNAAIHSIIIALIVSIIISIIGMFFLDDLLVLFGAGSVLDYAMDYGMIIFLSSIIILFPAIVSSLFRAEGDIRRATVPLVVNAILNIIFDPIFIYIFNWGVKGAAIATVLSTLVNLLMMLYWYLVKRDTFIKLSLEYFHSKMEIYKEILFVSIPASLEELIYSIVAICFNYLIMITAGTMEVAVFTVVWRFVSIAFLPCISIGISTITVAGIAYGARNYENFKTTINYSTFLSFTITLIICIIFFVFAYPISETFNFISGDAEMISRTAEVLRIMVFYNIVIPFGGTAVYVYQAIGSGFKSLAITILRELILSVFLAYLFGIVLKMGIFGVYLGAIVGMAIGCFIGFTCIKIYQGKFKKECESLNQPV

SEQ ID NO: 5872 - protein, 344 aa, Methanobrevibacter ruminantium
MDLLLILSQEHDKLPLAELRAVLETEEIETELEMVCPGLVLLKELEEDVFDDYYRLLVRRLGYTHEVHQLIKTVDCSDLESEVKSIDWSEFIDENFAVRVKRFNSEIDTVDTERKIGGYILTSTDNISVNLSNPKSFIRVVAYKNTIYLCYGKYQLNKKYFEEMKPHKRPFFHPGCMSPKLARCMVNLSRVKEGDLVLDPFCGTGGILIEAGLIGAKVVGCDIDWRMKNGTATNLEYAGITDYKTHVVDIREMEMYEEADAVVTDPPYGISTTTCGEGASGIFKEFLESIEHSMKEDALLVMASPDSLDIDSLFKDVGFVLLERYAIKMHRSLTRIISVIAKID

SEQ ID NO: 5873 - protein, 432 aa, Methanobrevibacter ruminantium
MSFDYDVAIVGAGPIGSSLAYELAQNGLKVCLIDKKKRIGLPLQCAGIVNKRISSLCDIPKELILNEAKGAFIHSKNHSLTVSKKESQAYVLDRVAFDQYLFNRAREHLDTYLSSKVVDIDTELGIVQFKFDCEIKTIRSKIIVGADGPLSLSAKKVNSKLNYFNASQYLVKVDKIDEMSFVDLYAWGDLFPGFIWAIPVYSNIYRIGLFSEDDYKSQSKMLDDYLENEFRYDEYEVLEKYKGKIPIYDKSNKLFKNRLILIGDAASQVKPTTGGGILIGLESVQFAKDAILNALNTLDFDKIDFDLVGGSDSNEDDSDLNDANYKEELNNFLDELSKILENYQNDFENRFSKEFEIQFKVQKSLSTLSNDDLDYVLTKLKEKDADKLISEYGDMDNQSKLVKEFLKRGLIFSLAPKIHKKELAKIWLLNKD

SEQ ID NO: 5874 - protein, 636 aa, Methanobrevibacter ruminantium
MFGKDKKENSNEKVLYEGQPNLIVYSKSIFIAVILLGFLFFLYSTGIQYIGNMQVYMIESTKLPLTRYFAIAVFVIIMVVILYIIIKFLSWTSIKYTITESRVIVEKGIIFNKKNYMPFNTIQDVSRSQSILGKAFSVGTITLYSAYDGKDMSLKDVSNPKKIEDLIFENMRTTHLRSHNLYDDSYGNPYNNSYNNHNNHWGYDNYGDSYQNRDFKPIRPNSDEKVHYNRMEDLDDLELVDVKERKRNLREIRRKAKNSRGNNYNNQPIDGPSNNYNRNSNYDPNYNRNSNYKQNPNYNNRNNYDDFGYDDYESGYNQRSKRAPQGNRGYSKRNANQYRDDSRANHQHRETIRESYQRNPNKYFAQNYEKFHQDNLEAQNRGGESFNEMNPLDSNDYYGMDDDFISDEEFDSTINKAMENIGDNIKFKPNNHSRVVNSHEDFDSRVVNSHEDFDSRMNDSYDDFASGSRHNTDYANSNQNRHYNSNYPDDRQFRSNQSYEGDYRQSRSNQPYEGDYRQSRPNRSYDDGYGHSGSNPNYNNSYDQSNYGYDDYRQSNNPPRLNKQSSSDNYHKSNNRNRSSNYRNRSYNNQENYNSYNDMEDNSNNYEESDKKGKKKKKNKDSNDLLEKHSRKFRRS

SEQ ID NO: 5875 - protein, 98 aa, Methanobrevibacter ruminantium
MIFVLAKAIPKDEEACEKIVEFAQDLIENSRKEDGNIDYNLYSNTCDGTLLFVEQWESKEILGAHLQTEHFLTFGKNIADLVAAELDIAVYEAEATDL

SEQ ID NO: 5876 - protein, 227 aa, Methanobrevibacter ruminantium
MKVAVIGGTGPQGLGIAKRFAIEGVEVIVGSRKEEKALTIVEETIEELKDYDLNIVGMANEDAAKEGDILILTVPLAAQKPTLEGIKEFCTDKIVLDATVPLETAIGGKPFRFIDLMEGSAAERTAKILDGTGAKVICAFCNISNSHLSNIPNEIDCDCLIAGDDKEAKEIATELINKLPGVKAIDTGILEKSRIIEKITPLLIGLNIKYRSHYGGLRITGIPQFED

SEQ ID NO: 5877 - protein, 358 aa, Methanobrevibacter ruminantium
MATFKGFAMKRLNEIGWVEKEVPECGPMDAIIKPTCVSPCTSDIHTVWEGAIGDRRDMILGHEAVGEVVEVGSMVKKFKPGDRVIVPAITPDWDDEAAQRGFPSQTTEPLGGWKFSNFKDGVFGERFHVNMADANLTFIPDGLSDEGACMLTDMWSTGMMGSENANIPLGGTVLVIGIGAVGLSAIAGAKCLGAGRLFAAGTRPISVEVAKKYGATDIINYKNGPIDEQVRELTDGAGVDSVVIAGGNLENTWAEAIKSAKAGGTVSNVNYLSGADNVLIPRVEWGCGMSNINITNGLCPGGAVRMERLADLALCGRQDPELLVTHKFKGLEKIEDALLLMKDKPKDLIKPVVMLDID

SEQ ID NO: 5878 - protein, 274 aa, Methanobrevibacter ruminantium
MIISEELFEGICDLDDFNLLKFVISSELRLKILFSLYESSKSIKELESEINRKSGNISRGLNELKSCKLITKLPNKLFAISSTGFLVAKNLENLMDNMGSIESNGEFWENHSIKSIPNKFLKELSIFNNSTLVKSTITDFAKPINLYLENIKKSTYICMILPVFSKIFNDAVNDAIIEHDGYLDLVTTKNIYDLSIKSDSDNKIKSLVRDKKIKFYIVDDLPNIFFTVSDQFASLYLFFDDVVFDNSEMLLLEDDLNLNDAYRFYRFFKNEILK

SEQ ID NO: 5879 - protein, 286 aa, Methanobrevibacter ruminantium
MTNRFEEENFLELQEDIKFLINSEIRLKILGCLYNSSASIKQIEAITNYSYSSILDNINKLEQKKFIYSIEDKFYLYNKTRLKLNSILYFNKSATFLRENSDFLNQSLIDINSEAIKDLSALEGSRLIESNNIDLFKSTEIFQRSLMGFKFLKGIFPYFHPRHDDIISYWIDNDCTVELILPDEVSEAVKNFIIDYVPKSPGIKNRFVKLKPNDHNIQLAFTVSDKCFVLALYTKSGQFNQNAVLVSTNPEAITFGLKLFEEYEELCGDYVSLENLIYPNGREDDY

SEQ ID NO: 5880 - protein, 424 aa, Methanobrevibacter ruminantium
MDDSPNEVPELNRPTKIDNIEEPKTVDELQKELDLLKAENQKTKRNLMWKVRKLEKDKILTENEKIRLERELKSLRGEVERFRSPPLVIATITEIIDDSRMTVKSSTGPSFLINYSKFLDEDLLKPGSRVALNQQTFGVVEVLPSEKDANVSGMEIEAKPDVTYDMIGGLDEQIIEVKETVELPLKHPELFEKVGIDPPKGILLYGPPGTGKTLLAKAVANETNATFIKVVASEFVKKYIGEGARMVREVFELAKEKAPSIIFIDELDAVAAQRLKSSTSGDREVQRTLMQLLAELDGFESRGDIGIIGATNRPDILDPALLRPGRFDRFIEVPAPNEDGRREILKIHTKKMNIDPEVRMSELVELTEGLSGADLKAICTEAGMFAIREERDHIIKADFEDAINKIMGKNKTGTLDDNGGVMFG

SEQ ID NO: 5881 - protein, 167 aa, Methanobrevibacter ruminantium
MNCEICGKEIEGKPLRTKIDGSVLLVCNDCAKFGRVQRDTPLERKFVTRDKKGRKEANAKTRPKKTYTRNEEPMDELVEDFNLVVRQAREAKGWKREELAAKIYEKASVINRIESGKILPDLKLARKLEKTLNIKLIEKYDDMDLEAYKSSSAGPNTLGSIVKIKRK

SEQ ID NO: 5882 - protein, 140 aa, Methanobrevibacter ruminantium
MALILIRGENNAKILNAIADVERHANLTLETKPKKVDPKFADKLVENVLKSPLRTKSKVATAFRVKEDTTIAILQVKKIHPPAHIVVVSNTYDGYRELSKIINEGKVFKGYYSNKSSSGTRMKDYKLTKTSTNEGLNIYM

SEQ ID NO: 5883 - protein, 408 aa, Methanobrevibacter ruminantium
MLFSVIATVSATCNVIVITDPSGEDPNGAAAGSMSFANNMFQSSFIMSKDDGYAMLSGGEGNGTERNYAIIAALAAMQHGATPASAAALASGFKGIRLVIGGPSMGAAIGGDYNAYLVVVDDAGTIKVTHHTGGVVQLPQGSKGAIIHLRNSAGNPMYGTAERVRRETAVNIGKMIRDGYPATYIVGKAMKEVAEDSGEKYGGGAVNLVSSISTGDMFVPDQVNTTGYPMDENYSKSCEKCGWATGFPDAERYNVCPYCGSELTVNSATDVLIDSITVSKDSVSVSVYGSDRLGLSDITREVVKASVKKYGYNASTIAGSLNKGINNGLIVGVDYVEPSDLNVKPDVRAVGVYYNPLPNGRSSPAWNLPINSMVLTILGTIQTAIGFVLIMLVIFRTRLLKSFKDRVS

SEQ ID NO: 5884 - protein, 165 aa, Methanobrevibacter ruminantium
MFIKIRRDTLIILLLAFILILCGRLIIYVAYASSAQVEEGVPIAGIIVKGNDIVPIDNIRYNVENSGLREGSYIDGDILKTSIRELPVTEAEANAEKFVKRSTIPGTTIAPIAGADVNVNKQTGIVTVTVIEDFSTINITGNSTTSTDFTENEPSKSVYNYSLAG

SEQ ID NO: 5885 - protein, 374 aa, Methanobrevibacter ruminantium
MIIPTLGCPSNCSYCWGSEDNAELMDIDVIKQIVEWLADFRDEPVHFTFHGGEPLLAGYDFYKEALPLLNDAETHETEGFSLQSNLWLLDEEMVELFSKYNIAISTSIDGPKEINDYQRGEGYYDKTMKSVKLATDHNIQINFVCTFTSYSKDFSDEIYDFFKANGLNLKIHAALPSLRGNNADPWALPQDEHGKLLIDWLDKYLYDLDKFVIMDLDHIAKSSLRRVGTLCTFNDCMGTTLAVGHDGSIYPCYRFVGMDEYIMGNVYDKPSMETLEQSEAWEKLMEFKNFVDEDCADCKFIKFCRGGCPYNGIVATQSPRAVDPQCEAYKMIFGEVSRRANEDFKKNAMAAFGGAPRVRKEGDPFSIMDLMTKM

SEQ ID NO: 5886 - protein, 72 aa, Methanobrevibacter ruminantium
MKFEDLMAKCPKCGSQDKTAVRRFIDNHHAHAELKEFKCDNCGFVYETGKDYEDNEDETIKKGLIKELNKTM

SEQ ID NO: 5887 - protein, 348 aa, Methanobrevibacter ruminantium
MDYSIKSGIFGLVVADALGVPYEFKDKHYCDMNPMTDMIGHGTYNQEAGTWSDDSSIALATLDGLTDYEFGEDDVEGMRIKNFAEIIDYDSIAHKFADWLINKKYTPHGDVFDVGNTTSHAIYSFYAGKVDALHASGAGKKDAGNGSLMRILPVSFLIYFLSLKYDFDEEGEMEAIHNLSSITHRTLRCQMACGIYIKIAIELLKNYFDSEDDSNLLELVNNGINSAKEYYETKEEFAHELSIYEDVFSLEIQDFDRDDIKGSGYVVEALKAALWCLLNNDDYKDTALAAVNLGHDTDTTAAIAGGLAGIYYGYDNIPSNWLDKIAKSDYIGELCNNLSDYLFEILED

SEQ ID NO: 5888 - protein, 259 aa, Methanobrevibacter ruminantium
MSLEILKKGTSENFLLKQIIRKNFTSKYKDSVLGILWSFFNPLITMALLTAIFSSVFARNIENFPVYFLTGRCVIDFFNSGTKIAMTSLKKNSGILNKIFVPRYVFALGGIFSEFINFLMSMIVLIVIMIVTRAPFHLYAIFSVIPIAILFILILGVGLTLSILCTKFTDIEYLYKIFTSLLVYACAIFYPIDIVPQPIRQYMELNPIYGIIAQFREFVMYGRFPSTKLMLITFLTSIVIFIIGVIIFKKYQNRITLEL

SEQ ID NO: 5889 - protein, 409 aa, Methanobrevibacter ruminantium
MDNKNENSNKIKTQLIPSIHNTVSLQAHLTTKDGEPIVGEEVVYKLYSIDKSFLTQYSRITNEEGLVHLTLNIKHKVYIEICYEGSEKYESNNVMTFRTKPSDDEKNVKTKHPLQVQREEKLEQKKIEEKKKNLLDFQQKQKDLESVDEDNIAIELKNVNLSFTIGSDKIDNLKEYVIRTIKRTKEKKTIFKATDDVSFKIYKGEKVGLIGFNGAGKSTLLKIISGVYTPDDGEVIVNGKIAPLLSLGAGFDKNYTGRENIFLNGAILGYNEEFLNSKYDEILEFSELGQFINLPVKNYSSGMLSKLGFSIATIVEPDILILDEVLGVGDVNFKRKSREKLNSLIESNITVLLVSHTISEIRNICEKAIWLENGKIREIGEVNDICDKYLEEAKKVSDDKTKKLKPKRF

SEQ ID NO: 5890 - protein, 226 aa, Methanobrevibacter ruminantium
MASIVAIIPAYNEEEALADVIAKTSKYVDRVIIVNDGSADRTADVAIEAGAELINHPTNLGKGEALKSGFEAITDDSIIVTIDGDGQHNPDEIPIILKPIIEDGVDLVNGSRYLYGHEENTPAYRRVGQRVLDIATNISAGIKVTDSQSGFRAFSPKARNCFRFKDTGFGIESEMLVDAAEAGLKIVEVPITVRYDVDGSTKDPVTHGVGVLLKIMKDKAVRTFKK

SEQ ID NO: 5891 - protein, 323 aa, Methanobrevibacter ruminantium
METQRIMVTGGSGFIGTNLVNELRSRGHEVLSVDLLHHEDEADLYSDSYSDYVRGDIRNYRQMERIFDDNDKFDYVYNLAAEYGRWNGEGYYENLWETNVIGLKNMIRLQEKLGFRMISFSSAEVYGDYEGIMSEDVMENRPIKDTYQMNDYAISKWAGELMCMNSATMFGTETVRVRPVNCYGPHEAYSPYKGFIPIFIYKALHGLPYSVHKGHKRIIDYVEDTANTFANIVDNFIPGEVYNVGSKQEWEMTIEEYSDLVLEAVGIDDSLVTYTPAEDFTTKVKTIDFSKAIRDLKHDPKVSPKEGIKRTVEWMKWYYRIED

SEQ ID NO: 5892 - protein, 180 aa, Methanobrevibacter ruminantium
MTNKSPEEEIEELKAQLSKYRKENRILKERCASYEDRIEHFAIERKELSRAITQFESLELELRQYDLEELIQNTRKLNHRIDILRRYLQTEREDNEKLNELINKLTKELDDANYEISRLTTEFHKLRVRKNQRTYFLENRLDIAYTKLAQLKYTLNEFEELGFWDRLRGKKPESYDDIDI

SEQ ID NO: 5893 - protein, 281 aa, Methanobrevibacter ruminantium
MKAVIPAAGLGTRFLPATKAQPKEMLPVYDKPTIQYVIEESVNSGVDDILIVTGKGKRSIEDHFDRSFELEHHLKTKGKEDFLKEIEYISDLADIHFIRQKKQKGLGDAIYCAKKHVGNDPFVVMLGDTITKDTVPCTKQLIDIYEKYEKSVIALEEVPDEKVERYGIIGGEEIEDSIYKIDKLVEKPPLRVAPSNLAIMGRYVLTPDIFDCIENVEPGYGGEIQLTDALSKLDEIYGQVFKGESYDIGNRIDWLKTSLRFALEDDSARDDILEFIKEEII

SEQ ID NO: 5894 - protein, 137 aa, Methanobrevibacter ruminantium
MNFKIKAKGHKNVLSLHKSTFEITKDKDLSLSGDCIIGLDIDKCMLDFPKEFKEKLANDETIVTVKLKSPNAYDEIVGYGHHDLTLDHPTDIVCRKSDFICSRTLMIKSDKAAIDLNRDLIEDLANGESLDVEIILS

SEQ ID NO: 5895 - protein, 312 aa, Methanobrevibacter ruminantium
MIINTGLRTDIPGFFSKWFYNRIEEEYVYVRNPYYKSQVFHYKLNPELVDCIIFCTKNPKPMLSNLDKISEFNQFWFVTITPYKKEIEPNVPSVNKVIKSFKELSSQTGKESVSLRYDPILINDKYTLDYHIEAFEKIASSLSDHTSEIIISFIDLYEKTKRNFPQAREVSKEERLIIGKEFSNIARENNLILKTCVEGKELDKFGIDSSGCMTKEVIERAIHNKLDVRVKKSRNRPCDCLLNNDIGEYNTCNHGCLYCYANSNKQLVKRNFKRHDPDSPILIGNIREEDEIKEINQESFLIHEDTVQTKLF

SEQ ID NO: 5896 - protein, 152 aa, Methanobrevibacter ruminantium
MKGTYCLIISMKKSDKIKIGNLYPEAYKFKKGYYVYIGSAMNSLISRLNRHLSDDKKMHWHIDYLLTSEYSEIREILFTDSEKRIECDLANEIAEDGLEIEGFGCSDCNCNSHLIFFNRKRDALRRVKDAYESLGIEYYDLKYFRTIDNKKD

SEQ ID NO: 5897 - protein, 960 aa, Methanobrevibacter ruminantium
MKIIFKRCLVLISLIFILILTLGLVSASNNINQINDMNCSVYEDYSENIITADLNSNSNELNSDFAYGDSDSEEILDEPSQKLKTGSDNSDFKDIQNLIDNAKENDVIELSGTYTGDSLIVVNKSLTLKSSSSATLDGEFLNELMAINAPNVILDNINFINANYTGLSVNNNYVTIQNCNFDGCINGELGCALIIHGNNVNVLNSNFTNNVANKSSCHHTDGAAIYLIGNDCQIDNCSFINNWGYNFETSSSGGAIWIKGNNIVINNSYFFNNSATAEVGWTFHGEEITYLADGYGGAAFLVGKNVKIINSLFDSSLSHAQGGALYYKSAYDCSIINSTFLNSFSVGEGGVIYLGQNIDGLMIDSCNFINNTADGLDGVLVKYTDLGSVLYASKFAENVVITNSSLLNNKGTSAVYFLGNNLNISNSIIENNNLSTAVIYMNGSMNDNFWSKNFDSADEFKNDCFIIRDNESQVPDTWFNLVCDGLDSLKAKGVYDYNMSFVLKDASLDNHASKISLTNNLPNYHINLKNSAKNKINPNELVIVDNQADFTYDYIESAKDSIDVYDDYNNLILSKKVLSGITYINDSGNDTKDLQDAIDSASSGSLISLSNKTYVLDTILINKDIHISGEENTTVMLSNSSDYIFKISNCSAANYSDYGIAISNINFILDNGDIVALAEAVNGSGSLSIDVASIKITDNSFTSREGVVRESITILELDSQRAVLAPTRNISISNNSLEIGMNPFDFNVKSVINGSDVRVDVGGNLASKKASQIICKDMVTKAIASNVDSRSGEYFNVSLKDSQGKPLQNKFVQIGFNGAVYNRTTNESGELRLQINLAYKGVYTFAISYLGDDECNGSFEVAKITVNPQSPILMANNAKYKVSSTKTLSASFKSMKGSPISGKTIKFTVDGKTYSGKTNSNGIASVKVSLNKKGTYKFTAKFAGDNTFAAVTKSAKVVIS

SEQ ID NO: 5898 - protein, 267 aa, Methanobrevibacter ruminantium
MKRQKKIAIYGKGGIGKSTTVANIAAAYSEDNKKVMVIGCDPKSDTTRTLCGKRIPTIVHTLKDNKKPELDDLVFEGFNKIKCVESGGPEPGVGCAGRGVIVAMKRLENLNAFEEEFDVILYDVLGDVVCGGFSVPLREDYADEVFIVSSGEYMSLYAANNISRGIKKLKGNLGGIICNCKGIDNEEEIVNSFAKEIGTQVIGVIGRSNLIQRSELDAKTVVEYAPESIESDAYRKLAKDIFDNDNYSTPQPMEDEDFENFFKSFID

SEQ ID NO: 5899 - protein, 419 aa, Methanobrevibacter ruminantium
MVELLAPAGNFISLSSALKNGADAVYIGLEDLNMRVNASNFSLEDIKKASEMTKEYGAKLYVCTNTIMKDKDIEMLKDQLPYIKEYGADGIILSDISLIELASQNGLEAHVSVQENTTNFYALKTLERLGAKRAILSRELSLDEIKEITRKLKESDSTIETEVFIHGAMCMAISGRCFLSYGLYGRSANCGDCLQPCRKEWKLSFEENEDDDVINFSDCDDESFIISQSYDDSYRTNFFSPKDMALIEHIPELIEAGIDSFKIEGRARSPDYVAAAVSVYRQAIDLYYDDPDNWQFNPEWMEELMKVFNRGYDTGFYFDTPYEISENNQSKFIKRDIGKVVNYYNKIRVAELKIWDDLALGEEIMIQGPTTGSITHVIESMQIDGKSIEKAEKGSNVAIAIDEKLRESDFVYKLVPREE

SEQ ID NO: 5900 - protein, 480 aa, Methanobrevibacter ruminantium
MKDKCGIVGIHSKDSSKDVSHLIYYGLYALQHRGQESAGIATYNINYGLNFHCGMGLVTDVFNNSLINSLSGNVGIGHVRYSTTGQSKIENSQPFFTELDDGFIAMAHNGDIVNSGSLRDELTKKGYQFKSGTDSEVVCYLIKEAYEKDKDILNVIDAVSQKLIGSYSLVILINDELYVLRDPMAMKPLILGQTNDHFVVASESVAFDVIDAEIIRDMAPGELLYFKNNEINSYILPSAKGSRRAHCMFEYVYFARPDSVIDDRSVYNTRLRIGEALFKENPIDADLVLPVPDSSIPAAIGYSRASGIPYGEGLIKNRYVGRTFIMPTQEEREIAVRLKLNPLKHELVGKRVVVIDDSIVRGTTSESLVRILKAAGAKEVHMLIGCPPVIAPCYYGVALATKDELIAANLEIEEIRKQLGADTLGYISIESLIEAIGIDGDSLCLGCITEDYPTEIPEDLEAESYYDYYQDLKDAVEEDE

SEQ ID NO: 5901 - protein, 470 aa, Methanobrevibacter ruminantium
MNNDFESDEFNSNDNNNNDFESKLVDIRIVLTDLNYIEAISKAVSNFDLSNFNVNISSIIPSSDIEIAKNTIIGADLVLIATSSDFEGKELYSNFKRALKTDYNFVEYLKLPSLDELEDYDYDYDEDNTFEDEIANSIIRAGLYSISNLSSINKSKKAYYNVKKDFDDSRLRFEKITKENDILLNESKQIREKNEKLREEVKILQKDLDNIKSDYSDLKSRFESIHSKNSLEVFSLMELWQDLFNETFTEEIYRFILISTDNFRPKNLMIGQGAICAESKEDAMDWLKIIKTAFILSDTNKQELNFNNFNSNFKFEDLDSNISSSQNLDSNISNTRYDLDSNDSNLFSSLDSNIFNAHNSDSSDEFIYNERFEGNNNSQEEFRQLDFDDAFDLNDNEGQESFNQNDLDNSYNSKDDPSDEINVFNLKSLKGFREESDEDESDENGDYSYDEDDDLDEADDLFNPFSNIWD

SEQ ID NO: 5902 - protein, 324 aa, Methanobrevibacter ruminantium
MILITGGAGYIGSHINKLLNKSGYETIVLDNLSKGHKKAVKWGSLVNADLSDSDKLREIFQNNDIEAVMHFAAFSSVAESVEEPEKYFKNNFENTANLLRIMKEFRVRKFIFSSTAALYGIPKEIPISESAELKPINPYGESKLMVENLLKDESDFGGLKYVSLRYFNAAGADLDCEIGEDHNPESHLIPLVLDAAIGRRNSISIFGDDYDTPDGTCIRDYIHVQDLADAHLKALQYLEEPFNDSNIFNLGNGNGFSVKEVIDTCKKVTGIDFEVKVEGRRPGDPDILIADSKKAEEVLKWKPEYPDLEDIVESAWNWHKKLHG

SEQ ID NO: 5903 - protein, 396 aa, Methanobrevibacter ruminantium
MIKTDVLVIGAGPAGSSAARFAAKGGVDVILMDKKSEIGAPKRCAEGVSKKTFDKLDLEMDPHWVTQEIAGVRLVAPDGTDVWLDEDVIDLPEAGYILERKVFDKHMAMEAGREGAQIKIKTQAKGLKREEDGSFTVTCESMGETFDINAKIIIGADGPESHVARWAGLKAYTKPKHMEAGVQFEMCNAKMEKSNVLEFYFGSVAPGGYFWLFPKGDDIVNAGLAIIPDMAGDKSAYEYLVDAVNNCYATKDAQPVELNVGGDPVGGLVKEMYGDNIMLCGDAASQVNPLTGGGITNGMMGGRFAGEVAAEAIKAGDCSKDFLKKYEDLVKEEMGHEMQKYTKVCDYLWTLDDDDLNSIAHAFQDMEFTKISTTELVKAVIKVQPKAALKLGKLFL

SEQ ID NO: 5904 - protein, 54 aa, Methanobrevibacter ruminantium
MIVKDWCSYCGCCAGVCARNCIEVKETALVISDDCNDCGICVKACPLAALELEE

SEQ ID NO: 5905 - protein, 201 aa, Methanobrevibacter ruminantium
MPSFLNIRGNNHDPKDPQLIRDGIKLGVNYKRFSKEPVLGKNILLRSNTVIYNDVIIGDDFKTGHNVVVRDHTTIGDDVLIGTNTVIEGGCKIGSNVSIQSNVYIPRNSIIEDNVFVGPCACFTNDRYPVRVEYDLKGPQLRKGCSVGGNTTFLSNIEVGEGAIVAAGAVVTRSVPPYYLAIGTPAKIKPLPTSLRVPNMI

SEQ ID NO: 5906 - protein, 103 aa, Methanobrevibacter ruminantium
MTKHVCPRCGSTNVEWIIPQNWSKWECRDCSYTGPIIDADDDLIAEIKADWEENKEKYIEEEYARAEQMASGEDERLDEEMEIAEEDELSDEELDKKLEELDL

SEQ ID NO: 5907 - protein, 386 aa, Methanobrevibacter ruminantium
MVYDVSALLSHINRIRREIGHEEVNIEIKEVLYNIETNEMWIITNDRPDKSAVIGKGGWVVGRLREELQINSIHVESYSDFLTKEYRMGLSLNKLKSFVTTEDLSDDVKLSLYNLIDLLTIKSDNLYSFDFKSYFDDLENGPYSYFEAEKPVAIVALSGGTDSSFSLILAKKLGFNPIAVTVDPGTIVLPNQFKYNIDKLTSKLDVKHEYIPVAYDDIIEDSLAGRFHPCGRCSKRIEETLFKYAVDNDIPMVIFGDMLSTGSQCITEQFYGENSEDSVSQDLEDSVSSDLEDSFNTELEDSINHKLIRLNLPAALAVSKLENKALTSHYELNKFKGFGCPLLYEVHKKFPHMKKYSIQRILRETRSSALEPGEALDLIWSFYKTD

SEQ ID NO: 5908 - protein, 472 aa, Methanobrevibacter ruminantium
MKIRTGRLEKEMTDEAAVYTSSLEFDRFIFDADIRCNYAHTSMLKAQGIIDSEIADKILDALDKLSEEGFDALEFDHSVEDVHMAVENYVTKLVGPEAGFMHTAKSRNDQVATDIRLLLRDRISEIQIAILEFIEGILELAKEHKETVMIGYTHLQHAQPITLAHHLMAHAQALKRDYQRLDDTYKRVNLNPLGSAAMATTSFPIDRELTTRLLGFDDYLENSMDGVSSRDHIAEAVFDLTALCTTLSKICEELVLWSTYEFGIVSMADEYSSTSSIMPQKKNPDVAEVARSKCAIVNGELMTILTILKAIPYTYNRDLQEITPHLWNACDVAYDTLKITNHMLLTVTFNTERCLELAGANFATATDLADIMVRERKIPFRTAHKIVGRIVNEAVAEGLNPSEIDGAYVDNVADELGFDKLNLDDDLIHNALNPIENVKIRNVPGGPSPEMVQLAIDNMNIFLDVEFEKQGI

SEQ ID NO: 5909 - protein, 52 aa, Methanobrevibacter ruminantium
MATKKELYTVEGDKIVRKNPFCPRCSEGVFMADHGDRYACGKCGYTEMKTKE

SEQ ID NO: 5910 - protein, 104 aa, Methanobrevibacter ruminantium
MEIEITEKKENILFDRTEVKFNCLYEGEATPKLLDVKSKLVALLDTKKELIVVDNIQPGYGEPKATGYAKVYGREASLLDVEKPSVIAKNKEPEAPAEEEDEAE

SEQ ID NO: 5911 - protein, 166 aa, Methanobrevibacter ruminantium
MFRIDENSIDEFKKPLGVLYPDFEDAIPMIKEASFLISVGDQTIKNLLDNDLYPNLGIIDNRIQRKDHNHDIIRTENILKADNPAGTITEDLWETIELAISSILEDEDTRIIEVKGEEDLAVLPCLLIAPEDAVILYGQPNEGLVFVNVFEAKDKATRLMTFFNKE

SEQ ID NO: 5912 - protein, 276 aa, Methanobrevibacter ruminantium
MGYLTDLFKEALVYPLSNIVTLIILGVLLTISKFPNVLSSFGVDVDFQLIIIFALISFVVSLFMDGYSLAVIKDAVDFNVSMPAFDIMKNFIDGVKVWVLKILYYIIPTIITIFVALLTGGVDAILNIFRFIGENQELLSNLNTPAELINAIPQEYIATFLTSLFITAIVAIILYIIFGLLYNIGLCRLAKYDSFNEGINFKAIINDIKAIGLGTYILWYIILFLIIFAISIVMGLIAAIPYIGIILLNLLFAPFIFLLVNRSLGLLYTKAEGYNG

SEQ ID NO: 5913 - protein, 60 aa, Methanobrevibacter ruminantium
MALQACTHCNLLTEKQQCPECKNPTSTNWSGLLIITDPENSDIARELGIKKAGEYALRVR

SEQ ID NO: 5914 - protein, 189 aa, Methanobrevibacter ruminantium
MTTIEGTVRIPPHRFGEPLEDVAIETLNESYNGQLDKNLGLIVGVTSIEEMGEGVLIMGDGAAYHNVIFNAIFFKPEQQEVVEGEVIDIAEFGAFVRIGPMDGLVHVSQVTDDYINYDPRNASLIAKESKKILTEGDRVRARIVTLSLKGKTVQESKIGLTMRQPNLGKFEWIEKEKAKALEKKMAKVE

SEQ ID NO: 5915 - protein, 133 aa, Methanobrevibacter ruminantium
MKSESREVFIDTNFFMIPFQFNVDIIEEFKRVLPNYKLVTTTFVIDELKGLKNNNKGKVRLAAGLGLRIAQSDEIEIRNVSLNDGESVDDALIRISKVLATNDIVLKKKAKKNGIALVFLRQKKYLAVDGYLA

SEQ ID NO: 5916 - protein, 407 aa, Methanobrevibacter ruminantium
MKVQSDVNIGLVGHVDHGKTTLTKALSGVWTDTHSEETKRGISIRLGYADIEFRKCPNCEEPLCYTTKEVCEHCGSETELIKKVSFVDAPGHETLMATMLSGAAIMDGAVLVIAANEECPQPQTKEHLMALDVIGVKDVVVVQNKVDIVPRERAIESYKEIKEFVKGTCAEDAPIIPVSAQQGANIDILIKAIDETIVTPEKDLDKPARMHVARSFDINKPGSHPDKIKGGVIGGSLTQGTLKIGDTIEIRPGINVKENKQNKWISLSSEIIGLQAGGEAVEEVGPGGLIGVATKLDPALTKADSLSGSVAGMEGTLPDVLHSFDMKTELLERVVGTKEERDVDPIKLKELLMINCGTTTTVGIVTSVKKNISVDLKLPVCADKGDRVALSRRVGARWRLIGFGIIQ

SEQ ID NO: 5917 - protein, 129 aa, Methanobrevibacter ruminantium
MAFKIVVSEKELSYQLEVEEAKQLNGLTIGEEFDGQIVGLDGYTLKITGGSDKNGFAMKRDVDGPRRIKSLLTGGVGYNPKVDGVKRRKTVRGNTISEDIVQINTIVTKAGSKSIPEILNPEEEEEAEE

SEQ ID NO: 5918 - protein, 596 aa, Methanobrevibacter ruminantium
MKIRSPIVSVLGHVDHGKTTLLDYIRGSTVADREAGGITQHIGATEIPIDTINEICGEFISKLAIKDTIPGLFFVDTPGHAAFTSLRKRGGALADLAILIVDINEGFKPQTYEAINILKMYKTPFIVVANKIDRLFGWETHEGASFMESYNKQAPRIKSDLDLKIYELMGKLHEEGFQSERFDHVTDFASQISIVPICAKSGEGVIELIALLLGLAQQYLTQQLEISEDAPAKGTVLEVKEEVGLGITVDSIIYDGVIRDGDEIALMDANNVVTTKIRSILRPLPLEEMRDSKNKFKKVDEVVAAAGIKIAAPNLDDVVSGSPLRVLSDQEDVEAELLKELEDITVDTDDEGILVKADTLGSLEAVVHLLKEMDLPIRSAEIGDISKRDVINASIAMDENEEYGVIIAFNVKVHPKAEDDLKNSGVKLFAGDVIYQITEDYEAWIEERKEAQKKQWLDAIIKPAKIMILPKLIFRQSKPAICGIEVEAGTIKTGYSLMDANGDYVGVVASMEDKGETLQAMPRGQRVAMAINDAVAGKDFEEGDSLYVDIPEKHFKVLEREFKDKLTEDEFLALDEIVEIKRKRDSDWGKLGLFEY

SEQ ID NO: 5919 - protein, 150 aa, Methanobrevibacter ruminantium
MIERSFVMMKPDAVSRRLMGQILSRFEDKGLKIVAMKLRQIDEDLAKEHHGEHKEKPFFGGLVEYITSSPALTMVIEGDDAISVIRKMVGATNPKEADIGTIRGDFGMDTGRNIIHASDAPESAAREIALFFDEEEICDYSMSDNAWIYE

SEQ ID NO: 5920 - protein, 53 aa, Methanobrevibacter ruminantium
MRTCSFCGKEIEEGTGKMYVKRDGTIYFFCSSKCEKNMIKLGRVPRKVKWVKQ

SEQ ID NO: 5921 - protein, 68 aa, Methanobrevibacter ruminantium
MEEGSPAEVIEVLHRTGMTGEIMQVKCRILEGRDKGRILTRNIMGPVREGDILMLLDTIREAKEIRTP

SEQ ID NO: 5922 - protein, 135 aa, Methanobrevibacter ruminantium
MDGKSQMKKEVNYMANIYVKFDTPEEIANKAEEALEVAQNTGKVAKGTNEVTKFIERGNAALVVIAEDVDPAEIVAHIPVLAEEKEIPYVYLATKDKVGAAAGLSVGTASACIVDAGDAADLVEEVVEKVAELKE

SEQ ID NO: 5923 - protein, 65 aa, Methanobrevibacter ruminantium
MELPIAPIGRILKNAGAERVADAAKEELAEAIEEYGNEIAQKAVNFARHAGRKTVKAEDIKLAIK

SEQ ID NO: 5924 - protein, 398 aa, Methanobrevibacter ruminantium
MIRCVSCGEEYEDDEVIYNCKKCGSVLEVEMEVDVPKSTFEGRRDNLWKYKECLPVDADKRVSLDEGGTPFCRCEKLGKELGIDLYVKVEGSNPTGSFKDRGMTIGMTKAMMLGVDTVGCASTGNTSASLAAYAARAGLRCAVFLPAGKVALGKLAQAMFHGAEVFSINGNFDEALEAMTQLAREKYLYLLNSINPFRLEGQKTIGYEIVHDLGWESPDRIVLPVGNAGNISAIWKGITEFHNAGFMDDVPMMTGIQAEGACPIANAYRDNTMDMVPVENPETIATAIRIGAPVSAVKALRAIYDSNGMAETVTDEEILAAQKLLARTEGVGVEPASAASIAGLKKLVEQGDVDKGERVVCVVTGHLLKDPNTAIDACVDPVQVDADIDKIKEILLNK

SEQ ID NO: 5925 - protein, 233 aa, Methanobrevibacter ruminantium
MEDFKYYKNKIKEEIKLAFAHNKYFLIVSALIFIIPMFVGYFYSDQITPYIQPMVDTFEENIRNGTVTLSTKSLFANNVEVAIILYALSALGAILGIVVLANNGLFIGFYGANFELTRYVLLTLPHGIFEISAIIIATTGGFVILSFVLNFLYNVIYPDYSYTDIFDPYFSDAKITVGQRFKSSFKKHGHRIKESFILLCVSVILLIIAAFIEANITIPFAYWICSLFGISLI

SEQ ID NO: 5926 - protein, 363 aa, Methanobrevibacter ruminantium
MIDPWASFSLDYDKLVNQFGIKKFEEVLDSIEDPARLMKRGVIFGHRDFDKLVPLINGGKDFAVMTGMMPSGQMHIGHKMVIDQLNWYFKKGASLSLSIADMESYAARGISFNQAKDIAINEYLKNYIALGLDLTADNVNVYLQSQNKTLNDLTFKLAKKVNFNNMHAIYGFNESTNIAHLYVPLVQVADILLPQTEEFGGPKQVVVPVGVDQDPHLRLTRDIAAKMNEEYGFLAPASTYHRFLTGLTGDKMSSSKPNTAIYLNETPKQAEKKVKSSKTGGRETLDEQKELGGRPDECVIYEMLVYHLIDDDKELDKIREECINGELMCGHCKVHTAELMKDFFEDLKVKQEESLDIAESLLD

SEQ ID NO: 5927 - protein, 171 aa, Methanobrevibacter ruminantium
MRGDLSDGIVTVKIGEGNERAISLNQKSQFGKLSEDCLELSLMEASYLMESGRLDIYEDDEKCQLDYIIDMIKDQDLYGKYLVYRDLKNRGYIIKTGFKYGSEFRLYERGTGPGKSHSDFLVKVLYEANEVNVLDFASYVRVSHGVNKKLLLAVVDDDFDVTYYNIEWTRP

SEQ ID NO: 5928 - protein, 217 aa, Methanobrevibacter ruminantium
MAREISENIEEYLETLYKFGSKDSYVSTTTLSKELGIAPGSVTQMLKKLEDIGYIDYVPYKGAFLTAEGNKIAQKITRKHRILEKFLKDVLNIKDENLHAQACAMEHSLSDEAERAICHMLEHPDTCPDDNIIPACDFNFESCEDCLNDHLDFDDIEERDFNLFSISQLSKGDEGEVLFIRGSDDALAQCVRVGITVGSKVKIEESESPNFLFYHSK

SEQ ID NO: 5929 - protein, 482 aa, Methanobrevibacter ruminantium
MSSNSLSSNELNSNQLNSNQLNSNSISNSNSNSNQKANSKDSRLILLNDKNLKVNGTEEKYFIKLVDGNGNPIPYVDLIFNIDSSIEFVGGTVRTDENGIAYIFMDFSYPGPYTVYASFEGDGNHNPSSTLSSTVSVYKDTEISSLQSYGYLGENFSFKITSCGEPVSNQKVLISIDNKNYTATTDSEGIAKVKLPNQQKTYSISCNFSNRVYYYGSSLSKNIPVYKRAFTQPNCYALLRKSTFTVTLKGADGKILSNRTLRFIVDGKEYNKTTNSKGAASINIDLERGEYRINYYFNTDGVYGPVSNYTDLNVVDPSGQYKRLLNVKSSASAKIYLTGGGYATVTSLIKSTAKSITKKYKTNFEKAVAIYNYVRDNLDYQYYYNTRKGATKTLKTKSGNCCDHANLVVALCRASGIPARYSNSKYCVFGSGLRSGHVWAQIYVGGTWYSADATSSRNTLGHIENWDTKTNKKDYNFRNLPF

SEQ ID NO: 5930 - protein, 115 aa, Methanobrevibacter ruminantium
MSRTWSFYKSFKNLIVGVNIRTKLLFLSALLILLLSISSVSADSSIDDSNLDIDSNLGIDSNLDLNADLYADLNNFDDFNNLNNYDYSNNYVDYSDILEGDSLIWKLKRIIILIN

SEQ ID NO: 5931 - protein, 1010 aa, Methanobrevibacter ruminantium
MLLAVLLMGFVLISSVSAIDIDEASSSSDLSDSSISNDYLVANSGDDSVASSSASSSIAADDSDLSNNASSSNVNFENEVLSTNNNEDTESEIVKDSKNQLSSSSLQASTKTKTTLKGSGSSVYRGNPYYVTLTDSNGKVLASQKVTFNILGKNYTRTTDSKGVASININLAKGKYNIACLYAGTENYASSKLSVALTVNLMSTKINTGGSTVKKGNAYSVTLTDGNGKALSSQKVTLNILGKNYTRTTDSKGVASIAINLAAGKKFTLTASYAGSANYLSSKVSATVTVQKGDTSIKPSGTSIVKGNSYSFTLVDGSGKGLANQKVAIKISGKSYSRTTNSNGVASIAINLAAGKKYSIVCSYAGSSNYKASSSTVSLSVTNPSTNSKTFSIAKIEAAATNLKAYVNKNKAVPTTVSVGGTNLKISEFSYLMSKAIVNLNSNNTNAITLPSGIYNGASASNSLNATVYKAQYVDLSKRVYNYIDKNKVPAAYGTVYNANGASLGNAGFNLYTFAFAKILDFHKTNKYLPNYCSFDSSVFKASNGSSSSNSSSSTNSSSSTNSSSGSSNSSGSGSSTPAVTVKATSLKAASTSVIRGDDYSVTLTDSSGNALANQKITFALSSSSYTRTTNSKGVASLTLNLAGGKYSITTSYAGTSAYKASKLTNTVTISNSSSRFFLNDIETAAENVKTYVTKNKALPNTVTVAGTQLTLSQFSYVMAKAIHNINASNSNYISLKSVASSNSTGDYLDTTVYRAQYMNLTNRVISFVESDKITPTFATVYNSNGKSVGKAEFKLYTFAFAKILAFYKTNNYLPTYCTFQSSAIGVVPDVATNVTINSKINANMNQFKVGLNEKNTVSNLSAYLVGTGQSTITTNIKNVAAQLTKGLNSTATKALAIYNFVRDDISYSYYSDSRKGADGTLSSGSGNCVDQASLVVALCRAAGIPARYSHAQGCTFSSGLVTGHVWAQILVDGVWYSADATSVRNSLGNIVNWNTNSYHSMKQYAAVPF

SEQ ID NO: 5932 - protein, 1298 aa, Methanobrevibacter ruminantium
MEDNLLKNRKLILISIFLVSLLAISAVSANEDVDNGLIDSDDSILQSAEVSDSAIGSDSILQSAEVSDSTIESDSIELEDKGNVLKSSDNASFELDDKNNIGSADSELEDDYLEPKEKNVLSMDENAWFYNYIVWYDGDDGDWVSLDFVDDLKNPENITIRLNSYDTPFDGVDLAVINDYDYSITKLTTDDNGTVVYNVPYEVDELSVFVGFWYDGDFVATYGNWESYTICAVNWGTWYRDPSKRTYDFYVSVSDMDTYESPIGAQVVFTSDSNQYVGTIDENERAIIPKVSYGTYDVKVIYDGYCILNLSDSSAIEFYDDHHTDPDSLGDERIDYMYVDSSGVVYLDLCYDGSLKVPDNSTYEPYGDDNPSGGGSGNQSGGTVANGTFTSLQSLFNRAAANSTISLTRDYVYDDGFDIKGIVINKDLTINGNAHTLDALGKSRIFYVNNSTVKFNNILFANGNATLGGAIYNGSAVNCLFINNTAQDGGAIYYGSALVCDFINNSASRNGGAIYSGGAVNCSFINNSANLGGAAIYDSLFAVNSTFVGNTLASSNPTGGSATTDVSVVSFNPITTYIPSPPSMTGSIGWGGAVLDFTRPVIYTDYNETFYLLTNFTLQQDGFNNYGNVQLTGRDLVFKSLYPYSGNYSMALIISGQIFTPTYVLGENDTYEAHFKLNGLSLGLHMVYAYVDFGYPEYYSYRIGGGYMDRVAYDRTAEIIFPILINKTVEISSSNLNKYYGGTGKYTVTLTDGGNPIANANLNVSLAGKTYPLKTNANGQASMDINLTPGTYEAVCTYDGVSQRSNIIVRSTINLQNLTGIYQNAKVNATFLNAAGSPLANTKVSFRVGSKTYSATTNANGLATANVDLAAGTYDVIAINPVNNEQKTSKLTISKAKSSISLSSTSNNDKVTLTASLSPSTASGNVTFNLNNKNYTAKISSGKASQTITGLNEGNYTANAYYSGDSNLNSSSASTKVVVKIVIPTKIIYKNMTTGPVAKSDGRIGNYFCVKLVDGSNNALTGLPIKIGFNGKIYDRTTDSNGEARLQINLANADIYTFAICYLGDDDHQASFEVAKIDVNKKYPKPNSANGNSNGVPAQETISNTKLKTYIQYSNMTTKSVLKSDGRVGDYFEVKLLDNNKKAMANVPIKIGFNGKIYDRTTDSNGGAKLQINLLKPTTYTFAIAYLGDSKYQASFEVAKIVVKAQSPKLTAPKKTFKANAKTKSVSATLISERGKPMASQSLKFTINGKTYTAKTNSNGVATVNISLNKKGTYSCTVKFAGVTGANAKTTKTTIKIS

SEQ ID NO: 5933 - protein, 549 aa, Methanobrevibacter ruminantium
MAQINQPMYILRDDTERFQGRQALRMNIFASQLLASIVRTTLGPKGMDKMLVDKMGDVVVTNDGATILQEMDIAHPAAKMLVEIARKQENVVGDGTTTVVIIAGELLKKAQELMEDGTPVPTILMGYRLAVAKAMEILFDISFDARDKDTLFGIAKTAMTGKGSDYAKDELAELLVQAVKKVEEGEEVDKTLIKIHRINGGSVEDSKIVDGIFIDQGRANETMPKEIHDAKIALMKYPLELKDLENAKVDFTDPLQMQIFLDNEQEMLKEIADKIIDSGCNVLFCQKGIDDVVQHYLSKEGIMAFKRVKNTDVKRIMKATGAELITNIEDLTPDVLGKADYIHQERVFDQILTFIEGCDEPKASSILIRGSTRHISSEIERAMEDALGVVAATIEEGKVVSGGGSPEIEIARQLRLYANSIGGREQLAIIAFADALEIVPRTLSENAGLNTIDLLVELRAAHEDNPYMGLDVFEGKVVDMKEAGVIEPQKVKKQAIQSAQEACEMILRIDDLVAAAGALQKPDPDENLDNSGMPPAPGMGGMGGMPPMM

SEQ ID NO: 5934 - protein, 259 aa, Methanobrevibacter ruminantium
MNLEGVEKTMLLTLYTKAKHSQKPNHKFFDYMAIDIISEIDYDFSIADKDRSMQMGVISRTIVLDDMVSEYIRSHPKCTIVNIASGMDTRFNRLDNGIIKWYNVDLENSANFRLNYIKDTERVKTLAYSAMDPSWAEEIEASGDVLFIIEGLTMYLTEVENKQILDIIDENFKSCTIFTEIMPPVSVENVKEKSVEEMDAKFIWGVQDGFELRRLNPRFNWVKDVNLFDGMNVYKPITKLFTWIPFIRRRMDFIAVLEK

SEQ ID NO: 5935 - protein, 145 aa, Methanobrevibacter ruminantium
MNRNKIIVLLVLLIAVVGFTMGPACAASTTIKVGNYKDVGKGDRISTFNVPKDAQYLKGVYAVIFYHGKNGDDFRPHTYVLSKIKVYYKNKKGKIVTRSSTAKNLSGLSILSTKQVSGYTPYKMDVSYRKMTNAEKKKICGSLVY

SEQ ID NO: 5936 - protein, 324 aa, Methanobrevibacter ruminantium
MMRKNDRSSINPFTGKEHYDTVDDDKFLEGCFQGYYQELQRSQLLDNTPEGQFIVQVAVKLINTVNEFLTKIGRQDYVEGYYEWDVHLVANNSVNACCMPGGKIIVYSGIFSIANTEERMAFILAHEMAHALLDHGRTRASAQSTKNTAASVAWVGSFALDMVGLGGLGSLARAATNIASVGSQYFLLQPWGRDHEFEADKLGMIICHLAGYDIREVPKFWKEFAGDKASNFDFFSTHPSDAKRIEVMEASEIEILNTTDFYSKPVLPETPKATGERKNTNAKPQEPQAKAVADNKSTHFCTNCGSEVAPDDNFCTNCGAKIGK

SEQ ID NO: 5937 - protein, 66 aa, Methanobrevibacter ruminantium
MIEEHNQKSVEELVENFSYVYVYFADGRSIRISKEKKFEFKDNKFYIYDKDIEVNIVDIELIEFTD

SEQ ID NO: 5938 - protein, 285 aa, Methanobrevibacter ruminantium
MKKSVFKILIALALILLAVSIVSSNDLSDSNVSSDLTVDSDSISSDDTGSSDTSSDDSNQDDVSQDKTNDKKLSDSQSDSSKDTQDTDDNNTDNGSDKCNLIITKKGNEKVKVGDTVEWTIEVKNSLNTAENISVDEFLPQNFEFKSAKASKGNYAVEIANWDIGNLKENESATLVIKAQALKAGNFTNVANLTTDSDNINGKVLSAKADVEVLSENKKNETPVGPKKNKDNNSTVKKIHKLIKNQTNNTNMTPIDFKKSGNSLFAVIIAALAVLGIFLGRRRIN

SEQ ID NO: 5939 - protein, 406 aa, Methanobrevibacter ruminantium
MKADAYKIVDNVYWVGVLDWDIRDYHGYTLDGTTYNCYLVFGEDKVALIDNVYPGKSEQFWGRIKDAFEKEGREFKIDVVVQNHIENDHSGSLGEVVAKFPDVEVYCSKKAEPGLKNHLPELEDFEFNTVKTGDTLDIGGKTFQFVNAPMLHWPDSMFTMLMEDGILFSNDAFGQHICVSERLDTDVDPVILTDAARKYYANLITLASPMVGRKIDELAELGIVDNLKMIAPCHGQIFTNPEFIIDLYQKWSTGSYEGNKITFIYDTMHHSTQRMAHAMAEGVMSEGVKVKMYFMHDDDKSDAVTDVLDSKAIFVGAPTMMNNPFPGIGDVMYYLNCLSFGNIEKKKAVVFGSKGWAGGSARILAANLEGAGFEVVEQMEIDFKPNEEILEECYELGKKVAQLIKE

SEQ ID NO: 5940 - protein, 280 aa, Methanobrevibacter ruminantium
MSLKYFNNLTYEEIGEYNDKIVLFLHPKLLSHWIWKKQIEEYDKYFNNYHCIFIDLPHHGESKFDGKFSIEESSDILIEFIKHLLNNKKSESINIVAIGLGASIAIEILNKETHLINHIILSGLEIAQIREKEEETIIKRLAKTKAEYLNMKPDQFIIKAYLRYYGIRKEYYDDLEKSLDIPIRKEEEIAYKSLNYIIPDFSKETIEKDNILLVYGNKDNFNSTKSAIKLKKLFFNAKLIEIEKGNHLWNIIDYELFNQVIINFIQKEIIFNDERIKEID

SEQ ID NO: 5941 - protein, 304 aa, Methanobrevibacter ruminantium
MKIGVIGYGNMGSMIANNILELNLLLADEELIVSNRHIEKIEELIERYPDGKVQITDDNTELAKSCEKIIISVTTPNFKEVLDEITPFINEKTHIIYTCAGLDFEHISSFYDGKLSLVIPSLASTVTSNNAISSIGRRKGITLIKHNEKVDIQDSYFLEDLFNEFSYVRTLKDHNFFFEENGNLASNNPKLEICTILTSCSPAFIALMIDNFAERISNISDLSKDEAEDMILKTVIGTAILKEDKKISNSEIIEKVATEGGITAEGIDLLDKRLNSIYKKLINTLLNRYEEVSKEMDELYLKDN

SEQ ID NO: 5942 - protein, 646 aa, Methanobrevibacter ruminantium
MAKRNFSESLGKIVTLLKKDFTDVFTKNPVVPIVLLAIIILPSLYALINIQACWDPYDNTGNIEIAVANLDNGTTFEGESLNVGNEIEDELKGNDDFYWVFVNETELREGVKNGTYYSGIIIPKNFSKSIKSITTDDPHSAELEYIVNRKSNPMASKLSDSAAKAVYNKINAKIVQFINVVAYSKLGELQSALSQGAGQMSSGAVQLSSGSAQVNSGASQVKSGSNQVKSAANQVQSGGAEVQSGSEEIKSHASEVKSGANQVSQGSSQIQSSSQQIQAGSSQVQSSAKQLDSSVDVDKLPSDDLKHVVNSSKQLANASSNLAGSSSQLANGSVQLANGSVQLADGSVQLADGSVRLADGSVRLANGSVQLADGSVQLAEGSLSLAAGSQLLANSAAYALFAASSSLSGAASSLSSITGVDENQIGSYIYSPVTLNEIELNPVDNYGSEVAPFYLVLSMWVGALITCVMLRTGQSTGTEYSPSEMYFGKLLIFMVMAVLETTVTLIGASILGIEMSNPVLFVLSAYFIALVFMLICYSLTSALGQLGKGIAVIWLVFQISGTGGIYPIQLMGPILQAVSPYMPMTHGITLLREAALGLVWSNYIHSFLILIAMGLITLILALIIKVFADKRAHWFEEKLNETDLFH

SEQ ID NO: 5943 - protein, 112 aa, Methanobrevibacter ruminantium
MNPKQLKKMERQMKKMGMDMKSIDDVEEVIIRCADKEIIITNADVSAMNVMGQETYQVTGTAVEVEREVELVIPDEDIEMVASTAGVSVEAAEEALRECGGDLAEAIMKLSN

SEQ ID NO: 5944 - protein, 666 aa, Methanobrevibacter ruminantium
MFEIKAKDMRGRVGVLKTNHGEIKTPNLMPVIHPRKQTVDVKEYGADIVITNAYLIYKDEELSKKALDVGLHELINFDGPIMTDSGSFQLSVYGDVDITNKEVIEFQEAIGTDIGTSLDIPTGPYVDREKAEEDLEITIERAKEAISYVKDNDYEMKINSVVQGSTYPDLREYCATELTKLDADLYPIGAVVPLMEMYHYRDLVDAVMHSVKCLPDSKARHLMGAGHPMIFALCVAMGCDLFDSAAYILYAEADRLLTTRGTVKLENLNEMPCSCEVCCKYTPDDLRAMDKEERVQLIAQHNLHVSFAELRLIRQAIYEGSLMELVEERCRAHPMLLDGLRHLGEYSFDLEKYDPRSKKSAFFYTGPESLKRAEVTRHLNKLNEMDKRKNLVVLPTYTKPYTKHLTNSFNELFVYAKDESLSEDAECKIENGETDFMVLDTPFCLIPLELDEVYPLSQSDAPRIRDKMAIEFARDFLIDFAEDYDNVLIHPNVLEELELDYIEEYNYPEEIKFEKDDIKKLKAIADYQFGNGAGDALFTGKIKIEKSKKTGKIRHVYDKNQIIVNMRASDSFLILSKLGAKRLAAIEGMRNKVMIDNSVESFARDGKSVFAKFIKDCDENIRSNDEVLIVNEQGELLAFGKALLNYSEMLDFNTGQAIKTRKGFKD

SEQ ID NO: 5945 - protein, 617 aa, Methanobrevibacter ruminantium
MKINSFRVLLFIIIISLSFIGFSTISAVDLSDSCCDTLISDGSDGIILGGSDDISLSDENNNLNFDLNDNPDFNLDYDSNSYPNLNLSSNSNSKSSSNTYGNDFTLSRFKSVLTSSYNLNGGSFEDIQSAINHAADGDDIILNGTFTTTGSVIVINKTLTIIGSPNAVLDAKNISKIFLVEADGVNLKNLTFINGKSRNESDNGPYQGTVNWQGSNGTIVNCSFINNSGDEKSYGASILWKGSYGKISDSIFKNSYSGANGGAIFALGENLTINNSEFINNHGKEGGAIYFGGSSAMWIINSIFINNSADSGGALAACAMNRQVINSKFIGNSANNGGSISWCGSNGLISNSTFINNSADQKGGSILFTGTNNLVKGSVFINSSANIGGAINSLNRLNYINDLRFENNNASLGEDCYGDLEFKRFSTSIASEDMVTSAIDANLDGRNGEYFNVSLKDEYGNPLINKDIKIGFNGRIYNRTTDSNGQASLQINLKYSMVYTFAICFLGNDDFYGSFTVSKITVKTQKPNLEVNNFKYKSSTKSKVIKATLKSSRNNPIQGKTISFTVNNKVYTAKTDSKGIASVNVSLSSKKTYAFTVKYAGDDTYSSVSKSANILVY

SEQ ID NO: 5946 - protein, 407 aa, Methanobrevibacter ruminantium
MTYIEEATVIDDTIYDLINEAFENERKYNDPVYRNSIFKGHKEYFVKTDDGSYSIKSKEINNKVETLHTSTGAISESFEKFIKPLKLDYSQDIAILDICAGLGYNTSAAIDDFMKNSTEDANLQIDLLEISKPTLAAGLMVPSPIKAHDITKKAIEDALIAEDYASLSLEEESIPDNINLNIFIDDARKVIQKLEDNVYDAIFLDPFSQNMAPELVSVDFFREFRRVIKDNGIVCTYTSSAPVRMAFIEADFYVSLGPIFGRFQGGTLASPSPKNLTKSLPKNDEIKMALSDVGIPFRDPNLNLSSKEILDNRTEERHNARHNTKISSAVKTPIFLAQEMDDEPLKRRVERNLRKMNIPGVLSEEAFYLVGPEENYSEDYAEDNNSRTRVIEMAKRLDEIKNNKVIF

SEQ ID NO: 5947 - protein, 157 aa, Methanobrevibacter ruminantium
MDVKIKEKLDNLFNYISNALSSIYSRKDEKDYHDFISSINGRLICMADILDESEEFEREYYTFLKIKKMIYYVLENIESINREDCLRVFDSFSKFNLLILLKFNYLDGGISQEEYQTKFDDFTLYLREFREYFYLNVYEKDGRFDALINEVSYIFVN

SEQ ID NO: 5948 - protein, 125 aa, Methanobrevibacter ruminantium
MDKKINLINFFWEEILFGLFKEKSEFLSCFVKCSNEVPSKFEINKDYLLNKLQLYNCGLNNFRKYCDLWHSLENLGIHEEDRKIILDAHDFAKDQFTIFVTVDEEFYNAVKSFSKLNIDKYKLLN

SEQ ID NO: 5949 - protein, 96 aa, Methanobrevibacter ruminantium
MDFIDTNIAIAYTFFPDKYFKTVDDFIVNSTEFYCSNNVCEEYKRKYKSIFTSFEYFFDEIILALENNNRIFLNKCSFEQFVLSQTSDIIWIWIKK

SEQ ID NO: 5950 - protein, 173 aa, Methanobrevibacter ruminantium
MYNINEKITLPRIEIKMDVKIKEILKNFLNNISNTLTSLNNKNDEEKSLELISSMKEYLLDFAMFLKELKEFQKEFSFFLVIRRMLNYVLDNYGSLCSSKRSVIFDSLFKFFELLRIKLSFLEGIYSKSSYLSYFNKFDTYLDEVKTEYYLNIYQRTGEFDDVIPRISQIILD

SEQ ID NO: 5951 - protein, 677 aa, Methanobrevibacter ruminantium
MGLFDNIKKIRNKESANSSSAILASTYNKINRRFGVGTDASSYIAKNMHKFYITSSKFSKGVQIKNLLRKLDITIHPEGFIYFLDEFRNLDYHGQIINSPIDYSLILDYSIYDLNEFYFNPKEGPGFRNQSSDYNREMLAILDGIELLIYEINKALAKSSRDDKSKYIRIFEDIIDKKASHFEEALQRILFLNQLLYQTGHSLNSLGRLDRILEDYYYNDLNDGYITNKEALELIKDFLKALDSYSWYKTDDESGLASQLITLGGKYIDEFGEYYFYNDLTYIFLEAIGQVNPKDVKIALRLSYKTPDDLIHLALDCLNENTIYIEEGVAVSFIIDNRIFTADGATIEANIDSNIVFSNDEAIIPRLLDFGYSSDDAYNYILSAHLEPTFISCLDEGNLSSISLLKPLNDIFEDKNELRFIINLDYLMELYKNNLKKEIEEKISALDQIQWNQDPFLSLFSAESYENQLDISQGGSRNNHFGIRFYGLQNTVNSLYNLKKIVFEDKTIDLIELDKMRKNNFKRGKYQETFLLLKNNPVRFPQNNPEIANISNEIIAFIGDSIKDYKNSLDGKLKFGLSAPRYMIKNDKRASFDATLKDIPPARLLISSQKTNSDIFIFNSSLDYKSSAINGNLIELNINTNDKQLTNILVEAIGYGFDQLQINLIREEIITKEDTEE

SEQ ID NO: 5952 - protein, 211 aa, Methanobrevibacter ruminantium
MNSDKKITKESSILDIGCGNGNFLSQLKRGGYKNLTGIDLFIEEENILEGINLIQTSLEDYKPSEKFDLIVSNHAFEHMDNQLANLKCFENLIKDDGLILLRIPIKSEPIWKRYGVNWFQIDAPRHFFLHTLKSFEILCDKTDLKILDVIFDSGYAQFVFSENYQNDIAWGEDGWTDFRSNKKLIKKYKKETNFLNSQGQGDQCMFVLKKI

SEQ ID NO: 5953 - protein, 108 aa, Methanobrevibacter ruminantium
MRILNGENMKCPICENEENNLTFIIKEMQIGLREEFEYIECSNCGCLFIKEIPKDIDKYYDTDYAPHLKPKSFNEIIFDKGSAIILSNSILSNLIPKEFVPPPFKINK

SEQ ID NO: 5954 - protein, 66 aa, Methanobrevibacter ruminantium
MTVSFLFVNGAASVLLNAIDKEKAVTKIYIMAVIFNVCLNLVLIPMFSYDGEAISTVLSVKYLLSF

SEQ ID NO: 5955 - protein, 37 aa, Methanobrevibacter ruminantium
MIIIPLSIGIFFYARLIIDFIYSNQYSLASTLIQIIV

SEQ ID NO: 5956 - protein, 475 aa, Methanobrevibacter ruminantium
MNQIKSIFKNTGWLSVSQVITSICAFLWTIIIARYLGVSDYGIVSFAVSFTGLMGIVMDLGISTYITREIAKHKDLVRKYFNNIFLFKLILAIILFILSGLILYVMGYSHLTIIVTLVFTIELIFMSMTTFLNGVFQAFEKVKYQAIGAILNSSFLLIGILITLGFDLGVISIAFAYTVAYSIYFSYMFLSYVKTFSRPHLELDTNFIREVIIKSIPFGLTNFFYSIYFSIDIVMLSYLAGDYATGLYKSAYNIINVFTTFFVVYQSVIFPVMSKFFKESQNLIKVSYELSVKYLLLIIIPISIGIFFYARPVVDLIYSNQYSLASTPVQILIWTVSFLFVNGAAAVLLNAIDKEKTVTKIYIIAAIFNVCLNLILIPRFSYDGAAIATVLSEILITIITLYHIFKTDYKPDLGLLKNVIKLIVCGIILFVALYYLNLSLWFAIPVGFIVYLISLFITKSIDDNDRYVIRELINR

SEQ ID NO: 5957 - protein, 258 aa, Methanobrevibacter ruminantium
MLMSIICVYNDEEVLEKYLLESLKTQNEEYELILIDNRNHEFNSAASALNYGGKKAKGEILLFVHQDVEFYENNLKDIKYYFENCQNLGIAGVQGVSEENYGRITTNIVSGIPKSTVSDYSITDITETQTLDELLLIIPKEVFGKYQFDEETCYDWHLYGADYCLNIKQKGYSVVLFPITLYHVSEGGSMSLEYFKTLKKVLNKYKYDYNRIYTNCLLSHEPNNQLKLDILYYSEILHIRNPITNFLSNFNFLKKILK

SEQ ID NO: 5958 - protein, 333 aa, Methanobrevibacter ruminantium
MQTVGMILCGGFGKRLRPVTEKVPKPLVEIKEDYAILDKQLFDFKNAGINEVYLLAGFLHEKIQERYGDEYKGIKINYVIEDEPLGTLNAIRLGMEALGEDKQVVIRNGDIVADINLKKMIEYGERSDYFVTMFVTKMTSPYGIVDISGDKITAFKEKPLLDYYINGGIYFTKGLLDFGEFKTGDIEKTLFPVLAKENKLGYYREDDLFWMAIDTSKELESVQKEYENKTDKPWGYEKVLIYTDKYLTKELYLKEGFQTSFHYHNDKDETMYIMSGAGYIEFEDRKEYFGKNDSIRIKPGVVHSIIATENTTLHEVSTPFLDDTIRVKDYYTR

SEQ ID NO: 5959 - protein, 335 aa, Methanobrevibacter ruminantium
MSEKKKIKVKFVDFQDSLKENDNFFIDSLKKNFDVEVSDDPDYLFFGAYGYKHLDYDCIRIMWTIENYVPDFNICDYALAYDIIEFGDRYLRFPFFLNRPEIENVRKTIERKPIDTSVKTDFCSFVVSNEWGDDYRIRLFHELSKYKKVDSGGRSLNNIGGPIGMGLDKKFEFDVTHKFSFALENAQNRGYTTEKIFDAFAAGCIPIYWGDPNIEEEFNPKSFINCNDLTVEEAVEKIKEVDQNDELYHAMLNEPTFLGDLDKYLQDFDDFLFNICNQPLEKAYRRDRIMKGKTQEHQYKLINRFYYKPYFFLIKVAQKLHIEFIGRKIYHFIRD

SEQ ID NO: 5960 - protein, 266 aa, Methanobrevibacter ruminantium
MSSQNIQIYVVSHSEEDIKNIDSNDIYTPLFVGRAGKDNLGFVSDDTGDNISNKNSSYCELTGLYWMWKNSPADIIGLVHYRRYFANWRLGKRLEREDIEKIFSEYDIILPKKTTALLGSVYEDYDHWNYAKDLDLCEEVIGEQCPEYLDSYKRVVEGKDLYYYNMFIAPKEVIAPYCDWVFPILAEVEKRVDMTGYDDYQKRIYGFLTERLFDVWMDKQNLRVKECELKVNGLRLNVHMWIVKRKIVRWAYVHIYMGLLHKDMRR

SEQ ID NO: 5961 - protein, 365 aa, Methanobrevibacter ruminantium
MKYDYLIVGSGLFGSVFAYEMNRRGKSCLVIEKRSHIGGNVYTEEKHNINVHKYGAHIFHTNNKEVWNYINQFAEFNRYTNSPVANYKGELYNLPFNMNTFYQMWGVKTPEEAKAKIKQQKAEANIDEPQNLEEQAISLIGRDIYEKLVKGYTEKQWGRDCTDLPSFIIKRLPVRFTFDNNYFNDLYQGIPMGGYTKIIEKMLDGIDVELNTDFLEDKDKWMAMADRVLFTGMIDEYYDYCFGELEYRGLDFEFETLDMENYQGNAVINYTDRETPYTRIIEHKHFENAVSDKTVITREYPKAWEKGQEAYYPMNDERNTELFNRYNDLADKEGNVIFGGRLGMYRYFDMWQVIDEALKLVKSLE

SEQ ID NO: 5962 - protein, 60 aa, Methanobrevibacter ruminantium
MEIQYLLNQALENENIREIEIVVKILKEFEKITQIKFELLHKELMEKPKKGLKQSKFSII

SEQ ID NO: 5963 - protein, 51 aa, Methanobrevibacter ruminantium
MNQNSKKEFEKRYEEFSNFFFKCEIEYHTLKGKTKHLMAKKYLSLFDMEYL

SEQ ID NO: 5964 - protein, 193 aa, Methanobrevibacter ruminantium
MYMNTPSQKNIDIKNYERIFKEKINFVVEKISRFFKGTSQEDSFLNEKLLDLSDPFIKSRIKEIKETTESIAEYLKIEYINYDEYYDFREIQSMMNQTLDYGSIEELKIILKIFNEFKNLTEFKFELLSNKSHSKSISFKDIDEESKEIFEKRYGEFSKFFFNRKREYYAIFEGECEEDVSEFFELMKKHALK

SEQ ID NO: 5965 - protein, 227 aa, Methanobrevibacter ruminantium
MKLFIDSNVIIGYCIEIDYWHYYAENLMKNENIYWSTTVKGESEYKLEKLIKTYSNFFNQIKEDLDKEIISKTEFIKLVKSIEYINNKKVPFEQENLANLVWTKGGWLDDVNSIELNENLNLISQGLKKKMYRNYNYCDEMLNLYERQFKAEYIQLVKRLEELKRGNREIHSPDSEILVDCHDLSLSQNLDMGFITSDGDIVYFKKEIKKMTNIKDIIYLKNVHRYT

SEQ ID NO: 5966 - protein, 275 aa, Methanobrevibacter ruminantium
MTISPKRILYLDEVRSLAIMLVVIGHLARLFSYNYNSWLFCSGVFSLTRIGVPLFFTVSGSLLLTRKYEVKKFLEKRFKRVCLPFFSWIIIYIVAGVLIWHYDLTFEYVVNTAFGVGDYSALFWFIWSLIGVYLLIPVISSFIREEGNWGAEYLILITIILSLLYTFGFFDYPQMKYNFRVIFNFFPVLGYFIMGSYIHNKKFKYSDKKMFAIGCVLFIVGICGHFAKIYLKGLGGLSLAPIDFFDICVIMETIGLFIAFKYASTKWDKRKDARN

SEQ ID NO: 5967 - protein, 85 aa, Methanobrevibacter ruminantium
MQEIEFRETKLGEVIVLFASCSFGIYFSHYILMRYIMYNGFLAPIRKTHALFWLPVSSIIIIGLSWLLIYVMSKIPYVRIASGVK

SEQ ID NO: 5968 - protein, 594 aa, Methanobrevibacter ruminantium
MCGIVGCVLKEGKVAPILFDSISKLEYRGYDSIGIACADEDKINLKKDSGKIAEVDAKLDLCDLEGKYGIAHVRWATHGDPSKINSHPHLNGDGTIAVVHNGIIENYLSIKEELEGEGYQFVSDTDTEVIPHLIDKYMKTGLDLTQSVRKVIGVIEGAYALAAISSAEPNRIVATRKDSPLIVGIGDSEFFVASDYPAILKYTNNIAFLEKGEIVILDEDGVKFLDENDQEMTKEIEVIEWSPEMAEKGGYDHFMIKEINEQSTAIKNTLNEKDKVKEIVDEVKGTINRVVFVACGTSYHASLTGKYLIESLVGIPTEVLLASEFKYSAKALNDKTLVIFISQSGETADTLKALDVANETSKTLAIVNVRGSSATRRADYVIQTQAGPEIGVAATKTYVSQLVAIYLFSALLGEDHELLKRLEKVPDYIEEVLQKRDEIKEISKKYKRDKDAFFIGRGFSYPIALEGALKLKEISYIHAEGYAAGELKHGPIALIDRNIPVVVVIPPGQDHKKIMSNLQEVKARGADVLGIGAVGDEDLISESDDTFLINCDVDDIIAPLVYIVPLQLLSYHVSVIRELDPDKPKNLAKCVTVE

SEQ ID NO: 5969 - protein, 235 aa, Methanobrevibacter ruminantium
MENAPNKEDIKKIAGDDLSKAELKKRIIELYDSGQTMMDIADSVNRSKIYVSNVIHGFYDEDEIKVRQYDKLRGKAKLDFSRYRSSTGIYRVSYVENKRSGNDYWSYQYYDDGRLKRIVSVNLYKLKTVVTEKGLDWFEFTEEAKEMVLKDKENFDESSLKRTNKTGFYRVTKRKTNTKQGYTWAYSFKENNHLYFVSSISISKLKEKVLSNGWEWEELTEEATRLVEEDSKKRI

SEQ ID NO: 5970 - protein, 249 aa, Methanobrevibacter ruminantium
MIEMDSKKLLYEGKAKSVFQGENADEVIIDFRDDMTAGDGARKESMGKKGYFNSIICAKIFETLEEAGVETQLIELTEPCVMKARKLDMIPIEVIVRNIATGSIIRKFPFEDKSPFNPPLIQMDFKADEFHDPMLNDAIAIALGIASQEDLDKLRELALKVNEVMSKMFKEIGIILVDFKIEFGKDSQGNIILGDEISPDSCRLWDAETLDMLDKELFRQGKDDEVIDAYEEVFNRLLTEEDKAKWNIK

SEQ ID NO: 5971 - protein, 90 aa, Methanobrevibacter ruminantium
MMYDIEVKVSLKAGMLNPEATTIQRSLSLLGYEVKGTKTKEIISFVMEAESEDDARAKVDDMCQKLLCNPIIHNYTIKIIKMDFTCASCE

SEQ ID NO: 5972 - protein, 217 aa, Methanobrevibacter ruminantium
MAIGIIRFPGTNCDRDVYKAIDLAGGEAEYIWWNNEDLTDYDGIVIPGGFSYGDYLRAGAIASNTPVVEGVKALVKEEKPVLGICNGAQILGEIGLVPGLFITNEVPKFNCEWSRLKVANNKTPFTKNFDLGQIIDIPIAHAEGRFYTKDIDLLKDQDQIVLQFAEENPNGSMEAITGVSDESGLVVAMMPHPERATTKLLGSDDGLEFFKGMLDSI

SEQ ID NO: 5973 - protein, 237 aa, Methanobrevibacter ruminantium
MPVYLIGAGPGDPDLITLKAVKALNKADVVLYDYLANDEILKHAPDTAKRIYVGKKAGEHYKTQDEINQLIIEEAKENENVVRLKGGDPFVFGRGGEELLALAEEGIDFEVIPGVTSAIGAPTSMAFPITHRAVATSFTVVTGHEDPTKENKQVKWDYTADTLIILMGIGNIKENTAEIMKYRDPDTPACAIESGTLPNERVVFGTLATIADKEINTPAILVIGKVIDVFKQIKGIE

SEQ ID NO: 5974 - protein, 239 aa, Methanobrevibacter ruminantium
MEIGEIITDSLKYPINNIKALIIYIVLGIVAGLVLVLTGVGVGAGAIANSAAATGIVGIIGIIIFFLIYLLILGYELDVINFGIERRDDAPEIDFARQITNGIKWYITCFIYMLIPTIIMIILSYLNQTLGLIVGIILFIIAAFALLMAQCRLAHTDSLGEALNIPEAIKDITKVGIIKIIAVFLILVILGLVVSFILGLFSVLGDVGTYIGAILSGIFTIYLAFVVFRASGLLYSDAV

SEQ ID NO: 5975 - protein, 503 aa, Methanobrevibacter ruminantium
MKILFLNLPYEFNISRASRWPEKTKSGTLYYPYWLAYCVGVCEREGYDCKLVDCITKAYTTEDTVEEVKNYQPDYIMAEITTPTCAYDYTVINAIKEAYPKAKILIGGTHATILPDAVLKECLGIDYLLRQEYDYTVGELISSDDVASVKGVSYRVNSDGVDIASLGINLLTEPVDFEVRHTEDREPLEDLDSLPYVSKVYQKYLNFDDYAYAFAQKPMIQIVSSRGCPNQCNFCSYPSTMGGRIYRTRSVTDLADEFEYILKELPEIKEIFIEDDTFTVNQPRVIEFCDEIIKRGLKPIWSCNTRVDLTYETMKKMKDAGCRLLVCGYESGNQDVLNETKKGITLEQSRAFAENARKLDIKVFGCFMIGLTGDSLETIDETYKFAQSVYPDMCFFQQAVPFPGTGFYDWAKENGYLITEDYSKWLNEDRYLNCLVDYPYADHKEIEKLRDSLMSKYYFSFAYIVKTFLANLDWVEFKRVMRGGTQYITFRLKKALNKSDNLD

SEQ ID NO: 5976 - protein, 258 aa, Methanobrevibacter ruminantium
MKKKIAITRPQERSKAAKEFIENYGSEAIIVPTLELKLENTESLKNLMEKSNELDWLIFTSVSSIESIFEFYPDFLDKLNPECKIATIGTKTAELGIKKGLPIDIIPKDYTAEGLLEEFERIDLNNKNVGVPRTFSARTILPEGLKNMGANVILAESYKSVIPEDTSKIEKLIQCILDEKIDGITFTSPLTVSNLFEIAKDEDKDNLVEKLSTTTLTVAIGPITGNILNQLGVNHIYPKRYTVKDMIDLMFRELNNRE

SEQ ID NO: 5977 - protein, 301 aa, Methanobrevibacter ruminantium
MNGEYLMFIDSDDTYPKDACEILLNKIEEYGCDIAFGRYLRHYPEENFIRKSYTPYIDTLDEPYLSYLDDLVKGSNFKGIVGSLWKNIFSKFFYGSSIDMNKFNSKESDNSHPKELDKNYKNNKEIFIRNIKDENKEEIAILKILPSFWTKIYRSELISKNNINFPECVSAEDLNFLLEAYFKSENGILFLNDKIVYNYFMRLEVVDKSVTKNINFRLVYDSIKAYRLSSELCDNFNIKNKDLFLNPYLLNWISLWLSRKNTKEENKIFLEEFDKLDKTKKYGLKYKLILKTTKLLLKIKS

SEQ ID NO: 5978 - protein, 107 aa, Methanobrevibacter ruminantium
MKEVMIWPIYLDADKSLNEGRKISQEYAISEPRIKEIEKAAQKLKYKYTVEEDKSYPGEWYNKSGRIIIETDDSKKEILMNLSNSIKDIREARKNYKPTKKGKKGKK

SEQ ID NO: 5979 - protein, 480 aa, Methanobrevibacter ruminantium
MIETLPPDMKQKYEEAKELIESSEDIKIYSHTDCDGISSGAILSTILKRIGKDYEIEIVNLDVLEDLEIEHELTIFSDLGSGQPVDKHAKKDSKILILDHHPPLREMDYPDSVEYTYLEINPMFHDIDGSQEICGGGLCYLLAKEFGYRDLSWIGVLAAIGDMQNTKTGKLQGMNKTILQDAKEEGLVSSDTDLSLYGRQTRPLFVALSYFSDVKLPITNNKNETIALLQRLGIPRRIKDESVPSGERATTLSDLNDAQKRALTSELIRMISNEIPPRYSIYVPKLVIADTYEFLAEEDGTFLRDASEFSTAMNACVRNNEEVVALKILEGNRAEALDALEIISKDHRGYLAENIQSIEDEHKIIQMKNLQYFDGSGIRSNVVGTIAGMVLSYGDWRKPMIAFTQVSDENQDLKISLRCSRLLAYDGIHFGNIIREVAQSLGGNGGGHNVACGAYIPKDKKDEFLNLMNEKLEGKLALED

SEQ ID NO: 5980 - protein, 275 aa, Methanobrevibacter ruminantium
MEILQKRGALTHFQILGEISKQEPNLKQKDLAERLGITIQAVSENIKTLTELEYITSKDGRAPYKITQKGIAKVKKDAIILRKYTDSVLETMTYYKSTWPAIAKEDLKEGDEVGLYMENGRLYASINAQTSAYADVILDTKKGFDVALTNLKGTIEIKDSKILIVTLPPIKDGGSRSADLDLVKGIYEGNYENYGLSSIDKVAAIGTTSHAVANNLGIPIDIEFGVSEASQSAVRKGLNVMILSIGDMSKNISKDLEDANIQYQVIDAKKSVKTA

SEQ ID NO: 5981 - protein, 231 aa, Methanobrevibacter ruminantium
MENKLIRQDTSDLDIVNHPEIKGLQIIEGKINFPISWLNQQGYCEYTLYLQYLKGIKTMPTQAMTTGTKEHLKLEEEFKQTATPSSFDDAFKESKEKEILSREMFVIDSEEGVRGFIDEIWMTPDEIVIIDDKPGNRAYPSSMNQVRAYCLAFKNMIGDDNRIIRGALRQRGTDNIFWSEIFDEKVEENILYLIHRMHGLFEGTKPFIPTKNGNKCRACRYQSYCEHKVDI

SEQ ID NO: 5982 - protein, 146 aa, Methanobrevibacter ruminantium
MDLFVKRIIAYILDFFVVSAFMWIFSYLAYFFINYLNMFQIYHYFIFILPILILVYFTFLEKNIGATVGKKLMFIEVKSTVAKRSRNGRNYNLTYGQAFIRSLSKIYWFPIIIDVILGKIAGKTRLLDGFSKTTVVEERVDRYLYY

SEQ ID NO: 5983 - protein, 336 aa, Methanobrevibacter ruminantium
MKIGMSHGAGGEVMGNLISETILNNLSKKAVEGGLGLDALDDGATIPLGDYEIVFTTDGHTVNPLFFPGGDIGRISAAGTINDVSVMGAKPLAISNAMILQEGFPIEDLDKIIKSMSATCEEADVAVITGDTKVMEQDKLEGIVIVTTGIGIAKKGEVIKDSTLSVGDKIIISGSVGDHGMSLMSFREGFGFETELKSDVAPMWGIISKALEVGGVTAMKDPTRGGLANCINEMARKSGVGVLLQDEAIPVKQEVRAASEMLGIDPYEVANEGKVLMGVKAEKAEEILEAIKTDKYGADAAIIGEVIDDDKVLIETGIGGIRILETPIADPVPRVC

SEQ ID NO: 5984 - protein, 125 aa, Methanobrevibacter ruminantium
MAICQGKSTRTPSGARRVANRGKRKSELGRESAETKLGDKNLRKIRTRGGNVKNRLARDNKINVVDAEGKAQTVEIFGVIENTANPNYVRRNIITKGAIVETAAGKAKVTSRPGQDGVINGVLIE

SEQ ID NO: 5985 - protein, 226 aa, Methanobrevibacter ruminantium
MPESPEQLAIEKEIQIQKDKFLNFFNGELPDTMELEFEGFYRRGFFVSKKRYAVIENEKIIAKGLELVRRDWAPIAKKTQEEILMAILKEGDVKKAEKIISKVLRKIKSGDIATKDLIIHTQITKNLDDYKQIGPHVIAAREIEAHGIKVGKGTIVQYIISKGKGSISQRAVPYEYSEGVEYDKEYYIENQLIPAVSRMMEPLGYDKNRLRELASTERQQSLDAFF

SEQ ID NO: 5986 - protein, 226 aa, Methanobrevibacter ruminantium
MTKAVFFDIDDTLLDTSSFADLARHAAIESMCNNGLPLEPDEAYDLLKDIIKEKGSNYSKHFNILTKEVLGKEDPLLVAIGMTTYHNVKFALLRPFPRTSAILIYLKSNGYKLGAITNGITIKQWEKLVRLNLYHFFDIVITSEEVGVEKPDPEIYLEACRRMACDVKKSVMVGNKLDIDCMGAVNAGMSAILVNSTLDEEEKERVNNEDIDIIVLDSISDVDTVL

SEQ ID NO: 5987 - protein, 262 aa, Methanobrevibacter ruminantium
MAQIKCPDCGKEQEDTNKFCKNCGANLSNVKAEEVKLDLDAAPTEEKIDLNTAPTEEKLDTDASEVKETPKAPVENKKICSKCGHELNNEKFCPRCGQSTASIVPYEAKTESQGENNDKTCPSCGTKVTTEKFCPNCGSKIEEKKPVQTQNAPQKYCRNCGNPIDPKAEICPKCGVRQLTVVKKEPLFSLILSLIFPGLGQFYNNQTHKGIFLIIGAIVSIVLTIFVIGVLLYMLVWLYGMYDAYSTTIALNNGEYVEDKLF

SEQ ID NO: 5988 - protein, 90 aa, Methanobrevibacter ruminantium
MSDFEEVMTEYIKISKHREKVFKTLKDGSKKPSDIARETNLNINSVSLSLKQLTEKELVYLLNPDDKKGRLYKLTEIGETIIKEFDEKTE

SEQ ID NO: 5989 - protein, 258 aa, Methanobrevibacter ruminantium
MTKIRLISWNVNGIRAIHKKGFLDWFNEEKADIVNLQETKAKIEQLPKKLINVPGYTSYFHSAERGGYSGVATYTSIEPNEVINGMGIEKFDIEGRLIRLDFDDFTLLNIYYPNGGRDEERLQYKLDFYDAFLDYANDLRDQGKNLVICGDLNTAHKEIDLARPKQNEDVSGFLPIEREWVSKFLDNGYVDTFRMLHENEKEKYTWWSYRTRARERNVGWRLDYFFVNEEFKDNVRASYIISEVMGSDHCPIALEIEI

SEQ ID NO: 5990 - protein, 515 aa, Methanobrevibacter ruminantium
MSEVIDKIINELHIYEKKLLKELEKNEDLSPDEIAQDTGLNIKSVMSAAGILASKGIITVKKDVEEKFSLTKYGKKYAEIGLPERRILNELQEKKELHMKDLAKIDSLEKKEINIAIGWLVRKGWAKINKGVVTITEVGESSKDKLGDDEVLLNLLNEKGSLSQDELDEDMANGLAALKDRKKLIASEKTTSHSFQLNDLAYEILDKGFDLTEEATQLTHEQLKDGSWAKLKYRPYDINAEYPIFFPGKEHPLRRIIQEIREIFLNLGFTEAKGEYLESAFWNFDSLFQPQDHAAREMQDTFYVKNPLTCDLPDDDLVERVAKTHEDGGNTNSEGWHYDWDADIARQSVLRTHTTGISTQALANWELPIKMFSVGRVFRRETFDYKHLPEFHQVEGLVAAPGINYQNLLGTLKEFYKKLGFEVRFRPAYFPYTYLSTECEIYLEEKESWIELGGCGMFRPEVLEPLGVKVPALAFGLGIERLAMIRYDLSDIRMLYKSDISWLREVPLEEGINFE

SEQ ID NO: 5991 - protein, 299 aa, Methanobrevibacter ruminantium
MEANQIAKLAQIASALEVSGYPKPGNVHRTRNYDDMVFEDFIISGVVIGDTIRELANHTQSIDDLSDANLGKYILEAVAETNKWIANNTNLGIMMMCVPIAAAASISDDFSQIQENVGKLMDATTVEDAVDLYDAINLADAGGMGDQDEFDVTSEKAKDELRANNQTMFDVLKISAPWDRLASELTSKMPVSFEIGYPTFTGFCNSCEDVDKINKATVLTFMTLLSEIPDTLISRKYGDEVAKDVSLKAKELLEFKDDDDFVEKLLEFDDYLYENKYNPGTTADLTAASIFISYLDKEF

SEQ ID NO: 5992 - protein, 331 aa, Methanobrevibacter ruminantium
MDFPNTRMRRYRKNSKIRDIVRETKLNKEDLIYPIFVKEDLKDDEKEEISTMPGEFRFSINGAVEYAKTLEAKGLRSIIIFGIPSDSEKDEIASPAYSPTGIVQKTVRKLKAETDLVVITDVCLCEYTSHGHCGILKENEDTDFGYEILNDESLKFLAKTAVSHAEAGADIVAPSDMMDGRVAAIREALDEAGYYNTMIMSYSVKFASSFYAPFREAACSSPSVGNRKSYQMDPANAREAIREAELDVTEGTDFLMVKPALPYLDIIKTVKDEFNLPLVTYNVSGEFSMIMAGIENGYLTEDSIMESLLCIKRAGADLIISNFAPYALDHL

SEQ ID NO: 5993 - protein, 366 aa, Methanobrevibacter ruminantium
MTNTIGKIFRITSFGSSHGKALGAIVDGCPANLELSEEDIQIELNKRRPGTSALTTARKEQDQVEILSGVFEGKTDGTPITGVVYNTNQKSKDYSSLKNTPRPGHGDYCWIERYGNYDYNGGGRGSGRITIGHVIGGAIAKKLLSAKGIKIISHVVQIGDIRAKEANIESLEENITKNNVRCGDLEVAKLMEDLILSKKEEGNSVGGVVETIALGVPAGLGEPVFGKIDGDLAKVLMNINAVKGVEIGLGFGVATKTAKEINDEFYYERDDVKTKTNNSGGILGGMTNGMPIVSRIAIKPTPSISQIQETIDLNKKENTTIEIKGRHDPCICPRVTAVAESATAIVLADHMIRSGFIHPTNLEKRV

SEQ ID NO: 5994 - protein, 313 aa, Methanobrevibacter ruminantium
MKITFLGSGGGRFTTISQKRMTGGFRLDNFGGKNYHIDPGPGALVRSYQFGVNPTKIDGIYISHSHTDHYGDAEILIEAMTRGMTKNNGIIMGSRSVFEKYKRWGPAISNYHRSNSKNLILVPNKIKRFPDFSIKGTDTIHGDPTGVGFQMEANNLKVSYTSDTRYFEELKKYHKGADILIGSVLRHDDDAIKGHMCTDDFINLVGDVKPKLAIMTHFGFKMIAANPVEQAIKVSKNTGVRTLAAFDGMLVDVNEKYPQKSRMLRLKDRFAAHMKQEDVYSTNFKVKSNKRNKMRNKKKYYNNNDSNNSFSSK

SEQ ID NO: 5995 - protein, 308 aa, Methanobrevibacter ruminantium
MSLIIAYVGKKGCVMAADKRRIAYFGLKEQREILEQEIYSGEIHNDEELYARAEELDVNLKVTDNACKVKSIENVAIGEVSSRGTMETKRKRIYGTSNGFKIIELSGSHVLNSKRGVSSIIVFGNKVTKSLANKMIQERWKPSFSLKYMGEIFGEILKDIAEITPSVGKDYDVIIEKNNLAKSQVQDYIDEVAERDVKVLAKFRAQLREQLMEQNENIKLASTIIEEGSVGEIVIIDDTLIEVKLNPDVRAFDVNWKVLAGPGENVLMVVDDSEGLDKGDEIVIEDEVLCVKKNKANLKCDIILCHLE

SEQ ID NO: 5996 - protein, 126 aa, Methanobrevibacter ruminantium
MVKINEIYRCNHCGNIIEGIVEGAGELVCCGEPMELLEPRQLEEGGVKHIPVVTKEDGKIVVKMGEVEHPMLEEHYINFVQLTIGDQVFRANLKPGEEPKAVFDINAEIEDIKAIEYCNIHGLWHA

SEQ ID NO: 5997 - protein, 169 aa, Methanobrevibacter ruminantium
MKKNIFLIAIILIAVVAVSGCINSPMDNINNNMKELNTDITEGDTDYNSAINYINNKDFISGTDNIQIAKDKFNDADEKLSNIEQYKSSLNESIYLDYLYLIKEEVSIKRQASDELYLALQYYTNNDFSSGNSYAQSANSLMNQAKVLQDERNQIVENNPDLFKKAGII

SEQ ID NO: 5998 - protein, 780 aa, Methanobrevibacter ruminantium
MKEACPKCNGTGLVAVDTKICDACDGTGYEDTFEMKNHFKGVTSNARAKFDLDADQDIPCEVCNGKGVVDVFEDCPYCKGTGQINVCNSCGKAIPDDKDYCDECNEKQLEEKMNKVKERLENPKKLKVESDIEGKEIVYELDGLCDMSDLEINSLYKGKVTRVERYGVFVSLNNQVWGLMRTSNPHNKVGDTIFVRISQIKERKREVDMVPAHVFKGEYVVKKLSKNIGRTKIETLDESSLKSIVKVYGEVIQIQQTSGPTIFTITDETSITWAAAFNEPGVRMYPEIEVGDIVEVIGEVNQHNGEIQIESESISKLDSDEAEAMKELIDIALDKKAEPDDVDFLIESPVLERLKPKMREAAKVIRRAVLDGRSILVRHHNDADGICSGVAIEKAVIPYLKENNPDNDAEYHYFKRSPSKAPFYELEDVVKDLSFALEDLDRHGQKLPLIVLLDNGSTEEDIVALMQAKIYDIEIVVIDHHSPGNLITKTLRNGETVSGDVESAPEDIMGGTVAVDEYVDTHVNPYLVGGDSQITAGALATEVAHFINPEIEDLIKHLPGIAALGDHAESDEAEQYVELAASKGYSRDRLKQIAECIDFEAYFLRFMNGRGIIDTILGVDNIDKHPKMVDALYKEYLRRVDTQMKAALPNIKRVKLDNGIYFNVLDVEKYAHKFTFPAPGKTCGFVHDKIVKEIGDDKPIITLGHGPDFGVLRATDTVHQLFGFNVNNIVISLADKIPQAGIDGGGHECAGSIKYIEGLGKQVLTELLNEVSEMTDSSKN

SEQ ID NO: 5999 - protein, 124 aa, Methanobrevibacter ruminantium
MYSDKVMDHFANPRNSGEIENASGEGTVGNPTCGDLMTIYIDVDDDEVIQDIKFKTFGCGAAIATSSMITEIAKGMAVDEALKITRNDVADALDGLPPIKMHCSNLAADALAEAIKDYKEKQEE

SEQ ID NO: 6000 - protein, 402 aa, Methanobrevibacter ruminantium
MIYMDNSATSPVKEEVFNAMVPYLKEEFGNPSAFYSLGRSAKKAVETARENVAKLINAETREIIFTSGGTESDNMAIKGIAFKLEDKGKHIITTVIEHPAVLRTCEYLETKGFEVTYLPVKENGILDIEDLKEAIRDDTILISVMHANNEIGTIQPIEEVGGIAKEKGITFHVDAVQSVGKIPVDVKKANIDLLSISSHKLYGPKGVGALFIRKGVRIETLIHGGGQENNLRSGTENVPGIVGFGKAAEIAYNNLDANIEKLQEIRDLLIGEVLDKVPEAYLNGDREERLPNNASFRFAAIEGEGLILRLDAKGINGATGSACSSKNLKASYVLSALGLEDAEIHGSLRLSLGVENSIEDVEVVSDAIADVVGSLRQMSPLWDNEKNESLELDESKFTDVDH

SEQ ID NO: 6001 - protein, 439 aa, Methanobrevibacter ruminantium
MTNKNYGLSTLGLHAGQEEPDPATGARAVPIYQTSSYVFSNTDEAANRFALQEFGQIYSRLTNPTSDAFEARIAAIEGGNSAISAASGLAAISYALLNITPPGDEIVSANNLYGGTYQLFDYTFKDLARNVIFVDSQDYDAFEAAITDKTKAIYAESLGNPKLDVPDFERLAEIAHSHDIPLIIDNTAAVGLVRPLEHGADVIAASATKFVGGHGTAVGGYIVDSGKFNWGNGKFPTISEPDPSYHGINYWEIFGDFPGLGNIAYTLRIRARLLRDLGATLAPVHSFIFLQGLETLTIRMEKHSENALKVAQFLDNHPAVSWVNYPGLEHHPSHETAKKYLGDKFGALIAFGIKGGLEAGKEFIDNVELLSLLANIGDAKSLVIHPASTTHQQLTPEEQESTGVTQDLIRLSIGLEDVDDIIADIDQALAKVSEKFGDD

SEQ ID NO: 6002 - protein, 699 aa, Methanobrevibacter ruminantium
MTDLNKMFNPDSVAIVGASNSEGKVGYIIVNNMINDGFKGNIYPINPKDDEIQGLKAYKNVSDLPEVPDLVIVSIPSVLVNPVVEECGEFGVKNMVVITAGFKEIGGDGVERENQLVALGEKYGINIIGPNSLGITDSHTPLNASFSQIMPPEGNIAFISQSGAMMVAIIDWSVTSGIGFSKIISLGNKAGTTEIELIEYLSYDDETAVVICYLESITEDDDFVRTLRKVSYKKPVIILKSGSSSAGAEAASSHTGALAGSDIAFDTAFKQSGVFRVTTMDELFDVGLAFSKCPLPTGRNLAIITNAGGGGVLSVDAMERYNLDLVKFDEKTNARLKEAVPEEGSIKNPIDVLGDAPVIRYKESLEAVLDSDDVDGLVVMVCPTASADADGIADALVEGASGFDKPVIAVNMGGPIFENANDVLRDNGIPTYVFPETAVKVFDYLARFAAVQDRNYDDPVGELDDVDKEAVEEIFAKVKAEERDTLLGSEAYAVAEAYGIEAAPIKLATSAEEAGQLAEEMEFPVVLKIASDKILHKSDIGGVKVGIQSKEEAEEVFEEIMANAKKAHPDIVPNGVEVQKMMDSGIEVLVGMVRDSQFGPMIAFGMGGVLVNLLEDVSFKLAKGLTTDEIAEQMESTKVMGLLKGFRGEAPGDIEAVKSAIIRIAKLTLDFPEISELDINPIFVYEKGSSALDIKIKLA

SEQ ID NO: 6003 - protein, 480 aa, Methanobrevibacter ruminantium
MTREKGELNTLFADKIKLFVCGPTVYDDAHIGHGRTYISFDTIKRYLEFKGYSVFYLQNITDIDDKIINRAKESGIDSKYLAEKFEKRFIEDMAALNVTSVNYFARATDHIEEILDQIQRLIDKGYAYVTETGVYFEVAKFEDYGKLSNRKLEDLETHRIDIDSSKKSPHDFALWKNREAPEYAGEPVWDSPWGKGRPGWHIEDTAITEKYFGPQYDIHGGGLDLIFPHHDSEIAQMEAVSGKEPLVQYWMHTGFLNVSGEKMSKSLGNFITIRELLKEYSGDTFRLFVLLTHYRSPIDFSEVSLHQAERNVSRIKNYLENLDEKINDIFEKGNLSEDLLKLAELEENEFDEELINFDYFKSNYPALKEGVNEFFTSMDDDFSTPKAIAAIFSFIKQSNKDLEEDDLIIDDLLAIKHWFKDISQILGIDFFVYKDETSGNEAELLDIIADVRLKLRAEKKYDLSDEIRDKLISLGIEVSD

SEQ ID NO: 6004 - protein, 126 aa, Methanobrevibacter ruminantium
MKPPCEMVVWYIIPAIRSELAKDLLKLGMKQKKISELMDITQPAVSQYLTDKRGSGIGFNDDVKALIQEFANDLNDGTATKFDIIPRTCYICKRIKTEDVICQIHKEKGHMPADCQACLGSEAHLL

SEQ ID NO: 6005 - protein, 246 aa, Methanobrevibacter ruminantium
MFDDLKDDLQAAKARDPAARSSLEILCCYPGIWAILLHRWNHWLWTHNLPFWGRFFSQISRFLTGIEIHPGAQIGKRVFIDHGMGIVIGETTIVGDDVLIYQGVVLGGTSLSKGKRHPTVEDAVVIGSGAKVLGNITLGCSSKIGAGAVVLQDVPRGATAVGVPSRIIHEDRKCVLDLEHEFPDPVSSAIDLLFERQEELEKRINILSHFHDIDHVEFSHDPKVEEVFKGADEKSFYKLNNIIEDE

SEQ ID NO: 6006 - protein, 318 aa, Methanobrevibacter ruminantium
MVNIPELKRGIANDMTEAIGNTPLVRLNRLTEGLEAEVLVKVESFNPVSSIKDRIAVNLIETAEKDGLLKEDSVIIEPTSGNTGIGLSFVAAAKGYKLILTMPETMSIERRKLLAVFGAEIVLTPGSEGMGGAIAKAKELAESTPNSFMPQQFENKANSEIHRLTTGPEIWRDTDGEVDIVVSAAGTGGTVTGIAQYIKPLKAEFKAVAVEPASSQTLGKGEKGPHKIQGIGPGFVPDVLDVDLIDEVVPVKDEDAGNTLLRLAREEGIFTGISSGAATWAGLELAKRPENKGKTIVVILPDTGERYLSTEWVFGDLF

SEQ ID NO: 6007 - protein, 201 aa, Methanobrevibacter ruminantium
MTLFKYIITSSPIGEITIIWRKKPQFQIEEIIISNPNQTSSQIAKEKYEKEGELAINKKSKQLNKVLREMENYFNEKDYKFSLKYLNLDKLKPFQRAVLEAEFKTEKGTVNTYKDLAKEIGSPKAYRAVGSALAKNPFPIIIPCHRTVKGDRTIGGFSGFAGGLESKKTLLELDGLMIQGKKIVGDSPIISLDKTSQTKLV

SEQ ID NO: 6008 - protein, 215 aa, Methanobrevibacter ruminantium
MRGFKMNDEEKIREIFRRLNEVYTIRTFHDHDPYKVLIRTILSQRTRDENTDQAANALFEVYPDIYAVADAPVEHVQELIKPAGFYRVKAARILEVSRILIDQYGGEVPREMDEMLKLPGVGRKTANCVIVFAFQDAAIPVDTHVHRISNRWGIADTKDPEETEQVLMEKVPKDLWVDLNDLMVQFGQTICRPIGPQCDKCPISDLCDYDVSKLE

SEQ ID NO: 6009 - protein, 455 aa, Methanobrevibacter ruminantium
MNLKIKNFSKINGTVKAPSSKSYSHRAVILASLSEGKSKLFDVLYSEDVLSTIRACEALGARIDKKKEIILKGDKSQTVDYLEVYGTGGKLHNVSDDPSSDMIDLANSGTTLRIMTSVAALSDNEVIFTGDDSLKTRPMGALIDALETLGVKIESLNENNKAPLKIYPGYEGGQTDILGSISSQFISSILISAPLSENGVELEVYPEFVSKPYVDMTISILEKFGISVEEEEYQFHETCKKEHTDCLGVKFIVKPQKYIASDYIVEGDFSSASYLLAATAIAGGYIRVQNLFADSKQGDKLILDILEEMGANVTVFDDYVSLRSDGNLKGIDVNLSNAPDLLLTVAVLGALAEGKTTISGVKHGRLKETDRIDTTCRELEKLGCKLEEFEDGMTIYGNTISDGIVESHGDHRLAMAFSLIGLKHDVEVENGECFDVSFPNFIEAMAEIGIDLELK

SEQ ID NO: 6010 - protein, 539 aa, Methanobrevibacter ruminantium
MQRKTLSRFDEIVKILRKYDMDKVLGQTTRNRISPFRSGSENKELLKEDFPERLRLTLQELGTTFIKFGQLLSTRPDLVGERISEELSQLHDDNPPIDFEEIKVIIEEDLGGNLKDFFTEFSDTALATASIAQVHEAKLHSGERVAVKVQKTNVQEIVETDLNIMKFLANESDRFNTTFKHLNLPAVVKEFDRSIHKEMDFDNELMNIRHLRDNFIHNDKIIVPTIYPDYSSERVLTMEYVDGVKLSEVIAGDDPKYNKILIADRMVRAYFKQIFLDGFFHADPHPGNIFITDDNSICFIDFGMMGVLDENFRQDLAELMICFSNRDIDGLINQLIYMNILNVKTDISILKGDLNDLFAKYYGVELSRFNGVIEDLLFLMQKYDVMLPNEFVLMARGLSMVENIGLSLDPDIDIVEIIKPFARKLMIQKYNPKKMVHNARNTFFTVEHMLRALPSLVSKTFYKVDEGELTINIEVKQISEITNQISLAIIIAALVIGSSLAMMVEAGPKLFGLPLLGFVGFTISLALGVFTVVRYFMDF

SEQ ID NO: 6011 - protein, 136 aa, Methanobrevibacter ruminantium
MSLDRFIEAQKEDYDMAFREINNGRKRNHYMWYIFPQIKGLGHSSTSRYYGIDGLEEAKEYMENEYLSNNLIKISQKLLDLETDDPIEIFGSTDSKKLKSSMTLFELVSDNEVFSLVLEKYFDGNRDERTLDLANK

SEQ ID NO: 6012 - protein, 261 aa, Methanobrevibacter ruminantium
MKGIIGAIAGDIIGSTHEFHPIKTKDFSLFNKKSHFTDDTVMTLAIADWLIEDKNSRDVLIQKLKFYGQKYPNAGYGRMFMQWVLSENPLPYGSWGNGSAMRVSPVAWAGESLEEVQQLARLSSEVTHNHPEGIKGALATADAIYLARIGSSKEEIKEHIEIRYDYDLDRTVDEIRPGYKFDVSCAGCVPESIICFLEADDFEDTIRNTVSLGGDADTMAAIAGPIAAAYWEVPRNIAYKSIHRLDYRLLNVLIKFEDKFL

SEQ ID NO: 6013 - protein, 242 aa, Methanobrevibacter ruminantium
MSKRIIFILMLIALLGLSAVAAVDADPLTDNQLNPTIFYLDFNHGALNDGFKKEFDLFEYVPTFDSVDLYNDGENVSVSFYSLNPTIDVDNLNDEIIDYTFEVMEDPKANITTLKDGIRNICSEYGADDVKINVDSVIGEDEIPVIFTTEGDSMLPTIKSGDKVLVNKSHNIHVGNLVSANSSEYGPICKRVADIDGDSVYLVSDNKKVTREYYDDYYVEYKGITTWVNIDDIDGVIIDIMN

SEQ ID NO: 6014 - protein, 73 aa, Methanobrevibacter ruminantium
MVEITSKTKYMDLLNEYPLLKTDLVKKNPKFGFLVTPMGKISLWESDLSEVSERAEMTVEDTVNLFIELVNSY

SEQ ID NO: 6015 - protein, 352 aa, Methanobrevibacter ruminantium
MKHRLNLDNKDPNYILLKEIFKIMDSRKSKSILASYGFKNLNRTIFTFKIIFISMFFGIDIPFILNELKSKKELRKYFNISEVLTADQVYKIFSEINSEKLIKCLNRILNSRNMVKRIGKKTFIVDATPVDVDINFHRNKKTKEHLEKINLKWSYSSSKGYYIGFKATVVLDYDSMNPVCILVHSGAPNDAKLFEEILENLQKRRIIRKGDTLIFDKGYYTYKNYQIGISKYKIIPFIFPKEKFSRTRLDDILTYPLAVFNKTKRIMKEKRLYNSLKMELMKKIDSWEKFKPIRGKIEDFFKLLKQGLNMREIHKYTPKSVEKTVYLNVFLGALIISQGFYSKTTIQQLSEN

SEQ ID NO: 6016 - protein, 939 aa, Methanobrevibacter ruminantium
MNAFLTLIIFIIHFIWRNILTNKEIPKDYDHKSEEKWQKKWEGDEIYKFIGDGTRPRYIIDTPPPYPTGLLHMGHILNWAYMDFNARYRREKGMDVLFPQGWDCHGLPTEVKVEETHNIKKNDVTRAEFRDMCTELTSHNIELMRGQMRSVGFSQDWSREYITMTPEYRKRTQLSFLKMYDQGLIYQGIHPVNWCPRCETAIAFAEVEYSENTTFLNYVNFPPADVPEEVLANVEGNSYVRYADCPDNADASVPGVLIATTRPELMSACVAVVVHPDDERYNQLLGKYVEVPLSGQKVKIIADEEVDMEYGTGAVMICTFGDKTDVAWVNKYDLDVIEAISEQGILTAAAGRYEGMELQDAKKQTIEDLKSEGYLTKQEEVDQNVGQCWRCKTPIEILVKKQWFVGVTKLIEESKKASNEMRWVPEHMESRLLNWADAMEWDWCISRQRLFATPIPVWYCKDCGKVILPKEEQLPIDPTIDKPLEPCQCGCNEFIPEEDVLDTWMDSSISPLSVADWPNPGWEEIFPSSIRPQGHDIIRTWAFYTTLRCLALTGQKPFDDIVINGMVFGEDGYKMSKSRGNVTGPEEVIAEYGADPLRLWAANSVPGSDVAFDWKNIKHGYKFIRKFWNAFRFISMHIFDEESEKALSGDIESIKAKLNPMDTWIFAKLNKVNKIVDTAFYDYNYATAINTIEQFIWHDFCDEYIEAVKYRLYNDDISEESRIAAKYTLRTVIEDSLKLLAPIAPFFAEEVYQYFDEDKSIHSTLWPEIDPNLDSTQVEEDGDLAIELIGEVRRFKSASKIPLNADVESTTVYINEKTENLKDVFEYFADDIKGTLKIQDFKVTSGKPEVHEKVIEIEPDMSKIGPTFKKNAGQVIGFIKSTDPNEIAKQLEEDGEIAIADGVITEDFLKMKKEIVGASGKKVDILQSEKLGVIVEVVR

SEQ ID NO: 6017 - protein, 118 aa, Methanobrevibacter ruminantium
MHLLWFYVAIVLAISDEIHSRIVWGYVRDFYIVFGGIISSSLDSVMETWIVHEGLEALFHMIFVSIVFFSLKIGFLAALIHFLLDVSHSIVIRHMPWLPHRALHFVIECLFFIAVFGL

SEQ ID NO: 6018 - protein, 551 aa, Methanobrevibacter ruminantium
MPVITFKYQDLKDLGIDMEKDELINTLPMMASDIEDYDDEEIKVEFFPNRPDNLSVEGVARSFKGFLGLETGIPKYEIVPSGEKVTVSPEVAEIRPFIKFAKIENVDFSGDKIKYIMDFQENLHWVIGRDRKKVAIGVHNADVISGPYKYIATPKDENAFVALEMEEEMTPGEILTQHKKGEKYAHLIDKFDKYPLILDKDNQVLSMPPIINGELTKLTEDTKNIIVDVTGTDEIAVTQALDILCASFAEVGGQVKSMEVEYEDRTVISPDFTPKVKTVHVDLTNELIGGTDLSPEDIKKLLEKARFDANILNENELEVFIPPYRVDILHEVDIVENITIQYHINAVEAKLPDITTVANEHNWFKSEKTIRELMVGLGFQEIMSLMLTSEESQYEKMNAEEIDHVQVSKPITISGTMIRTSLLNSLMEFLEDNKHQDLPQKIFEIGDVLYMDESKENKTKSAKKLAGMICHSSANFTEIKSTVSSVLSNLGYTMEISNSTNGSFIPGRAADVIGESKSGKVVGFFGEISPEVIRNFELEYPVTAFEIEFKL

SEQ ID NO: 6019 - protein, 232 aa, Methanobrevibacter ruminantium
MAQVFNYHCRSCDFYFTIHNYRFCFDDKMDCIEEYMALFTDSDYGNDSLIKGRVIEKYCSSCQKTVRIYQFTPDSSIYTTDASFDFLKFYIPKKHDFLLESIDFHKELIELIENNENLKKISSFIEDNHVYNIYELNLNHYLNTKRSGFNSNQLIKDIGLYLDAINDNLDRFDDFIICMNSTEDNYNLDLEGKMFDMDVCPECGEEFYPISLKNPCPICGKNTMERSREMID

SEQ ID NO: 6020 - protein, 555 aa, Methanobrevibacter ruminantium
MLLNDKSELLKSLSILFLLIVLITSFNSVYANSDNFDSAKSSDLIFSDSNNVYIENIDCSDSILINVYSNKKDSNLGSYFVGSSSDSYLKDSNSDSAFVVSNSEDSYLEDSNLNHSKNYLSSQSLSASSKSKVILTTSNLSASYKTKNFTAKLTDLNKNPIAGAKLSFVILSKTYYRTTDKDGLASLMINLAPGKYNISTKFEGDSNYSSAVVKNSITISKKKLSISSSDLSKKYGDSNSFQVKITDNGNPISDIKVALKLSAKTYYRTSDKNGLVSLPINLIIGKYIINSSVYDNKFYYSNTNSNNIIVSSQNPYNLSVLKWGTKGNIKKNSVLMNNIPKSSLTNAIISACNNGTPLIQFGNGSGKKVFINAGVHGHELSSQAAAFKLINNIYNSKKKINGTVYIVPVLCPKMTEQNARYFNNVNLNSVANKNGTVSNKLVNLALSLKVDVLGDFHCTRPNGDPGKNVAMGTSSPMASSATLAKYISKTTGYSSLIYKKAGEEYPGAVEDVCNLKGITSVTCEALTPHGKIASGSVGKSYNMMIALLKYYGITI

SEQ ID NO: 6021 - protein, 142 aa, Methanobrevibacter ruminantium
MIINKSLKINSNSNFQIIDITNEISRILDEIKFNEPNSISNGILTIFTKHSTSAIVVNENERGLLSDFEFILDELVADKNNYAHDRIDNNASSHLKSFLLGSSETIPIVDGKIDLGTWQSIFFVELDGPRRNRTIDLVFIGE

SEQ ID NO: 6022 - protein, 40 aa, Methanobrevibacter ruminantium
MITCNVCGHLNPPSALVCENCGSDLSDSPDLGGGFDDDDR

SEQ ID NO: 6023 - protein, 172 aa, Methanobrevibacter ruminantium
MSENQEDETRKTNNYEFDNSGFKAKDYDDAEEFEIWDLEQIFKDRVKILQDLNNEFWEAYEGSKTEASGRRKDKKERLEPLSVRVKPHTKRFLKEDSILSAREILEIYEEFYNGRDDYIKSLKRDEIQLKEELSEIEEKLKNAQEFTEKLNEIKIQKDQEKERAKKIKINIE

SEQ ID NO: 6024 - protein, 47 aa, Methanobrevibacter ruminantium
MYRYENDRLASHEIDPTTPSKYVYWNAKRLLEVLKEVEATKKQNQDK

SEQ ID NO: 6025 - protein, 210 aa, Methanobrevibacter ruminantium
MSDKVKAEEVKSEETQVKDVDLVFLLDKSGSMYGVVRDTIGGFNSFIEREREKNPNTHVTLVLFDTEYNVLYTRKPIAEVEELTKNEYYADGCTALLDAIGTTINRLDRQVNNDVLFVITTDGLENSSREFSKSDIKNMIANHNWEFLFIGADIDSYGEALTLGIDESHAANYEKTSAGLGALFDSVGDAHEEISRGGSLDDMSWKRRLG

SEQ ID NO: 6026 - protein, 537 aa, Methanobrevibacter ruminantium
MTLDYQLSEIKELENQEELISIIQNPNLDDLRRSAAASNYNLNNKDFLKELASNINLNYKIRRGAIKNLNLDDQSLFIDIGLNDENIQIRRAAIKRITDQDTLTIIARESLDFASRLIAVEKISDIAVRLDIAVKDSNDLVSFKAVDLYPFLSTLNSLFYNFNCSGRYVDNALKLIDFIDLCLSKDFNKESHDALNKFKDYLNDLINIKLSDLKEVPYHLEKSFSRRVLTNMAILTWDLAFAIIDYTEDDYELLKIFNVQNDIRIRLAALKKIKSEHFLIDIVSNFRTGHSLYDDTLGSLQRRFSYDLDECLSIHKFTQEELIDLAVYSGFKKTRRIVVKYIGDMELLEYWALNDSYTGFRREIVSLPNFNNKELLSKLVFEDDCDRVRLYAVRKINDQEILSKLAVDDSYWAVREEAVSKIRDESILIDRALNDPNVMIIIAALKNPNLNDRQTINKIGSYPNFWVTKIIAEHPLTDDETLIDIALNNPWNYPREKAIERIYDKDVLKYIAENDKDPWISLISESRLRKLDENENV

SEQ ID NO: 6027 - protein, 101 aa, Methanobrevibacter ruminantium
MTNQVIEDMAEVCHDEWVKWSKNISEELALAIDVLKKDIEFAHEKGVENKEAIELVEKFESRLERWGALWIPYEDLTEEMKDSDRKYAIKMFDIAEEALKE

SEQ ID NO: 6028 - protein, 79 aa, Methanobrevibacter ruminantium
MIVEKVSKNDQWEDYFIKSKSSNKEYIITIDLLEGTVSCDCEDFKYRKENLRFGGVRLSDKANHCKHIKKILEIRDDLD

SEQ ID NO: 6029 - protein, 296 aa, Methanobrevibacter ruminantium
MKKIYLIFPILAGIMFGSTGIFVRTLTENGIDSTTLLFLRFSIAIIYMLIAIVLTDKSLIKVSKEDIPLFLICGLCILGLNLCYNNSINTVPLSLAAVLLSTAPVFVVIFAYFIFNEKISSAKVISIILVIIGCILTTGLLEESMIPITSIGLISGIGSAIFWAIYTIASRKSIDRGKHTFTILFYSLIIITIVTIPFTNFGQIESFVLANPANNIIFLLLHSLISFALPYILITISLNHLDAGTVVILSSGEPVAALVFGAIVYNEIPSPLMFCGIIITIIALISLSRKIEMKSE

SEQ ID NO: 6030 - protein, 170 aa, Methanobrevibacter ruminantium
MNNKYFLGIIIIIIAVLAVIFAFSLDYQTNYLNGSSNGSVNTNENSSFNQSNNGLQTNVQLTISAEQSFPMEKIAEEIKTHPAYEGYDEDTLKWLETFNGSIMFTSKDYFVVMDKNDAENLPTSFVNDAFIYDDFTCDIIEKRSLGKDLKDIIYVKNVKFENQRIVPMIF

SEQ ID NO: 6031 - protein, 71 aa, Methanobrevibacter ruminantium
MFEKQGFIERRIFKNKESFMYKGFFSHKEDFINKGDFIEKEKSLKKQNFIKGKYANLIFKMDDDCIILKGG

SEQ ID NO: 6032 - protein, 343 aa, Methanobrevibacter ruminantium
MKTTLDNKSVKNNSRNSKNVRSNLRDNRSMRTNLRASRNMKTGLGDVNIQSNDEATKKCPSCGSVDFEIDYARSEVSCKSCGLVLEENIIDFSPSGTAINRDGQNLTQNGAPCSITKHDKGLATDFKLENLKHDRARWARIRRLQKQSRVSGSRERNLARAFSELSLLISNLSLPRDVNKEAASIYRRALEKDLVRGRSISLLISASLYAACRVCRVPRTFDEIAEVSTGSKKSIAKNYRFLNRELALKIRPASPVDYIPRFASMLELSSPVVVKSIEIINELNEKGLIAGKTPAGVAAAALYYSSRVLGERRTQKEIASVVGVTEVTIRTRYKEMTKGLNLN

SEQ ID NO: 6033 - protein, 94 aa, Methanobrevibacter ruminantium
MSQARNLEKDVSSSKAYFKGENELSINSNINETKFNEMTDSDSNFFGTRFILNLSLILKLILKKQMKVISQIEIISNNQKTSKQFQYKIIQKTL

SEQ ID NO: 6034 - protein, 175 aa, Methanobrevibacter ruminantium
MTILDGILEDNKKFVESFEGEEMSHHAQKKLAILTCMDCRLIDFFEPALGLERGDAKIVRNAGNSIVGEDAIRSIGAALYNLGAEEVLVVGHTECGMAGADAEALKEKMLARGIKEEDIAKYDIAEWIGGFDDEEENVLNVVEKIKNHPLIPEVPVHGLIIDIVTGELKVLKEDY

SEQ ID NO: 6035 - protein, 278 aa, Methanobrevibacter ruminantium
MANNGHGHHGAANLTPEQQKKMIEQEMKLFEHMKNIKYKIAVMSGKGGVGKSTVAANLAEAFQKKGLLTGILDADIHGPNIPKMLDVEGEDVIISNGEMIPVMSRNGIKVMSMGFLIDSQDTPIIWRGPQKSGSIKQFMADTAWGDLDVLIIDNPPGTGDEPLTVLQSLPEVDAVIMVTTPNSLSHEDVLKCVGMVKMLHIDKIGLIENMSYYVCPHCGEKTNIFGESQGEDFANEMGVKYLGNLPLTEQVPESANKDSTMVNAYAESEVATKFFRND

SEQ ID NO: 6036 - protein, 998 aa, Methanobrevibacter ruminantium
MLLVLMALLILAMSCVSASNASDNLDDLTISDSNSLDLVSTSNSDILSSDSGVSSDDSSNDASGDVLGSDVSSNESNNQSQSTLDSNNQSQSGLDSDNSTLLDSQSNNQSNSESSDSSDSSETVIKNATSISVSSKTVVRGNSLNITLKDNASTLLSNKTVTFTFNGKTYNKTTNAKGIASLTLTATPKKYLVKIAFVGDELYEASSKSVNVTLSKTPTSISNSGKSIVRGKLYKLTLKDAKGKALSGKKISISFNGKKYTKTTNSNGQVNLTINVNVGKTYKMTYKFAGDSNYLSSSGSVSIKVKMGTSIIGSGSSIVKGKSYTVTLKNANGAVLSNQKIAFTLSGKTYNRTTNAKGQASLKIGLSSGKTYNLTYKYAGNSYYGGSSGKVSLFVKTPTTMKNSGKTIVSGETYKVTLKDADGKSLANKKVSITFNNKTYAKTTNSNGQASLTIKGTFGRSYPLSYKFAGDSKYGPSSGSLCLRVKKATSLKGSASSIVQGKSYTVTLKDSNSTPLANQTIVFTLDTKKYNRTTNAKGQASLKIGLAAGKTYNLAYKYSGTSYYNGSSGSVKLKVKFPTSLTNSGKSVMNGTGYNIVLKDSKSNLVSNKTISIGFNGKTYDEITDANGTVTLLIDANVPKTYKMTYKFAGDSDYGASSGTVNLTVKFKNAFTISQIISASSSLKSYVLKNKKVPATVSVNGVSLNLTSFTYLMAKATISINSNKTSGSILLVPVDSNYTNNGSRINANLYKANYIDLAKKVISSAEANKLVPNSVSTNIGLVSHDLYSFGLAKALVFFNSDHYLPNYLILSSDDVGEKHSTVIPSNARGNASQFKAGLNEAETLTAAQIAKYLVASGHDATNSEIKALAAKLVSGKTSLWDKANAIFTFARDNITYSYYADSKKGAAGTLSSKSGNCCDHSNLIVSLCRAANITARFSHAQGCTFSSGLVAGHVWAQIYIDGVWYTADATSRRNSLGNIVNWNTNHYNTLKQYDHLSF

SEQ ID NO: 6037 - protein, 825 aa, Methanobrevibacter ruminantium
MINRLRKDFGRIIKLIIFLILEVILFFAITQTFGGIIIPDLKTAFAIIIALSILNALLWPTITYLSLRFIVLTLGFGTFLIDGVLLYIISLFIPGVSINGIALFSIPLLIGLISSMLSIILNIDDDYTYYRYILEKEMKVIHRNIPKKEGFLFLEIDGLSYRIIKEALDNGDMPTLKSWIDKGSHRLISWETDLSSQTSSSQAGILHGNNNNIPAFRWVEKDHENRIISSNGRTDSKLIEKRISNGKGLLSLNGASRSNLFSGDAKDHLLTFSRFSDSESINSNSWFYLYSTPYVIARILVLFIFDMIMELLSRVRHLFKNIQPRLKWRGLKYFVARAGTNVVLREATTFTLIGDVFAGEHNVIYATYMGYDEIAHHSGIEDFDSFYSLRQIDKQFKHIENAINNSNRDYKIIVLSDHGQSNGPSFKQKFDISLNDLLSEFLPENITVHSILHSNDDHFSKEFSINHLGSENLEKLDKRVENTKEKLDIKIDNTKEKLDHRIDNTKEKLDHRIDNTKEKLDHRIDNTKEKIDTTKEKLDHRIDNTKEKIDTTKEKLDHRIDNTKERIDSNLDYTKEKINTSFDGELINTWDKLIKFKNKSSNKAFLDKLRKKRTLINNDEPIIDRINNVSEDLSEDLEVNIELSKEKITSDKAAQTIVLSSGNLGLIYFTDWSNRMSYEQIEDAFPGLINQLASHDGIGFVMVKSDIYGTLVFSNDNLFYLESEEYVGENFLDKFGKNTVQKLKRTDKFAHVPDILVNSEYNMETNEVYAFEELIGSHGGIGGTQQYPFILCPSNWESEEIFGAENVYKFFMKEINKSWNQSKNK

SEQ ID NO: 6038 - protein, 162 aa, Methanobrevibacter ruminantium
METKKMFLVILLFAFIVIGGSYSVFAIVSNGGGNNSLSWDNITIAGPSGNVSDDGNNSDDGLLGIFNSGDSSDSSSSNSNTGSSSSQSSSSPARSSSSSSSSSSQSSSSQSSSSQSSSSSSSSSSSSSQSSSGSSYDSGSGGSVVESGGHYYDVNSGDELDW

SEQ ID NO: 6039 - protein, 168 aa, Methanobrevibacter ruminantium
METENLIIVILLVLIAMAGIFCAFLYTFGTGGNDLAPVEPNLTANQTNVTNMTNDTANATTVDAPLNNGAYGSSSIDSSSSNGLSGSNSYNGGSNTYNGGSNTNNGGSNTNNGGSSSSDSGNGGSVAPDSGNGGSSDSGNGGSVAPDSGGGGSSSGGSEPAASGESSN

SEQ ID NO: 6040 - protein, 498 aa, Methanobrevibacter ruminantium; identical to SEQ ID NO: 4553

SEQ ID NO: 6041 - protein, 203 aa, Methanobrevibacter ruminantium
MKVLLINGSPHKEGCTFTALSEIKNQLEKEDIDSEIFWIGTKPVRGCIACKKCGHKEGKCAFDDDPANEIIDKLIEADGVIVGSPVYYAGPNGALCAVLDRVFYASGGRFAFKPAASVVSGRRGGASASFDRLNKYFTISNMPIISSQYWNMVHGNTPEEVRQDLEGLQTMRTLAKNMAWMLKSIENSDLPNLEDKIATNFVR

SEQ ID NO: 6042 - protein, 264 aa, Methanobrevibacter ruminantium
MKERLDKYLVNNNLIASRTKSKEMIKSKNVKVNDKIITKASYTVRDGDKVEIINDESLRYVSRGGLKLEGAIDSFNLNFNEKSIMDIGSSTGGFTDCGLQHGAKRVVAIDVGTDIMTTSLRDDDRVDLYEQMNFKNAPSSLFKDIDIIVSDVSFISLKHIIDRIAQEDDDFELVFLIKPQFECGKEIADQFKGIITDKEVHKDVILEIKEYFKTKGYYLIDLDVSKIKGKSGNIEYLGHFKANEKVREIDIEEVIDRAFIDEEN

SEQ ID NO: 6043 - protein, 130 aa, Methanobrevibacter ruminantium
MELDSEQVVKRIEELRKDYSCSQATLMGICEVGGMPTEELALLAKGFSGGIGGTFSEGTCGAVTGAVMALGFLGADEKQIISASKKLFNEFKDKYESVTCGYISKDGDDKSPCVEVCLFAGEKVCEYLKE

SEQ ID NO: 6044 - protein, 697 aa, Methanobrevibacter ruminantium
MIKKVTNVIDEITDFLFGLKMTIISGIFLLIAVIFMIFGIDTPIYLNPAWGTVIISGIPMLLLAMTRLIREKWVSSALLIAIAMVASLLIGEIFAAGEVAWIMALGALLEDWTVERAKKGLRNLINLTPQTGRRIVGDSEEVISVDEIRIGDVLRILPGESVPVDGEIIKGSSSLDQSIMTGESLPIDKEVGDEVFCGTMNMYGAIDIKATSLGENSSLQKLIDLVKAADEKQAPTQRIADKWATWLVPVALAIAIVAWLVTGNIERGVTVLVVFCPCALILATPTAIMAAIGQATKYGVLIKSGEALETLGALNTLVFDKTGTLTYGNLAVSDIISLKDDLDEMDVLRIVASCEKLSEHPLAKAIVNYANEAKVDIEEPEDFKMYPGKGVYCKNSYGHICAGNSKFLNENNIDFNIGSKDDLDVDSILNHLKQEGKASIIVALNGEIIALIGLSDVMREDSKAMIESLHDLGTETVLLTGDNTETANYFASRLGIGKVYGNLLPQEKLDWIERFKDEGKKVCMIGDGVNDAPALKTADVSVAMGSVGSDVAIEAADIALLGDDIGKIPYLKKLSNSTLFTIKANIIISMTINAVAIVCSVLGLLNPVTGAIVHNAGSCLVVLNAALLYDRKFDDSIKRIDTENVEHSHYHFHNDGEHSHSHEGIRIIDEIKTDNGIKHMHIHKHALNRQSCEAYHN

SEQ ID NO: 6045 - protein, 273 aa, Methanobrevibacter ruminantium
MSCYKYWGKIEEIANKLSSYGDLDNEGLSALDGTDIDEITKILDEIEVIAHDKEIDFDSAKHILDDEKMNKALQLIRKFYVYIGARLERENALTILEADDPKVALDSFHFYDRYIGLIDNERQLANFNENKTFVFLGSGPLPLTIIMFNMVTGCKCIGIEQDPDVADLSRKVLKRLDLDEGIEIVTGNEKTIAELDYDILMIAAFAEPKDRVFANVWDIVDEDTPVLYRTYTGMRAILYSPVTEKDTRGFHKEVMLLPRGKTNNTSVLIRKIS

SEQ ID NO: 6046 - protein, 203 aa, Methanobrevibacter ruminantium
MELTGKNISFKYSSGSRQILKDVNITVDNKKILGLFGDSGSGKSSLCKILAGHIKRYEGEVRLDGQEIPKGFDPIQLIYQHPEKVMNPKWKMHDVLGESWEVPDDLLEDFGIQKSWLNRWPAELSGGELQRFSVLRALNPNTKFLIADEMTTMLDAITQVQIFESVLKIVKERNMGLLVVSHDRDLMDIICDEVIYLDDINNI

SEQ ID NO: 6047 - protein, 354 aa, Methanobrevibacter ruminantium
MSDLINVSNISISFTQYVKGLNQRELKVITDLTLDIKEGEIVAVLGSSGSGKSLLAHAILGILPHNANLSGTMVYKGEVLTEELKEKLRGDEIALIPQSVNFLDPLMKVSDQVIGECKDEAEEKEKRAKQRAIFEKYNLSEEVDDMYPFQLSGGMARRVLVSTALLTNPKLVIADEPTPGLDEESVEETLNHLRQMAADNVGVLLITHDIDAALKVANRIAIFYSGYVIEIANAEDFSGEGENLLHPYTKSLFKALPLNGFELTKGHQPLHGEIPVGCPYYDRCPHKMDDCDKTRPHLIPIDENKRVRCFKYEGEIKDSSEEQVVDSSEEQVVDSSEEQVMDSSEDQIKDGSEE

SEQ ID NO: 6048 - protein, 286 aa, Methanobrevibacter ruminantium
MDESANKMNKFDVLGSMNLRTKTLLAIGLSAFILIVVVLVSFFIDPTSITTDWSIMNQPPSLEHLFGTDWMGRDMFTRTIKGLGLSVQIGFFASILSSIIAVALAFLSSFNKYLDSFVSWLIDVFLSIPHILLIILISIALGGGAFGVLVGVAFTHWTSLARVLRAEIKRIKTSEFVTISERLGKSKFWIARKQILPLVISQVIVGTILIFPHAIMHEASVTFLGFGLSPHEPAIGIILSESMKYLATGNWWLALFPGLALLILVLLFDIAGENIKKMLDPASAND

SEQ ID NO: 6049 - protein, 330 aa, Methanobrevibacter ruminantium
MLDKQKILKFLGYKLVRFAILLIVVILLSFILIDMSPINPVNAYISNMVVSPEKIAKLEAYWGVNQPITEKLINWLGNIITGDFGTSLIYRTPVLQVIAEKFTASLILMLTSWVISGILGFALGVLAGFKRDTWIDRVVKVYCYVLQSAPTFWIALLVVMVFSIYLGWFPVSGGVPIGALSQDVSFFDWLKHLILPAFTLSILGVASIALYTRDKLIEVMTTDYFLFAKARGESGWTLIKRHGIRNILLPAITLQFLSFSELFGGTVLVEQVFMYPGIGQAAVSAGLRSDVPLLLGIVIFSAIFVYCGNLIADILYNFVDPRIREGEENG

SEQ ID NO: 6050 - protein, 537 aa, Methanobrevibacter ruminantium
MDKKIIIGAVVALLVIIVGAAVLMGGGTTERGPGEIVVAAYSHGGEPEAGFDPIAGWNYYAEPLIQSTLLKMTPNGTYAKDLATDYEISDDYKTYTVDLRKDVKFTDGSDLTAEDVAFTYNAAKESGASLDLSALDKAEAQGDYKVKFTLNKSDSTFLDKMAYIGIVPSDSYNNESYGENPIGSGPYKFVQWDKGQQVILEKNPDYYGKQPEIEKITILFAQNEAAFNLAKNGEADIVAVPLEYGKEKLDGYTMYLQDTIDVRGVSLPSVPDTGELSPDDNYTIGNNVTCDIAIRKALNYGINRTALAEGALNGLGYPSYDGIAHQLPWANKEAAIEDGDVAYANKTLEEAGWVDSDGDGIREKNGTKASFKIYYSASAPERQALAVGAAEQAKQFGIEIEPVGAEWDEIYPNEFSQGVLWGYGSTDPSDMYGEYYSSSDFNPARVNNSAVDKHMDDAFAESREDSYKDWSAVSWDGSTGISPKGDANWLWLGEIKYGYFVNDRVDISNDTALLQPHGGDLFSNVYDWTMTNATAEK

SEQ ID NO: 6051 - protein, 321 aa, Methanobrevibacter ruminantium
MVSVNLEAKKTVDVMIEKADDLNIAVSKLENGATVIDCGVNVAGSFKAGELYTKVCLGGLADVGISIPGDLSEKFALPSVKIKTDFPAISTLGAQKAGWSVSVGDFFALGSGPARALSLKPAETYEEIDYKDEADLAILTLEADVLPGEDVAQYIADECGVDVANVFLLVAPTASLVGSIQIAGRVVENGTYKMLEFLKFDVKKVVHAAGIAPIAPIDPDGLKAMGKTNDAVLFGGRTYYYVKSEEGDDIAAVAAQLPSSAADGYGKPFFDVFKDAGFDFYQIDKGMFAPAEVVINDLTTGKLYKEGFVNAELLKKSFGIE

SEQ ID NO: 6052 - protein, 318 aa, Methanobrevibacter ruminantium
MITTVVGSFGIDLKEPKTLGEKIKSSIGMYDPYKIAIEEAVKLQLDCGIDIIGDGQPRGDMVGSFVKHIPGFSYEMNSSVIVSKIRAPQVDIMIKDLKYAKKVLEAEIKARNMSGDEANRKGVKLMLTGPSTIVHSSRLESFYKERNPAIIDCAYALRREVESAEKAGASYVQIDDPFLSTGMVDLKVAKESIGILTDGIEMPMAMHVCGNLDGCFKEIAKFPIDILDCEFAGNNVNIGILEENASLLSGKKLGFGCVDSAMNAVDDKEEVRALVQRGIDAVGKENMLLDPDCGLRKVDIPIAMEKLKILSDLAREFN

SEQ ID NO: 6053 - protein, 102 aa, Methanobrevibacter ruminantium
MSFCLETYLQQNDDYKILIQRSGVKQCYKLIEDNAKEIIHVNPGDKVLGARLIGLPPIPVGINEEEGTILITYTKPCHGTAAIEIPISQEEIQNVRDMDIGA

SEQ ID NO: 6054 - protein, 153 aa, Methanobrevibacter ruminantium
MKALVLLGCPEAPSQTPIGLYASYKLGQMGYDVTVSSNPAAGKILDISDPEGVYVKKRVDIEKCLDEIEEGDYDLLVGCVHKDAAATFFITYYHILKCKALALVFSRDAEEVAEFADMVESSTDADIIAVRAFHNPNPIKVRFDKYLKTLEEE

SEQ ID NO: 6055 - protein, 169 aa, Methanobrevibacter ruminantium
MGLISDTHISEKRGKLSNQILESFKGVDLILHAGDISSQTVLDKLNSIAPTIAVEGNNDRARKTLDLNPSEIIEIDGIRILLIHGDKLPSRDFDKYCKFALKENADILISGHSHRPHLERQEDILMINPGSPNRPIKSDASIAILTIDEEKEHKNKLDKVKVEFIKIEK

SEQ ID NO: 6056 - protein, 38 aa, Methanobrevibacter ruminantium
MLICPICGYPLDSDGRCWNCGYWVETHPLDPFQPGSGY

SEQ ID NO: 6057 - protein, 42 aa, Methanobrevibacter ruminantium
MLDCPVCGSELDEKGQCWVCGYNMAPCDHPDDYDYDDFEPQL

SEQ ID NO: 6058 - protein, 167 aa, Methanobrevibacter ruminantium
MTFKKEKFIKLLMFIISRSSDNYNVGKTVLSNMLYFIDFNYFETYGESLTNEIYIKSYLGAVPSHFDEIVRELIYYNKIYRRREPYYYHHINKYYLTSLHNIDLDYKELIVVGGVLDNLMGFSAVEIVDYISGDAPFKIAGFDEPLDYSFVFYRDFDYSVRNLDYYW

SEQ ID NO: 6059 - protein, 602 aa, Methanobrevibacter ruminantium
MKNIRQTLSTIGKMLSPLKKSIPSIFLIFIFLLIDVYCNLTLPSYTADIVDVGIQNTDFNYIISVGTMMMTMVLIGVLATIALSYFSSKVSAAYGRDLREISYEKILKFSNFELNKISRSSLITRNTNDVYQIQIFLGLLFTTILFAPILGIGSIIKAMELGTDLLWIIVVTFASVAILLGIIFIRTVPYFKVMQELIDKINQTSREILMGMPVIKAFIRQDYEEERFEKTNEEFKEVNLHVFKTLFLMIPAMTMILNVMIVLILYFGAYDAINGKILTGTIIAFIQYSTQIVISFLMLGGFTIMIPRILVSGRRVGEVLNTEISISDGPIDKIDENPTIEFKNVGYSYPGSEKETLKDISFKLEKGKTTAIIGGTGSGKSTILNLIPRLQDVTEGQILVNDKNIKEYKLSTLRERISYTPQKAILFQGTVRSNMQVGKEDATDEEIEKALNIAQVDFIESLDDEVTQGASNFSGGQKQRLSIARSIMDKRDFYLFDDCFSALDMNTEAKVKENLKDLKESSSILIISQRISTIMDADEIIVLDEGKIIDKGGHDYLYKNCDIYKEIVSSQIERSEDLIYDNEETASFTIDSSSIKKAAGGK

SEQ ID NO: 6060 - protein, 595 aa, Methanobrevibacter ruminantium
MAPRPRRLPPEKPTNVKEAIKNIFGLLMGYKLKLSITVICGILSTVFSVISPLLIGLATTAIFDGINSGNMNLEYIINLLITVVILYIISAVFSYLQSYFLLEITTDISYNLRKELIEKITHLSMGEMDKNTRGDILSRITNDVDSLQTGLNQTFNQLLSGVITIVGVTIMMLSINIWLTLATIVLIPIAFLIITFVTKHSQDYYTKQLTYRGSLNGQIEESFTGHEIIRSYNQEEQSMETFREDNENWYEQEWKSKFYSSLSAPLMNFISNFQYVIIAVLGAVFVLQNAIAVGDILAFIQYSKNFTTPIQQITRVMNMVQTAMAASERIFGFLEIENEENPSKEKIEKINDSITFENVTFGYTKDEPVIKNLTFTAKKGEKIAIVGETGAGKTTIVKLLMRFYDVDDGEIKIDGVNINSYDKHSVRSLVGMVLQDTWLFNDTIYNNIKYGKLDATEEEIISASKEAHADHFIRQIPEGYQSELNEDVDNISHGQKQLLTIARTIISNKQILILDEATSSVDTRTEKIIQKAMDKLMEKRTSFVIAHRLSTVRDADKIIVIEDGRIIEQGSHEELLEQKGYYYNTLNTQRRENIV

SEQ ID NO: 6061 - protein, 200 aa, Methanobrevibacter ruminantium
MNGGNNLDNNCKNLGNILNPTEVNNQLLFHKFIMINEILDKRNKKQNPEMKSITKGQGRLIVLLKRKDKLSTKELSEILNVSVSSLNETLNKLEQKNFIKKVPSEKDKRILLVELTEEGRQLEFKNHEDIDIFDFLSKEEKENLNDYLNQLTLSLHEKFKREDPEKYAKIVKNRKEIFDKYFKDENNNETCFEFIDCSKK

SEQ ID NO: 6062 - protein, 245 aa, Methanobrevibacter ruminantium
MANAIITGGSRGIGKAMALKLGELGYNVVINYRSDSSKQLTEDVIAEIKDKYGVEAIAVQADVSKFEDCKKLVEAAVDAFGEEIDALVNNAGITNNSNFIDLEPERYEAVINTNLVSMMHMCHLCLPYMVDRDTAIVCTASVGGLTGVINQADYCAAKTGVIGLCRALALEFAPRKVRVNSIAPGMIMTDMLRGVNQDELNALAATIPLGHIGEVEEIAGALEYILTAPYLTGQVISPNGGFVLQ

SEQ ID NO: 6063 - protein, 343 aa, Methanobrevibacter ruminantium
MKIWIDISNAPHVRFFKDVIKYFEDEGDDVLVTARKFGDIHKLMDMYDIDFISVGKHGVTLEEKLKESAERVVNLADLISGEGFDVALSKHSIELPRVAFGLGIPSLFVLDNEHAMAANKLTLPLCSKIIVPNIIDMWKLMEYGANPNDIIRYNGTSELMHFNNFVFNENIFEDLGLDLPLQRTILMRPEPSLASYLNTDCRKSVLSPVVDVLKEYANILILPRFKEQAEIFEGIKNVTILKPPVDTSSIIKACDLVIGAGGTMNREAAILQTPVISCYPGDTLSVDQFYVNNGLMYRTTDLEDITKQALSFIVNPHKPIDFKTDDLFDLIVKNTYELGGSKK

SEQ ID NO: 6064 - protein, 253 aa, Methanobrevibacter ruminantium
MHKVADVEVAKNIMDANAKLAHKNLHLLEDHDIFCVDFVGAIGSGKTALIEEIIENVDEKIGVIAGDVISKFDAGRIESHNVPVVGLNTGKECHLDAHLVGHGLGDLPLDDIDYLFIENVGNLICPVDFELGSHMRVVVVSVTEGDDTVEKHPLIFQNSDLVIINKIDLAEAVGASVDKMVCDAKRLNPDVKVITSSLKEGKGLDEVIAAIEDCKAHVAEHHHHHDHEHEHDHSHDHEHSHGHDHSHSHEHSH

SEQ ID NO: 6065 - protein, 124 aa, Methanobrevibacter ruminantium
MHELAMAQGILNAVLETAEANNAIEVTEIVIEIGKLAMLNPEQLKFMLGVLCSETIAENAELIVEDIDVEIKCHNCDFEGVANVDDSDHYAPMILCPKCESHRVEVKNGKDVTVRNISIEKEDE

SEQ ID NO: 6066 - protein, 306 aa, Methanobrevibacter ruminantium
MIIGGSASQKLAANVAKELGDVLCPIETKKFPDGERYIRIKSEVDKEVTIIQSTGFPQDENLVELLFLIRTVKDLGAEHVKVVVPYLGYGRQELRFKDGEAISAQLVANLIEESGADEFISINLHEDSVRDFFNIPTANLSAMPPIAEYIANTVENPIIIAPDKGALGFAEEIAEILGCNCTYMSKVRLGPDKVETTIVDIHSDFDSEDLAKVKKDSKVNIDSVKDKEAIIIDDIIATGGTIVNAIGILKEHGAKSVDVYCVHPVLVNDAVLKISAAGARELASTDTLKSDVSSISVAKIIADVLR

SEQ ID NO: 6067 - protein, 367 aa, Methanobrevibacter ruminantium
MLLIAQNHFQLILEVGLILLATMIFVINLVPLSLSVVTFLSLFLSGGFTILFGADLAFLVLSFGQHEFTHPFGPIALLAIVTALASLKVMEGSGVDISRLKNIVYVFLIAITVFGGAMHRSFLLLWFIGLFIGYTIISKSFRQKSILTIRRILMFFLAALVAFGLLELVSRILSMEVFSPLLRISRLAQNSLASLKLVIGNTQLIGHDPASSYWSDSTGFADGYISLPMQFILMFGLPFPLFFGLLVTKKDTIDYMLPGIFGYAYDFGYLTFVILLLLVLFTIIIGLLVLREYRLKREKNNKKYLGKEVLLIGSLTGFIAQAIIGLFLFNRTINGMALLTFLFLGSLVLAHVVTIRRDSNEVLSQQI

SEQ ID NO: 6068 - protein, 159 aa, Methanobrevibacter ruminantium
MVNIKTVALAVIAIIVVLLAIFAVSNVVILAQDDTEGGIPGVDMAALWSLNGGFQWIYPGSSFDPEGRTLHNIYMLDDPYGEVKTIMQYTYNVDPHILVIINDQAAAHIFGDNILDTIRQHDWVEGHSRGDAVGMSITSVNPLPIIPDILMGNIKIMFI

SEQ ID NO: 6069 - protein, 724 aa, Methanobrevibacter ruminantium
MEEKKIESTDVEVNESKDLNLDSTVENNEIDKTEELDASSEIDENEELGTSSEVRETIVIDTASEVVEADVVSETIDSSESVKDEEEDSNPLDVEYVEEDGKRRIKPMLDYESLSNTSEIEVPPLLIDQVIGHEESVETIKKAAKQRRNVLLIGDPGVGKSMLAKGMAELLPPEVLEDVLVYPNGEDSNYPLIRTVPAGQGKKIVKANKANAKSGDEKKMMITMFATAAIFVLGILYQRIFEAIIAALLVIFISMQIKPKANNMSPKLLVNNGDKRFAPFMDATGAHAGALLGDVRHDPYQSGGLGTPAHERVESGMIHKAHKGVLYIDEIGTMSMKTQQELLSAMQEKKYAITGQSENSSGAMVRSQAVPCDFVLVASGNIQVLEGMHIAMRSRIRGYGYGVFMKDYMEDTEENRKKLVQFVAQEVKNDGRIPHFATDALDEIILEAKRRAGRKNALTLRLRELGGLVRSSGDVAIEEGADLVTAEHVVTAKRFARTLEQQIVDRSIIQRKEYSVFHSSGGKIGMVNGLAVMGDRSGIVMPIAAEMAPANSKNEGKIIVTGKLGEIALDSVQNVSAIIKKYTQVDISNHDIHVQFLQSYDGVEGDSASVSITAAVISAVEGIPIDQSIALTGSLSVRGDVMPIGGATAKIEAAAEAGIKKVLLPKSNMEDVMLEKKYEDMIEIVPIETIEDVLENILINGSKKEKLINKNERNQWSSHKQGLY

SEQ ID NO: 6070 - protein, 546 aa, Methanobrevibacter ruminantium
MTKCLMIQGTASNAGKSLIVAALCRIYTKRGYKVAPFKSQNMSLNSYTTKENKEIAIAQVLQAKAANIEPTVDMNPILLKPKGESCSQVIIQGEAVGNKDFFRKYDKTKATQRDIDNNLMDDEDYRIIAKEAVIDSLNNLKEDYDIIIMEGAGSPAEINLREGDLANMGAAEIADANVLLVGDIDKGGVFASIAGTFLLLDDADRSRFKGVIINKFRGKQELLCSGIERLEEIIQVPVLGIVPYAENLQLPEEDSASLKEHNWTKEFKNNDDHIIIGVVKLPKIANFTDIDPFDTEDDVEVRMIEVHNYKDKIKDIDALILPGTRNSTEDIMELEKTGLAQEIRKLSNESKIPIIGICGGYQILGNKIYDKNHKESKLDEVEGLGLLDIESEFIRESKVVKQSIGRIEINDNITGLNNSDENNIFYEIFSKINGETVSGYELHEGTTNLISAKPLFKIEKGIGNNDNDQFDGAYSKNVFGTYFHGIFNNYNLRREFLNHLRKNKGLDEKTGEDPYETSVENSLEKLANIVEEALDMDYIDKLVFDE

SEQ ID NO: 6071 - protein, 386 aa, Methanobrevibacter ruminantium
MRDVAIIGASQTKFGELWDVSFRELISQAGLGAIEDANLSGADLEAMFVGNMSAGLFVGQEHIASLISDSMGMNPVPCTRVEAACASGGLALRQGIMAVASGYHDVVVAAGVEKMTDVVDATPAIATASDQEWEAQQGATFPSLYAMIAQRHMYEYGTTREQLAMMSVVNHKNASNNPNAQFPFEVTVDKVLNSSPVADPLTLLDCSPVSDGAAAIVICAAEKAKEYTDTPIYVRASAQSSGTIALHSRKDITTLDATIAASRKAYDMAGVTVKDIDATEVHDCFSINGLLAIEDLGFAKKGEGGKVLEEGQTNIDGDCPINPSGGLKARGHPLGATGIAQAAEIVWQLRGEAGKRQVDGAEIGMTHNVGGTGGTCAVHIFGRDLN

SEQ ID NO: 6072 - protein, 346 aa, Methanobrevibacter ruminantium
MAGIVGYGANVPSYRIKVEEIAKVWGDNPESISNGLIVNEKSVPSSDEDTATIAVSSARYALRRAQIDPQDIGAVYVGSESHPYAVKPTATIVAEAIGATPDMTAADLEFACKAGTAGIQAVMGLVDSGMIKYGLAIGADTSQGAPGDALEYTASAGGAAYIIGNKDTIADFGTTYSFTTDTPDFYRREGQPYPSHGGRFTGDPAYFKHVLGAAKGLLEKTDSKVEDYDYAIFHQPNGKFYLRAAKKLGFTPEQYKDGLLTPNVGNTYSGAVPLALSNVLDKAEPGDKIFIVSYGSGAGSDGFTLTVNDRIDEVRNLAPTTEEILSKKIYVDYAVYAKFKGKLRMA

SEQ ID NO: 6073 - protein, 88 aa, Methanobrevibacter ruminantium
MSSGLTIGLLSLIIFGNIENLILASQGVVKAANPLKLAIFSLICVSCWLILGTVCTQQLQNYGIYIEFIGGFAIFVLGLQSMIEAARG

SEQ ID NO: 6074 - protein, 95 aa, Methanobrevibacter ruminantium
MSFAESLKEYKPFLGLLIFGNIENLVLAAQGVIEGADPFLVAGASVCFVIIWQFIGVFGTKSAMKYSRHIEFIGGFAIFVLGIQSMLPLIYQLLG

SEQ ID NO: 6075 - protein, 222 aa, Methanobrevibacter ruminantium
MSDEKMERVEDNELLINARKPEGELGDQLLDRMNKSHESLAQWGVSHLDISKDDIILDIGCGGGVNVERFLKMTENKVYGLDYSEVAVEKSKKLNQKAIEEGRCEVIQGSVSELPFDDEIFDIVTGFETVYFWPDFVNDLKEVRRVLKEDGIIFICNEAIPRDGDARQEELKELLDMNIYSDDELDQSLRQAGFSDLIIFDKSSSKVESKDVSGWICAIAKK

SEQ ID NO: 6076 - protein, 155 aa, Methanobrevibacter ruminantium
MTFGNDKENIFVKNVVDYGDLSKSDRSSNLGRFFPNRQSPKSDFDSVPSSIDEKIINILTFKDEGDSNGSNNDGTSDDSVDGVDYSLFDEELEYICSLGFNPFEEGGINRDSLEEHFNPYLENHPEELAFLSVFEDFTLVQMNFSDMIKEVYFEE

SEQ ID NO: 6077 - protein, 536 aa, Methanobrevibacter ruminantium
MAQGQPIFILPEGTNRLLGRDAQRTNILAGKVLAETVRTTLGPKGMDKMLVDGLGDIVVTNDGVTILKEMDIEHPAAKMLVEVAKTQEDEVGDGTTTAVIIAGELLKKSETLLDMDIHPTIIAMGYRQAAEKAQEILDDIAIEDISREMLVKVAMTAMTGKGTEKAREPLANLIVDAVQQVADDGVVETDHIKIEKKDGAVVEESTLIQGVIVDKEKVHPGMPSELKDAKVVLINSPLEVKETEVDAEIRITDPAQMQAFIEQEEQMVRDMVNKVADSGATVLFAQKGIDDLAQHYLAKAGIMAVRRVKKSDIEKLAKATGATVVSNLDDLTEADLGSAGSVIQKKISGDDMIFVEECQEPKAVTLLVRGSTKHIVAEIDRAVDDAIGVVAATVEDGQVVAGGGAPEIAMAKKLKEYAQSISGREQLAVTAFAESLEIVPKTLAENAGLDSIDSLVDLRAAHEKSPYMGLNVFTGDVTDMKEEGVVEPKRVKKQAIQSASEAAEMILRIDDVIASSGTSAGDMPMDPGMGGMPPMM

SEQ ID NO: 6078 - protein, 338 aa, Methanobrevibacter ruminantium
MVERANINPAMMLWARKRAGYINGFEEDLPKDIKSKYKSWESGEEKPTWTQLRKASKKFCLPSAFFFLEKVPEDDDFPKMINYRKLDADDIFENNSPSLIKQIRKSQSRREHYLDLLYELEENIPSFEIYEGSLNKKHVSNYIREKLGISLETQKTWIRKNKSKDSRHYNFLNKWKEIITRKIGVLIFESEGVALNEMRGLCIFHKEVPIILLNGKDSVNGRIFSLFHELTHLLLGQSAICGDDENIDEEIFYNAVAGEFLVPNEDLCKNTNADNMDTISNGAGGNYLNNQIKYNGEPYCAVVLEAYEKGIINGGEFSRFTNLNKKFIPFMFNRYLFS

SEQ ID NO: 6079 - protein, 91 aa, Methanobrevibacter ruminantium
MEEFRQQLVDKVVFSLVNTKQISNDDLDKRNNSISLDVRKLIIGRVLDKVNSNINYEGENLSYAQIIDKQAKKIVNYLINGEKYTGFSLRW

SEQ ID NO: 6080 - protein, 231 aa, Methanobrevibacter ruminantium
MKILIEGYNKSIHKRDNQILIMEKEGELEKINIKKIDDITIIGKGSITFDALRLISENNVRLMSIDYFGKINYTLEYPSNENIFLRKQQYKTSENHKGLIIAREMIMSKMINQKSTIKTLNKNKKLENVKIFERNINEAIKQIGSLRFGERTDIEKSKMKMMGIEGSASVDYWLAVNELLPKEIGFFSRNNRHPNDITNASLNYAYAILASEVNKALVINGLDSYCGFPAF

SEQ ID NO: 6081 - protein, 91 aa, Methanobrevibacter ruminantium
MKVLVSFEIKFKTNKEKIISILKHFGFRRMQENLYFGDVEYDELYAMQSDIMENIREYDSILTIPICKSCYLKLNVFGRNLSFKDELYKIF

SEQ ID NO: 6082 - protein, 3053 aa, Methanobrevibacter ruminantium
MNKSKKTMIMLIMAILVLLTMASVSASELEDIQVTASNGTSDAVIASEANSAYPDNAIITSEKENGDENIIATDNGKIGYENDDKTIIATNGNGGNIGYEDDDNTLITSDKELNALDKGKYQSLSVGDYHSFEELQTILNQADGGETIELNYDYSLGAGGSTLKLTKGLTINGNNHTLYGVGLDRILYISSLNTQPIILNDIIFKDGGKKDSYTNLETNWGGAIYYNPTTEGGAIGGEPADFIINNCTFENNGAVNGGGAIFWNGSLKIIDSRFFNNEIELGSGGAVYANGNLTAIGCSFSNNRVRHGLIGMDMLTTTFTDEGYWAKVIQYYSFYSVDVIPPTGGAIFCNGTCKINDSSFDNNQAGEANEMGTGGGAIHSMNDITVCNSTFTNNKAYDQHGGAILCNRSGFIYNSTFRNNVANVGGAISCFYYLNAEGSTFSNNGGEIGTTWMDEHSFDFLIDNFIGSIPIIGDIYGALQNFLDLLGVESVDVLTGQYFSVGGALYTGLDCNVDKCTFERNHAAEGGGAIYSERKVTAKNSAFSSNKVFRGDSAVSELMSSQGKNRDGGAIHAENATTIRNSEFSGNSAPSKGGAVYCAHHLEMSDSSFLYNTAYQNGGALYADTIGTISNTKFSGNSVTKGSGDGGAVYIIAQSDARFESCEFSANTAESDGGAIYIANSNSLLRLNKCTFIQNIAHLDGGAFNCRGKTEIKNSVFKRNSVDGDGQTENSQGGAAFSKGDMSISDSSFEQNMAKHHGGAAYTDGKMTVKNSNFTVNSANNGGAIYASVMNDEVTNSIFKKNTGTNGDGGAIYINDKSWPKFDSCVFSDNKCVVKSSVENSQGGAIYVRNDDSELKVTNSNFTGNAAGQGGAIFSGKVNEITNSVFKKNGASKSGGAVYIEPNCNPKIRQSVFEENVGGDKGGAVYLNSKYSYLELTGCNFTKNTAKEGGGVYAQQMSAKVSSNRFISNKATDGKGGGIYVRNYHITETVKRYTTEFVDCTFTSNTCTDNGGGLCMDSTYSVLKITSCNFTSNTAKNNGGGVWAHMINSIQWSSFSKNKATEGKGGGVHIKNDYPNRIADNPKTEVKNCQFDSNTCKDEGGGLHVESEHAKLTLTSSTFRFNSAGRGGGVYAHKVISINSCGFHNNSANYVKNNGDGGAIYIENDNDFEIKSCRFEGNTAKSRGGAIYMDSYEIKTKISYSTFVDNYAGRDDHSSTLYTFMAGHSVFTKGTYTNISLCWFGSNNPSFTEQLVDQNRVSSDKEKKPSDFGAEYLKINIKINNTRPIAGNPYKVTVYFTGNVNNNVVSFSSNTLYHSTGKFGGDGTYSNIKADKNDMTADVVLTPESRQIWGQLDHQKVYLNVNPLTKNSTMVEIRSCEDIKYPDALEVNYTLVNYTISNAEAATYIINDSEGNTVKSGNLTSPETLYVEGLKPGTYSITITIPETYYYLSSNATASFDVFKGDIEELRIVVNNRTYPEEVKAIVYASVDEDYEVTIGEETKTVTVIGGIGQVNFGSLETDTYEATVSFGGSDLYEPISNATEFTVYPEEEGTNFEIDTNASEITYGASIKVTHKLPEDATGTIKYYLNNGTVLGELPVEEKLTLDLDAGYYVIFANYSGDESFEPDWDSADVLVKQVETEFHIGLQQQVISGNPAYVTHSISEGATGTISYYLSNGTFLGEVQVGETYVSPKWKVGIYNITANYSGDRNFVPASDSMEFRINPDFSFDIYLDEDDVIYGQTTTVRPSLPYDATGTVEFYYNDTYLGKVTIGQYEIIMVDGEEYYETPGVELPEFDVGVHEIVGKYLGDKNYDPAIANVRLTVLSTETVFEINASPSEIKYGEAAAVIHKLPSLAVGTILYYLSDGTSLGELYYYEDLALPKLAVGSYEILANYSGDENFNNASASTTLTINKADPDFEIYIAFPSYDFGDSPVVFVNLPDDATGNISYYLSDGTFLGELPVDERLSLPILNVGTHTIIGNYSGDGNYNNASASMTVTVNEVSMEFNLGISAEEISYGETATVTHRLPSLAKGNITYYLSDGTLLGELPVSENLTLPKLDVGTYIIIGNYSGDENFDGDSANVTLTVIQADPAFAISISAEEAAYGETVTVSPALPEDATGTVIYYLSNGTILGELAADENLTLPTFDVDVYDILANYSGDKNYLNASAETALIVSQADPGFEISISAEEAAYGETVTASPVLPEDATGTVIYYLSNGTILGELPVDESLTLPTFDVGTYTILANYSGDSNYLDASAEKELTLIKADSTLEINDIAFDYSKTGSAEAKTSGAEGIVASVAGHDEAVVEVNGNEITVSGLDAGSYTLSVSTIVDDNHNSASKNITVTVKKIDSSLSVEGLELDYGESGNVDAAAEGATGISAKIGSKSIGVNGYSIPISGLDAGKYNLTVTTIPDRNHNPVTKTAQITVNKIDSTLEANDMAFDYEGTGTSSVTYTGATGVKASVIGQPNAKVNVKGKEISVSGLDAGNYTLEITTIPDKNHKAVSQTVNVTVNKIDSKLDFNNLVDYGSAMNVTVKTEGASGIMAEIDGKELGVDKYTIPISALDAGEYDLTVTTIPNSNHNPVSKTVKVTITKLDSELAVEDLEFDYNSTGTTNATFEGATGITAKVVGQPNATVEINGNSISVSGLKPGSYTLEVTTVPDENHNPVTAKSAIRVNKLETAISANDISTVHGADKNLTAIIRDINGNPVANATVSVSLNGSKKYVSDSSGQISIPLKSLAAGNYTATISFAGTEIYGKSSASIKVAVDKEPTSIAATNVNTQYGLEDYITAVLKDGQGNPLGGVKLNVDLDGNRTIVTDSNGQIKIATKDLTAGNYIATISFAGNGNYMASESNAIVNINRTGTRFNFKNMTTTAFDYRIEGRIGKYFYFQLVDEDGNPLANKNVCIGFNGVKYNRTTNETGWTKLQINLRCVNLYTFAVTFSGDDNYTGAFNVAMINVTHQSPKLTAGNKSYKASANTKTLTAKFKSFKGTAIVGKKITFTVNGKKYSAITDKKGIATVNVSLNKKGTYKYTAAFAGDSTYKKVSVTSKLTIK

SEQ ID NO: 6083 - protein, 184 aa, Methanobrevibacter ruminantium
MTTTAFDFKIEGRIGKYFYFQLLDEYGNPVAGKNVSIGFSGRIYNRTSNETGWAKLQINLKYSGYYTFAVNFGGDDEYAAAFDVAAINVTIQTPKLTTSSKTYKASAKTKKLTATFKSYKGTPIPSKKITFTINGKKYTAKTNKKGVATVKVSLSKKGTYKFTASFAGDRTYKKVTKSAKLTIK

SEQ ID NO: 6084 - protein, 54 aa, Methanobrevibacter ruminantium
MEIDDYFDIFGPSGHASMMYPGDLAGGAENVANCRCWVRYTNERPSNLKPYGTI

SEQ ID NO: 6085 - protein, 139 aa, Methanobrevibacter ruminantium
MYLTKFCPKCGEENEDVAQFCSNYGHDFKDVNQRMKESKRENSSFPLSGTKILLCIVLLIVLIIAAFLFTGGNADKPQNITMIKENTYGFTFVNRGVLFYNYHLDEVLPICRMISRAMTLRQDSTMQMTHWLRSIMITI

SEQ ID NO: 6086 - protein, 269 aa, Methanobrevibacter ruminantium
MNQLKEEVDSRMKSIEDNASEKTKQKLQKKQKKIDDISEADIDEQIETLEKENKKLKRYQRILDALQEKMEIDSGRVMGLTDGIFSIVMTLLIFGITLPSTEILTDAGLSSFISSILPNIGVTLVSFILLASFWIYHHEFIKLKCLNLVYLWLSMFYLATVCFIPFTTTLIGTYPEFRLSTNIFGINILLVIIFFLLMLNYASKRGFLDEEVIEKDKKYVHHTLYIILGLAVIINLLDFSVNENFIYLFFLVPIISTIRDVRFKLKNTE

SEQ ID NO: 6087 - protein, 686 aa, Methanobrevibacter ruminantium
MANDNERLQQLVRSSLLENNKLKMEIVKLKENENSLKSDKEFDELKKEYEASLSEKDQEILDLKDSHQSDLDELKLKYDDDLKTKENEISALKIQHKQDLENKSTEISNIKVKHNDELKLKDSEIDQLKQKHDEELRLKDNEIIDIEYDFDNKLKLKDSEINSLKEQFNQDLKSKSLELADFLEKFDEDIKSKNDEIDQIKEDYNKEIISKDMEIESLTNSLNANIEVLNKSKDLLSSKDETIDKLNDKVKELSDMNDSLSNMKESFDAELTNFKTLELGELNLKLRNALNDITSKDNEIQSISNDLKIANNDIVDLKRQLNESKTNANELNLKLATALSSLDDKNIEIQALNNRIASQNENIIDLKNNLVNKDNLVALQRELDSRDVAIREKDVQIQLLKDKSVSREEYAKVKNELSKKDLQIKRLNEVKDLFFELSDNSFMDSQSSSVVNKTSSDDKSLMELNNIKKELELAKENKVKFKIVEENLLDDEKASADLDKKVKLDESKLNTDLEELVNSEIDNFDDLVKSRDAKAEESKSTDASSSKGDYTSSQTNLAGLESSKAPQSDNAEIQKLKEELESYKKQEAEYKKQQEELNKYKDVYEKLTSPQLKNLNSIQSQIYYLLPDEAMDTLSIKDYLNEVAFKNLSFGNTKNILKSLERKGYVEVVKKENDIFFWKKLPIPAE

SEQ ID NO: 6088 - protein, 51 aa, Methanobrevibacter ruminantium
MIYMMNLRESLTHMRSNGLPLLNQMKVNLSVDYYNKYILTHKKTYFSKYYS

SEQ ID NO: 6089 - protein, 121 aa, Methanobrevibacter ruminantium
MNNTTKILIGVLMGLLIVGAAVMFVSATAINDVSDGNSFMGQVQNTANHVKNVASNDIKSGSNIIGGGSEFNSQEGNGYFYQINYTDGNFRQYDTKTGKLIGSGFNEDQSILGNDDGFNLE

SEQ ID NO: 6090 - protein, 553 aa, Methanobrevibacter ruminantium
MQEKIDLVSLPKKSFWKLSIPIIAFCIFDAIYGIVDMLWVSRISVEAFYAIGVSIPITSLIFSFGDSIGQGTNSMMSRFIGTGDYESAYNTLIHGILIANIIWLILVLCLIFAQGILFKVDDADSYILIFDYMVPMIIFAYVFILNNLFSETFQAEGNSHTPTILIIGSNILNIILDPIFIFDLNLGIKGAAYASVLSSLITFSVLMFLYTHGRTKIPLSRKYFKFRSYILVEIFKVTFPNFLDDAIWSFTMSFINVILIGTMGEIGPILYSVSNKIRSLLNAPTKGYGRGLMSVTGHLFGAEQFDKLKEMYKYVLKIAVCTSLVIMIVFFFVRNWAFGLFSITGMDNEIFWIAVGGIIMMTILPFSTISSKMLDGFGKSLYSLLITIIKVAIEIALISLLTQYLKDGSSVLIGIILSEIISSIVYYKFLGYLFDHFDKKYEFKYTVKAFTIKRKDKREKRRERIRQNIEEKKLRKEEKKEEFRQNIEEKKLRKEEKKEEFRQNIEEKKMRKEEKKEEFRQNIEEKKARKEEKKEEFRQGLEERKEKRKEKID

SEQ ID NO: 6091 - protein, 398 aa, Methanobrevibacter ruminantium
MGSKNFQYLDELIHSSANEIILDSDIVLDFDEESEYDDGIKLDVDDLTIDGNGHVIDAKDGLCRLKNHAKNITFKNLCFKNFKSKFPISNQSGDLIFENCRFIHNQGTIYNYFGNIWLKNCCFYRNYLSRSSSGYSVCIYNAKDSKAFVSDSHFYQNEVNYPHYGLILNDGLIEVKNSIFHENKGEDCEICVIFNRKGELLVDNCKFKDNKNVYCSYDFAELIVSILNEAGKVSLSNSTFENENRILGSIKNMGICRIIDCKFKDSLIYNSQWYSSVSRPDELDFGPYLEVEDSSFANKYDEGVIANSGLCKIASCNIDGRSYLNNDDVLFIDEKDFNLLKDNIINSGEIVFDYDRDVPIYESFKGHGKSNGTNSNLEDDLDNDKSDDGYPPLGALFR

SEQ ID NO: 6092 - protein, 213 aa, Methanobrevibacter ruminantium
MAMDLTDIGIEEGQKYEGIYTTMSKDGVKNAAPIGIVCKGKDKLGCRLFVGTKTLKNIMETRKYVVNITFDPINFVNSTIGNLDIEEFTDDEDIAILKNAEAYVICEVTDIRKMDPIKDHITSNGEAYIISSDVVKIVKNNPCAKALNRGVFALLECLTNYTRLDLVSKEQQDYFIGRFNENNRMIKRVSGPDTIKAMEILKNSMIEKGFDVE

SEQ ID NO: 6093 - protein, 356 aa, Methanobrevibacter ruminantium
MSRNFKYLDDLILRKDKKIVLDFDIELTEDEELEYWDGIKLDKDVLIDGKGHRIDACGKARIFDCSGKHIRLKNIILKNGKAINGGAIKISKDSNLEIIESKFIYNIANGTCNEGNGGAIFNKGNLKLLKSTFENNMAKGEGGAIRNYGKLNIAESIFNKNKAKRGAAIINRNDLTISKTIFDDNTAEWYGGAIFHNWGQASILESEFINNSVTEDHGNGGAICNWMRSQLNITKSSFKQNISGSAGAIYNASDCKLNISQSAFKENSARYAGAIVNYGKASIQKSVFGANKSNKFEGGAIFNYSEGNLIISQSVFESNISERVGGAIYSENDNSLKLNNCKFKHNKPDNFNVGSK

SEQ ID NO: 6094 - protein, 321 aa, Methanobrevibacter ruminantium
MKHRLNLDNKDPNYILLKEIFKIMDSRKSKSILASYGFKNLNRTIFTFKIIFISMFFGIDIPFILNELKSKKELRKYFNISEVLTADQVYKIFSEINSEKLIKCLNRILNSRNMVKRRGKKTFIVDATPVDLDINFRRNKKSKEHLRKLNLKWSYSSSKGYYIGFKATVVMDYDSMNPVCILIHSGAPNDAGLFEEILENLQKRRIIRKGDTLIFDKGYYGYKNYQIGIGKYKIVPFIFPKEKFNRTRLDDILTYPLAVFNKTKKIMEEKRLYNKLKKELLEKLDSWEKFKPIRGKIEDFFQIIETRLEYERNPQIYSKIS

SEQ ID NO: 6095 - protein, 100 aa, Methanobrevibacter ruminantium
MSQERYKHIRESLFDYINAFLINKYDELYYFNMYESAENMNWDVEYIFKLKYSLTFHEKKNLEIRIRKDLKKFLKEKFEMNIYELAILIILEDNELHSKI

SEQ ID NO: 6096 - protein, 79 aa, Methanobrevibacter ruminantium
MFYIEGENIKYEILPYKKGKKVIIYLKKTENGFVRKNKCFGTHYLEQIFDYNNKLLKETIYENPNFVDLTNFPIDLDYD

SEQ ID NO: 6097 - protein, 49 aa, Methanobrevibacter ruminantium
MNLEVFKMARILIPNYEFVKNWSEDELNDFLTTPAGIPHELMHIVRKVV

SEQ ID NO: 6098 - protein, 244 aa, Methanobrevibacter ruminantium
MECYHLLRKENYSLVRKKIENFLEKYPLKISEENYFYFNNKFEENFYFIFFIHSKYVNVSQKEDVLKNYKILKYDYPFILAAYGETLIEFDEFSKAKYFLELANKISPFDIGILRQLLRIYCIELDREKIEEIFNYALDIVYDEYYLFYIYEFLSEYYLQINQIEIGNLLSQIAKEESFNVAEKHYIKDLFNKYDINLGFNEELISHMEYIVNLLNKKGDFTESYLLNQDCADLKRFNRKFKYY

SEQ ID NO: 6099 - protein, 134 aa, Methanobrevibacter ruminantium
MSNIEKINSEIKDYVNYVQKGGKLEPFFEDICLVTTELVGFRKISNFEDLFSQFKKGDYLALFRDTQNELDELAIVVKWNNLMIGYVPRKHIPILSSLMDSGKEIYAIIDDLILDELFKDLFFETVKIKIFLKE

SEQ ID NO: 6100 - protein, 252 aa, Methanobrevibacter ruminantium
MSMIVHSEYKKLKDHLYDLVYEYEDLINHICPNIEMEYLLKFGIYEYELYKKELELNKLKFKLKLLQTEINHQNELDLNEIDKKVIDKYTEYANNLKNSMNELENIIKHKDNYFQLDEEDEKELKRIYKILIKKLHPDLNFHQENFKKELFIKVTNAYKNGDLEELKALYAMLPDEDIEEKSSLNELKELIHSFEIKIEKIKNEYPYNKLDLLSNEKEIGEYKINIQYLIDSCNEEIEEYSNKINEIIENQH

SEQ ID NO: 6101 - protein, 349 aa, Methanobrevibacter ruminantium
MVKVGVLGATGMVGQRFIQLLADHPDFEIAALAASSRSAGKKYEDATTWYMNDEMPESVRDIKVIETDPAHMDKDVEIVFSSLPADFAAKVEPEYAKDFVVASNASAMRMKKDIPLVIPEVNPQFLDMIEAQQKNNNWDGFIVTNPNCSTIALTLTLKPIYDNFNINRIYVSTMQAVSGAGYNGVPSMAILDNLVPYIGGEEEKMESETLHLLGSLDGDEVVPANFSLSASCHRVPVIDGHTEAVFVELDEEADIDKIKKTMADFRGLPQELGLHSAPEQPVIVKEEDDRPQPRMDRMAYGGMAATVGRLRKDQAFDNSFKYVLVGHNTIRGAAGASILNAELINKQIL

SEQ ID NO: 6102 - protein, 272 aa, Methanobrevibacter ruminantium
MIKVAVTGASGRMGSGIIRKISEQDDMEVVAAIEMPNTPLAGVDAGEKAGIGKIGVPIVGSEDLEKALEESGAEVLVDFTIAPAAVETIKRAADCGVNLVVGTTGFTEEQAQGNADVIKEKNIKAVISSNFSIGVNVFFKVLKDLTPILNDFDIEIIEAHHNQKADAPSGTAMTAFEVVAGALGRNPEEVGVYGRQGQVGKRTKEEIGMHAVRGGDIVGDHTVLYVGDGERLEVKHMAHTREVFIAGVIRALRFVGSAEPGKVNDMTDVLGI

SEQ ID NO: 6103 - protein, 297 aa, Methanobrevibacter ruminantium
MRFEGTAVAMVTPFHEDGSIDEEGYRQNINWLIDNDVDGLVAVGTTGESATLTHDEHRKVLDILIDEVDGRVTTIAGTGSNATSEALDLTKYADDAGADMALLITPYYNKPQQHGVIEHYTQIANSVDIDLIAYNVPSRTSLDMAPQTIVELAKVDNIAALKEASSDVDKASKTMKLLRDEGLEDEIVILSGSDELTLPLMSIGARGVISASANIDPRTMVQMVNNILDGNYDKAMELHYQQYDLIKALFIETSPAPAKEALNMMGMPAGPLRLPLVPMLEENKAILRKALEDAGIL

SEQ ID NO: 6104 - protein, 405 aa, Methanobrevibacter ruminantium
MGLIVAKFGGTSIGNGKRIRKAAQSVVNEYMDGKKVVVVVSAINKTTDELVAIADESIGKEVTEKQLAEILSLGERTSIRVFSSVLESLGVKSEYIDPSHELWPVITDDNYGKAQIDFERTEEQAQGLLSLLEQGIIPVVCGFLGRTENGEVTTLGRGGSDVTAFLLGHCLKADNVIIVTDVDGVMSTDPRKIDEAEKLDYISVEEMRDLATHGAQVLHPHALRFKDPEIKAKIISFEKGDLSDPGTEIVGPFEDSMGKKVCLHHEPISVVAVVGEDLLNQIGLLAKMTSLVADANINIYGISAGQNSITLFLDKEEADDAYHLLHDLVIAEDNLSSISLGRDIAMLTMINPDFIETPGVITEITNPLKENHINIVEISSSQTAIVLFINWEDGKAAYDLIKEVL

SEQ ID NO: 6105 - protein, 65 aa, Methanobrevibacter ruminantium
MGNIRTSFVKRISKELIETHKGKFTTDFEENKILVAEYSTVSTKHLRNKIAGYITRLVRQEANKA

SEQ ID NO: 6106 - protein, 107 aa, Methanobrevibacter ruminantium
MDEKELMSIYETEEEARNVLLKSRKRIDEIDNDLVNLISERTSLAKDIVSAKVFLGMEIYDKSREDEVHAKVSKLAQEKNIDDDILSDIMNMLTILSKNKQREFLEE

SEQ ID NO: 6107 - protein, 289 aa, Methanobrevibacter ruminantium
MHYINAKTILSSKNGMNLYRGCSHGCIYCDSRSKIYNMNHDFEDIEVKENGIRLLKNALKRKREKVMIGTGSMTDPYIPLESNLKFMRESLELIYKYGHGFTCITKSDLILRDLDLIKKINENTKAVVQMTLTTADDELCKILEPNVCTTKERVNVLKTLNENNIPTIVWLCPILPYINDTEENINQILDYCIDANVKGILCFGMGMTLREGNREYFYKKLDEHFPGLKERYRRTYRNSYGIKSPNNKKLMKIFLQRTDEHGIMNNIEDIFEYLHEFPSHESTKQTTLM

SEQ ID NO: 6108 - protein, 305 aa, Methanobrevibacter ruminantium
MIDLAKIVKSPGSATVINAISTGFGSAFGIDLNITCEAEFSSQGIDCSSDLGVDPNLMNICVKSVLSHYNIGKDLSQDDLLNDLDFGNGEGIKIRTKSNLPLGSGLSSSSALSNSVVMATAGLISDEFFLKPLSDFEMINLGIDASLEAGVTITGAFDDASASFFGGLTITDNMERKILHQEKLPEYDILVFMPDKESLSGSSDVNRMKLVGSYVKMAFEEAMNKRYLKALTLNGLLYGTALNFDNNIALDALSAGALASGLSGTGSSFVAIVEEDTIDDVKDAWASFDGNVIETKVNNEGTRFI

SEQ ID NO: 6109 - protein, 285 aa, Methanobrevibacter ruminantium
MSENNRTLITIGIGAFIIIAILLLIALVLPFSNLAVDNDEIAVITISDTITYGDNSTSAHTSKKEIESELNDAYSNPKIKGIVLDIDSGGGSLVASDEISDLIKKSPKPIVSYIGDKGFDEAYQIASATDYIFASSSSSLGGIGLSYINTDRYSDEKVTGVFNEKYLKNNKTKSNSKVKSANDLANAQKMVDQDYTLFIKKIAENRNLTADYVAELAHGKKYNGNEAKKLGLIDEIGSKSQSIEKAAKLSNATNYTVITYPEPQKKLTEILGENDIFNLKELIKI

SEQ ID NO: 6110 - protein, 83 aa, Methanobrevibacter ruminantium
MVYKVEVFTSPTCPHCPGAVRLVEKAKEELGDALDVTIYNTAEAEAMEIARKYHIMYVPTIIIDGEIKFQGAPSYDELMAELK

SEQ ID NO: 6111 - protein, 368 aa, Methanobrevibacter ruminantium
MKIAMVGQFPPHIGGVGVHIHSLAKQLIREGHEVYVITYPHKDIKDIDGIHVIGTKGINIPGLRGLMFGINAKKELKKLINEENIDIIHGHYLFPAGWASVKAGKSTNTKTYVTAHGSDIFEMYKKQKFMRPFIKKVLSDADIVLAVSNALKDEIIKIDVPGIKEKIKIHWNSVDIEKYKTTEENKDKFKKELVNEYNLDPNKPMILFVGNIIKRKNVNLLVEAKRLIKTDANLVIVGEGSELGKLKEKVKNDDKINDVYFTGARRDVEDIYPSCDLLVLPSFSESFGLVLIEALACGNAVIGSNIGGIKEIITEDVGLLINPNDSQDLANAIDKILQDEELLNKFKSNARNRAKDFSKTELPYDELK

SEQ ID NO: 6112 - protein, 156 aa, Methanobrevibacter ruminantium
MGEKEFTHLTESGVHMVEVGAKAQQRRTAIASGKIHLQKETIRMIENAEIKKGNVLTTAQIAGIQAVKKTSDLIPLCHPLNLSGIDIEFEVEEEEITAICECRLTGQTGVEMEAITGVSVALLTIWDMTKAVEKDENGQYPNTRISDIKVLKKEKI

SEQ ID NO: 6113 - protein, 690 aa, Methanobrevibacter ruminantium
MKNIPTNIKQIINDCYPYIKEFNPAQKAVIESGYLENDKNYIIAIPTASGKTVLGVMAALQSILSGGKAVYAAPLISIQNEKVKEFKKFEEHGISVGKHPSSSDLSIMVFESFDVLTRFSWDVLRDVDTIIIDEFHMIGEYSRGPTIECAITRAKIINPNLRIIALSATLENMSEIENWLDATVIEHDYRPVPLNKDVLDTEMFNTKNKNDVVVKVIEKAIEDDSQALSFVSTRRFTESLANYVAEKLKKKTTDEQKKRFKEVADKILEVPEKKGSRPTSTCLKLAESCENGAVFHHAGLFSEQKEIIEEEFRNGNILMIAATPSLMYGVNLPSKYVVIRDYTRWTSQGPQAIPVFDYEQMSGRAGRPQYDNAGYSYLIAKSMEEASTLEERYIYGDIEPTNSKLIENKDAVFRQIIAQVASTISKTPEDLEDFFKKTFYGYQMTNNSSMSFFAEESLKFEIQNALEFLLQNQILQATPSGLKTTALGNLIAKSNYTVETAVKVKEYANLVDQFSAEELIYHLAQTPDMPLISFKGRRSKDPVREKLANYGLFALEIANPEATAVSLIEWIDERNEYEIENAYNVYASSTRRAAYEASLLVRFTKNTLEVLGKYNYSKDLDFLSARLYYGVKEDIIPLVIGVKRLGRKRARALVNTFGEDLRPVSENELQKVDGIGPKLAKSIRNFADNY

SEQ ID NO: 6114 - protein, 100 aa, Methanobrevibacter ruminantium
MSFCDIRGETIDIGAFIRYTGTGTISKVVDLKEEDKQQWVKLDEPALWYAADSLEVVDEKDLINVETVDRDTLEKVKDIKEGYEELNANLNDIQGCEGGG

SEQ ID NO: 6115 - protein, 151 aa, Methanobrevibacter ruminantium
MKIKQLLGMLVLDDNANEIGKIIDADFEPETGAITKIVVSLKKNFLTSDQLDVEYNDVKSIGDYVLLKITIDKETKIKEAEEAKKAEKEAKKEAKKAEREAKKAAKEAEKEEAVAEQIEKQVEVVEAEIVDDAEEAEEAVEAEETTDVKVE

SEQ ID NO: 6116 - protein, 568 aa, Methanobrevibacter ruminantium
MDKACRIIIEDIMNGKITTRRELEVEKRQLCRDRKLKKFMSNSVILEHASLEEKKIVSNLLRKKPTRTISGVAIVAVMCHPHQCPHGRCFYCPESDIAPPSYTGEEPAALRGRMFKFHPYVQCYNRLKQLHKVGHPIDKVELIIMGGTFPSKDICYQEWFVSQCLKAMCDFGIILENISQIDDIESIKREGLLKYHPYSNNELKTYPPNDYVLIDDIQRINENSKVRCIGMTFETRPDYCKEPHVDRMLDMGVTRVELGVQTIYNHIYEKIKRGHKVEDVIEANRILRDSGVKVAMHMMPGLFPLARENPRIEQCPEQDLKMFKEIFNNENFKPDMLKIYPCLVTEGSELHKLYKEGKYRPYTDEEAVELIVQIKKILPKWVRTMRIQRDIPSTLIEAGVKKSNLGELVYNRLEEEKINCQCIRCREIGHKKTEQDYSIDDYRLFQEDYTAVGGKEHFLSIEDKNEESLAGFLRLRMPTEQAHREEIRDNTAIVRELHVYGNMIKIGHKGNAIGQHTGFGERLLKKAEEISIDQNKEELLIISGIGARNYYRKFGYERKGPYMAKKLI

SEQ ID NO: 6117 - protein, 240 aa, Methanobrevibacter ruminantium
MITAEELAQYIEFTNLDNTATEEQMKAFFDKAKEYNFYAVVVLPHYVKLAKEELKDTDMKVVTVVDFPLGAGTTESKVAEAKDAIKNGADEIDMMANIPAIKEHNFKAVKEDIIAVKEAVGDHILKVIIENALLTVDEKAGASAMCEAGGADFVKTSSGFNGNEHFYALMESLRIMKKNAPHKEIKAAGGINNYKLVNNVIAAGVTKIGTSSGHIIMDQFNHVMDNQKVSPEQKTGPRLI

SEQ ID NO: 6118 - protein, 66 aa, Methanobrevibacter ruminantium
MSELPIAPVGRILKNAGAQRISDDAKVALAEALEEKGDELAKKAVNFARHAGRKTVKAEDIKLAIK

SEQ ID NO: 6119 - protein, 428 aa, Methanobrevibacter ruminantium
MDNMKVFIETYGCTFNQADSEIMAGILNENNIGLVSTEEEADAIIVNTCYVKLPTESKVINRIKNLQKQYPDKKIIVGGCMVEVDPKKLEAIGPNCSWIGPHQLNKTADVVKSTIGGEIVREFGFSDEPKVCVPKIRKDPYIHVIQICEGCLGACTYCCTRFARGHLNSYPIKDIVEEARLAIEDGCVEIELTAQDTSAFGKDTGEKLSDLIKEVASLDGDFRVRVGMMHPRNIGNDLDNLIEAFKMEKVYDFIHLPIQSGSDKVLREMGRNHTVDDYKNIVYSFKQAIPDITIATDIIIGYPTETEEDFMKTAELIREIKFNLIHLSKYQHREGAISSSLDNIPFDDMKRRSKYLSEIKFEMLEEENKFLQDREMDALVVEKGSKGGFIAKTNSYIPVVVQDVNLGEFIKVHIDKTTGTYLIGHKID

SEQ ID NO: 6120 - protein, 210 aa, Methanobrevibacter ruminantium
MVCPVCGSDDAIVLKNKLIDAKSKEIRELLLKCGECGSVYKERLTQDKPKPFRLIISEHEDTHKVSIDLYPDEELRVGDFLMSELGEVKITSLELPDEKRVQKAIASEVKTIWASSEEIPARFGVSIDLHGKVASFKCETDRDFKIAVDDIIKIDKYVARVHVIKTEERKTTKGYAKARVIKRVYAKPVKFNHFDYDLSKFIVSFKPLNK

SEQ ID NO: 6121 - protein, 161 aa, Methanobrevibacter ruminantium
MAEIKGKVWNFGDNIDTDVIIPGRYLRTFNPNDLALHVLEGERPDFTKNVEKGDVILAGENFGCGSSREQAPVAIKAAGVDVIIAKSFARIFYRNAINIGLPVVVADIEADDGDIVSVDLENGIIINETKDTKVEFQAFKEFMVNILSDGGLVKHYLKTKE

SEQ ID NO: 6122 - protein, 326 aa, Methanobrevibacter ruminantium
MIIRAPSRLHMSLIDLNGSYKRIDGGIGLALKDPQFVLQSEETNEKGYTLEFADSISEDSREECIEKIPKAAEKIAELCDIESGFHFKVLEAYPPHSGLGSGTQISVCTAHLMTETVGQKYTSRELSTMVGRGGTSGIGTFAHDLGGFIVDGGHSLEEKPGFLPSSASKAKPATLIARYDFPEEWDILLALPEVKEHMHDQQEVNVFQTYCPIPKTEVEQVSHLILMNLLPFLLEKDIVNFGWAIKELQKVGFNKLEHSLDASFLPTMEAIDEAGAYGTGISSFGPTLYTVFDKNNKDIVKAAGEIVGEDRVKVVKAQNHGYVLEK

SEQ ID NO: 6123 - protein, 509 aa, Methanobrevibacter ruminantium
MFIKKTTSLCPHCLKPLEAEVYQEDGKVWIEKECPEHGVFKNTYWSDAELYDRVDQVDSITQDLENPMVNKVAKCPQNCGICSEHESYTVLGLIDVTNRCNLKCPICFANAATSKKLFEPTQEEIRQMLRNLRGEKPVPTPAIQYAGGEPTVRKDLPDLIRMAREEGFSHTQIATNGIRIAKKEGYAQELKDAGLNTVYLQFDGVTEEPYLVARNKNLLDVKLEAIEKCREVGLGVVIVPTVVKGVNDQQVGDIIRFAIQNIDIIHGVNFQPVSFSGRTPSDQVEEQRITIPDFLNLVEEQTDGQISKDDFYSATSVQPVSKFIGALRNEEPPVTLNCHQHCGSATYIFMDNDKIIPITRFMDIDKFLTFLNKYTEKLEDGGFAIKSRVLASAAKNLPKVLNEDEAPTGLDMKRILLDIFKTQSYDALGEFHINSLLISCMHFMDPFNFDTDRVKDCVIHYAVPDGRVIPFCTMNSIYRQGIEDEFSTPLNQKMTEFNDKTGEEEEDAD

SEQ ID NO: 6124 - protein, 100 aa, Methanobrevibacter ruminantium
MKLSEWIIINKIPNNKILTILEEYENIEAIEFNDPEDVKAEVEEHGLRYVAHKYGVNEKALKEYGWRFKKRDAKGKKREETPIIKTDEQKPLVDIFGDEE

SEQ ID NO: 6125 - protein, 191 aa, Methanobrevibacter ruminantium
MALELMNLLISILGAVYFMLPAYVANLSGLAFGGGTPIDGGANYRDGNRIIGNGVTWKGCINGTIIGTLVGVVLGIVGMYYGDLSTLTGGVIDLHVYGSLFSGLILGFLMAFGALFGDAVGSFIKRRMNLQSGQPAPIMDQLDFVLGALIFSLLVVRISWSFFIIICLLSILLHLSSNTIAYLLGIKDVWY

SEQ ID NO: 6126 - protein, 229 aa, Methanobrevibacter ruminantium
MGKIFKIVTIILIVIALAILGVFIYSDGHSEKIGENNLGVVYKVTYGHSNDPNVTIGIVSGMHSREKLHQYVLPYVSKAFAFLHPDVKIVNYIVNVTKDPEDFTKGRANGESLVHDYVVKDVKKEDFDVVIIGHDHEPGYGEAYYIATPVMDNASVKLAKKVTKDIGFNHYTRNKSQPTTSTSILKVDKPIVDAGTRVFVYEIPEVDGKVNAFYKSYQLVNATYNRLKK

SEQ ID NO: 6127 - protein, 340 aa, Methanobrevibacter ruminantium
MKVAGFDIGGANTDLAIIDFENDEIKEIKTDFEYLPMWSDNNRLGNVLIDLIEKICPLEEIDAVGISMTAELVDAFETKTEGVLDIATTCEKLFECPVAYIGVDKVLSLAELVQNPIEVAAANWIATSQIIAEIEKDCIFVDTGSTTTDIIPIKDGRECAKGRTDFERSATGELVYTGTLRTNLTSFVDSVPLNGNQYRVASELFASTADVYNVLGLISEDDFTCATCDGAGKSKEDSARRISRILCADLDILSKEDILEIADYIHKEQVKQIASGLKDVSDREGLTKVVVTGLGKDILCAEAARLLGLEVKSMGDYYTDDECTVAPAIGTAIMMKNYLK

SEQ ID NO: 6128 - protein, 388 aa, Methanobrevibacter ruminantium
MDLKDVTDDSILVFELFTASGIEDLSIVSEAVELIRSLVNDLKDEDTYVLIAEPFKNIFDDFDFDVKTITIDNLEEWLEENAYIFDRAMFIAAENDMNLYNLTKLLENKAVKVYGSDSYAVKLCSDKYETFDYLINRVNQPMTYNILLNKKTYWKRAIQIFFDKINGDYGDGSDNGAVPIMQKPKDIPVLDNSDRDEVKKYKLIAKPRFGVDCESLKIISSKRDIDELEEIYPEGSRFIVQEFIPGDVCSVTLISDGKNAIPISLNKQIVEIDENGGKYLGGYVPYEHEMKEKAFEVAKKACESIPGIKGCVGVDLIIADDVYLIEINSRFTTSYVGLSKVANINIGKTIVDLIDKKISIEELGEIEYKDKVSFYKDENGILDIKIGE

SEQ ID NO: 6129 - protein, 442 aa, Methanobrevibacter ruminantium
MKIAIVLGTRPEIIKMASVMDEIENRGHELLLIHTGQHYDKEMSENFFIDLKLPTPNYNIHVGSGSHGAQTGKMMEGIEEVLLDEKPDILLVQGDTNAVLAGALVASKLHIPVGHVEAGLRSFDETMPEEINRLAADICSKLYFVPTEESAINLAMEGISRKRIFITGNTVVDACFRNLEISKSRDKDQYDEGLQELDIDNMDNILTLTMHRAETVDDKERLTNIIEALEELSDMNIIFPIHPRTKKTMENFNLFDRLNDLPHVHIIKPVGYLDFLLLISKSTIILTDSGGLQEEAITLDVPALTLRYNTERPETVTAGGNILVGSDKEVILENARKILDDEDFANRMKSAKNPYGMGNAAELMIKIIEESDKNDTLKMVAPDEVMASFTRHMKAVDEDITVVDFEEKNNSLIKIAFQGEDIKYPYDELNLNGLTIIYEDYS

SEQ ID NO: 6130 - protein, 213 aa, Methanobrevibacter ruminantium
MFEFTKNELRDLVIAFIVLSIAFAIANVKFDLHAFISILPIVMFGVGVGFLLHELGHKYVANKYGYKAEFKLWPIGLLIALITSLIGWVFALPGEAKITAENIDEETTGKIAIAGPMANIGLGLLFIVIAAITYPLKSSFTLFELIYLVSTVGFSVNAFLATFNILPFYTLDGTKVMKWSVKAFIVAFAIAAIMMLSSMFIGAENMILMLIGS

SEQ ID NO: 6131 - protein, 225 aa, Methanobrevibacter ruminantium
MNQELIINNKEYRKTEPLESLNMFKGQLYETIVTTQSNEHIKNAAPIGVICKDSNHIVIHLDNCVHTHRNIIENGELIVNITKDPLIFTYSTIGELDDEYFDEFNGFPLIKDSLGFFKAHVIKKINKKRENDFNDGIGHVVTCEVEDIFIREYNEIVPLNRAMNAVIESLVYYCRFDAKYKHMQKEIWTHMKELNRVAQKVGNEKEKKSMKAILDKMRENHDYLD

SEQ ID NO: 6132 - protein, 154 aa, Methanobrevibacter ruminantium
MEDVSEFKGINGQLVSFKNEVEGADKITFIGSPGVCTPFAELLSYAVRNKENHFIPLLDIDDAHQFEFKPYGMVLKDEVSNPRDADVVVLLGGLTMPKYEVAFDDLNALIGDVLKEDGKIVGVCFMDMFAKAGWLDKVDFDSVIDASILGVVKK

SEQ ID NO: 6133 - protein, 268 aa, Methanobrevibacter ruminantium
MADKDKIFEDNAYDDSEYIYNDTYEGSRNDYDVEYDESEDYEYEEPLISLFDIVKEYDKGKVIALNKVNLDIYEGEFVSIIGPSGSGKSTLLNMLGALDVPTSGEIFIDGLNIGKEKDLSDFRRETIGFVFQLHNLIPNLSVWDNVQIPLVGTGLPEKEMKKRANEMIDAVGLSDKKKQKPNKLSGGERQRVAIARALVNKPSIILADEPTGSLDTKTGSMVLNLLRAMHDVYNVTLIVVTHDMEVARMADRMITIKDGQIVKDVDNF

SEQ ID NO: 6134 - protein, 378 aa, Methanobrevibacter ruminantium
MRFISLIIKNPFRNKTRSFLSIVGIAIGIATIVALGLITTGMEQSVQTTMNEGAAEITVTNITSIGAGTIDSSLVDELKNITNVSRTAGILSATDQNFVDMASSNDMSSMESSTRLYGINRADLDLEGIKDINGSFFEEGTKQAIIGKQYAQMNNMSIGDNISALGEEFEIVGVFETGGVLADSGVYVSLETLDEVTGAEGKVNQVIVKTDEGVNDTVVADAIEDKYENLTTITSEEMSQMLDNVIGILDAVSVAVSALAIIVGAIGIVNTMVMSVYERTKEIGVLKSVGWKSRKILKMIIGETLVLTILSGIVGSAFGILIAEVGVRLMGDTDFALGYSPSTFIMAFGITIVVGLIGGIYPAYKASKLAPTEALRYE

SEQ ID NO: 6135 - protein, 290 aa, Methanobrevibacter ruminantium
MKRTALKIAYIGTHFHGFQRQPDVRTVEEELIYHLRKLEYIDDLKASRFRIAGRTDAGVHSLGNVISFQSEKEVRVNQINNSLPDDIQIIAWAPVRFGFKPRFAKRRWYRYILFEEDLDIDLLRKTAEVFKGTHDFTNFTKRKQKTTVRTIEDIRITKPIIDEEDKNKKSDFAHLNKSYSPIFVDIYGESFLWNMVRKMMRIFLDVNYGKLTLDDVERLLNPEEGEPRAYIKVVDAENLILMDIEYEGIRFRYDDYACERFRRYLIDNLFELQKTYSITESMLNCLDDLI

SEQ ID NO: 6136 - protein, 298 aa, Methanobrevibacter ruminantium
MRKEKESKESISIYDNYKIDMELKHTDKQYYFIFYKRRLFLINNKIPLVKDLISLNINDSDVKNSIYIGQFHSKDCFAVELDEEFDCEHYIKANDDSQFIELYFVFDIDEETYLVAGRAIQIIDWENTHQYCGRCGAKTVTSDIEMAKVCPECGFTSFTRICPAIITSIIKKDESELDQEGRPINKVLMARHSYHTAPRYALIAGFLEAGESVEEAVKREVMEEVGIEVKDIEYFGSQSWPFPNSLMIGCICKYKSGEIKVDENEILKAKWFKKEDIERPASEISIFSKLLKNFIENY

SEQ ID NO: 6137 - protein, 204 aa, Methanobrevibacter ruminantium
MELIAKNISFKYPSAKDYLLKDVSIELDNKKIVGLIGDSGSGKSTLCKILSGYITKYEGEVTFDGQPFHKKGFKPVQLIYQHPEKVMNPKWKMDQVLSESWDVDDATLSEFGIQKSWLTRFPQELSGGELQRFSVVRSLNPNTKFLIADEMTTMLDAITQAQIIDSVLKIVKERKMGFLLVSHDMDLVETVCDEKIYFKDLNKA

SEQ ID NO: 6138 - protein, 446 aa, Methanobrevibacter ruminantium
MDKLLDVENVSISFIQYTKGLNQRDLKVITDLTLDISEGEILAVLGSSGSGKSLLAHAIFGILPENARLNGKIKFKGKELSQADKEEIRGKGIVLVPQSVNFLDPLMKISDIAIGHCDSEEEKKEKKIKQREIFEHYNLGPEVDEMYPFQLSGGMARRVLVSTALLADPDLVVADEPTPGLDEKTVEETLNHFKHMKDDGIGVLLITHDIHAALEVADRIGIFYSGYVIEIALKEDFSGDGENLLHPYTKALYKALPANGFEVIKGHQPLHGEIVKGCPYYDRCDWRFDRCKEERPELMDIGLKKIRCFKYDGVTEDMIKDGAIEETAEANIEDAANEVVEKAAELVDESNIEESAEAVEGAEEAVSETEDAIEEEVAEAVEGAEEAVEGAEEAVEVPEEAVEEGTEEAVEESSEEAVEESSEEAVEESSEETVEESSEEAVEEGA

SEQ ID NO: 6139 - protein, 168 aa, Methanobrevibacter ruminantium
MDIKIKEIENDESQIKSVQEFLYAQIKIEYGIGPMPEFHYDIDGLKDYYILPKRNAFFAAYDGDKIVATAGVRAYDKDYEFFKGQYNEENTASIWRLMVDEQYRRNGLARILVKKIEEFAKEEGYKEIYLNTHRYLEAALPFWNSLGYTVTIEEDDYDETNHMIKVLV

SEQ ID NO: 6140 - protein, 284 aa, Methanobrevibacter ruminantium
MIKKKTNDKEQWFIYRANLRTKTLVIIGLAALIIISIFVCGYFIRDIPTNFASANQMPSLEHLFGTDWMGRDMFQRTIAGLGLSIMVGFIASVLSTIISIVLGLFSSFNKFADEAVAGIIDLFGSIPHILLIIIVSIMFGGGVWGVIMGVGLTHWTPLARVLRSEVKEIKTKEYIALSENLGRNKVWIAIKHIFPLIISQIIVGVILMFPHAIMHEAAITFLGFGLPPHEPAIGVILAESMHYLSAGYWWLAFYPGLSLLIVVLLFDLIGENVEKLLNPETAQS

SEQ ID NO: 6141 - protein, 329 aa, Methanobrevibacter ruminantium
MNKQKIAKYFGWKLVRFVVLMIAVAIFSFVLLDLSPIDPVNAYLKGAAVTEAQRAILQQYFGTNVPLPEKIFHWLMDLLQGNLGTSLIYRRPVMDVIIDKFMASLALMTISWILSGIIGFALGVVAGKNKGSWIDKAVKVYCYAIQSAPSFWVGMLISMVFSVYLGWFPIGFGVPIGVRSTDATFIEWATRLVLPTLTLSLVGLAPIAMYTRNELVQVLSSDYVLFAKSRGEKGWALIKDHGLRNIMLPAITLQFLSFSELFGGAVMVEQVFSYPGIGQTAVAAGLQNDVPLFLGIVVISAIFVFVGNLLADISYYFIDPRIKENEFND

SEQ ID NO: 6142 - protein, 539 aa, Methanobrevibacter ruminantium
MDKKTIIIAAVAILVIAGIAVFAFGGGGSSDSDPTHLTVATHSNMAEPEAGFNPLTGWGCGHMNYNPLVQSCLFKTDKNGDIVPDLATNYSISADGLKWTVKVRDDVKFSDNSTFDAKDVAFTFNTAKDTETDLDLTNLKKVTAKDDKTVVFELEEPRSTFIYDLRYVGIVPEEYDNATYGEHPIGTGPYVLDHWDKGQQAIFKANDNWYGDKPYFTQITMLFPEEATWLELAKSGQVDIAPVATSALNESVDGYNFVEKSAGRAQGISLPYLEDTGKTSPAGAKIGNNVTADKSIREALNIGVNRDKICEEVFSGHASPEYTSVDTRSFANPNAKVKDGDVAKAKQILKEGGWEDTDGDGIVEKDGVKASFDLYYPPDYLDRQSLATVFAEQAKDLGIQVNLQGADWDTIYANMYSSASVMQQTSPDPYKSIYQQYHSKEADDFYMNPNLYNNTASDMLMEQAMHSNDFKLADSLWAQSALVNGGGWGPAGDAPWVWLANYNYNYFVKEDIDMGDQPDGLGNDFLINVVDWTRTNSTA

SEQ ID NO: 6143 - protein, 230 aa, Methanobrevibacter ruminantium
MSLSIELEKYLKGNGAIEVGYADITNFTPKKGLNTGVVFFITYPKEVIRNMANAPTLEYLYELIDLNTRLDALGMICEEFLINKGYKAYAQTKKRLGGNFGEFNSFELPHKTIATRAGMGWIGKSALFTTFKYGSALRLCSVLTDAPLEIGEPIIKSRCGKCMICKEACPGGAISGRNWDYTLKRNDFYDDKKCEKYALIVSEENLGKPDTVCGKCIYACPHTQKYVKRT

SEQ ID NO: 6144 - protein, 186 aa, Methanobrevibacter ruminantium
MNVNIKELGNDPEEIKNVQNFLFHMIKLEFGYDYVPEWHQDIVNMEDYYINPERNAFFVAYSESGEIIATIGLRAYDKNFEKFEGIYSNDTTSSIWRLFVDRRYRRCGLASKMFSVAENFAKDRDYKNIYLHTHRTLEGALQFWMKMGFIITLDEGDELETVHMEKFIQKLKISPQAGILTYAIKL

SEQ ID NO: 6145 - protein, 241 aa, Methanobrevibacter ruminantium
MLTFIQMEFLKLKRSKIFLLSVLMAVLPALLMYIATFAFDEVQAFDALFTNVNMYMSVLFAVLIFAIIMAYLFGREYNEHTLKMMLTIPISRGKFLMSKYLMFLIWILILTVITSLSTMIFGFAAGLSGFTVNLLINSFAQLLFANLLLFLTFSPFVFISLFVTNMVPAMVGGASLTLVNMLVYGQTWAPYVPWVCPYLIASGEIAEYGINMLLPYGLVFATFIVGIVISYLYFTKKDVPL

SEQ ID NO: 6146 - protein, 355 aa, Methanobrevibacter ruminantium
MSQLINYYFIIKGDFVTDYVIETTNLSKKYSKKYVVDSIDMHVERGKIYGLLGKNGAGKTTTMCMLLNLVAPSDGDILLFGMNPKEHSKEVYSNIGSIIETPGFYENLTAYENLEIVSKLRGKYNPLIIKMVLEMVNLDHEKTKKFKDYSLGMKQRLGIAAAIMHNPELLILDEPINGLDPFGIKEIRDLLKRLSREYGVTILISSHILSEIENIADVIGFMDEGCLIDEITKEELHTRLNKFVEFEVSDIDLAVDLLKDTGFEENGDFTFARNIGNYIEDMNSLKSFESDGYVNSEDGFESSENAIGGTIHLLTNLDLRDQFNKLFVSSGIDVRKVNLCEENLEEFFTRIVSSA

SEQ ID NO: 6147 - protein, 251 aa, Methanobrevibacter ruminantium
MKNEKTENENNKNTSSPLVKYLFQTRFFLFGLTKKSKTIKKIFNKVFFEDNELFILPNKSTVNKSNTKITANIEIKESFQKDDSEFLPSEILKEIIKEANNIFIMNKCICRSSSNCKDYPHDFGCIFLGPASKKISSKYGKAATVEEALEHVDMADKLGLSHLIGRNKFDSLLMNVGPKEELLTICHCCPCCCLWKIIPDLDDEISNKIKRLEDVEVNALDDKCKMCKKCLEENVCISNAISLEDDKITID

SEQ ID NO: 6148 - protein, 39 aa, Methanobrevibacter ruminantium
MGCGHCVQACKFDAIRLNYSRKSVDSVINRIEELVDYKN

SEQ ID NO: 6149 - protein, 246 aa, Methanobrevibacter ruminantium
MSFQDNKMLIMPAVDIRGGKCVQLVQGKPGSEQVVIENPEKVAKKWEDAGAEVVHVIDLDGALESVTNIETIKKILNEVSVPIQLGGGIRSIEYAEELLNLDIDRLIIGTMGIKNPEIISKLSNEYGSERVMISLDSKDNKVVIKGWQEKIDKSASEISKEFQELGAGSILFTNVDVEGLLGGFYVDPVIDLVDSVDIPVVYSGGVTSLDDLKQLQTTGAKGVVIGSALYKDKIKLEDALKYQNIE

SEQ ID NO: 6150 - protein, 150 aa, Methanobrevibacter ruminantium
MKVMATGAFDILHPGHGLYLEKAKELGGEDAVLAVVIARDSTVKKKKRIPVIDENQRLEMIKYLKPVDEAYIGHDGDMFEIVEEIKPDIIAIGFDQGHDVNKLQEELDKRGIKAKAMRVEAHRIADLDSTCKIIKKIRNSDFEEDYVNCD

SEQ ID NO: 6151 - protein, 338 aa, Methanobrevibacter ruminantium
MVSIAIVGGSGYTGGELIRILSAHPEAEIVDITSRQFEGTPVHKVHPHIRGTDLVFRNKKPSELDADIIFTATPHGASMKIVPDLIETGAKVIDLSGDYRFNDIDVYEKWYGIEHTSDLKGVFGLPEIHREEIKKTTLLANPGCFVTGAILSGYPLSKAKLAERMIFDSKTGVSGAGVNPTTSTHYPNIGDNVNPYKVTSHRHMPEIQQELGAFSDVKISFTPHLVPVIRGILTTNHCFLVDGADITSEEVLDIYKETYKGEPFIQILEDGEIPRLSSVRGSNYAQIGCFEIDETGRLVIISAIDNLVKGASGQAVHNMNIMCGFDEKTGLDFFGMHP

SEQ ID NO: 6152 - protein, 162 aa, Methanobrevibacter ruminantium
MNRIILYYSEGGTTQQVAETLAINLRCDICRIRDLKSRDGYKNRLFSTFDAFRESKTEIYPPRLDLSEYDTIYIGTPIWANNPTPAIITLIDRYNFLGKDVVLFTTSTNSEGENTFNKMDMKLRARGARVVQEFNIKTKDKSLEMISEDTEKAIKNLDLELY

SEQ ID NO: 6153 - protein, 385 aa, Methanobrevibacter ruminantium
MFDKIMENHKALIAIPIILALLSLALISFNGIEQGVELKGGSLAELQLTGSTSVNDLESQLTKELNTNNIKVTSNGENKVTVELENNVNSSTFSKAIDGKAKVISYNEIGPVLSEEAMGQIYIAMLFAFLFMAVTVFIVFREPVPSVAIILAALCDILIALGGMSILHIPLSIASVGALLMLIGYSVDTDILLTTRLLKRREGTVDERARNAMHTGLTMSCAAIAAMGILYIVTVIIMPEATTLSNISAVLVIGLIGDILSTWLMNLGILKTYIDWRQSKKQDKFNIDAPKSNESKSKSKEEDGKSESKSFKDRFKRSKDDDSKDSESEDSSKDSESKDSSNDIDSSEEEKSSGKDKKSSKKTKSNKKGNKRKTKKSKKKGKGGK

SEQ ID NO: 6154 - protein, 407 aa, Methanobrevibacter ruminantium
MASNLSKFFKDRQVIILIICLIISIISISFLGVEQGLDLKGGSSIQLQLEHPVNDSTMKVVTSVLDKRLNLYGVTDVKVRSSGDQMVIVEMAGKSPEEVERLIGNPGIFEAKIDNKTVLVGSDVATVDAPVVGESGEWQVPFTLTTEGAKKFAELAKGKGGHEVVMYLDGKQIDDHPPALAEELASGEAVTEVQVTGGAEDVETAKAESNEVFTVLKTGSLPVKIHTVGSNTVSPELGQQFAQGALIAGLLAILGISAVVYIRYRRAFLAIPILITTLSEIIIILGVASIIHWNIDLAAIAGLIASVGTGVDDQIIITDEVLHHDDENTRHRRTRTQMNVKNALFIIFASAGTLIAAMLPLAYVGFARGSSGIGTIAGFAFTTIIGVLIGVFITRPAYAKFIELFVS

SEQ ID NO: 6155 - protein, 413 aa, Methanobrevibacter ruminantium
MVIVVGTGAGGAIIAMKLAKANIPVTIIERGPYIASKDAYETYDMKYYDKRFESEQSLDLLKTTCVGGSTIVAAGNGVRVLEEEFKDLGIDLSKEYETIEELIGVHQMDDDHIGEGTRLFLESAKECGFDAIKMPKFIRDEDCKPCGKCSFGCPRDAKWSGKDFIDIAIENGAELIENAEVTKILTAHKSASGVEYIQDGQVKTIESDLVILAAGAIDTAVILQKTGIDAGNKLFFDPFISVGGVLKDIKYNTEVQMNGLAIGNEYILAPHFSSFISKYIKETYPEVEDKDILSIMVKVQDDMVGSVDIDGNVKKFNTIGDIRRLGQGAAAAGSILQKAGVDATTMTSTVFRGAHPGGTAAIGEVVDKNLKTEIDGLYLGDASVIPISPGKPPILLILALAERLANHLIEEVI

SEQ ID NO: 6156 - protein, 142 aa, Methanobrevibacter ruminantium
MWEMVWPILLVILSNTIYNICTKSTPGNVNAFGTLMITYITAAILTAIIFVFLVKPENVMVELSHVNWTSVVLGIAIVGLELAYIFAFRAGWKVSSASIVANIGLAIVLVFVGAILYGENITLKQLGGIFICAVGLFLINMG

SEQ ID NO: 6157 - protein, 153 aa, Methanobrevibacter ruminantium
MTKVELKVKPIENGTVIDHIPANKALQVLKILGLPKKGTNVTLAMNVHSRLGYKDIVKFENRELAHTEIDKISLIAPDATINIIRDYEIVSKNKVRKVNELNGIIKCTNPKCISNTEEPLETKFYLVDSNPITVRCHYCERLVQYDEIYNQFE

SEQ ID NO: 6158 - protein, 2255 aa, Methanobrevibacter ruminantium
MKLNKFFIISIILIIFLSISAISAENTDNALSTDTHSNDNVLSTDSRSNENALTNENTLLTDTHSNENALTTDPLTKENTHSYKDSEKSLSSDAFNKTIYVNKTGSDEGDGSEANPYATLKKSISQLDDSDNAVIYIGPGNYTGENNSALEINLDHKDHDGSLSIIGDSNGGTVFDGENLNPIIISISEDSIVTLINITFTHGKNNMGSAIRSSGNLTIDNCIFTENYATNLAALYVDKHSPLTVMNSKFLENRAKQCADIYFSQNSEIILLNNLFEGSTAEYSYAYSPSVSLQTGKSLVKGNTFKNLTGAYYKGALYIAYNNGINIANITDNTFINCNYTGTDGAILFFQNAYLKNNKFIDCHSSTAFLYSNTEFNAYLSFEDAEIDGTTFFLKANVTDDMGNKVKNAKVIFYLNGENVGSASSDNNGVAMISIKKLLENGEYVISGTQSYSEINPFGVNVKNATARVNYDHSSLEVWVSTDGDDGSGNGSEDNPFKTLRKALDYGTASAVNLTVHVKNGIYNGDDNRDLSYSTLGKITIVGESYSNVVIDGENITKSIFAFSSTLDVTLINLTLINCPSTLINAYTLSMMDNIVINSGTIRAQTGNNGVTIDNLRVINGTDQAITGYNLRLTNSRFENCDGLTHTGLIWLSTNNNKVTYLENNTFFNNTIAGSAGGGAAYYIQSDLISINNTFDSNWITESRGENVAYAGGRHIISINDKFINNEVPKYVAQYRSIGNEECEIIVENITFINNKASGNGAGLATTGAIVKGGKFINNSASGNGGAIYLLNHDNTSSYCQMSLEDVIFENNSATCGKDIFIEGSSGNNIFTYLNNLTIVANDLNVTSLSDNLTVSVFHPSGAIIGGGEISFYLDGEYIGKSTLVNQNASLEYVGFKNNTIYEFTSIYEYASLNDTYIDGIVSTKIPYALENIELYVSDGSGDDENGNGSISNPFKSISKALSEGYQKSTNITVHILEGTYTGSLNSNLRIPTTVNILLIGEGAAKTIISDSSSDYFITALKGKCELRISQMTLNRAARDTQSAIYIEEESNVAIDNVTFIGGQGNYGGAINTAGNLSIRNSYFHDNGYADRTLRANAYYGGAICNDGTLIIDNTIFESDHAGRLSEIANQGTLYMNNSKVIDSINAYSINMDLVAIGAYGGQKGEITIENSQFIVSSKTINELNDRIYDPTRALTCLGIGSCQHAILINSTFIGEGAVFSPYVFGGINSNNLASGGCTMIPGDLEVYNSTFRNVQAVNIIYSRTDNVRYHSQRVFEGCLFDNVEYIIAVLNTGNFSVEMHDCVILSDDLAKIGFGSEKTMKMDISNNWWSSNDGSYDNATLGTTNYISNCVVKLKEISSETVHPESYLILTLNSSNRTGLLQDAILAFKAYDGENISDYDGALYPRNFEMSAINATLDDLEGTIINKAINPFEGVENSGYYIEAIVDNQKVNLTVHDSLSIGNAYILAENISINYNETQINVTVLEENGKRADGGNVSLKLHDKTYISEIINGTAIFDIDVLPKGDYLLNYSLNRPKVYHSISNSSNLTVIPFKINAYANASNIKVGEDAIVIAYLDKDAGGNVTLGEEIQKVNDGTATFIISNLAKGDYTYQLSYSGDEKYDNETFHVSFSVNLKDASISVENDTLDLFVGSNETIVATISPIGLAVNYSCSNESVAMVDENGVVSAVGAGMAVITLTVGDDVTYSKNSSSVTVIVSKIPTIIEIVNDTISLEVTDSLDSIASLNPEEGGNLNYAISDDLIAKIDNGQITALSEGSAIITVSFDGNDKYTKAQNKSIKIIVNLKEASVSAFSNIDLLVGENDTLSPKTSPEGLDVRYESNDTSVVLVDNGQAIAVGEGNATITLTVGGDGVYAENTTTVKVSVSRIATMIEIEKDTIELKVNEESPIGAILEPDVGNLTYSISDESIAKVENGKIIALAEGNASLSISFAGDERYIGTNASVEIRVNKINTILTETDITTTYKEEGYLIATLKDSQNNPISGAVLTVDLDGIKNYTTDSNGQIKIATNNLIPDTYTARISFAGNENYSSSNGNASVTVKRIGTKLNFNDMNTTAFDSNIEGRIGEYFYFQLVDCDGNPLANKKVIIGFNGVKYNRQTNETGWAKIQINLKYANSYTFAIAFLGDDNYSGSFNFAVIRVSQQTPKLTASSKTYKSSAKTKTLTATLKSSSGKAIAGKKISFRLNGKVYTANTNSLGVATVKVSLNKKGTYSFTAQFSGDSTYKKVTKTAKLTIK

SEQ ID NO: 6159 - protein, 456 aa, Methanobrevibacter ruminantium
MEEHIDLFKSILNKIEDKVDYADIRAGTGNNTSITMKDNQIQDINTGLSTVARIRVLNNGAWGFATTNDFSKLEEISEKAIKISNSLKGDITLAECDIIEDAVAIEQKIKLSDVSIEEKKEIIQDANKASNVGNVISTTVRYGDAESKTAFLSSEGSCILTDNARVSLSLNAVASNGELIQFHHDSLGGVKGFEVLKNADIESFGRKVGEKATELLDAKPAPSGRFTIIADNSLTGVFIHEAVGHAVEADLVLQDDSILHDQMNKKIGSDIVNIYDDSSNKDGFGYYPYDVEGVKTRKNQIVKDGDLISYLSSRESAGKLDIPLTGNARSSISDQPIVRMSNTYLQPGDLSFDELIEDIKDGIYLKGSRGGQVDTGKGIFQFNASEAYKIENGELKDHFRDVSLSGNILETLKCVDAIGSDFKLSVGFCGKGGQTAPVGDGGPHTRILNAMVGGSS

SEQ ID NO: 6160 - protein, 185 aa, Methanobrevibacter ruminantium
MLSEDDGKYLLELAKDAIETYVKEHDKIDVPSDCPEHLREKLGVFVTLNKNNNLRGCIGYPEPIFPLVEATIESAISAAVRDPRFPEVGESELDSLEYEITVLTKPELIEVDKPIDYLDNIIIGEDGLIVEKGFYRGLLLPQVAPEHNMDKEEFLSHTCLKAGLRPDTWLNKDTKVFKFQGQIFK

SEQ ID NO: 6161 - protein, 351 aa, Methanobrevibacter ruminantium
MMLPTIPTPDELLDKGFRRGKKAADLRRGEKMPKRLKGKRIEETRVITACQVIKDRLKMILDRTPEIEELPEFYQDYIDITVGVDDFKQALGAVNWAYGIITQLEKEYGAKIRKAPSERATGLRKQAYGRISSVVHKIEKDLDFLDFAKQSLRNMPTVDFDAISIVIAGFPNVGKSTLLTHITDAEPQVANYPFTTKGIQIGHFEKRWQHYQIIDTPGLLDRPIGDMNDIELNAMVALEHLADAILFIFDASETCGYALENQYNLLEEIKNVFDAPIIYLFNKMDISDYDGARHDYVQEYIDKTENPLLISAAEGEGLEEIIQLIQQVEKREIAEEDEDEYEDDENYFDLT

SEQ ID NO: 6162 - protein, 197 aa, Methanobrevibacter ruminantium
MAEDMSENIETKSDFKDKAEEFKAKAEARTEANKEKWDETYNKGKDVAGKVGENLSKTIDDTIIAMKAMQKNFDDKYQSYKETSATNKISVDLAETKDFYYLQAYLAGVAKEDISIEATDSSISINAELKNILCSIEEDEENPANLIITGVKTGVAERTIKLGAEIVKEEISAKQDNGILFITIPKKEIPTTKIDIE

SEQ ID NO: 6163 - protein, 67 aa, Methanobrevibacter ruminantium
MAIPKAPVNRIIKDAGAERVSAEAVDALVAYLEEDAAAISKKAIEYAKIAKRQTVKADDIALAIKNE

SEQ ID NO: 6164 - protein, 223 aa, Methanobrevibacter ruminantium
MEFYIINGGPRKKYNTAELLKKASEGIKDELKDIDEDVNIHQIHLYDLNFKGCKSCFHCKRIGGKYYAQCPIKDDLLELLPKVQNSDGIIFGSPIYFGEITGELRSFLERFLFSILVYGGESNAPKRMPMAMIYTMNVTEEGFNLFYGDKFDILENAMANLISKPYSLKVYDTFQFSDYSKYENYAFDPELKAKRKEEHFPIDLDNAYNLGKKIAQDSLKLNE

SEQ ID NO: 6165 - protein, 336 aa, Methanobrevibacter ruminantium
MRYKMYDEMMEQPEALRRTFASESENMANISKIAGSVETIYLIGCGSSISTCYSVRDALASVSDLRIEVFTGYEFVYNKKLNDGENSLFIATSQSGETADTLTALKRANEFNIDTVSISNEPESSMIKEAKYPIVTLGNTETAILGTKTYITQLACLYQILFPASGYEKTDEIMEQLANMPDLVQELLESTEEDNKNLAEELKDEEGFYCLGSGVNYGLAYKLAMTMLMEGAIKHACPLYSAEYRHGLIERAEEGVPLIFLDADLESDELTKRAIANARDELKANCIIYNLRDYADINPLLAPFVFVVPLEWFVYYLAHFNGEDPGSTRHIGKVRY

SEQ ID NO: 6166 - protein, 181 aa, Methanobrevibacter ruminantium
MNVDLSKASMNVGQQYEAILTTINNEGKTNAAPFGVRIIEEDKVMLKIFEGGNTIKNIKDNGEFIVNITNDPIMFSYATTTSIPDEYLSRINYDDHEFAHISNADAYFICKVYSIKEGMRKDNIKDSEANVIKADVLELKINSPCVRPMNRGIHALMESLVNYSRINIVDKDTQDFFYRKI

SEQ ID NO: 6167 - protein, 456 aa, Methanobrevibacter ruminantium
MQEANEDIDLIVNHPKQAINKLALPIIFSNFFMVLNNIIDGIWVAGLGSNSLAAVGFVTPLFFAMVGFANGLGAGANSLISRCIGAENYQGAGNSAIHSMMLSIIVTIFATIVLLVFLNPLLMLMGAGEIIEETSNYGYIILVGAYSIFLPAMMAAIFRSEGEINRASYPLMLNAIINMILDPIFIYVLGWGVKGAAFATVLAGTFATLPMVYWMFIKQDSFLKIKLSEYKTNLKIYKDILVVGIPASIEQFIISFVSILMNYWLTLLAGTLAVAAYTATWRLVSIGVSPIIGIGVAALTVGGAAYGAKNLKNFKTALNYSAILGIISSIIICSIFFVFAEQLSFIFSYSADSAILAPRVVDALRILCFFILLMPLGVISGNLFQAMGKGTISLVLTILRSFILEVIFAGIFAFVFDWADIGIYTGLVCGMMCGSIVSYLYINYYLKKHEDYFIVK

SEQ ID NO: 6168 - protein, 624 aa, Methanobrevibacter ruminantium
MDEKTIDYEGNIITVSAEGLDEDIEIGDITITDAEPPEGDLVITARILEVEIKEVYPAEIVIENGLFKDAIPIITDDDSLLDLDYDGVLIPGFIDSHCHIESSKLSPSNFAKVALTHGTTSVVADPHEIANVLGIDGVRFMIEDGNKVPFDFYYGAPSCVPATPFESSGAIIDSKDVAELLSHDEIVALGEMMNFPGVLAEDEEVIAKIKAAHDFGKPIDGHAPLLSGDDLKKYISYGISTDHECSNFAEAAEKKRAGMKIMVREGSSAKDMDNLFDADERFNYIIEEEMRGNIIADSTDEAMAVPPFDFLVCDDVDARDLSKGHLNKLVKKAISMGINPKEAIAMATFNPAEHYGLNCGSIDPGKIANFVLVDDLKNLNISKVWVHGELVVDDGEVLFDVEAPEIINNFDLDEVKPSDFDATMEMGYVSSLMDETTNVFVIEAYDGELITGKLEESLLIKNKVIQPDIDKDIIKIAVINRYGGNNITNGFIKGFNIKKGAIATTVSHDSHNIVAIGTNSEEMADAVNLIRQHQGGLAVVCKEDGIQDILDLPIAGLMSDKDAEYVASKLVELFNLVRGLGCTLTSPFMTLSFMALLVIPAFKISDLGLFDFEKFDFIDLIHNI

SEQ ID NO: 6169 - protein, 405 aa, Methanobrevibacter ruminantium
MYKREIELSGHIIDSLTLPKTMDIIMDNGGDFDILEFDIGKRKSDTSKAKIMVSAESPDILNSILDELNFIGVSISEIEEVNLVPSPKDKVAPEGFYSTSHHVTHIYYKGKWILVDKIEMDCLIVIDEENETASCKPIADLKKGDLIVVGREGVKITPPQRSRGKQGVFEFMNSDVSSEKPMMSIINDVATEIKNVKANGGKIALVGGPAIVHTGSAPIVAKLIKEGIIDVIFAGNALATHDIECDQFGTSLGVKIETGEVVAHGHTHHMRAINRINKSGSIKAAVEDGTLKSGIMYECIKNDVPFVLAGSIRDDGPLPDVITDTAESQKLMRHYAQEVDMVIMISTMLHSIATGNLLPSRVKSICVDINPSTVTKLADRGSAQVVGIVTDVGAFLPVLYNALHD

SEQ ID NO: 6170 - protein, 241 aa, Methanobrevibacter ruminantium
MFIGLLAPAIVSTVFIMLSGSDLLKKDFKNKMIGFYKVKWLNVIWAVIVFAIVIVCSILLSLLFGQPIDQFSFTESFSFTGVGIAGAFITITLASIIEEVGWKGYCEDSIGNYMNWFWESMIFGVLWSFWHFPLIFISGTYQAGLMVNPLYVINFFVSGIPMGFVITWVYLESDRSILACMIFHFFVNFMQEKIALTPETKCLETIVITVVAILIVMAKKDMFFETRHVGRLLEYNSSQQQ

SEQ ID NO: 6171 - protein, 204 aa, Methanobrevibacter ruminantium
MKKGEKRKQELLKIAYDMFLTRGYENTSVDEIIEKAQIAKGTYYYHFQSKEQMLEEVIDMMIDSEIETAKQIIGMDISVPQKIVGIIASMKPTEVEQPIKDTLFQPENVLMHHKVRKQLIDVLTPLLSEVIQEGVDEGIFECDNIPERVKMLLIISDGTFNEGTFSERDISVFIDMTEKLLGAENGTMSFIYDLIDKSEMEGAQ

SEQ ID NO: 6172 - protein, 69 aa, Methanobrevibacter ruminantium
MGLILFFLSYFLLFLFSQIHHSFYDIIIIASPICHSKSQGIYLYMMMFKLLLKNKNRPIVEKLFRRILG

SEQ ID NO: 6173 - protein, 324 aa, Methanobrevibacter ruminantium
MLFNTYEPGKFAFSHESVDYYDLINSEDNLNGSSDFSKSKKWGIIGVPFDSTCSYHHGSRYAPTIIREASFGLEQYNSEFDKLLDGEFYDCGDLNVVHGNCKRTCEILEDSVNDLIEANIKPIIIGGEHSVTLGSVNALSALEDKNNLNDITVIHLDAHRDIIDEYIGEKYSHATIMKRIYDLEPKELIQIGIRSFSEEERDFVEDKENIISFYAKDIKNQNIHLNEDVSTFEDLLSKLDSIEGKVYISIDMDVFDPSVAPSVGNPTPNGLFLADVQAIFEALSFNEEIDIIGFDLVELASDRLGDISGVLAAKVIYDFLTLFA

SEQ ID NO: 6174 - protein, 135 aa, Methanobrevibacter ruminantium
MSTKVVELKTVKVGKYIVLDGEASKVTSLTTSSPGKHGAAKARLEAVGIFDGQKRSLVKPVDTKVEVPILDKRVGQILAVMGDQVQIMDLESYETFELPIPAEFEDEIRGAVGTDLGVEYIIALGNMKIMRTKKV

SEQ ID NO: 6175 - protein, 153 aa, Methanobrevibacter ruminantium
MRIAIVSGNAEGPTELNAFDNALYEAKIGDVNLIKVSSMLEANTKIEKLPKLKAGSMVNCVLSSIVSSNPGENLTACVAVAIGDELGCAVEVDGIDKDPEDLKDEATKMVKYMMDKRNVKINELIVEEAHHTVKNIGSAIAAVIYITDDILEE

SEQ ID NO: 6176 - protein, 621 aa, Methanobrevibacter ruminantium
MNQDDIQICKEIATTVFKNVENLLDGQVGNPKAGEFVKIGADGTPTSHIDIIAEDEVIKLLKDADFESYLISEEIGELRLGKGKQQSVSLSEELLNNTPENKKEEEEIPRYIFLIDPLDGTSNAVKNIPAYGMSIAVANVPIGREATLEDVQLGFVKNYSNGNFYEAVKGNGAKENGQPLTPSKETDITKITLGGFTKSKTLSVSKLVDTARRMRVLGSVVLELAYIANGKYDAFLDLRGSRIIDIAASKLIVEEAGAIVTNKYGEKLNNRLSIYEKAVVVSAGNEDLHKQIIKIINNDELDKVTSVAIVSRVDEYKSVLFSLKIFETLIEKNIETVLETSLAEKLEEIKEDPELHKIIAKTMNETPEIAMHIESLNFNYEFMDYAKQLNELRTDIAIILGGDGTLLRTQNQLTKEIPIFGINMGTVGFLTEIEVENTFKALDAILDGEWSKEKRTQLIISHENESFRALNEVVIMTARPAKMLHYEVSVDGEVVEELRADGLIISTPSGSTAYSMSAGGPIVDPKVGAFIIIPICPYKLGVRPFVVSDTSEIRIKLLRQGKKAIFVMDGQIQKEVNYLEELVIKKSEKDVYFMRINKKYFYKKVKDKLNEGGLESINRVL

SEQ ID NO: 6177 - protein, 544 aa, Methanobrevibacter ruminantium
MNVFLVDLTHGGVKISSELSKSKRFEKVFAYDLYSTLKEEDEHLLKTYDVTILKDFDSFKEELKENSKELLKSEKEKENNSKDLIINPIHSSLNIKDLLNQITEEINPNNDLTHLYEIINHHQATKLVLENWKEETKKHDIKTIEITGVKGKTSTAFLLKEIFLENNQNTLLLSSLGAYLFRKNQDKEMELILQKNISITPANIINTIQLAKKIANPKCSYFPKCAANKNKQEENELFEEYNNNPYHNLNYDIAIFENSLGVCGLGDIGILTNLVENYPIAKGSSNAMEAKRQVFDCSLVIIEYETLNEFYKGESEEYKDKINSFSLNNNKANVFCKNIDFDIDNTQIKITYQDFKTRNKNTINGEFTLNCFAPGPHHVLNILTAVSTALALEIDEKTIIAGISKFNGIDGRTQVKTVENSIIIEEINPGINTKAIESSINMIKDIDNYYIIIGGKYGVTCEEIDEEKLSNYLNNYLTDNPNTKLILTDEVGKSLKEKLDLLNDKDEYEIMFIENYEEARDLAINENKNILFIYRSNYSQVSKR

SEQ ID NO: 6178 - protein, 289 aa, Methanobrevibacter ruminantium
MIVGTRGSKLALVQTDYIRQCLYNITGEEVEKNIIKTKGDKITNSQLYNMDSKGLFTRELDNALLDEEVDFAVHSLKDVPTELNEDLEIVAVPIRESPNEVLISNYSWSELEEGSTLGTSSLRREAFCKHHNKDFELKPIRGNVETRIEKVMDGQVDATIMAEAGLNRLGLQKYIKAKFPTDYIMPAAGQGALAVMTRKDSEHKETIRKLNHYFSHQEVLAEKTILEEIGVGCQWPIGAISGIKNNQLELKSILLDKNGEILYQKTLSGSIREAKEMGVQIGKEMIEFI

SEQ ID NO: 6179 - protein, 315 aa, Methanobrevibacter ruminantium
MRTINVGVIGVGAMGYNHARVYSKLENANLVAVADVVKPTLDKVCKKYNTKGYSEIEDLLKNPEIEAVSVCVPTTFHHEVVMQAIKYGKHVLVEKPIAFTAEEAQEMIDAAKEAGVKLATGHVERFNPAVQKAKELIKNEVIGDLVAISAKRVGPFPPRIKDVGVAIDLAIHDLDVMNFLIEEPVKQVYATMSSRLDQSDFEDHAEIMVSFEEDITGILEVNWLTPYKRRQIEITGTDGIITVDYIDQSIEVYGKFAQDIQIKPVEPLSEELNSFLTKIGNDETPEITGEDGLKALKMVLAANKSSKEHSPINFR

SEQ ID NO: 6180 - protein, 204 aa, Methanobrevibacter ruminantium
MNQELINRAQELRNHGFTTGEIADELNVSMDTARWLTLQKTEEPVETEAPVDIAINWNSLGGSATRLRYVSAALSDIALKHGDIDLVVGIATSGIPFATIMADVIEELTGTTTCVSIFHPKKHRTNPTNSDEGAISSNFGTVEGKRIVVVDDVTTSGDTIKDVIKVVKDHGGNPIVVTVLIDKSGLEEVDGVPIESLIKVSQLR

SEQ ID NO: 6181 - protein, 268 aa, Methanobrevibacter ruminantium
MEFNIVKELNGQFDPIVLIKTDEKPEDALAPKPGRGGCVMSFVAQSIAKRKVTAFGRENITCGGVSAGFGWGTGFKTDKDKEFQATFLSLGLDSAKDKDAFLERLSYLPKPTQEMFKKGERIFSDFDTAYENIQNRPLYDEGEYVVFKPIELLEEGETPDSVIFTANTMELSAILQLNGSFRAESAHIMTPQASACQAIGAFTFEQEDSDNPIPVLSPLDFAARAHMRRLIPDDYMNLSMPWKLFLKLEELSKNSVFQTHFWDDFGNK

SEQ ID NO: 6182 - protein, 473 aa, Methanobrevibacter ruminantium
MIENNICLLTDSYKLTHHYLHPKGTEKIYSYLESRTGAEFNKTIFYGLQYILKKYLEGNVVSEEKVLEAERIVDAHIAPGIFNTDDWMYIAQELDGKLPVKIKAVAEGSPVNVGNVLMTVENTDKRAYWLPNYLESLLLQVWYPSTIATLSAEVKKLCNFYLDVTGSSKDNLNFMLHDFGYRGASSTESSRLAGSAHLLSFSGTDTVPSLAIPVNYYNTNEIQGFSVQATEHSVMTAMGPEGEMEQAINVVRNAHDGILSIVIDSYNYKNFLENACIKGHKLNEEINEFLKRTEGNKIVFRPDSGEPISTTIDCLEIIERGFGTHNTDKGYKIFNENIGLLWGDGLDYQKIRDILFGIKAQGWAAENLIFGMGGGLHTAVNRDTQRNAFKCSAQLRDGEWIDIFKKPLDTSKKSKKGRFKLIRNDKFEYSTVPIETEGKDQLRTVFKDGELLIDDSFEEIKKRTETYNMFPIK

SEQ ID NO: 6183 - protein, 457 aa, Methanobrevibacter ruminantium
MEESKTRFEGVESILGDPKKAIWKLSIPLIISLFITSLYSVIDAVWVSSLGADALAGVGFVSPIFIALMGIGNGLGAGATSAISKYIGEGDKKKSDNGAVHAIVITVIVSIFTTLLFLIFLRDILLSMGASNTIDYAMDYGVILVSGSILVILSNSLYGVLRGEGDGNRTMYAMLFASILNMILDPIFIYYLGLGVKGAAIATLISLLFVNLLLFYWFYIKKDTYLRPFLSNYRFDKDITVDILKVGFPASLELVNNALFAALFSLLLTVVASTDAVAVYSTGWRVVTIATTPMLAVGTALISVVAANYGARRYEDILLAHRYSMKIAVLFGFIAAIVVYVFAPQIVSIFAYTGTSMRLSSQLIAFLSVIVIYFPTMGYGVTSTFLFQGTGNGITAMFQTILRETVFTLGFAIILAVVLGYGEYGAWWGIILGELVVNTITMFWADWHVKRLIRSNN

SEQ ID NO: 6184 - protein, 139 aa, Methanobrevibacter ruminantium
MEENNYIVFKKQYGNIKRPRTKEVSINQNGVKIYEKDQSMIINIVLPIEDSMKVYQFFEEFNLGEDIQFNISNTGDFECVFRGISSVIDKDSYSSFSITVQEKYQRPDQLQVEADCNQVDEYGNPIQQCIGCGLHRDEI

SEQ ID NO: 6185 - protein, 312 aa, Methanobrevibacter ruminantium
MIDEIYDYYEKRLSTSNSILKMRGIDEEINKLPLGINLDIANILSTIDIYDYDEKKAAKKIKEAYVEVFKEGIYLGIGFGKILKFNYAKSHPENYVECLEEDYQHFTFYDFKIEVLKKIIPPIKVKKFTQERHPKEINYRNESFEDIRSYTCINVETQWEDKFDFEVNPDAKEMEDYIRQREVKSYEDNEELKKCVDDLKMGIQNILFQKFFEALEVDLEKAENGCENNLRFDEETAKDVFISPVFSNLEGEFKIRELVNKYLIHVFNEGKIIGLLNGIKIVLEDIQNDRLDYEEMNSMSSRESFLYIKEGL

SEQ ID NO: 6186 - protein, 281 aa, Methanobrevibacter ruminantium
MINEIVNGYKNQQKVYLSSIIKTLNLDIPDVLSVYPKSNHDLDKIFKEIKLIDKDENILEPLEEFYIDTLKRGILSSIPLGKSFMVKLHRDDEEHFNEVLRMNSGLFLNYVPKISSLEDLEKCTPKYGERDYYKMKEEEQVIVIVEGILRSFCEFTTDNNLMVDYHFEELFDVLDIDLKLAKKRCNKRIKLGNKSKIGIISAIYKNKNGKFRVTDLVKEHCQTIFEEGMRLGIRNGIKIVMDDVHSKRIDPDDFSTMELNELSAYFYKEINEELEQLARNC

SEQ ID NO: 6187 - protein, 407 aa, Methanobrevibacter ruminantium
MQKDNSNQNNDLKQGISDSNQEKDLNHKTNNSNQNKDFNNRISNYNQEMGFKNKSNNSKQENDSKNDLDSNKNINPFKQKDDDFDKALDKNYLEEYNTQYYYSISQCTSLDNSSQGRLVSNILLNLIESLENYLLKIARIDYINSYFDWDFHLLNSSFENAFCMPGGKVLVYSGILSIADNEERIAYILAHEMAHALLNHPRDYIIVKDKEYNNVLLFKPFSLNQEFEADRLAMMILKWADYDIGNIPSFCQFLRGNYNKFNYFSTHPLSDDRLMNMESLIAEINNLKDDCFAPIIKNDRSNALIYTKRYAGSQYNDKDNEIEDRPKVFCTNCGYYEDSDAVFCSNCGSRMDDKSRCDRCGALIDPGDVFCTNCGNVLVDDYKCFNCGHKIKPGDVFCVNCGIKLIR

SEQ ID NO: 6188 - protein, 132 aa, Methanobrevibacter ruminantium
MATFSSIEEAREFFKGDKFATNIGVQLDELEDDSCVCSLELCDDFRNAYGAVMGGAIFTLGDFAFAVLSNQLHRPTVGLQVSINYLSGAKGEKLIAKAHYKKNGRTTSVINVDIIDDTGREIAQFVGTGYKM

SEQ ID NO: 6189 - protein, 335 aa, Methanobrevibacter ruminantium
MKDIFDECQFGEFKLKSRIIRTGGWERDTEDGGFLKPKVFDRYEKMAGNEVGLIVSEMFALDPKDRFYPYCANMNYKGFIKDYKQVTNLSHHFEVPILGQLAFFFFDDGTNQKAEPNDISLEGIRKLQAEVVMAAKKFSFAGFDGIQINMAHNFYLARFINPYFNQRTDDYGGSTEKRMRIVVEIIKLIKKMVGCHVSFRINAVDGRKGGMTLDESFKIAKILAEAGADSVQITARTISFKFGETGDHAFLSYADRMAKELDIPVILGGTLRDMKTMNEILNETDIEFLSLAKPFVAQQDFLSEWKENGDGVSRCRACNNCYGKKESNCFQFGDE

SEQ ID NO: 6190 - protein, 191 aa, Methanobrevibacter ruminantium
MLELDKLLDIFNAGDTLVMDEEATDACNYYSAEAQKITCELNYQYNDFDKRRELFSKLINQELDDEFRVFTPFFTDFGKNIHLGKNVFINAGCKFQDQGGIYIGDDVLIGHNVVMATLNHDENPNNRANLIAAPIRIGNKVWIGSNATILPGVSIGDGAIIAAAAVVTKDVEENSIVAGVPAKFIRKVKTD

SEQ ID NO: 6191 - protein, 467 aa, Methanobrevibacter ruminantium
MAGLNLIDSVMYYPILIIVMAIAGLYFTFKTRGVQIRLFLESIRILTEPPDEEGSISSLQAMLVSTASRVGTGNIIGVSTALCLGGPGACFWMWVMCIIGASSAFMESTLAQIYKRKDKEGVFYGGPAYYIEHGLHKHKLALLFCVFLLATYAVGFNMLCSFNLQSTFMEYPFYHPSITPIIIGAVLAIITCYCLLGGGKRIVSVTSTLVPVMGVSYVIICLIVILFNIQNVPVMFLLIFRDAFDFQSILGGVAGSCMVYGIKRGLYSNEAGVGSAPNASASADVSHPAKQGLAQTLSVYIDTLLLCTASALMCLSTGVVRDAAVSGAPYVQNAISSVFGWIGPIFITVAMILFAFTSLIGNLYYTNNVLMFMNNEKMPSKRFVHIFHIACSLIIFIGAIIPMDAAWAMADITMGGMTLINLPVCLLLSKAAIDCLKDYERQKKMGLKPVFKASSIGLNEEELDWWK

SEQ ID NO: 6192 - protein, 111 aa, Methanobrevibacter ruminantium
MAIPKAPVKRIMKEEGAERVSAEAVDALVDYLETDADAIARKAIDYAKLAKRQTVKAEDIALAIGRPETSESTAENPHNLLEVVQKVLDAAADGKGFEEIIKSFMKLEKKE

SEQ ID NO: 6193 - protein, 444 aa, Methanobrevibacter ruminantium
MSYVDEVIDLIVKENPDEPEFHQAVKEVLESLRVVIEENEEQYRKDALLERLVNPERQIKFRVPWVDDNGQVQVNTGYRVQFNSAIGPYKGGLRFHPSVNVGIIKFLGFEQIFKNSLTGLPIGGGKGGSNFDPKGKSDREVMAFCQSFMTELCKYIGADTDVPAGDIGVGGREIGYLFGQYKRIQGLYEGVLTGKGLTFGGSLARTEATGYGLLYFANAMLKANGETLEGKTVIMSGAGNVAIYAIEKAYQLGAKPVTCSDSTGWIYDPEGIDVELLKEIKEVRRERLTAYAEARPSAEYHEGKGVWTVKADVAFPCATQNELDIDDAKTLVENGVIAVAEGANMPTTLEATEYLIENGVLFSPGKASNAGGVATSALEMSQNSQRLSWTFEEVDSRLQTIMEDIFANVDAAAKEYGFEKNYVVGANIAGFLKVVDAMNAQGIV

SEQ ID NO: 6194 - protein, 182 aa, Methanobrevibacter ruminantium
MKILISNLKGKELVEIAMKNQIDKLISVYSNYNETSLLDQYMTKENIKISTTNAIDACKQLTDIIRHQDTDDEIYVASDGNFLGSMLNFVANKEAADYIFYSFNNQIIQMPRLSINLSETKMKILKSLNETEQTAILIGKNIGISRAMVYKHINSLMEDGLVGQTKQYEKYYLTNAGKMLII

SEQ ID NO: 6195 - protein, 79 aa, Methanobrevibacter ruminantium
MAEDKQEPLSPIEEIKKEYLEKIDYFGNRRSKYALYKKFSKKYNLNRRVFIHILNEAHEDVGSPKRYELRRQTPKDYKR

SEQ ID NO: 6196 - protein, 279 aa, Methanobrevibacter ruminantium
MLIVYCLNFYMVFFMFYLVGLGLFDEKDISLKGIETLKKVDKVYAEFFTSRLFGSNFESIEETIGKEIIVLDRTQVEEESVFLKEAKEIDVALITGGDPLIATTHSDFLVECARDGTDFEVIHGSSILSSAPAISGLQAYKFGKVTTIPFPDLEYNYFPKSPYMAIEENLKNDMHTLVLLDIQAHKDKYMTINEGLENLMTIKDNLEREGMIDENSLAIGIARVGSKDNVVKAGYIKDLLDYDFGGPLHCIVIPSKLHIVEAEYLVHVADGPKEILDDL

SEQ ID NO: 6197 - protein, 467 aa, Methanobrevibacter ruminantium
MNVFRSFIDILSDRTVNERGYFFSNKALFALFLPLLVEQALEFCVGLADSMMVASLGEVAISGVSLVDFLVQLLIFSFSALATGGAVIAGQYLGNDEPEKACDASNQLVWFTTILAVIMAVLVLIFRPFLINLFFGQIEPDVFNTSSIYLSYMAISIPFIAIYNSGAAIFRTMNKANLPMQIMFVCDILNVIGNAILLFVFGFGVEGVAIPTVLARALAAVIMIYFVLQERYEIHIRKTLRHKFDWVLLRKVLNVGIPYGVENGVFQLGRILILSLVSTFGTIAIAANSVGYAIGIFSVLPGFAINLGLTAVISRCVGHNDYEQAKFYNKKILIITFLSHLAINLLIFALLPYILQIYNLSPAASALTYQMVVWHGIFAVLIWPIAFTLPTTFRGAGDAKWPMAVSLSVMFICRIALSYVIADFMGVGVFGTWIAMFIDWYVRAAFYVYRYFSGKWMEYRAVGTNLS

SEQ ID NO: 6198 - protein, 486 aa, Methanobrevibacter ruminantium
MILNHYILSGINEKIGEMEEEFQLMLLASEIVDCCFNFFEIERKTSKVGRPHFEIKNMIKLIFYGYINKITSSVVLAHNAKYNFLYSFISHGCEPSDRTIRDYRKNFMSIFQLIMSFTLIATYKLGLSDFKYIAIDGTIKQAYNSPFNIIKEKDIRLLIKHYMVEELTKNEIKKLRKTAKKFLKDKTKTDEEKVDILFEWWRLLDFSGQSSLGLNDHDARWMKIKDKGQIYPKFSYNLQLGTDTESKLICGVNVVQNPTDHYQIPALMNQIISNLNLKPTKISADTIYLTLANLNYLDNLGITALIPTSQQNRENSGEKPNNRFAIGYFVFDEYKNVFICPEGQELTLDGIYQAHPEKGGGNKLKAVYSNFNACNNCINKGVCFKTGHRSITRYVHELAYKTERIISSEKGIEEYKLRSSTVESHNGTFKRVYLYDFIPITGLKRVQGLMFAIVASYNLIRFLNLIKENNMSLQSVINSIRYISSS

SEQ ID NO: 6199 - protein, 365 aa, Methanobrevibacter ruminantium
MLTIKIPVQNIEATRQIVLKHKILDYDYKIKVENGFGHIPIREETEDEILSKVIEECKEEIIKQNSDYTIEVVDLNQNEELETVKRYPRSITELLKDKLSDEEIEELKKSFDIIGDVVIVEIPEELEAHKKEIGEATLQFTKRKTVYMKRSAVEGITRTRQLELIAGEDNPITIHKEHGTRLKLDVKNVYFSPRLATERKRVQEETKDGEEILDMFAGIGPFPIVIAREKNVDITAVDINEYAIKYLNENIKLNKLQPNAHITAICGDTRIVADNELKGRKFDRIIMNLPGLAPDFLDLAVSMCKDGGVIHYYEFSEGFSQGIERAQIACEKQNKEVEILNTRKVKSTSPGMWHVVIDCKVSDKK

SEQ ID NO: 6200 - protein, 319 aa, Methanobrevibacter ruminantium
MRTLEWEDNKLKLIDQTKLPDELTYVYCSNYKQVITAIKDMIVRGAPAIGVSAAFGMALAQLAGEDMEKVAVEMKNARPTAVNLMWAVDRVMKAENMLDEALEMAREDINTNLAIGEYGAELIDDGDTVLTHCNAGALACVDYGTALGVFRSAFNQGKNIQVICDETRPRGQGASLSVWEMQQEGIPVKLIPDVASGYLMSIGKIDKVVIGADRVAHDGIANKIGSFMVALAAKRFDIPFYVAAPISTFDKEISIFDTEIEERDPNEVIYYGGARICPEGTEVINPAFDIVPKDLITGVITEKGVFDLNNLEKDFKELF

SEQ ID NO: 6201 - protein, 296 aa, Methanobrevibacter ruminantium
MTKKDITCGGDHKGARFAHITKVHPCYNEKLHDKVGRVHVPIAPKCNIGCNFCIRSINTDEDRPGVAGSIMDADAAVEHVLNVTKDSAITVVGVAGPGDSLANEATFEFFEKINKVKPDLIKCMSTNGLLLPKYAERIAELGVNTVTVTVNAVDPEILKEINGFIFYEGKVYKGLEAAEILSKNQLEGIKKITDLGVVVKVNIVLIPGLNDEHIPEIARTVKECGADLVNVLPLIPLNKMADYPRPGCMEIEKARGEVEEYLPVFRACTQCRADAYGIPGKKHEDHHIGNAPQSHF

SEQ ID NO: 6202 - protein, 188 aa, Methanobrevibacter ruminantium
MYIESNDPEGAKVYDMIIRQIFQDLVLPPSIDDMKAYVNPNEVCFIIAIKMRKTSQHITLKEVANVDYNAEDDTTVVIIDNENYLPNILKRLWEINGRENVHQPSRYVIHLPGEKNVSDLVVDDPHENLKRRIYDAVFRIVPEGFKIMKDMSEGDIVCIVATDELIKDEWVEKAKGYMVELNTPKTWD

SEQ ID NO: 6203 - protein, 411 aa, Methanobrevibacter ruminantium
MVQIALVSCGTEYSGIQKEIEKAALKFGAEIILPEIDLDYINEAYEKFGFSAQSSSLKLMIARAMSIVEGRCKPDAVFIATCFRCAEGALVRNEVRRFIQNNTRIPVVTYSFTERTKADELFIRMEALATTVTRRSILAREKQEGLTLGLDSGSTTTKAVLMENNKVIGTGWTSTKDIIESAKTAAAEAFDNTDYNWDDVDGIGTTGYGRFTMGREFGAELIQEELSVNAKGAVYLADCQKGEATVLDIGGMDNKVITVNNGIPDNFTMGGICAGASGRFLDMTSRRLDVDITELGPLAVQGDWRKAMLNSYCIVFGIQDLVTTLAAGGSKADVAAAACHSVSEQVYEQQLQEIDIREPLIQVGGTSLISGLVEAVSETLGGIEVIVPEYSQHIGAVGAALLVSGMGKRHE

SEQ ID NO: 6204 - protein, 168 aa, Methanobrevibacter ruminantium
MVKVAIYPPNSLILADLIERKGHAPLALQKQIRQKIKDPEIDSPPMNITEEDPINGLKYAAIEVPSGVRGRMSIIGPLIDAAEAAIIVDGAPFGFGCVGCARTNELSIFCLRKKDIPVLEVVYPDDEDGTVLMVNQIMEFLDSLPGGGGDMEGDNDVLGEQIGTKGGK

SEQ ID NO: 6205 - protein, 168 aa, Methanobrevibacter ruminantium
MPANLCITPDLGKEDMDPEVSTRMIILSSKANVSESEVVNFLHMLNLPLTIKWTCYGAMISGKDKYVRQAIRELRKLDPYGIFTKERGFAPGDPRRCRGHRYGPREGFHQMEKEFRILDYVGEALKNPRDVEIEKKEPVSVDYFKEVLDKALEESEGSSKEKSEDDNK

SEQ ID NO: 6206 - protein, 522 aa, Methanobrevibacter ruminantium
MKRGKPMLIKINGEDVDIPEGSTIKDAIELSNAPYKKGSIVCLIKGESEIQSNVLKYKIKTPKGSILIELEVSEKSKPLTDFFKENYSLFSSNNVRWETSNEVAIGPVESNFEPSHDEFRYFDNDVLISLSGFSKEATHIIFVKDDHSNVYGVPKYSDRGVFARIIGGRRTLFSLTDDDEILSIEPVIERSTVTDSTGGSNLEEVLEEGNQLFTYALLEPNAKSPASVEHLFSLIRNNKIQVDFESNSFLGFYELNGLTKDAEEISERKRGTVTLRSEGNGKGRVYVYREDRVRAETHTNLATVKQGMELFDTAKKGDFITVLSDPERIMLMMLTQKEAEEKMQSLGIKHVRDGNLDDDAIVVIQTPENTIDILENKEVTTFGLASDELVKIKLTDKAPRTRWYLEKISGLAEKPVGTLKVYFAVPDMNMFMFNGDTDESKGLIPENIPTDIVKAGEIAVTNMSRKNLGLIGIRTIDTDEFGPTGEAFSATNIVGEVVGNIEGLNKLKDGSTLYIYEVYDEE

SEQ ID NO: 6207 - protein, 227 aa, Methanobrevibacter ruminantium
MSLLEVKNLKKSFGDNVVLKDISFSVEKGEVLSIIGPSGSGKSTLLRCITDLETEDSGEINFDGTFGLVFQNFNLFPHHSVMKNITNAPLKVQKRDKAEVYEHARDLLKKMGLSDKEDAYPSELSGGQQQRVSIARALCMKPDILFFDEPTSALDPELTGEILAVIKDLAAEHMTMVIVTHEMNFARNVSDTIIFMDEGVIVEEGSPEEVFSSDNQRMKEFLGKFYE

SEQ ID NO: 6208 - protein, 217 aa, Methanobrevibacter ruminantium
MLLSKILEELLWGMGTSIEIFLLTLLFSIPLGLAVAAGRMSSFKPLQWFMKAYISIMRGTPLMLQLIVVFFGPYYIFGMTLSRDYRMIAVIIAFTINYAAYFAEIFRGGIESIPNGQYEAAQVLGYTRVQTFFIIILPQVVKIVLPSITNEVITLVKDTSLSFVLAIPEMFTVAKQIAAAEASISALLIAGGFYYVFNALVAIIMERFEKRLDYYDT

SEQ ID NO: 6209 - protein, 274 aa, Methanobrevibacter ruminantium
MKKKIAIILGIALLAFLVIGASSAGFLDFLGGDGTATNDDNTFIVGFDAEFPPYGYKDDNGEYVGFDLDLAQEVCDRNNWTLVKQPIDWDAKDSELDSGSIDCIWNGFTINGREDDYTWSEPYIDNKQVVVVKTDSGINSLADLDGKIVETQKDSSALAALEGDNKTLADTFKDLTQVADYNTAFMDLETGACDAVAIDIGVAQYQISQKGSDQYKMLDEEISSEQYGIGFKKGNDQLKDQVQKTLDEMFEDGTVEKLAQKYDTYGVPGALIQK

SEQ ID NO: 6210 - protein, 325 aa, Methanobrevibacter ruminantium
MNFNELVKSLQEFIGVSRKNSIEKVTKALSETYNISGDVLLDFGDDASAIDIGNGQVVLLAADGIWGQLMSVNPYWAGYCSVLVNVNDIAAMGGRPIAMVNTLSINDDEIYDGVLQGIVDGCRKFNVPMVGGHLHPDAEFNSLDVAIAGIAKKDSLITSAGANVGDKVIVAIDTDGRQHPQFVLNWDTTYEKDAKLVQDQISVMQEIAEAHLPTAGKDISNPGTLGTLEMLLEASGVGAFVELERIPRNPDVSWEEWLMAYPGAAFVMTAKEENCQEIIDRLSPYSFEVAVVGDVIEDKMLVLKSGDEEAVLFDQRKNPVLVLGN

SEQ ID NO: 6211 - protein, 210 aa, Methanobrevibacter ruminantium
MTLLGHHIHDKLFLSKDTLEIPFDEEADSPENFKSIMFNVFKSYVIESIKEVVPSFVEKDHEYNVVNSYEGFVEEDYEFEDLDDFIQELEYGSYEGSNEIYVDEDGSLVEEVYIEDGEVPLEEVYIEYDDVPVEEIFVEHDSDDDIYVEHESVEEIFVEHDDGSIDEIIVEHEPNENIVYEDAPVEEIFVEHEPNEEIVYEDAPLEEIFC

SEQ ID NO: 6212 - protein, 413 aa, Methanobrevibacter ruminantium
MEIGVVVHGPGIIDSGWAIKIIDILSNYGNVHCRLGGTMGRTAVIDAALEDAIDISLKLLPSQSLELFNREGVDIIFLLNYGKSPETGRVFGYKVFNHYFKQISNEDYLATNHKPLYDASVPVIQIERPGEEDGSIISWNTELNEQLSKSRKGRFKLGLGKKNMVESLSFNFEELFDHLKTSLNLVEVTPEEVVSNYFSNNQERKDEEDIEKILRSYDDYDISHYTYRKIHGVSPDENIFINGIVVGYSNGDSIVLVARDGLIADIINGTIKYHGLEKLGPVDLERVIVKTGLLRKSDDVNPRVLSNKDISLKDTERHIYSGEISEDDYSFKVAYVDHAAYDIYKFKDFDLVVTIGDDTSLVASDILYRFDIPIIGITDGDLDKVVENGFVNEKSTIIEVASGFDDIAGPSHS

SEQ ID NO: 6213 - protein, 168 aa, Methanobrevibacter ruminantium
MSDLYYVLDASAFINGFEPKSDFNITVSEITDEVKDLKSRLILNQAIDDGKIIIQEAQKEFLDKLDETIAKSGDDLRLSGPDKKLLAVALALLDEGKEIKVLTDDYSMQNVLKILDIPYESIITEGIKGVYNWKKTCEGCKKEYPADYPFDDCEICGSKVFKRRIKTY

SEQ ID NO: 6214 - protein, 172 aa, Methanobrevibacter ruminantium
MKSETMELHKKKAPIKVSCGIITLSDRFSNDKEGKEKDLSGKYLIDELSKKYDVDDYTIIPDEKDILKDTIESMIDNGIDVIITTGGTGLESRDITIETVEPLFEKEMKGFGEIFRAISYEELGAGSLLSRATAGVYKKTLIFCMPGSPNAVKTGMKIFYEELGHLKKHAQK

SEQ ID NO: 6215 - protein, 176 aa, Methanobrevibacter ruminantium
MCMVSKEYLIEILKENKVFEQGEFTLASGKKSNYYVNMKRAITEPEILSTIAKLINEKIDDDTDKIAGPALGAVPIATAVSLESKKPLLMIRKEKKGYGTSKLIEGDLNEGDKVILVEDVTTTGGSLLKAINAIVDNGGVVQKAFVVVDREEGAMETFANEGITLEPLISVSEFFE

SEQ ID NO: 6216 - protein, 94 aa, Methanobrevibacter ruminantium
MRIAKELIGKEVLGTDVTVMGKVVDVDIDVEDNIIESIIVSKGGIQESLNISKSELVIPFDMISKIGDKILLKDAFGEDLDQMADEIQDLKNQL

SEQ ID NO: 6217 - protein, 37 aa, Methanobrevibacter ruminantium
MMVFGIEDPWIWGVYVLLIGMTLVCVAYGALNWNNED

SEQ ID NO: 6218 - protein, 549 aa, Methanobrevibacter ruminantium
MNYFLLGIVFIVYFLMVGYVGYLAWKRTNSSEDFLVAGRETHPYIMALSYGATFISTAAIVGFGGVAGKYGMGILWLAFLNILVGIFIAFVFFGKRTRKMGKNLNSLTFPEFLGRRFDSKFIQYFSGVLIFCAMPIYAAVVLIGAARFMESSLMLDFNLALFILAVVICGYVLFGGLKGVMYTDALQGTIMFIGMLILLVFIYWVLGGVTEANTALTNMAHLYPPDALAEGGTGWTSFPKLGSPFWWTLVTTIIMGVGIGALAQPQLAVRFMTVKSNKELHRSLLIGAVFIAVMTGTAYIVGSLCNVYFYQNFGQIAIDYVGGNMDSIIPTFISTALPEWFVYIFLLSLLAAAMSTLSSQYHTQGTALGHDIVDAFKNRGTTREYTDEEILEGSSKEETRIGFISVSQLGILIAVVLSLIIGLILPGGIVALGTSLFMGLCAAAFLPVYCAALFWKRATRKGAIAGLLSGTFTSLFLLVFVYKKTAVGLGICKALTGMDMLINVMPWYSIDVMVFAIPVSVIFTVVVSLLSPPMDEKVIKRSFEGLSEE

SEQ ID NO: 6219 - protein, 433 aa, Methanobrevibacter ruminantium
MIWNQNAECMDKEEKEEMQLALLQKQVKRVYEKVPFYREKFDKAGFHPDDLKTLDDITKIPFTTKADLREAYPFGLFAVSDDEIIEIHSTSGTTGTPVVSGYTQKDIDIWGECTARAIAMAGGDKNSKIQNSYGYGLFTGGFGIDHGAKVMGATVIPMSSGNTARQLKIMEDFQSDILTCTPSYAMYLAESLEKEGYTADDISLHGGIFGAEMWTEEMRRSLEEKLGITAHNIYGLTELMGPGVAAECKYQTGLHIQEDHFYPEIIDPETEEILEDGKRGELVLTNLTREGMPVIRFRTKDMTALRRDECPCGRTTVRMDRITGRSDDMLKIKGVMVYPSQIETAILQIEGLTANYQIHVSRPHTLDEIEVKVETSPEVFSDEMKKIEEFERRIAKKIQSAIGISVDVTLVEPESLPRSEGKAIRVIDERNFD

SEQ ID NO: 6220 - protein, 143 aa, Methanobrevibacter ruminantium
MSVKQLSVFLENKEGKLKKAVNAMSQAGVNIRALSIADSSKYGILRLIVSDNELAIKALKEENFTVKETEVIVVGVKDEPNGLNTMLEILEKEHINVEYLYAFVSSKTDEAIVVVKIGNYEDGLKALENANANLLSKEDLAEL

SEQ ID NO: 6221 - protein, 425 aa, Methanobrevibacter ruminantium
MLDRLKSISLGNWILIGMVLGLITGVILNLYVHSQFIDIILIDNVFYLGGNIFIKLMKMLVVPLVFCSIVVGVASISDIRKIGTIGGRTILIYLITTALAVSIALLIASFIHPGAGLHMAGLATASNVSTNVTITNTILGMVPDNPINSLANGDMLPVIIFGVLVGIILAKLKEETETINKVFEEGNTIMMEMTSIVMKFAPIGVFCLMAKTFATLGFDGLMPLSKYVICVLIGLAVQAFIVYPSLMVIFTRLNPIKFFKKFYSVMLFAFSSSTSNATIPLNLEKLSELGVSREVSSFTIPLGATINMDGTAIMQGVAVMFAAQAYGMDLGASALLTVIFTAVMASIGTAGVPSVGLITLNMVFTSIGLPVDAIGIIMGIDHILDMFRTAVNVTGDAICTIIVSFKNKSIDLDVFNGKKQAEGSS

SEQ ID NO: 6222 - protein, 92 aa, Methanobrevibacter ruminantium
MPFKIDSAIVKKDMDSGKYDLVDPEGKFSQADALMVINSDDFITVQLIINAILRNDFKAWKDVKWEGGDSLKSLLVKLGYGKEEIVEMLKEF

SEQ ID NO: 6223 - protein, 1058 aa, Methanobrevibacter ruminantium
MPVDKDINKVLIIGSGPIQIGQAAEFDYSGSQACKSLREEGLETVLVNSNPATIQTDMDMADTVYTEPLTAELVAQIIEKENIDAILPTMGGQTGLNIATELGKLGLLEGIKVIGSDVQTIADVEDRDLFANFMDRLDEPIPKCHAVESVEGALEAVEEIGYPVIVRPAFTLGGTGGGIAHNKEELIEVTTHGLDMSYINQVLIDESVLGWKEIEFEVMRDKNDTCIIVCNMENVDPMGIHTGDSIVVAPIQNLNDEVCQRLRDASIKIIRNLGINGGCNIQFALNPETNEYKIIEVNPRVSRSSALASKATGYPIAKISSKVALGLTLDEIQNDITKETPASFEPSIDYIVVKIPRWPFDKFKGIDRKIGVQMKATGEVMAIGRTYEEAIQKAIRSLDIGLHGFEYLEYTEDNLANPTDERLFHMYSAIKDGRSVEELAELSKMDAFFLYKIENIVEFENQVTKEALEDEEFLLKAKKLGFSNFTLAKLAGIEEEDVKALLDKFDIKPSYKMVDTCAAEFEAKTPYYYSSYDKGNELVKSDNRKILIIGAGPIRIGQGIEFDYCCVHSSLALKDQGIETILVNNNPETVSTDYDVSDDLFFEPLTYEDIMGIIEQVEPEGVIVQFGGQTSINLSVPLAKAGVKILGTPYESIDRVEDRERFTEVLNDLHIHQAPYGLANSFDEAKEAAERIGFPVLVRPSYVIGGRAMEIVYGVDELEEYMKEAVKVSPEHPILVDKFLEDAVELDVDLLCDGEDVFIAGIMEHIEEAGVHSGDSACVIPPQTIPEHLLEVIRENTRKLALELDVIGLMNIQYAVKLDEERVYIIEANPRASRTVPFVSKAIGVPLAKVATSLMMGKTLKDFNLTKEIKINHVAVKESVFPFLKLTESDSVLGPEMKSTGESIGIDENFGLAFYKSQLSAGMDLPKEGNLFISVREQDQPKIQPIAEKAHALGFNIMATKGTANSIFDVPITRVKKVSQGQPNIKEAILDGKVDMIINTPHGEQASKDGYTIRRLAVELGIPYVTTLAGARAALNAIAAVKENDLKVKSLNEHIANI

SEQ ID NO: 6224 - protein, 359 aa, Methanobrevibacter ruminantium
MGNEAKLALEDGTVLKGKAFGYETTTVGELAFSTGMSGYTESLTDPSFKGQILMSTYPLEGNYGVSEDWYQSDSVHVEGFVVREACKKLSNFGTKKTLDDFLKEFKVSGIEDIDTRDLTLKIREKGSLKAALATEEIDDDELVAKAREHTSITELDLVPLVSTPEIKAFGDFDKTVAIIDCGVKRNIIKCFLENNIGVALFPYDTDYQTILDYGVDGLMVSSGPGNPERLTSTIENVEKLLNRFPVFGICMGQQVIAKAFGATTYKMKFGHRGANQPVKDLNTGKVFITSQNHGFCIDPESLAGSDLELNQINLNDGTPEGFLHKELPLRTIQYHPESGPGPNDTKVLFEEFGQMIREY

SEQ ID NO: 6225 - protein, 249 aa, Methanobrevibacter ruminantium
MSHFDNSDFNKDLDVNNQYDPVKGNDKAFNGKYSLNFSISHNDPNFSNLAMSSSIISETTLEEDCILLKKKSLLKRKSLGSQKIYYREILELDLIKSTLSSLYSSIRIVYSKNGYSKRVLSLSSSDGFAVRWFYDALVVKYSYVKSGLDKKYDFNSNESDWIEANESNKNTSLSGDLTNSNDLNDSSIKEDDLNNSNGSNSGDESHNSLSSKQSKLSDFVSQMNKELSEEETRSLKKKMKFERCSSGEY

SEQ ID NO: 6226 - protein, 129 aa, Methanobrevibacter ruminantium
MFLDRFSLERNDLNFRKYNLAILIASLLLYLLNIYFLSSFGDFFKFYFDDLFAIMVLFSFLNLVFPYKIDNFWIIVIITIFAAFFWEYVALFIKPGSVFDYLDILAYFLSMVIYLILIYAFEGELNVSF

SEQ ID NO: 6227 - protein, 75 aa, Methanobrevibacter ruminantium
MEDEVIDVEDYEVKETAIVVSDDEEDNDYSKSSNDNNYTSNTTFRTATISLSNEKLIILALVAIVLIAIFLLTFC

SEQ ID NO: 6228 - protein, 76 aa, Methanobrevibacter ruminantium
MNQFCPKCGAKLLDPYAKFCSQCGTNLTEKKEINIDELPEERIDLREGMTNTNKGMYRYTKWGRRKKKPVNWDMEK

SEQ ID NO: 6229 - protein, 116 aa, Methanobrevibacter ruminantium
MRSLEEIGAKIEELNDKIAGIRAEDEENLTNELKVILAGSELQSIILTSTLTSKEQQVRDLLDKFVQRGDELNERYEEASIEDDAAAKNQLHAMIWTNDIRIDTLKWVLEEEDVGI

SEQ ID NO: 6230 - protein, 472 aa, Methanobrevibacter ruminantium
MVLICPILAEEAHATTVFLTSDNVLGHDEDMQMLNDIKQQIETKSNGQITVIVDENASNPGEGTRAMNADCDIAVTIAYACAGNLVDLGSYSVQSTKKIIYVNAGSLDLTSINFLRRSYDDNWSSSSFASLQNPGQYLYDSGITLLQPGQKFYGETDNGNLDHCSSEIDGYIADEVMKQVYSNGVIRKLDSDYINRHKLDPKYLAEDSKKIVDGFGTPMADSYGSYTTQQLLYMSASYLVGYSLDVPQQFAPPENPAEYSAFTKGTYSFNEYCEMADIVVDYMNEHGKAPDSISYKGATISYYDLVYNFALLTQDDFDAAHMNFPQNADFQKYNSNILLDILPIAIIIVVIIAVAIIIRKLIKKGRRGIKRIKNRGKDNNYYRNQASGNRSRKSRGGSRDNYSRNSARYNNSRGNQSSRKSRNSGRPRNSRNSRDSRNSKNKRSTKLFHKNVDLDQYDNSRSKEPKRLNKKR

SEQ ID NO: 6231 - protein, 309 aa, Methanobrevibacter ruminantium
MTSQTSEKENQELIDSLNNEIDYLKEILTSKIFEEEHLLNFTCRDIETDYALKFGVYKYKIKGYKLKIKKTKRTIELIKKMVNRQEINLFNKKLEEMQPNQAKINETKINKPRLNMKEIEDHIENEFKEEDIELETETARTNILIEEHRNNLDRRVPVREIDALYKECIRKMHPDLLFNPTEYEESLFFNAKEAYEDRDFEELEATYNLIHTHKIEETPQTVEEMERFIEHLEIHIKLEEREISNIINSKPYTQQKFLLNQKKVNDYREGLVKSLLEVEKEYIKCKRELTDLKSKNNLSYKLDLTKKDN

SEQ ID NO: 6232 - protein, 148 aa, Methanobrevibacter ruminantium
MLIREFLPSDLARVYQIEVESFSTPYDIPILKQLYDIGAGFLVATENGQVVAYIIFWLKEENLGHIIALAVDRKFRGQHIATRLLMMAVTVLRNCSVPKITLEVKAQNTPAISFYEKFGFKIERKVPNYYEDGSDAYVMYFYTDSIKN

SEQ ID NO: 6233 - protein, 137 aa, Methanobrevibacter ruminantium
MWDDLEEYIENLSNDYSSKNNRKTKIVEIGVGKFQTISDHLRENENIELIMTDIDPANENVVKDDVFNPNMDIYKGADIIFSIRPPGEIQEAIMKIRDEIDCTLIIKPLFNEDLNIKAKGMKLKNYNRASFYIYQKE

SEQ ID NO: 6234 - protein, 906 aa, Methanobrevibacter ruminantium
MIEEILKTYNTTIEGLTNHEAKERLEKYGPNKIQEQESDGLLKLFLSQFADALIFLLIIAAIISYLIGNHLDAVVIVIVVIINSIIGFIQEYRAENAMQELKSLVSKEAHVRREGKTKIIPAEKLTIGDIVLIEEGNKVPADLLLVESYDLTIDESLLTGESEEVRKNADYSNMGNLEEKIRNISSHYQEEELREKIVSMNSNVLSGRGTGVVIAVGMDTTIGKIATMIQEEDEETPLAKKVDKLGKRIGALSIAVCIGVFFIDFFQDYNIIEGFMTAVSLAVAAIPEGLPAVLTLTLALGMQKMAKSNAIVKKLSSVETLGSCTFICTDKTGTLTENRMTVREDFLLDNDKSVLISGLCNNAKYETVDEGEYESLEKDNNRARNSSEEDSKKTENSKEESQLIGNPTDIAAYNFAKGHGFDKLDPEHSYTRLDEIPFDSNRKRMSVIYKKETQNETEYYIFTKGAPELILNLSDRIEKDGNIKEIDSETISKINRKIDEMTNKTLRVIGLSYKQIDEEDYNKIKNSHNDNKIHDIQEELERNLIFTGLLGIMDPPRAEAIDAVASCQKAGIEVVMITGDHKDTATAIAREIGILSKEDCESLSKHVLTGEELDRLNDDEYRNIVEEIKVYARVYPEQKRRIIDILQSKDHIVSMTGDGVNDAPALKKAAIGVAMGSGTEVTKESADMIIQDDNFATIVSSIKEGRTIYDNLKRFLKFQLSTNIGAILTITIGSLLPIPTPFTPIQLLWINIIMDGPPAQSLGLEASEDNIMERPPERGELLDKKTLIKITISGIVMTIGTLSLFIYELGLNSPYGKTKAITMAFTVFVLYQLFNALNYRSKSNVKNKMLIFSLIGTFILQVLVIYVPYLQIIFKTCPIEPFDWILVIILSAIILVTDKIANRLIN

SEQ ID NO: 6235 - protein, 40 aa, Methanobrevibacter ruminantium
MNLIADIASGLFWMSLVMIGGFIVVIALMTLIGKGSSADF

SEQ ID NO: 6236 - protein, 102 aa, Methanobrevibacter ruminantium
MNQARIKLTGTDPEKLNYVCDQLKKISERTGVDISGPIPLPTKKLVVPTRKSPDGEGKATWEKWELRIHKRLVGIGADERAMRQVMKVNVPDNVSIEIELKN

SEQ ID NO: 6237 - protein, 413 aa, Methanobrevibacter ruminantium
MAKEKEHLNLAFIGHVDHGKSTLVGHLLLKAGAIAEQQLDEGEDKFRFVMDKLGEERERGVTIDLAHQKFSTNKYDYTVVDCPGHRDFVKNMITGASQADAAVLVVAANDGVMPQTKEHMFLSMTLGIKQLIIAINKMDMVDYSEDRYNEVKDEVSDLLRSIGRDPASTPFIPMSAFEGDNIKELSGNMSWYKGDALMTALDKLVPPEKPVDLPLRIPIQDVYSITGVGTVPVGRVETGIMKQGDNVIFEPAGVSGEVKSIEMHHETFPEAEPGDNIGFNVRGVGKNDIRRGDVAGHTADAPTVAKEFTAQVVVLQHPGVITVGYTPVFHCHTSQTACTFLDLTSKLDPATGQPEATKPDFIKTGDAAIVQIKPTKPMVMEEAANIPPMGRFAIRDMGQTVAAGLCLKVTDKK

SEQ ID NO: 6238 - protein, 735 aa, Methanobrevibacter ruminantium
MVMILSRRDKMIAKIKELMYQPKNIRNIGICAHIDHGKTTLSDNLLAGAGMISEELAGDQRFLDFDEQEQARGITIDAANVSMVHEYHGDEYLINLIDTPGHVDFGGDVTRAMRAVDGAVVVVCAVEGIMPQTETVLRQALREKVKPVLFINKVDRLINEVKLGPEELANKFIGIINEANKLITKMAPKDKKDEWLVKVDDGSVAFGSAYHNWAINIPMMQETGINFKDIIDYCNDENQKELAKKVPLADVLLGMVVEHLPSPEVSQQYRCPNIWDGDIESEAGQTMINTSPDGPLAVMVTNVSVDKHAGEVATGRVYGGTVEQGSEVYLVGGQARSRVQQVGVFFGPERVPTEKVPAGNIVYITGAKGATAGETICSPENKIVEFEGIEHISEPVVTVAVEAKNTKDLPKLIEVLRQTAKEDPTIHVNINEETGEHLVSGMGELHLEVIGVRINNKGVDILTSEPIVVYRETVAGKTPNPVEGKSPNKHNRLYLEVSPLDDSIFEALQNGDIKEGKIKAKEEAQQFIDHGLDKEEARRVWDVYNKSLFINMTRGIQYLDEIKELVIEGFESALEEGPVANEIAMGMKFTLVDAKLHEDAVHRGPAQILPAIRNAIKGGMMMADPTLLEPVQKVFINTPTDYMGSVTKEILNRRGQIIDMPTEGDMVNVEAKVPVAEMFGFAGEIRSATQGRCLWSTENSGFERLPRELQGQIVREIRQRKGLAPEPFGPDHYLG

SEQ ID NO: 6239 - protein, 186 aa, Methanobrevibacter ruminantium
MAKLFNKWDLDEVEVEDLGLKRYICLDETIVPHTLGRHVKRQFAKSNVSIVERLMNKIMRTERNSGKKNKAYNIVKEALEIINRRTKQNPVQVLVKAIENTSPREETTRIKYGGIGYQVAVDISPQRRVDLSLGFLTRGTLQSAFKNKRSVAECLASEIIFASEEDTRSFALQKKEEKERVAKAAH

SEQ ID NO: 6240 - protein, 141 aa, Methanobrevibacter ruminantium
MPGLFAAKKLKKNRQNFKWKDVDYKRRALRLDVKADPLEGAPQARGIVIEKVGVEAKQPNSAIRKCIRVQLIKNGKQITAFAPGDGAIGFIDEHDEVMIEGIGGPSGRSMGDIPGVRWKVSKVNNVALSEMVSGKIDKPVR

SEQ ID NO: 6241 - protein, 134 aa, Methanobrevibacter ruminantium
MRFIALFESMTGAMVKDCIIDDENSKVTFVVKNGDMGLAIAKGGTTVTKVKKAVGRGVEIIEYNEDPEQFIKNILSPAELKSIKIVTKNNDEKIAFVNTDSSNKRIAIGKGGINIERAKLLAKRQHNISNIVLK

SEQ ID NO: 6242 - protein, 99 aa, Methanobrevibacter ruminantium
MMDVERGIRVAVDTGDVTLGSEKSIQSLKLGKGKLAVVAANSPKEILEDVEYYANLSEIPFIVYEGTSVDLGSVCGKPFTVATLIINDPGDSTILEAMG

SEQ ID NO: 6243 - protein, 414 aa, Methanobrevibacter ruminantium
MAKYDISMIKDNNYYKEQCEHAEESLNKKWYSESILTMAITLEELTEELIKYTKNISDGKLSQRDKIWILKDNGITNYNIYNYLREANISRNKLVHGEIPRNYSNTFSMYKNFLKIVFWYDENYVIGKLNTKSKLKQYLNKVCDDSHILNIIEQEINDGAITENHQIIKRHNKELIDYVESLNIELEIKEKLIKDIYSGVTKNRSQIEEKIKREKKDPIIGVVNIVNTENMMKYTIQSTDIDKEVKENMEKLENNTHENKQLQEDYNKYGPESFTTETVNICKNEELSKITKEDEIIFNANKSYNNRKKDINPKIGIANIINTETLMKYTIQSTDLDKEIEENIGKLENNTHENKQLQEDYNKYGPESFTIETVNICKNEELSKILKEDEIIFNANKSYNNNKKEETGEKNHTL

SEQ ID NO: 6244 - protein, 584 aa, Methanobrevibacter ruminantium
MLGGINLNNEDIIIGIDFGTTNSAACIYKDEKFQIIPSAMGYDYFPSVVAVNENGELLVGHHAKKQMASNASNSVAEFKLKMGENETIKFNGEDKLPQEITSYVLGRIKRDAEAYLGKPINKAVISVPASFDNDARNATMEAGEIAGFEVEALVDEPTAACLTYSLTKNFLGNILVFDMGGGTLDIIIGAFDGSELVPKVTTGARFGGRNITMALRDYLQRDFEEQNGLKLEDYITPEYDPLIDLYNATEIAKIELSSTKTTNVHIDSIVMTDKGQRINLDKNVNRSDLNKLSDEVVKGSKEKVLEALKDAKLTKDDIDFLVFVGGPTKMPLIRESIEKLLGKSAAEGIDPMVCVAQGASIYKGGPITVGTINSLTLSVVINEKESDPLIPKNTPLPAEVTKEYHTMRDNQTSANIQIVEGESILAKENHTLHSFTLRGLPPRPKGEVAIQVKLKVDKNGIMGLSAKELSTNKKLSATFDSSNRMSSEEIKKAGLDNENLLSDYEEKIKQRNIINDAEEVIFEGKKLIENYSGHMLISDKNRVNENIEKLEGLLVIPKNFELIKLITKDLRNLIEKIESEDFYY

SEQ ID NO: 6245 - protein, 683 aa, Methanobrevibacter ruminantium
MVNKGSNDDFNCNNWELGRIFARKGNFTEADIRFEAELNHSLSPNSLVLDDHGHLLNRMGKYQDAIDKFRNLLNSDENYVSSLFGIGISYIGLNKLGDALKYFEKVNELDEEHADAWYYSAIIYGNPFYPKYDLNVAKIRYKNYQKSKESYINDPKYFSKPFDNLSWEELHDYYKCNSLFRIIEQSLDKGILDEFLNFSNDYKRLYCFDEEGLDKQFDIFRLFENDTPLADKIDKFHEDKNIEDKFESAGFEEDLIEGLSFKLGMMSIDDKKMLNELMDYSKSSQLSFNDINDLIRENVLDEDMSLDDFYENREYIVKNRIKKNNSEYERNVEKRVNTELKNQIAINKRLNDNLIEKDEVIEKLNDNLIEKDEVIEKLNENLNDKEEVNQKIEDKLRNNYELLSDENINQPEHRFDNYDFSTKEIKSSFSGLKESMDSYLEDMESYLNECQDVSSMNILSGINNQCYQDDLEYIKNECGISDVDLKTLKSAFKDFYNGKFGSASYNFSLERLRKTIGKTSELKKYRYFLKLTSKSREKILEEEDFNWLIIKNLKLKDYKNEKEKKINKGKKLKKEKYPIGWFNLGNICFDYANSQSVKTTVKAGNNAMDAYELAYFCYKCAEDSISNQEENSKYEFNFKDTKNEQEFKNNVVRMISNCEIKILQQEIKGELKKLDKLQGKFNW

SEQ ID NO: 6246 - protein, 545 aa, Methanobrevibacter ruminantium
MVDAEAKLDAIKKVEKVLKKNKIDFPQSYIDELASAYIRRDLTDKELNTLVLKVEEAYERAHIEAGEAVGTVAAQSVGEPGTQMTMRTFHYAGVAELNVTLGLPRLIEIVDARKKISTPTMDIYFEDEYKNDEEFVRKLANQIGKSTINDILADYDIDYFNYKIVTVLDNEKIESRRLDIDDIISRVQKTFKKLEIINYGDDELIEEEAKDIEDVDSDVEETDIAKVDKVDETGMAKADSDAEETGMAKADSEEDSETIQVSDEEVQEPSNINLKKSDENITLIFEPSKRTIRELRLLGDKVRDLQISGTKGIGKVIIRKDDAEWVLHTEGSNLGAIFKIEGIDKVRSTTNDIHEIEVVLGIEAARNAIVYELNRTLSDQGLTVDIRHIMLVADMMTSEGTVKSIGRHGISGEKSSVLARAAFEETGKHLLHASIRGEVDDLTGIIENIIIGQPIPLGTGSVSVTMKPDAYPITAGITKRGKGKSGGSASESKEVNSGIAKGGKGKSGGSASESKEVNSGIAKGGKGKSGGSASESKEVNSGITP

SEQ ID NO: 6247 - protein, 926 aa, Methanobrevibacter ruminantium
MSPDQIREMSVVNITRPDTYDEDGYPIENGLMDSRLGVIDPSLKCRTCGEKGGECQGHFGMIDLARPVIHVGFGDDIHKILRSTCNECGRVLLDEEEIEEYTEKLNELQEAGESTEDLIKEVYKICKAKKAKDVCPHCGAEQEDIKIVKPIGIIEVRKEYDENGELLTDANGNPVTTDYDLTASEVREKLERIPDEDAYVLGVNPEVARPEWMVLTVLPVPPVTVRPSITLDTGERSEDDLTHKLVDILRINQRLIENMDAGAPQLIVEDLWQLLQYHVTTYFDNEASGVPPARHRSGRPLKTLAQRLKGKEGRFRSNLSGKRVNFSARTVISPDPNISINEVGVPEMIAKEVTVPTYVNEWNIEDLREAILNGPDAHPGANYVRKYNDRIKDYNKVRVLDSNKETVAEMLTCGDIVMRHLKDGDIVLFNRQPSLHRMSMMAHEVRVLPYKTFRLNLCVCPPYNADFDGDEMNMHVFQTDESRAEAKSLMRVQEHILSPRFGGPIIGAIHDHISGAYLLTRDGFTVPEDDAFQMIRKSHLLKCPYDEYLKRDLDEKEYKQQIKEYNEKLKRKHRDWTGKELFSLLLPSTLNMNYRAEICRKCEECMAEACEYDSYVVIKDGQLTHGAIDEAAYGSFSGKILDNIVKEYGPAYAKEFLDRSTDLAICGIMKTGITTSTNDEEIPEEAIEVIDAHLDNAEQKVDKLIETYEMGELQPLPGRSAEETLEMRIVQVLGEARDAAGDIAAGYLTMGKQSPDDSYDHVMAVENHSVVMAKTGARASMLNLAQITACVGQQSVRGGRITRGYLARPLPHFRKHELGARAKGFVHSSYKEGLDPVEFFFHAMGGREGLVDTAIRTAQSGYMQRRLVNALEDLNVRSDGLVTDNKNQVIQTVFGEDGIDPAKSDFGKVANLDKLIDEMRIKDEGK

SEQ ID NO: 6248 - protein, 603 aa, Methanobrevibacter ruminantium
MVKAKIYINGKLTGTCDEPEEFVKEMRARRRSGEIHNEMNITYYDENHEIYIFTDPGRARRPLILVEKGEPLLKDEHIEAITKGELKWDNLFELGLLEYLDAEEEENSYIAMNLSQLNEDHTHLEIDPSTMLGICAGIIPFSDHNSSPRNTMEAGMTKQALGLYVSNYALRTDTRGHLLHHPQTPLVKTRIIDAINYDDRPSGQNLVVALMSYEGYNMEDAMILNKSSLERGMGRSSFFRSYEASERRYPGGQEDKFERPEKGVKGYRSEEAYKNLDEDGIVNPESHVESGDVLIGKTSPPRFLGEIDEFGTVAEKRRETSVTVRHGEKGIVDAVLLTETVEGSKLTKIRVRDTRQPEFGDKFASRHGQKGVVGLILSQDDIPFTEDGVVPDIIVNPHAIPSRMSVGQVLEMVAGKAGCMEGHRMDGTPFNDNVEGEIKRALHDNGFESAGCESLYNGVTGERIEAEIFVGVAYYQKLHHMTTDKVYARSTGPVQVLTRQPTEGRAREGGLRFGEMERDCLIAHGAALALKERLLDESDKYEAVVCNECGMLAVYDKNKNKMYCPICGDSETYPVEISYAFKLLLDELKSLCIFPKLILGDKA

SEQ ID NO: 6249 - protein, 520 aa, Methanobrevibacter ruminantium
MNNETWGLVDSFFDKYDIVDHHIKSYNDFVENRIQNIIDITEPITIENEKGNYTLRTGKLTIEKPFTKEADGSKSMIYPTEARLRNLNYSAHMYLEMALHDNNSDEEEELENVYIGELPLMLKSSICHLHGLSDEELVKRGEDPKDPGGYFIVNGSERAVVTMEEIAPNKIILERIDEIEDRHAKAIVTSIKSGFRARITLEYKKPRKSGVFLRISFPYVPGEIPLVILLRALGLSTDGEIISKISDDFNFQMYIADDLQVSEKDLKLDSDLLLSLSNEERDEYLQKAAIKYIGNRVAKGMTEEYRIKRAEDVIDRYLLPHMGIESDKRYDKAIYLAEMTEMLLQVIEGQREPHDKDHYTNKRLRVSGDLTEDLFRVAFSSLTRDMSYRLERSLSRGKELSIKQAVRSDVLTENIKHAIATGNWVGGRAGVSQLLDRVSYMATLSHLRRVVSPLTRSQPHFEARDLHPTQFGKICPNETPEGPNCGLVKNLALMCKISEGFDPEDIVNIISTMDNVDMID

SEQ ID NO: 6250 - protein, 82 aa, Methanobrevibacter ruminantium
MKFDILEHNAVPKHEILTKSEIKKIFSKLDYDVSQLPKIKIDDPVSKAIGAKEGDVLKITRESQTAGTFITYRLVDGFTANK

SEQ ID NO: 6251 - protein, 304 aa, Methanobrevibacter ruminantium
MTNEIIKENTEKIEEILNGIEEAMENVKAKSPLTHCITNFVTINDCANAALAIGGSPIMTNDSQEVAEIGNIASAIVINIGQVSQLQINSIKKSCEHANKTNTPIVFDPVGAGVSNIRNTITKEMVEFYELTAIRGNMSEIKAIVNLIDLEIKDNEKKDSAGKGVDVAESDIITRDNLYTNGLIVRELAKELETVVMASGPIDIISDGEYTFALENGDAMMPLITGSGCMLSTIIGTYIGANEPLIGAITASALMAIAGENAAEAVKKDNLGPGSFRNFLIDNLYKVTADDISKRANLFEIDLN

SEQ ID NO: 6252 - protein, 219 aa, Methanobrevibacter ruminantium
MFKAMKKEDKMNKSSIDYSVYLVTDHRGKTDEEILNIIEQAIKGGTSVVQIREKTASTKDFYNLALKAKEITEKYNVPLIVNDRIDIALAVKSDGVHIGQDDMPAKVAREIIGEEMILGVSASTVEEAMKAESDGADYIGSGAVFPTATKDDADSVSKEELKEIVNSTSIPVVAIGGITIENAESLKDAEIDGFSVVSAIMNADDPKKASEILKEIYNR

SEQ ID NO: 6253 - protein, 410 aa, Methanobrevibacter ruminantium
MAKFNTIDDFDVNGKTVLMRIDINSPVDPNSGIILDDTRMKIHAETIKELSLKGAKTVLLAHQSRPGKNDFTTFKQHAEVLSKAVGMDVKYVDSIFSSTAKEAILALEPGQILLLENVRFYSEEQLKRSPEEEATSVLVKSLSPLIDYFINDAFAAAHRSQTSLVGFTTVVPSAAGRVMEKELTVIGNALENVQHPCVFALGGMKADDSIMVTENVLENGTADYVLVSGLVANIFIWAAGYDIKSTNENFIEARGYLDMVDKCRDLIKRFPGKIIYPQDVAVSVLGDRADVTIENIPDASIFDIGRQSLIEYSKIIREAKTIFANGPAGVFEDPKFAIGTEDIINAIASSEGFSIIGGGHIAAACVNLGYGDKMDHISSGGGASINMLAGKPLAAVQALEASAELFNNKE

SEQ ID NO: 6254 - protein, 224 aa, Methanobrevibacter ruminantium
MSLKTPVVILNFKTYLESSGQKALDLANALESAGEESGITMVAVPQAIDIYRIKEETSIPVLAQHIDAVSPGGHTGSNLFESFVANGVDGTLLNHSECRMTLADIAEVVQKTKGADLISCVCTNNIETSMAAATLAPDFVAVEPPELIGTGIPVSKADPEVVEGSVSKVKAINKDVQVLCGAGISTGEDMAAAIDLGAEGVLLASGIIKAENPKDALLDLVSKI

SEQ ID NO: 6255 - protein, 304 aa, Methanobrevibacter ruminantium
MTFTKEEQAKLEYSGYRFVGEHGHAAAKTCHWTRKSIKNEGVCYKEQFYGVKSHRCLQMSPAVPFCHQKCSFCWRDLSQTRTEWEGEYDDPKTIIEGAIKAQNNLLCGFGGNKKADRKKLEESKRPTNAAISLAGEPTLYPEIDELIGEFHRQDFTTFLVSNGMYWEKLGSLENEPTQLYVSLDAPNEKVYNELCNPQIDDGWGKLNKTLELMPSFKNNTAIRITSVKGKNMFNTDEYAELINKADPTYVEVKAYMFVGSSRKRLSMDNMPRFHEVNDFAKEIADKTGRELTKYSEASRVVLLE

SEQ ID NO: 6256 - protein, 374 aa, Methanobrevibacter ruminantium
MKFFEHSAKKVFESEGIKILEGHVVYSPEEAMEVATEFGRPIVLKSQVLVGGRGKAGGIKFADNPGEALEIANELLKLEIKGEKVKHLLIEEKANIKKEFFLSVSNDRANRRPIIMASAEGGVEIEELAKTSPEKIIRYNVNPLKEFLPYEAREIARKMGVGSELISPLGSIIWKLYNVYDKYDAEVAEINPLILTDDGLIAADAKLEIENDALFRHQDLVKQNRFKQKDFAFVKLDGDIAVIGNGAGLTLTGMDMVTLFGGKPATFLDIGGGASEETINKALSLVLNYPPVKVVFLNVLGGITRADDVARGVIAALEANKWDVNIVIRLTGTNEEEGQRLFDEAGIPYEISLEEAAKKAVEMCNEIKAKEAGK

SEQ ID NO: 6257 - protein, 193 aa, Methanobrevibacter ruminantium
MFGKFKVKKYFSELNKAYYSNDFKKAIKYADIILEMDKNNLEVLKYKYNSLANMGDYENALVCIDEIITLEKSCMALLNKGTTLCYMNRIEEGFKLLDYVIDNCEEYEAAFINKCNFFFMLEEFDEALSLSDKILNMHPDCSNAYDTKSFIYYKREEYDSSLIYANKALEKNPNNNIALERKERLLSILNSKD

SEQ ID NO: 6258 - protein, 181 aa, Methanobrevibacter ruminantium
MRTEVRIAGFGGQGVIMAGIIIGKAASLYDNINAVQTQSYGPEARGGASRTEIVVSDEEIDYPKVTSPDILVAMSHEALIKYMGDLKDEGVLIIDPDMIVEEEIVDFVKEHKIKLYRAPATKTATEDVGLRIVANIVMIGAIVKVTNVVSVDAAKKAILDSVPKGTEDKNIQAFEAGYALI

SEQ ID NO: 6259 - protein, 287 aa, Methanobrevibacter ruminantium
MVEVKESPYKKYLREDRLPHIFCPGCGNGTVMSAFLKGLEGTDIDFENIAMVSGIGCSSRIPGYVKCDSLHTTHGRALSFATGLKVGNPDLDVVVFSGDGDCASIGGNHLIHAARRNINLTVICINNNIYGMTGGQISPTSPKGSFGTTAPYGSRDMPFNLAELVSAAGASYVARWTTTHPLQLSKAIQKGLENNGFSFIEVVSQCPTYFGRKNKLKTPLSMFQYIKENSVNKRRAEKMEEDELEGKIIVGEFANKPHDELTDSIKKLIEENSNMPLAIKSAFEELD

SEQ ID NO: 6260 - protein, 376 aa, Methanobrevibacter ruminantium
MAEERFVQGNEACALGAIAANCRFFAGYPITPSTEIAEQMSILLPKYGGAFVQMEDEIASVGAIIGASWSGLKAMTATSGPGISLMQENIGYGFITETPIVIINVQRGSPSTGQPTMSAQADMMQVRWGSHGDYEPIALAPSSVQEFFDFTIKAFNLAEEYRVPVTVLADEVVGHMREKLIIPDEIEIVKRTRPEKPDGQYLPFDAPMDGTTPMPAFGDGFNIHVTGLTHDERGYPDTNDPESHTKLVERLCNKVIMNRKDICSVKKEQCDDADIVIVSCGSPYRSVGAAMKKAREEGIKVGSLKIDTPWPFPEEEIAEIAKTASDIIVPEMNLGQMVHEVERAAKGEANVHLIGKIGGILHKPEEILAKIKEISG

SEQ ID NO: 6261 - protein, 68 aa, Methanobrevibacter ruminantium
MIIIDSKLCKGCDICIATCPKKVYSKSDKVNTKNVYLPFPEHEEGCTKCGLCELSCPDQAIYVEKEVE

SEQ ID NO: 6262 - protein, 42 aa, Methanobrevibacter ruminantium
MDLNDLNKNNLKQKKNHQVLKDLKINNLIIIFLDLTQYINNN

SEQ ID NO: 6263 - protein, 123 aa, Methanobrevibacter ruminantium
MGAKEKYFSNISNRERAIFEGAISMGALFHQFVGTPFNRKTAESLEKAMEESFTLQPCIDKVEVSIDLDRLDKAMTEFEYTSLSGDMLDVKIYSKVDDVLAVIRIEFIEELNYPLMYVEDIIE

SEQ ID NO: 6264 - protein, 253 aa, Methanobrevibacter ruminantium
MDLKNIKIATIITIIAFIIIGLYALTEVNYFSYKNVVEHDDINASVVIIPSIGVFEKINNVSISQGVYIDQMSNLPTKGDVVLFGHRTLQGSPFLRLDSLKKGDIVTLEWPEIGEINYTVKSSKIVPASYGLYLNESHMEGDIHNQEIYLITCHPLGSSAERLIVVGELNSTSLINETALEENPHASWAWYITLGFFALGLIVSFLSPEEERKIILAVVIIITIILVYFCLFPISSQIWADQLGWLNSMMGVN

SEQ ID NO: 6265 - protein, 643 aa, Methanobrevibacter ruminantium
MSNRFNSFKKGISKVKNISPKIKGNSNRKKNNSKNKRSKSTIEYIVPENSPLRKNSTDLDSDSGFFNSDYLDDLPEGVSYTRPVGDLSEGVTYTHPADDSYDLDGVDKRYAKYIFGDDLSDRNFKDPRDSSYMEDLDNNDGLNNEFGRNRNFHKSRNYADKRFNNDLDNNGENYKNDSYLDESYSDFSFKKDLDNGYLNGDAYLSNSDFSDFDKDYLDDSNFKSSHSKKASLKSNGIKSKLLNFKDGLLNKDDNSKSRFGKIVFILIFLVLASSMFYFFVYQPFQDELNLEKNAKLNELNTLYKGPLEAHENAYILKNQIESENDINELKKIDILMYATKDWRTYHKSKIVSSKDNFGRVMLAYGDENKNLIMSVKDANEFVGDNDGRVLSNIQFEKVDTIIVPVSISRLQASAGLISVGSIVDIYSLKDNYSYGGDEDSNFESSSALNESSEGLVENQSEDNEDLGGGEDISKMPVDSNPEEDSGFSQNGEPDVSGATVLAILRSKDSGVIDSSISKSNTLVEGNLTDPYENTSSYTNDVEELLKASVFNSYDDNKALEYYLNSYGIKLSNYERMSNLADLDSEYLVLLEVPRSDVSFVINNMDNLILTIPTEFAPNWVIGELNETYYDNIYNYDLNSSSFI

SEQ ID NO: 6266 - protein, 314 aa, Methanobrevibacter ruminantium
MRLKSVGMGYFLAVSDAISILNIAFGFLAILMVIDNNLIYASLCILLAVVFDSVDGWVSRKLNRVDPLGFGMNIDSLADIVSFGAAPMAILYSIGSSISSWAGYLIAIVCMITLVCGLLRLTRYNVIADKINYRGFVGLPIPATAIILVTYYLSGLFNIAVAAVLMLLASFLMISTIRYPKVDNYYLIGLGALMILLLILPIQVFIGPINLPALVLFVLALVYMFMTFLEFFIDDDMTFDRDKASDKVSNVREITESKVSSSVTNVKDVFKNMKDTINQISNEDLDVGLKEDAEEEKEKEEKEVKEAEIVEEVE

SEQ ID NO: 6267 - protein, 283 aa, Methanobrevibacter ruminantium
MIEERIQILRRAAQISTEDREEKVWCVIAGNDRLVDDIAYNAITRQGQSPDYPLGENVSITSKHSYKKFDCIMLKGETLKIRELKNKTHEEGGASLQITTTSLERQPNLLVVIGPEESMKRFVGQTSRQEVKIDILLEDHTTGFIKSEPKSTKIPKFLKNFFNPIIESSEVILSVLLISVKDEGDIDKVKGISQENSLFGIDLKSTIQDKEIARLKERKAREKAKKEEAEKKEKEEKEKAKKESEKKEKEEKEKAKKEESKEDKKEIEKGETKEDKKEEDKKD

SEQ ID NO: 6268 - protein, 356 aa, Methanobrevibacter ruminantium
MSIFGNEDAIEIEPTRVVKNSLGIDLGTLNTVIAKPSGDKFDLYQIPSVVAVKRDDPTAVLAVGEEAKKMLGRTPEDIIAVRPLKKGVIENIAQAQALLIRAMEIGINEGETVERIVIGIPGDSSEVEKNAAEEIGRKAGAEYVLVISEGLAAAIGAGLPIAEPMGTMVLDIGAGSTDIVVISLGGINDIETVRCGGDDIDNRIVELIEEKYNVAISIHDAEAAKIEVGMVHCSEEFENLNYEVIGKSLETNRPKKVVIDSMLVADAAEPIIKQVIGGLNLILERLPAELMMGIYNNTVAVGGSSRLRGIKERIFDESEIPIKISDDPMTVVAKGTAIVAAEPLALEPEVRLKAMK

SEQ ID NO: 6269 - protein, 79 aa, Methanobrevibacter ruminantium
MDMKTIYLSEEVYNRLSLLALESENYNDLIARLIDVYENSYFDELSDAEADFYNERIKYFENGDYEGIRKVDLKFFGKN

SEQ ID NO: 6270 - protein, 219 aa, Methanobrevibacter ruminantium
MNTLGLDEAGRGPVLGPMVVAGIVIPEKKEKIIERMGVKDSKRITPKRRAVLYRKLTRMFDYETVEISAKDIDLLRAKGVNLNQIEKLAMMRIIAKLKADTIIIDSLDIKEGRLEEEMQNFVGEGSKVIAEHKADDKYIVVGAASIIAKTKRDEIINQINKEYIRSTGNKDGIGSGYPSDPKTKNFLKNYKYDEMPDFVRRSWGTVQRIKEAEEAEKSL

SEQ ID NO: 6271 - protein, 205 aa, Methanobrevibacter ruminantium
MYLGRIISAGKTEDGKPFVAYRVSSRSFPNRQVKVLEDEAAIIPKEGFEKDIFKNSYIAYDCIKTVGDIAIISNGSQTNPIADKISIGMNIRDAMAYSLITLDYEKDDYNTPRIAAVVKGGDDFEAYIGIVTDSKILVEKIDEGAQFISTYEKNSPEDVVYSAETPDDACKFIFDEGAFAEFENPVCSVAAIFDGKWNISGLNPE

SEQ ID NO: 6272 - protein, 133 aa, Methanobrevibacter ruminantium
MAIDIKRHKEKLRQDEPEIKLVPFIDILFTLLIFLVVTSTFGAATVDDNGSGSGKPNMTDTTGDAEYYLIPVAGLQKVTVDGVDMSSEIKGNAIGVHARVLDQGDVQIKTSEHAIIIKAPPGMSPQEAVHTPE

SEQ ID NO: 6273 - protein, 279 aa, Methanobrevibacter ruminantium
MIIEMLTDGFNMIMEMLQSGGVITYIILLLGIYGLLISIRKIFYLRKISKIDATEIMGTITSSMEQGGAIEALKNISHYKNPVSRIMSEALKIGYKNKTEVEESMEQIFIVELSKMTNGISALKTIIELAPFLGLIGTVLGIWMTFKNLGVNPDAAAMAEGIYIALITTIAGLTVAIILMPLYTYIKGLIDDEMDKIELATKMTNWSYAVIKIRVYEKLPCVVEALQEADGIVSVKEITDPYSNIQISFKPSMLEKSISNIILEKCDVKSEITESKLRQ

SEQ ID NO: 6274 - protein, 254 aa, Methanobrevibacter ruminantium
MTLELFGLKKIPLVKKGDDIAKIIEDDLKEEDIQLENGDILLIAETLISKAEGNIIKMDDVEVSDKAIEIAEKCKKDPKIVETILQESNEIVAVGPNFIVTETKHGFVCANSGIDESNVEDGLATPMPENPDKSAKEIREYLEEKYQKEIAIIITDTQGRAFRVGAIGTAIGCSGINPLWVRIGDTDLYGRALETTEVATADELAAAASLLMGQADEGIPIVLIRGFDAFNILRDTETGIKPLLRPKEFDVFRK

SEQ ID NO: 6275 - protein, 169 aa, Methanobrevibacter ruminantium
MVEINYSCTNCDFSFLDKNLIFYLDTANETERIDNLEEILNDKTDNLELIETSLNKESSDKMTKALIAGFLYENYCPHCKQLIKTYVPEDNKLFTDQEMEKILKKEISKNKQENNNFKILFFDFKNTLYRDRRKILESNECPNCNKEMSLVISEKTPCPECGEKLKEDF

SEQ ID NO: 6276 - protein, 301 aa, Methanobrevibacter ruminantium
MITILSGGTGTPKLIQGIKEIYPEEEISVIVNTVENEYFSGGYVAADCDTVMYTFADMIDDQFFYGIIGDTFKIRNILIEMGTTELLKIGDMDRAIKIQKTILLEEGKTLSEIVEHQKNKLGVKAKIIPMSDEDSEIKIITKEHGELDFHDFLIKHQCEGEVLEVKYSDVKPSPNVIGTIKDADKVIIGPSNPITSIRPIIAIEGVEEALKEKKVIAVSPFLGEAAFSGPAAKFMNAFGYEASSKGVAELYKPFLDTFIIDNEDKDKKEELEKIIPNIVVANTFMKTIEDKINLAKVVLEL

SEQ ID NO: 6277 - protein, 253 aa, Methanobrevibacter ruminantium
MIQMTLIQIDNYGPWTVTPRPRTESDLQILQAELFADVQRQIAAKKGLVFFTRFDNLLAVTNGLNEEDHMRIQRSIRNRYPITISMGVGAAETAHEAQRLATIALQKEGGAQSSGRKEILAINNLIENPEDSFVQAAHIDINSVTETLTDIESAFDTSFMVNKAQHYLMTKLREKGALLFFIGGDNFMSPCNGLSEEDLTNILKEIDEEIGIGLKAGIGRADNMEDAAYMADIGLEIIREGNNKEWIHVIEEL

SEQ ID NO: 6278 - protein, 237 aa, Methanobrevibacter ruminantium
MAGITNAEFAMKLIPYGFDTVTIGGYNTDSESIDACEKIIARGRKEFNYPKEEIYSVIENEVNAIKDSFNVQVSANLRGSTPDPLIKISKIEKLDIIEINCHCRQEELVAVGCGQSMLLRPDLEDYIREVVKKSESKVSMKMRANVEGVDNLEIAKLAEDCGVDYLHIDAMKMGVRDADFYLIKEIAENTNIFIIGNNSINSISQAEKMLNAGANGISIARAAISGKLNFDLNQIKI

SEQ ID NO: 6279 - protein, 326 aa, Methanobrevibacter ruminantium
MAGTMKAWRINELGKPPVLEDVPIPEPGFGEILIKMKGAGMCRTDLEVIDEGFITVPFVGPFTFGHENAGTVAKLGPGVDTVEVGQNVIVDTLHACGKCQYCLSGRDNFCEVASARGLKEDGGMAEYMIADAREVAPLGDLDPTEYVALADAGLSPYGAVQTAKPFIPNNGTAVVIGVGGLGFYCCQYLALTTSARVIVVNRSADKMAKMTNFGADELVVLDDNAYDKIMELTDGKGVDAVFDFVGRDNTLELAAQITKGLGLISILGLGGGTLPVSWTTVKPGVMVRLTQGGTITDLYEIMDLAKAGKITVQAQKYPFSKVFRSS

SEQ ID NO: 6280 - protein, 85 aa, Methanobrevibacter ruminantium
MSKLSKLPNIGKVLEKQLNDVGIKTDEDLIDLGSKEAWLKIKEVDDSACLNRLMALEGAIQNIRWHNLSQEDKDNLREFYNSQKI

SEQ ID NO: 6281 - protein, 219 aa, Methanobrevibacter ruminantium
MVRPKIERRIVKKPSYTCIQHGDISREEDFESIKMNLDEFEAIRLGDYHNIKQKEAAELMGISQPTFHRIINSARKKTAMSLIEGRKIEINNENFYSEDKIYICNNCGFQWNNPKKEYANCPDCKSENIERIKVNLNESDYINNNPNKIKTNSQICDIDNTDVPLNERKSFGGPGSGRGPSKACECPNCGHIAPKIKGFPCRNIKCPECGTPLCGSKHK

SEQ ID NO: 6282 - protein, 536 aa, Methanobrevibacter ruminantium
MSFITLKNINKSFNGEPVLKDINLTIEEGSTLGILGRSGSGKSVLINMLRGTKEYAPDSGQVLFDLAICENKKCLHVEPASKAGGKCPECGAELQAKQIDFWNAGRLEKAAIRRRISIMLQRNFALYDEQTVIDNVLNAMGDEGRYEEENIYNAIDLLEMVQMSHRVTHVARDLSGGEKQRVVLARQLAKNPMLLLADEPTGTLDPQTAEKLHQTLIEGVKDEGISMVITSHWPEVMNHLADDAIWLDNGEIIEHGAPDTIVENFLKTVPKAEQVEKIEHTEEIIKVQDIKKHYYSIERGVVKAVDGVSLTINQGEIYGIVGLSGSGKTTLTKMMIGLTEPSAGELVIRLGDDWIDMKKPGPLNRGRVTPYLGLLHQEYSLYPHRDVLGNLTDAISLNLPAEFAKIKAAHILETVGFEKDKSMSMLTKWPDELSGGERHRVALAQVLIKEPNIVVLDEPTGTMDPVTRIIVTNSILKARDELDQTFVIISHDMDFVLDVCDKASLMRGGKLLSTGTPEEIVAELTGEEKADMIKDH

SEQ ID NO: 6283 - protein, 160 aa, Methanobrevibacter ruminantium
MAWDDAPSHICRGGDVRGLAFCCPPVKPCPVMNALREVGITPQEFLEIKQKFARETRLGEGPATCFGSLVWCCKTSKPCPLRDMTLNQIKMTEDEYMTLKKQLSEEILKAGKPKDNSAEAMALAETFNISVEEAKKTLEDCDNDLRMAVKLLKLKELDNE

SEQ ID NO: 6284 - protein, 207 aa, Methanobrevibacter ruminantium
MGLTSLFLEVENKNVFILGTGEVATRRAHRFLDKGANVILAGNSIDEELSKKGAILTPIKDLEELVKWSDIIVTASGDDELCEYIASISQGKLINRADKPEKGNIIAPTSFLIDDIEISIYTNGQSPLMARELRKKIQSIITEEDILEIKLQDYARKLLKEKVEDQKTRKQYLLKILNNTQIKQCLKEKNLDKAKGLAEEIINSEFN

SEQ ID NO: 6285 - protein, 398 aa, Methanobrevibacter ruminantium
MIINIRVDHTLADIETMEKVSKDLKELFSNLKENFNISEYIEINTCNRYEYFLYTNVDDDSLDCDNEYVIIEYDDSAILHLFRMTSGLESMIIGEDQILGQIKDSKKKSEKEGHCGKTLDTIFTKAIHVGQVVRNKTKINQGSISIGSAAVDLAEEHLGDLQDKHVLVIGAGKMGTLVAKALAEKNLKAIFVANRTYYKAVKLAEELDGEAILFDNLEEKLLNADLVISSTGSPHPIVNKERLMKVFGDEVPEKMIFIDIANPRDIEDDVKELGIDLFNIDDLRGIAEKNKKLREKEVIAAEKIIENEFNLLKESFNLIEINSILGSLRESMEEIRQRESQKGIVKLNAVDARDIKVIDKMTKSIVNKIFYDISEKVKISAKNNEEDVIKMCEAILKR

SEQ ID NO: 6286 - protein, 375 aa, Methanobrevibacter ruminantium
MKSDNKSSKIKKSEVYIKSSSDSIDKEAEELILESAGYPFNFALLEGPHLEISDNVLFEQYAIEQWSGTLVKTGSYLFDQKIIPDYAFKVLKVFPENSIISENTSIVVADVDKDKRSSIKSKQYDVHFDDIVGQENAKSKSKLIYKYLQNPDKFGTWAPKNVLFYGAPGTGKTMLAKALANELDIRLYLVKSTSLIGEHVGDAASRIHELFEAASRNAPSLIFIDEIDAIALHRSFQSLRGDVAEIVNSLLTEMDGISPNDGVVTIAATNNPSAIDFAIRSRFEEEIEFKLPSDDERREIIMLNLDTFPLDYDLDIEKLVKVSKRMSGRDIKEKLLKTALHNAIINDKQTVDMDDVAFALGVNKYKEEEVKGMFE

SEQ ID NO: 6287 - protein, 278 aa, Methanobrevibacter ruminantium
MKDKVIFGPAGKPIDFKGKAFESPEYLGPRGLYAFEYQSTYGVRIGESSAIKLRESAERNGVLMSMHCPYYINVCSKEEEKIDSSIERLIQSAKVGEYMGAYRLVFHPGFYSNRKADVCMDLAKETYRRLLLRCEEEGIEDFTFAPETTGKRSQLGNIDEIIEMCASFDHFEPTIDFAHVHARGRGILNKKDDYNCIFSKLEDNLDIDRLHCHFTTIEYSHKGERKHHTLAEGDEYGPHIKDLLLNLIENDWKATIICETPLIDQDALRMKKLYDSLI

SEQ ID NO: 6288 - protein, 338 aa, Methanobrevibacter ruminantium
MKSVAINGFGTIGKRVADAVAAQDDMKVIGVSKTRPNFEARTAVEEKGYPLYIGIPEREPLFKEAGIEIAGTVEDMIQEADIVVDCTPGNIGPQNLEMYKKAGVKAIYQGGEDHELTGLSFNSFANYDDSYGADYARVVSCNTTGLTRTLHTLNPLVDIKKVRAVMVRRGSDPSEIKKGPINAIVPNPPKVPSHHGPDVQTVMKGIDVTTMALLVPTTLMHQHNLMVEIGNDVTKEEVIEALEKRSRVMVVEAAAGLDSTAALMEYAKDLGRSRNDLYEIPVWKESINVVDNELFYMQAVHQESDVVPENVDAIRAMLEMESDNEKSIAKTNKAMGIF

SEQ ID NO: 6289 - protein, 183 aa, Methanobrevibacter ruminantium
MVFMIDLDQLKKEINDLTKDYKGFEFKYIDTDSIVVEPWTRLKCQYGCPNYGKTLVCPPFTPKAEEFIGMVNSYKTAILFQISLASLEDDIGGITKVSVDIENLCAHFGYYKAFGMGAGPCMVCKSKGEECSLDACKYPNEARPSGEACGVDIHKTIENNGYDILGIDEENNSYFCYGIVLLE

SEQ ID NO: 6290 - protein, 361 aa, Methanobrevibacter ruminantium
MANTFFSKIVKSLWVLASFIPTLNGLGFAYIGAKEFKNNWIIEGVIYEIPWFLLFIFVNNEDLGVFFATIGLLGMAVSFVRSLYVYYKHKDILIDDDAESRISTEKSITSFWVIFSVIIFLNGLGLIYVGFKRNVRQWILEGAFFEFLWLLFFITPSNKALNSFIISLGFIGMILSVIRTFMVYFEEERMDGGFYSPTAVKKEPPAQNPIENTINSYSENNLSDDDIVPEFKGYKTQVEDLKDAFKTKEDNVNNLLSKRFTKEELSYGRFKSVVNEFHKTFYSQADSTLTMINLAPEYSERVDETIKNKIGLMDSLLGEMNNLLEELILNDGLPEKSDEEITELFENMHNLINSVDDYNKE

SEQ ID NO: 6291 - protein, 114 aa, Methanobrevibacter ruminantium
MNFNKKILLIIALVFIASVGIVAAEDATVDPYTFTIPDDYTIATSDDTTCAMQKDATHAISFATGVSDDIEAAKQNFISQGKTLLKEESMNYNDMDITLQAFSADVDGTTIICL

SEQ ID NO: 6292 - protein, 550 aa, Methanobrevibacter ruminantium
MENNDLENLRKLIQDILDFAKTHSDTLDEDSAPLWYFAKGKFNITLDALLLNDILCFLSFLGLSDGNISSDELNFINYVLNFNFTKSDLELYLKNNLIDDYSESLPPSFFVFYEFDKFALENGKLTESIVDSLFEVFNGIGHLFIALDNESSLEKNILDSFLDNIKKQLADLRGFQYELMVLALKNDLIDNMLDTNSIDGFSDSNLDTSFDSDLDNPQLDDSFLDKVDDFFFNNESDDDFVSSVDSSNDDLNMGGDDSLDSDSQSNSSSPSDSDSQKDNKKSIQESLDKLNKLVGLEAVKSDVNSLINLIQIRKLREQRGIKQPDMSLHLVFSGNPGTGKTTVARLLSDIYCQLGLLSKGHLVETDRSGLVAGYVGQTAIKTQEVIQEAMGGILFIDEAYALSSAKGENDFGQEAIDTILKAMEDNRDDFIVIVAGYPDLMDEFLHSNPGLESRFNKHLYFEDYNPQELFDIFVSMASETNLKLDEKAEEFLKGHFEDVYNSRDDNFANGRYVRNIYEKVLSNQANRLVGMEDISDDDLNTLTLEDFKDF

SEQ ID NO: 6293 - protein, 658 aa, Methanobrevibacter ruminantium
MGIKEFFLNKEKRKIVAIEKDLNNNLSILGGYSMGIKEYFIEKIDIIFILISIIAIALDLLGVDIYGISLIWIAIIFCGIPIFKEAAIGLYTEFDIKADVLVTIAIISSILIGELFAAGVIAVIMAIGGYLEEYTVSKTRAGIEKLVDLTPRKGRLIENYNKSNESEREISADLIEVGDILKVVPGETVPVDGKIISGETSIDQSVLTGESIPVDKLEGDEVFSGTINLYGSFVMKAIKKGEDSSLQRLIKLVEFSNPNDAEIVKTADKWATLIVVIAFICAVLALVFTGEIIRAVTVLVVFCPCALVLATPTAIMASIGNLSKRGILVKEGITIEKLAKVDRVVFDKTGTLTYGKPTLTDVIVYDEETEEKELIHLLASLENLSEHPLAKAIVKYYMDNYDDTLLKLSDFEMIIAKGVKANLNGSNICAGNLEFFKSLGIDIPEEFIEEIVSPSLEKGATAIYIAKDSRFLGCALLSDVLRKDASDLVVQLRRLKVVSTLLTGDNKQAAEYIAKEADIVDYQYNCLPEDKISTIKKFQSLKLNVAMIGDGINDAPSLRQANVGISMGGVGSNISIEASDVCLVSDDIKYVPHLLALSRKTIRTINRGIAFALILNILATVLAMYGMIGPIEGAFVHNIGSVIVIIYSSLLLRYEYAN

SEQ ID NO: 6294 - protein, 86 aa, Methanobrevibacter ruminantium
MDSENLHRRLKKIIGQLNAIDRMIDEDIPCENILMQINASKSALHRVGYIIVEGHLDNCIKNAMEKGDTDEALADISSILEYYSRL

SEQ ID NO: 6295 - protein, 149 aa, Methanobrevibacter ruminantium
MSSEKRNSKDQSYLGFELIEVEDYYLLSNTEKLLETVKKDWFKSLMDEIRELVGKHYPDFVIYLAYVDHGDDGTILGYVNVREDDNKRDEEYSEVALNKEMLEICEKHKEDKILFVTIPRKRKSFIKLKKGSIREHFKEALLKLGAKPL

SEQ ID NO: 6296 - protein, 362 aa, Methanobrevibacter ruminantium
MTGESTHEHTHKEQRRQYTFNKLKAFGQEIIEDIEKNKVPTLKIPSRGTGNIVYDEDKRYYILGDRYGRRSLGNVKQIRKLGQMVYVANFCKDLVQRDKTATIREMYYISEGWGIEFNTQQESNIVGEDLEVALGATREDLGLMPEEDGASVYGDITLLDGDYEINAARAGKSGYTISPTIDQVELLDCGADFLLAVETMGMFHRLVQEKAHERYNCLIVGLKGQAARATRRFIKRVNEELGLPVYICNDGDPWGFHIAQVIISGSAKLAHVNHDLATPDAKFIGVTASDIQNYDLPTDPLKDIDVLRLKELSKDPRYQTDFWQTEIKKMLKLGKKAEQQSFSKYGLEYVVDTYFPEKLGLN

SEQ ID NO: 6297 - protein, 599 aa, Methanobrevibacter ruminantium
MSQQAQELFENFNELTPSEFFRKNKQMLGFSGKIRSLTIVFHELITNSFDAAEEAGILPEISIKLDRLGKDHYVLTHSDNGPGIPEEFVMKVYCQMFAGSKFRNIQSRGQQGLGCSGCVLLSQMTTGESTHVTSGWMENGELKGVKMEFKMDVKQNKGDLIKKSEFTPTGTGVCIKLHFKEVSYSLAEQGAFEYIRRTMIANPHAKITFRDPSAHKYIFKRAAEIVPVLPQEVLPHPKGVTADDIITIAKFTDKRNFKSMLTSSLSRMSSKKVSELQELTGIDMKKRPKNMEWAEAEKIVEAFGKMKFMAPPTSGLIPIGEEQIEKGMKLILKPEFITTITRSPVTYKGGVAFIVEAGIAYGGDAGRIVNEQRKSEILRFANRVPLTFDAGSCAITEALRSIDWRRYGLRDLDNTPLTLFVNIISTQVPYLSTGKQSIAPEPEIVHEIRQATMKIARRLQKHIRSKKAEKEKAMRSKIFEDYVPVIIEEAASLAETEVPDYKPVLAKVTRRALAEIMGEKVEEEEEEEDFVDSLLEELDEFGHTVDKEHSARKDRIQESDLDEAFIDDEKPRKRSKKSKKSEGADEGQSTLFDSEEQEE

SEQ ID NO: 6298 - protein, 203 aa, Methanobrevibacter ruminantium
MNELPETDYLRVPSDRIGALIGTKGETKHLIENATNTHLDIDSDDCTVAIYPGENMEDPLGVWKANHIVKAIARGFNPHVALKLNKDDTYLEIIKLPLYVGKSKKAMARYKGRIIGKDGKTREIIVDMAEVDMAIYGKTVSLIGELDNVMVAKEAVEMILNGSRHKSVYAFLENKKNERKMKEFKEVVGIEKDEIEFRDDLDD

SEQ ID NO: 6299 - protein, 77 aa, Methanobrevibacter ruminantium
MSLLDNIDKIHTTEMGVGRIQRNLGIDVDPVEYCILKIKDKDAVIEEKGKNYYVTVDDCIITVNKHSFTIITAHKKK

SEQ ID NO: 6300 - protein, 259 aa, Methanobrevibacter ruminantium
MDDENPRVAKADAEVQKLISRKRTKDADDRKVSSEIFDKATLQVLYKLANQGHLDVLNGAISTGKEANVLKGIKEDGSIVAVKIYRIATSDFKKMQYYIAGDPRFNVRSSNKRQLINNWVNKEFRNLTRLKDAGVNVPEAITSLNNVLIIEFIGDEDGNPAPTVKNLPPQDPAHFYEQLVEQMDRFINKANLIHGDLSSYNILNFDEKPVIIDVSQSVVRDHIIANELLARDIKNISFEFSKMGVDTSIEDLTNRLIKD

SEQ ID NO: 6301 - protein, 106 aa, Methanobrevibacter ruminantium
MFRRQILAKPQNNQQEYRRVRTPKKGEIPGVVEQIMGHGKLKVRCADGNIRMTRIPGKVKKRIWIREGDVVLVKPWDFQSDQKADVIWRYTRTESNWLERKGYLKM

SEQ ID NO: 6302 - protein, 404 aa, Methanobrevibacter ruminantium
MGVEFLNIIESDEAKEIIKEKFEECYTAQSEIIDIAESANRITYSKIESKIDFPPFNRSLKDGFAIKAEDSYGVNEENPKKLKVIDFLEAGSFTDKTVELGSCVEISTGAPIPDGADAVIMVEFSYKSDENPELEDDEVEILTSVTPSQDIGQKGSDVKKGQVILDENILLNPPKIGVIAAQGIDTVEVYKKPKVGIISTGNELLTNQEELRPGKIYDVNSEMIRAGVNACGAEGECLGIVRDNYDDLKNKITESLKECDILLCSGGTSAGVGDNIRHILDELGTVYIHGITVQPGKPTILGVVDGKIIIGLPGNPVSAIVIFNVFVAPAIKKLAGFKQEEEQKTIKGKLAKRIHSPIGRMQYQLVKVEGDSVIPIFKDSGAIFSLASAAGYTKKSQKQNPNLV

SEQ ID NO: 6303 - protein, 155 aa, Methanobrevibacter ruminantium
MEIQEKTIEDQKVAIMNYKGYLKDMEILISKLTGWIELEEIETVGDLFAIFYNNPRTAKEDEVVYDVGIPINPELDPDETEEIRIVTIIEHKVLSGLHYGSIDNIQETYNIMAEYSIENKYDIIGSPKEVYIKSKFDVEDEEDMITEIQLPVIKM

SEQ ID NO: 6304 - protein, 102 aa, Methanobrevibacter ruminantium
MAEEEKSSKKKSKRELEKELNSKVDKIIEKNFEDFKSQDELEDFIQKAFDDKASQYNKKIELKEKELDKKFKASRENDNKKIDRKIREMDRKLKLRYKTMLK

SEQ ID NO: 6305 - protein, 437 aa, Methanobrevibacter ruminantium
MIYEIAEEAKREISKYSDTYEIYIDRTELLELDSQKTELNFAKEDLSLGVGIRIIKDGAIGFAFTSDMDEIAKTCENAYLNSKLNTKDEFYSFAEYEKLPVVKGTYDKRFKDLDLDELTGSLKSVLNSVEDYGCQVSSGGFSAAEGETLIINSNGVEAYDNSTGFAIGVSINAVKDGELTTAYDSDSSCLYDLDGMALVEDICNLAMDSLGGEDIETSDRDVVLDYHAATGLLSTFLSGFNADNVQRGRSRIADKMDEKIITENLSIYDDSTIDGGLNSSRCDDEGTASKRTCLVEDGVLKGFLYDIYTANKDGVKSSSNGFRSSYLGTPSVGASNLLFDFKSHRNLDDIDDAFLVTDVLGAHTANPITGDFSVEASNSFLVSNGDKKPIKKAMISGNIYDLLADAEAVGTETKQRGSFIIPKIFLPNVRVVGNNSN

SEQ ID NO: 6306 - protein, 234 aa, Methanobrevibacter ruminantium
MVKIEAIAVDVDGTITDGRRRVCHSALDALRKAEDAGIPVIIATGNISHFSYAVATLVGTTGGLVCENGGVIYHDGYNDNRVIVLGDISKAQKAYDFLFDKFGKDIPFRIVEDSDARVSEITFYKNMSSEPLKEMLKDFDVEVYDSGFALHLTDPAVDKGTGLAKLANLVGYNVENIMCIGDSENDIDFLLAGGFKVAVANACDELKEIADYVCENKYGDGVAEAIDKFVFNQE

SEQ ID NO: 6307 - protein, 317 aa, Methanobrevibacter ruminantium
MMASMKEMADAILKRINDLAVPVKIMHVCGSHEHTIMEHGIRSLLPPEIEIVAGPGCPVCVVPSREIDECLQLVEKGVTVTTFGDMLRVPGSNGSLAEAKAEGADVRVVYGIPNAVEIAEKIDNDVVFMSAGFETTAPATASELLKKPPENFSIISCHRLIPPALDFLINSGETNLNALIQPGHVCTILGTEPFEKFSTEYGIPQAVAGFNPLDILMSVYMILRQIDRGEPRIDNEYKRAVRTEGNVIGKEMMDEVFHVESREWRGFPKIPDSVLEVNDEFSQWNAREKYDIEVKDVTEAPKGCICGPILRGLAKPY

SEQ ID NO: 6308 - protein, 574 aa, Methanobrevibacter ruminantium
MYKDNKILVVIPARGGSKGIPRKNIRFLGKKPLIAHTIEMGKASKYVDELVVTTDDEEIKFISEKFGAETIKRDGKLAEDSIPLDPVIYDAAIQKEGKSNEKYDVVITVQPTSPLLKTKTLDLAIEKLLNPDNENKDYDTIISVVDDRHLSWGYDEKEKKYFPLYKERVNRQYLPKAYKETGSIFATRREFVKEDSRLGENIGLIEVSKQESIDIDNYEDWWVAERILNKKKILIKADASHEIGTGHIYRGLSIASKLVNHEVIFLLDEAQELGIEIVKNNNYPFITHNSNKGKGKEADEKAKEEIIEKIVEYDPDIIINDILNTNSKYTKTLRDNGFFIVNFEDVGGGVKYAHLVFDALYEHKIPLKNLYSGHRYYILKDEFYYQSFKKIDKEVNRILLTFGGTDPNNLTEKTLEAILESKYQNEIEIILGLGYSKKEEIQEKYKDNERISIYENVKNMSEHMHNADLIFTSAGRTMYEIASLGVPCICLCQNERELSHIFGNIEHGFINLGLGSRVSKEDLIRTLENTINDYELRIEMNKRMGNVDLKHGFDNIRKLIKKEYKNWKAEQLNK

SEQ ID NO: 6309 - protein, 279 aa, Methanobrevibacter ruminantium
MESKDITNIEEIIPSNDVYPLVNLLFQSKLFKSKEINTNSLAISCLDLIDKNRIKITFNEEIESIKISKNPLLKTKGQLEKELELMKNIKFTINSKEMKKLDKRDQIILKMFKDINKNHEFDLKSMYDKILKQDIAIKFAKYFKDYSKSLERETKYSLENYKDLIKDGEFTFKGNEISNEWKEFKSSLKSDKSLYSQDAEIIDKYLIYGRCLEIEKDVLKNIEKANPDYDSELYRFLRHNGADLLKLIFDKALANSKIERKGDGSVPVGNSKYFVPGFG

SEQ ID NO: 6310 - protein, 356 aa, Methanobrevibacter ruminantium
MTIFNEEPFLIAEIGVNYYDIAKKENISNMDAAKLMVKEAHDAGCNAVKFQSYKANTIASKNSPAYWDTNEEPTQSQYELFKKFDSFGEAEYREIADYCKEIGILFLSTPFDFDSIDYLDDFMDVYKISSSDLTNIPFIKKIANKGKDIIISTGASTLDEVKLAIETIENANDKYKKGEAGIGIMHCVLSYPTANEDANLLMIKNLKDLYPNYEIGYSDHTKPDENMLILTTAYLYGATILEKHYTLDKTLQGNDHYHGMDPDDIRKFNKNIELIKTINGQYDKIPLPCEGESRKQARRSIIAKEEIGEGTIITEDMLTYKRPGTGISPSEIDNVVGKKAKITIPEDELIQYDFLE

SEQ ID NO: 6311 - protein, 508 aa, Methanobrevibacter ruminantium
MTFTVKEICQHIWSLEEKYELNHKEIQGCYPWQLIRMYLYYEITRKTNVFESAQQSSLSLADKVNTFLPFIKNSILSNPLSGKDTKDVLIFDHPRKVILNGEYQDIYSYFLKDILIKNNKSFETIESPYLNNHFRSSANKKENNVKYNDRILLGSFINKTKNRGKLPFTDEEKDFIETIKRELESAFKIEINLFNIIEDHILNFQYDYKKYIELLEKRKPKQVYLVVAYENKALVAACKKKNIEIIELQHGTISPYHLGYSYPKNTMLMNNTIKEIEYFPDKILSFGDYWQNSSSFPIESDKIISMGFPYFEDNSKTFMKMADEDKNKKQILFISQGVIGKYLSELAYELAKELNEKNKKNDLENSENNESDLENNNYTFIYKLHPGEYGTWRENYEYLNKANEFDNFKVIDKSEPPLYELFAKSNYQIGAFSTAIYEGLAFNCKTFIIDVPGVEYLDDLIDKNIVKKVKSSEELINFIEDEDNLDLKEYDKDYFFKNFDESIFDEIL

SEQ ID NO: 6312 - protein, 480 aa, Methanobrevibacter ruminantium
MSEYVRFIQRIGLVGITNILISLSSLIFIPIITKSFTTAEYGMWAQVNTTIALVPNIANLGLPYTMVRFLSAEKDKEKIRDSFYPMISLTFISTVIICLLFLIFGHPIADALFNGSMQVLYITTAISFFACMNLMLITYFRTFQEMKRYSLFLVLQSYIGVFVSIYLTYAGYNIETVVLGLLTGYAAVFIMMAFLIVRHLGFSFGKWSNLKEQLAFALPTIPSNVSSWVVDSSDKYVIGILLGSVAVGCYSPGYALGSILLMFLSPFAVLLPTILPEHYEKGDMAEVDKYLSYSMKYYLLLTVPAAVGMSVLSKPLLYIITTPEIALGGYMVTPFVCLGAIFMGMYGITNNILILEKNTMILGKLWIIVAISNIVLNLILVPYLNIIGAAIATLLCYMLAFGVTAIASRKTMRLPFNRKELVKILIASAIMGAVVYMMNPSGIVNVLVAILVGVVVYFAIIFVLKAVTRKEIGIFKDLVK

SEQ ID NO: 6313 - protein, 168 aa, Methanobrevibacter ruminantium
MISKIFNIKQSIKRAYYTYRVKRVSKSCGDNLTVNNYSYVTPKTSLADNVNFNGMKIQGTANVSIGSNFHSGIDCMIITDSHNYEGEAIPYDETVISKDVVIEDNVWIGNRVIILPGVCIGEGAIIQAGSVVVKDIPKCAIAGGHPAKVFSSRDKEHYEKLKEEGKFH

SEQ ID NO: 6314 - protein, 661 aa, Methanobrevibacter ruminantium
MKVVVCENCGAKYQLNDDDDINAFECSNCSGSLKELESFSDEEIPKQSDESSGSDSVLVYCINCGLKFQIEKDDNINDFECASCGGPLDYLSNKSEESQESQISQDSQGSDSYYETVSYVQSDDIIPIHADPNYSDSDDIIPIHAESDSQTPYYEELIESDEIYANQYEDDDQYYVSEYEKVLQSDADSYYEDEYDDQYYQTDLQEEGSGQISLDELYYTSEYPAYDGTDEIIPIHAEKRYMEDSQDSGFAYGPNGKYAEDYLEEEYIEEEYVDSVEEESPYVEVIDIPEDELPETPVVLTRQVLSEEDQRLFDRVQNQMVFDSPEEYEAFKAARYKYYVGLLDILKEEYLLSMENEFKSGRSVKNLIKKGGETVKQSNLYADDSDSLVSPETVELMKSNRKYEPKKSNADVIIIAGFFIVIVSLAYYFFVSQIMYVLIAFALGLVILAYGAYKKYVFNEYIARGRIIRERLLALPNDFYVFYAVQPPQSKDIINHVVVGPTGIFTILSQRYDSKDYKNKLKSDTETGDMLSESASIQDYRQKKNTLELQTDYDDNQSRFQFGNEEIHFTQNSQIKRKALELNEDLAIFLDKKGFNGIYIEPLIGFVNDDLAILNVILTNEDLFIDELFNKVIRGRKRLDELTVAKIARLLSYYSANCDVY

SEQ ID NO: 6315 - protein, 390 aa, Methanobrevibacter ruminantium
MNILHVAHFFYPCLSAGGVVNASYQIALNQVKDNNVHVYTSDSCKQRLKFEDGRYDVDVDGIKVDYFRNLSNRFKLATMLDTPLSAYFRIRKDIKNHDIIHIHEHRQTLAILVSHYARKNNIPYIVQAHGSVLPFFQKEGLKNIFDKAFGFKILHNASCVFALTEVEKEQYIKMGVSEDKIEIVPLGINIEEYENLPEPGKFRSRFNIADGDKLILFVGRIHEIKGLDLLIDAFNLLIKDSSSPIKLAIVGPDDGYLDTLNERIAENNLESQVIITGPLYKREKHEALVDCDLFVMPSKYESFTTSGLEAMACGKPLVLTKNNHIHDWVDGNVGISCDDDEISLKEAMKKLLFDDDLSETFSSNGKKLIKEKYNWDMINEQILSIYNRFI

SEQ ID NO: 6316 - protein, 595 aa, Methanobrevibacter ruminantium
MMFSNISKDLNIERKDYLCLFLLLVYSAIITVLLINFNESIGIYCSDVYIYLYNSLVFARMGYNNTYLYLSPLDFGLVELHFLFRLGFVNEVSIYAVTGVFSIFGSLGIYVLLKRYFNSLLSLAGGVLFTSFSLNLLWWANGTLDLPAVGLSVWAILFLILAVDESPKYYILSFVFLVLSIFTRYTCLFLIPLFLLYYLSKHDLFGFLDSLISDRKEAFSSLRSFLKTEEFRYLMIALVLALIVAVLFISVILYYGAELSFLEQGSTFASGSKGALDDYAHTTDTLFYFHDFLNFLFSQKVIFQENFIPTLTGASYLAYLILFILIIGISLGIYRFFNKNKSEDKKQFDNVNSSISNLKEFSFKTSHFKTLLYIGLLLSLAIAILGFKINSIITIAFLLIGLVIIFSLLKSKGLDRKDYSVPIFMIGWFLVYFIFFTFLNIKVNRYIITVFPAFIYFVILALNEIIGLLDGKSLKIGDLNLSNIIPIVLIVLCMFSAFSFTSTFEDNLDFNDYKIVADYLIDYDGDYASKDIAVFKQRTFNWWLKDSTIAVTTDQLDFLESSNITYYICDEDLKLENYTKIYNYKDIFLYERVNN

SEQ ID NO: 6317 - protein, 293 aa, Methanobrevibacter ruminantium
MNPYLEIIRPGNAVMAAISVVLMMIVGHYYDLPIILCAVIVFVCTGAGNTINDVFDYKIDEINKPNRPIPSGRISLKNARNYSYLLFAIGIILSFVIDYMINSIWPSVIVVPAVVIMYLYARNLKAMPLIGNITVATLTGFCFVIAGTVIACATSSLRILFISIYLGLFALFMTLAREIVKDMEDIEGDKLEGARTFPILYGKKIPSIVSIILIVVTTLMCPVLYIFGIFNVFYMIVMIVPICMFLYCAYSLKLNPPEEVCAKVSKNLKIAMLISFVAFVLGSFDWFSIFAAL

SEQ ID NO: 6318 - protein, 456 aa, Methanobrevibacter ruminantium
MKKVILIAFYFNQVNEIASKRLRALAKYLPQFGWEVVVIVPDLGYEPSSNADLSSRIITTEYEDMFSHIFTKFKPGDKSKLNDKSDNHSTSDSQKLKDSSSVSNPIASKAISIAGEVFAYPDGMKYWYGPAYEAASKIVEEEKIDAIISSSWPITCHTIAKDISDKYNIPWIADLRDLWNMDPYISHTFIRDYFEKRLELKTFENTDVLTTTTDLAAKTLATLHPNNRIVPILSGYDEDDFKFLESVLEENNDSDSSEDSVSAGDSNSSEGSVSAENSNSSEDSITTVDSTDRKLKLIYAGSLYGGKRDPTLLFKAIRQLEDESKLDSSNISIEFYGDSGNLEEIAREYSLLDIIKIGGRISHEEVLKKQLDSDVLLLISWNNEKEKMFIPGKIYEYFALQKPVLSIGYKEGSLKDLIEDTNVGYHVSDLESTKKVILDIYNEFISLGKVEFKIRN

SEQ ID NO: 6319 - protein, 364 aa, Methanobrevibacter ruminantium
MSKIKIAIVGIGNCASSLIQGIYYYKDKNPEDAIGLMHWKIGEWDPTDIEVVAAFDIDKRKVGKTIDEAIFAKPNCTTVFQEEIPKSDVKVCMGPVLDGVSEHMADFEEDYTFVVADEEPVDVVEVLKESGAEILLSYLPVGSEEAARFYAQCALDANIAYINCMPVFIVSDPEWDAKFREKGIPIVGDDIKAQIGATITHRTLSNLFKERGVKLDHTYQINTGGNTDFMNMLNRKRLDSKKESKTEAVQAVLAERMDPHDIHIGPSDYVPWQKDNKVCFLRMEGRTFGDVPMEIELRLSVEDSPNSAGCVIDAIRCCKLGLERGIGGQLTSISSYVMKHPPEQFTDDEAAAKVEAFIKGEIER

SEQ ID NO: 6320 - protein, 573 aa, Methanobrevibacter ruminantium
MKVKITETAFRDAHQSLLATRMRTRDMVPIAEEMDKVGYHAIEAWGGATFDTCIRFLNEDPWERLRILKENFTNTPLQMLLRGQNLLGYKHYADDIVTKFVEKSYENGVDIFRIFDAMNDIRNMEQSIKVAKAQGAHVQGTISYTISPVHTVDKFVEFAKELEALECDSIAIKDMAGLISPAVVFELVSRLKEETDLLVNLHSHCTSGITPISYYAACQAGVDILDTAISPLAWGTSQPPTESIVASLQGTEYDTGLDLKTLNQIKKYFETLRAKYEGYIDPISERIDTDVLMYQIPGGMLSNLISQLKQQNALDRYQDVLEEMPRVREDMGYPPLVTPTSQIVGIQAVMNVINGERYKIVSNEVKDYMKGYYGRAPAPINEEIAKKIIGDEERITCRPADLIEPEYDKFKKEAEDLKNFEKEEDVLTLAMLPPVAKQFLNGEIKEEDFPEKKVIDDGGISAIPTEYSVEVDGDVFDVKIMPTGYIKIDGEGSEPAPVIEGAITASMQGMVLKIKVNTGDKVQKGSVVAVLEAMKMENDIYAEEDGIVEQIFVEEGDTVNAGDNIMVIKGLDE

SEQ ID NO: 6321 - protein, 201 aa, Methanobrevibacter ruminantium
MDKRINFVSISRFTLLVAIFLLIINKIQFHAKILDYMALALAIFAIICIIIFIIQFKKGLVEFPIKVVVETNVDKALADGAITEEQAENIPKRVVLNANDIFLNLVFNLAIANHFDLLPVDVLREYIPDIPPANLMRLYEKSREISDDLNDYFRSQKFLNKADVITRSDEIKTYLRETYPWMDDVTLDNTFDYFFLGIGNG

SEQ ID NO: 6322 - protein, 424 aa, Methanobrevibacter ruminantium
MVFIIDPQNAGISGNMIIGALVDLGADGEKVKNLMEDVAYDFGEVEVSITKVNKSGIEANFCNVKTIHDEDENNHHIHFPDFIDKIDSLKELDIENLTDEILDMAKNVFKRIAISESRVHGKSLEEVHFHEVGAADAVADVLGAICAYFDLDMDKERVVGLPISVGGGTVKTAHGIIPVPAPASLDILKGLNEDEFNDFYKGEAQCRGGPVESELATPTGCALYMEFCDEFLEFAPMMSPERIAYGCGSKEFDFPNVIRVIKSKDTNEKHRVCVIETNIDHMSGEELGFLFDLLLDAGASDVSMVPIVMKKNRPGQLIKVISKPLLVDHLVNILFKQTGTLGIRVSENTHRGIAERHFVPLDININDRIYTINFKIGLIGDEIISHRPEYEDLKRISLEEDIPLTEIKEVANTMIRDFLENNRE

SEQ ID NO: 6323 - protein, 405 aa, Methanobrevibacter ruminantium
MSKKNKANKNKKKKESDQTIHELEIGKLIKNEDVLYINNPDYFLTFSDLEISDGIDIIENIMILSKDYVSFNRQYEDEKISDVELMEITEEYKENNNIEGGYISQSFDNSQFIINSYNDITIITVISNDLEVQKFTDNLKVVNSWKGFHNAKINFGQIILIDHALSPKLLIQLYKTATKQKAKFFESLHMPLHINNILNNEDFLVIASNLPEETLNQDYIMEIGLDITNMEYEDDKLDLEEFQERIEDGVTISCEDAIRKINLNIGILDYFVSEGILIGDLVELGMELLENTEPTDELKEKLKKQLLKSVSDRNINALIMAAIRLEDDFRKQRVREIDLNEKLVHFYPDEIIGVAIANQISGTKGVLNYRRYSRHKPGILYGLGPILSNTFAGLVAGCMTKILEE

SEQ ID NO: 6324 - protein, 278 aa, Methanobrevibacter ruminantium
MKEKNNDDYFEKQNPSILRSIGGLFTFSTILPLNIYTTIDEMAKMTWFWPVLNGIVGLIAAIIAFILCRFAHLDGLVIGAIIYGFLLIINGYNHFDGLMDFGDGVMVHGDPEKKLRIMKDPMTGVGGIATGFIVGTITIALYSSLIDYSYMISPDFILLIIVAEIAAKIGLTTCCITSKAGKEGIGKYFIKYMNIKNYIVGLIICLIIASLLSMRIGSQIGILGIIGGAFGGALTALIAKRHLKIANGDVLGTSNELGRLFSLLAMLIAISMHFSVLI

SEQ ID NO: 6325 - protein, 185 aa, Methanobrevibacter ruminantium
MTINVLRLDHRIGRDTRITTHVCLTARAFGASKVWLAGEEDHSMMRSVRDIADRWGGDFEIEYNNSYMEVIMNWREKGGKIVHLTMYGAQAHEVVDEVRESSDDILIIVGGAKVPTKVYKNADWNVSVTTQPHSEVAALAIFQHLLMEGKEFDLEFKDPVFEVIPTAHGKTVNVHNENRKLNKKE

SEQ ID NO: 6326 - protein, 373 aa, Methanobrevibacter ruminantium
MQRRGTTNLPLHGGHTPRWLFDRMTKLSGAITEVVIDEYGPNEFLNRISNPYWFQAFSCVLGFDWHSSGTTTTTLGALKSSIDPEKHGIYISGGKGSASRKTPQGIVRAGEIFNLKSSHVDNMVNSSKLSAKVDNSCIQDGYTLYVHNFFITEKGDWAVVQQGMNTETKYARRYHWMGENVDSFLQDPHNGISCDKKEKEALNMASKDSVEAQKISVDLINDNPNHLRDYFKRKDSNQLLLTDFSISQENTLTLPPHHQVLDMDLSDKEFQVLKNAWEIQPENYEELILLNGIGPKKIRALALISDLVFGEPASWKDPVKYTFSHGGKDGFPYPVDRDVYDNSIATVKDALYQAKLDKYDKMKALKRLDDFIS

SEQ ID NO: 6327 - protein, 166 aa, Methanobrevibacter ruminantium
MKRITTPISDDDINDLKIGDKISLSGKMYCGRDAVLPKLSKSIENGQEDKYPFDFKGMAIMHTAFSVAGIAPTTSNKAEIESSMEALSSAGVKFHIGKGSLSDETKKTLDKYNSIFIVTPPVAALLTNNVISKKCVAYEEEGMEAFFELEVKDIPGIVAIAHGKSL

SEQ ID NO: 6328 - protein, 388 aa, Methanobrevibacter ruminantium
MNKEPISEEEIFKELDFYQSQDCKYSDGRILGSMCTQAHPIAQKAFIQFLESNLGDPGLFKGTKAIEDKVLKMIGSFLSIENPVGHIVTGGTEANIMAIRAARNIARDEKGISQGEIIVPQSAHFSFKKASDILNLKLREIVLDDSYQLDASFVEDEINENTVAIVGVAGTTELGMIDPIEELSNIALENNIHLHVDAAFGGFSIPFLKEIGYGLPEFDFSLKGVKSITVDPHKMGLAPIPAGGILFRNEEYLDSISVNSPYLTIKHQSTIVGTRMGATSAATFAVMKYLGKDGYARLAKESLDNAIFLAESVKQLGYELVVEPKLNIVAFNHPKLETDDLAQLIEKRDWKVSCSSCPKAIRVILMNHIKREHIVELISDLKDISESI

SEQ ID NO: 6329 - protein, 756 aa, Methanobrevibacter ruminantium
MYVIKFEDLGKDDIGIAGGKGANLGELTQAGIPVPPGFVVTSETYKKFMMDTGIFNSVMDILDQTDINNTKELQEAAEEIKRIVIETPIPEDISTYIIEAYNQLSQKVGVDEADVAIRSSATAEDLPEASFAGQQDTFLHVQGIDNVIEYVRKCWASLFEARAIFYREENNFEHSQVYIAVVVQQMVDSEKAGVMFTVNPSTGENIALIEGSWGLGESVVSGTVTPDNYVVSKENNELLNITVSDKKTMFTNDENGTSIQVDVPEDKRNERVLSDEELEKLVEMAKRVEGHYGKPQDTEWAFHGGNLFLLQSRPITTLGDAEEKASEEDVDLEVLIKGLGASPGLASGTVKVILSLDELDKVQEGDVMVTTMTTPDMVPAMKRANGIVTDEGGVTCHAAIISRELGIPCVVGTGDATTTLKENDKVTADGKKGLVYKGIIKGEEPAEAAAVQVSATPLITVTEVKANVSMAEAAPKAAATGADGVGLLRTEHMMLSTGVHPRKFILDGEEDKLVDVIAEGVLKVADEFYPKPVWYRTLDAPTDEFITLEGGEDEPREHNPMLGWRGIRRELDEPEILKAEFKAIKKLHDKGYTNIGIMIPLSQHPSELRRAKEICREVGLEPQVDVEFGMMVEIPAAAILIDEYIAEGIDFVSLGTNDLTQYTLAVDRNNEFVAKHYREEHPAVMALIERTIKHCAAAGVTCSICGQAGSVPHIVEKLVKFGITSVSSNTDAVEEVRKTVARAEKKIMLDAARKQL

SEQ ID NO: 6330 - protein, 160 aa, Methanobrevibacter ruminantium
MVRAYSRREYIRKIPNNRIVQYDMGNLSEDFPVRLSLAVKKPAQIRHNALEAARIASNRYMQRSAGRLGYHLKLRVYPHNIVRENPMATGAGADRVQSGMRNAFGKAISVEALVKTNQKVMSIDVNPKNFEDAKVALKRAGMKLPVSCKIVVEKGAELIK

SEQ ID NO: 6331 - protein, 78 aa, Methanobrevibacter ruminantium
MKIKSNIRLKYNNSKNAEIVYKSLEVDNEGFLESELNSDEIEYNIKSDKLGSFLNTADDLIASEILIEDPFKKQPKKD

SEQ ID NO: 6332 - protein, 409 aa, Methanobrevibacter ruminantium
MECYNHPDREAVTTCSVCGKAVCPDCAMEIAGNVYCKDCVNEIVTQSIMEKASTQAPKEAAEPITEEVQEAEAVEEAIEEPVEIITPVQQEEVEEIIPETPKKAPENFEPEVEYETEYVETYDEDGVEDSYYENPEIIPEPEPEYKERERIVKEEAKAKEEEEIIEPVHKTEDIPKEAYMDDMEADFYEEQPSKAPSKDLEAKYEKYLEDLYYDEDEIEEEIYEAPKTQKRRSKPRRPQREDSYYDEDHKRSPRNYSNQGEYYINPREEEFEEEEFITPSHSRKRARSEETESYEELKRRIERNYAKEQEAKENRRFRRSKKSKKQKRPDYEYDELENIQEMHSFPEYEKEDKIGILDIILAIILIVLIILLILYVIYLFRLNGEYFSFIDSLLGLVRDPSGYISYVLN

SEQ ID NO: 6333 - protein, 256 aa, Methanobrevibacter ruminantium
MAIQDGDFVRVDFTGSIKETDEIFDTTSEDIAEEAGILVENKKYGPIPIIVGGNHLLPAIEEAIIGSEAGESVHVSVTPENGFGQRNPNLIQLIPMKEFKKQGMTPVRGMKISTENGNGKIISVNGGRVKVDFNHDLAGKNLEYDVTVVELIEDDEEKIKSMIELHYSYPNMDYDNIEIKFDGSTVSIKLDEITRFDQQSYMDVTFARFRISKDIWDNMDYEKVQFVDEFEKIVEEAPDEEVEAEVETEVEADAEE

SEQ ID NO: 6334 - protein, 395 aa, Methanobrevibacter ruminantium
MPSIDFIRNILKEDKKTFCNDYKKAQKSLSDDDGYSNGSSQSKQSYEKTNEESTSNPLIADFTEYSPLHNGHFHCMKTAKSKIPNGLFVAIVPGLFERSGRGLPYIMHRNVRAEIAIEVGADIVVEGPPMGIMGSGQYSLCLCKMFQALNTDFIPRGYRPFDGYDEILKRISMGHGVAPKPYKIVDMDTKETILEGKLEEDNYVIVSFSKSLKRIGFDFKDKFIFVPRIEGVSGTLIRKACSENKLEDVESMLPPETLRILKRELDNDNAPLHDQRDYEVILNSANNLSYDELIKLNFFSEKLANEFIEKRENKEFESISEIEDAIFYGFSSHYKNRVLSILETQMRGDVISNYINTYPFNVRVLNYKNETVLTQFEEKVLNDHPFVNSIELTNE

SEQ ID NO: 6335 - protein, 65 aa, Methanobrevibacter ruminantium
MSEETKIKRVTIHVESELDYEFRRLASQKFRFEPKWYSKAIKEAILLWIENNPEEDFEDLPEEDT

SEQ ID NO: 6336 - protein, 417 aa, Methanobrevibacter ruminantium
MFDLVLKNLKLVGESGEFYIAIQDGKIAKMSKTPISADNEMDIKGQYVLPGLIDPHVHFRDPGLTYKEDFKTGSMAAANGGFTFVMDMPNTLPKTNTYKAFKDKLEMANSKSVVNFGLHSGHSSFEEMERILELNPMSFKVFMDLESDERLREIFKNISNLDGNPILTVHAEKQSIVRENTERLSEDLELKDKPISYSYARSAESEIESISQTISLSKEFGNNLHICHLSTKKGMELAKENNISYEFTPHHLLFDNSYFDKFGTIVKTNPPLRESKDKVNVSDIDSDSMIGTDHAPHSLEEKNKGVWDSSPGIPSLETVLSLLLTEVNKSNLDFNLIPKIFAENPAKRFNLKNKGFIKENYDADFVVVDLNKEGTFNIDEFYTKAEYSPFDGMDYQGAATMTIIGGEVIMEDNELFI

SEQ ID NO: 6337 - protein, 410 aa, Methanobrevibacter ruminantium
MIVFNEDSCIKCGACEGVCPTAAIEVGDHIVYCDTCSEEPKCAEVCTKGALQVDDIAIDEEGNTQVRLIFNKTKCDECGDCVDACPSKTLKLDPEDSQLLKGFCVMCQKCVDICPVDVIGVPGIKEPASRVIEPEGAVYIDDCKGCGVCVAECPVDAITLSAYGEPIEVDEDKCIQCGVCSQSCPWNAIFIAGNAKPAKRSKVMKSFTLDADACIGCNSCVDACPGDFISPKSDLTVALPEACAACGLCVNVCPVDAIDLDVEYGASKFDSTEGICWDGEKCLYDGGCALKCPTEAIRVVTKRGMEVPSRQKDMGEQSFIMCVRCGACANVCPNDALQLDYVDKEIDGETVMRDRIIFNPSKCDECGECIDACPYDMLHKAYKVNLPIAGFCTLCEQCLAKCTPEALSLK

SEQ ID NO: 6338 - protein, 470 aa, Methanobrevibacter ruminantium
MEPVTRIEGHAKITVHLDEAGNVEDTRLHVMEFRGFEKFLQGRPAEEVPRIVPRICGICDVQHHLAAAKAVDQIYGFNDDDILPAAYKMRELMNWGSYMHSHALHFYFLAAPDLVVPNGTRKTRNVFQIIQDMPEVALQAIKIRRNGLDIVSATGGRPIHPTSSTPGGISTELDEETQADLLAKAKENVELAQATIELAVPILEEKIDLVKTLGYFGDTRHCGIVTKDGDWDVYNGKVRIKDKDGSIYTEYRNLEYKDIVAEHVKPYSWLKFPYIKELGYPEGIYRVAPLSRINVCDKMPDAAPLAQGALEDFRDRFGYAQYPLLFHWARLIELLASAEMAVDALEQDLSGDKFPDALERTAGEGAGIVEAARGTLIHHYTTDDEGLITQANIIVATIQNNPAMEMGIQQVAKDYIKPGVEVDDKIFNLMEMVIRAHDPCLSCATHTMDSQMRLATVEVYDSEGNLINKI

SEQ ID NO: 6339 - protein, 308 aa, Methanobrevibacter ruminantium
MADKAKVGTMWLGGCSGCHLSIADFHESLLDVLELAQFEFSPVLCDTKYDEVPELDVLIVEGGIRNEENRELAEMLREKAGLVIAYGTCAAYGGIPGLGNLHTVEELTTEGYINSCSTVNPEGIIPNEDVPTLESRVRPLGEAIQVDLLIPGCPPKSDVVAEAILTLLNGGTIELPTTNLCEVCPREKPPAGLAMDFIKRQFEIGKPEDDLCLIAQGLVCMGPATVSLCGAQCPSIAIPCRGCYGPTAKVNDAGAKMISAIASDYGVNEDKTVDPEQVADQLDDIVGTFYTYTLPAALVPAKMQKGGK

SEQ ID NO: 6340 - protein, 141 aa, Methanobrevibacter ruminantium
MSEDVKIVMFCCNWCSYGGADTAGTARMQYPPNIRVIRVMCSGRIDPQFILKAFRDGADGVFVAGCHMGDCHYDAGNYKLDRRMRLVYKLVEDMGIGRERVHHDWISASEGEKFASSVKMMVDRIKDLGPSPLKAQLDAEG

SEQ ID NO: 6341 - protein, 139 aa, Methanobrevibacter ruminantium
MSKYFLDANFIIAIFREIETNNELAISTCEELLSNHECYISNGVFNEIITILMMRTKDIELTVKAYYFMKDNLTIINEFEISMFNDRVFEMFKRYNSKSFKVGFTDCSIAFLYKYYGLDYIVTFDKNFKVFDDVNLLDL

SEQ ID NO: 6342 - protein, 81 aa, Methanobrevibacter ruminantium
MIDIIANTKMYKNKQTIIPSEVRDRFNVDEDTIIEWGVDEFGDLRITFRKKVTLKDVAGMIKKENDVEGDWKIDRGVYLNE

SEQ ID NO: 6343 - protein, 407 aa, Methanobrevibacter ruminantium
MANDALRAKDKKAALGTDIVIENFSKEEVNAFDVLDDIDDVDKKTKRTLLKVGVDTESEERAGSFLQMDQSNVFSSSISNSVEVMNTGIALEKYSWLKDYMWNAVKPDADKYTAQTALREVEEESYSGYFVRSLPGTKEVFPVQACMFIADQDVMQTAHNIIIAEENSELHLITGCATGEDVSSALHVGVSEMYLKPGSKITFTMVHNWAEQVEVRPRTAILQAENTTYINNYILTSPVNSIQSYPTTHCNGENARALFQSIQSGTKDSIIDVGSRALLNAPNTSAEIISRAVANDESSIYSRGHLAGNVPNVKGHLECHGLVLDDGSSIYAVPELEANAANLEMSHEAAVGQIDEEEIYYLTSRGLTEEEAASMIVRGFLSMDITGLPDELAAETQRMIDMSLDGM

SEQ ID NO: 6344 - protein, 252 aa, Methanobrevibacter ruminantium
MLLEVKDLVVEVEGKRVLNGVNLAIREGETHVLLGPNGAGKSTLFLTILGFPKYEVVEGSIIFNGEDITGLSTTERVQKGLGVSFQNPPAIRGVSVRDLLKFESKQDPDEDLNPRMQELAKKLKFSDEFLDRDVNRGFSGGEVKRSEILQLLAQEPLFTMFDEPDSGVDIENVELLAGELNVLLDKDKKPGQRKRAGLLITHLGYILNFVKADKAHVLMHGIIACSGDPDEILEDIRKEGFKGCVGCAECGK

SEQ ID NO: 6345 - protein, 89 aa, Methanobrevibacter ruminantium
MENAVAKPNPHRREEKLWSEIKNYQVATNNARILGVLDELIINEKTGKIVDIAVKIESGRNIHVKGAKRRGDLLLIPFTKLRKLENSLL

SEQ ID NO: 6346 - protein, 210 aa, Methanobrevibacter ruminantium
MIIALVMAGGKGLRLKSNIEKPLFPINDKPLMDYVLDNLKKSKYIEKTVVAVSPNGENTKSYLKDDLNFSDFHDDFYNSTKTDFYLDTKGIGFVEDLSEILTCFENHSKDDILLFINADLPLVDENIIDYIIEYYLDHDKPALSTLVPVEIFEEYGIPYTYDFNGKVPAGINILRSENVVQEEEVLIIPRYELVFNINTIETSILASKFL

SEQ ID NO: 6347 - protein, 492 aa, Methanobrevibacter ruminantium
MSFLDKIFNKGPKPIIAESQSRDLSILKAGNRPQGPGVMVAQQDEYYVTASVELGNTTTKCVIMATNLNNSQSYLINKTVNMTRDVRAPKPDEEVFGKTVWGIELSKESVADMIKDTVLESLKKAHVDMDEDLDFVVRSTGVTAGFATTQEVGQMVKALADGCLDAGISHTKMAPAMSSAHLPKRLQKYTLLDNVMFDGAVVSVVPPKGKEVVANEMEGELVTAGIKLGAKWTEVDYRNPCVSLDFGSTLAGRIVNKDEPYASTVGNFLGLAGVISDSLAKGSKQIDQKNGAALDLFDPKLLKKADGKKHQEKAKQYAKEAHELINICKVPEGIDRFGTVPLDAAGAKAAGTCLIGCDVGTNADGLDGLVEIGAKIYEDEGIPTLLATMDHVSANIVYRVLDVAFEENLILDGSILGVTGRAGITGKKPELILEYAQDKFKDVVFVEDGLALGSAIMARCMNSMGTQKNPLGGNQGERCILKKRMQAQGTIE

SEQ ID NO: 6348 - protein, 293 aa, Methanobrevibacter ruminantium
MGGQPGEYPTVLAGTIFYGGHKIISDEKAGDFDKDAAEGLIKTMEEMSDVTGNPCVVQTFGATAEAMVKYLEFVGDICDKPFLIDSTAAAAKIAGVEYVQEAGLAERAVYNSLSMAAEAGEIEAVANSDIDASILLGFNPMTPGVPGKLEIWETGGSVIDEGILEMAERCGITKPWMDVAVTPLGQGAGPAVRTSYAVKAKWGYPVGSGIHNVPSAWDWLRQYKKEHKEAWPVCDIGSNIVQQMAGGDFVLFGPIENSRLAFPACGMADIMIAEAARDIGTEPIEAHPLNLLL

SEQ ID NO: 6349 - protein, 83 aa, Methanobrevibacter ruminantium
MSEEESVPQIIVSTDDMAAAINKLDEAEEKVEFAVGEYFQRLGQQNGRDIGILYGIILGLVILIVSIEFGLVSAMSTMLTSLV

SEQ ID NO: 6350 - protein, 68 aa, Methanobrevibacter ruminantium
MVRFSNKPNTRGIRNASNNVEYRAKLLGREGRLFAGVISTRFSGMAIGIGLALALAVVIPYLAKLCGL

SEQ ID NO: 6351 - protein, 245 aa, Methanobrevibacter ruminantium
MADKKPAADNWPVVSGDYIVGDPESPVAVTTLASHNEDIPAAAGAAIAGPCKTENLGIEKVVANIISNPNIRFLILCGAEVQGHITGQSIQALHENGCDPEKKKITGATGAIPFVENIPMEGVERFQQQVELVDLIDNEDGGAITAKVKECIEKDPGAFEEDAMVIEVKEGDDDEDEGEEIRPISAETALLEARIRNIDTQVKLVGAVQRNMAGNYSGKVQGIMIGLIFTLVIGFLLLMAPLLGA

SEQ ID NO: 6352 - protein, 106 aa, Methanobrevibacter ruminantium
MVLPLIQFIPELNLNLDPETGLLGAGGGDLIILSMDEINGEIAKVEAAADELMNSLDPNSAPLGSFPGREGNFVIAGTLTNMVYGFIIGMFLIMAAMPILTAMGVL

SEQ ID NO: 6353 - protein, 272 aa, Methanobrevibacter ruminantium
MSAGGSGAPAEGAVNANVMLAVGIIGGLIGIYASSFEPTIGPVIACLGAVCAILWGVLAIRSVASYGLGTGVPSIGYMSLGIGVIGALAGVGIIAAFKLKGLEMLGPILALVFAMLIGLLVAIVAKKIVGMKIPVMERCTAEIAGAAALAVLGFSSAIAGGYSIDLLLTAVVAPGFIALFYILVTMAIQHPFNACLGPNEDQVRTLKCGASTAFLTMIITGILAISAGGYAWFAILVVGLIGWYVSFKMFVNASYEAAASVKWSGLWPKVEE

SEQ ID NO: 6354 - protein, 233 aa, Methanobrevibacter ruminantium
MDLLIFIICVVIAGIIMGGGVHFIPVGGAPAAMATATGVGTGTAMLAAGAGLTGLITAASMTGQPVWLIVLAGAVGSMLMMGITMLIGNFIYIFGVGVVPASGKAAVDPITGWNQEKYKTPGTEGHGIPTVCYISGIIGGLLGGAGGGLVYWAINEFATANLTGFDATVIAGLAAILSVGMFFINSVTASYNIGGTIEGFVDPKFKRLPTGILACAVVSLVAAIFMVLMIGGI

SEQ ID NO: 6355 - protein, 290 aa, Methanobrevibacter ruminantium
MDPITLGVVALMGAAATIAGAAEDLESDIGSQSNPNSQVQLAPQMGHLHRMINKAASGEPVAYGCWCGISGAIAALAMGMGIIPIVAIAMGSTVAALVHAIYTVTSHMGRIVGQSQFEQPLFMDVLTQSLGPIAAHGFIASFGIVGIAYLMTLPLDGLGHPFPLPLLAVLWGITIGAIGSSTGDVHYGAESEYQKFDYGGGTPVAIQGDIVTKAPLGAKNSIDVGNFCAKYGGPLTGFCFGLIVFVSFWITVVFGALGGQIVGIVIVILLIAANYLLEKSTRAKFGPYEE

SEQ ID NO: 6356 - protein, 550 aa, Methanobrevibacter ruminantium
MADKKFLDAMTKKFKEAPEEKTTTFYNMGGWTQSERKTEFVNEGKAIAEARGIPMYNPDIGNPLGQRALMSYQLSGTDTFVEGDDLHFINNAAMQQAWDDIRKTVIVGLNTAHNVLEKRLGMEVTPETITNYLEVVNHAMPGAAAVQEHMVETNPLLVDDSYVKVFTGDDDLAAEIDPAFVLDINKEFPEEQAEALKAEVGGAIWQIVRVPSVVGRVCDGGTTSRWSAMQIGMSMISAYGQCAGEGATGDFAYASKHAEVIGMGTYLPIRRARAGNELGGVPFGFMADICQATRVTDDPVESALEVVALGAALYDQIWLGSYMSGGVGFTQYATAAYTDNVLDDFSYFGKDYVEDKYGDLCSAPNDMDTVLDVGSAVTFYSLEQYEEYPALLETHFGGSQRAAVVSAASGISTAFATGNAQTGLSAWYLAQYLHKEQHSRLGFYGYDLQDQCGAANVFAIRNDEGLPLELRGPNYPNYAMNVGHQGEYAGIAQAPHSARGDAFAVNPLVKIAFADKNLPFDFTKVRAEFAKGALREFEPAGERSIIIPAK

SEQ ID NO: 6357 - protein, 250 aa, Methanobrevibacter ruminantium
MAQYYPGTSQVAENRRKFTNPDVELEVLREISDEDVVKLLGHRAPGEEYKSVHPPLDELDEPDDIIREIVEPIDGAKAGDRVRYIQFVDSMYFAPAQPFLRARSYVYRYRGIDTGTLSGRQIIEARERDVERISKEILENEYFDTARTGIRGAGVHGHSLRLDENGLMFDMLRRQVLNKETGNVEMVKDQIGRELDEPVVLGEPLDEETLRAKTTIYRCDGEAYKDDEDAVTVLRQIHVTRSQFGYNPEY

SEQ ID NO: 6358 - protein, 198 aa, Methanobrevibacter ruminantium
MIGRCTHLVDCRETRGLGEGGGIAQRGTFAECGSDVLAVAMSPGRRHITKPVCEITFGLREANLLTSTMILDAGSGVPHDAPAGGAGNAFGLTDKEVEQMQKFKVIVVHLGGVRNHITYKARLILRNVNKPCVIICEYPVDFEDFAKIGVKTAKVMPDEVKTEGKIMNIVSGVIRGQTVSQEKLDEIIRKVRLTLGDA

SEQ ID NO: 6359 - protein, 151 aa, Methanobrevibacter ruminantium
MDIEIFPHRILGTDTTEKVLNDLESLDSVKRTVIQGPRLPPQDEIDRIYGDRRIIVVNGEEVELKVKTGRIFVELYDESGIEEIRAICDKHIDTGFDINTSKAQYIRKQKTVTDGLKYGENTEIPEELIGIADTRSKFNEHVSILRKDGLE

SEQ ID NO: 6360 - protein, 443 aa, Methanobrevibacter ruminantium
MAKFDDKVDLYDDRGSLVESDVPIEALSPLRNPAIKNIISGVKRTVAVNLEGIEKSLKTASVGGAKSKILGREMDLDIVAQADSINASLKEMLQVTEDDDTKCEILSGGKRILVQIPTIRLDSSAEYSVATLATATALTQAIIKEFDVSMYDANMVKAAILGRYPQSVEYMGSNLKTMLDVPQKLEGPGYSLRNIKANDFVAATLKNTLQATALASIFEQTAMFEMGDAVGAYERMHLLGLAYQGLNADNMVLGLVQDNAKEGTVGSIVQDTIAKAEADGVIAVEKELTDYNMYATNDAAKWNAYAAAGCTAAIMVNVGAARAAQGIPSTILYFNDNIEFATGLPGIDFGRAEGVAVGFSFFSHSIYGGGGPGLFNGNHVVTRHSKGFTIPCVAAGMALDAGTQLFSPEATSGLIKEVYSEIDEFREPLKYVALAAAEIKGDI

SEQ ID NO: 6361 - protein, 416 aa, Methanobrevibacter ruminantium
MQVIADLGGTPGKDCRGYCKFCYFRKVKPLTEALGCQHCPPNKVGCERCLEGVQEAGKPFQQPFTVLSEVQMALMMNPVRDANLKVNISGGGDVSCYPQLEELIASLYQWQLPIHLGYTSGKGIDDGDIASRFLNYGVNEVTYTIFSVDPALRKQWMLDPTPEESLKAAQLFAEGADLHAAAVIIPGVNDGQALVDTCNKLEEWGAKALMMMRFANSYDQGLILGNEPVIEGVVPHEPLEFEELVKEINSEYDMRVTGTPLGDPTIGAPFIIAKDEYEEFLGILPEVRGEATLLTSKIAAPFLKKIFDKIAPDNVNVVATKKDIACLMTKQDLEALDLDELKDAVILPGRAFIHILDAERILSSDGKQRLVGFGPDTLSVDGELSSGMSEEEVIEHELGSFIELIEAINFFGMRRL

SEQ ID NO: 6362 - protein, 73 aa, Methanobrevibacter ruminantium
MKIRKRIKKLKRIKKLKRIKKLKRIKKLKRIKKLKRIKKLKRIKKLKRIKKLKRIKKLKRIKKLKRIKKLEKE

SEQ ID NO: 6363 - protein, 304 aa, Methanobrevibacter ruminantium
MYETLTFTGGIHKSEELKELIEDLGGFVLQSNILQMELVLNMAVPIDDVKIIEDKANELLGELSVAPMAGSEIAIVSPTLARHHLPHAACDISEYLRRYGAKDNMIGLARGHGKGTAGISETEKALIEEHDIAIFALGSFKQCIVDKAYLYNDIDIPVIVTGAPEIDLEELPGVDAYVPGLGRIPRRLKRGENIRALKHLVQTIEDLLEKRKKELAQDPPIVPSILVKNEIENQVPAIEGVFSPTPVTSQLSGLRVKLDYDNYHEEIENVVIGEQKLKDIANIKKSHFYDYILVELLTESSLVD

SEQ ID NO: 6364 - protein, 554 aa, Methanobrevibacter ruminantium
MGVNMYAENNILVGANENTEVYLLSKLANRHGLIAGATGTGKTVTLKTLAEAFSDMGVPVFLADMKGDVSGLAKIGEPSSKTTERMEKYNLADKGFIFKSYPVEFWDLYGEKGLPIRVTISEMGPQLLSKILNLTEAQEGVLNIVFRVADDENLLLIDIKDLKSMINHVSDNAELYESKYGAVAKKSATTLLRSLLALEEQGGDMFFGEPALELEDFMQCDDEGKGIINILDSVKLSTAPELYSTFLLWMISELYEKMPEVGDMDKPKFIFFFDEAHLLFDDMAPAVQKKIEQIVKLIRSKGVGLYFISQSPSDIPDSVLAQLGNRVQHALHAYTPKEQKAVKTAAETFRPNPAFDTKEVISNLGTGEALVSVLEEKGAPSVVEQVDILPPQSYIGAIEDNFRAELMSISPLRGKYKEAVDRESAYEMLLNKIDNNPNIQTEIPPEAPIRDIPNQAEQAPSQPQAQQAPQQAPSQPQAQQAPQEEAPKQKGLLDDVIGIAVGTAVDQMTKQNKTTRSRKTTKQTTVEKATSTMVNTAAREVTKGIIRGLFGNMK

SEQ ID NO: 6365 - protein, 122 aa, Methanobrevibacter ruminantium
MVELDREELYRQLEEMENDLRLYPIEEGLEDDIIDYINGKELSDNEKWDLENRLEDFFYGAKLKCRKPTYYFTDGFEFYVTEIYIDFRILEHVRKSFPKFNQLSVSSEIEQGFSTLSVKLTL

SEQ ID NO: 6366 - protein, 265 aa, Methanobrevibacter ruminantium
MKLNINKETCTGCKLCETVCIRDNIIVVDKKAVEVDNGDCFDCGHCLAICPSNSISLKGFDGQKDRVGEYNPKEIPVSSEDYLNLLKQRRSIRWFKKKKIDKETFNKLFEAAYYSPSAQNAQDVEFVVLDNELDEFMHLVYDIISAEEDKFFRIKQFGEYLRGEGDYKNHPLLWEGHQMILAFSRNSANALIASTRLELFAYTMGLGGFYSLFTLKADELDHDRLMEFFPGIDSHKHMYSAFVIGYPRVKYRRTVPHKGIDVYYR

SEQ ID NO: 6367 - protein, 179 aa, Methanobrevibacter ruminantium
MSIYDFEVKDINGNMVSLKEYEGQVLLIVNSATECGFTPQYNELTQIFDELNEEGFTILDFPCNQFGKQAPGTGEEIAEACRATFLVQYPIFEKIEVNGENEEPLYTYLKSEQPFVDITGEDAERLKGILESINPDYMDSNDIKWNFTKFLVDREGNVVARFEPTQSLDDVKAQIKELL

SEQ ID NO: 6368 - protein, 152 aa, Methanobrevibacter ruminantium
MSILVAYYSRTNVTKKVAESIANQLDADIEEIVPKVKYDGKIGYMRGGKDAISEKIIDLDSLKYNPADYDLIYLGTPVWAGRAATPVISYIKQNEGSFNDVKFFVTAGGSGFEGTIEQLGKYVGKAPLKTLSLTTKQVKRDEFKDELASFIE

SEQ ID NO: 6369 - protein, 370 aa, Methanobrevibacter ruminantium
MTIISKKVELIELFYDLIFVYAISRLTSIISEPVNGGIAPFSLFAYIITSFVILQAWLYFTNYVNRYGQWKWYEYVIAIINMIAVIYMANTISSTWNNYFVFNVSMLIMLFTVVFLYSVHAIKEKSLKGAAGNSITILLVVCSIYIISTLSILFGHMDVVIWLNVLAILTGAFLPFFLKGKFDKSIINFPHLIERFELLTIITFGEAVVGITHFFNVNNFDFVPILVFLIVIGMFGSYVLQIHYLVDHHREERSLRLMFSHYFIVISINLVTVAFELIHSGEINYWIPSLMVIISLIVFYLSIMANKEYYYDGLELRKKDIALMVLISLIGSIAILLSVGSIYGFLIGALIITLANFGVLLNKYQKFNDN

SEQ ID NO: 6370 - protein, 116 aa, Methanobrevibacter ruminantium
MLFIYYPRCSTCQKAKKWLDENGFDYDEQHIVDDNPDYEQLKALYEKSGLPLKRFFNTSGKIYREMQLKDKLADMDEEEQLNLLATNGMLVKRPIIETEDTCLTGFRQKEWEEKLK

SEQ ID NO: 6371 - protein, 276 aa, Methanobrevibacter ruminantium
MDYIRQTEVIQWNDGAYQTINEESVEDEYTYLFIDYLPPRKFSTYPKDLEDFAVGYCLGEGLIKDYSDIKSIQLDGTNILVTTTLSHDPEEDLEQEGIVQEKKGNCEHACVCRLLEYQGVNSDNAGGIRSELKTIEPNTSDLKIDASQIIKDIEHLTDEAKIWQRTAGVHVAQLKYEDKIIIREDVSRHVAVDKVIGAASREGYDFSKCYISYSGRMPADMLIKVIRVGIPIILSNAAPAASGIDVAQTGNITMIGFIRDKRFTVFTAPERVNLDA

SEQ ID NO: 6372 - protein, 401 aa, Methanobrevibacter ruminantium
MKYNFESIIDRKNTNSLKWDLFGDEYPMWVADMDFYAAPLIYESVNRKANHGVYAYSFVNEDVYDSYINWWKKYGLDMKKEELLFATGVMPSITSIIRAFTEIGDNVLIQTPVYHVFFYVILDNGRNVVENQLIYNPDSDDVETAYVIDFDDLEKIFKDPKTKLMLLCNPHNPVGKIWKKDDLERIAVLAKKYDVIVVSDEIHCDLTDPDMTYIPFASLDDDLSKNSITCISPSKTFNIAGLQSSAVFTQNKGFYEVLKGQLATDFFSHPNIFSIDATIASYKSEDWLNELREVLFNNKMIVKEFLEENIPEIRLVPANATYLLWLDCSKLNKNEDIESSNYEFSKTLSEFLREEVGLFLSPGVQFGQNGDNFLRMNIACPKDLLIEGLNALKEGIDKFKS

SEQ ID NO: 6373 - protein, 172 aa, Methanobrevibacter ruminantium
MADFEEIIKIRRSIREYEDKEVEDEKIEKILRAGMQAPGSRLGAEPWEFLIIKNKEVLTKIGEIKPRVTNAPVAILLIANIERAFYKTVWQQDMSAAAENMLLEAVNLGLGGLWNGVAPDEERMGKIADIVGLPKDDNLKPFCIITLGYPAEGWENKFMDKFDESRIHYETY

SEQ ID NO: 6374 - protein, 190 aa, Methanobrevibacter ruminantium
MNKPVFYDADCLECFLFVDATYILEELFSKIIIPEQVYNEIMEENTPSLVKRNFKKLKEGFVEIQEMPFGSSQYLAYKSIEKGFWSKAGQICGSGESAAMALAHLNNGIIASNNLSDVEEYIESLDIGLITSSMILTKALEMEIISEDTASSLYLAMIERGIKLPQDSFWEYFDKLYEIDCKRFLKNDFP

SEQ ID NO: 6375 - protein, 240 aa, Methanobrevibacter ruminantium
MNSTVLAEILRHEWGIESFASVNIRSLVYNNIRNLTVLWFPMKANISGCCSKTNEDKVIFINTNHSIGRQNFTLAHELYHLLYEDIDDFIVCGINMNTPSERNADEFASTLLIPDSALYWFRNKNQIDDWSVEDLIKCEQYYQVSRSTMLNRLKSLNWISQDQYDEFGLNVVAEVNRLGYETGLYKPSPQDQKYSSIGELVRLTEKAYGKKKITGGKRKEILLKCFRNDILYDNEVNKLE

SEQ ID NO: 6376 - protein, 108 aa, Methanobrevibacter ruminantium
MIDVVAKNLKDLRKKNGYTQEQVSDYLGITQSNLSKIENGERNFNMTLLDKLCLLYNCSPEYLIGETDLYEKSTIAFRSDEKVDLNVVAKMNEITGFLKLLRSLDGVD

SEQ ID NO: 6377 - protein, 273 aa, Methanobrevibacter ruminantium
MKRSIIFLTIILSLFLVIGYASAGLFDFSSDDAGSGENTDDVFVVGFNSQFPPFGYKENGEYTGFDIELAKEVARRNNWTFKPVPIIDWNTKRFELDSNEVDCIWSEFTIDGREDDYTWSQPYFNNTKLVIVRGDSDINDLDDLKGKTLEVQQGSSILNTIEKNETLKRKFAKIEQVDGYDTAFMDLESGVCDVIIIDSGLGRYLVSEKHNDTKILNQTISNEKYGVAFEKGNTELRDKVQKTLDEMYADGTVEKIAQKYSKYGIPDGVIYPE

SEQ ID NO: 6378 - protein, 147 aa, Methanobrevibacter ruminantium
MFIIFPLFSANLISIIIGISVLIFGIGLAYSSFITHEISGALSSVMGIFGIVMIIFGLCFIFAINAISFLVGLQFYIVAFMLIMIAVVGFLSDSNVARTGALLYLVLGIVILLIAMFAAENPILITIILGVILIAQGIMGLIYGNEI

SEQ ID NO: 6379 - protein, 425 aa, Methanobrevibacter ruminantium
MLDIKLFRENPDLIFDSEKKRFRSTENAEKVIEYDTLWREGESRLNSLRAEKNKLSKSFKQAKKDGNIEEVIAQSKAVAEEIKELGPKIEEYKQLREDYRYKVGNIIDEDVPVSDTEDDNLIVRTVGELPDFDFEPLNHVDLIEKIDGADIETAASIAGARFYYLKRDILHLNLALIQFALNELEERGYIPLQTPFFVKGEVAAETSELGEFEETLYKVENEDLYLIATAEQTLAALHRDEIINPEDLPMRYCALSTCFRKEAGSHGKDTLGIFRVHQFEKIEQFIFSTPEESKNEHHRLLEVTEDIYKKLGLPYQIVAIVSSALNDNAAIKYDLEAWFPGSKTYRELVSCTNCGDYQARKTKTRYGRAGSGDAQTLHTLNSTAIATERTMCCILENYQQDDGSVKVPEVLVPYMGGKTVIEARK

SEQ ID NO: 6380 - protein, 193 aa, Methanobrevibacter ruminantium
MIVVTTPMCKQIVEWAGLKEFKVNKFPDEEEGDLAILLSESKVKMNSLTLKLNTFSQIRESILKVSNYCFEHDLTDHLLSDDDIDDIFSSYDLKYANLGDDDFDKIRESNSNKKVKVYSEFLKDIVLDIGALVVDEDYSYVVYPDYLKDIVDKNEDFTDSSIVFIEMPSHGKVSKNPLERTEERYSILINSLI

SEQ ID NO: 6381 - protein, 260 aa, Methanobrevibacter ruminantium
MQIIKTSETEAEKVIINLSQEKSHSKDVSIMVDALRASTTVTIALDYFKEVIPAFTPEEARELSLKHNAVLAGERKGVKLEGFDIGNSPGEIKEFETNKKSMVLTTSNGIMTMENMQNPKHVLVGGFINAKSVAKAAVELAEEEIEIVMGGYNHEFAIEDFLAAGEILFYIEKELKERNMTPKENDGSNYELKDREGFSEYAISAILASRNLELTNEQVLKSKSGKRLSYLNYSDDVELCMKRNITENVGILKDGKIVLY

SEQ ID NO: 6382 - protein, 388 aa, Methanobrevibacter ruminantium
MRRECLKIIGTAHVSQNSVEEVKEAILEDKPEVVAIELDRGRYIRLMNERNGIVEDDQIHITKIIKENKVGVFLVTTILSYMQNKIGDDLDIKPGSEMIGAIDAAEETGSRIALIDRDINITLQRVLNHMSTWEKLKFIYGIIGGLLSSDDEELDVEALKEQSAIDEAMGYFKEISPGAYEALVNERDAYLANSILHIPEDHVIAVVGAGHKEGINRYLDNPETIPPHSELIDMDKKGGIPWLKIILALIPISFVVIFFLAWMNGIHIEGDIVQFIVISMIMGFLGSILSGSKLASAIIGGLVAPLTIIHPLLAAGWFSGLAEAKFRKVRKQDINNIGKIESFRDLWNNNIFRILLVVVGTNLGVSLATLVILPSQVFIPLFMKIFGG

SEQ ID NO: 6383 - protein, 91 aa, Methanobrevibacter ruminantium
MYVIFRCDCGRVLYAKQGVKTRKCTCGKTIKVKSRRILQKVETANDASLAVQKMQEEIYGGTAFKTADEYKANKFINQLDRRMKEYEDGDF

SEQ ID NO: 6384 - protein, 448 aa, Methanobrevibacter ruminantium
MEMDSIIIISEILIIIILIVLNGLFSLAEIAVVSARRIRMQKIADDGDKRALLVLDSMDHTSEFLSTVQVGITFTAIITGALGGTTFSEPLGNYLSQFIPYSYQISFIIVILLTSYFTILVGEIVPKRMALNDPEGYALSTAKFMQISSIICKPIVKLLDSSTNLALRIVGPSPKEDVVTEEEVKLLIEEGIEDGTIAEEEEDIIKRVFRLDDQKVDMIMTPRNEIIWLDLEDEIEINKAKIIASKRSIFPVADAELDDFIGVVQAKDLLSKIFEGEDVDIRANVKSPLVVPENMLSMDLLKEFKENREYVHMVLVVDEFGSVVGLITLNDLLEGIVGDIPGIDEEDDPKAVERKDHTWLIDGRFSIEDFKDLFEIEKEMPNEVEDGYTTIAGFILSHAGKIPETGEIFHEDKFTFEIVDMDGNHIDKILVTINEEDSDKLDLESKED

SEQ ID NO: 6385 - protein, 313 aa, Methanobrevibacter ruminantium
MELIIQIILLIIGFVLLIKGADVFVDGASNVAYNLKIPTIIVGLTIVAFGTSAPEAAVSITSAFAGTNAISLGNVVGSNIFNILAVVGVSALLGTLTVDKVLIKRDFPFLVVSSIGLLLIATIFGEISRLCGIIFLIIIIAYVYVLVQEARQDKEAMSEEIEVKLSIPKAAIYIVIGIAGIIIGSDLVVDSSSYIASVFGLSDVLIGLTIVAIGTSLPELVTSITALKKGDNGIVIGNVLGSSIFNILFILGISGAIMPLPIAPEMVWDILLMTVITIIGAAFAYTKNEVDKKEGAVLVALFILYMAFVILRN

SEQ ID NO: 6386 - protein, 167 aa, Methanobrevibacter ruminantium
MDSKKLILVTALAFLAIVSIASVSAWDLFGTADETSSTAKTTIAGHDFNIPDGYQKNESYVLDNETTNSNGAIFYSTAESYYKGADDIIYIQVADYSYPGYEANLTTAQLLKSGLGDKETINGHEGLIAENEFDGLKVHAFFYAEDGDCITVITSDDNLFEQIIPEA

SEQ ID NO: 6387 - protein, 451 aa, Methanobrevibacter ruminantium
MNVNKKIFLLVIFIISISIAGVYCADIHQDSDLTAILSNETDSGLTAIMSNETDSFGCCSIVLQLDGNESIMCYRRDSNYTADVFIEKVNWHGKPAIKQYKTDNKYFNHVIITNDGWIIGLGGIDDGIDSEICENITAKMITKDYSISEDYLTQIQEIKKKYGRGHVVIKAPNGNYGFATPTKLKTGTLNVGEYISIPNNYELSRRGYVSLDEPDKIEAMINLSRTDLYGDDRREIITYDVHLNGNNNTTDIYISNEDGSLIGKDYTGCVDNVIFNNVTIEGKDIPIAPNYKSLGSMSFEVDKVNLSLTDLAFIVVGVVLVIALLFVLLLRLIRFIKTRRSRRSAPRRTRRETPRSSRGSAPSRTRRESPSRTRRETPRPNLRNARRRDTEEDRRRNDLRRNVLQNIVEDKRRSEPRRNVRRNTRNNRGRRRGQNRGRQQTKRPPTLYRKE

SEQ ID NO: 6388 - protein, 285 aa, Methanobrevibacter ruminantium
MSINKEEFNEKIFSRINNLIDDYQLIKEGEKIAIALSGGKDSVLTLHALKNYKDSADFDFELVAILVDEGIDGYRQHGIDAAVNNAQLLEIPLIQKSFKEEEGFALDDIYSYFKSACIPCGVFRRNILNKTAYEIGADKIATGHNLDDEIQSFLMSFSRGDTVKFSKFGPELDQIHEKLVPRIKPLWNTPEKEVGMWAILNGVEIHLDECPYSNLSLRAKIKEFLNKTESKHPGTKENVLNSFIKTLDVENVRTVLSECERCGEPTSGRVCKACEIKDIISENRD

SEQ ID NO: 6389 - protein, 91 aa, Methanobrevibacter ruminantium
MGIEESGVGEYVSKAVQIIEESGLNYQITAMGTQIETDNLNKLYEVCANVQEAIFEMGVPRVYTVLKIDDRRDKENRTLKEKVKSVEDRIK

SEQ ID NO: 6390 - protein, 157 aa, Methanobrevibacter ruminantium
MAPVVEQPVEEWDKDIAIDLTGVFYCCKAFGEYMVKQEYGKIINMGSIHSRVALTGGLITGYTSAKGGVYNLTKTLAAEWAPYNITVNAIGPAYFESELTADVVGDEQFDMLIKAFCPMGRWGKEGELDGIAIYLASDASSFCTGQLINIDGGWTAI

SEQ ID NO: 6391 - protein, 367 aa, Methanobrevibacter ruminantium
MADIKVSIASPIIEEEEINAVVEVMKSGMIAQGPKVIEFEKEFADFVGAKYGIATNSGTSALHVALLAAGIGKGDEVITTPFTFAATGNSILYTGARPVFVDINEDTFTIDPCKIEEAITDKTKAIMPVQLYGQAADMDPIMKIAKEHDLIVIEDAAQAHGAEYKGKKVGNLGDMACFSFYPTKNMTTSEGGMITTNNEEFAENARIYRAHGSATKYHHDVLGYNFRMTDIGAAIGIEQLKKIDGFNDKRIENAKYLNEGLADCDLVETPVVEDGYKHVYHQYTVKVKDGKRDALSDYLIENGIGNGIYYPIPLYDQVLYTDMGYNQSLEVTDKTVKEVLSLPIHAKLTKFDLDLIIEKVKKASKEL

SEQ ID NO: 6392 - protein, 405 aa, Methanobrevibacter ruminantium
MEEYKDNFPQEELKTYTEDELKIIEEGKVKIKFPDFDKVSSDAPVFYNPKMEFNRDNSILALQAYQKEVDREINICDLFGGSGIRGIRYKKEIEGVGEVSVNDISPLANEFTRINAELNDVEVNIDQKEANIELRTNMGLFDVIDIDPFGTPSPFVDSAAYNLKRDSLLCLTATDTSCLSGTYPEPCIRKYNAKPYKSEYYHENGIRIIIGFAALTLAKYQKHIEVKMSHSTEHYMRVYLKIIKGSKATDKSLKNIGYISHCKNCLYRTESHGLATSVPDICPECGEKLVTAGPLWLGPIQNKEFIESMIEIADEKELNTKKKVLKLLNSCKMEADAPATFYDIHKICRSLKISAPKLDLVFDKLKENGFYAVKTHYSPLGIKTDASSRELIEIVKELAEEVENK

SEQ ID NO: 6393 - protein, 159 aa, Methanobrevibacter ruminantium
MCAKVNEDIIQLDETDISILKIINDDVRISYRQISRDLGISVGTVHNRIDKMLKTGVIEKFAPVLNHKKLGYALTSIIGVNVKGQELEQWEHDISKNKNVVGLYDVTGQYDAIVIAKFKDTDELDTFLKELLKTGCIEKTITQTVLNIVKEDVGSADIL

SEQ ID NO: 6394 - protein, 313 aa, Methanobrevibacter ruminantium
MVVCLPDTQDDAPRIPIHLSRVGVTGVKKLLTLKRKEKRPIILLPTFDAFVDLPSDQKGTHMSRTPEAISEVVEEVAQSSQKGVESLCADIVTRMLEKHEYAKRVEVSMVSDYMFMKDSPVTDNRSQEMGKLIANAVGIREDDDTISIRKSIGAEVIGMTVCPCAQESVREVDKNNLLKFLDEETCQKVLDTVTFASHNQRGVGTILIEVPEDEYVDGEKLIEIIESSMSSPISELLKRPDENAVVMNAHKNPVFVEDCVRTMNEKIVKEFSHLPDDTLITTRQENQESIHRHNAFAEKVSTLGSLKEELNIN

SEQ ID NO: 6395 - protein, 93 aa, Methanobrevibacter ruminantium
MIFMENFENQKFCQSCAMPMTEELYGTNADGSKNDEYCIYCFKDGEFTSDMTMEEMMNFCIEKMVEVHPEMDKEEASKMMNEVFPMLKRWAKD

SEQ ID NO: 6396 - protein, 394 aa, Methanobrevibacter ruminantium
MNVLVCSMSAMAETAGPYGRARALVEALKASGIDVATCMAEDINYKPIDGIKNYYLNVPMPLGLPKPIATRTFPIAQKLGIIERKNVGSFEDVLHFTGNIDYKYLCESVANIRKAINDFNPDIIYSEFNISAILASKLENKRLYATISYPTQTEYASNPKYAKGLKKFLRENNLPDVNSSLDLFNWADKSFVPSIYELEPIDKDNVTFCGTWKNLNEGSVFKENDENMDSTDERNAILVYMGSGTISPNKMFKEIKDAFIGTEYQVYIASLGLEKSDFDNIHIDKRWDFSKLLNESVLFINHGGQNSVVDGFIYGVPQLICPGRVFERIYNGKSVEKVDAGKILEITDFKGEIIKSESEKIIKDDSFRNNSKSIGDKLKSLNGIDLIIDSIKKG

SEQ ID NO: 6397 - protein, 447 aa, Methanobrevibacter ruminantium
MKMYKINVSNISRLRTYTDGDGVSTLIGSMGCPLRCAYCFNPFSWDGSLEPKTYAVDELYEEVKRDNIYFLSTGGGLVFGGGEPLLYHEFIKEFIKKYKSTGWKFTLETSLSVKKDILRDIIDYIDFFIVDTKDMNKNRYELYTKGDYELFLSNLKFLIDKVGSDGIRVRVPKIPKLNTVDDVKTNYRTLKDMGFSNIDVFNYVEIAKHRKISRVALENKKDFDERLYENKIKFVEDYILSEIMLKVPPILDFHIKKFPNSFNKKFEFLFEYDSIFNDDLFFLKEVVISKLQECYDYLDLKYGFFVIFYPVGYLENRLDDSCFDLSIMNNLVKSFEGLDEIDKEKHALELWEENKWEYIEFKYFCHDLNHLKNFYVNFKDHGYKLDSKYILSNAYDVCPSDFVVHINLRKTGKTYNIVEEDYSTHLLVQKFDKDMNLISQSIFEKGI

SEQ ID NO: 6398 - protein, 89 aa, Methanobrevibacter ruminantium
MKGKDKCELLKNIRQKIADENNIEYTAVECTFQGDCTGTCPKCESELEYLDKELEKKQNAGENINIKNIFSSDDFDKSEYGLLDENILG

SEQ ID NO: 6399 - protein, 141 aa, Methanobrevibacter ruminantium
MVDEIDRFDGKYLFLSNFYICDVEYDGILYPHTEAAFHAQKVFDDETKMKFTNVTPKQSKRLGRKVKLREDWNEVKDNIMYEVCKAKFEQNPDIRKLLLETGDATLIEGNTWNDQYWGVCRGKGRNQLGKTLMRIREELRE

SEQ ID NO: 6400 - protein, 510 aa, Methanobrevibacter ruminantium
MNETKKQVSWMPLILVAFASFIIALDATFMNVSISPLVIDLNTDVGTIQTIISFYTLITASLMLISSKMQDVFGKKKIFLTGALVYGLGAFIASISQNAIMLFIGWSLLEGIGGALMTPATISIISGTYDGQMRTTALAISSAIVGIAAAIGPLFGGVVTTFLSWRYGFVFELLIILIIFIFRKRIPNFASTASKKDLDITGSLLSAIGLILLVLGVLMISGKTIGLSIGLIIASIIVLIGFGLFEKRRKANGKMPLFDVSLLKDRNLSRGTLIRLITAIAMGGSLFSISIYLQTVLKLSAFNTGIVLLPLTFGMLIFSIMAPKFAIRLSHKYAMIIGFSIAIVGCLLLSYQFTLTTRFIDLLPGMFIYGAGLGFPMALSVDTALINTPPESQSSASGFVSTGQSLGMSMGTAIIGIILIVGAVGGMHDAINTYAPDKVTNQEFHDNVQGYFEKLGNVNTTELKHENSLKEKIVSKVVQDAMRLVMYVTALLLAIGGALTFTLKKQKIKG

SEQ ID NO: 6401 - protein, 529 aa, Methanobrevibacter ruminantium
MGNKEEKKAARQRFDEIIGVAKRHHLAKLLTNNEDDEDFEVSDLRYAMEELGPAFIKLGQLLATRPDMVGNDIADDLKLLRDNTPATPFEEMRKVIEGELGKPLEEVYSEFNEEPLGSASIGQVYRATLKESGMEVAVKVQKPGIYDVIVPDVKILNNLAGTVDKHVSGSRTYNLPAMAKEFERSIFKELDYMEEVRNINKITNNFKDVEYIKIPEVYPEYCSSKLINMELIDGYEVTDLFDNEIEGINNTEIAQYGTQSYLKQVLIDGFFHADPHPGNLFVTKDAKLCYIDFGMMGVVNDTFRSNFAQLILLLLDGNSHHLINQLLYMNIISPEQNTDEFREDVDDLLNSYIGVDLDQMDGIFDNLMNVMINHNIILPREFIMIGRGILLIEDAGNRLDPHFNLTAELEEFAKKMIRTKFEPGNLVGGGFNYIVEIEHLLKDLPDRLNSTLDKVEKGELELNMNHTGLDDLKNQLSIALIVSALLVGSSIAILADKGPKVWDISAIGFFGFLFSAILGAYLVIKYIRK

SEQ ID NO: 6402 - protein, 155 aa, Methanobrevibacter ruminantium
MYKKLMILALFCFIVIGSASAADFKINDGFNSSLSDYSFYNEDQNMYINIWDYDDEILSEAYLENSSSYRIVSGENNTYNFVFDSYNDMDHVISYITKGYVALDCGVLEIAEVDGKKQIILVSKEGTNVDSLKTCYDELMKFNQNNNIEPIADAI

SEQ ID NO: 6403 - protein, 645 aa, Methanobrevibacter ruminantium
MRINKSLLMISLLLISILAISAASAADDMVDADIDLASSEISEVSVDDVQATDKNVLSDADEVSVVTQNTPYNENATIDISVNGTLADDSTIKLFIDGEDKGDLNLSAEGKASYVIPASTLDVGKYFIEAVVHNGTSSFGGRSTLNITKVTPIVSVSDVTVKSGDYITIPFNVTDDKGKAIPGDVIVTIVWENDVISKHIKLNDNSSAGFNIADIIGIFGGNSTGNGTGTGIGDLFNRNGTNGTGNGTGIGDLFNRNGTNGTGNGTGIGDLFNRNGTNGTGNGTGIPGIGGNSTGNGTGNGTGDFDIASILAMLMGGGNNTGAKFAYVFEKGVYNVSVEYLSNRNYNGAINDTAKLTITPLEDVLINATIETAKNMSDNTTVSILLTDGYEKPIAGGEINVFLNGEDKGKVTANEEGKASIAFSNLLKGDYELLLNYKETNKTFDFFVNVERMGTVIEYEDMNTTSVNEKVDGRIGEYFQVTLKDNEGKALANRFVQIGFNGKIYNRTTDDKGQTKLQINLFYTGDYTFAVCYLGDDAYNASFIVAKIKVSKQTPKITTKDATYKADAKTKNIKVTLKSAKDNAIKDKKISVTVNGKTYTAKTDEKGVATVNVSLSKKGTYSFTAKYAGDSGYAQVSTKGILTLK

SEQ ID NO: 6404 - protein, 81 aa, Methanobrevibacter ruminantium
MELVIFKAENKLEEIFLNAQLKMQKAKNELIKNMEKDIEKAIELAAIEVETQIIKENIDIAVDALEETIEEEKADLAERFE

SEQ ID NO: 6405 - protein, 153 aa, Methanobrevibacter ruminantium
MSEILPKITGQIIGHFNAFKGSRPAFHGEHTLIVRGISRDKIEIEEMEPKLAELEDILKAREVDVLSDAGKNFVEKVDSYIRDAESIDTAPDSGGLLRMKEQLETMGLHVEYKLFLMPYAGAFVAIWKDKSGFGPLYVEVTASEREETDNDMK

SEQ ID NO: 6406 - protein, 363 aa, Methanobrevibacter ruminantium
MSNLSNIDFENLSRNDLISILECKKEDILKIMDLANSKRENTFVTYSKNVFIPITKICKNDCGYCAFKQSPDDPDATILLEKEEILATLKEAEKYGCKEALFTMGEDADEEPAVKIKLEKLGYENMPDYIYDICKMTVEETDLLPHTNAGNFSYEDMKKLKEYNISMGMMLENSSERLMNTIAHKKSPGKDPKIRLETIENAGKLNIAYTTGILIGIGETKEEIADSLLKIKELCDKYGHIQEVIIQNFTVSPGIEMESHEEPSLLDMVRTVAAAQLLFDEDVSVQVPPNLNYETSQIFLLCGTDDWGGVSPLSEDYVNPSSPWPTLERLEKLTNDAGYQLKERLAIYDKYINEKYIEKSYIN

SEQ ID NO: 6407 - protein, 440 aa, Methanobrevibacter ruminantium
MTNEDNKNMTIIGASRGLGKWIAQHLKEDFNITITSRNQAEGQEVANELKVSYNNDNIDAIKDANIIIFSVPIEHMATTIKEVAPHAPKGSLLMDVASIKKEPAEALEKYAPKDVEILPCHPMFGPRVPTLKRQIVVLTPIENRSNSWTLVKEYLEKKECEIVITSPDEHDKYMSIVQGLTHFSFISLASTIKKLNINVKKSRSFSSPVYSLMLDMISRVVYQNPYLYYSIQKNNKETAYARDALIKESMRLSKLIEEGDEEDFVKAIAESAEHIDEIEEALVRSDKAISMLNQKANILTKLIGEEVGLEDAFSKKAYIGIVRKVSSQTVTIENENNEEIELKISSIDIMDKDELFQWKKKNLKLESFDLTAKFPSSANEDYLLKMFKRIEPVIDANIIFKDKEIEKDLRTYKFHYSLFNKQEKDYVEKYIQGIGGILIK

SEQ ID NO: 6408 - protein, 256 aa, Methanobrevibacter ruminantium
MKWKKIGDILIIDDNFDLDLNDEKTLKDLAHRHKVKSIIRIEKIEGQKREPTIDILYGEDTETIHKENGCLFNLDLSKVMWAKGNNNERLRIAKLVQKDETVLDMFAGIGYFSIPIGVHSQAKQIYSIEINPNSYHFLKRNIELNKINKKAGYDRMIPILGDCAIEAPKYSADRVLMGYVKTTHHFLHPAMECVKDGGIIHYHETVPDKLIETRPYERVKEMAWNCGEREVEVLNIQRIKRYAPGVEHIVLDARIY

SEQ ID NO: 6409 - protein, 207 aa, Methanobrevibacter ruminantium
MSNKNTFEGTTTVGITCKDGVVFASERRASMGNLVAHKVAEKIFKIDNHIAATIAGSVADAQTLMKVISAETSLYRLRNGKDISLEAAAAVSSNILHSSPAYVQTLIGGVDDTGASIYSLDAAGGMIKDTFISTGSGSTFAYGVLEDRFYEDITVEEATEVAIRAIKAATERDTFSGNGFLVANVTKDGFKMLEKEEVDAIIEKINS

SEQ ID NO: 6410 - protein, 636 aa, Methanobrevibacter ruminantium
MASNVLEQIKEEITKKLPEEVKLANIEFEGPEVVIYTKNPDIIADNGDLIRNLAKDLRKRIIIRSDKSVLDSYEDAIKKVEEIVPEDAEINDIKFDEVTNEIVIEATKPGLVIGKYGVTSRDIVRNTGWAPKILRTPPMRSEIIDRIRNTLLNNSKERKKFLQTLGARIHQGGKYPSDWVRLTAMGGFKEVGRSCMLLQTPNSRVLLDCGVNVAGQDDKTSFPMLGVPEFSIQDLDAVVLSHAHLDHCGFIPYLYHYGYEGPVYCTSATRDLMTLLQMDYIDIAHRDNNPLPFNAKHVQKEVKHTITLDYGVVTDISPDIKLTLHNAGHIIGSAMCHFHIGDGAHNLLYTGDFKYEKSRLLEPATTRFPRVESCIMESTYGGHEDVTPSRNNAEKELMKTIYKTIKRGGKVLLPVFAVGRAQELMIVLEEYMHHDIIETVPIHLDGMIWEATAVHTARPEYLSKELRDQILHMSRNPFMTESFNQVQNNAERKEIVEGEPSIILSTSGMMTGGNSVEYFKWLCEDKKNTLIFVGYQSEGSLGRKIQKGHKQLPFEDEDGKTRVFNVEMEVKTIEGFSGHSNRRQLMEFAKRLHPRPDKIITCHGDPYKTVDLASSIHRSFKVETKTPVILDAVRLQ

SEQ ID NO: 6411 - protein, 339 aa, Methanobrevibacter ruminantium
MVTYSESGVDIDLEALTVSKLASKLKPTLEYRNIITDSGHFAALVELGDKAIAMSTDGVGSKILVAKMMEKYDTVGIDMIAMVVNDILCVGAEPIALVDYLAVEEPDPKVAEEIADGLVKGATESKIAIIGGETASLPGIVKDFDLAGTGIGFVDKDKIITGADIQEGDILIGLRSSGIHSNGLSLARRAIFEDGGFTVDDKMPNSDTTIGEELLKPTQLYVKAIIDLLGQGFNIKGLAHMTGGGVNNLSRLKDGIGFEITDYPEPQDIFKLIYQQGVPLEEMYKVFNMGIGFTVIASPEEADAVLEALNKNIESYIVGKVIGEEKIVVKTFEGTEITY

SEQ ID NO: 6412 - protein, 329 aa, Methanobrevibacter ruminantium
MNISVNKERELVKEILTKIGVKENQADVVTEATIDSDLKGFTSHGLGRFPQYIRGIKRGHIQIDGEYDIVQETESIALIDGKSLFGQYIAHEAMSLAIEKAKKTGIAAVGTFNANHFGITGYYSDLAIRNDTIGIVICNTEPGVAPLGGKKAILGTNPVAIGIPSDTYIAVDMATSVSARGKLLEAQRKGEEIPPNTAIDKDGNPTTDPEAALEGSILPFGGVKGYALSLMIEIMSGPLVNAAFGTKVTGTAGDYKENCNKGDLFVAIDPSKFVPIEQFKADVEEFVTEIRESGDTFIPGDLEVKRIAENEVKGLDIDEKLYDTLENNL

SEQ ID NO: 6413 - protein, 130 aa, Methanobrevibacter ruminantium
MVKPVKIHDNNLWDKFVKETESYWAVLSPGTVIAIFIGETDKNFLLIERKEGTVESKFNINNSLNMMDTGLFFTITEEDASDLLDDSSLLTTFIKEGKLGIFCLVDDYAMAEKGLDTLLSDLGFAPSCAI

SEQ ID NO: 6414 - protein, 127 aa, Methanobrevibacter ruminantium
MEEKIALAACSGMSPNGLVARVAVHDLAIDDHEILSICMGSTSANVEGFTRVLDKYPILAINGCEGNCVGKILKEKGVDIVGELNVGDILAETEYKANDAARLDDEGEICVKIVKDIIEDKINELSE

SEQ ID NO: 6415 - protein, 638 aa, Methanobrevibacter ruminantium
MVKRNIVLLDIDYITHDEKAVIRLFGKVKGGESNDIIAIDDSFVPYLYILPLEDIDKCIKDINGLKEEGEIEFTKLEKVNKKDLQVPKEFIKMTLNHPQDVPKYRDKIWDLNSVKQLREHDIPFYRRYLIDNALVPMAELELEGELIDSFETVDSDDESLEILKLSCPPKTANTDFQEFRMMSFDLEVRNPHGMPNPDQDEIIMIGIDSNVGVRKVISTKGDEFDDDEEMDFIEIVETEKEMIERFVQTVKDANIDIIIGYNSDNFDFPYLRDRAKRWEVDLDLGVDGSGLKFLRRGYANSAAFRGLLHVDLYLVMRRYMSLDRYTLERVYLEFFGEEKIDVPGERIYEFWDNGGDELKNLFKYSLDDVVATLKIAMETLPLNLELTRIVRQPFFDVTRMSTGQQAEWFLVRKAYEVDEVVPNKPNMTMNNIRERGSNSGGYVKEPEIGLHENLVQFDFKSLYPTLIISKNISPDVLVTDNISYNAKFEDFETGYDEIDSVLEETPSEDLDEEDYYVCPEHFFKFKKEPQGFIPSAIEDVLNERFRVKNRMKQTEDPVLRKSLDVQQQALKRLANTMYGVYGFLRFRWYSFECAQAITAWGRQHIKKAMKEAEDFGFKAIYADTDGFYAKYVPEMKKE

SEQ ID NO: 6416 - protein, 361 aa, Methanobrevibacter ruminantium
MVLLGAMIAYGLTPIANKIQTKIKYPSISIFLALILVVIPLILLFAYVFYEITVFADVFFNSSDLAGMDINNALNAFVGNLPVELQGFIKPYMGSLSTGLESALSYVLAYTVKLVKGFSNVLIQLFVLICSIYYFTRDGDLIWENIFVFIPNEHKAFFDRTFYEIANVLKSIFYGHFLTAVIIGVMGGVGYYLLGYKFALFLGIITGIFQLIPIFGPWIVYWALAIYAIFVAGDIVQAVLTVLWGFVLSLSDMYIRPVLASNYADMPSLILLVGFMAGPYVFGIVGFILGPLILGVCYAVIKSLKEELEKDNWNSGDEEGSDDGDSEDVKEISDNLDEVSDDKKDSNEDSKDLDLGIEEKI

SEQ ID NO: 6417 - protein, 269 aa, Methanobrevibacter ruminantium
MNVPQVLEIKRIIEETPSIKTFIFDWTMVGENIPTPGQFVMVWNFNDEKPMSISYIDIAKGELGITVKNVGEFTNQLHSLEVGDRLGLRGPYGNGFDTDLRDMKVLAIGGGVGMAPIASFAEEALKNKAIVDVVCAAQTKDELLFDERLKEKGATVYTCTDDGSCGFKGFATHRAIELMAMKKYDWAVVCGPEVMMKPLYGTLESNMIDGEYSMERYMKCAIGVCGQCCVDNTGWRICVEGPVFSTDQMSEIIEFGEFHRTASGLKEFY

SEQ ID NO: 6418 - protein, 278 aa, Methanobrevibacter ruminantium
MLKTKLCGISLKNPLMLAAGVLGSHASSLNWILNSGAGAVVSKSFSKEPNEGYKNPTTVAVEGGIINAIGLSSPGVDAFIEELESVNRIKGRSIASIYGATPDEFSYVAGKIESLVDMIEMNISCPHAMEGYGASIGQNPDLTREFVSAVKDTVSVPVLAKLTPNVTNISEIAIAAEEGGADGLTLINSLGPGMKIDIITGNPILANKFGGMSGPAIKPIAVRCVYDAYEATDIPIVGVGGIRNYTDVVEFLYAGASAVQIGTSIMYEGPEIFGRIRK

SEQ ID NO: 6419 - protein, 426 aa, Methanobrevibacter ruminantium
MEYYITQFIAGFIAFDEDLKIANYKLFDDENIVSNNLKIENKELLEEEIELINELSSDDSTIIIETRKRRSQYKELDNYENIIVETPNKGGEHLRNNLESILLEIGFLNDDKENIDDVEENISNLEEPNQEKYSEITKIYEDIASLKVKESSQEEDKLLIQAINTVDDLDESISKLVERIRDWYTIYFPEMDTIGSNETYIKLIAESENREDIIKNHKEHFDIDLDFSTGADIEEYDLIMVKSFAESIYSLQRSRKDLEKYIDTKMEEIAPNLRDLLGPTLGAKLIAHIGSIKRLATYPASTVQIMGAEKAIFRHLKTGERPPKHGLIFQHPSVRGAKWWNRGKVARNLALKITLAVRKDVFSGEYDPKIAEDYLKKVEEIEKENPFPKKTSSRRKSERQMEKDKKSKKYKGNKKNKKNKKRKKRK

SEQ ID NO: 6420 - protein, 216 aa, Methanobrevibacter ruminantium
MEIFLKDQDIVTRNLRPGIKVYDEKLIQEEGSEIEYRSWNPRRSKLAAALLNGLESLKLENDSKVLYLGASTGTTVSHISDIAYDGLIYAVEFSPVSMKKLIRLSKQRPNIAPLLEDATKPKNYLNKVEKVDLVYCDVAQEKQSELFMNNMKLFLKEDGQGLITIKARSIDVVQKPKKIFKEEEKKLKANGYSILEKIKLEPYEKDHIAFLVEKSF

SEQ ID NO: 6421 - protein, 406 aa, Methanobrevibacter ruminantium
MEIVLCVTGSVAAVETVKLAREFKRQGHSVKAFMTQEATKIIHPNALEFATGQEVVLELTGKIEHVKYSQADLILVAPATANTISKFAYRISDNPVNTLLITAYGHDTPIVFVPSMHDSMYDAVSENVAKLKEEGIVFLNPRLDEGKAKFPAIGDIVLESIRTVNLDRVKKNLTDDSLDESEIEDLNMEMLSKIAGLNVLISLGGTFEEIDPIRGISNRSSGKMGLELAKEAYRLGANLKILAAHHEVEIPKVFDVIDAKSSSVMSEKTIELVPDFDVFIATAAVSDFAPIVKEDYKISSSLNLSLEFEPVAKIIHQIKKINPDIFLVGFKAEYNIPEERMIQCAKTQMQDAGTDLVVANDVYKKGCEFGSDSNEVILVSDEIKKVGLNSKSEIAKSIFKEIANKI

SEQ ID NO: 6422 - protein, 187 aa, Methanobrevibacter ruminantium
MKKIIGIIFIIVILVIGGSLVYKNYKDSQNTVDKSQESIEISKNGITMLIPGDWVEAKSESNTTAIAAADPASKDSAGFSSVNINIEKKTSYNSLSYEFNNNYKALGRDSSYDILYEGNVSIAGTEGMEAGYTSSKTGFLKQHKAIWFKQGDDLYVILCTAPQSKFAEEESTFDFIINNLKFNNSTN

SEQ ID NO: 6423 - protein, 244 aa, Methanobrevibacter ruminantium
MNQDKMKLMQILKNLERDYNDGLISEEKYIYLSNQYRHKIDTIDTSNRIRTMQGKKKVSPRPYSKYEDANYQKSRDEDERLVEKYIHNPESYNINSRGKKTKSGGTSPWYIALAVIFLLFAFGAGISFGIFSENTNSDVGDIITASATINDTAFPEVKQTYKYNRTSNYTKYSSNSYSSDYSSGSSYNSYNSYGGSGYSSGGSGYSSGGSGYSSGGSGYSSGGSSYSSGGSGYSSGGSGSVSID

SEQ ID NO: 6424 - protein, 275 aa, Methanobrevibacter ruminantium
MINDKVAFLGPQGTFSHEAASLLSDNLISYCSIQSVMDAVERGECRYGLVPIENSIEGPVSLTLDSLIHNFDLKIRNEIIIPINHNLLAASDISVDEVENVYSHAQALGQCQPYLERHNMVAHYTLSTAAAAKHVAETGEDAAIGTLKAAELYDLKVIDTNIQENYNNETRFVVLDTEDSPITGNDKTSISFSLFEDKPGGLYELLGYFASENINLTKIESRPSKEGLGHYIFFVDLEGHRLDENIAKILNNLEDNTSFFKILGSYPVYSRELFD

SEQ ID NO: 6425 - protein, 272 aa, Methanobrevibacter ruminantium
MKIKNIMSENVVSIDKNLNICDCLRMMYKDNLSRIPVTSTNENKKSLVGIISEKDIANKLGSVKYGNLAPSHFHVSTVMVKDLITVDADDDLTDVANILIEKNIGAIPVLSDGEMVGIVTKSDFIYLCKAKAYEKVSVKDIMTPDIISISANDRLIHARKVIMDSGVGRLLLTEDNELAGIITSKDIAKALVSFRKHTPEKHMASKIKELVAGDYMSTNVQTISEDTSIPELADAMLETGYNGYPVVDSNDQIIGIVTQSDLLKLIYEMETQ

SEQ ID NO: 6426 - protein, 294 aa, Methanobrevibacter ruminantium
MNRGSVEHESKVAENEGEIMTLAKKEVISIPQTKTIKEAAEMMIEHEFRRLPVTQPGSNKLLGIVTAMDILDFLGGGSKFDIIEKKHNDNFLAAINDQVKEIMTRGVISVGPKATIRESVTKMTENGIGSLPIVDKEGKLVGIVTERDFALALAGSLTNETVGDLMIKDVITTTCGTPIESCSKIMVRNNLRRIPVVEEDKLVGIVTSTDILRFFGDKEMFASMTSNSGLDVLKRQISDIVKPNISVTESYVKLGDLCDLLAEKNIGGVPVVDDNKLVGIITERDILNAVLSKK

SEQ ID NO: 6427 - protein, 370 aa, Methanobrevibacter ruminantium
MAEIKKQVRTRDFIISTDGLLFASTNYIHPEDRIISFLRYIPDENGDREKDGIKYSKVGSDEAYAYLRENHPDYLYFCDVTNVEMMGVPIDKVERIIKPEERLKGLRETYIPIINEKLEKGEDLDYKEELMSKLIDLSDFFHYMASIDYNDLGISGSILPGLQKAGTSDLDFVVFGLENHRNAIKAYKENKDKPVYIEELDKEITLNRINDDFWDFVYDKRIKDDSLTKEEFAWYEERKSNRGLIRETLFDILATRNYDEIEGTWGDTVYEPEGFAKVNCTIKSALGAFDNPAVYTIEDVEILEGPDIEISELASLTHTYAGEVIDGEEVVARGKIEKVLKNGEFEKYRILVGTTRESLNEYIKLRESPV

SEQ ID NO: 6428 - protein, 1498 aa, Methanobrevibacter ruminantium
MKYKKELIFICFIICMLSMASVCASDVNDTYINQNDLKIDNQDNCINYEKVVYTEENLENNLISTEDSLEDSNSIEPSDSFKQKNSLNEGNSDERLNPEIDVALNSIHVNETAEVNVTVRNASGYVLVSVDDQSFNKDLTDYQARFNITGLGFGNHNIAVYYGGDDNYLPGFKLETISVEKYQTQISEIEIGEVYYGEDAIIEVSVPNGVEGDITIKINDTLQTVITEAIHDGMALFSVSGLAVGSYSLDATYNGNDYYENDTASAEFEVKKADPNLSVVSFECTVYDNATILASINEEIHDEFVNITVGDEKYEDCPIEDYGMIAFTGGVLSNFSSYRILIEYGGNENFESAMIEAFVTPKKITTYGLDIIAQNISINDDEIISVVVPDHVDDVVVWVDGQSYRNCSFENNVAVFNVTGLGEGVYTVTATVNDTEFDHKNFTSIFTVSKVLPSIGISINETEIYVGDNVKIIVSLPIDVSENVSIVFDDRELSQKPVDGNATFYIDCLSYGNKSVPAIYYGDEKYRTAVESINFTVNKVPSFLNVAVENISISDNEVINFSLANDASGNITVIVNDETYIVAVSGGKGTLTVPKLNQGVYSVNASYNGDGKYLPSLNNSESFKVLVNSGQMEIIDERNNTVSVYLWDGATGNLSVKIDGKVYNATVVDGFAQVVISNASYGAHHAYVLYEDNESDLKLESVVDVFVPKYLSPIGINSSILKVGDIGYINVTVPMGASGNISLEIDGKSYLIAIDNGIAEFEVENLTAGDKTIFVKYSGDKVYSQNSTSESLTVFKQESSTHCSIEDISVGDVAQIKITGPSDVLGTVIVIINGSEYTASISNGEGILNVYNLQNGDYDIELSYLENSKYLSSEYRDNLSVSKIQTAISSSNIVCQYNYEGYLNVSLKDIKGNPISCAELSIDLDGVKNLVSDVNGQVKIPTKDLDANDYSVLISFAGDEKYLPSNATVNVTVNKDIPQIIASNLIADYKSDDYLIIGLEDSQSNPLAGFDLSIALNGIDGDYDVYSTDSNGIVKVPIKDLAANDYIASIVFKGNANYDAINSTVKVTVEKALSSLFALDLVTVHESDDYMIIALKDSCGNPLVGFDLSVDLNGIDGDYSFNEVYSTDSNGMVKVSTKDLDANTYDVKVKFDGNENYTESNITGSIIVREDIIIVPNASIAFTANDSSVSAILSNLDGVPISNASLDISVNGDESTLITDANGRVAIKINGNSTVIASYKDENNLSTTGYLNVIVKDNITVVEKNNTIYVNQTVEVPVYINQTVEVPVYINQTVEVPVYVNVTPNRTATMIVYNNMTTVAVAKVDGRVGEYFYVSLKDAKGNPLANKLVQIGFNGRVYDRTTNATGGVGLQINLGNEGKYTFAICFLGDDNYTGSFEVALITVSKHSPKLTAPAKSFKASAKTKSLTATFKSSNGNPISGKKLSFTVNGKTYTGTTNAKGVATVKISLNKKGTYSCTVKYAGDTMYKATTTKFNVKIV

SEQ ID NO: 6429 - protein, 312 aa, Methanobrevibacter ruminantium
MLSISTIKTYMFCPLKLYFQSEIDEIYDEEEYFVPKTLKDLRIDIQDLLHKNLRLVKKDMELKEIEETLSKGVFNQIETTFEIIEELNETKKEKERREKSSIYKDSNIEFLDEDRQILNASLEDNDGTLEDLDNEEDEIKKLKDEIIDEVNLNLKILSLKASQAMKNLEKDGNEIQNLFFQSSMYNTLIRDLGIDLIGVIDKIEVEKGKYFPILLKTSNPPSKGVWQSDEIELIANALLVEGEFNTYITVGFVEYLKIGERRPIVIDTFARKKFFKLLTKINKIVEDGEIPHVKTSVKKCRNCEYRELCEKA

SEQ ID NO: 6430 - protein, 219 aa, Methanobrevibacter ruminantium
MSSISLTITTKEEKGVLDEITDVLTSHGVNISYVHLYVKEDVGTLNLELENINELDELIRDLKSKDFILDIEIHGSLNDIFGKRVLIFGGGAQVSQVAVGAITEADRHNIRGERISVDTIPLVGEANITEAVEAVSRLPRVGVLVLAGSLMGGKITEAVRKIKEEHEDIIIITLNMPGSVTKEADLIVTDPIQAGVMAVMAVASTAVFDVKRLKGNNKF

SEQ ID NO: 6431 - protein, 87 aa, Methanobrevibacter ruminantium
MKFVIRPYHMMSLGGYIVEYDFPYRDIIIVNKTSEHIKFEIPVFDESWIEETRALGLEVIPVRKEDSYLNMYRKAHADLDAFKAKLD

SEQ ID NO: 6432 - protein, 332 aa, Methanobrevibacter ruminantium
MSYEISLISILEVVLTLIIALFIGVLIPGIERKYVQARIQQRIGPPVTSPGLWASIKFLYKENIQPNSMAPGLYKAMPVLCFIVVLAIFLVLMPYNYQFMAFSSLIAIVGFLKVEEVAYVLMGSLSESVMSANLRFPDHIKGAARPDSLVSSIEDISSKRSLRMIVFGSFPLYLALFVPAALSKSIYLADIVAYQQANGPFLFTLAGIIGAVVFFVGYMIILNEYPFSYIKAKSDVIEGPYMELASKYRSFVYVTRGFLIFTLGLVFSVLFLGIPPVLFSWKFIAAVIVSLILPVIMASISAFSPIFTNKQLYPTILLVSAMGVLAIVIALF

SEQ ID NO: 6433 - protein, 391 aa, Methanobrevibacter ruminantium
MEEKKAKKQEIIETEIQMGTVHPAALEPYRVRFFVEDEIIKDAEITIGVNHRGIERVMEGLPVEKANMLTEKICGICSNSHTWNSVRTAEKGLGVEVPDRAVYIRVIVGELERLHSHLLYLGHGCETLAHETFSMRVFYIRETIMDLLAMIGGNRVQYGCSIIGGVRPRCELDDNRIQRILDGMDLVEKNVLDFANRFVKDSVVASRISGTGYIPQEQALKLAVSGPTLRATGVKRDLRTDMYEYDNFDYDIITQDTCDVQAQLLMRVFEIFEAIKIVRQAIRDLPEGKITDRSWEMIDTDLIESYIEVPRGTLYHSYAIEDGRVRHCIIRTPSMSNIGAMQYACIDNHITDGQLCIVQCDPCFTCSDRAIEVYDTNYNKLDKSILKSNIH

SEQ ID NO: 6434 - protein, 148 aa, Methanobrevibacter ruminantium
MSLKTLSRSKAIHIMLVYTGGCNGCDIEIVNAVLSPKFDMEQYGVFLTWNPREADILVVTGPVTYDNRKPLEDIYNAIPNPKLVVAAGSCALMGGVYKNCHGDIPSEEIEGPVENVIPVDAKVPGCAVRPQDVLAGVVAALPHLLNAD

SEQ ID NO: 6435 - protein, 222 aa, Methanobrevibacter ruminantium
MKDVIKIMLNGTYTNFKRILFASDRVTDMELRNAILTGTVEPDKKVDEQACIGCGGCANVCPTGAVTMKPLQTPVKIKEGWVKTEVPELDPFKCVVCYWCHDFCPIYSFFEEAGTIHPGNVGEINIDTAELLSEPIKISQEKISFIAQYLSDKSLLSENIVSDADEIENVGAGLERVSKIKDIQDNINEKYEKDAKRSSALADDSNESSSESDESSKNEGGE

SEQ ID NO: 6436 - protein, 486 aa, Methanobrevibacter ruminantium
MYLTTNKCDGQGDCIRNCPTEAIRFVDNKAFSCMCCGACFEACPNHAIFKNKYGGYVVDRAKCNGCGVCQFTCPIESIHIDNGIVKGICSRCGVCEDVCSRNARTDTDNLVLDKQKVLLNSMKMVANTVGYRAGVKKIENMKLPVKSDKSADRVCVSTDMEKCVKCGRCAYYCPTRAIEVIIQDEGFCVGCKICEDLCPTGALKDGQYDKNLCTLCLACVENCINDALKVKDFKIVRNIKDSSMDNPLCSNTKGTIVSCLNCGLCREKFDSPALIKKENALRYDPSQDKDSEENNEKRLEAIYNCPVSTLSENEDNKLFGYCVSCGKCTQVCNEQARSFQTISWDGEVSDDCISCGICAELCPKEAISLKRGTINVDLDKCIMCETCGIHCPTDAIPKTTSTKYKISGGFNYIDENLCVKCGLCKDICGEEAIYTVDISNEDVNLGTKNKNLRFVVDDDKCIYCGACMNICPSKSFIFEREFNRVN

SEQ ID NO: 6437 - protein, 92 aa, Methanobrevibacter ruminantium
MFVLANLLIGPIIISVIFGFVLGSRIHLDEKNSFKFTASGIIALIIGALIVSYGIGQFPYYNDLPIATTFLGALFGLLIGSALLGGRAKGDH

SEQ ID NO: 6438 - protein, 174 aa, Methanobrevibacter ruminantium
MAEDKDLKTTKKSPNWNKDESSPILKIMVLPISFIIASLGIMVILGGHITPGGGFQGGAMIAGAIILSVVVYTVNGSPLKLSHRFISLLESVGALAYVLLGLAGLALTGSFLYNVGGNLYGLVPQAIAAIFKYPDLTNAGMVPYLNIAVGLKVLVGLSAIVIAFSQFKKLAEEE

SEQ ID NO: 6439 - protein, 131 aa, Methanobrevibacter ruminantium
MSDKTSIRSILMVVATIIFASSLFDALYGFKNLIQPGISLVYTAIGTQLAPNMVTLVVFDWRGFDTLGESLILVTAVLVVLLIFGKGKILDKNVNADNGTADSNLTHEADLEIGDSDLELDGADLNEGDDE

SEQ ID NO: 6440 - protein, 111 aa, Methanobrevibacter ruminantium
MTLYQKFLDSVKELKSSFSKDPTTMNNVSGAMAAEFLILVGLILAALFFRHINIAACIVVVILAAILFFTNMPLASKIKSEQSDSLEKMLFYVLIVLGILISVIYWGLKYV

SEQ ID NO: 6441 - protein, 493 aa, Methanobrevibacter ruminantium
MNYLIPLMVVIPILAALIVNILGGKDKTVKAFSIIVGLAIPIIAILAAIGVQYFGGHDPGLLANSLPSNLVGTLVASYNTGIVYIFDNIERIFIFLMGIVAFLSIFTYFTEKKEVSGPYLYLIFMGLASVIALLLSNDIFNMYVFFEITALTQVGIIVASSTEDNYEIALKYLILGSIGGPMLLLGVGFVLGTIGSVNITDIIYAISNNFVDPYSPGLVIGFALILFGWLYSAGLPPFHTIKSAVYSKARPNGSAILQGFSVLCMLAFGIAMYKIFAYIPGFNTAIIVFAILAMVLSIAMSAMEVDFRRMIAFLAVGELGFIALGFGIGTQMSIAAALFQAANEIVITAMLFIGFGSIYYLTNTSDTRKLGGLIGVDSLMGVMILLGGCALAGVPPFNGFVSKLMLVQAALEAGYTELAILAVIVSVVIFFTFVKAFHSVFLEPKPKDLKFVNEKIPRVTVFSVAVLLIICLALGLFPNIVTDVFIPFAGGLI

SEQ ID NO: 6442 - protein, 122 aa, Methanobrevibacter ruminantium
MIMDIQLASLFASGALIIIGLIAAIFIDNIIKKIIGIAFIEEGVNLFLICLGYKAGGVVPIFLPGMTADWFAQNSAYPLPQALVLTSIVIGASTLAVMLALAMVLYRKHGTLSAKEILGDEK

SEQ ID NO: 6443 - protein, 76 aa, Methanobrevibacter ruminantium
MIEYIIIIVAVISAIIALLQEDLLKSAILVGISGFFIAVLFHLLLAPDVALTQAIVEGAIVPVFIALAVYKTKGGA

SEQ ID NO: 6444 - protein, 188 aa, Methanobrevibacter ruminantium
MALGLEGMNLITIIQSILLIISALIIIIAAIGILRMDKDMPNVVYARIHILGMIDVAGIIAFIGLGQPLFALIYIFLAPLLAHALANAYFHAEDDLNNPVLNPNLLNEESDESELEESVDVAEQDGEEPEESVDVAEQDGEDSDSEETSENVEEDSDSEEEASNEDVDNKTTEEDVENLNNSEGDDND

SEQ ID NO: 6445 - protein, 88 aa, Methanobrevibacter ruminantium
MIMELLLISECFLIIALVVFLFASMRIITYKTVSMGLIGTSSLTLAITLILICVGMMWGIEFFKDIALVLLLLGIVGTIAYATFLRRA

SEQ ID NO: 6446 - protein, 104 aa, Methanobrevibacter ruminantium
MFLSRIYYAIAYLVVLILEIIKATIDMAGRIFKGDQYDPIVIDIDTELKRPISQTILANSITLTPGTLSVDLDSESQVIKVAVIAPRDVKDIIPFEPYIKGMLE

SEQ ID NO: 6447 - protein, 245 aa, Methanobrevibacter ruminantium
MSSYKGHTIFAFILSLLMFYDPFAIALAVIGANIPDFDHEFKRNHVLIIISIGMILSIFLYLLNLPIYLGLIIALLGLIFLLSSHRGFTHSILGAVVISIAIFLLVYFGMDLSSYFNLNTITNIPLNYVILVGILIFLAVLFLNKQLASIFILLMLFFITLVYFGIVPVFKINVYSLIFSVFLGLFSHMILDSFSPAGIKPFSPFSDRKCYKKLGLLLFALIIALYLILFPNKLDFYLNLLPHFY

SEQ ID NO: 6448 - protein, 248 aa, Methanobrevibacter ruminantium
MTQEKNNLDLDHISYETGGFISANKNILNNLNLTKNTKYILKESIKGTPIIKLGTNYPKVMMVAGIHGNELAPQISALNLIDQIHDLDLLGTVYIVPFACPKASMLNSRYFDGKDLNRTSHIEGSVGDLILKKAVELEVSAIGDFHSSAPNSNPGKEGVFCTEVPTMASFRLADFISKVTGSEKIVYSSAGIPFKGALEDEANLKGIPAVTCEVLSAIGYANERICYRSIIQMKAFLQYFGFFDRYME

SEQ ID NO: 6449 - protein, 391 aa, Methanobrevibacter ruminantium
MEKVVLAFSGGLDTTVCVKLLEEEYNYEVVTACVDVGQPQEELEKSQNSADNINAGKHYIIDAKDEFAEEYIARGIKANAEYEGYPLSTALARPLIAMKIIEVAEKEGATAIAHGCTGKGNDQFRFEAIIRSMSDFKVIAPIREMNLTRTEEQAYAKEHGLNLSYDKIYSIDENLWGRAIEGDVLEDPANEPPEEIYEWTKSAEDAKDTPTKVAIEFEEGVPIAIDGEIMGLVDLINKANEIAGENGVGRVDIIENRMIGLKSRETYEVPGAKLLIAAHQALEQLVLTTDELRFAQYMSGLYADLVYSALWQEPLREDIDQAIDHMQRRVSGKVVMKLFKGSIQPLSRESPFSLHSIEQITFEDKETEQSEVEGMIKYHGLQAANYQKLNR

SEQ ID NO: 6450 - protein, 220 aa, Methanobrevibacter ruminantium
MPNTGRCKELLVEDAVVYLRPSDNPNRKTKYSLYYVENNGALVAMFSQEANKIVFDAINKNKVKELSNYSIIESEKTIGSSRIDIYLANHKSNFKDNADSKSIGEDSKEDIIDETYVEVKSVTLIKDGVAQFPDAPTDRGRKHLEELISLKKEGIRAVVFFLVEHPNGNSFRPNWENDPKFSETLVKAYDEGVEILVYKTRNDFEGIELVGDCLDFNLNK

SEQ ID NO: 6451 - protein, 522 aa, Methanobrevibacter ruminantium
MDPIDMMATDYNCEYLGLSRLCLMENAGKSISDEIAILSTYKYSRPVKIVIFTGSGGNGGDGFVAARHLLNRGFEVDVYALNTADQIKSGDALDNLKILMNLEPRVSRLSVQFIKDSADLDKIKLDNNSPCIVLDCLLGTGIKGKLREKVRKTVELINAINGLRVAIDVPSGLDPLTGEIADIAVDADYTVCFHKVKTGVKLAGEGKVGGIITCDIGIPIEAELFVEGGDLLRLNNRPSSSHKGNNGKILIVGGSLDYYGAPAISAKASIATGADLVYIYTPKSAALPIKSFSEDFIVKEAKGDYLSIDDLDDILEMASKVDAVLIGPGSAQNEDTMKLFNVLAMKIDKPLVLDADALKLVDFSLINKKEDIIITPHYSEFKSFFKNQIPRDIERNLDNIVNLNDDSDFVKVNDKIDALQSITASFDGSVILKGQYDFIFNKNKLKINRTGNPGMTVGGTGDALAGIAVSLLSQGLDSWTSAILAPYLNGKAGDLAMDAQGYGFGAQDLTQYLGAVMANLID

SEQ ID NO: 6452 - protein, 386 aa, Methanobrevibacter ruminantium
MKNRNVWRIIMSEIKKYMEDLKKNKTGLKGILVIILIFAYGILGSYYIMNLNINNSIYYTIITIATVGYGDIIPVTPLEKFFSTSLALTGIGLIAYIFTIIITSFEENLHDIRSGRHMEKRLAKMEDHYILCGFGRVGTAVYEELMKRNQKVIIIEKNEDKLEDIEETENVVPFNANATEDKTLKKLNIDKSLGVIVTTGSDVDNLFIVLTTREMNKDAWIISRASKKENIKRLKHAGANKVISPEVSGGTDIYFAAVQPNLVHITQKHGIDYLEREFEILKKHNCHLENIEYHFPGIKTPVTRTIGVLDEEEKDHFIDMVKNNPEVHESMDVMYETVNGVHSHWISGPDKSHVDMVIEELKKEGNLLGVNLDFKEINEFTKQFKE

SEQ ID NO: 6453 - protein, 188 aa, Methanobrevibacter ruminantium
MKEYLSETKSIDYMNPIIQEKVKELKEQSSDDADYIKRAFLFVRDEIPHSWDIQTNTVSRTASDVLKNKTGICWTKSCLLAALLRANEIPSGISYQLLTIGEDDSFGHMIHALNTVYMDDLDKWIRMDARENVGDDDEEFSLDKDYLAFSPREEFGEVDYQDNNPDLDEKLINLLEKTENLLEMELDF

SEQ ID NO: 6454 - protein, 295 aa, Methanobrevibacter ruminantium
MEINGVEIKETYAEGFGIKVTRILVTAATAKLAKIAATEATGYATSVIGCPAEAGIDCFVPSECTPDGRPGYAIMICHASKKALDHELMERIGMCVLTAPTAAAFNLLESEDELKTAFKLKYFGDGFEKDCCIDGRKVHSIPIMSGDFIVESTFGFKAGVAGGNFFILAKDQITGVKAAQMAVAAIRNIPGTITPFPGGMVASGSKVGSNKYSFLPASTNEKMCVTLKDQVDSDIREDAEGVFEIVIDGLDEESVKKAMKAGIVAACSVDGVLEISAGNFDGKLGAYILNLHDLF

SEQ ID NO: 6455 - protein, 423 aa, Methanobrevibacter ruminantium
MKNKKLIIFLIFGLAIMAAMLYFIGIDQVVDALKYSNLWFVLLAVLLQIFTYFLYTWRWQIINKSAGMTLGIWKLLPMVLVSLAVNNITPSGRGGGEPVRAYLLAKEGHYKFEDTFATVIADRALDTFPFVILAILTIIAIIFSVSLPVYWIVILVLCVVGITAIVILLLYVCINEAFGVRLTEWILKITKRFYKNYNDALEKRIVEAVASFQSTMNALIRDKNIIYYALPLSFIIWVFEILRVYVVFLAFGAKVSPIIIGEVFILASLVGMVPLLPGGLGAIDGVMILFYSRSGITASLSAAATVVERSISFGMTTILGLIFLMKYGTSILDASFKLAESEKAENLEEITEDEQKILDQLSEDGDKSEDSDENREEAVLEVLDGEPSIEVVDEEPTIEVIDDEPTIDVLDEKEEAIDEKVKN

SEQ ID NO: 6456 - protein, 496 aa, Methanobrevibacter ruminantium
MKRKYITKADLFIVLHYLGYIMQGLGVVLIVPTLVALIYGEYDPIAPFMIPCFVSFVLGTAFSKKFKDYTKLRLKHGMLISSFAWLWASLIGASIMVLSLGIPFVDAIFENMSAWTGSGMTFFVNVEVLPKSILFLRSLEQWLGGLGIVIIFIGILIRAGTAASRLYKSEAREEKIKPNITNTLRKALEIYLIYTAVGIFLFILAGLPIFDAINITFTSISTGGMSIKNANVGFYQDSIVYLISMFLMILGATSFTIHYKIVKTKGKALFKDVQFQLLITLIIVAGAFFIATNKMVPIEELFTIVSAVTTTGANVVDPHVLATWNGSTLIVLMVLMLIGGSSGSTGGGLKLIRIITVLKGMNLTVTNLVSPEGRVVNTRIGGKKINEREIKEASAYIVTFLMFLVFGWIIMTMYGYDPFTALFDVISIQSNNGLSTGIVYGGLPLPLKLTLIFLMWIGRLEIIPVLVLFRTFYGLVNPKRRIKQMKKTNGNDKKTN

SEQ ID NO: 6457 - protein, 224 aa, Methanobrevibacter ruminantium
MYIVIMGGGRVGLSLADRLIIHGYDVTIIENNDELCDHASEELDAMIICGNGTDTKTLEEANIEEADVFVATTGNDESNLLSCILVKEYTNGKIIARVSNPDHEEAFKKVGIDKVISPERTAAGFLEKVITRPNVADLMAFGAGNAEILDMTIQNPKVFGKKVSEFSPTKDYIIISKNNDNHELEIPQPDDILSNGDKISILVKRNAFEKAEKKFMGAGGLFGF

SEQ ID NO: 6458 - protein, 215 aa, Methanobrevibacter ruminantium
MEKIKNVYCIEGLMADSNSYLIDNNDGDGDYNYILVDTGTGQSNAFLFSQLGEIGVKPEDIDLIVNTHCHFDHVGGNDFFPNAKIAIHKKDAVALRDPDSELTVSSLFGAIVRKHDVDIELEEGDKIANFDVILTPGHTSGGISLWDGEILICGDTIFANGGVGRMDIGGSPIDMKDSLMRLKEFDVEYLLPGHGPWVKNGKEHVKMSCLNMGIR

SEQ ID NO: 6459 - protein, 112 aa, Methanobrevibacter ruminantium
MRAPASGGATKKPLPDVVAGNGKIYLAIEVKTTTKDKIYIDHPQIDALIEFSDIFGATPYLGMKFKYTKWLFLAPENILKTKNGNYKIEKDYCLEKALELDEICGFDTQVKF

SEQ ID NO: 6460 - protein, 343 aa, Methanobrevibacter ruminantium
MNFLNENHYRDSMNEIDSIETLELINKANSLSLKKGYTEISLERAVFLSWWCDKGDCKFCYMSTQKDKIKDPKKARRRVNNILAEAEMCSRLGWNIEFLSGGYKSFTTSEIKSIAENIHSITGDGVWLNTGITDELEEYGKEIKGITGAVEAANPEFQREVCPSKPLNQISNMLDKAGDLGFKKAITIILGLGESLEDVEYLKDYIKEHKIDRVIFYSLNPHPETIYVNSSQPASLYYANVVSSIRLAFPDIEIICGTWIDNLANIGILILSGANGITKFPLFKMFGTKYGKRVEEEVKWTGRTLKGTFTDKDKLGPEKSQINPEFDQYIKRYIKESLKNKYQ

SEQ ID NO: 6461 - protein, 451 aa, Methanobrevibacter ruminantium
MMCGLEIHVQLETDSKLFCNCPTNYQEAPANTNVCPVCLNQPGAKPFPTNEKAIENALMISLMLNCKIDKNFTYFMRKHYDYPDLPCGYQKTSVPIGYEGELNGVRIREIHMEEDPGQYKPDRGIVDFNRSGIPLIEIVTEPDMHSPEEARNFLKELIRVLQYSGGARGEGTMRADVNVSINGGNRVEMKNINSIKGAYKALNFEVIRQKNLMKRGVEVKQETRAYLESQMITVSMRMKEDADDYRFIPDPDLPPMKISDEQIDKVLDIMPEAPHNKVKRFVTDYGIDEESAKVLTSELDLAQCYEEVAKEVDPVFAAKWMRDELKRVLTYNKLDFADSGILADDLIELFNMLQNKEITTKAGQRVIEQMPNSKQTPREIAEEMGLIGVVKDDEVLAAAKQALEENPKAVDDYHNGEKASLNFLMGQVMRLTKGKADPRETVKILRDLLEE

SEQ ID NO: 6462 - protein, 283 aa, Methanobrevibacter ruminantium
MEGKTMEQEKAAVRDYMTKNVITVRYDSLNNDVIALMKETKHDGYPVVDEEGHIVGIITAYDLLLKDWETEYVKSIMSQEVIVAREDMHINDASRVMFRHGISRLPVVDKERHVKGIMTNTDIVRSHIERSTPTKVSAFRETMEKLYDIKTTLTREQVPVDKIKPTQDRVYADELQGRTYELEKGLAEPTIVVKTGDRYILVDGHHRAVATVQLGLDKIDSYVVDFNQDITLGMEKTAEKQGLKTFNDITIIDDDQHPLIALTETIKTANQKQKISEITKNKN

SEQ ID NO: 6463 - protein, 95 aa, Methanobrevibacter ruminantium
MDEKILREVYNVLESRRDSPIDSYTSNIMKDSDKKAEDKILEKIAEECGETIIASKNDENLVYESVDLIFHTLLLLVYKGVEFDEILEEFDRRRK

SEQ ID NO: 6464 - protein, 215 aa, Methanobrevibacter ruminantium
MFILIFRDFDPEIHDVYKVAELIYDVDYRTFVHVFKSKEEGVEAIKNRLTFEFAEDREDENELFYLFFDDEDTEEKEIIGMFNGGKGVQHSLFKDILEQFKHLKFSEALGLSKVSFMDNFVLVDVGDDDFYICELAICSNQRGKGYGTEALDQLIQLARDLNCKRVVLDADFRNDGAFRLYSSKGFKVFNKKSFGFPGKKRGMRNMELILDNARE

SEQ ID NO: 6465 - protein, 271 aa, Methanobrevibacter ruminantium
MMKKILKRLAEGEISIEECETLLRAENIRQLDDIANIDISRKDRTGFPEAILADSKDYEDLLAIVKGFFDDEFDLKDNIIITRLSKERYGLLSQDLSYLLDNGIKFDYNPRARILVIYKDKLVDFNPEYGKIGILTAGTSDIPIAEEAKVIVEQGGCEVLSSYDIGVAGIHRLFPKIAYMVEEDVSAFIVCAGMEGALPSVVAGLVDVPVIAVPTSVGYGVGADGKAALYSMLQSCAPGLSVVNIDNGFGAGVYALTIVKNIAKKVKMSKE

SEQ ID NO: 6466 - protein, 815 aa, Methanobrevibacter ruminantium
MESIKVLVEGIVQGVGFRPFVYRIATELELVGYVRNLGNVVEIILQGTDNQLADFIYKLQNELPPIAKINNLRTEDIEIDSPYTDFTIKESSDSFSGTSVIPPDLAICDKCLEEINDPQNRRYKYPFNACTDCGPRFTVIENVPYDRDKTTMDDFPLCDECEIEYKNPLDRRYHAEASCCEVCGPSLKLMKNETEEGISTDKEGNEIKAMKRTAIDTESNDPLKDTARLLDEGKIFAIKGIGGTHLVANVKDEKAVSTLRERLGRKNQAFAVMSPDIETVRTFAIVSDEEEKTLLSKERPIVILKKSKDYDFAESVSPRLHNIGVMLPYAPLHHLLFNETDSPAYIMTSANVPGEPMMITNEEILQNLDEIADYYLIHNRRILNRCDDSVARFRNNELAFIRRSRGYTPEPYDLKGKYTDINPDFDNLNILALGPELDVTFTILKNSKAYVSQHIGNTNKYRTYEFLQEAIKHMMRITKTDSFDAIACDLHPQFFTTRLAKEYAEKYDCPLIPVQHHHAHGISLLNDHYDDNDLNEMIIIAADGVGYGADGNSWGGEILYTDIKGFERMASLMPQKMPGGDLCTKYPARMMASILSNPESDYENEKYTKEYIEELLNNNYLDSFKHGSVEIKSLFRQMETNLNVGINTSTGRVLDSVSTALHICDERSYEGEASMKLESYAFEYKGEGSLDDFPIIVKEYEDENGKRLILDTTAILRYIIDKIEEGEDLHKIAAAGQKAVSIGLAKLAIESAKEKGITTIGATGGVFYNEAITDYIKTYIEKEGFDFIQHINSCPGDGSVSLGQAIVAGTNLNNF

SEQ ID NO: 6467 - protein, 165 aa, Methanobrevibacter ruminantium
MKRKVIMILAILLAVGMTLTAVSAEDSWSFNFSSEENSDGGSINFENGKLTIQGIEFTIPDGYEMDESSKKVAEDAEDFDAKYSACKFTKGDDEIVVNVFFTDGDFENLSANNADQVEKTLNDIKGLYEENKYGDNTPTFTYIEDGKVVKINAPNDEIIESVMGK

SEQ ID NO: 6468 - protein, 280 aa, Methanobrevibacter ruminantium
MKKSSIIIFFAVFEIIAILLFITLNDIFYLFNFTYIGACLSIGLYLYNVDSKYSKYARNFIQLAIGLYMLVYLGIISRENMMIEGFWYYLFLGVFEAAVIHYLVAKILGPFLFGRGWCGYACWTAMILDLLPYKTPNKNLDHERKNFGFIRYILFIASLIGVGLLFMMNVPNLSTVMFYLFIAGNIVYYTVGIILAYALKDNRAFCKYICPTTVFLKIGARYSLLKVKYKRENCISCNKCYRVCPMDVDICNNDKNKKNGTECILCLSCAKECGNDALFL

SEQ ID NO: 6469 - protein, 171 aa, Methanobrevibacter ruminantium
MENEGQNQQNLNDVDMEAILDVMGCKTRRDIMDLLREEPRFVSEISQELQIGQKAIIEHLRAMEDIGILTSSTKKVVRGRPRKYYDMPNDVNVNITITKNTFNVAISQDMLNANHVPQLPSGDEWSKLLDIEKRIDQGHTEAIEELKSQIRLYDNLKERAEYILERTYNKY

SEQ ID NO: 6470 - protein, 230 aa, Methanobrevibacter ruminantium
MANKKEEEKEEESEDAKKSTKDKIKSKISKSSDDSSSDNEESSSDKEESSKDDEKDKELAKLNEDLEKKDEEIGELKSHIQRLQADFDNFRKQNDKQKQDLIRFANEGLIVKFLDVYEDMERALENSKTEEELREGLELIYSKMKGTLEKEGVEEIPAVGEKFDPFKHEALLTVDSPDHENNEIVDELMKGYTLKGKVIKYSKVRVCKKAKKAEINKAEEAKDDEDKKEE

SEQ ID NO: 6471 - protein, 631 aa, Methanobrevibacter ruminantium
MADAKKEKIIGIDLGTSNSAASVLVGGKPTVIPSAEGASQYGKAFPSYVAFTEDGQQLVGEPARRQAVTNPENTISAIKRKMGTDYKVTIQGKQYTPQEISAKILQKIKKDAESFLGEPVEKAVITVPAYFDDNQRTATKDAGTIAGLDVVRLVNEPTAASLAYGIDKQDDDDDVNILVFDLGGGTLDVTIMEFGGGVFEVQSTSGDTQLGGTDMDNAIMKYLADEFKAETGIDLMNDDQAVQRLREAAEKAKIELSTTLTSEVNLPFISMGADGKPHNLINNLTRAKLEELVDPIVNKCGQPIKQALDDAKMTKNDINKIILVGGPTRMPVVQKFVENYIGKPVERGIDPMECVAMGAAIQGGVLAGEIKDLVLLDVTPLSLGIETLGGVSTTLIERNTTIPAKKSQIFSTAADNQPSVDIHVVQGERKMAADNTTLGRFQLVGIPPAPRGMPQIEVTFDIDANGIINVTAQDKGTGKEQSITITSSTKLSDEEIEKAVKEAEMNAEADKKKQEEIEVRNNADSMIYTAEKTINEEEIKDKVSDEERTNIERLVAELRELISGDDIPAIKDKTDELTKVVQDIGARIYQEAAAAQQAAQGAAGGAGPDPSAGPSNDDDDGTIDAEFEEKD

SEQ ID NO: 6472 - protein, 391 aa, Methanobrevibacter ruminantium
MRKLAEKRDYYEVLGVDRTADEKEIKKAYRKLARKYHPDVAEEDKKEEATEKFKEISEAYAVLSDEEKRQRYDQFGHAGMDGFSNEDIFRNVNFEDIFQGFGGGGGFEDIFDILFGGSSRSRHYNAGPRRGGDIYTETTITLEEAASGVEKDIKIRHDVLCPECGGSRAEPGSEVETCPVCGGTGQRKQIRQSLFGQVMNVVQCGECKGTGKIIKEPCHNCKGKGTVKEDKTISVKIPAGVETGNRLRVSGEGHAGDLGGGNGDLYVEINVKPHKDFERDGANLYYEKQISFVQASLGDTVDIPTIDGAVELKIPAGTQSGTVFRLKEKGMPQMRRSTKGNLYVTITVVVPQKLNKEQQKLLRKFAQISGDEISVYKKGIFDKVRDAINNP

SEQ ID NO: 6473 - protein, 256 aa, Methanobrevibacter ruminantium
MKLMMYSIKMRSAKGGPHEEGGKHISGAERILREDEIEEELINVYRRAITHEKGKPDFINLKIEAIDEDKILYKKRLNIIQHKVSSKEEGLKLAKELLIKNTVSEEAAKEGISSIQKLKESIHGAMLLDKDSGKRIDDKGIKGVRVTGIASADIKKYKESLKRDGREGLHLEEALILASKIASCKAIVAELCWSDDPSYVIGYVGTKENYHRIPILKDKGNPVGGRVFFVDTSQLNDNYTLEDLIDYLEKQIVLIE

SEQ ID NO: 6474 - protein, 414 aa, Methanobrevibacter ruminantium
MNPNLEMKLKEELEELKNNNLNRTIDDLRFISSTKAIDKDGKEFLVFGTNNYLGLTHQPDVINASKKASTYGTGSTGSRLTTGASFEARELEENLSKFKSTESTLIFNTGYMANLGIIYTLTKEDDIIFSDQLNHASIIDGTRISKAKVRVYKHKDTKDLENLIQTEIKELKEKNINSSNFFIVTDGVFSMDGDIAPLPELVEIANKYNCCLIIDDAHATGVIGKTGKGTVEYYKDKTGIDLTESVDLQIGTLSKALASEGGFVCGKKTYIDYLINKSRPFIFSTALSPSTIASANAALNLLKKNSNEYLTKLQNNTKLMRNLLKEGGLNVIDGETPIIPIIIGPADLTNKFSKELEKEGILVSAIRPPSVPKGESRLRLTVIATHTKEEITFTAKTIIKIWNDLKKKLEYENH

SEQ ID NO: 6475 - protein, 3176 aa, Methanobrevibacter ruminantium
MNKRIFLYIALIFIISLLSFSAVSANEDISSDNLILDENVYDEKIILDDVQDKNIISDNDYDDVIPVENANDNAILAGNDEELILDENNSEISEDNKNDKTKLSDPNTYSFTRLNQAINSGASVINLTDNYQYTEGDESFIHGIMISRSITINGNGMTISGSGVARIFEVFTSNVIINNITFRDAYAEGDSNRQNYGGAIFMYGSDSIVQHCKFINNNANNAGGGAIVLVGSNSRVEYSDFTGNNGQNGGAVYLYGNNTKAIYCNFTSNNASEKGGAVYTYGSDITVEFCNFTNNSAYLEGGAIDWEGERGTVKHSSFANNTANNNGGAISWYTANGTVEHSNFINNRMATFGGAIWWYGEKGTVKHSNFTNNSGRNGGAIQWSKNDGTVENSNFTNNTAILAGAVRWVADNGTIKYSRFINNHGYSAGAIDYHLTYANISGCLFINNTSDYRANVYEDLFESKSYSNFNNNILLNNGGNEINFNTSEGFNADYNWFGDNSLNYLDKPNIYSNTWLFLQPIVNHDSVFLGESCEITFRLYSYDGTEVHEYDNALVYPIKLTLNSNYGNVNDTVGLEEKAIFTPQTLGYTSVDVYAEGSYIGSVPINVYVPSFSDLNRTINGNEDSIITLNKHYIFDPETDAAFINGVIINRTVTINGNGFTINGSNNARIFQVTASNVAINNVTFANGYANGSTDEDKDGGAIHWSGANGNIENSTFYNNHATGAGGAIIWQAQYGNVSTCLFINNTADDGANVYHNNYPSDSHSNFNNNIMLYNGNNEVHFTVYNGSNADYNWFGHNSSNYNDATTGIIGDIWLFLNATANPDTILISNSSEISYKLYAYNGREIQEYDNHLLYPITLTLSSTNGIVNDNVALEEKVIFTPQNLGTATVTAKAAGTDIQTISIKVFEASFSDLNRTINGNEGFEIILDKNYAYIPEIDAAFINGINITHTVTINGNGNTINGLDKARIFQVTAPNVTIDNITFINGYANDDGGAINWQGPNGIIINSEFINNHATSAGGAIRWFAQYGNVSACLFINNTADDGASVYYNDYPSDSHSNFNNNIMLYNGNNEVHFTVYEGSNADYNWFGNNLSNYNERPTGFDGNVWLFLNATANPLTISISESSEIRYKLYAYDGRNILDYNRTLLYPINLTLTSLNGNIEDITEDKAIFAPENLGIATVTTKAEGIDIQKISINVLYGTIFYGSFSDLNRTINGNEDAEITLDKNYAYNPEIDTAFINGIVINRTLTINGNGFTINGSNKAPIFHITGDNVTINNISFVNGYANAYVNGYDGEDMRGGAIYWQGRNGKVTYSNFTNNNANDGGAIYWFGTDGIVEYSNFINNNANDGGAIYWFGTDGIVEYSNFINNNANDGGAIYWFGQNGNVENSVFTQNHAGSYGGAIYCSGAESIVEYSNFTNNNAYNGGAIYWFGQNGNVENSVFTQNHAGSYGGAIYCSGAESIVEYSNFTNNNAFNGGAIYWFGQNGNVENSVFTQNHATFAGGAIYCSGAESIVKYSNFTNNDAIKGGAIYWNGRNGNVENSVFTQNHVDNDGGALYWDDSEGKVTSCIFVNNTAETKHSGHLILPMGRGGAIYWNGRNGNVENSVFTQNHVDNDGGALYWVDSEGEVTSCIFVNNAADVEASVYYNERGAYSNFSNNIMLNNGKNEIKFKIFDRSNIDYNWFGNNLSNYNEKPGGFEGNIWLFLNATVDPNMLLLGESSEITFRLYAYDGTNVIEYDNDLIYPINLTLISSNGNINETVGLEETAIFTPQNVGTAIVTAKAEGFDIQTVSINVRAASFSDLNRTINGNEDAEITLGKYYEFDPETDGAFIHGIIINRTVTINGNGTTINASGKARIFQVIADNVTLNNITFTNGNASGEGADRSGGAIRWEGANGIISYSNFTFNHAYLTGGAIIWSGENGTVKHSSFSQNDVDGSGGAIRWAGAKGTITDSDFYLNSATDAGAIWWLGAYGTVKYSNLINNHAGSRGGAIMWSGENGNVTYSNFSLNNGGSGTGYDGGGAIFWDHLNGTVSYSNFSNNHINGHGGAIAWHEQYGNVSSCLFVNNTATDGASVYHNDHSESYSNFNNNILLNNGENEIHYDVYDGSNADYNWFGNNGSNYNEKPAGSVGNVWLFLNATADPNPISILGSSDVSFKLYAYDGLDLIEYDNNLLYPIILSLSSSNGNINDTAGLDEKIIFTPQNIGTATVTAKAEGIFQTLSINVYPPSFSDLNRTINGNDDDEITLDKYYEFNPELDSAFIHGIIINRTVTINGNGSTINGSSKARIFQVIAPDVVLNNITFANGNANGENEGGYGGAILWEGDNGRVEDSTFINNNASGYGGAIFGGNCSDNVIFQNNHAGIEGDDWYVPKPVISVNDFTSTYKSGEKLYVNVSYVGTQIDGINVTISVFDSSNQLIGNYSCLSGDGWTVDLDAGNYNALVFVDSDEYGYGEETIALTINKRASQISANPLNTTYNGNENIIMILKDNYNESIANATVLVDFNGEKNLTTDENGQIVVSANGIVPGEYWAQFIFDGSKNYDGSDEKVKVIISKASTSLSSENMNVSYNESKYLIATLKDQYSNPLAEISIEFKSNSSTVKNENTDNKGQAKLLIDFNPGTYNIDISFAGNSLYDASYATVTVVVNPSDDSGNGTEPSGNGSSGNGTSPEGNGTSPGGNGTSPSGNGTSPGGNGTSPSGNGTSPGGNGTDPGGNGTSPSGNGTDPGGNGTSPSGNGTSPGGNGTDPSGNGTSPGGNGTDPGGNGTSSTVKDTLIGISTSTVIYGNDELINLTLTTADKTPIDGVIELRVGNSIYNVTITGGKGSKALSNLTIGNYTVTADYKGDSEYNSSTASSSFTVRDRIETRIIYNNMTTAPVGANDGRIGNYFRVKLVDENNQALAGVPIQIGFNGRIYNRTTDSEGGAKLQINLAKEDGYTFAICFKGDDNYNASFEVAKIDVNKKYPKPNSANSESAEPANKTQKNTRLETSILYKDMKTESVLKAEGRAGKYFEIQLVDNNKKALAGVPIKIGFNGVVYDRITNATGGAKLQINLLKVTQYTFAIAYLGDSKYQASFEVAKITVNKQTPKITAPQKTFKAKAKTKTVTATLKSQRGTLLSGKKIKFTVNGKTYTGTTNSKGVASVKVSLSKKGTYTATAKFDGDANTKATSVKFKVKIS

SEQ ID NO: 6476 - protein, 113 aa, Methanobrevibacter ruminantium
MARHKSNKRLNKGEEEDPMSGAANLVDAMLVIAVGLLVFLVISWNMQGIVFNEDMTPEEKQEVMQQMQQVTELEEGQELNDTPDVSNSSGKGYTEMGKVYKDSSTGKLIMVEG

SEQ ID NO: 6477 - protein, 214 aa, Methanobrevibacter ruminantium
MVTVIPGSDLLTSALNVVSQSLQIPVIVFLLIFAVYAVITVGGLISEYSSRKKVPVKVIKDLIYAISRSEDVTELENILKNARIPKNQKRVLINIARSGELKKDSREALAEKLIENEEDIIEKKLQKTDIVTKIGPTLGLMGTLIPMGPGLAALGSGDVTTLSNAIIVAFDTTVVGIGSGAVAYVVSKVRRRWYEQYLSNLDALSKAVLDRLNE

SEQ ID NO: 6478 - protein, 241 aa, Methanobrevibacter ruminantium
MFCGEKMDTISMLWQFGILAAVLVFGIKLGLAVGLANLSKKYLATVCIGYGAGVLILAQISSYFATEITELIYTYNSLFFIIMAVIMILAGIFTIREWKVFEKNTTAATCAAVIAPCPCCFGSIIVSILLVAPTVGLGAVDLSVYVAAALVLTIIVTYFASSIFVRYVDKPYPIVLGNFMFFLGIYFLLSALVIPNIAAIMNKSMGSISIVSMESLAGSIVALVLLVVIGIVFSRKNNILS

SEQ ID NO: 6479 - protein, 1875 aa, Methanobrevibacter ruminantium
MKYNKKIFFLFLLLCLIIPQAIYAGDVDDLSDAGNYTRDNSPLTISSTYQSSTYGSDGGYDDKNENIYILDKVSDGDKSKTCCSKDLSLDNACSMDKSSCSKSNSACSKGISSDKDSSNLSNTYLVSENNYNDFNVDIDLNDKLSDLDLNNDLSLNKDLTLNLNSNNDMDYLNLEEVIQTDGTLTYEGDLDQTYLNDESLNQDVQNDDSLNKNDLKSPLSDENTFNIFIISDNTGNNLFDAVACEILDNSNFSNVKFNIRSGNQINAMSEDEIYELMAPCDAFIGQWVSSNVDAVLTSLLNNHPELSNKKLFLILEPPTGNINSSSSSLNLVRNSTIDYKKIFNGISNDDLINYFKATKRGNNFESIQEYIDNEGSSFNSIFNNLVLYKDINDKANLKNELLYILYLLGHGCSYESANFTGVQASGIFRDRWYSFDEYVLTFFNESRNRTIGILESTMYIQSQQLDLVNEITERLESKGYNVIPIYCPAGNAEQLNIMVKYWTSACSNISGFLENPQDFDIYVDGIISMVAYGVGGENFTNATKFFEDANVPIFRAVHSEYITNEQWELSPVGLSTTKSDKWWHVTIAESQGIFDATYVGGVDSYISNRTGAIILTFVPVHENIELLTDRVDAWVDLKYTPNEDKNISIVYYNYPPGKQNIGASYLDAITSVYNMLYTLKDEGYYLTDLPNNVSELEDMMIACGINVANWAPGEVEKLANRSGVALLPVDEYLEWFDSLDDIVKVQITEGPVAYIGQMVRRAVLINYTDEVETMVNDWYNQIKALLPENQTVAATNILDKLVNSLKLYANASSDGDENASLYYDEFLRYYDEFKSLNVSGLNGWGEAPGNIMLVNRNGTDYFVIPGLTFGNVFIGPEPQRGWEADIENLYHCTAVAPTHQYLAAYYYMQTRQSNAMVFVGRHATHEWLPGKEVLLSYNDYGSIVVGKVPQVYFYITDGLAEAIQAKRRGFAVLISHLDSPKSYTHLYGNLTVLATLLEEYDNNHIIIESDSDKDNQAITYQVIKDNQTITYQVINQELEDNLTRAIKDLVIANNYYLTIGFTAEELNNTDMFSLSSTLNAFLKNTQNTLYPLGLHAIGQKWTDEDLANTVAIIVSHDFEYGGKKTNLFDQLSLYYYGEKYSNLTPLKRDYILNRSVDVCKALIYWDTETVSDTIGIGSPEFIESLNIAKKYIDLYNQCISLELEEMVSALNGGYVPVNIGGESVTVPQVLPTGANMYQDQSSELPTQKAWDYAKTLSLLTLADLNDTTEKIIMGIWCVETARDDGALVSTVLYLLGMEPVWHNSSSAGFDEEGIPTGKKVEDLPNVIALENLTRPDGWAKKRIDVTVITSGLFRDLYSSQARLMDNAYRMALACSYYTIVNNKTIMDSEYGPQVYDALRSIMRSISFKGMSNESLEDNYVAKHWLEDCIYYLSLGYNSTVSGEYAITRIFAPPNGDYGAGISKLVSMSWTWNDTDELSEFYIGRMGNMYSKYYWGDTNPVVFMRALSDTDHIVVSRNTNQYGVLDNDDFFDYWGGLSMTVEYLSNKTPTMNVLMYANKDNAYVATFENVFYNELNTRYLNPEWIKGMMQEGYSGSRYMSNKFISNLWGWQVTRPSSVSETVWDDVYNTYYKDKYGLGVKSWLQSGNNAYSLISMSGTMLNSAYSGYWDADDATLSDIANTWAQATVANGVACCDCSCGNVAMMQWAFKYVNADLLAKLMPKLYDATQNPLFYTNSSDMPTNSSNIDRRTTNSSAESNNTETVQTNSSSNSQQSANGNTNIPGASGGYMVGTEADAQSDMASDSDAGMNDANGEGRSVEVTKSTSTPVAPKDVSMPIAIIVCVICLVALIGFGYFRNRKDDDDYYNDDDDDDYEYK

SEQ ID NO: 6480 - protein, 1805 aa, Methanobrevibacter ruminantium
MKTNYKIILISIILLGLVMSFGAVSAADLNTVQSGEVSGGVDIASSNPGVENGELTYEIPDSVENIQYAGLFVDSYTAGSSNLVYGSEANITLTKNGESEQIASERLVASVGSADGEVYVINDHTTKCFADYMMTYNLTDRLQDAKGNITITVNATPIEGYTFYNKIKLIGLVFTYDDGDGDQFHYWVNAGSSWVKTDSGETSKATFKLGNVNYDPTVATLDNFALSSQDGVYTFNGKEMDESIVTETGVYYYIHHKFDILDKIKNMTNTLVYTPGEGSYSFRNVLSVVKLVKTVPVYAKVNISSEYDDIVFSGTENLLKVGITNNGTGSASYLLDLYADGKKVNSSQISLAAGREAVISLIDNTIRPSAADTVSGADNKKINYTVVVSDKNTGEVLDESSIFPNLLYNGYLGKGLAYPAEKISSFKNITVNGGMIIESLGDSTYLDASMTGKTDSWTIDLPDGAFFTDAFVYVPYNLDNGNVPMFTSTFNGAAVNPIASYRDQPNIGENAKNGYGLLVYDVGELIKAGVNSFALSKEAGIAGVYPSTLIAFYNLTDSDLLTSAFIFNGADLLSNEYNSLGRDVSSDNILSIGAFDGLVSAKLHVFAADCQAGEGDLTVNGKSYKNVWAGTNRSVGDYVVDLGKSTNASNEVSFISTASNILALQQLAVVQYNVPSVKASLVSEYSNAVFAGTNNVLSLNITNNGKFDSIYTVDFYVDGKKQNSTEISLKSGANKGLYLIDDTIRPIDASTVNGADNPKVNYTVVIIDKEKSMVLDEITITPSLLYNGNLGKDLAYPAENITSFRNITVSGGVIVDTLDDSTYINSQATNRTDIWNVNVADGDVFTDAFVYVPYNWDKTNGYMPVWNARFNGVAVSPLVSYRDQSNIGFFGKNGYGLVVYDVSKLIKSGENTFTLEKEAGITAVYPSTLMAFYNATSSNSLKTIYIYNGADLLANENNFLNRTVASDSHLDISSFKEVISAKLYVFSAGAQKGEGNIIFNNKTYKDVWNGTVNSVDSFIIDLGKSPSVSNDVSFVSTGSTIMALQQLIVLDYYVSSVKANVSSEYSGAVFAGTDNVLKVDLTNDGQGGSVYVLDFYIDGKIVNSTEIPLDAGKSTEIFLVDDKIRPVDASTVNGANNAKVNYTITVTDKASGLVLYEASLNPIVLYNGNLGKDLAYPAENISFFDAITVNGGVIIDTLDDSTYLGAKTTGRTDVWKVEIPKDGKIVDGFVYVSYNWDKTNGSMPIWNVSFNGVSVSPVAHYRDQSNMGTYGKYGYGLVVYDVGELIKSAENKFTLEKENGTTAVYPSTLLAFYNRTESNNRTTVYMYNGADLLSNANNFLGRTVASNAALDLALNPNDEIKSSRLYVFAASGQSGEGKLIVNNKTFNNVYNGSANSVDAYIIDLGKSPSASNNVSFIATGSTILALQQFVVVDAIHQSSEELQKMINSARAGSTLNLGSNVFKDVSNVIINKDLTITGGTIYAREGETIFVVTDRSAGGPKEVNITGVKFVLDNANTILQARAVNGSTPTSIDVASINIKKNNISFVDDDVVPESITVLDLKSQRSSIAPTRNLTISGNNLIAGICPFMFEVTSFNGKDSVVVPEGGNIPDKKASVIHYEDMVTTAINTNIEGRVGKYFEVNLTDSNGNPLKDKKVQIGFNGVVYDRTTNATGGVKLQINLGYKGTYTFAIAFLGDDYYNGSFVVAKIKVNTQKTKISTSSKTYKASAKTKAISATLKDASSNPISGKKLSFTVNGKTYSATTNSKGTATVNVSLSKKGTYSFTVKYAGDDMYAGATSSSKVVIK

SEQ ID NO: 6481 - protein, 3451 aa, Methanobrevibacter ruminantium
MKNRKFLIVSLILIVLMLALGSAYAADLSPVTNGTVSGGVDVATANPYASQTGGQEIQSGELSYDVPEDVSDVQYAGLFVNVYGGSAQGDYGAQSNVSITSNGETSQIASESLNYTDGSGDGTVYIVNDHITKVYSDYQMIYNITDRVQGATGQIKINVTNTKLEGYANFDGRIKLIGLVFAYNDGSNNRFDYWVDSGQAWSNSADSVTKANFTVGTVSPFLSANIRNIALSSTDGNYSFNKQELTGGELISDSMFKYHKWDVTDLLKNKTNNLTFNSTKSFKNVLSVLTVTKNLEEIFVSPDGTGTGTTADDPTTMDKAAPALANNGIIHVLDGTYTQSKRYDIRANYSSIVAVNPGNVIFDGNNSVANIRVYGANVTLDGLTFTHGKGTGGGVYFDSDANGGLVTNCIFKDINNTGAGGAVYISGSKNVMIENCKFINTTSTGTGGGAIYIAGDNATVKECSFENATGKDGGAIRVNSRDFAVVRDSNFTGCVATTGGAISWVGKYGNVTNCTFTDNQATGSSNGGGAIYWQENFGLINNCTFIRNKAQVYGGAVNWAAGKINGTIVNSIFKENSAGRDGGAYYSAAGANEMLIMYCSFEDNEADANGGAMGFRADQCYLLDCNFTSNHAKQNGSAVMLYSNVANFLGIGNCNFVDNSADVLNYSIVNNAGKLKLSENNITTNDLRDGIYTNGSILTDVYLYLIVNETNDAASNVVYADIGDEVPIDVYLVDDNSNLINGIGLSVEINGTNITEFDLDGYTYKTSYTPSEIGTYYVTGNYSKAELSNILTGSIVVGEEPVSAIEIAFRGEYVNTTYAGVENLIAVSLHNTGSLDGNYLVEFYVDGELAGTEESKVNAGYTSDINFIDEKIRDLNESTILGHDNLQANYTVIVKDNETQEVIGESSYFPYVLYNGYLSKKYEYSDEFISSFRNVTFNGGYFINTTGSYSGNSNPGLTDIWTLPALGEGASFAGAYVYVAYTWDKTENGPSDWASSFNDESIPIVAQYRDQSNMGTSGSYGYGLVVYDVSSLIKEGQNKYSLTKGDTAIYPRTLVAFYNVTESSTVKTMYMYNGADLLYYGSYNVLERLVMTDSVLNISTEGNVLGSNLYVFAASAQAGEGNLLVNGEKYEDVWNGTTSSVEEKVFDLGDNPLASNEISFVSTGSTILALQQFVLVEYEAYSADVTIASEYNGACYAGTENALKVNVTNDGLEKANYLIELYADGVRVDYEHVEIDVGESNVLTLIDDTIRPVTEDTVNGADNQKVNYTVYVSAAGSLLAEKTITPTIWYNGYLGKDYAYPNETISYFDTITVNGGVIIETLNDTTYMGATVLNRTDVWELDVPDDVEFADAFIYIGYNWDKTGANIPVLNLTFNGETVAPMESYRDQSNLGSSGKYGYGLIVYDVSGLVEAGENTLLIEKEFNKTAVYPSTLVAFYNQEVPDVITTVYMYHGADLLYNSYNLLGRDVESNSVLEVELVDDLASADLLVFAASAQAGEGNLIVNNETYENVWSGSTNSTNVFGVDILDSLKQSNEVSFVSTGGTILALQQFIVFEYDVTSAKAKVSTEYSNSAYAGTDNVLKLDLTNNGTVDTVYHIDLYADGDLVDSIEAEIDCGENSTLYLIDDTIRPVTENTINGNNNAKVNYTVVISDNATDEILDEITITPVLVYNGYLGKDYAYPNDTIQFFDAITVNGGVIIDTLNDTTYLGTKTTNRTDVWTVDVPNDAEFVEAFVYLAYNWDKTNGTCPVFNTTFNGETVTPIAHYRDQSNLGTSSAKYGYGLLVYDVSEYIAAGENSFELLKDYDVTAVYPSTLVAFYDVEDSPILTTAYMFNGADLLYNAYNFLGRPVESNSVLYIDSVDDIDEATLVVFAASGQAGEGNLIVNGDEYTNVWEGTSNSAAAYMINLTDSIAESNNVSFVSTGGTILALQQFVIVSEYAPYAKADIISEYKGVAFAGTNNVLKVNVTNVAEEDAVFNVTLYADGVEIGSQLIEVGAYGSAIAMFTDEKIRPVTENTVKGADNEKVNYTAVVRDVDDLVEDAEATITPDILYNGNLGKDLAYPAEEITFFDSITVNGGIYIEIQNDSSYLASGATNRTDIWNIEAPEDADFVAGFVYVAYNWDKTSAGIPALNITFNGVSVAPVAHYRDQSNMGTYGKYGYGLLVYDVSDLLEAGDNVFTLTKDANMTAIYPSVLVAGYDQEVSDSMKTIYMFNGADLLSNANNFLGRVVASNSVLDIELPDDVIDCALGIFAASSQKGEGNLIVNGESFEDVWNGSSNSVQACVFNLTDDIEESNTVSFVATGSTILALQQFIFVEYELVSVDAKLGSEYNNVAFAGTDNVLEFNITNDGTIPTAYTIEFYIDGELADTLELELANGESDSLYLVDPTIRPVDETTVNGADNAKVNYTVVITDNSTGDVLDIITITPSVLYNGNLGKDLAYPAGEITFFDVITVNGDIIVIGMNDSTYLGSKTTGRTDVWDLTTNEDIIFAAGYLYVAYNWDKTPAGMPVWNTTFNGVTVTPVAHYRDQSNMGTYGKYGYGLIVYDVSDLIVAGENTFTLEKENGTTAVYPSTLVAFYNMPESSTYVTTYLYNGADLLSNANNFLGRLVASNSTLDIDSFDNIVGADLLVFAASAQAGEGSLVINGDLVADIWNGSSNSVDAYAIDLGKNPKASNEVSFVATGSTILALQQFIVVEYNVPSAEASLVSEYSNVAFAGTNNVLQFNLTNNGALNTSYIVDFYIDGKKVNSTQIALNSGESFGQYFIDDTIRPVDASTVNGAANAKVNYTVLVSDKDTGLILDEVTLTPSVLYNGNLGKDLAHPPEEIVLFDTITVNGDVIIDTLDDSTYLGAKTTGRTDEWNLTVPSDADFEVAYLYVAYNWDKTASGMPEWNTTFNGVNVTPVAHYRDQSNMGTYGKYGYGLYIYDVSDLIKAGLNTFTLGKENGTTAVYPSTLVALYNVNESNVLTTVSLFNGADLLSNANNFLNRTVASNNVLELDFTVFDEILSSQLYVFAASAQAGEGNLIVNNETFTNVWNGTSNSVDAYIVDLGNDPSLSNDVSFVATGSTILALEQFVVVKSKYQTSSDLQKLIDAAEPGSTLDLGDNVFQDVANVVIDKNLTIKGGSIMGKAGETIFVIPAKSANGPDEVNITGVDFIVEDANVIVQATADNGSSPTSIDTPNIRISDNFIDMIDGSVVPESVTVLKLDSERGVLAPTGELKVTDNAIAAGIKPFEFDVTGVSNGSDTNIPEGGNIPAKQASVIHYQDMETTAVNSKIEGRVGKYFEVNLTDTNGNPLANKFVQIGFNGVVYNRTTNETGGVKLQINLGYKGTYTFAISYLGDDYYNGSFVVSKIKVSTQNTKLTTAAKTYKASAKTKTLTATLKSSVYNKPINGKKVTFTVNGKSYSATTNAKGVATVKVSLSTKKTYSFTAKFAGDDMYTKSSVTGKVTIK

SEQ ID NO: 6482 - protein, 116 aa, Methanobrevibacter ruminantium
MARRRCNRRFESEEEDPMAGTANLVDAMLVIAVGLLVFLVLAWNMQSVLFNEQLTQEEKQQVMDAMNQEMTEVQEGQILNETPDTSNATGQGYTEMGKVYKDPSTGKLIMVQNNSA

SEQ ID NO: 6483 - protein, 248 aa, Methanobrevibacter ruminantium
MTLAIGNTLIFADEAIYQGANNGLFAIFSNTNGTGFPFLDSSLTAITQALQIPVIILLLIFLVFAVVTLGKLLSEYLSRKKVPIKLIKEMIYSIYDAQSAEEIKNIVNSSDIQSSQKTILCELADSEHLGKKSRETLARRLIDNEEDKITQNLQKTDIVTRIGPTLGLMGTLIPMGPGLAALGTGDVTTLASAITIAFNTTVIGIGAGAAAYFASKIRRRWFGEYLANLDALMDAILDNINKRDDRLE

SEQ ID NO: 6484 - protein, 1370 aa, Methanobrevibacter ruminantium
MNSNKTYAVLGLLLLLILSIGAISAEDSIDDMSLTDINSADNSNINQINAIDNSIDTSTDSSIDTDNSIETNLDSSIEDKNSTDAKNTLSSNSLASTYKITEKDYLTYFDKDGNILSGKLKSGDTIDLSGTFSKKAFVINIPLTITSSDGTAKLLNSNINLVSGAQGSMVSNLNMNTSVEKTPALSAVNVTKVSFVNNTVLSTATGSYALLLNTVNNSDVLFNTFQTTCFVEGWGHPSALVLSGSNYNNISSNNVIVNDSNGIYLTGYLGGGSMGDSTQGSNTYNYIYNNTVHSVRGVEWAKDKDGNKPLPSSFCYGIQVMGAYNEIIENTVYNMYRGISATQTGNKVVNNNLSNIHGTWYSGGTNDDGADYTIYVTTNSIVKDNSISDSKIGDSTAAIHAAANTNVTNNVLSNIEGTGVLIEGNNVVCNKNSLLGLTNDGIIAKGNVSNIDISGNIINASETAVSLVKTSRSLAPHDITVSENTIFTTKENPISYEEAYSTNITVENNRIIKEASNGTDPSTEGNGTYYIIDSNFYNYFDNTGYLKSTIKENDILIFVGPIESKDKIYINNKVNITGIDAVFKDTTIIVLDDGVVIDGITINNPNEAKNDREWGIQVNGAKDVTIKNCNITIYDAFSAYAVYLIDSSDCKLINNNLEAKGDYLTSAVLLYNTNNTVLSGNSLKTIGTGQNYTFLNESCLDGCLDGCLDGCLDGCLDGCLDGCLDGCLDGCADGCADGCLDGAQGVNHIISGIFRTYGLFMVYSSNNNVTDNKVDVSSALEKGYATYIESTNAIGGIFIHHNSNNNIIKSNNITLNGNDPFMYGAGVVGGNSNHTDYVSSNNQFESNAINVKSPYYAIGILLGYNSSKSTLKSNKISLSANNYSYNIASYKSSENTVDGTVTVLKDTIVTSTNITAQSNSPIVLNLTVLDEDNKTVTVGSLLAYVNNTLVNSTSIKGQSTSLGIGAYPKGTYDLVVLYVNGGIYRVGAGACQFNVSDVINTGNGTKDIQNALDNAKDGATVDLGNQEYNNVVNVQIKKNVTITGGKISGDGSNPIFVITPKSKGGPNNVSITGVEFNLGNGNIVALATADNGTSPLSIDTAQISIKNNVFNAVDGAVPESIKVLELDSERGVLSPTNDISVKSNTLSSGINPFEFKVTSVANNNSINVPSGGNLAQKQVSQIQYQDMETMAVNAKIEGRVGKYFVVNLTDDAGKPLADKFIQIGFNGAVYDRTTDEKGQAKLQINLGYKGTYTFAVCFLGDDNYNGSFVVAKIKVNTQKTKLTTASKTYKASAKTKSISATLKDASGNAISGKKLTFSVNGKSYSATTNAKGVATVKVSLSSKGTYSFTAKYAGDDMYASSTASGKITIK

SEQ ID NO: 6485 - protein, 1164 aa, Methanobrevibacter ruminantium
MINKRIISLSLLIILVFLIIGLSAVSAEDSSKAADLDLNSSSVSNIDLSSNSVAIESNSNSIASESSSNIVLDNKSSDTTDIQTDSDSSSDDNLNHDSNSKIKSDNSKKVHTITESNYSLYFDSNGYLNNSLVSSNDTINLSGNFSSKYFRFSIPLTITSLENDAFLRNSPIIITGVSNENYVYDAIVSNLTIESDLANISAVWVIGSSNIKVLNNNIFTTGHNGYPIALDSFVYNCILANNTIKTIVPVSEAMSSKDIDEDNQTNNSDNSSWQHSGISLRDAHYNTVVDNDITVENSYGVYLCYGASISNYNVIANNTIRATSETPSFWCYGVYITGNYNLIYGNDFYHLYQGVHSSYPYNSIVSNNFYDIDGLDDNYGAGGDFGIYGGNNTLIANNSIYNAKLYNAGILVGTNSEVYGNYIQINSSGEGIRIGDKEGGSYSKVYNNTVDFLDGKGICLYGEPNSTLVYDNILNSISSIDSLDLSAESKGSGLGIGIYSHYQSRAKRPYNISTCNNTIYTSNDYAIDISQSSTKAYTCYGNLVFGKGIIYPMEVVYVPDYGEGNVYEVSEDNFYTYFDSSNKLSDKVKDGDSLIFVGEFSPKGKITLNKEVNLFGYGALLKNTTVFINAPNCRVHNFTIVNNGIDEYNLWGVYVFEADNASIVGNNISILDKNTSYGIYLCDSYDNNVSDNTISCQGDNLVFSLLTYEAYDTLFENNKILAIGTDELYPYYETICIDGVHSISELSKTYGVILDSSSRNQFIHNDIEVTSTLEGFHVPYNPSVNILIGLYIYYASNYNNISENNVYVHGHDPFLYGVGSSGDDTSKSVTYACENIFSHNNITVEGDYFVMGMILRHNSKDTIVDSNHFRLNSNNYTYGITLEISEGAKVTNNVLNSTGNAGIYAMELYASNNNDIKSNEIYASASYSSVALYASSNNNVTHNVIKTYGNKVQEPAQGPEHPDSVDLFNTGISLQKFSSGNNISDNIIETDGDAAVDFDETSTGNTVGNNELSSTKGGGNAAVNDRTGKNMVYGNTGSRYVPNSNSSSNSNNQNSGERNTVPTNGSSNRYNDGGEESGSSAFGQVDLGLLATAMSSVGEGTGDVGETGDGESDLIVSELEEVASKSMAGGLSVPVAALLLVLMFCFSFLNAKDEDDENDDENEE

SEQ ID NO: 6486 - protein, 1684 aa, Methanobrevibacter ruminantium
MDFKKAIPLFALLLLILFIIGSSSAASSDLSSSPADNENLEIDSFDSNEDLTVNTNTNYIESGNNLEIDYKSNSKESVNATNDIKEETVDYNEDISVEKNNLKSSKLSSVYKITESNYSNYFNKSGNILSNVNPGDTLDFSGSFNNKDFKIDIPLTVTSSDGAQFIDCSFKFNKGSDGSNISNLNINSSRLQSPLIYLDSVSNMNVFNNNLFSCASKSYALCFSNVSYSSAYHNTLQTTAFVVGWGHPSAFVLAGANNLNISSNNVIVNDSNGIYFTTYVGDTISANLINENNYIFNNTVHSVRGVEWAVDENGTTPLPSSFCYAIQVMGSGNKLLNNTVYNAYRGISASGSNSVVAGNVVYDIKGNYYSGNTKDDGGDYGINVGPNSIVENNTIYNSHFNKNSGVAISVGSNTTVRYNNITNINGTGADLSKNFIEFSHNRIDNVSDNGIRVKGQYGNTNISDNFINSTDSSITLLRSSKDKYPSRINIENNDFYTDVSPIYYLEGYIGKLTAKDNTLNGSSISDISIDVPSSSETKVSINSTKIDFNESVLIMPTVSAYGLSLEGLVDIIVNSQKIATVPIGSNYTFTPTEAGSFSINANFTGNEEYKPSESAVLILTVTPKETTTSIIISPSTVELNDTVVISPFVRYNGTLLEGFVDILLDGEKLDTVEIGSDYSYVPNSSGSFYISASFSGGNGYGASVSDMLILTVNESSSIEDPDDPTNLTVSSILISPNTVEVNDTVLISPFVRCNGTLLEGLVDILIDGEKLDSVVIGSDYAYVPSTAGTFNISASYAGGNGYEPSVSDIVVLTVNEKQIIDNGTDNNGTDNNGTDTNGTGTNGTDTNGTDNNGTDTNGTDTNGTENNGTDTDQIKIIINDDNYSDYFDNGYPIDLDVDGNYTLIIDSLNNKDIIIPSGFNINIIGKEGSGTINNGTIQLGDGTDEVGDVKISNLTFNNYNKDAIVINEIAYDLTVENNKIIINTEASPGNLYFSVYGINAKGYVDSLAVRDNDIFLNGSAPYLYGVSLGGYGAIANPQNIFVQNNTININSTASMGMAEGIYLDNPINAAVLDNKINIESINDVYVYGMQIADSAFSAIGEGKTGVKSPYDIMIESNDLNLKSKYMVYGITILDYGCDGSLNELGQPMTNMMDLDTTIQNNNLVADSEKAVMGIVGKTYNMSVLCNNLSVIGGSIEGVASHDALGVDNYALGVQYSGKDYTVLVKDNTVSTNVLAEYLNNKDYEAYVSFVNNTIYHIDGPSSGNDTPENGTGDNGTNTNGTDINGTDTNGTDNNGTNNGTNGTNGTDTNNTDNITKRTVKDLQELIDNATSGSVVDLGNFEYLDVSNIDISKDISIVGNNTVIRTAGDGKPVFNIKEGLSSVSISGIEFMANNGDVLIRAKAVNSTSRLAIETPEINIINNTVIKSDDGVVAESVTVLELDSSRCILAPTNDIKVSNNTLEIGMNPFNFVVESVINAADVNVPVGGDLQSKVKSVIHYEDMDTVAVAKADGRVGKYFEVNLTDSDGNPLSGKFVQIGFNGAVYNRTTNETGGVRLQINLGYKGTYTFAISYLGDENYNGSFVVAKIKVSTQNTKITSSSKTYKASAKTKTLTATLKSSVNGNLISGKKLTFTVNGKSYTATTNSKGVASVKVSLSSKKTYSFTVKYAGDDTYSSSSASGKLTIK

SEQ ID NO: 6487 - protein, 2968 aa, Methanobrevibacter ruminantium
MKLKKFSVILAVLLVAILAIGAVSAESVSDTDVAAVAAVDDTAGTVSVDDSIDDVSVDTTDNDVKNSLSAVALEDGESVSYEINDTSYSTYFKDDGTATDELSEMGGYTLNIGTLTNKDIQIISGSDINITAKDGEGFINNGTIILGGDEFPGSIIVSGLTFTNTNKDAIQVLDYTTDVSIYDNNMNIIGISSLSSDPNFSVYGVSANGFISGLYIENNTMSVEGDALSYGIEVGAYSDGAYALSNPQDILISGNTIDVSTSGAMAEPMYLSDVWDVTVVNNFVTAESVNAPAYGIQVADSAMWASYMDPNYDGDLSSPNNVLIDGNTFILNSDFMIYGITTINYGWDGIEMESYALPLNITVSNNNVYANSKKGVMGIAGQIYNLTVIDNTVIAIGGSAEGLYTGDLLGNGTYALYIDYDGNYAEDTYYVVVKDNDVFTNVTKEYAFNNDYERVIFENNEDLKTFVIDDETYSIFFNDDGTSDVLEDMEDYTLMIGPLNNKDIVLDSGSEIVILGLDEGYINNGTIVLDGVSDVYVSDLVFVNVNKDAFYIGDESNEIVIVDNAIVLVGKAAESTNPYFSLYAISANGYVTGLNITDNSIYITGDAPYSYGISLSAYAAEFNPEDITIYNNTIEMSLSEGSSMAEAIYLDCPSDATIEENNITIETVGNTFAYGIQVADTLPAAYEYASYRGELTSPELVTIKGNTLNISSEYMIYGITVLSEGALVNGSGDLALCQFELFLNVSENTIYADSTKGVIGLAGKVYNITMNNNDLYVTGGDASDVFSYDDLGVGTYAVGIKYNGDSEDGNYYADVFENNIFTNVSAEYINDETVLDEYVFFNNFIPLDLGIVLEADKDALEIGDLINYTITVVNNGPNAASDVYVSFELSDILLLVTAPEEYDAEFELLNVSDLAVGQEKVYNIVAQVIDGGYLLSTAYVDCYEDDTYMDNNTASLDMIAVPIVIDDSNYANYFNENGYLKDDVIATGTVVLFGNLTNKDLFINAPLLISDCKDTKLVNTTIALVEGADGTLISGLVFDYTAKDSGFAIISVNDGVSDVLIRSNNITVTDIPDYVTAVAIGVYGAVNGSEDITIEDNFINMTGGNAYTYGINVQNYDQGWVPGEGASGVEILENTIILSGTGMEEAIFLSGLEDVYVYKNTIVSASFGENTGCDAYGIAAANVSELIIEENQMGVGSNQMAFGIAITTKSNDVDVFNNSIDVEGTGAIGVGVQDSTDVSVTFNTICAYGDDFTSIQTYDSLGTANAAILDETGEALIENNTIYEYFPITISDDNYATYFDESGKIKNDSGIAGGDLIFLDELTNKALTIDIPLTIKGVPLNALVNTTITLLADASGSTVTKLNMEFTGDENTGSVGIIYVLGASDVEITDNVIIVPAFVDKTGAKYGSSLYAIEVESGADGCSYIDISDNVIDIIGSARYLYGIDVFQTWGSENKNSYVAICDNFISVVGASRMSEGIYASGVDELEILNNTITSVGQAAAYGIGTDTLTDSIISDNGMEVNAGTQAYGITNTYSDGVEITANVISSTGEGAIGIGTNSEDVTIAKNQITINGNDYTTITSADTLGTDNAAILDTTGEATIENNTITENCPITINDGNYATYFDENGSLKNNSGIADGDLIFFGELSNKKFNIDNYLIIKGANNNKLVNTTIALTAGASGSTLSRLNMEFTGDNTTGSVGLIYVLGASDIEISQNTITVIDFVDKAGAKYGSSLYAIEVESGENGCSFIDISNNIIDITGSARYLYGIDVFQTWQAPMRNSDIAITNNFIMIDPASRMSEGIYASGIDNAIIANNTIISESDAAAYGIGTDSLANSTIADNVVRAAAATQAYGITNTYSTNVDIVNNTVNAEGIGAVGIGFMGSEGVTVADNLIAITGGDYTSITSSDSLGTANAAILDKDNKGTISYNNVTENIPVTINDGNYDNYFNEDGYIRNDSGFNDGDLVFFEKLSNKNIVLDMPLTVKGAPGNKLVNTTITVLDDASGSTITCLDMEFTGDENTGSVGIIYVLGASDVEISYNNITVPNFVDKTGAKYGSSLYAIEVESGQDGCSYVDISNNIIDITGSARYLYGIDVFQTWQAPNKNSYIAIADNEISIQSASRMSEGIYASGIEFAEISNNIINSVGEAAAYGIGTDTLSNSIIEDNDIVVLAGTQAYGVTSTYSDTVNLTGNNISAVGVGAIGVGSNSDNVNIDKNEISILGQDYTAITSADSLGTGNAAILDKGTKTTIGNNTIEEVAPIIIEDNSYDKYFDENGQIKEDAPIGSGDVVYMGVLTGKDMVFDIPVAILPADNSKLTDSTIKVVEGADGTTINGLDIEYTGDENTGSKNIINVVGASDVTISNNNIIVPDFVNKAGSKYGSSVAAIAVESGAAGTDNTTITGNNIEVNGSANYLYGIDAFTTWGANTTNSNLKIENNNVSVNGGARMAEAVYVSDSKNVTIDNNDVEASSEAAAYGIATDQLSHAKITDNDVAVLAGTTGYGITATTSGEDVLIESNDVEVLGMSAIGVGLSNQDAAIVKDNTIDIIGGDYSSVTSADNLGTANAAILDKDNKNTNLVVENNTMTENGKAVNTTHSGNSSAELQAIIDAAPAGSTVDLDGVLYADISNVVIDKNLTITNGTIVGKAGEAIFVIPAKSENGPDEVNINGMEFLVNDATVIAKATADNGTTPTSIDTPAISIKNNTIDMANDDVVPESVTVLELDSERGVLAPTSEIAVEGNTIATGVDPFEFKVTGVADDSGNVVVEKGGNIPAKQASVIHYQDMETTAVNSKIEGRVGKYFEVNLTDTNGNPLANKFVQIGFNGVVYNRTTNETGGVKLQINLGYKGTYTFAISYLGDDYYNGSFVVSKIKVSTQNTKLTTAAKTYKASAKTKTLTATLKSSVYNKPINGKKVTFTVNGKSYSATTNAKGVATVKVSLSTKKTYSFTAKFAGDDMYTKSSVTGKVTIK

SEQ ID NO: 6488 - protein, 177 aa, Methanobrevibacter ruminantium
MEIIELIAIIILVAAIVFLIYYYFQTVNGGSFDIDDLKDHLTISKREAATATVNLDDDEAEEKVSVGKKIKYTFKDIDKSYSNTTDAFSKRLDAFLDERSEELIENWSLVTTDDLESLEKRCVTACDSIDDLEKRFSEYSNVTNEKLEDLDKRIKALEEDSELLEEDAETIEKEADE

SEQ ID NO: 6489 - protein, 134 aa, Methanobrevibacter ruminantium
MANEIIPSEIFILILVVILAFVVIIIALQWKKVRQSDNTLKLMEKEIELKKIAMVEKDLENKRLMENPISLPSEQQEQLTQIRDSTAKVMSDVGYLHSEINERLARLEAQTELKKLEKMLAEIEDKEKKLNKGK

SEQ ID NO: 6490 - protein, 309 aa, Methanobrevibacter ruminantium
MVDEIKSYEEAGKIVSKVRSDASKMIENGLPILDLVEFVESEILKSGAGIAFPCNVSINEITAHYTSPAGDTNKMVTGDLVKLDLGAEVNGYIADSAVTIMVPGDNLEELFDEDTLEKNQRIIDASAAGLEAAISTVRAGVKVCDVGRAVEEAIAEYGLNPVRNLTGHSLEHWNLHAGISVPNYDNNDPTILEEGQAVAIEPFATDGEGIVNDCPYAYIFSFMQSKPFRMKNTQRMLNHIEKNYRYLPFSGRWLTESFNERRVNTGLKQLGDAMAIYPYAALKERTGAWVSQKEHTMIVESDGCKITTL

SEQ ID NO: 6491 - protein, 1471 aa, Methanobrevibacter ruminantium
MKVYKMILISLILVILSISCVSANDLTNDAIQGDLSDIDYSFTIDDDLSNSDNSLDVSSDLKENSCLDEIDLDKESNQNTTKILSSNQLDSNLLDSNQLESDQLSSNQLDSSLLNSNQLNLSNTYTVSQSTYSKYFDKNGYVKTSVVAPYDTIDLSGNIISKNFIFTIPCHITSSNNAKLTNCMIKFENMTADGRSSVSNLYIRNSVEWCPGVFLEGSTNVDVYGNDIYCTGANGNPVRVIYSNYSNIFGNKLETYFTGYMNLSWKRAGILLGDSHYNNIFSNDVTIKDSNPIYLTTYGFEKSNHNTIYNNTVRSSAISEDSGLSNPSAWAYGIHLMGDYNIALNNTIHNVYRGIDSEGSFNILAGNIIFNLTGGYFEGNDGTEGGDYGIHASYDNIVANNTIFNSKLTGSAIYLMPNNTAYGNIVYNISGHNGLEFNYYADNCKVYNNIIDVPVESPIYVFGRMNNLLIENNILTSVDSSSILVKKQSNSKYPTDVTIRNNLIMGYSKTFNQSPIDYSQIKSDANIISFNNSIAVYNDTYFNYFAEIGNVRDYSDWIDLNNTINYSDSYNYNALVFVGNFSSITDNITKTDYIIPLKDIVNSRISDVYRNVPYNEYKSMMETLNEIYTDIVFNGPSPVDLRGVDSGGNSSDSNQTPMDGNGSMNESSDNGSDNSTNSSLDNLDDEVKDSYENLIDNINSTENASDVYVINDANYALYFNEDGSFRDDFPIEFGNTLRFANLTNKMFKIDIPLKIISDSEDSSLLNCFISLEGESSNTIISNLKFELDNLSSNIDFISIKDGVSNVLIYNNTFKLDIDSSDSLIDSPLSDDASLSAIRLYGSDYISRNIFIENNIIDFKSNFGQLYGIYLSNKMDYLNSKTNPSGFIIRNNVFSIDSNGLINAIYSDSVKNLLLENNLFNLSSNGNLEDSSLIYGLDLVKVDNLTMINNQFSINSTYLACGINSSDSSGFNLSNNQFSVDSAYLAYGLNLKNTNNFNLHNNDFYIDSGSFAHALDLDDCNNFNIANNLINASGADIKRNLNASNLAVFIQDDLNDNVLKNGYLYISELNGSLKGNGLYENDFKSPIVHTDNSTRDLQNLIDFAVEGDTVELGNMVFADLDTINIYKNLTINGGIFVSGNWRPLFHILPNDELLNHSSSDSYNSYRSFDYLNIQNGAYYLDNADLLILAEACNGTDSLSIQVPSLNICDNEFMLLDDSTVAESINILKLLSSRAILAPTNDISIENNILVSGMNPFVFEVSSIMTGSDIDIAHGPLNPKKASKIIFEDMVTTAFDSNVEGRIGKYFEVTLKDENGNALSNKAIQIGFNGRIYNRTTDENGSASLQINLAYKGTYTFAISFLGDEYYNGSFEVAKITVKKQTPKLDVSNVTYKSSAKSKTWTAKLTTSYGSLLKNKKVYITIDGKTYTTRTNSKGIASLKVSLSTKKTYKFTVKFEGDDTYNSLTKTAKLTIK

SEQ ID NO: 6492 - protein, 294 aa, Methanobrevibacter ruminantium
MNEKNESAFPIRCDPEDEIFVKCMSRIKEFPQYITGYDDIEGPYESRFISSGYRNLNLDSVRIRSDKSSINIEHHSSISQEAMRRNYEYAVNVFNATGQAVYPFIFYTGDLPVDKITYMNQLNYFHPQWFILKEKDGMKRLNNIKYKTDNDIDMHIFEFLDYIWLPKFKLEITIEECIRELVKLYNKLSADEFILNFTKECLALWVGRYIKDQDELKYMARCLNMSKIEERPFEESLRGVIFARKLEEAEEKGVEKNRIDFITKALKQMSPQEVSDLFDIPIDSILSVQNQYSK

SEQ ID NO: 6493 - protein, 281 aa, Methanobrevibacter ruminantium
MAFGTYKDVVSARATDKAIQKVAQDGGIVTALLTYALEENIIEGAIVAGNTEDPWKPEPTIAMTPEEIIAAAGTKYTFSPNAIRLKEAVRQYGLEKIGTVGTPCQIMGLRKMQSYPFATRFVADKLALIIGIFCMENFPRDSLKTFIEGKMNSSLEGVNKMDIGKGKFWITDVEGESGLPLKETHGYEQAGCNICLDYVAELADVSTGSVGSPDGWSTVFTRTDSGADIFTAAVEAGVIETKPMDDVKPGLELLEKLANGKKDKGRKEIERRVNMGLPSPF

SEQ ID NO: 6494 - protein, 319 aa, Methanobrevibacter ruminantium
MLARIKNSIRKFLGLEAKPDAEDDEAKAETQDKLKQEIKKEVEAQSKPAEEAKKEADAKAEEEAQAKKEAESSKALKESSTQEVEKVADKPKIGYIHMSGCTGDGMSLTENYDILSTLLTDMVDIVYGTTLVDLWEMPEMDLALVEGSVCLQDEHSVKELMEVREKAGLVCAFGSCAMTGCFTRYARGGQLAQPKHESFVPISDLVKVDCAIPGCPASPEIIAKVVVALINGDMDYLQPMLDMAACNLACGCDLQTNVVSKALCCGCGTCVLACPTRALEMVEGRPSHNKNRCIKCGACTTHCPRTWFPAEQIKKDLGL

SEQ ID NO: 6495 - protein, 157 aa, Methanobrevibacter ruminantium
MPYDAGRLVVGCGNVLFKDDGFGPMVIHALEDYFKENNLEMPKDTQFIDAGTGATHFIFSMPDDNWKKVIVVDVVEWNAEPGTLKIFSPYDMPKGKYENAHTWPVEEPLHDLVDMGIEVVIVGCKPKEITAPDVDMGLTEPVEAAIPKAIEMILNEL

SEQ ID NO: 6496 - protein, 385 aa, Methanobrevibacter ruminantium
MEIDDEGIVTKGRYFSITPVRGLEKMVTGKAPETAPVLCQRICGVCPIPHTLASVEAMDDSLDIEIPKAAALLRELTISASNLNSHAIHHFLVAPDFVPEDLFKTAVDSVGTIRKNAQYVVDMVAGEGIHPSDVRIGGMARNISELARKKLYARLKALVPVVDNHVELMTNLILEKDIPEGLGVIDAPVFASDVVYGKRDFFDLDRFTEIVPEAWYDDPEVGKRACTTIPLYDGVNVETGPRARVDKFQGYKERGVVAQHLSRAREMKTYLSRAIAILDELDTAANTLADFDPRGTNKLGIGVIEAPRGTDVHMAQVKDGKTAFYSALVPTTWNIPTMGPATEGFHHEWGPHVIRAYDPCLSCATHVMVVDDEDKSVVENKMVRI

SEQ ID NO: 6497 - protein, 184 aa, Methanobrevibacter ruminantium
MDNSNIIISVIIVLCIAAGVTAYGISEGDNAVFSDLTGFSPSSTDSGDTGIGNTTGNNSQGGGITAGQTNVATNTGGSSSGGSSGSGSSGSGSGSGSGSSGSGGSSSGNGGGNTNPSPSPSKISAAQAKNIAAGAIAEEGAYISSVSDTGSAYVCYISNAEGTNVGYITVSYGGAIIEGAGGAP

SEQ ID NO: 6498 - protein, 200 aa, Methanobrevibacter ruminantium
MDNSSILISVIIVLCIAAGVTAYGLTNDSNTVFNDLSGFTPDESGDTGIGNNTTGGNGNSGSGITAGTTDSGSGTGSSGTGTGSSSSSSSSSSSSSSSSSSSNTQQKAWKPKVSPEKAKALATSAARNSGWPGAYCYSATYNSGGYYVCLLKDDAGNTGYAHIGSGTGRFLEGSWSKQVTKEPNEVEDDYKENETSNITE

SEQ ID NO: 6499 - protein, 397 aa, Methanobrevibacter ruminantium
MLVNADLHIHSCFSMATSKDMLIENIAPKSLEKGLKLVGTGDAFHPKWLDIIRQSTEYKGDGIYSRGDCDFVLTTEVEGKHKVHHVIIIPDLDIAHELSAKLVSSNKFIDGRPKTPLGGAELLELVREYDCMIGPAHSFTPWTGMYKYYDSIYDCYDKRPDFVELGLSADTDMADCIKELSDFVFLSNSDAHSPWPHRLGREFNQIEMDDVSFSSLKKAFKHKTVKANYGMLPNLGKYHMTACTKCYKLVDPIIAKENKMICSCGGRIKKGVDYRISEIADFSQPKHPSHRPPYVHLMPLGELISMVYDKGVTTKTVQGIWQKMVDNFGPEIDVLIKTPLDEIEKIDSDVSLAIQGFREKTLNITPGGGGKYGEISFSEDFNKTEKKESVTTLDSFF

SEQ ID NO: 6500 - protein, 187 aa, Methanobrevibacter ruminantium
MSKKRCPWAEDVEEIYVKYHDEEWGVPTYDDRELFEMLVLESFQAGLSWITILKKRDNFKEAFDNFDVVKVSEYDDAKVEELRNNAGIIRHKGKINSAINNANVFIEIQNEFKSFSNYIWGFTDNKVLKDTEENYKTNSPLSDKIAKDLKKRGMKFVGTTIIYSYLEAIGVIDNHIHECFKYKEESD

SEQ ID NO: 6501 - protein, 158 aa, Methanobrevibacter ruminantium
MKSSVLLEEIKENIQNYDIDHIKENLKKEDINPISKQVSEFNLKNYDEIMETKISEEDDFEISDEMIYSMKNEIDLFFKGCSPESEDSFKKFIESICLYLSLIAKKPLHPVGMDFKNGNTVHEEIEDGNTVYYCDLKEYFGKQEKDYYTCKFCVCKTV

SEQ ID NO: 6502 - protein, 335 aa, Methanobrevibacter ruminantium
MAFKDIFKFKQGETTFIFVGGKGGVGKTSISSATALWLAKQGKKTLIVSTDPAHSLSDSLETKIGHYPVEICENLYAVEIDPDKAMEEKQRALESQKSMATADQLLGLDFLGEQMDLASASPGADEAAAFEVFLSVMTSNEYDVVVFDTAPTGHTLRLLSFPEVMDSWVGKLMKARSKLGAAASALKNIIPFMDAENDIQSSQELEETKKQINEAKAVLSDPDRTTFKMVVIPEEMSIYESERAIEALNKYDITTDSIIVNQVMPDISDCDFCHSRYMLQQKRLALIDQKFSDQVVAQVPLFKDEVKGKEKLLKLAEILYEGKDNDEVEASVIQL

SEQ ID NO: 6503 - protein, 43 aa, Methanobrevibacter ruminantium
MFVEEIPEEKFYSNRIRDEFIEEVVEKIENNILQNKYRKYLDY

SEQ ID NO: 6504 - protein, 49 aa, Methanobrevibacter ruminantium
MFYEERVEDQFSTYRNREEFIRELLDVVDNKITDEEMEDIYQLLDIPRN

SEQ ID NO: 6505 - protein, 253 aa, Methanobrevibacter ruminantium
MTICISAICTENNEEHIVFAVDHMITTGLGQFEHSINKYNVLNENVVGMMAGNALLMDYFFDEDYSENSFSEILDIFEEKFKEKRLNIIEKEILDVYSIDLDFIRDILKGPITNDFQAAILKKIAKTKLESAILLMGFENNKARIAEVSDYGIGNFNRINFHTIGSGSIQAQNTLMFQKHSKKDDLRTTLYNVYKAKKNAEVMQGVGQDTEIGFLNNGSIVMLDKKNMGILDNVYALELNWGKEHKEVGALDF

SEQ ID NO: 6506 - protein, 359 aa, Methanobrevibacter ruminantium
MLEIKHTICPSCSVGCGLNIVSKDGAVVGTYPYKRHPINEGKNCSNGRGSILQFENKINAPSLVQNGELVESDADSIIAAIKKELDAIDASELAIICSDKNTNEEIDAIKKFAEDFGTDKIGFYGYNFPKFSGEIANYNDINNAKFILAIGDIYGENPLAARRIVLAKDKEAKFFNIDDVEKSITALNADEYIQFSDKATFADAIASVKGELNEEAVIVLNKIADAEDFKLVEDLASETGAKLLPILNGPNSKGAMDKIDPLTKDEIIDLIDGSKVLIVVNDNLLDYLSESDIKGKAFIANISNFEDEFTKFSNVVLPGKAWVEKEGTFTNAEGLTQSFAASADLGEGLSEIEIFEKLA

SEQ ID NO: 6507 - protein, 384 aa, Methanobrevibacter ruminantium
MSENLMLAKSKENEITDSGACGGAVSSIFQYLLSQGIVDGVLTLNKGEDVYDGIPRLLTDASEVIETCGSLHCAPTMVGDLISSFLSDQKIAVAVKPCDAKAVNELVKRHRINPENIITIGLNCGGTVRPETAQEMIEKFYEVDPADVVKEEIDKGKFIIEMADGSEKGIKIDDLEDEGYGRRDNCQRCELKVPRNADLACGNWGSEPGWTFVEVNTEKGNEIIEGAKAEGFIETKDPSEKALEMRGKVENIMIKMGKRNTKKQLEDEALTLEEWENQWNKCIKCFACRDVCPICWCHECELEKSYFKDDGQAPPDPLSFHGVRLSHMSPSCVNCGQCDDVCPMEIPVSKLFHKLQVKYEGQTGYVAGVGDEKPPLYSPQKENF

SEQ ID NO: 6508 - protein, 133 aa, Methanobrevibacter ruminantium
MADDIKIVGFCCNWCCYGGADTAGTARMQYPPNIRIIRVMCSGRINPSMVFKAFREGADGVFVGGCHIGDCHYDAGNYKWNRRALMTKDIIEEFGIDKERFRFEWISASEGEKFQRTMKEFYNTISQLGPRNK

SEQ ID NO: 6509 - protein, 957 aa, Methanobrevibacter ruminantium
MTNNEIEKKWQKKWADAKLFQSDPNEKEKLFLTVAYPYPSGAMHIGHGRTYTVPDVFARFKRMEGYNVLFPMAWHVTGAPVIGIADRIKRKDPWTLDLYERVHKVPHDTLPSLEDPINIVKYFSNEYHTVMDDMGYSIDWRREFRTIDPTYKKFITWQAKKLKSLGLIKQGEHPVKYCPHDENPVGDHDLLEGEGVGVNELTLIKFEVEPGLYIVPATFRPETIFAATNVWLNPEVHYIEVEVKTGANAREKWIISNEAFLNLSNQHDLEIVGDIDPKPLIGKYVKNPLNGEPLPIFPASFVDPEYGSGTVFSVPAHAPADYIALRDLKENEELIKDFDIKEEVAKAEPLNVVTVEGYGEFPAVEVVERMGIENQNDPKVQDATDELYKAEHSKGYISDHIEKYAGKRVAFIRDEIKADMIEAGSADIMYDFAERPVICRCGNKCVVKVMDDQWFIRYGDEEWTEKTQKVLAQETIIPEEIRSNFEYYLDWLDDWACSRRVGLGTRVPWDDQWLIEPLSDSTMYMSYYTIAKYLKDMDPEDLNEAFFEKVFLGVDSDEITVPEETVNQIQEEFNYWYPLDWRLSAKDLVGNHLSFLMFTHAAIYPEEKWPKGTVVFGMGLLEGNKMSSSKGNVILLADAIEQYSADVVRLFLMASAEPWQDFDWREKEVRGTQRRLEWFREFAQKVEDIKGEKLDLSNIEEVPLERSIDKWMINQLNIHIKEATEALEVFQTRQALQHALFLLKKDLDHYLYRVQDLIEAKDPAVIYVLSTLLSNWIRLLAPFTPHTSEELWSKYGGEGFVSFAKWPEYNEDLISKEIERSESLVQNIVKDINEIKNIVDTDPEKIHLYLAPEWKWELYKIADEVGKPDIGQIMGKAIKADIYDNKKEIANVAKRISKEMIKTRYIGKIDEETILNDAKDFIESEVGSEIVIHTDDSYDPQNKARNAMPYKPAIFME

SEQ ID NO: 6510 - protein, 457 aa, Methanobrevibacter ruminantium
MKKNKLEKGCEKMSADDKKLDQIIKTIEANDIKFLRLELADIHGLPKSMAVPLKNANDVEDIVNDGLLFDGSSVAGLASINDSDLLAKPDINTFSTIPWRPESKGTSRFICDIYTTEGTPYDGDPRGILKKTLEKAEKRGYQYNVGPEPEFFIIKKDENGNYVPADEAEYFDVEPLDQGTDIRREIVFGLEELGFDVEVSHHEVAAGQHEVDFKYADALKTADAVITFKEAVKAVANNLGVKATFMPKPFIGINGSGMHCNQSLFKDGENIFYDPNTETQVSQEALYFIGGLLKHAQALSAILSPTVNSYKRLVPGYEAPCYIAYGFKNRSTLLRIPASRGLGTRIECRSADPSCNPYLAFSALLEAGLDGMDNKLDPGEPTEENLFAFSEEEIAEKGISNLPTSLWEAYHALEEDDVIIGALGDKVFNQFYNIKRAEWDAYRIQVFDYERDEYLNV

SEQ ID NO: 6511 - protein, 305 aa, Methanobrevibacter ruminantium
MCGIAGVIYKDKKTHPVGEALTSMLESLQHRGPDSAGYAIYGSLDFPENYYQLNIEVKRRRGALDNLKSLLNQISPIYEEEIIKSVGDSDVYKCKIALDEFSLLQPWIREIDELENVRVINGSHSFEMIKDVGKVKDIAERFDVQSRMGTHGIGHTRFATESGVDRYHAHPYQSYIIPDITVVHNGQITNYWKIRDPLERKGHTFESFNDTECIVHYMADKLNQGYKLEEALDQAVIDLDGPFSILVGTPNGIGIAKDKLGLRPGVMVETDEVFAIASEEMALHDVTDSNEIEQIAPGETRAYTI

SEQ ID NO: 6512 - protein, 215 aa, Methanobrevibacter ruminantium
MKEYIINAKDMEEKELNRAIKEQAAHHDKLIINNPESRHNICAGLSEDVDIEINGSAGYFVGTMVNGPKIHINGNAGWFAGDNMTKGELIIEGTAGDGAGQGIYGGTVIVKGSTGSRTGEIMKGGTVIIGGNSGFMTGLLMMGGKLIILGDVTDDVGESIMRGSIYVLGEVKSLGKNAIMEETTDEDLKDLEETLTKYGFEDIDYSNFKKIVNIQ

SEQ ID NO: 6513 - protein, 364 aa, Methanobrevibacter ruminantium
MSEHKIAMVGTPCEIMAASKLQDYTDSPIEVKLGLFCMENFSYKYFVNFLKEYDLKMDDIEKFQIDKGFLFLILKTKETVKIPLSVAKRIIRKNCNICVELTSETSDISIGSIGSDDGWSTLIVRSEKGEEIVKGAIEQRFIEVEELEESKFQLLNKLAQGKINRNLEHIEQREFLARPVLYQREKDDDSISKEISESDFSDLKSNVIDIGACVLCGACEYACPDNLIIIDDTKPRMKGQCPPDCHACFAVCPRTFIEEHLRNDNEKPIGDYINVYTVRSLKHSQGQDGSIVTTILDYLLSNEIVTEALIVDKKDDLAWKPYAKLTKDIDQVVKSGGTKYSVCPVFKPLKEINEESSTTEEGVN

SEQ ID NO: 6514 - protein, 495 aa, Methanobrevibacter ruminantium
MSFTVERKIEICRQNNDRPGCCWYLCDNPNKSACKNCYSCYSNCPHGVYEVINDEPLPIHQENCVGCKICEEMCPTHAIYVRPLVDEGRGIWSNSTMVEIKRKSQTGSYKVRGCGLTRRIPSFDDLSILPAQVSRPPIDSYRETCKTSVVLGDRFAENPIEIDTPIMIGAMSFGALSKEAKIALAIGSSKVGSITNTGEGGMLPEERHYADKLIAQYASGRFGVSASYLNNAEAVEIKIGQGAKSGMGGHLLAHKVTAEVARVRNIPEGTSALSPARHMDIVGPEDLGMKINQLREITDWKVPIIVKFASGRVEQDVKIAAKAGADIIVVDGMQGGTGAGPEVVTEHAGIPTIEAIVKADDALKEINLRSEVSLVAAGGIRSGADVAKAIALGADAVYVATSALISIGCKVCQSCSEGICPKGIATQDRALRRRLDPIRKGQQVANYIEAMTQEVTSLTQQAGNTDIENLERQDLVALTMEASQLTGVPMVSQRY

SEQ ID NO: 6515 - protein, 880 aa, Methanobrevibacter ruminantium
MAAFDRIKSGIPGLDSALDNIRLGDNVVWNVTNLNEFSYFVNPYIKQAKEDNRNLIYIRFANHPPLIEMTEEDFRLLEIEQNNPETEFSMIERDGIKIYLVNPYNQFETFTLEVHRIIEKEGFDAFYVFDCLSDLQAVWSTDLMMGNFFKVTCPFLFQLDTVAYFPIIRGRHSYDAIAKIRETTQLFLNVYSNSPEEVYVSPLKVWNRYSQTMFLGHKFNPRTGFVKVLQDGQEVSKYYKTINSDKYMNGQTLDSWERYMLKVRREYEEGKNIDEECDKICELMMTKDEKMLSKIKEYFSFEDYTTIYDRRVGSGLVGGKSCGMLLARKIIERNCPEIYNNIFEPDDSFYIGSDLFYTYIVSNDLWDLRVKQRTPEGYYKYGKELEEALKNGSFSDQTKREFIKMLDYFGQNPIIVRSSSFLEDGYGNAFAGKYESVFCVNRGSLEERLAAFEEAVKVVYSSTMNISALEYRKINGLDDTDEQMALLVQRVSGSYHGDYFFPTAAGVGFSYSPYSPLPDMDNSKGMLRLVMGLGTKAVDRTKKDYPRIINLDKPEVTMAKDIKEKHRYSQHYLDVIDLKEISLHDIPVDEGLSVIPRYSKNMLVEHDREAERMFRDRGQRREIVFVNCEGIVKNDAFIETMKEIMSTLQTAYDYPVDIEYTVNVGEDKSFNINLLQCRPLQVMVNNEAIEMPEDKNVFFHIKESSMGMSRKNTIDTICYVDPHKYYEYPYAQKSSISRVISDVNAYLKSNNKTAILIVPGRIGTSSPELGIPVVFADISYFSAILEESYSDAGYMPELSFGSHMFQDLVEADIYYGALFENEKKLEFNKDMVYDYPNILKDINPNLSEEIYDMIQVIDFDENKAELYHDMNKDETLCIFK

SEQ ID NO: 6516 - protein, 451 aa, Methanobrevibacter ruminantium
MNKSKKCAEKDLAHIWHPASQMKDYEDFPPIVIDHAKGVHLYDVDGKEYTDIISSWWCNILGHCNEEVSQALKDQLDELDHVLFANFSHKTIIELSERLIKVMPKGLNRFSFVDNGSASVECALKMAFQYCAQTGRAQKKRFMCFTDAYHGETLGALSVGALDEYSSVFEPIMIDTIKIEAPDCYRCPYGKTRNDCDCQCFEHAERAFEEHGHETCAMIIEPLIQGSAGMKIYPPLYLKKLRELCDKHDVLLIADEIATGFGRTGKFFAVDHANITPDIMCVSKGLTNGYMAMAVACTTDEIYNAFYGDYEDNIAFMHSHTYAGNPLAASVANATLKIMERDRIIENNQEKAIWLNKRFHNTFDEHPNVGEIRQMGLINAIELVEDKESKKGFDSSLRIGYKIYREALKDGLMLRPLGNVMYFNPPLVITKEELDESLAICKKAIDKVLLD

SEQ ID NO: 6517 - protein, 532 aa, Methanobrevibacter ruminantium
MTKFIFLIILLKFMRKEILIAAIAIILILCGGVFAASNMQIADIATFSLNAIDLEDRGSLIVDSEDITASKGYYNSSASDENVVLVKNYSLRLSNSIVNKTGDTGSSGDDADFYGINSAVLVNSNGSVELSDVEIETNSKGSNGVFVTNAVSDSNSNSSSSSGSPIVDSTERHDGKSDAEEPGGVPPEKPVEDGPSVYGGSSGGKGALSDGNQSMPAPGASSSDVEGSSSADISNVRITTHGDKSRGLDATFGGKIIASDVEINTDGQSCAALATDRGEGEVHVKNCILNTGVDEKSGRGSPIIYSTGNITADNSEGCAHVSQIACIEGKNSIALSNCEFSAGAGGNREDNGEYVDLGGVFIYQSMSGDADVGTSLFDANCCVLSIEEDSEYYKTAPMFHVTNTKAIVKLASTELNFGSGVLLNVSGQSQWGTVGSNGGELEFDASDEILDGDVFVDSISSLNMSLASTSFIGAVNPDDDFGETNLVIDSDSDWTLDGDSHLSSLENNGDIDYNGHTLYVDGKAYTESNPFK

SEQ ID NO: 6518 - protein, 232 aa, Methanobrevibacter ruminantium
MSKGLFVLGTGTDVGKTYVTGLLLKYIRDNGYNASYFKAALSGAIRDNEGKLIPGDAVEVINMAGLEEDTDFLVPYIYETAVSPHLASQIEGNPVELDKVKHAYEEVSKKYDYIVMEGSGGIVCPIRYDGQGCKSNILLEDIIKCLDLNVLLVADAGLGTINSVITTVDYLKNRDIQVCGILLNNFKDMPMENDNLKMIEELGGVDVIAKIYKNDKNLSLDVQLDVLMNYFK

SEQ ID NO: 6519 - protein, 326 aa, Methanobrevibacter ruminantium
MYNIIELKDKVLNNYKVTKEDALNLLDVPLDELSDAANEIREFFCSNKFDVCTLINVKNGRCSEDCKFCAQSNHYDTDIDIYPFLSKEELVGKSNSLLDAGFKRISYVASGRKIRDKEFDIVVSALEQLNKDRTDEFHLCLSLGLLSEEQISTLKNLNVERIHNNLESSRDYFSNICTTHSYDEKLDTIDLIKDKNLMVCSGGIFGMGESFEDRIDLAIQLRDLGVKSIPINVLNPIKGTPVENNKILSNDEVCRLIAIFRFINPDAFIRMAGGRTLLGDNGRKAFQSGANAAILGNMLTTSGVELEEDFKLLEELGFEITYSIDA

SEQ ID NO: 6520 - protein, 237 aa, Methanobrevibacter ruminantium
MDERGKKYLLKEDREFQTDLGIIKKEQMERATIGDTIITHLDKEFKVIKPTVNDFIDLMERRCSILIQKDIGTVLARTGLGAGDRVIDAGTGAGAIALNFGNVVGDKGQVYTYEIREDFAEIAKRNIDNFGIKNIEVKNQDIKEGIDEEEIDLVFLDLPKPFEIFEDVKKALRLGGWLAVYAPYIDQAEVAYRIAKKLDFRDLTILETLEREMEIRPQGTRPKTRMVGHSGYLVFCS

SEQ ID NO: 6521 - protein, 842 aa, Methanobrevibacter ruminantium
MVTYIEHPLIRPNAAEARIYQQVLAANVLKNGNTMIVAPTALGKTIIAILVAADRLQKLKGSKVLILAPSKPLAIQHEENFKHFLNLPCTSITGAVKTDEREKRWDASSIICATPQTIESDLLNERYTLDDVSLLVFDECHHAVGSYSYVYLAHRYVKESNNHLILGLTASPGHDKSKIKEVCENLFIQDITIKTEDDPDVKPYFNPIQIDWVRVQLGEELEKIRDLVNKALKVRLKGLKSLGVINTVSVTKRDVLKARSRVQRKIGQSVNPPKECFQAISILSAVINLQHSLELLETQGVVPFNDYIKRLRKKTTKAAKNILLDPNFSKAIYFAKEAEEKGLEHPKMNKLVELLKLELGVDEAQTRLTSLRNDSDSSMDEKVKEDSPKIIVFTQFRDTLDMIHERCEREGIKSVRFFGQGTSDGKKGLTQKEQKKIIKSFKTGNYDVLISTSVAEEGIDIPAVDLVIMYEPVPSEVRMIQRRGRTGRKSSGRMKVLITEKTRDEGYYWTSMRREDKMKTQLATQEAIEELKLNAVEKIEVEKSAKDLGKREKVIIEDPRDDDSSDNFEEEAKNEDIEEISLENDNEEKQKELMEKEAKKKQSLEDSIIEELAKSSTSDELVVYVDSREGNSRVIRALDTIGVKVKVNTMAVADYQVSDDVAIERKTASDFVDSIVDKRLFKQAKAMMEEFKKPILILEGDDFYTGFINPNAIRGSMASIAIDYGISIIPTRTPEDTAAMIKRIAIREQQGEKKSIQIRTERKPQNLWEQQLFIIESLPNIGPVHAKNLLEHFGSVKAVLQADEKQLQEVDGIGKKTAKSIKEVVDGKYLYFKKPEKNEKLI

SEQ ID NO: 6522 - protein, 5066 aa, Methanobrevibacter ruminantium
MKFEKISMLISIVLISLIALGAVSAADDVAADDAVAPATVDEVQTIDNTITNDDISYESTDIIVNDTGDSADSKAKTTSLSANAVNEGETLSFTQLAADVSSSPSMLSGAYYKYDPSTDTAFENGITLTNGLTIIGGGATIDGDNQARIFNIPEGVSVTIMGVTLINGAADEGAAIYNSGKLTLMNAKVNDNTAVKSGGGIYNNGGEVLVTSSEFDGNDLTDRTVNGYGGAAIYSNGGSVTITDTNVTNNLKNIVHRGGTGTYTGDLSSAAVTSNNADLTVTNSRFIANSGSYGGAIYSGESTSANLLVSGSTFEDNFAFNGGAIDIVGTSYTISDSTFKNNNVKGTGSTNSNYASGGAICVQDANNPGLISGCDFEANSGVVGGAVNCENTMVLDCTFTDNTANSANSETFNGKTNNRGGFAGAIYNEGTITISDCEFDDNAGRGEGIRVKNAEISDSSFTNTRIDTCQNSNVLLTNNTYNNPDRDVQAASGTQVTVDVADGDIPNANTAPYIVGDLTFTDLQALIDSGSSGIRLTGNVIKTAEEETTFADGLNVDKTVTIYGAEGKVIQANSGKIFNVAEGKTLTLRNATLQGSGETAITNYGTVYLYLADNNQFTDCGDVLIDNHGRTTETGLTTFTQLNNLIGLVNGGTVYIGESKITKAEDEKEAYKNGIVIDKDLSILGSYNTYYKYVKTSINANNDGRIFTVAEGKSLSLKYINVTNGAADEGAGVYVSEDATLIADTANFIKNTAVTKGGAIYSEGTVDLTNVNIKNNTISKTDGVMADDNGGAALYNNGGTATLDKVNVTDNQKTYVIGDIMDGVVVSKGATTITNSYFANNSGRWGGAITQTGTDQTLTVEDTIFEENTAIFGAAIFDNSPLVVKDCKFYNNSAIGPGSPGTSNSQGAAILVMDDTASADISGSEFINNTADCGGAVSLAGVGSDSSIDDCTFIDNTAYADGGAVYFWTESASVTVTDSEFISNTAPYGGAIENEGLGDLIVDGCEFTENTASLRGGAIISSGDTSVSNSKFTDNEASGNTNAIYLYNSGSSLSLSNNVITGSDDAQIYVKEGIDVVTPLKVKILNNETVNINMVPYDITATVTDDKGNNIVDLAFRFTVGDDVVDGISIDAATGVYTATFTPTQAGEFVVSTNLANADEVQTGTLNVFRTLTDLKAIIDANTNGTIDLDGNYAYNAEFDSALTDGIVINKDIVINGNGFTICGENSTRLFHVTSGFLTLKNATVCHGAAEKGAGVYVDHGSKLSTDYVTFTENTAVKRGGAIYSEGMVYIGNSVLDSNNITFRSANDDNGGAAVYNLNGQLTIEKSNITNNLKDIVIRNGNAGDLLVGVVVTTGDTLIKDSYFANNTGSWGGAISSLGYMNTDDYTLTVKGTTFEGNNATFGGAIFVESSNLVVDDCIFNENTGVGKGSDGTSNTQGGAIVVHPTGSKATITNSKFNKNSANTGGAVSLAGVGQDSLIEGCTFTDNTANDGGAVYLWTGGNAIVTVKDSSFSDNTANFGSAISSDGTLSLSHNEIANDYTITPIGSYDGTIVSAIYVTTLNGETIITGNPTQNLTATITDDNGNPIVEKGLVLEVYGEEVETSYDKTTGIHSAIHTFTKPNSYRITAKGFDQDHTTPGYIVYTGGTFNELQDLINAAEEGATITLDHSIVYDEEFDGVPFLDGITVNKTVTIVGAEGVEICANNLARVFKVTDGATLTLKDATVCHGTAQKGAGVYVDAGASLIADNVTFTKNTAVKRGGAIYSEGMVYIGNSVLDSNNITFRSANDDNGGAAVYNLNGQLTIEKSNITNNLKDIVIRNGNAGDLLVGVVVTSGETLITDSYFANNTGSWGGAISSLGYMNNEDYTLTVIGTTFEGNNATFGGAIFVESSNLVVDDCTFNENAGVGKGSPGSASTQGGAIVVFPSGTKATITDSRFNKNSANTGGAVSLAGVDQDSLIEGCTFTENTGNDGGAVYLWTQGDATVTVKDSTFTGNTAGWGNAISTDGALKLEGNTISSTSADVGNWAGTIDSKVYAQILANDTYNWHMGGFVINATLTDDMGNLINDHNFNYVITKEGATDSISVPATFYTSLGYYQGTFTPADIGTYLISLDYAVEEVNTSVVVVSRSLIDLANIIAADEDGIIDLDDSYTYIEEFDSSIVDGIVIGKDVTINGNGHTICGDDKARLFHVTDKALTLNNVTLCHGNALNGGAVYVESAATLNANNAEFNENTATYRGGAIWSTGTVNVKDSSFDNNNITYRARNVDNGGAAIFNNGTLNVDHSNFTNDLVGYVVRTGDTNSPQLIDGIILSSGVAVINNSHFENNSGTYGGAITAVPIASLGSTATSLTVENCEFINNLAYCGAGISINADGNGKTTYSIKNSTFIGNNATGVGSTGSTSAGGAISIARDSEGTITDSKFYNNTATTGGAIDVSATRSSSKVTIDNCDFENNTATAGDGGAVRISKNNLEVAVKNSNFTNNDATGDGAAIYNNGVLTLEGNKVTSGETEIYVGPNGSVVNSIVKAIFLGDAEDNTILAFLGDEVHPYATLTDDNGNAIYDVDFNITVDGVEYETSYDDSTQQYTATYTILHAGDNIVSTNYDAQKTDGKYDVPKANATIVVTTESISVGDKATVNINLTGTDGVGLNGTVKITINKAFTDTVVTENGINVTEVEGLEIGEYFVYVYFEGNSDYNPEYNYTLFRVTGNVSYFNVTIEDVTYDDAATIKVTVQDGPIDDPDNGVTGIVLVTIQGKDVNFENTYSVSVIAGEGSYTVEGLAPGNYSYAAKLLADELYNEAYLEPQNFTVFENPYSELEVTDDGPIASGETVNITATLTDFQGNPIEGATLEVYDTGVWIANITTNAEGIAETSIDNLGYGLHDITVIFNDTVHDVQTETVTVSVTPKKGTFTDLQYLIDTADGRLVLPYDFAFDAAYDEQFFLTGVLVDDNIIISGAGHIIDGMKKARILYINAPNVKIFNVSFVNGKSDVGAAIYTEADYLLVDSCYFANNDPEAGAAIYAESGVTDVEETIFFNNTAVNGGAIYVESGATLNVADSEFNQNTATYRGGAIWSNGTVNVKDSSFDKNDITYRVKNDDNGGAAIFNNGTLNVVNSRFTNNLLNYVIRTGDDNHPELVDGVILSSGKAKISNSHFENNSGTYGSAITALPIGTELSDLTVENCEFITNLAYCGAAIYVGSGTTLFYINDCVFIGNNATGVGSNGYVATGGAIKIAKKATGIIADSQFYNNSAANGGAIDISATSGNTASVLIDSCVFGYNVADQGGAIYIDNRTTVNLYDSTLYYNEGEALNYHIFLNGDATLGFEGNNFYTTIPTIVAEDTYAYGETITINGTFDWGVNNKPINMIYTINGAPGTAEVVDGNYTILIDNQPDVGDYTIVITAFTDENGNVYHVETAQKTISVTKATPILSVEGDEYLMPPSDDATVTISLTDKDGNGIKGTVIVTVAGETYLVETDEDGDGELTINDLPATTWAIDAKFIGNDNYNEVVNDTEEITFIADVAYFDIIIEDGVYGDKLTVIVENATDIDGNSLTGMVTGMISTGDDDISFIVYVNNGQGTNTTTTAGGVGKFTGDAYFYDSMMEFMSGPEECSAYVSPANATLYLVPWDADDLSSDIAYGDTIEFGAAVFGVNLEELNGTVYYIITELNKKGEIAIVNGSGAVNLTDILDVGTYTVISYFVDDKGNYDPESSVNYTNFKVAKATPTLNVENAQQVYADTNTITFNVTGIDDKGVKGTVIAIKPISEDVSGAIYDPETGLGELTFNGLVVGDNPIVVKFLSDDDNYANAEKTINITITQATLAIDSTITTQEIVYGKDVEADVTVTGIVQEDTVIANVSLYDNATGELLDSFNIALGLEDSISFEDLEVGDYYYTIEFTSELYAGDNFTSEVFTVNTAEILDLDSSNVDNVSYGEGIDITVYVDGMIEGDLIEVNFTVVDATTGDDVFNGTYNISNGDVITVPPLDVGKYSYSVSFYGDDKYNTGGADSIAAVGSFEVLDMSDVDVLVTADESITYGEKVTVEIDPIVSEGGLPVTGTATIYVYDDPASVDPVYVLADVELDKDGATAVLDTILPTGEYWIVVDFESDDGYYDGRGVTSTIVDLALAKLSIDPITVTYGETIPITVTALGNGGELLNGTVEFKIYGPGFEGTVTVKNGTGVTNITERFDVGTYTIIAAFGDDGANYEGFNITSLEITPATPIVRVTGSEVEYGEPSTVTVSVSDIDGMPLSGKVIVTVDWVVDGLTQVIDLDDSNEASFDLSPYVHQGTYDVTVTYIANGNYGEAVNDTETVNVTASTTATVNVEVPEDVSYGDELTIKVTAEDGAGEQIPLEAVNVTVNGETKEYPVDENGTVNLGVLPAGDNEITVALDDGTHKPTKTEATAKVAPAEAVVFVDTDNDNPSYGDVVVVTVNATNKDKPIDADACLVVDGYLIGYYDLEDGQVEISIKDLAPGKHEIEVSVANGNYSEGSYGRAIVNVDKATPVISAEGETVEWGEVATVKVNATGANGEKLNIPLVVRVIWEVSGVDELIEIENGTGEAAFQISNYVAPGTYNVTVIFLGNDEYYPVNNTEAKIILTEPKTVEMEVSITPDEYGKATNVTVTLKDVASKPLEGSTVTVTVDGKEYANATIGEDGTVTVPVEGLEAGNHTIAVDFDDGEHSPVHEEENIAIEPSTDATVEATVNVGENETTVDVIVKDSTGEGINGTVIVYVDGEPVANTTVGNDTSSVSIGQLAPGDHTVDVEFVNPNYAPTSYSTHVTESTSLTNMTVKVDKKNILYGESDITATIEFTSEGKALDGVVEVLLNGEAQNVTVTGGKATVKFSDLAADHYTVVSNFAGNATYAPSSDSANFVVERKATKFNYNDMNTTAVNPNVDGRIGEYFYFQLVDQDGKALANKSVSIGFNGKVYNRTTNETGWAKLQINLRIVFGYTFAISFLGDDNYTGAFNVALINVSAQTPKLSTSSKVYKASAKTKTLTAKLLTSSGNVDKGKKLTFTVNGKSYSATTNDKGVASVKVSISQKGTYSFTVKNAKDNTYASVSKTAKLVIK

SEQ ID NO: 6523 - protein, 597 aa, Methanobrevibacter ruminantium
MFKLQSLELSGMSDEELKGLNLEGKTFGVIGVCGVVGNLVARIIMDNGYEVIGTDISSKEDCRFYSSFDDYDIEIFFGGHPDEFFKQIDFIVPPPSMSDDAKVLELAREKGIDILHLGDIFKLFKANKPILCISGTNGKTTTTTLLKHIAYSNGISPAEHNLKGMQGNNEFIPSLQTRLHGDVAILETGTDGTPGGLKSVIDLTHPNYGILTNITIDHLVDPDDHKDGVDESLSAISLDIGDDEVSHIDRGFLEYARVKGELIEGIEENDGLLIYNSDDPTIVGLLDKLNYSGKSISFGVEIDEFDNFELEIDEFDFDSSFDSVSPIKIHTKPCWCGRDIKIYETISGSGFYECQCGIKYEKPVYIAKDIDLMNRSFNLASRDDEFEFKLTLDGLHNVYNAVGAIIAAKEFLGLSNQDIQKGLSTFKGVAGRMEIIDKIEDTTIMVDYAHNPAGVETILDAISKIYDKTCVVITVSSESGVEGDFDILDSAIGKVDYIVPASHDCRYAADKLIELTKENRQEELHLNSVYTLDELCKTFVLTDEDLKQESIKTLGASEDQVIGGLKEALNLDTDIILIIGEAAFKFESAIKDFCDSL

SEQ ID NO: 6524 - protein, 498 aa, Methanobrevibacter ruminantium
MNVIVVGAGNAGRPVARLLNYAGHTVKITDPKNIEDFHMDVQKTLRLMESEGVELDLGVFKPSLDGIDTVYLSPTVPENSPAYKIIKEADLDVFTNDDFGRLADSFIDIDIIGITGSVGKTSTTHMVTEIFRTAGYQVWICSSMTQNLVSEVIVDGIIKGIPEKSDIAVLELPHGTAGLMAELKLKVGALLNIYEEHLSEFGGSMERYTQRKMFIAKNSENFITSIHCKDTVKEARPDAIFYAMVKDLPAYDPSKKSLFFDKIANFEEIAIGEGQVCNFIGDSAKGAIEIGYKFRNKSNELRKGSFQSEFHMMSYYYENAVAATAIAMAYGLSVEIIKEGLANFKGLSVHMEYIGDYNGREVYIDASYLIEGITVALDFLGDRSLVLLLDNFDTSTYRDKKETGKLMGKYANVMVATGFNEVYQRVDLEPAQELLDAAVDSDAVKVIAGTMQEGAELAIKYSKPGDTILHLGPQLMQDPEGIMEKIVTGLEEGCKKYK

SEQ ID NO: 6525 - protein, 323 aa, Methanobrevibacter ruminantium
MKRPKKMYNPEDMFIKRSNTYLGRVMHSFLKLPGRYVNSRTNQYPDFFGKERKTDATILVDLELEMEESEVLESSYEVFVSEKETEEIPQLAECLHNEKGKMIIDIEDESSKVDKQTLAKDFEYNYIIHYESGLPVYSVITTPIPLKRCKTCYISGNTVFKPIIKSYDEMDGEAKLKEFQEKYERGEYFSDLEGYELISIPRMYGEKGNEVIEEVCILFNKIKMKNGRVKIQLARCLDCLINKYGGTLEEINRLEGLINMTKLINLEKEYEDRLRQEGEEKGRQKGRQEGRLEGKLELARQFVEELGVDKVSKISKIEKNLLL

SEQ ID NO: 6526 - protein, 117 aa, Methanobrevibacter ruminantium
MYGQKGNEVIEEVCILFNKIKMKNGRVKIQLARCLDCLINKYGGTLEEINRLEGLINMTKLINLEKEYEDRLRQEGEEKGRQEGKLELARKLVKEYGVDEVVRISGLSKEKILNEKN

SEQ ID NO: 6527 - protein, 411 aa, Methanobrevibacter ruminantium
MFLTNEEEKMANGEYGETIRKSMDILIALGDIYGAEKFVDIKSAQVSGVSYKTIGQAGLEYLEDLASTSEIIYNENGTISDKSGIATISATLNPAGTDLDNWEDFGFPADFARKQVDICNAYGALGISTTCTCTPYLIGNVPRFGDHVSWSESSAVAYVNSVIGARTNREGGPGALAAAIVGKTPLYGFHLEENRKANLLVEVESELERADFGALGYAVGQIVKDGIPYFKMQNKPYEVSNGNLKALGAALASSGAVALYHVEDVTPEFANAAIDDVENKITITKDDIVSTREKLSTADGYADLVCLGCPHASLEEVKEVAEIVKGKKIKNELWVCTSINIKEAAKRLGYLETIEKAGGKICCDTCMVVAPIEQMGYEVIGVNSAKAANYVPSMCGLRVIYNDIEDLLDFE

SEQ ID NO: 6528 - protein, 319 aa, Methanobrevibacter ruminantium
MDIGKLVGNTPMIRIDYEYEGKTGSIYTKLEFYNYSGSIKDRIALYIIEKEKERGNLKDGQAIIEVTSGNTGIAFSAIGALFGHEVHIFMPDWVSLERRKLIQMYGAEVHLVSKEDGGFKKALELVDDFADEIGAYKPLQFDNELNVEAQYETTGQEIIDDLPDVNAFVSGIGTGGTLMGIGKRLKDYNPESKVFALEPSTLSILKMGMDEGSHLIEGIGDDFIPGIVDEDVIDDIVLIHDCDAINMSKIIAQKLGLGIGISSGANFLASVIMDNDDLKIATVFPDDNKKYITTKLSEPIDENPELISNKINIIDFEVV

SEQ ID NO: 6529 - protein, 432 aa, Methanobrevibacter ruminantium
MLKKHIENEDIIRLISHNDADGLSAAGVIANAIKEEGGQFHITIVPRLKPDVIRDVSKEKYELYVFSDMGSACIKQLNRLKSDVIVADHHQPSEHEPKDNLIHVNPHLFGIDGSRHLSGAGSSYLVVRNMNKKHLAYMALIGAFGDMQCANRFTGINQLILKDGQEAGNLELHEDLKIVSKAQEPLYKSIAYTLNPALPGLTGRLDNSQELLEKMGVSYGISFLDLEDEEKDVVKDELVKVNPQIFGDVYSVPSEHPVLRDLEEYSSILDACGKNKEYGLALSIILGEREKSLDEALKLQKRYREDLTKGFEWISREGAQQLGSIQYLYSEDKVLKSIMGTIAGVGMSAKILSDEKPVIGLSRLHNDIKVSGRATRFLVARGVNLGKALADASVNFGGQGGGHDIAAGAMIPYEAKDNFLHLLDQIVEDQLQ

SEQ ID NO: 6530 - protein, 132 aa, Methanobrevibacter ruminantium
MARPDWIMYSNEEIEEFIVKFKREGKTASQIGIILRDQYGIPSVKEVTGEKITEILRRNGHADEYPEDLMNLIRRAVNIRDHLEENPKDLHGRRGLTIIESRIRRLGRYYAANGQLPEGWRYDPTKAALLVK

SEQ ID NO: 6531 - protein, 185 aa, Methanobrevibacter ruminantium
MITFITGNEHKVIEAENIFQIFGVKLEHIDLGYMEPQGTLEDVSKFGAKYACQELNRPVIVEDAGLFIRALNGFPGTYSSYVQDSLGNENILKLMDGIDDRYAEFRSVIGYCAPNSEPKVFLGRVKGQIAHEERGNLGFAFDPIFLVPEEGKTFGELTTEEKNQFSHRRNSLEKFINWYVSQDDE

SEQ ID NO: 6532 - protein, 565 aa, Methanobrevibacter ruminantium
MISLGIEGTAEKTGIGIVDSDGNVLAMAGKQLYPEVGGIHPREAAEHHAKWIPQLIPQAMEEAGLDYKDIDLISFSQGPGLGPALRIVASSARSLALSLGIPIVGVNHCIGHVEIGKLDTGAKNPVTLYVSGGNSQVIAYESGRYRIFGETLDIAIGNCLDHFGRETGLGHPGGPVVEKLAKDGSYIDLPYVVKGMDFSFSGLLSSALRAHENGERIEDICFSLQETAFAMLVEVTERALAHTEKDEVLLCGGVSANSRLRDMMKIMAEEHYAKFYMPEMKYSGDNGVMIAWLGQLMYDNFGPLDIKDTAIIQRFRTDEVDAPWVDNRKEKLNLPEELKAKGAESDIFEAKWLGMDAIVKQRVSKSYRIREIDDKIRRQRTKSEAKILSDVKKTGIRSPILYDINLDEKYIVMEKLNGPLVKDVMHKLDYDKRKELSYAIGENIRLFHDGDIIHGDLTGSNMILLSDDSNDSNDDFSKSDDDFNNGVNLDNLDFANNLAIFDFGLGKYSDLLEDKAADLLVLKKSFQSIDYDIANECFNWILESYGSDKIIDNIADIESRGRYTH

SEQ ID NO: 6533 - protein, 354 aa, Methanobrevibacter ruminantium
MIEGLKTYGSDKIVDELKDLKNPIFICTIATTETSKIPGLTGAGATPELTKYTPAGDAELILEGEVKCMKDIPQTVIGEVVTPTPSMITKGSLALCDCPVMVLDAGSEIKAQTDVFDISDGKHGMDIRTGKAVEDSEELFEKGYSLGEILSEKHGYIVVGESLPAGTTTALGVLVGLGYDAKGKVSGCMNTNPHEMKNELVDEGLKNAGIVPSKDNNPFDVVNAVGDPMLPAVAGLIMGSSVPVVLAGGTQLTAACAIVKALDDEFDFSNTCLATTSFVVKDETANILDIISQIDDITVNAVNPNFEISKVEGLKNYTKGYIKEGAGAGGAMFLALLLGNDINSIRESIEDACS

SEQ ID NO: 6534 - protein, 66 aa, Methanobrevibacter ruminantium
MANDNFQVNKQFAKFKGKNVLIGLKNWEEVEGKIITIDNFLNLVLDDGNGLKVIKGGKVAFISIQE

SEQ ID NO: 6535 - protein, 48 aa, Methanobrevibacter ruminantium
MAINQLEATLQAVTHTLAKLEKEGCSDEKLLKELREERDKLLHELNLN

SEQ ID NO: 6536 - protein, 260 aa, Methanobrevibacter ruminantium
MIHMKILLSNDDGVNASGILAAKHAVEDLGDAIIVAPSNQQSGIGHALTLFEPLRVNKVILADNDIGYGVSGTPTDAVTIALFELLDECPDLAISGINTGMNTGKAELTTSGTLGAAIETATFNIPTIAVSQHVSDDDLKFDEGEIEIDFSSSVKVLRELVKKIIKDGFPKGIDILNLNVPSHPDSYEPVICPLGDRMYWPVVEKRHDPRGREYYWINGDEYVGNPKDSDIDILNQNIPTITPLTLDMTHNMDYLREWYG

SEQ ID NO: 6537 - protein, 236 aa, Methanobrevibacter ruminantium
MLSIGQCYLEFVNKILKEGKETYKDSDHHLKEYLGNYYYIDDPLDLKFRAKYQHMTPELMLEEIKKGRYDIDACPIKGDALYEYVKSFEIRDDQGFVYTYPNRILEHFGVDQFEVMKERILTATGSNRAVAVTYDPKLDHDREDIPCLQFVQMLVRDGELTIHVIFRSNDIFGAFYSNMFFICYMGIKMKEEVNKEIMGEKLNFGGIHYHSTSGHIYNNDMRAARKLISANKAALK

SEQ ID NO: 6538 - protein, 399 aa, Methanobrevibacter ruminantium
MEKPQLVNFIAKVLEDSGFKVYKNFKTSQQTVDIYAVLPTSMGDFGMVVACKNYDKEWEVGIDVLKEMEVIGKKLKASKVSVVTSSGFSSQAKRYAEERKIKLVDRNDLVALAKKYNNKKKQENEPVRLRKESPANIDRDSFYNRDVSRDYIDNVNGTQYDAGLNRVPNPYDSYEEYESDIDYYENQVGGIDLSGYSAYDDDLYRAEFLNRHPSNESNYNGLLIANNRDPYVNSKPSSNSRSLFSRNKATEKLSSLNSRGYTKNTNNNNNRQRNSRTTTVSRNKSPSRNFISSRDNALSKFSRNESRSSGGLKEMIKPILGNTIVSIIVVIVVAYLIAFILGSIVKVPTGYLGLTELAVALVLSYGLVFYTDRGSDVLVKGTIIFFISLVVLMIILIAF

SEQ ID NO: 6539 - protein, 307 aa, Methanobrevibacter ruminantium
MAFDENGKVWMDGEFVALKDAKISVLSHVIHYGSAVFEGIRCYETENGPAVFRLQDHVHRLFDSAKIYKMDIPFTEEEICDAIIETIKVNNLKSCYIRPITYRGFGELGVNPLNCPVETTIAVWEWGAYIGEEEMEQGANIGISTWRKPAPGTLPVLAKAAANYMNSQLANLEAGEHGYDEAIQLDYHGHVAEGSGENIFIVEKGKIVTPDLGSSILQGITRDSIMTIAKDLGYEVSQETISRERLYLADEVFFTGSAAEVTPIRAIDNRQIGIGSRGPVTKELQEKYFDAVNGRSEDIHNWLTYVE

SEQ ID NO: 6540 - protein, 274 aa, Methanobrevibacter ruminantium
MDILQAIIIGLVQGLTEFLPVSSSAHLIFIQQALGLSNVPLAFDVLLHVGTLVAVFVYFFSDIIQMIQGFFYSLLDLRDGNFIPEIRRDPYKKLAWLTIIATIPVGVVGILFNDIIEEMFTGLTIPAFLLLITGCLLYVSQRMNSGKIDVQNITIKEALLMGCGQAIAVLPGLSRSGTTIAAGLFAGLDKEFAAKFSFILSIPAILGAAVVQLKDLSGGNIEIGACLVGFIVAVISGYFAISFLLKIVREKSLDIFAYYCWIVGVIVLVGSILL

SEQ ID NO: 6541 - protein, 333 aa, Methanobrevibacter ruminantium
MVYVGMDHGTTGISFAIMDDEKVLDVFKISREDSKAGRVSAIEELSKRIDLEDIDLMIITYAMGDGISTILPMEKVENRGILSIGGAGKVTGGGTSVYSEIENANLPVLMIPGLHKDCDWLDPLFRAAYSHHASPEKVSIVYNAYLETQWENMVVADISSNSVDLLIEDGKIKGAIDACCGAMGIVHGPLDLEMIRDIDEGKRTANECFSHAGAVKIANVDNKVALMKDELLEMYSKGDERAVLAIDTMIMTVAMEIAGLIAVSKNEIDGIVLTGSMGSMKEPVDFEAGLNKYFKNKYETRIISSESGAIGAAQIARDIFNGKRDIMGIKVDY

SEQ ID NO: 6542 - protein, 331 aa, Methanobrevibacter ruminantium
MKMYYDDDVDAEVVADKTIAVIGYGSQGRGQSRNMADSGLNVIVGLREGGSSWQKAIDDGMNVKTIEEAAEAADIIHILLPDETQEKVYKEQIAPYVEAGNTISFSHGYNIHFGLIQPGEDVNIVMFAPKGPGSRVRTTYLEGFGIPGLVAIEQDATGDALQLALGMAKAVGLTRAGVIETTFKEETETDLFGEQTVLCGGLTALIKAGFETLVEAGYQPEIAYFETCHEVKLIVDDIYENGMAGMWHDVSNTAEYGGLTRGNRVITDATKAEMKAILGEIQDGTFKKEFADENATDAANLKEMRAAEERETIEVVGKRLRIACGLQKEDE

SEQ ID NO: 6543 - protein, 163 aa, Methanobrevibacter ruminantium
MREKSHVISTLVEHKPGVLQKVAGLLNRRGFNIDSITVGASEVEGLARMVFVVKGDEKVLEQVIKQLHKLVEVVKIKDLDPEYVLKRELCLVKVKTTKEKSRSEIIEYADIFKAKIIDVCDDFITMEVTGNPEKIDSFLRLLKPFGIKKIARTGPTAIARGHH

SEQ ID NO: 6544 - protein, 631 aa, Methanobrevibacter ruminantium
MRGGDAIIKALMDKGVDTIFGYPGGTVIPFYDMLYDSDLRHILVRHEQCAAHAAEGYARASGKVGVCLATSGPGATNLVTGIANAYMDSSPIIAITGQVVSNLIGNDAFQEVDIIGITMPITKHSYQPKDANDIPSIINTSIEIASTGRNGPVLIDVPKEVQEMELDEYVLGTIPTPGYKPSVKGNDKQIAKAAKMLLEAEKPIILAGGGTILADASSELRQVAELVNAPVATTLMGKGVIDEKDDLSIGMLGMHGKQVANQSVNKSDCLLAVGVRFSDRTTGKLEKFMPDAQVIHIDIDPAEIGKNVPVDLPIVGDAKIVLAKLADELASSRFAEEFDDDELSGSKIIKGLMENDLAKELYKSKLVKEIESSKFKENYEFNYDSYSPWLKSVVDFKNATIPRVSYSDIPLKPQQVIKEIASSITDDTIVTTDVGIHQMWAAHFLDISKPRKFISSGGLGTMGFGLPAAIGAKVACPDDAVLAIVGDGGFLMVSQELATIKEHDIPVVIAMLNNRKLGMVYQWQNKMYDKRYSETDMGNTPDFVKLAESYGINAVKVEEVDKTQEVLSKALKDNEAILLDITVEKDEFIPMFPPGGAITDLLGEYKYESDVKNVDLEQKESEDSQTVEGGK

SEQ ID NO: 6545 - protein, 458 aa, Methanobrevibacter ruminantium
MIFSKLENNQLLKKLLNGEIKMKVLVVGTGAREHAICDALKDDVDLYAYMSKNNPGISKISTFKKGDEGEVDEVAKFAKENEIELAVIGPEAPLGKGIVNALEAVGVPCVGPAQESARIETDKSFMRNLFEKYQIKGSLTYKVFDNYEDISAFLDTYEKDVVVKPVGLTGGKGVKIVGDHLKDNQDAKAYAKEVMDNAMGGFAQVIIEEKVVGEEFTIQAFCDGENLAAMPAAQDHPHAFENDQGLITGGMGSYSDVGGLLPFLTQEDYDEAVDIMKETLKAIAKETTPYKGILYGQFMLSKDGPKLIEYNARFGDPEAMNVLPLLKTPMVDVCKAIVDGKLEDVEFEDKASVCKYIVPDGYPDTPHAGELIEIDEEAIEALGAKVFYAAVSQEDDGVHLSGSRALGIVAQGDTIAEAEKIAEEACGLVEGNVYHRRDVGTEALIQKRIDHMEAIRNE

SEQ ID NO: 6546 - protein, 298 aa, Methanobrevibacter ruminantium
MNECVIFMSKQAKSKNTIIKKAKKLERQGKYIKALKVCDSYLDNERSEETLIQLKIDILVNLYNNDTFINEINENKSKITDFIERDEEIELLKLYNTLDNYLELNSQNMADERKVGTYLAGGLLVDNLETILVLNEMAKDNKAENKEPFKANSDLLEFIYNVKKTSYQYLDLILPNSLELLANSNFNIEAIISKIRQFLEPKKSTDSKEESIKENEEDDSDQSDSKNALKSKDDTELISDYSIEDEMKGLKEMISYLNDKNEFKKALIYQRRLVKLAREENIRAEQDHDSKQKTLSDY

SEQ ID NO: 6547 - protein, 304 aa, Methanobrevibacter ruminantium
MRSLLSVCDIEEEVETILNIASDFKAGKIEEKPLKDQKLAMIFQKSSTRTRVSFEVGMYELGGTALFLSTNDIQLGRGEPIKDTAKVLSRFVDVIMIRAIEHDDVIELERESDVPIINGLTNLEHPCQALADMLTVKEHKGGFDGKFVYVGDGNNVCNSLLLICGCLGMDMAIACPDEYRPNEEITKKAKEYAKANNSTITITSDIEEAVSGADVIYTDVWVSMGDEEESEKRRADFKDYQVNQNLIDMADDDVIFMHCLPAIRGEEVSAEVIDGPHSVVYDQAENRMHAQKAVLYYFLKELYK

SEQ ID NO: 6548 - protein, 327 aa, Methanobrevibacter ruminantium
MEFNDPALEHLVNKITVALNENNKEDAAHYMDIIIDKYPEVANILMNSIEFQNIMAQNEDVEGEEASDDFAIQPGSAMELDEEKIINDMNAMLDIEPTTAQEYIQKGTVLTVTEEYEKALECFDKALELDENNLSALISKGNTLELMEKFDDASKVYDDVMNTEVEEVYDLMSKGYIFEGHQRYNDALKTYDKALQKERYNANILFLKGSCLIKLEQYQKAIDSLEEAIERYSENPYETIFELENAYHNKGVSLHAIGEDDDALEAFSLALGLNPEYYYSYYEIGIIQEDREKYDSALKNYNKFLEYDNTDSEVVEAKERVEELLKE

SEQ ID NO: 6549 - protein, 573 aa, Methanobrevibacter ruminantium
MYFKIKTEAEEALRKAVDQFDCEFDEEIKLEFPPNPELGDLASTISFQLAKLLRKAPNLIAPEVVEKIELPEIFERVEATGPYVNFFINHDIFAKQLLDSVDEDYGQLAAVDEKIILEHTSANPNGPLHIGHIRNSVIGDSLRRLLTKAGYNVDTQYYVNDMGRQLAMIVYGMEELGLKLEDQPASKIDHKVGELYFKVNQMIKEDESLNDGVDATIRKYEGGPSELDEKFEYAVNSCLEGVKETLKRMNVKHDAFVWEGQFVRTGIVDNLTQELYDIGYARQEEVLYLDLSEFDIPKELVLRRADGTSLYSTRDIAYHIYKSKNCDKIIDIFGSDHKLAARQVELALEILEEIEPNSDKIEVIFYEFITLPEGSMSTRRGVFISVDELMDEAVRRATEEIISRRPDLDKETIDKIAEEIGIGAIRYYIARLSPEKHITFKWDEALSFERGCASIQYAHARACKLLKKAQEEKGIDLADLTVEDTWSLDENEKELVKLIAKFPSLVEDSAKIRRVHPIAQYCQDLASAFNRFYKAEQVIGSDVENARLLLVEKSRITLRNALDLLGVSAPDMM

SEQ ID NO: 6550 - protein, 137 aa, Methanobrevibacter ruminantium
MKEIAIYLILIIIVLIAAQHLNVVVSGSMEPVMYRGDIVVLQKANLFGIHEFDPHDVQVGDIVVYNAAWYDSPVIHRVINTAEINGTTCFEIKGDNNNKSDPYWVTPEQITDRVITINGQPLVIPKIGYITLWVKGL

SEQ ID NO: 6551 - protein, 551 aa, Methanobrevibacter ruminantium
MNSDNIKKGVQRAPHRSLLRACGLNDNDFDKPFIGIANSYTDIVPGHIHLRELVDYVKEGIREAGAIPFEFDTMAICDGIAMNHDGMKYSLASREIVVSTVESMTMGHCFDGLVLMPSCDKVVPGMLMAAARLDIPSIFLTGGPMAPSTYKGKNADLITVFEAVGELSSGKITEDELFELESCACSGAGSCSGLFTANTMACITETLGMSLPYCATTLALSEEKKKLAIETGKRIVEMVKEDLRPSQIMTQEAFENAIAMDMALGGSSNTALHIPAIAYELEEKGVHADLDLFDQISDKVAHIALLSPAGQDTMADLHNDGGIPAVLKTISSKLDTSVMTCTGKTLEENLKDASVTGNGVIHTLDDPIHEAGGLTVLKGNLAPNGSIVKSAAVPEDLMHLKGPAKVYNSEEEAVEAIFDHQLKEGDILVIRCEGPKGGPGMREMLNPTSAIMGMGIKNVGLITDGRFSGGTRGPCIGHVSPEAMSGGPIAALKDGDIIEIDIANGNLSVELSDEEIKERIEKADLPEKKVKGWLNIYRRSVSSADEGAILR

SEQ ID NO: 6552 - protein, 107 aa, Methanobrevibacter ruminantium
MDIKGTPINVEDMIQYQKDSVVSMEIIKKELGTVTLFAFDQGQGLSEHSAPFDAMVQIVDGEAEITLAGEPHTVKKGEMIIMPANVPHALQAVNMPYKMVLTMIKSD

SEQ ID NO: 6553 - protein, 432 aa, Methanobrevibacter ruminantium
MSDFNMFCYQCSQTARGSACTNAGVCGKNATVARLQDNLIFSMKGISAYNYHCKELGVSDESVDEFLTKGLYTTLTNVNFDIGDLVQLALDSGEANFKVMKMLKEAHIENFGEPVPAEVKVGAQEGPGILVTGHDLKALEELLKQCEGTDVKVYTHSEMLPAHGYPELAKYESLAGQLGGSWIDQRKVFADYNVAILGTTNCVLPPKDAYADRLFTMDIVKIPGAQVIEDYDFKPLIDKAIELGGLEAEELSTISTGFGLSTILSLAPKIKELVLEGKIKRFFLVAGCDSPNPRMSYYREFVENVPEDCIVLTLACNKFRFNNLELGDIEGIPRLLDLGQCNDAIVAIELAVALCELFEMELNDLPLTIVLSWMEQKAAAILWTLLYLGKTDMFIGPVLPAWANDDILNVLVENFNLTPISTPKEDIKKVMG

SEQ ID NO: 6554 - protein, 264 aa, Methanobrevibacter ruminantium
MENIIESLEKFGLTRYEAKAYIGMTNIISGKAEDIAKASEIPRSKIYSTLKELDKKGFITITHTRPIEYKVVPPREVYKRKKEELIKELEDSEEKLDEIYNSQISEVQAPIWLIKTSKNIINKEVEIVKKTRKSLNMRVGFLLEGEGEELIKAFNSIPRNIPIKILASPYCYINQERIDIIELFESARLENLEIIKADIPFVKIIIRDEKELFRTIVKFTGKEKSVLPETAVGVLNQYSDICKNFDERFVNQFNRIKAKKSSMN

SEQ ID NO: 6555 - protein, 251 aa, Methanobrevibacter ruminantium
MMLNYLFNILNTNTFLLNPKERVIQGILLFILMSVFSLLFISFITLASPNLFFPLLISFELLMLFLGLNISLHSIYTNYFNMLVSENPVLLSYEGVIVNLLCLSLGAFSFWLSIAIFIGPFWAFFSFALAWLLPLWIMFFRRDIFNEKSKVISKNSDKLIGYSPIWFYLFGCVSLFIPFLVMFKIVFFSKFNFLALGLIIITLIETILIFCPDYWDKILPFDIRTKKGTFIYFLLSILILSCISIILYKIV

SEQ ID NO: 6556 - protein, 132 aa, Methanobrevibacter ruminantium
MFEAGMIALPTGLPGLALLGLGTVLTAYGSGMFDDLGTDHPGYAKPENQLNFGLSMGLNFIGLGASEGLARGVLYKEVQEKLVTGFVPSIKAYGKTIMDESLGKGNAKISTVIWAYVENSVILAIENSINGG

SEQ ID NO: 6557 - protein, 258 aa, Methanobrevibacter ruminantium
MLKAIFKGGDFQCSQGNGTIIFELADNSSKLIFGPDGSVASLISSDILENNYLNGGMDLGTFNFLKNSTIISNLKSIVNSSYYDINCLSNWIISLVNDSDINFTAIVSYLSDPKLVASVVGGLLFEAGMIALPTGLPGLALLGLGTVLTAYGSGMFDDLGTDHPGYAKPENQLNFGLSMTLNFLGLGGSEGFLRGVLYNEVQEKLVVGFVPSIKAYGKTIIKETFYDDNGVLAGVAKSYFDNILQNILFDTFLKWGVR

SEQ ID NO: 6558 - protein, 362 aa, Methanobrevibacter ruminantium
MAKKVLIIVTGRGLGGDAGIALNVYNALTKRGMECEIALDESAPGILFKKNNMEWNKVIIPQAGGHSATLKTTVNAATRSVKALFKTRSLIKEKKFDLVLGILGGGAIIGALAAKITRTPSVSLLITPLDTKICGKIGTPIILPENNLFLEPNIPDRMVKSFLPVNDNISLGDKKKALDKLNEHCSELKKKNPDAMEFDPSKQTIVFSSGSSLFEKTAQAIDQFSKYSDRFNLVLCGDPLEEEFYKYIDETKIINVGFIDWVNDLLHLADLAVLTNDGLMLHEAMVCNLPVVILKRVKYGRYHDMVSIFKGATIECDLEDLDEAIFDVVDNYDDYAKNTATYKEAILSVGDNIADIVEKSFK

SEQ ID NO: 6559 - protein, 152 aa, Methanobrevibacter ruminantium
MKNWKIIGLILIILLAVVSVSGCIGDDSSSDTTSISADALNITEDGTYDSKEEVAAYIDEYHKLPSNYITKSEAKALGWHGGSVEKYAPGKCIGGDIFSNRQSILPIGHEYKECDIDTLGADSRGPKRIVFSTDDYEVYYTGDHYASFEHLT

SEQ ID NO: 6560 - protein, 79 aa, Methanobrevibacter ruminantium
MNEIVLFGEDMKEDPHKYIKETLDFPDYYGENLDALFDCLSEVYNKTIIIKDSVLVDEDIIQTFVDANDENPDMDLILD

SEQ ID NO: 6561 - protein, 608 aa, Methanobrevibacter ruminantium
MRVLLIHSDYIKYQVKNKTPVAEEIEEAKESNAFEEALVVFTAVEKEDEKNPNAVVKNLVAEVKKTNEEVNAERIVLYPYAHLSSSLSGPKVGVQVLKDAEAALKEEGFEVFRVPFGWYKAFELSCKGHPLSELSRTIGAEEEAEEEEEEKKPSKWLIFDDGETIEPKEYNYQSKDLEKLVAYELGEGASDEGEPPHVKIMREKELCDYEIASDIGNLKWYPKGRLVRDLLADYVYNFVVDLGAMPIETPIFYDLANDAIREHAAKFGERQYKTATKKDLMLRFACCFGAFRVLGDSFLTWKNLPAKVYELSTYSFRFEKRGEVVGLKRLRAFTMPDMHSFCADMPQALEEFDAQVDMCVQTGVDLDVNYEAIFRATEDFYEENKEWMEATAKRIGKPLLLEILPERKHYWSCKIDFAAIDYLGRPIENPTVQIDVESGKRFGIEYIDEEENPQNPIILHCSPTGSVERVICSLLENTAKEDGKAPMLPTWLSPSQVRILPIGEKHLEYANQLADKIAAENIRVDLDNSDDRVGKKIRSASKEWVPYIIVIGDKEVENDVYSVTVRESGEKVDMTAEELIAEVKAKTEGMPFRRLPLPRNTAERINFK

SEQ ID NO: 6562 - protein, 346 aa, Methanobrevibacter ruminantium
MLNLNKKTIIGVILCFILAIPSFLLGNLFPIIGGPIIAILLGMIIASFWKDKGSAEEGINFTSKYILQLAVVFLGFGLNLGVIVATGIQSLPIIIGTISIALIVAYIMMKVLKMERNSAILIGVGSSICGGSAIAATAPVIGANDEEVAQSISIIFFFNVIAAIIFPMLGRMLGFSTVNGDAFGIFAGTAINDTSSVTAAAATWDNMWGLGSATLDKAATVKLTRTLAIIPITLALSYIIGKKDNGEKSNEEGFSLKRAFPTFIAFFILASIITTVAVFLGVDASLFIPMKEISKFLIVMAMLAIGLNSDIVKLVRTGGKPLLLGASCWIAITIVSLILQHLLGIW

SEQ ID NO: 6563 - protein, 412 aa, Methanobrevibacter ruminantium
MVKKDDTMFIGEALIGDGDELAHVDLLIGRKDGPVGNAFANGLSQLSVGHTPLLSVIRPNLMTKPATIIIPKVTVGDLDDASKIFGPAQTAVGRAVADAVEEGIIPKNKAEEWVINASVLISPAAEDYRKIYQYNYAATKLAIKRALDGYPDMKKVLYEKDRGTHAIMGFKAIKLYEPPYLQVALDLDNEEAMARIIKQLPNRERILLEAGTPLVKKFGVGIVGKIRELAPSAFIIADLKTLDVGRVEVKMAADETADAVAISGLGTIESIEKAIHETRKQGIYSILDMMNVDNFTEKLQQINKDLMPDIVLLHRNVDLESKLRAEGKNLDDISAWGNIKEIKEITGGLAAVAGGITPEKAEEAFEKGADIIIAGRYIIGSGDPRRAAEDFLAHMPVDPNHMRVVMEDDEQI

SEQ ID NO: 6564 - protein, 104 aa, Methanobrevibacter ruminantium
MGFCNSCGRPMGRNDYGTNEDGSPNQDYCKDCFQNGEFTEPDITINEMIIRNAERMLRRNRDLREEEATGILCNFLPNLKRWNPNPDDEIEDEDEPVRGYRGGF

SEQ ID NO: 6565 - protein, 337 aa, Methanobrevibacter ruminantium
MDFVKGIVKKYFRSYNRTLKDGTKKTYKTEQVQVTIPKSDNVFDDKEEVFILSKNQFDEIQDNEELISAMELFNAMQSEDIKNLNYSLDEARQELYSNSSKLESFTLELDDSKLELDKSNKKLLILKEDCSNLRDQLEESKLTIVNLKDQLDNKNFIIEDLNEYVNSLNNKVDSLNGEIDNLNTINAELNDNLNNLTNELNNNELNNGLGNGLNGFNNGNGLNGNGYNNGLDNNGLGNGLNGNGYDNNNLYGYNNGLNINNNHLLSSTVDEDSEVLISDVKSSVSFDYSDYIELQREYIVLLRKYEEAQENLYNEKVKVIHYRSLLEKFKAFIARLE

SEQ ID NO: 6566 - protein, 5985 aa, Methanobrevibacter ruminantium
MISFLIILLLNKGGHFINTKIINSILIILILFCFISLLGTASAEDIYTDDIASIDASNDFESIEISNEEVSTNAVENLDVSADDSDYVVNGSSSKNVLTANELSATYDLSGSSVQNISDLFNSGTIQSGDVIYLGNQSISSSWDEWTGNHLINVNVSNIIISGGSSSNPDGTSTINANGAKLFNIQASGVTLTNIKVINAHGGNGPGCINFDGSDCSIINCEFENCQYAQGGAIHGTSSASNLIITNCNFTNNVGRWGGSGGAIYLEGSGCKVTDSRFEGNTAQNYGAIYCAGDINLNNCNFTSNGPGAIYGGGNTEVIDCNFISNTGSSVTVISGGSTKVRNSNFTDNAGASIYSGGNTEIKDVIFTNNGAGSYNNKNVGSVYSGGATTDVSNSKFDNNAGIAIYANENAFVDGCNITNGGVAIYSGSDANISNSIIENNSADQAIVYIYGIGKVNNSNFTNNTVSGHTHGGALSLIGDNSEVSDSIFADNTAGASGGAIYTTGENTMIKNCSFTDNTVMQDYGHAGAVDVVGVNTKIIDCNFTNNSAPNGGAVYGGSYGLSLSNSVFEDNNASTGGALYIYHDDFAITNCNFTDNDASSQGGAIYIASECHNEQMTGCNFSGNTAPRGSAIYCDGDGKVTDCNFDVKPDLTVSGGNSSLTVTLGSDYSNVVVGDIEGVSGGSVTPLVDAQVTVEIFDSRGNLVDSVTNATDENGKIKYDYSGLSYGSYTYRASHMDGDTLITKEGTLTRQASLDVRTGYPALTSTLGLQTSIDGTAVENDPFVNEDITVEIFDSRGNLVDSVTNATDENGQVYYDYSNLQRGTYTYRVTSSDGQTEEGPLSMGEVVGDNFSAIQAAIDNAPSGGVIFLQGKTYLNDIQGQMVIDKPITIIGTDGTVLDAQGISRVFEITSDADNVNLANMTLTNGNDVYGGAIYLQSGCDDGTLTDVVFDSNTAELAGGAIYNAGGNRWTIDNTTFTENEAHGETNYIYRGGGAIWSCDAEMILSNTTFVNNQAPYGGALRGAFDIYDSLFDNNTATDGNGGAIDVTTEEFLYDTLILEFRNSTFVNNDAKGSRGDDRAQGGAIHIYHLQEVNMYDCFCENNTADRGGAVDFYELGKTWVDNCTFVNNNASSEGGGLAIFCNSSTFKDSNVSNNIAGTDGGAIWVIGHNSLFNNVTSENNTASRGGSSYIEGENTTIYNSTFNNNNALYNESLGSQSGIGGALDILGDNCKVIGVTSVNNTAELGGSTFIRGDNTLVQNTNLSNNTAVFNESRNETSGIGGALDVVGNNCQIINVTSDNNNAYRGGSTFIRGNDTVIRNSTFDNNNATLRGGGLNIAGEGCTIFNVDVSNNAAGENGGGIYVIADGTEFRNITADNNTAERGGGAFVEGNDIIIDNGTFNGNKAIFNESKPDESGIGGALDIKGHGCNVTNVDSFNNTAYRGGSTFIRGDNTYLENCTLDGNNATLRGGGLNIAGENCTIHNVDISNNTAGLMGGGIYVIADGTVFRNITADNNSAERGGAVFVEGNDIIIDNATFNDNKAIFNESRPDDSGLGGALDIKGDGCNVTNVNSFNNTAYRGGSTFIRGDNTHVENCTLEGNNATLRGGGLNIAGENCTVYNVDVSNNTAGLMGGAIYVVANGTEFRNITANNNSAERGGGAFIEGNNVTIDNATFNNNRAIFNETRPDESGLGGALDIKGDGCNVTNVNSTNNTAYRGGSTFIRGDDTYVANCTLDGNNATLRGGGLNIAGDRCIIDDVDVSNNNAGLMGGGIYVVSNGTEFRNITADNNTAERGGSAFINGTGITIRDGELNNNRAIYNESRPDESGLGGGFDIVGDNILVDSVHSNNNSAYRGGSTFIRGSNVTVQNCNLDNNTATVRGGGLNIGGGDGCKVINVSVSNNDAGEDGGAVYVIGDFSLFDNVNSTNNTAQRGGSSFIAGNNVTVINCNLDNNTASNRGGGLDVNGSGCVFENVTLSNCHADKEGGAVYVRGDNVTFNNVTSENNTAERGGSSFVAGDNCKVINCDLNNNNATWRGGGLDVTGTNCLFENVTLSNCHSDEDGGAVYISGDDNRFVNVTSVNNTAVNYGGSTYIGGTSNSVENCTISNNIAYNGGGIFIEGEDSKFTNNNITFNKAIATDEDHDFNIMGGGVFILGGNSNFTNNNISSNHAKDNGGGVQIFFGPDTFMDKIYAFNNTAENGGFANLLYCDNLNVTNSTFYSNHATGDISLDRGEGGAFHMSYATNIDVQGNFSYNTATNGSAIYSDGSDIRVHDSSFFDNQAHSWFLLITPSDETYLKGQDVIINISHIGGDNIANAIHNRDAESSITVRNVTYPFYNNGVLINKTTPIDEDIPIEIIGYENSDNGNLIYIDDLEDNQVIYYNITNRDTNESILVGFNKTDISGTVSLRLTNLPAGNYVVSAYYPETTYYTEIRNVSSFRVIDVDMVANKTVDNQTSNVGDIRDWNVTIWNDGASEAQNVTIIDFLPDGLNLTDNLTIHFYNGTGGLWNNAVLNLTSNNLTFSVYNKADGTWINGVASYDESSNTWTYYVLSLADNRTFAYSVFNQSDYTDAFGEARYYEDINSWTYRNISYDVDNADWYYYTFEYDDHTYVYGVFNGSYFVDAFGEARYYEDINSWTYRNISYDATTGNWYYYTFDYGGNTFVYGVFDESFFVDAFGTAIYDDGSWNYENISYNATDGKWYYYSLNYGDDSNNVTYYIFNPENFVDVFGSNYHYNAENNTYVYVNAYYDAETDSLIRNDTIYNVSSGIWTINNRLVVPELVSINPNVSYISPEKIYLVNKISLSIANHTNSTDISLDVGRFDGNGSVLMNLVTNVTKRGNFTNIVNVTTDSPEKNYTNNVANNSTIVYNDLVINKTVSDNLTNVSGIVDWNVTVLNNGTFEAVNVTMNDYLPDGLDLTNLTVKVYNGTGSLWTNATLDLSTMTLSFSVYNETSGEWISGIAAYDQAAKTWTYYVLALDDDVLTYTAFDETFFSNLFGDAFYNESSNVWTFVNRTYDEVTGDLISEVNTTYDNNTGIWTIGDKTFVEYKVNLTLVNGTNSTNLTLGINSLDENSTMVMNLVTNVTKYGIFTNVANVTTVTPETNYTNNVANNTTETLTNITVTKVWDDANNQDGIRPTSVNITLIGSDGSERSVLVTGTGGVWNYTFTDLPMFNSSGDSIVYTVNESVVPNGYDVSYNQSNWTVYNTHVPEVTNITVTKVWEDANNQDGIRPTSVNITLIGSDGSERSVLVTGTGGVWNYTFTDLPMFNSSGDSIVYTVNESVVPNGYDVSYNQSNWTVYNTHVPEVTNITVTKVWEDANNQDGIRPSSVNITLIGSDGTERSVLVTENNGVWNYTFTDLPVYNGTTDPIVYTVNESVVPDGYEVSYNQSNWTVYNTHIPELVNITVTKVWEDANNQDGIRPTSVNITLIGSDGTERSVLVTENNGVWNYTFTDLPVYNGTTDPIVYTVNESVVPDGYEVSYNQSNWTVYNTHIPELVNITVTKVWEDANNQDGIRPTSVNITLIGSDGSERSVLVTETDGVWNYTFTDLPVYNGTTDPIVYTVIESVVPDGYEVSYNQSNWTVYNAHVPEVTNITVTKVWEDANNQDGIRPSSVNITLIGSDGTERSVLVTETDGVWNYTFTDLPVYNGTTDPIVYTVIESVVPVGYEVSYNQSNWTVYNTHVPEIVNITVTKIWEDANNQDGIRPGSVNITLIGSDGTERSVLVTENNGVWNYTFTDLPVYNGTTDPIVYTVNESVVPVGYEVSYNQSNRTVYNTHVPEIVNITVTKIWEDANNQDGIRPGSVNITLIGTDGTERSVLVTENNGVWNYTFTDLPVYNGTTDPIVYTVNESVVPVGYEVSYNQTNWTVYNTHVPEIVNITVTKIWEDANNQDGIRPISVNITLIGSDGTERSVLVTGTDGWNYTFKDLPKFNGTTVPIVYTVNESVVPVGYEVSYNQTNWTVYNTHVPELVNITVTKVWEDANNQDGIRPISVNITLIGSDGTERSVLVTGTDGWNYTFKDLPKFNGTTVPIVYIVNESVVPVGYDVSYNQSNWTVYNTHVPNVTEINVTKVWNDSNDKYGIRPSNVTIELFADGKKVNETNLTARGAWTYTFSGLPQYNNGKLINYTIGEVRVDGYSVLITNNTVGNWTVTNTPIAVPNMTVQKIANDKVVYIGNVTSFTILVRNTGDCNLSGVYVVDSDYSAGLSYLRYENGSRDWTYDGAKWTLVGNLTTDNPTANFTVYFTVVDNGTLVNNVSAGSNLTNETNGTNNTTAYRPNMTIQKVSNDEVVYVGNITSFTIVVTNTGDCNLSDIVVTDSDFSAGLSYLTYANGTRNWNYDAVGHTWSLVGDLTNGSSAEFTVFFTVIDNGTLVNNASVRSNLTNETNATNNTTAYRPNMTIQKISNDEVVYVGNITSFTIVVTNTGDCNLSDIVVTDSDFSAGLSYLTYANGTRNWNYDAVGHTWSLVGDLTNGSSAEFTVFFTVIDNGTLVNNASVRSNLTNETNATNNTTAYRPNMTIQKISNDEVVYVGNITSFTIVVTNTGDCNLSDIVVTDSDFSAGLSYLTYANGTRNWNYDAVGHTWSLVGDLTNGSSAEFTVFFTVIDNGTLVNNASVRSNLTNETNATNNTTAYRPNMTIQKISNDEVVYVGNITSFTIVVTNTGDCNLSDIVVTDSDFSAGLSYLTYANGTRNWNYDAVGHTWSLVGDLTNGSSAEFTVFFTVIDNGTLVNNASVRSNLTNETNATNNTTAYRPNMTIQKISNDEVVYVGNITSFTIVVTNTGDCNLSEIVVTDNDYSLGLKYSRYENSSRLWNYNGGKFTLVGDLAPGNSANLTVFFIVVDNGTLVNNASVKSNLTNETNATNNTTAYRPNMTVQKVSNDQLVYVGNETSFTIIVTNTGDCNLTGVYIKDDDFSKGLQYNNKFVPVKGTWTYAGGRWNLEGQLTVGDNASITVYFTVIDNGTLVNNATAGSNLTNETNATNNTTAYRPNMTVQKISNDGVVYLGNTTSFTIVVTNTGDCSLSEIVVTDNDYSAGLQYSRYANTSSKWNYDGDKFTLVGDLAPGASANLTVFFIVIDNGTLVNNASVKSNLTNETNATNNTTAYRPNMTVEKLIYEDTVYVGDTAIFTIFVKNTGDCSLSDVVICEYWFSEGLEYNGVWVPNGDRKWDYDDETRTWTLIGDLAPEGFASFVVYFNVTKNGTLYNNISAKSNLTNETNATNSTRAYLPNMTVMKVANDEIVYLGNTTSFTIVVSNTGDCNLSEVVVTDTDYSTGLKYKNYINGSANWNYNNGEWSLVGDLTPGSSANFTVFFTVVENGTLVNNASASSNLTNKTNTTNNTTAYSPKMTVLKISNDESVYVGNITSFTILVSNVGDCDLSGIYVIDDDYSNGLLYNRYENSSRKWNYDGSRWTLVGSLEPGDSANFTVFFDVVENGTLVNNVSAGSNLTNETNNTNNTTAKPVCDLIIYKAVNATEILVYDIVEWKITVVNLGPDTALDVIVKDLLDNGLELISVSGGNYNNITGEWNIGDLEPNTPVSLSLVTRVLVNGTIVNTATVNTTSHESNYTNNNASNFTEADYLCDLVISKAVNCTNCNVSDLVQWNITVTNLGPHDASNVIVKEILPKGLELIDYNVSVGNFNEVISEWSIGTLEKDTAVSLVLVTKVLIDGTLINIATVNTTTLDNNYTNNVANNTTVASPICDLVISKIVNATKVNIDDILTWTVRVTNNGPSEALNVCVSDILPEGLMFVGYKASTGRYDDESGTWTVGKLSSGSSATINIYTKVIELGNITNPVSVNTTTVESNYSNNKANNTTEVYPIVDLVIEKSSDKIKYNVNDTMHWIIKVMNEGPCDAIEVYVYDALPASTKFIAYNSSKGTFDAAKGIWSIGDLANGEEVTLDICCKALISGNFTNNATVNCSITDKNTSNNFDNATIEIADNKSDNPDPIPDKPKHGVDISLRTGNPLLIFLMAIFAIFGGIGLRCRKE

SEQ ID NO: 6567 - protein, 198 aa, Methanobrevibacter ruminantium
MKILGICGSPRDGASSFLLKRALNELEKEENFETKFISVKDKNISPCTHCNFCLESKGECSIEDDMNEIYDSLKQADGIIFASPVHFGSISAQLKAVIDRCQALIMEDLDIFKNKVGISIVVGGDRCGGQELAIQQINTFYLLNKIIPLSGGSFGANLGACLWSQDEGTDGVKNDEYGLKTLDMTINHFKEFLLEFKQ

SEQ ID NO: 6568 - protein, 522 aa, Methanobrevibacter ruminantium
MSEESSSSKVAKGSAIILIGNVIFRVGGYIYRFLMASLLGPAAYGILGLTTPFQGIFQVLSAAGLPPAIAKYVSEYNALDEKDLARQTIFTSLKIMVFLGLFFGFIMVFVAAPIITNYYHKPEALLPLQAVGLITPFSVIVGGFRGAFQGVYKMEYILYTRAIEQIFMILMATALVLLGLSTLGAVLGSVLGFVASAISAVYIFKRYMGKYIPPANPDFKFPLKDELKLAKTLIFFSIPVTVAALAEMGIYSICTLLMGAFLPAAAIGYFTAADPIARLPLVVSNSLATTILPATSEAYALKDQVLLEKYVTAPYKYGMFFVIPMCVGIAIFARGIMGLVYFTNAAYMNGAVSLAILVVGMTFYSVYTISGSIVQGIGNPRIPMYILIIGCVITLGLGWYLIPLFGIEGGALATTISSFIMMVPMFLIQFRMTKTHAPYSFLIKVTVASLIMAIVSIIVPNNVYGLITGIVVCPIVYVIMVILLKTLSHEDVAEFRKYANKLGPIRKYANKLLDFIDKHSSD

SEQ ID NO: 6569 - protein, 230 aa, Methanobrevibacter ruminantium
MTDVKAGVEYKINIDGNSFLLDEKKFNLLLYINESGSITEAAKRTKISYRTALHYIEKIETTLNIAIVSTKKGGTGGGGGTKLTEEGLQIVKECKKINAIMELHRDVNELEAEILEVDASKGIMKIKMEDLTMTMPLNKKYVVGDKILALISYDNIFIMLEPQASSIRNIFKGIVTEMRLQDEMVRVKIDIGGVDIFSDITLSAGKDLDLNLGKEVYIGFKALSIATLKL

SEQ ID NO: 6570 - protein, 34 aa, Methanobrevibacter ruminantium
MARVSNLSYCHVCTLCAMKCGPDAIKIIRNAPDE

SEQ ID NO: 6571 - protein, 200 aa, Methanobrevibacter ruminantium
MNIEKRDIMERTAKVSRKTSETDIEIEMNIDGKGKYDIDTGVKFFDHMLESFSRHSFIDLNIKAIGDIEIDDHHTVEDVGILLGEAFAKAIGDKKGIRRMGHAIVPMDDSVATVAIDISGRSYCNMSLDFRNDKIGDLSSDIIVHFFESFASSAKINIYGTCEGFNDHHKAEAVFKAFAKSIYDACKIEHDEILSTKGVL

SEQ ID NO: 6572 - protein, 406 aa, Methanobrevibacter ruminantium
MMNYNYDIDMENPFEPGKSVSPDRFKGREKNIKKILRDMGKVQKGNVQHFFLTGNKGMGKTSLAEFVKEYVEINYGMIGIYVSNKGNNSLNSLITAIIQAFLNKIPRNVLFEKIKTLFSSIESVEIIGNRVSFKPSKSLIVDIEKDFPYYLNQIIKDLPTNNGVFLIIDDINGLSESKKFVDWYKRFADTIEVNRGDFNLPLYVLFAAYPDKFDSLVYEEPSFGRIFHYDEIDRLSDLEVKEFFKDTFSSVNKQINDNSLELLSYFSGGIPLIMQEIGYSIYWLSEKTTIDEEDVLNGIMEAIGELESKQIRNIVNQISSDDFEDLLLKIASQKQQSYIETDFKEKLNWDEYNIWDEFLDCMIKLGVIKTSNRKSNLKFSFSNQFYFTYFWLKSLNLHEEFAKIES

SEQ ID NO: 6573 - protein, 166 aa, Methanobrevibacter ruminantium
MASIDYFECEDCGFRWKDQGPLLFFLNENNKIEEYILLISNMNLDSNSNISGDIIETYCTNCDKKIKIYIISTIKSPYDEDSAIESIRKLADENQIDNKALKPFIRSSDLKDNFYIVDLYRNFYSNKDYHCPNCDSIISKYILSKNKCPKCGGEISSVDGLCLDKF

SEQ ID NO: 6574 - protein, 278 aa, Methanobrevibacter ruminantium
MVVKIGIVKSGNIGTSPVLDLLLDERADRPNIDVRVFGSGAKMNPEQVEDVVPKLDQFDPDFCIFISPNPGAPGPARARELLSEKDLPAIIIGDAPGKGKKDEMDEQGLGYIIVMSDPMIGAKREWLDPTEMAIFNADILKVLAETGALRLVQKTLDAVIAAADAGEEIELPKLIVTAEKAVEAAGFANPYAKAKAIAAYEMAGAVAGLDMKGCFMTKGFENFIPLVAAAHEIASAAAKLAQEAREIEKSNDTVLRTPHMKEGNLGCKVDLISKPVDK

SEQ ID NO: 6575 - protein, 222 aa, Methanobrevibacter ruminantium
MLKILAADKMDKKLIVRYIMLIVGVIIMSMGIALSIKATLGTSPISSVPAVLSIAFPWTVGEFTIVFNALLVIFQMVLLRKITISQIAQMLVCVLFGYMIDFSLLILNFPNPTDYISQWILCIISCFVLAFGLLIEVKSDITMLPGDGSVVAIAEVTNRDFGQIKPFFDLTIVSIAAILALVFLGHLEGVREGTIFAAIVVGLIIQFYDRIFGYNIDAYLAD

SEQ ID NO: 6576 - protein, 104 aa, Methanobrevibacter ruminantium
MKKVKITVMKKARYDDLIEKYENPLEHECEVELGDVFIANGWEKPEDFCSSAWDSISPFVLALSSGGEDLYDGWMKDKKSAMISCNDGFRPVSFYLEAMDEDAD

SEQ ID NO: 6577 - protein, 374 aa, Methanobrevibacter ruminantium
MNSKNIAIAGEITPSKTIIPLIQRLNELDKEDKLNFKINKIYGLYHGESSKLLLEPYCDELYDIGQGRRGQKKNSTAKLAYLISRDIIKAFNALKGNNIDLLITAGNAGDVRKSIVAANLLKIPILHIEQDIYNPIEVISHANLVTVPKEDYKDYLERKYNLKNVASIDGYPMAKYVDNHIKDNNLIDKEEIYGEYGVKEFVLVVLGGDLKDDEIEPLIRSVEQLNLKTLIAPYRFDRNLVESLVLSPNIKVLPQYVDLLSFMNAASHLIYAAGMGLTIEAGVFNIPSLKIEGFHKTHGSVDLARELNIPIVKIDEIPDAFEKLSAHQDNNLVKNSEIAIDKLVDLINGFDENGLQKSGFKSTKQIWNSRKVFR

SEQ ID NO: 6578 - protein, 393 aa, Methanobrevibacter ruminantium
MNLENKSIDLLNPFIIIAMVIVFIIIALPMWYAYQKLPSPSMDLFLYIGLGLIFFIFGILISNLLLNRFLKKDLSLDSLKDTIKISISKNPKKLSIFESYSRKEMILVIMVLIGIILQIINIVRLGGIPLFSATLKAEAAGKIWLASYIIFLPFINILLAEFNRDSHYLLVFLGLLLFTLTGYRTTPIAIVLSILITLYYTRNIKFKYQVLFLGLFLVIAVALLLAIGFIAVQAISWQHWSLNPIELVSYRAAFTLNVLGHAISNQFATAGKLFYSTLTGFFTHTDPRVLVGQATLGRNHSITSTIFGPALLDFGLIGMCIQMLLIGFILKTLHSIQKHKKEVYSAFYGILLAQTIIWIETGPTDVVVWIFYLIAIVLMALFFLKGSSRDLEA

SEQ ID NO: 6579 - protein, 5651 aa, Methanobrevibacter ruminantium
MRNKKIFIFTLMIVMLLSLAAVSANDLDNLEVDDGNVVSTDTVINDVPMESTSSDKIALNVDSTQSNTTEILNENEIITNNSTLSIDLNESITNEISSDHEDSYQADSNQEDSYFTSDGNIYVKVKTSMLKADGDQIYYIHPAGSPTATGTRDDPLDSMNSALNLFTSDGTHTIVVMDGIYKDTYYDYNNTDVDTNLSNLIIKSDEGASPHFNLSTSDYRRSLYWAFTGENITIDGLKFTDSQYGSFNEDGVYKYHTVLRFINSTNVLVENCVFDNDGYLINATDSSDVVIKNCNVSNSNRSNVFNVLNSSFTVQDSNLSKIRDSYITNSSFKLINNTICNNVNSNLFTVKNSSLDIINNTFKDSNYSSYYVFRIYNNNETYANFTGNNFTNLTGTDYLLQVNYYVNDNTTVSFVNNSLKDVSLGLNIRYSNLTMDGNSFDNLSLSSRPSYSGISTSYSNVSFTNNNFTNSDSYIYLGYGVNATIENNNFTDNIPSYYGLLRAEGNSHDIKENNFTNNKGNCSIIQHYSGNATIHGNHFYNNSLNGCGHVINVTSTSGSEIYKNDFVNNSADNGTVYLYGSSNVHDNNFTNNSVTGLGGAIYSYSFYNINTTIKENVFDGNNASFGGAIYYENYPSYNNKREIVNNTFINNSADFGGAIYSNKSINNIIDDNDFINNSAQIGGAIFVDYLYINDFRYNNTNNTISNNLFAENNAQSGGAVVLYSQNSTVEGNRFISNNASRYGGGALITSGNNSIIVNNTFANNTAQLYGGAIGTNDSKIIDNKFENNSAYQAGAILTINSTIHNNDFVGNEATRGPAIVYIDDFNYTALTYYTYNCSCENCSNCSGCSDCECCVTTIVDPETGDEIKIINCSNCDGCNCTCENSTVTEHNITLLYNNTGIDIDEDVYAYHENQLLRVAKENNGMYYLYDNVNVTSAENYTYWAYCIEQNNSYPWLGNGTLGVHVDDLYFVRNSLDDSYVGDYLKILISYFYHNLDEDKINVKEYIYIFTDTDYRSNNDRIIQKIIKLANNESTVLENGNNWINGVYNCLEFSTFINPTTRQNLILINGCEPLDKPDFNITKKANATHVKTGDYINYTILVTNNGTCNLHGLKVTERMNSMLIYMGFDDVSDNWTQTGDMEWMLNRTLKVNESAELHIYFMTNKVTSYTNITNVIEARSDESDTKIAEEHIETIYPKLVYRKVSVDPVAYPESTIRFILLVKNIGTANAYNVAIEDSGFSSSQLLYQGTWSNYKGTWYNSGSSATSTGRFTLNGYLAPNQEAGVYVSFKLKEGVKGTTVSNSFNVYLNNTWDGSASNFTRVVSSAMKVEKLWVDPLPIATIGDEVTFAINVSNVGEANLTGVYVEDFFPSGLEYIRFYNTDAHNWTHYETLDGTHRFILQNTLPNSQTSRTLSSSIIYVVFKANEIGDLTNTAIVKSDYTENVTDNETIIISPYGMKVEKFSNNPISQSDNQVSYVIRVTNTGIYNLTDVYVNESQNEYMVYDHFEDSSNKWIYNDSGDSPRWVYNGSLENNTYSDFIVYYNITKIPENGLIKNTVRVYSNETVERNASNETKVYKLSLWKVSNNPVSRLGDQISFTIVVKHEYNGNSYDKDLYLDGVFVKELIPDGLTYDHYVDESGKWSYDYNTDNWVYSGTLVPNTETNFTLFFNVTKMENLTNVVILGTNQSNNVTVNNSSDSRYYSMLVDKISLNETVFKGNITEFLIKVTNNGDLNLTNVTIREVIPDGLVYVGYLNKTGKWIYEGGNGASSDDQPMWTYQGILAPGESAEFIILFNATETGTFLNIVYGTSNETEEFVAENTTKVLNPLLYVDKVTLNQTVYRGDLTAFEIFIVNIGDCDLHDLYIDEIFPDGLVYYGLVDDTGSLSYDEKTQRISFDGTLKVRETLVFTVIFNTTKVGNFTNKVEVGSNETKKEYANNTTQVLEKDLNVTKVANNKTVVKGDKTEFTIDITNVGECNLTNVYVYEESFEGLSYYAYIDETGKWFKNGNKWIYDGVLKPGESVKFTVVFNTNETGNFTNIIVAGADGIPNKTANNTTEVLICDISIEKLTLNKTVISGEDTQFAIRVKNIGLGNLTDVTVTDSFPEGLTYKTFIDNSGKWSKNGNKWIYDGVLKPGESAEFIVVFATNQTGNFTNFVSVSTNETKSKNASNKTEVVLADVEIQKITLNKTVISGEETLFEIVVTNKGIIDLSDITVTDSFPEGLTYKTYIDESGKWSNSGNIWTYDGVLAPGESAGFIVVFDTNQTGNFTNFVSVKTNETKSKNASNKTEVLVADIEIQKITLNRTVISGQETMFEIVVTNKGLVDLSNVIVADSFPEGLTYKTYIDESGKWAVNNNKWLYNGVLAPGESAGFIVVFDTNQTGNFTNFVSVSSNETKTKNASNITEVLLADIAIQKITLNRTVVSGQETMFEIVVTNTGIIDLTNVVVTDTFPEGLTYKTFIDESGKWSNSGNTWAYDGVLAPGESSGFIVIFDTKDPGNFTNIVSVISNQTGNKSARNITEVIVADVGIQKITLNRTVYSGEETQFEIVVTNTGIIDLTNVVVTDTFPEGLTYKTFIDESGKWSNSGNKWVYDGILTPGKSAGFIVVFDTKDIGNFTNVVSVNTTEVGPKYSYNITEVIIKENKTNHTNETPPGPNPPGPSPPGPNPPGPNPPKPHVPTHPHKPIVPTNPNQPKLVKSNKNPLSDVKAGNPIALLLIVLVVLGSVPFASCDSGGTRRRRKTKERKAAKHKEIDKKKGIIILSGCLLLMVSVSAISAADTGDLGYDDAGSDVAVQSVSHEPAQYSYSTSENMAYDSYDYGDYNDYGGYGDYGDYGDYDGYDTYNDYYILDNNETVYEDGMENSADGNSADAANGQANQYAEDGSDMELYSIDDESYDSNDNYDNYKEYSYDDDSSREDASSIVRYNDCTVNGDNKVKSIYTSSSLAEGEGVVVYVSLDGRTGAEGTYDDPLLTIGAALTKLSTVSSTETKTIILKGGNYSGNNYRYLSTRLNNLIIKAEDGAEVNVDLRGMNQNSLYWTFYGDNVTVSGINFMNANMTSYNLNNYHAVLKFINSSNSRVEDCSFSNLKSYGILAGNSTDVVISNCNFTNGSSRMFSITNSSVTVEDSIMKNFSTSYIRNSTFTMVNSTVTDFNDDDIFNFANTDLDIRDNTFKNLTFPNKTNFQRFGVFYAWDDNAGISYNFINNTFANFTGTDAYMIYRSASSSVKPMCKVNFTDNNVSNVSVGVNIYYGNITVENNSFDHMSPANTLRFSYSNIDIRDNNFTDSNSTHVYSDRCNGTIEYNNFINNSALPVSAEWGNLNISFNNFTDNKGNFSAGAIQSTGVVNIFNNTFCNNSARVGAVNVASISSNKTIYNNTFVNNTGVSGTLYVNGNATVHDNRFIDNNVSENGGAIYAAYDNSYNNYYNISANITDNIFDGNIANKGGAIYYEQYNSAYGLDNLANNTFVNNKAEYGGAIYSNKTVNVTISENEFVNNSATIGGAIFLDNYTSAFNTGTNITLNNFTNNSAQSAGAVVVYGNNTNVIGNNFVGNNATRYGGGALVTDGANGLIYNNTFENNTAFLYAGAIGTNNSKIINNTFTNNNAYQAGAILTINSTIHNNTFSGNDATRAPSVGYIDNYNYTVSSYYVYYCSSEDCSGCTACESCTSTIIDPITGAEIKVINCSNGDVPECICEDSVATLYNISLLYNNEGLNLDEDVYVYDESTILRVALNNNDMYFLYENASIPNASEYHYWAYCIEQNNSKPWQWNGTTGVLVDDLYFVRNSLDGSYVGDYIKVLVSYFYFNLDEDVYNLKDYVYVFTDTDYRANTDRVIRRVINLTEREDTSLVNGNNWINGVYNCLSFHSFIMPTTRQNLILINSCMAMQTPDFNPQKIANKENVGTGDIVNYTVTVYNNGTVSLHNVTVTERPNSMLTYLSFTDFRNQGWVQTGEMTWVLNRPLKVHETGTFNINFRVNNVTYLTNITNYIDVGCDEVSNKSAFTRTETKWPRIQVQKITLDQNVTPGSTVRFLLLVKNIGTLEASNITLVDNFNRNELEYEYRWDSYKGNWSGGHGWGGSSSSWHVDTLYLNQVLYPGQEAGVIIYFKVPNNVTVGSAYNSVNAYRNGTSEGYSSNYTIIQRPYFSIWKTLVSSKTSTIGEEVVFQINVQNTGYVNLTGVYVEDILPIGLKYLRFYNTDNHNWTHFVDEDGKHRFLLQNTLPTYYSDSQNYVARLYIVCNATEYGNWYNLATGYTEQTNKSTSQANVTIIPFGVSIEKVSNNPISQVGDQVSFTIRVRNTGIYNLTDVYVNETRNSYMVFDHFVDNSGKWILNESYATSGVPSWNYNGTFEVGAVSEFDVFYNVTNINYYGNITNTAYVSSNQTTNRSVSNQTAAYNIKVRKISNNATARVGDQVSFTIQISRDGYSWESPFSLYGIHVKDLVPDGLVFDHADNSYYWIYNESDETWYYRSGLTAGRTISLTLYFNVTKAANITNVAIVGVNNSTVKTANNTTNSIYHNLQVEKVTLNETVYPGNITEFLVRVNNTGDNNLTNVFVKENIPNGLVYYDYINKTGKWNYTEDDDGPIWLYDGILAPGAFGEFIIRFNTTVPGIFVNNVVAGSNETSNKSTENSTKVLGPIISVGKITLNKTVYIGELTEFRIKVSNDGDCNLSGVYVVEYIPDGLKFVEFKDESGLWTYNESSRTFYYNGILERDDSLEFVVVFNATRAGNFTNVVHAGSNVTNESVANNTTEALDVRMDIQKVTLNETVFTGQETGFVIVVSNTGLKDLTDVRLKEIYPDGLVYSRFIDDSGKWFNRGDYWIYNGVLAVGESTNFTVIFNTTKSGTFNNTIIVSSNETGPKNTSNTTKVVVANVTVAKITLNETVMSGEQTSFDIVVTNDGIYNLTGVVVTDAFPEGLAYSGFVDASGKWIFDDSKGNAWIYNGTLAPGESASFTVVFDTDEVGEFTNIVKVSTNQTQDKNASNITKVIKLIPNVAIQKVTLNRTVYSGEQTSFEIIVRNNGEMNLTAVTVTDAFPEGLAYSGFVDASGKWIFDDAKGNAWIYDGILAPGESASFTVVFDTNQTGNFTNIVTVSSNQTKEKNASNITEVIIKSVPGIEIIKITINRTVYSGEQTSFDIVVSNDGNVNLSNVTVIDSFPEGLTYSNFIDDTGKWFNIGNKWIYNGILLPGESAGFRIVFDTNKSGNFTNHVKVTSNETGEKNSSNVTEVIFADVAIQKITLNRTVYSGEQTCFDIVVTNVGEIDLTNVVVADSFPEGLDYSSFVDESGKWIFDDAKGNAWIYDGILAPGESAGFTVVFDTNITGNFTNIATVSSNQTSERNASNITEVIKLIPDIAIQKITLNRTVYSGEQTCFDIVVTNVGETNLTNVVVADSFPEGLDYSSFVDESGKWIFDETKGNAWIYDGILAPGESAGFTVVFDTNLTGNFTNLATVSCNETEDKNASNITEVIKLVPDIAIIKVTLNRTVYSGQQTSFDIIVSNVGETNLTNVVVTDTFPEGLTYNSFIDETGKWIFDEEKGNAWAYNGTLALGEYASFTVVFDTNLTGNFTNYVSVTSNETGEKNSSNVTEVIKVPKNDTPPVPVPPEPVVPPEPVTPPEPVIPNKKVPRHELPRTGNPLMVLLIALAAVGLSSVRRKRE

SEQ ID NO: 6580 - protein, 502 aa, Methanobrevibacter ruminantium
MGLFRVKRIPDEKQIKLGIRTLDFNIPEDHISRFVGDFIDEYYPLLGIKENKKKKGRDSFPVKEMLKLLIYAKIEHIDSMRFLADMVKYHDVYKFVGNGICPSERSLQRYREKYGKYYNELLKATLKKASDVDYTDFNEVSIDGTIKKAYNSKNKVITEKETEILTRYFEGGRVSQEELDKLHKPAREILENKKISNQEKLYLLDDIKTQFTLSGQKSVPVTDIEARWMKSKKGNSQISYNIQSAVDYDTKMICAINVVQAPTDHYQLPKIVDKAINNTNVIPRFVLADTIYLNEESLSYLADNQINGVIPDRKQSKEKIGRLNKNPYHKDHFKYFPEIDAFECPEGQIMYFFNKYTEKNDDLDKPDKIKRLYSNYGACKACNCRENCLSSTQTHRTITEYGGSLKKAMWEKMETEEYMEEYAKRSSVEGPFGILKEQFHIESEVVIGKTKTEERILLDAVAYNLIRLFNLEQEIKNDKEDIVDFCEKISVQEKLEVRATIF

SEQ ID NO: 6581 - protein, 229 aa, Methanobrevibacter ruminantium
MLEKEVKQYKRGNSFTYRIDLSKKDNFEGGEKIMIFRMSEYEAYLNEIEDLKSQIEENNKTISELRESRSEANSNINNVVDNHNKEIADKNKEIMDLIEENKSAIQKCYDIIEEKDKLLTQANEEIRIEREKTDATRKQAQEDILNERKRHDELTLEKDKQLKLVNEQLQDSLKDIAYKDKVITADRLLIERYKNRGFVDRLLNRLPDDSDLKIDDVKETYVLEAEKKE

SEQ ID NO: 6582 - protein, 45 aa, Methanobrevibacter ruminantium
MILSLHLFCYGYFFIDFDDIVLSLHSICNLFFIDFDDIVIASIGY

SEQ ID NO: 6583 - protein, 480 aa, Methanobrevibacter ruminantium
MKVVLAGTGSAVGKTTISTGIMKALSDENVQPFKVGPDFIDPSYHTIATGNVSRNLDSFFMTDFQIINSFERALKKSNSNMGIIEGVRGLYEGISPIGDVGNTASIAKAIDAPVVLLMDARSLVKSAAAVVLGFKALDPDVRIEGVILNKVKGQRHYKKAKESVEKLADVPVIGGIPRDDKITVEERHLGLVPALEKERITRNINLWGEIAEEYIDLDALKDIMKTSSKSTARDNKNIAMEKHEDDFNREHTEAIDLEVTNDSKPGQLWKTGNRNKVKIGVAQDEIFTFYYKETLESLEENSAEIVPFSPLKDEHLPDVDALYIGGGYPEVFKKELSDNKTMLNDINKFHKENRPIYGECGGLIYLSKSIDGLDMVGAVPYSSEMTNKVQGLNYVVARANQDNLISNEGDVFRAHEFHYTKLNIDKTDSLVFDVLRGRGVLNNMDGVCVNNTLANYIHIHACSHPNFGYNFTINISELDI

SEQ ID NO: 6584 - protein, 371 aa, Methanobrevibacter ruminantium
MSTLEKMQVLADSAQYDLCDYVSHSKSSQVNLPGIYHATGHNGCKIPLFKTLMSNKCKNDCKYCINQSKRDFTRLELSPEELAKAFLHYYNNGYVNGLFLSSGISNEIDETMNKTIETARILRRDYGYQDYIHLKIIPGSSKDSIKRAMSLANRVSLNIEAATKDGLSEITSTKDYNKDILKRIDWMHQIAKKNPDYAKSGHTTQLIVGANDESDYEILKRMDSLYRKADLRRSYFSAFSPVEGTDFEKREACSSDRTAQLYHADALLNDYKFKVKELVFDEDDKLFLNEDPKILAAREMDIFPVEINTAPYRELIRVPGIGPKSARRIMSIRKKMPFKKLEDLQKLGVVIKRAEPYIQLEGAYQNSLDNY

SEQ ID NO: 6585 - protein, 71 aa, Methanobrevibacter ruminantium
MSLEEIPFEEQLRGVILEGEIERAELKGVEKGRNIIIIKLLETMNPQEISESLDLPLDTILSIQESHTKNV

SEQ ID NO: 6586 - protein, 295 aa, Methanobrevibacter ruminantium
MADAKDSKDDKVYHLEDLLFVKCLVQFEEFPQYITGFKDIRNSFDSRFASSSNFSSLNLDCVRQREDLSLIDIEHHSSIRPDLMRRNYEYAVNLYNVTGYTVHPFIFYTGDLPVNKIIRMNDFNTFQPQWFILKEKDGMKSLNNINYKTFNKIDWNVFDAIDFAWIPKFDIDMSIEDCIVELAEIYKMMPADNKFLQFCRESLKLWTGKYIKDKERLDKVKECLNMSELEEIPFEEQLRGVILEGELERAKLKGEEKNRIDFISKALKHMSPKEVSNMFELPIEYVDEIANSYSK

SEQ ID NO: 6587 - protein, 511 aa, Methanobrevibacter ruminantium
MYAINMEQNKKELNIPDEIKIFDTTLRDGEQAPGIALTVDEKIKIAQRLDELGVNVIEMGFPTVSSGERKAAREMVSLGFSSELCGLARVVQKDIDALIDSDLSYAHLFIGTSPLHRDYKLKKSKTEILSQSMEMVEYAKDHGLKVEFSAEDATRTELNYLIEFYKGVESAGADIINVPDTVGILVPSTTRTLIRTLRKKINLPISLHFHNDFGLAVSNSLIGIEEGANQAHCTINGIGERAGNTSLEELVVSLKIAYGANLTVDTTKLYDTSNFIGSITGIKMPPTKPIVGDNAFAHESGIHVDGILKNSSTYEPIAPEIVGHKRRIALGKHTGHAAIKSKLEEFNIEVTQKQFDNIYNQVKTLGDKGKCLTDDDLRSIAITEIGTSGKEYIKLLGLSVMTGESVSATATIKLSIDGKIMETSQIGVGPVDASVLALKTLVQDRVNISLDEYRLEAITGGTDALAETFVVISDDKGNKATGRATREDVILSSVIAVINSINRILDIQENC

SEQ ID NO: 6588 - protein, 263 aa, Methanobrevibacter ruminantium
MATVDSFLPDFIQTTFFSGYTIFNTVIYTLILLIFIIAIIKMFKKIKIDPISIIYPIIPYIFLGSLIRALVDNGVYPKTVFLITPGLYILVGLITIASLLFSLFLYNRKNIDYRYTLSIIGVILLIPNIIMIPRLNIIPVIYVLITWIIASSIFVLISYIIPFFKDRINLSIISAHMFDASTTFVAVEFFNYSEQHVLANTLYQLFDTSITMFPMKIIVIVAVLYIIDQYFDDETIKSLLKLTVFVLGLAPGLRNFLTMAIGV

SEQ ID NO: 6589 - protein, 221 aa, Methanobrevibacter ruminantium
MKFDPHIHSVFSGDSRSEPIDILIQAQKIGLDAIAISDHNEIKGSRLARSIPGDIIVVPSIEISTEKGHMLGLGVDEIIPKGLSAVETVDRIHDAGGLAIVPHPFSYYRHGLFCNVDSNLGVDGVETKNARYIFGYSNKQAQTLAERKRLARLGASDSHFLESIGDAYTEVNTKGYDSVDGILKAIKHRRCRAMGHGTSNFLVAKEVFVKKVLRRYPKRDE

SEQ ID NO: 6590 - protein, 358 aa, Methanobrevibacter ruminantium
MKILAIDVGTGTEDILLYDTEKEIENSMKLVIPSPHLTIGQMISESESDLYFDGVIMGGGKIKDRCLEHMEKGYKIVFEELSGKTIRDNIEQVKSFGFEVVKEGSFDKELNEDSSLKYADYQKISLKDVDVDKLIDIFKSFDLDLEVDELIIAVQDHGYSEDMGDRDFRFEKIKEKLPEPLPPEVFAMEREEVPEYFTRMQSVIQSLEESNPEFKPVLMDTKFASLAGVCYDKEVLKLNSFIVMDIGNGHTTVASIENGKIQGVFEHHTRDLSPERFEELVLALADGTIKHEDVHDEGGHGAFALNPISKIEKVVVAGPKRALVEKTNLDYYHAAPGGDVMMTGTVGLVKSMEYLRKN

SEQ ID NO: 6591 - protein, 433 aa, Methanobrevibacter ruminantium
MQYRIDLTNDEVPTKWYNINADLPVELPAPKNSEGKDQISTLPQIFVNECLNQEFSTERYIKIPSEVRELYQRLGRPTPLCRARGLEEKLNTPAKIYYKREDTSPTGSHKLNSAIAQAYYAKKEGIERITTETGAGQWGTALCLAASMMDIECTVYMVRVSYDQKPFRKTIMQLYDGNVHASPSENTEVGRKVLAETPDTPGSLGIAISEAVEDALKYDDVKYTLGSVLNHVILHQTTIGQEIKLQLEKAEEEPDTMIACVGGGSNFGGSLFPFIKDKIQGNSDTEFIAVEPSACPTLTEGEYRYDFGDNMGFTPLLKMFTLGHNFVAPSVHAGGLRYHGMNTQISLLKNEGYITPVTAHQRDVFAAGKMFAMCEGVIPAPETNHAIKAAIDEAKKCKETGEEKTIVVNFSGHGLMDFKGYASYMDGSMENSK

SEQ ID NO: 6592 - protein, 258 aa, Methanobrevibacter ruminantium
MGETIAVMNQKGGCGKTTTVVNLATSLAAMGKAVLVVDMDPQANATTSFGINKTEIKKTVYTALVNECSVQKATIPTRIENLFLLPSNIDLSGIEVELSKEDNYHIALKKLLEPIKGIFDYIIIDLPPSLGIITINSLIAADSVIIPIQAEYFALEGLADLMNTINLVETRLRSPTPIKGIVLTLYDARTRLGREVYGELKNYFKGKEYIFKTVIPRNIRLAEAPSYGKPCIAYDPESKGSIAYLKMARELLKLDGEI

SEQ ID NO: 6593 - protein, 248 aa, Methanobrevibacter ruminantium
MAKKQNSGLGRGLDSLIPKIKEIEQDVEEGLSLEDLLKKSDDEEEIEETVEETVEEEAIEEQEDISTEETETEEEPDEEEDEPVVEKDETEEEKIEIEDEPKEELETEAKEEETSNYTNIFSNDDEIVTENSTKTIEISSSKNNDKNIESSVNLNKETEESIKINEDKTKENDSDSVLSEKEEKLVYEVIETVEKNPRITLWSARSAAVLRYLRKTEPEFSISNEASNLIDEAIAQKYPEIWTLFNHL

SEQ ID NO: 6594 - protein, 252 aa, Methanobrevibacter ruminantium
MKLGFSLLSLFMKEVDEMLEIAVENGFDSVELLAEGPYRQDILLERKEITETFHSYDLDIYIHGVNVDINLASLNEGIRKESVKQTKECLDLADEIGAIGVTAHPGKIGRPEKYLREMALGFLTESTHELVAYAEDKEAKISIENMPERFSYLGNRAYELENLTNETGCNITIDLGHVNTCKDQLSFFEIPNILYYHINDNDGIKDKHQAIGDGTLDLNLLKYVDNGIIELNNFDNVLKSKKVIEDFLAKNQ

SEQ ID NO: 6595 - protein, 268 aa, Methanobrevibacter ruminantium
MIKMTKKAIVFDNSGTLLERFRVIKDLSTGEFITHVNSLDLIDSCLNAALVVLQFNTNRLKDLDPNTLISDFVLENNIDFDISYYSTDVSKEEIKAILEKDTAIIKDITDTFPLLKERVPGMELCNGSAVIIDIEEERISYTITSAGQLFSGVKDTIAKLQDSGTDVFIASGDRSGDIRKLANITGVPEDHAFATASTDRKAEIVANLQDEGYKVMMVGDGPNDILAFQKADAAVLTTEQKDGDFPDKLKSYADFVIEDISEVLQIDF

SEQ ID NO: 6596 - protein, 316 aa, Methanobrevibacter ruminantium
MHLDSPLKIKNICLSNRIVMPPMAREESIDGKVTYPLIEYYRMRAKSTGLIIVEHEYVREEGKSSPKQLSMADDSVIDGYIELTESIHREGSFAIAQINHGRYGSISSNNVNLNGISIEEIEDIKKAFVEAAVRSQKSGFDGVEIHAAHEYLLNQFYSPYTNKRTDEYGGSLENRMRLHNEIIREIREAVGDDYIIAIRFGAYDYLEGGSKMEDIPAAVKSFVESGVDMIDISGGLCRYQNPYSREPGYFKDLSKIAKESCDIPVILTGGVKKAKDAERLINEGYCDLIGIGRALLMDGDWSKKAIRKVRKIKSDK

SEQ ID NO: 6597 - protein, 93 aa, Methanobrevibacter ruminantium
MRARERRARLMSLYIYIVMTMIQTKVSARNQTTIPSKIRKKYNVQPNDIVEWKENRNGELTVTFRKRISFRDMIGKGTIKTTTNALDLEKDLY

SEQ ID NO: 6598 - protein, 352 aa, Methanobrevibacter ruminantium
MFEKRKIKRLSNHLNNSYDAEDYVSALSYCDMILDIDSNNPHALFNKAKILVIQGELLEAMSYYKKALQTGFFDMSTWVDEVSYYMDGDISSTNYKLSNRNEISLELCEICLEKYAKDIFFSIYKSQALDNLGRFEESLNAISLDLTPADGELYVFQCIGQCFPLSNLNRWEDLLETSSNGLKLKSEDPSLNSFKAKALYYLNRLNESEGFFNKYIQLTNDSRAYNFLSKIEFKRKNYTSALKLINNAIQLSKKEHLDLLESNVLIEDDGIYENDYYMKSLILLKLNELDKSNKIIDCLMEKEESAKNYCLKARILYEMKDYRTSLSFVNKSLDLKSDCSEAIELKEKLGEF

SEQ ID NO: 6599 - protein, 372 aa, Methanobrevibacter ruminantium
MFTKIKINKLFKELDSALNNQNFDKALIILNNILILDENNLGALYKKALILYNKGEYEKSLSVLDHLLSIDYCIDAFLLKGRVYCNLNDYENSLNSYKEASINFDLDKMNNEMTYYASHPSLFDKGIHTKIFIDLCNIILDNADIIEVRLFKSYVLSEIGRSRDALNNVNYILAHNPNNEKAISLKSSILISLNHFDEALALINEGLNLYPNNLQLIDTKARLYYALSDYDEALEICKEYNSMDDFGNYYLLSKIEYKKGDYSLALKNIDIALDKFFKNPNFDDKKEFSHAYYWYKSLILSKLDRFDEANKICDCLIEKEESAKNYCLKSMILFKEGNYTDALIFIDKALELDCECDKALELKNNIEDKLSS

SEQ ID NO: 6600 - protein, 501 aa, Methanobrevibacter ruminantium
MSNNQISGCSYALYLDGSDNGSFIGNKIFNNDYGILAKYSNINLFKNNSVFNNWIAIEDSSKYNQFLSNNIHDNYQGIRLIASNSALIENTNVYNNYLGILKYSSSFINKSASVYNNTLINVQSLNDGEIVIQDNMWYCGPAALSIIFESLGLSLSQEDIAKIAGTNTNGTSLYGLYQACIKKGFNPSVLKINSSDLMTNDLAVLLINEDYHFSVIYSINDTDIVLNDPSIGLFVLSRETFDEMFSGYVLDVEPIKDRVSNVSIAKMKTIVGTVFPALAYGGYLALAGVTVIAGSLAIVWNSNSHYNSKSIQKPHYTWKPNNKIHFPRNVKYPTSTGNNGNRPKVSYNPVTSSISGNKYYTNNKVYTYNYKSSNRKVSSSNAAIIAYQEAYNYYLSTKNNERAKVEKPTNITSYNYFLKDVKAFEKGSYKFSLGPKGPDDDLYDSAKIVKALYRDATRNYNYGKFLINTGNKSRGICYIFLATFEISFIPAIIYNQLSLNP

SEQ ID NO: 6601 - protein, 467 aa, Methanobrevibacter ruminantium
MKKGVLMNILEKLNAIKNQEITAKENVESYIKVIEEKNDELNAFLELNKEDAIAKAEEIDAKIKAGEEVGALAGLVFGIKANINVEDLIISAASKTLEDYIGSYDATVVKLIKAEDGIIIGINNMDEFAAGSSTETSYYGAVNNPAAPGRIPGGSSGGSAAAAAAGMCDIAIGSDTGGSIRNPSSHCGVYGMKPTYGAVSRQGLLDLSMSLDQIGPMARDVTGITLALDTIVKYDPTECTTLKWDAPNFTEIALSVKDKEKPLEGMKIATCKEFKEVTNDEINEIIDESVAKLESLGAEVVELSFDYIDICLPTYYLINYVEFFSATRKYDGRKYGSRIEEVCGPEVLRRIQMGSYISQKEFSGKYYQKALQARSLIRNAINDMLEGVDLIVGPTVPKLPHKLGEELEPMEMYAYDVLTVIANLAGIPAASLKAGEVDGIPVGLQLQAKPQDDAKIVKAMAAFEYAQ

SEQ ID NO: 6602 - protein, 189 aa, Methanobrevibacter ruminantium
MMSELEKLKSGLVYCYDDEEVSAIKDNAIYQSFRYNNIDPNDKQKQYDALEEILGSCGDDVWIGKRFSFDNGKNIHIGNNFTGNYNLTILDIREVYIGDNVMIGPHTLITTVGHPLEPKGRRKHLAMADSIHIGDDVWIGGNVTILPGVNIGNNVVIGAGAVVTKDIPDNSLAIGVPAKVVREIENDIE

SEQ ID NO: 6603 - protein, 287 aa, Methanobrevibacter ruminantium
MTDNSSNMGSNSDKKEFDSDRKEFNSDKEFNSKKEFDSKKEFNSKKEFDSKKKDFNSKKFNSNYKSNRSRNNINTIQDLKNSIELKENKINDLKELLEIKDEEKQEVEYELSLKDQELNDLQSKLDILTVENEELTIELNEKESKISKLNNALVKCKYEKDKVDLVLKNEVNIEKSRLKEMDNLNNTIKEKIAIIHDKQEQINYLRTLIDDYKDQTKNNTDNLDLQLKKITKTYEGLLNQKDSIIEKQEQNINELIESQKQIAKDNKATITRLELEIGKYREELKKS

SEQ ID NO: 6604 - protein, 264 aa, Methanobrevibacter ruminantium
MVKCSKCGSENKSEAKFCHSCGAKLDIKDPYNLDGKSREYGSTTGKSAGSASAYYDHSANSGGSSSDSTGGIDNFRNMSNFKKIIFACCAVFIVLFILSLAAQALGFDMEPYSENKTAYHNYSSLDLDDDGALCLEELEIEYSNISSSKMSDIFKKSDKNRNHLIRGAEYDMLNYYVNEHFKDLEKKKNEKTSSSSSSSSSSSGSSSYKSPFTTSGSSDDGAETCPFCGSEAVYESGNSYKCAECGRTISNPDDLDLNYDEGYY

SEQ ID NO: 6605 - protein, 408 aa, Methanobrevibacter ruminantium
MKKCSKCGSENPDNAKFCHNCGSKDFGTNENICPKCGESNVKEAKFCHKCGASLSSNSSSGSSSSYNPTGMNGPFGAGANDKPGSVMNGPFGAGANDKPGSVMNGPFGAGANGVADSFAFDPSSNDKSSSSSNSNSSSNSNSSSNYSSSSNSNSSSNSNSSSNSNSSSNSNSSSNNQGSTASSANQSNSTASTKNQSNSTISSTTANTGNEGPGLKKICCCYVPVILLVLFIIFAILLNAFPENFSATYDDEFYQLDIDGDGRLSLSEASQLNPGMSDSSISSYFNEADKNNNGYLIGHEFDDFYSDVKPYSSSSSSSSSSNSHKYSSSSSSSSSSSSSSSSDYDSSSDGYVLTCPYCGSEAIYESGSYYKCADCGSIIHNPDDLELNYQEGYMDLLAPIVQINLGGV

SEQ ID NO: 6606 - protein, 129 aa, Methanobrevibacter ruminantium
MIKMEITGIVTTGLGKAAYFLGQDFYKSQFNEKCGFTPFPGTLNLIVEENKLEDIRLMKNSCTNVIKPDQGFGGVKHIRAYLNENIVGAIVFPDKTTHDENYLEFISKDKLRDKYNFKDGDEVVITIDI

SEQ ID NO: 6607 - protein, 569 aa, Methanobrevibacter ruminantium
MSWLVVLIVFLLASIKSTKNPSVSVVIPAFNEEATVAQVVTVARKLSYISEVIVVDDGSTDKTVEEAERAGATVISHKGNQGKGVAIKTGFKNSHGDIVAFIDADVSNFTPTKIDKIIKPILEGKTDITKTKFARESGRVTELTAKPLLSFFFPELNYEQPLSGQFAGKRSALNKIKFEKDYGVDVGIVLDADVHGISILEVDIGDIQHDMSSLADLNKMANEVVRTIIDRAVDYGRVTMMDTLGNYIRMAIMGLSLIILGLFMIFFVPFIPLVISVLVALVGIALTIAYIIKIVQRSIPILRKGDTSTALKSFVKMHFPVIVSGLILILMLSTFLSAATFNDGRISVELTSRNFVYSPSDDYHQTISVRGPYTIDSAIENETDMVRIPPDALSTLEMSANDTMIIDGEYYSVNTSREGEVDVFRLSKAVRHDLDLYPREVIPNSRLAEVFNGVIVNHNINFNNSSEVMEGYVQFSISPKATNATFFNLTLDNESLLSSVGNFKNDSYYTIAYDDDILCAFTGDDIKKGNVTFEYAGKDGMIVFEDRNNTSIRNFIDSDRDSFVKLYTL

SEQ ID NO: 6608 - protein, 104 aa, Methanobrevibacter ruminantium
MIALVLAPTVLSLFTSSVTAAALVIVGILMIVQLKEVDWDNMVVAASVFMTIIMMLLTYSISLGIAWGFVTYAVAAIATGKAKEFSWIMWLMVIIFAAYVFFGL

SEQ ID NO: 6609 - protein, 331 aa, Methanobrevibacter ruminantium
MLNKFFKLDENNTDIKTEFLAGLTTFLAMAYILGVNPTMLAEGGMPATGVFFATALASGVSCIIMGLVSKYPVGLAPGMGMNALFTYTIILAMGNTWETALAAVFVSSIIFLLITISGLREAILNALPFDLKLAIGAGIGFFLAFIGLKGAGIIVADPATLVGMGTILSAPALLAVIGILLTLILYIKKVPAAVFLGLVITAILGVIFTLFGFGAGDPLMPAIPTEFISFNFDTSVVGAFLKGFSQLFTNIPNLIMILFSLLFVTFFDTTGTLIPLANQCGFVDEEGKADGIDKAFLGDAISGIIGAILGTSTLTAYVESATVLVLVVEQV

SEQ ID NO: 6610 - protein, 3079 aa, Methanobrevibacter ruminantium
MSIKRILLTSLMLFIIIFSISFVSANENVTNDVSTNELSTQTVSNDITTSESISDTSLDSGENRGLDEIKSNSTEESSSSNLDLEDGTLNNDEIESDDCLTKNGKEATLQANKLSLDINMSRGTAQDVLDAIVRISSQGGGTLYLNGGTYTEGGHARVYNNDTDSFRNIVRNDGIVDISNVRVVGGSVDNPNQYATFQPNTRDSTSLAFSGYGVWDGNGTRYYPDSGFNLTNVTFENLNCTGRFFSFNSGYLTDCVFNNLESYQHLFFVTGAYNDGGKPIVLTNCNFTNSKQTYRGDGPGDGTDGTGQFGVVFGAEMYGCNFINTSTATHGGAFCLSDEWISAACVPSKLVDCNFINITSRWFAVYIHGNYSNTTRFITEPQVVENCSFINCTATGEFGGALGISHNNVIINNTEFIHNVGGKGSAIMVGGINNTHDGFLGVNTQGNNITIYNCTFEDNIAKIEGQSSAHSTDPPFTTYPTGYGGAVYVYGNHTKIIDSTFNNNTADDSCGAAIYIRGDNTTVVNSEFYNHTSENGTIYLVGNDCKIKDSLFHDNDADSTGACIFVEGNRAEIGNTTFVNNTAPNGGCVFIIGDHTLVDNDTKFITNNATNGAGIYVNGSNTMILNTSFINNTAVNGSGAFIYGHDTDVNGSYFEGNDATNGGAVFIEGNINDISNNTFLRNNATNQGGAVYIDGNHTKVNYNNFTENEAIPISEDQETGLGGAIFIRGNDTNTTANTFLHNKARNGSAIYTDGTNFYLHNDHFLENQAWSYLLITTADPAESLYKEQDIEINVLYRAGDNIINAIHNRNKPNETHFMNVTYSHSEFGNITTSPADQYVEPVDGVENSREGELLYQDDRENYQQIELRVEHENGDLALPRTPFRTNIYGNVNTTLNKSSLRKGLYVVGAEHIEDWNYKFIMNSTSFRILDTMDIMVNKTSDKEEYFQDEIAEWELIFHNTDNGTDAENVTMTDHLPNVFELMNLSYMFYTPTEAITNATLYLNNNTLRYGVYNSSSQQWVYGDARYNASANSWTYYFFDYDNVTYVYTEFNADDFVPVFGPVIYSNSTDVCYDNISYNIPEEDWYYDTIMVNGQEVRYGHFNATEFEQYFGPSYYDEDNKTWVWIHRGEDPLNPGQETDLRTIYDPESNIWVIDDYMHYPERKTVTEKVVFTIVNDTANNLTHLSLYARDFDVNVTGYVNFTTNCTRSGDYTNVVNVTTPDYDWDLSNNVANRSVLVDPLPNKTVSNTTPYYHDYVDYNLTIMNTGNSTYDQILTVVDSLPEGLVYNTTVGILYADQIGETLVENQGRTVTWNVTNIPANTNATIIVRVYVDALGNLTNNMTLIAPSGDNRTVNATITPVTYTDVSVNKTVEKEEYFINDTIVWTITVSVAGNGSNATNVNLSDVLPPEVEYISTNGTYDNATNSWYIGNMTNGSSVSITIDTRAIRVAENVTNVANVSCNETEWDYENNRDNATVSIIPVPQKTVNETNPTFGKYVDYNLTIINNGAEPYTDTLTVVDNLPEGLAYNNTVSILYADQVGDTIVENNNRTITWYVTNIPANTNATIIVRVYVGILGEQINNYTLIGPKGSNRTVNASIVVEPKVDISVEKTSDKINYFEGETVIWTITVSNANNATPATNVTLKDILPEEVEFVSANDTYSNETGIWYIGDMANGTSRTIVINTTAIRSKTNVTNVASVNCTEKEWNYTNNVDNATINIYPLINKTVSNSTPDYGDEVEYNLTVINTGDVMFNETVTLVDRLPEGVDFIKVLNEDGLKVISFDHSTKNLTWVVTNISANTKATITILANCTLVGLQENTWTIYGPEGMNRTVNATIVVGPKVDVSVEKTSDKINYFEGETVIWTITVHNANNGTNATNVTLKDILPEEVLYVSSNGTYNNNTGIWYIGNMTNGSSRTIVINTTAIKSKANVTNVANVSCNETEWNYTNNVDDAVINIYPLINKTVSNPTPDYHEEIEYNLTVENTGDIMFNETVTLVDRLPIGVDFIKVVNVTGLKVISFDNTTKNLTWNVTNITAHTKATITILAVCNAIGVQDNTWTIYGPEGMNRTVNATIEVKPIVDVSITKVADQEIYHIGDNVTWIITVHNAWNGTNATNVNVNDILPKEVEYLTHTVTQGQYNNRTGIWTIGFMANGTSQTLTIVSVAKINKTDITNVANVSCSEKEWNYSNNRDYATIEIVDTPINKTASKPVPDYHEEIEYYLTVTNLANETYNKTVTLVDSLPEGVTFLRVVNETGLRVLGFERRGNHQIWNVTDIEPNTTAVITILARCDAVGTKINNWTIYYPNGDSETVNATIEVKPIVDVSITKVADQEIYHIGDNVTWIITVHNAWNGTNATNVNVNDILPKEVEYLTHTVTQGQYNNRTGIWTIGFMANGTSQTLTIVSVAKINKTDITNVANVSCSEKEWNYSNNRDNATIEIVDTPINKTASKPVPDYHEEIEYYLTVTNLANETYNKTVTLVDSLPEGVTFLRVVNTSGLRVLSFNSTEKVQTWTVTDIEANTTAVITILARCDAVGIEINNWTIYYPNGDSKKVETPIDVQPIVDLSTTKTSNKDVYFLDDTAVWTITVHNAWNGTNATNVVIDELFPSEFEIINYTTTKGRYDPSARAWTIDFMENGTTETLVITSVATVVTPFVDNPVNVTSDERDWNLSNNPSNKSVKVIDIPDPEKTVNNATPYYNDTVVYSLTIKNTGDIKYTNKLTVIDSMPQGLEYVKTVGISGAKLIKEVVKGQVITWTITNISAHSNAVIKVRVRAKALGNLTNNLTIVTPHANKTVNCTITPVPIADLAVTKTNDHYGKDCLNSTFVYWTIKVVNYGPNTAVNAIAKDILPEGIIYLSDDSDGAYDYETGIWTIGNLAKGKSVTMTIETIVDAIDTRINNKVVVSSDTYDPDKSNNRDNSSIKVISIADLKLTKTANVTKTYVGENFTYTITVVNLGPDTAVNSRVYDVLPKGVKLLSFNESKGSYNPQTGKWAIGDMALGEEVTLKVNVRALTTGKIVNEARVESDTYDNDTSNNNDSATVIVIGDNPPIKMLPTGNPILIALLSLLAIVGVTLRRKS

SEQ ID NO: 6611 - protein, 728 aa, Methanobrevibacter ruminantium
MMIADTLSQELNIKISQAESVIKLIDDGNTIPFIARYRKELTGSLDDEVLRKFDDRLKYLRNLEEKKETVLNSIEEQGKLTDELKQSILDCKTLVELEDLYRPYKPKRRTRATIAKEKGLEELANIILAQEIEVPLEEIAEDYITKDDSVEEELRVNTVEEAIGGAQDIIAEIISDNASFRSLIRELSYEDGELISEAKDKDADSVYDMYYEYSEEVSKIASHRVLAINRGEKEKFLKIKISAPEEDIISYLTRHVLINKGGKPTKPIYNKYTEETLKEAIQDSYKRLIAPAIERELRNQLFEKAEDKSIKLFSKNLEQLLMQAPIINKVVLGWDPAFRTGCKLAVVDEYGKVLDTTVVYPTEPQNKIAETRSTVRDLIFKYDINIIAIGNGTASRESEAIVADIIKDLDVQYVIVNEAGASVYSASELATEEFPDYNVGERSAISIARRLQDPLAELVKIDPKSIGVGQYQHDMNQKKLGESLDNVVEKSVNNVGVDVNTASVSLMEHVAGISKTVAKNIVSYREENGKFYTRDELLNVKKLGPKAFEQCAGFMKVKGPNPLDNTTVHPESYGATIAFLSFLGYSIEDLENKKIKESDLDLTDKQFEDMAQELGIGSITLKDIAKELKKPGRDPRDEMPQPILRKDVLTMEDLEKGMVLSGTVRNIVDFGIFVDIGVHQDGMVHKSEITDSQYVNHPMDFVSVGDIIDVKVLDVDIPKRRIQLSMII

SEQ ID NO: 6612 - protein, 349 aa, Methanobrevibacter ruminantium
MERVRLQYIDLLKFFAIFSIIALHVFLVWPKAKVMGIKVYSLSSIVRFGVPVFIMISGALLLNRDIEIGSFLKKRINRITYPFLFFYIITFIFIALTNHTHEQQNIFAFRWYFWTILGVYLSIPIINKYIQHSSLKEIEYFIYIFIFASIFYQFTYFFEIKQYFYLTLFLSPLGYLVLGYYLSKKDFNLSTSKMIVISIILFILSTSIKICGQLGYIPITENFVASQSVILSSWLDVSFIGILQAASFFLLCKSIYEASKGIFSPIKKFLESNIISKFVLSVSRASYGMYLINLIPTVIVYYYIQPMNLTGSQVFLAIPLISIIIFLVSWIIIVILCKIPYIKYVSGYS

SEQ ID NO: 6613 - protein, 1178 aa, Methanobrevibacter ruminantium
MKTRISVIIPIYNVHEFLEDCIESVLAQTINHWDLVDDYQRNLQIILVDDGSTDDSGEIAKSYAAKYENVEYRYEENQGLGHARNYGCEFAEGDYIIFIDSDDIIPPKAYERMYRIALKNDSDLTIGSVWRFNSKLTWASNIHEIAFGGTKELTHIKESPELFYDTTAWNKLIKFSFWKEHGFQFPEGILYEDIPVTMPMHYLANNVSIVYENCYLWRVRDGISKSITQTTDDLKNVEDRLYVMGLVDKFFNENVKEEELHRVKNLKWIKNDLMIFINKLKSMDIDESQEIIDLLLDYIDRNIDPKYFDEINEIEKLKYEYLFERDFDRLLKLLNYEHVNFYTLNIHSKGSDVVIEGDKDVFKTSSFIVNDFIKEGKKAKYIQKVNLEEEALEVSGFVVIPGLEAKEFKDVEYSFYLVNSENRKKIALRHEQIYLGNINSYRLRFGKKFSYKAAGYTVFVPYELIEDNEDFLGENKIIVVFKQRGVTHNIFAGNAKKNVRSRSENRAVLIGKTYMSIGYDKNNEIIINVSKARHSYDRIEIEDDDLCIFGPYDGDVFLHYNKSFISPESNIPFAYDDGNQCYRLDLDNIRSTEGQILYDNGESLVYKDKELLCLYSSKGQCVISSLLDHNIKINKFKNFSLVSEISERNNEIDIVSRLHSLDLGDRQLKSATLYFFLDKNQSSYPIAEAKIIKDVSTTQDSHIGDNAYIDDKDSEDIDSSSLNGENTYELNFKFNMNNKIITENLYHGYFDLLIRYDFGDLVFSTPIHLLDDFKALLKKKVFHFTIYRGNAWTLRIRAKKKWNWWDGRPRIYTRAYRIFKHLPINKKRIMFESMWGAKYSCNPRYLYEYIDENHPDYECIWSLNDEHIPINGNGIRVRRWTLKYFYYLATSKYFVDNVNFNERYEKREPQRYVQTMHGTPLKTLGLDVPGDFPTKASEERFIERCSRWDYITVQSEYVEDIARSCFKFDKDFLRYGYPRTSMLYTMNNEEDINKIKERMNIPLDKKVILYAPTWRKKNKVEIMLDFQSFKESLSDDYILILRLHHLMFSADFAPIEDDFVYDLSRHDSIEELYLISDILITDYSSVMFDYSILDRPIILFAYDLEDYAEKLRGFYIDIQENKPGPILFSSKEVEDAISNIEKTEEDTKYLREEFRNKFIPYECANSSEKIFNDLVSGK

SEQ ID NO: 6614 - protein, 1224 aa, Methanobrevibacter ruminantium
MKTRVSVIIPIYNVYEFLEECLESVVNQTINDMELTDGYERNLQIILIDDGSTDSSPIIAKEYAQNYENIEYHHEVNQGLGHARNYGCEFAEGDYIIFLDSDDKLSPNAYEWMYKTAIRNDSDMTIGGFWRFNSKKYKISNINKIAFNGNKEKTHISESPELFYDTTAWNKLIKHSFWKKHNFQFPEGILYEDIPVTIPMHFLANNVSIVYENCYLWRIREGKSKSITQTTTEIKNLEDRLYVMGLVDKFFDENVDDERLRHVKTMKWLKTDLLIFIRKLRSMDKEQGYKIMSLIRDYIQNNIDADEFKYLNEYERLKYEYLMDDEIDKIVSILNFKAENIKETKVYQKNGHIMFNADKEVFKQSPFYIDQYIRERYNRKYIQDIEIRDDGFLIRGFMLIPGLDIKNFKDREHRFHLTNANSHKKIKIDSEDVETGNISSFNIRFGRGFSYDAAGYKIFIPFSKICDDEDFFGENRISVDFKLNGIYQSPFLSYEKKELCQNFFLGYAKKDIRQKTNMKAVIYKNTYFLIRYTLKDEIIIEALPLKNYFKEIRLDENVLKLDSDHIGNLYIYYEADSINEEEKIAFEYDNEDKSYQIDIRKLKKKPGKILCDGENSIYKSKELILLDSKYGQCLISTLNDYYLDIYYFDSLTQVLDIRQNRDRIDIDAKLYSNRFNETRSTYKADRIKTAKLYFKDDSSKENYILSDGMIDRQTGDIKFSIDFSNKEITKNLYEKIHDLYVEYAYDETSTEEEAIVNKEVDESEYDSVSKEEKENNKIEKTENEPVPVEGRNNKINEESRFSTELYLFKGDDKTISKSYYEYKVYHDLKGFLKLKVLKRWPVYEDTPGKRLKHSQISYKLFSKLPINKKRIMFESIWGGKYSCNPRYLYEYIDENYPHYECIWSFKDEHYPIKGNGKCVRRSSLKYLYYLATSKYLINNVNFKKHFIKRKGQVEIQTMHGTPLKTIGLDAPGEFPTKKSQKDYIKKNKNWDYLTVQSDYVAEISRTCFKYEKDFLKFGYPRTDILYTKNNKEDIQSIKERMGLPSDKKVILYAPTWRFKNNFDLMLDLKSFKESLKDEYILILRLHHFSAGGWKQPLDDDFVYDFSGYGSIEELYLISDILITDYSSVMFDYAILDRPIILFAYDLEEYDEKLRGFYMDIESNKPGPILHSSKEVEEAILNIEKTEMKYKDLRRSFKERFNQYECENSSEKIFNKVIDKKKNKK

SEQ ID NO: 6615 - protein, 696 aa, Methanobrevibacter ruminantium
MQDPKISVIIPIYNTEDYIEETLLSVINQTIFDEIEVIIVDDESTDNSKYIIEKYALDYSNIQVFHQKNEGQGISRNYGLSKSKGEYIHFLDSDDYLPPTAYETLYNMALKNESDIVIGNVLRFALYNVWEESLYKNAYNDFDEDIAIMSLNERPSILWDTLVTNKLFNREFLIRKNIRFPNKKISFQDIPFSLESYILADSISFSKEIFHYWRLRSNQSSVTQQDKSLKNIKDRLEILRIVQNLLEKYEVEEEIRNYEYSKWLNHDLKFFLKRFNYYPKEYHEELFEEVYGIVKIIPDALIDSLNSYKKVLFTMIRNKDYENFLLFAPLENELYKNPEIPSFLNDEYKSYFDFEKAMEEEELNIELLDFKNDNDNLYIDFDGYLNYLSPNDNYKIIAKLVDENDYENPLLVNHLENKQIAIPFYLLKDKKRAQIKVIYEFESFKKTAYLKNRHRKSIEREKFFIDLDLGKNSYLYLDIREKNIENYIDIIDISFNSKEFTIKAKSKKSIDKISMENIISFEKIAYPIYDLKYEENEDNNLKNEENGEYTFKFKIPYYDILKSAVKKWELNCDEYFNSIKLSETFEFFTETYKIKFVNTRNKILIENEIFNPIKMIYALNHENTDLKLNIKTLKGENSRLNKEIKKTNEKNEILNEENKKLIDKNKTLNKENKKLNKKIEEYKSRKVVKIVDSLKN

SEQ ID NO: 6616 - protein, 212 aa, Methanobrevibacter ruminantium
MILGTYLIMPIFNRWIKDCSIREVEYFLAIWLITCIFDNTLLIGFPVTLTYFTGPIGMVVLGYYLRHTDRKIFNSLPYALAFLLIGMIVIMLCSYFLSSPEGMYVFDRYSILLAIEVVGIFTLYKVIDKKELKIFHKENGFFRRASFSIAKYSYGIYLCHEFIMNIFIIIFLKHAPFKVTLLLVFVCTLGTSWALLALLNRVPYLNRIIGAK

SEQ ID NO: 6617 - protein, 97 aa, Methanobrevibacter ruminantium
MNWVVIPEYSLIPSLNWFITDFLGTCCRCGVDIFLMLSGALSLGRDWDIKSFLGKRIPRITYPYLFWATLLISIMLVAVYFNPDLLKLFFGISHSFI

SEQ ID NO: 6618 - protein, 335 aa, Methanobrevibacter ruminantium
MMIPKVMIILGSASDKDIAMKSIKILEKLQIPYSLKVASAHRTHDKVKKLVKDATDKGVEVFIGIAGLAAHLPGAIAAYTHRPVIGVPVDGAVGGLDALYACVQMPFPTAVTTVGINRGDNAAILAGEIIASYDEKVGQNISDLRVEYQEKVEAGEKELIESIEGEYFQKDFLEEEKYEKIEFEELDDTPDVMILAGSYSDMEIAKNVAILLERMRINYKLDYISPIRHAKDFESYMSKRNNAKIFIAISGLSALVAGSVVALTEKPVIGVPCSKKLNGQDALLTMANMPPGVPVGTVGIDNGRNAAIVAGEILAISNKEIEENLKWIKYKNADL

SEQ ID NO: 6619 - protein, 420 aa, Methanobrevibacter ruminantium
MAEELNIIQIDEELDAEYEAAKVLRKYPKDTVMLNNIKGYDIPVVSGICNTREKIAQSLGCQVDEILYKIIDGMNNPTPITKFIDLKDEYDSKRVDLGKIPILTHYKRDGGAYITAGVVFAKDPETGIQNASIHRMLVLEKNKLAIRIVPRNLYTYFQKAKDMGKDLDISIAIGMEPSILLACTTSIPIDADEMEVANRFKNGELELVNCKNGIKVPEADIIFEGKILIDETAPEGPFVDLTDTYDYVREEPVIKLSKMYLKKENPMYHAILPAGFEHKLLQGMPQEPRIFNAVKNTVPTVQNVVLTEGGCCWLHAAVSIKKQTEGDGKNIIMAALAAHPSLKHVVVVDEDVNIFDPQDIEYAIATRVKGDDDIIIVPKARGSSLDPKASEIDGTTTKVGVDATKSILEPHKFERVSFSE

SEQ ID NO: 6620 - protein, 323 aa, Methanobrevibacter ruminantium
MDKVGIIGAGSLGTALAQTVANNVDTVYLHLRREELAKTINSTGYNSEYYPNTKLKNNIIATTDMNDLIDCKIIFLSIPSSAFRSTLENLKEVISEDTILVTTAKGIEYPSLKSMGRLIEEYFDENFVALSGPNFASEIVLNLATVSNIASRSSENAIKVKKVLSTPEFKVKIIDDVVGLEICGVIKNINAIANGICEGMNINENARYAVLTKGFEDTGRIIEAFGGKISTASEYCGFGDLVLTSTSSESRNHTLGMLYGQRIIVDEKASGIVFEGKNSIMAIKDICNNTNTNSVVVNFVYDVIVKQIPPKIAFKDLWNNIEE

SEQ ID NO: 6621 - protein, 363 aa, Methanobrevibacter ruminantium
MMSEDSILLTIKSFTDLQTEINNTANGGILILEGYYKYNSNLDSNFLQKGVLVNKNITIFGNGCVIDGNNTSSLMEINANNNTVKIYDLNFINGHQNTWNYGRVSITNSIAYFNNCSFLNSTNGYYGSVYIAKTSQAHFNNCIFNNNYAKFGGAIFNNNIMYCKNCSFENNSAQSGGSLCINGENNGVENTNNYTYLENCSFSDNSSTAHGAVIYCDEWSKGCFNNCSFEKNSATTSGGAITIDGANIDINNCSFNKNKTGTSSTYNGGAIWIIKNDISGASNVNILNTSFSNNSASQDGGAIYLNGTCVLKISNSSFNNNTATRYGGSIRNYQGTATAYLCGFLKSSDATYGTITKNGCYGP

SEQ ID NO: 6622 - protein, 238 aa, Methanobrevibacter ruminantium
MIGVILAAGMGTRLMPLTKDIPKALLKINETTLLERMIKNCINADISKFIVVVGYNKDKVIDLCPEIAEKYDIEIKTIENEKYDVTNTSVSTYLASKFIEENDLDDFILVNGDNVVDPEIITRLAVSQNTGMIIDNFKELNEESFKLIIDDESFNEDKTIANGKINSIGKGLDIPSSTGEFIGVSKVVSDDVAQFNRILEKLIEEDPQNYYDFAYKDLSLIKTIDFVLTNGLKMDRNR

SEQ ID NO: 6623 - protein, 406 aa, Methanobrevibacter ruminantium
MAEEKRSFKKLIKDILYISAKRSARALYYIGSYIIPANEKIILFESSNGRNYTGNPKYIYEEIVSQGLDKEYKCVWSFMHPDKKIPGNAIQAKRSFFKFLYYTLRSGTWIFDSRHLYYLKKNKKTKYIQTWHGTPLKKLALDMDYIDMSGNQDIEAYHEEFRKNTSAWQYLISQNEYSSNIFRRAFDFKGEMLEIGYPRNDILVNKDNEKDIDEIKTRLNIPKDKKIILYAPTWRDNQFYTKGQYKFATEMDFDRLYEEFSDDYALIIKFHYLVKENMDWSKYNDFIIECDADWDIQELYLISDMMITDYSSVMFDYSILKRPMIFFAYDLDDYKNNLRDFYFDMVEDVPGPICQTNEELVDFIKNYSENAYKNTFGEKYEKWNDKFNQFDDGKASQKIINLIKER

SEQ ID NO: 6624 - protein, 350 aa, Methanobrevibacter ruminantium
MKESSFYIKLYEENNSTDHISNSNKSVQCNLCARECKIKNNNTGFCKSQKNIDGKLFALNYQRIASYHIDPIEKKPLYHFLPGSSTYSIGGFGCNFSCLNCQNYMLSMNSYNENNSIKILPERIVKNALDNDCLSISWTYNEPTLYFEFAEETSRLAHSQGLKNVFISNGYMGEEVLKETVSFIDGFNIDLKFFDDELYRKICGGRLDIVLDNLRTIYESKKKYNNHLEITTLLINDLNTEKEHIRAISRFVLDELGPEVPLHFSRFFPMYKMTDKAPTDIDYLIRAREIAISEGLEYVYLGNMPADNNTYCPECGELLIERNRYCNRDKNRIKDGCCVNCGHELNFVFD

SEQ ID NO: 6625 - protein, 413 aa, Methanobrevibacter ruminantium
MKSTLKVSDIGEKQLIERIIEKSKLCSLKNPFDLDDFNSNYPSSNFKTSIGDDSALLNQNLNTNHYLVASSDMLIQSSHFPREMTYYQMGYKSVIVNVSDLASMGAKNIGFLLNIAIPKDTSLDNFDDLICGIIRACDNYNIPLVGGDTNEASEIILSGTAIGQVEKGKALMKHGFKEGDLVSISDHLGYAALGFELLKIKEENIDKYNDIIFQINKIDPTVKDLALFKALKPEAKYEEGRILASHNSQENRISATDITDGLASEFYEILNADKKYYLFNKDTESHNPNDSNDSNDLNNQQNNQNNTNNQDVIDEYDDSNYSKGIRIYEDKLPVDDEFKQIADVLGIDYLDLFLHIGEDFELLFTINKELKSQLENDMNFYVIGEITNNNTVEIVLSNGDIKNISSKGYEHLK

SEQ ID NO: 6626 - protein, 227 aa, Methanobrevibacter ruminantium
MNLIKGLDKNNGLDLILHAPGGDVGATESIIDYLYEVFNGDIRVIIPQIAMSGGTMIACSSKEIIMGKQSSLGPIDPQFNGIPAEIVIKEFYRAKNEISEKPETIPFWQTNISKYPPAFIILCENARKWSDEILDKSLRYAMFDGSDEEKINKIRLELGSHENTKSHGRHLSAKDCQELGLKISYLEDDDEFQDTVLSIHHACMNFFSINKDCCKIVANNDSKFFIQ

SEQ ID NO: 6627 - protein, 55 aa, Methanobrevibacter ruminantium
MAVEFNEVIKMNESYVKRLYRDLGIPYYRPKKDKGDEEFDFFPKYDLMHWIPLKV

SEQ ID NO: 6628 - protein, 106 aa, Methanobrevibacter ruminantium
MFKIRKLSNKIIVLLICGLLICSIQACSASCTAVYVGPDVSADGSTIIARCNDHQGVWGNHITVTPRVENKSSRLMAVCEDGSVKTELPATTYKYTATPYMNSTKA

SEQ ID NO: 6629 - protein, 483 aa, Methanobrevibacter ruminantium
MDNQNQWNSRIAFLLSMIGAAVGLGNIWRYSYVVYSNGGGTFFIPYLVAILIMGIPFLVLEYGIGFRHKDSFSNILKSINPKLEYISWALVLIIYFVLIYYLVIVSWDLVYLGSSINFSWGADSALYFVQNVGGSSNLSNMASFIIPTTISMVLVWICVWYISHKDLNEGIGKASKILIPLLFGIMAFIIVFALTLPGAGIGISALLNPDWQMLLNVNIWLAAFSQIIFSLSMGESISLTYASYLPEGSKLTDNVLIVVFANCAFEVCTAFGIFSILGYMSYTSGTPIVELVSEGTGLVFVVFPMIFNIMGAIGHIIAPLLFIAILFAGITSAVAVFEPMINSTVHKLNWSRKKAVTVWSIVGCIVSLLFTTGISSYLVGIVDSFITEFCILLLIAIQSIIFTWFYDIEGVIPILNENDRVKVGKTWVFVLKYILPILLFFMWASGVYHLLLNANTFELIVYGLITVFIIILTYVFTNIPEKS

SEQ ID NO: 6630 - protein, 153 aa, Methanobrevibacter ruminantium
METILTNEKDERFIELSNELNNEYYSNIGEDSLKYLDYNTLEDPHVVLLVLNWGNPIACASYRIFDEQSVEIRRVYVKKRYRNKKIAYKLVKALEKLAMENNFKYSIIETGSENMAAINLYKKLGYEKIDNFGFFKDDDACICMRKEFKTLIF

SEQ ID NO: 6631 - protein, 155 aa, Methanobrevibacter ruminantium
MHQKFMEEAIKEAEISSKEGGLPIGAVLVKENQIISRGHNRLIQKDSSILHAEMDAIENAGRLNHEDYQKCTLYTTLSPCPMCSGAVILYNIPRVVIGDNQTLMGAEKLLKDNGVEIIVLNDDKCKELFEDFVNNNPGIWENELAKVGNTTELKE

SEQ ID NO: 6632 - protein, 322 aa, Methanobrevibacter ruminantium
MIIMSEDTAVLLLSHGSSLPYAEEVFKDICAKFKEQTEFDAEVGYMKVAKPSLPEAINILKERNPGLKRIIATPVFLAPGIHTNIDIPIILGLEPKETDPRQPDGNYPEGHYLYGLEEVDFDGELKLIDAIGPNPRLIEIINNRIDTALEDSKLDDDAKTAVLLVSHGSRLNYNKEFISCVFQQFEEQTDYVCDFAFMELVDPNIPTTINKLVSENEVDRLIVVPVFIAPGVHTTRDIPTILGLIEDDGSGHHHHHHHDHDHDHSHDHGHDHDHGHSHGHHHHHHAHGDEKMEFDGEILYPEPICDDDILIEILETMVKEAL

SEQ ID NO: 6633 - protein, 132 aa, Methanobrevibacter ruminantium
MSDTVRTWRHIQQRYNLIGSKCTTCGQVFFPQRVICPECRRKGNIEDIQFSGKGKIHTYSVIRTPTSDFKKIAPYAVAIIELEEGAKVTAQIVDADVDDIQIGDPVEMVFRKIREDGPDGVISYGFKFKIVK

SEQ ID NO: 6634 - protein, 385 aa, Methanobrevibacter ruminantium
MTIKKYFKTRKGTKKSVQERDYDSDYSNKGLHKESRIKNLLNDNKGNYSIVISAILLISFLILSIIVLNTVLEEREEHTDTIASNQYQYIIEDYKRNLPNIEREALEELSLYVIENKRPCFNSRDDLKEIIDEKLAQKNQEYYQNYNIEINSSIIGIENTSDPFSYKFKTYISSVKGDFSYEEIDESYVNCYNLKDPVPVLFCGDDSSFRIEDYSLLGDSDFGTHDSNFENDDSSSNQKVFYGHSLAKFLRRHHVENYSFYENASSPFIIKRCPYDPYKHHGDDNGRIMKNCRDNGYYHESADGACYLCRLEGKSGCDHYGFETFINPQKTNETGGVSACGSDHVIFSDDIYPGVEVIYNSENGLNEILYLDPHGHKVKYGMSEY

SEQ ID NO: 6635 - protein, 338 aa, Methanobrevibacter ruminantium
MYSSELILSLILIIFIIGIMANITDSVNEKVLSQEELSSLEAISIESVDYLLNNPGSPMNWEEDEGLNNGIVSRRIIPGLAINKKSVENGFFYEESSSDEEIIPNSISYIKLLKLQSNYDDLINRNLFNSTLKSSITIYPHSDIDIIAMGDDLESSSDVVAINRTVRCDYLSNFVIYRFNDFELYGENYKKTELCNHDSNVNLSNHSNDRRYFWLCKNFRIYRSSLNNYNYYLISDSSIRHANSYYILESLNRTRDDMERLNDEVIELNPFFAEDMVNSSNEIYSIHFKVPHDDIDDFKTVMVAIHKNMTDEIVSNNQLRYDYFNSGEVDFVLKTAYR

SEQ ID NO: 6636 - protein, 144 aa, Methanobrevibacter ruminantium
MSTTIRINKDVKELLKLKSVETGVSQIDLANRYILYGIKYDDTPSKPIKSIEEIEKLLNYDEIRESVEEIDLKDYEYEIPQGISLVKEGEENKPINTEEEIKKILKYDKPEGDDVSRSIAGIIKTEEVTDAVKLKKERLKERYK

SEQ ID NO: 6637 - protein, 130 aa, Methanobrevibacter ruminantium
MIFLDTTYIIALINENDKYHKKALKLMEDVDYEKKMTNSVVFVESLNMLDKRSTQKDIDNIVNKLYQLDKIHCVNSANIKNSLNIFKFYNGSINFADCTIIDSMITYRINEIISFDSDFDKVKGIKRIYI

SEQ ID NO: 6638 - protein, 762 aa, Methanobrevibacter ruminantium
MLVKKMLRDLSDHKIQFVSIFLMAFLGVFAFTGINGEVVGITDVSTHYYEDTNLADGWIYGENFDKDTLKDIKNMEEVKNAHREMVVDTVANYSSDPDITLHILEGKQEISKFHLFKGKDFNPNDKEGIWIDKRFADARDLDIGDKISLKFDGKTVSKTIRGIIYSPEYVYYIQEGSMIPDFSQVGYAFMPSKGADFDIEYNRITIDGKKELDAKEFSSEVSELLGQYTYAQFVPREDNVGVSTLQDEIDQHNMFSGIFPIIFVMVALLTLLTTMSRVISSQRTQIGTLKAMGYDNTTIILHYLSYGFFLSFAGSLLGLIIGPLTLPYLFYPSMSAMYSLPYWGPAWNLSFFLVAALMVIISVLVTFISVKTINDENPADSIKPKVPKAVSSGIMERTKIWKKMGFNGRWNYRDAKRNKVRAIMSIFGVFACALLIMSAFGMYDSMNDVQDWQYNQIYNYNSKLYLDENITDAQLSTVVKDTNGEEMMEQAIEVKYRGNKHTASMTVYNDSELFRPTDINRNYIEIDPDGVAISDRLAEVLGLKVGDKVRWHLVGNPKWIDSEITQTYSTPFGQGIIMSEKTYEKYGGDDYNYSTNVVLTEDKDIKNYTGVTSVSTREDIVKGWEDMTEAMNLMVYVLIIFAVILAVVVLYNLGLLSFTEIQREIATLKVLGFNTKSLRRLLLTQNLWFSTIGFILAIPGAYILMEAMMGSTGADYYFPINIYPLNFIISLIMTFGLSILVNLLFSRKIKKVNMVESLKSNE

SEQ ID NO: 6639 - protein, 234 aa, Methanobrevibacter ruminantium
MTTMIEFQNVSREYQSGDHILKALDNLSLKIEKGEFVVILGPSGAGKSTFLNLLGGLDTATSGKIIVNGENIADYDDNQLTKYRAKEVGFIFQFYNLIPNLTAKENIELMSDITNLKVDGNKILDSVGLLDHANQFPAQLSGGEQQRVSIARAIAKQPAMLLCDEPTGALDSNTGVLILSLLQTMCHEKNTTVVIVTHNAKLADAADKLIRIKNGQIEEVKINENPLDINEIEW

SEQ ID NO: 6640 - protein, 443 aa, Methanobrevibacter ruminantium
MKMIRQFGESSIALVVNLILFLFNGIKYIFTLPNRIYVYIKLFLEDTDAVLKESLIALSICAVGDLCAGIILGNMEFFLKTYPGLMVIIPGAIGMRGNIFGSFGSRLSTHLHIGTLSPEFKRSEILSENITASLILTMVLSILLAVIAKGVCIAFGFKSISIYDFVLISFIAGLISTIIMLPITMFISLKSFEGGWDPDNITTPFIAAVGDFFTLPAIILSVIIVGFISIIPIVKMIVFVAVIFVTIAALIAGYTAKSDVRHIVRQSTPVLFICSLLGTFAGGILNDSLTTLLKNQTLLTLVPLFSGESGGLVSILGARLSSGLHSGLIDPVLRPKKHTVENFVAILTLSVVMYPVIGFLAESSTIAFGNIGVGILESMSISFLAGMILILLMLLVVFYISTISYRRGLDPDNIVIPLSTSLTDSISTLILIVVSLGLLNYVF

SEQ ID NO: 6641 - protein, 202 aa, Methanobrevibacter ruminantium
MPSVKDILIEMKDMSELMVDLAYSAVLFNNRAAAEEVITLENKLNSMNYEIKKQSLVAARSLEDAEKLTTLLEIAEAAESIGNAAKDLADLTLKGFEPHPVFKMVMEESEKTIIRLNVDESSVLVNNSLGDLLLLNRTGMRIISIRRGDSWIYGPDKNTVIIAGDVLIAKGSEAGTEIIEKLAEGEMDLEDLVNMEDFIDDN

SEQ ID NO: 6642 - protein, 454 aa, Methanobrevibacter ruminantium
MMIHLIGIGNDKGNITLNAFKAIKEADVIINYNDIDLSFFDSEIKDKEIISAIDLINDIDLEDDLDLNDDVAENIDSDEDLDSEINSDDLESNIISDDLESNIISDDLESNIISDDLESNVGSDDLESDIDSDDSSDIDLEDDLKSNPLLERILQENFLIELAISKSLESKQVALIVSDDPNILGLSNRFLQIKSKYSDVKYKIYPGVSSISQSASIVGAPLGDFALIDLSNPITSLSEIEDKVKHILDANLVLAIKNPIDDKREDGREAYNLIKSIINEYNDELLTAIVYSDGYYSIDEFKNIYDEDIDENSIFFIGNKLSYILEESMVTSSDYIVETKLISWSIEFFERYLNGEVPRGLDYDCDFLPCHVNLEACDFCYCPFYPCADGVTGGEWIKDRDVWSCQHCDWIHLEEPCVAIREGLDDILKEIDDLKDKHIELLKLRRKSLLKTLK

SEQ ID NO: 6643 - protein, 261 aa, Methanobrevibacter ruminantium
MKISRIILILLLFVVFFEIGLFSSYTIVNAEVPNPQELWDMQVNTVSSFFSPENVGGLLIKDPDNINVTNKYDLATELAEVAEVDGVNVENMTITTSADTDEEPFNATVTAFGYSTPKGNSGSIVISGQPDYKIVASVQIKHTINGYEADLDTINIESILKVYDSNDAKNVSYSGYDSGPSGASQSYSYSSDSSSSNDNAYISSDSSSGSSSYDSGASSSSGSYSGGSSYDSGASSGSGSSSGSGSGDVVINLLSPIFSFI

SEQ ID NO: 6644 - protein, 657 aa, Methanobrevibacter ruminantium
MTAETLLKFARKGIILTPGAYDLILGSDNPLDLSSSIILKLKSGKYSNEDLVPVDEKQIKEMMKALGISVKENKGLDHGSLDDFGSRTSGEGLERKIETRPEKTVEKAVEPQQAVETREQKPQQTFKPTQEKTVEKPIEKPQQTFEPNQQRTVEKPIEKPQQTFETPAKQTRAEKPIKPQIKPISAEKPTEAPQRQETKEIEKTIEKPKSDKPKVNAGYPSDHIVKIDNVEVSEETKKKYRRNLTESKVNFDGFKVLKDTSNKSYTSGEIGNLIEYFQNRYKKLSDILSKRPELRTWQKINEITETQTDLNLIVMITDIKSTKNGHYFIEVEDDTGSMPILVSKDNDQLIRAAKNLMKDEVIGIVAQKRPGNELAICQNIIDPGVPRIAKKEVNFGTVFTSDIHIGSSTFLEDAFTRFIKWINGDFGSEEQMEMANNVKYMIIGGDIVDGIGVYPNQDKELAIKDITAQYDEAARLVGDIRSDVKIIITPGNHDASRVAEPQPAVPEKYAKSLYELNNVEFLSNPSMVSLDGLEVLIYHGRGIDDMVMGSNDFSHERNDLVMKEFLNKRHLAPLYGERTPLASELEDHLVIDRVPDVLHTGHVHINTYTNYKGIHCINSGTFQTQTEFQKIYNIVPTPAEVPIIDVGGNYKQLKFID

SEQ ID NO: 6645 - protein, 195 aa, Methanobrevibacter ruminantium
MEKEIVKSVVEMSAYVFERGLVSGKAGNVSARFKTDHGDIVAITPTLKSLADLEDKDIILVDSEGNNLTKGKPSSELGMHLAIYREKPDVYGIVHTHSPYATGFAFSNKRIKRLEGFGQIKSEYIKDIDYYKPGSEELAKNAAEALKEEDVIVLRNHGVIATGSTVKEAATLVEFVEESAKTQFVTLVLNSLDEK

SEQ ID NO: 6646 - protein, 163 aa, Methanobrevibacter ruminantium
MKIEFDTIGTIHSPFKELEGMPIQPTGAKGIKGEIHIKDEYKPGLKDITGFSHLILIYHLHKTNGNALEVKPFMDNKTHGVFATRSPKRPNNIGMTVVALDSVDDDCVLHISNVDILDGTPLLDIKPYVPQLHEDTIVDLRIGWFETNHKKAKTQKADDRFIN

SEQ ID NO: 6647 - protein, 82 aa, Methanobrevibacter ruminantium
MTNETFEEVSQILKHIMENPSVPRNIRRAADESFNTLNNEEEDETVRASAVIIKLDEISNDPNIPVHARTLIWEILSKLEAI

SEQ ID NO: 6648 - protein, 118 aa, Methanobrevibacter ruminantium
MVKNEKFITVICFNKFHGKKIFKIGSILKLVKEPDNAYDAEAIRIEMRYAGKVGYLANSVKTVVRGTMSAGRVYDKINDEAAYAQVKFISNENVIARILEEEEIKDLKRDPESDLNFI

SEQ ID NO: 6649 - protein, 335 aa, Methanobrevibacter ruminantium
MSNTEKINVNVESNKDKGFSDDINTIFINFNGLNISLELMEKQSYKNMDIIPIKTDSFAKKDFITLKKGFEMGLVEIKELENEEVNTVICKNDAVVPLILIDGDEIIGAKQNRIMNESLLIPAKSQVKIPVSCTEHGRWRFKSNEREFQHSDYSLNFESRRIKSIARNECRDYQSDVWSHISDLEDRHSFRSRTSSMNDNYEHSKTAQDDYIKNLMIADGANGLICFINGEFKGLELFYNHSIYKEYYEKTLRSYIIEAISYGGNNTVGEELFRVINGEMNDLSSSEFIEYETVGLGKNIRFATKGGSGSGLIFEDELVHMTYFKEDSNKNYEIL

SEQ ID NO: 6650 - protein, 341 aa, Methanobrevibacter ruminantium
MITELYSNSIYMLLTILLFSLAVDLLLGEFPMQIHPVVWIGKIISFFKNILIKYDNKIAGLILSIAVIIVSSLIVLIPMAIARYLLPYNDMMIYLFKLIAILLLTSTFSVKLLLDSARDVEKDLRNNNLNKARQAVSYLVSRDTNELNKEHVISAVIETLSENIPDSYVSTVFYYSIVGIIASLCGIGDFDVIILAVLAAFIHRVVDTMDSMVGYKTKELYNIGFIPAHLDDALNYIPARFSGALIVVSAMFLRLNWKNALFIMRRDANNCDSPNSGYTMATVAGALNIQLEKEGVYTLGDNINPINVDCIEKAVDLARLTIFLVTIFFMFVFMDLILLML

SEQ ID NO: 6651 - protein, 154 aa, Methanobrevibacter ruminantium
MAVIDEEQVREWLMEEDMIREKIYDENANFHYIINFPNNNAMDVIQPRTKEDVLLIGCATEVSQVEQDMIKNTDKAINQEFIWNVRFALNEMLLDFELEHPDDQLKRFIITEDIFSDGLTKHVLVKSIKKVFKAKLQCIWLLGKTYGTVQMKKE

SEQ ID NO: 6652 - DNA, 194 bp, Methanobrevibacter gottschalkii
  source 1..194: mol_type = genomic DNA
ttgacagtcccagaaacttctgaaattttagcttcatttggctttaaaaacttgaataaacaagtatttacttttaaaattatatttatcagcatgttatttggtttagatattccattcatcttgagtgagcttgaatctaaagaaaaacttcgtaaatactttaatatttctgaagtttggagtgctgatca

SEQ ID NO: 6653 - DNA, 249 bp, Methanobrevibacter gottschalkii
  source 1..249: mol_type = genomic DNA
gtgggagacaaattattaattatgtacaagcaaaataattgtctcccatttcttatattggaagataagacatataattttgtcggtgattttgttgatccgattcgacatgaaaataaatgtgaaattttagataattctgttcagattatcctgccaattcaaagtattctcgataataacttctttgttaactcagatggtgttattgaataccgtgaacgccattgttgtaaatgtggatcatga

SEQ ID NO: 6654 - DNA, 1053 bp, Methanobrevibacter gottschalkii
  source 1..1053: mol_type = genomic DNA
ttgtattcaataaaatcagtaaaagaaattcaagatttaaatccattcatagtagtaggttgtggtggaggaggtgaaaaattctccaatcttgaaggggtagaaactgttggattcatagatgataatgttaaaaaacaaggaaaagaattctgtggctatattgtagcaggtagcttggatgaaagtcttaaacatgcaaaaaacgcaaagtcattagttattatgcttcctattggtgcagagggttcagctttaaaatatgcagttcaggctattgatgcaggattaaatgttatcacttcatttagatcattatccataactgaaaacatttctttaaaaaaatttgctgatgcaaaaggtgttgtaatcaaagacattggtcctagattggacgttgttaaaacaattgcaggtgttgctcctaaaaagtcttgtgaggtattaccaaaaatttcatatgaatcaaaagcaccagtaatcttcgttggagggacttcccaggaatgcgggaaaagaaccactacaaaaaaattaggtattgcaagcatgaaaagaggattgactcctgccattatatctactgatgagatgggattggaagaacctactgattttaactttagggctggaagtttatctgcaatggatgttccagcagcagtattatctgcaattaaatacgcagaagaaacaaaacaaccggatattattttcattgaaggtcaatccagtttgactgaaaaaggaaatcctcacccaagaggattgtctgcagccatattaattggtgcagctcctgatgccgttattgttggacacagaccaaaccacccatacagagaacctagaggtattgaagaagaaatcagagctattgaagctgttgaacctactaaggttgttggtttgtccatcaaccttaaaaatgctgacctggatttatgtcctgaattcttcgaatccaaatacaatttacctgctgaggatgtttataacaatggtgctgataaattattagatgcgatattcgaatatttaggggagtaa

SEQ ID NO: 6655 - DNA, 534 bp, Methanobrevibacter gottschalkii
  source 1..534: mol_type = genomic DNA
atgagctttatggataatttaaaaagaagtttaggctatgaagaaacagaagatagtgaaaaaaaagaaggtggaagttttaacttttctgaatttgtaaatgattttactaaatctgttaaaaattcaagagaacagtataaacaatcaaaacaacaggaaactgcacaacaacaatacaggccggctcctgaaccacaacaagctcatagaacagctccagtttacgatgattttgatgatgattttgtgattactccagaacaatctttttatgaaatcgtactgattaggccaaaaactcttgatgacatcaattatatggttgaccaaatcctcgaagagaaaaatcccatcattgttgatttatcctttttggaaaaagaaagtgaagccaactttaaattagcaggagataaaattagacaaatgagaacaaaatatggtgctcaggcattattacttacacgctctgaagataagaatttaattattctttctcctagaaaagtaaaattggtcaataaaggatga

SEQ ID NO: 6656 - DNA, 915 bp, Methanobrevibacter gottschalkii
  source 1..915: mol_type = genomic DNA
atgctcattaaaaagataccaattccaattgcaggtttagcccttgctttattatcattaggcaatctattgcaagacatgaatcctaatgtcaagtatttatttggagctatgggtgcaattatcattgttttaacaattcttaaagctattttttatccggaagatgttaaagatgattttaaaaatcctgtaattgcaagcagttccgggactttttcaatgagtttaatgctttcatctacatatgctctggaatttatgccaaatatttcatatattgtatggattattggaatcagcttacatattttgttaatgatttactttacatatcatttcatcatacgaaattttaatataactgatgtttatccaagttactggattgtttatgttggagtctcaatggctgcaattaccgcaccacttcatggccataaagaaataggattcatatttttagtcataagttttatttcaatgctaataacattgcctttaatgatttatagatatgtcaaatattcagaaatgcctgatgccaataaaccaacaacatgtattttcacagcacttatgagcatactgcttgttggatatataaattcagcaccggcaatttcaacggcatttataatctgcttatattgtattgcatgcttattctacatattttcattctacaaattagttgaatacagaactttaaagttttatccgagttttgcagcatttacatttccgtttgtaataagtgcacttgcaacaaaagacatcgtaaaaatagtaggttcaaatacactattatcttcagtacaaacagttgaaacattgatagcagtaattgtagtattctatgtattatttgaatactgcgaatttttaaaaaatagcaaaaaaagtagaaattaa

SEQ ID NO: 6657 - DNA, 756 bp, Methanobrevibacter gottschalkii
  source 1..756: mol_type = genomic DNA
atgattgatacgcatattcatgctgatgcaagaagcagtgaagactttaaagaaatgtatttatccggaattgattgtgcaataacttgcagctattatccgtacaaaattgatgctgaaaacatcttattgaatcatttaaatagaattttagaatatgatactctaagagcatcacaatacggtttagatttaaaagtagctttagggattcatccgacaaacagtattgagaatcctcagatgatttttgatgaaatgtataattggattgaaaataaacagattgtagctattggagaaattggtcttgaagatttaactgaaacagaaatagacatattcaaaaaacagttagatattgctgatgagacaaattcaaaggtcatcatccatacaccaaggaaaaaaaaattagaagttctaaaagtaatcttggatattgtgccgcagcatttagatgaatcacaagcagtaattgatcatgtcaatcaagaagttatcggagaagttattgatagaaattatatgcttggaataacagtacaaccccaaaaacttgatgttgatggagctatcgatattttggataatttcggatttgataattttcttttaaatagtgatatgagcaacaaaccatcagaccacctttctgttgctaaaactattcgtgagttatccagacttggctataaaaaaagcagcatagataaaatatcccacagaaatgcttcagattattttaaaatttag

SEQ ID NO: 6658 - DNA, 900 bp, Methanobrevibacter gottschalkii
  source 1..900: mol_type = genomic DNA
ttgtttctgattgtaggtagtttatatgcagtttcactttttcacattttctcacttcaagagattttatattttttagtaataaaaaataatgatgtaagtaatactcgattggtgattaatttggaaaataatgaaaactatttaaaaagctatgatttgatttcagaagaagtaaaatatcttactaattcaataattagattaaaaatattggcaacattatttaagtgtcctttaaatatgaaagatataaacggcatcacttccctaagttacagttcaatatccagcaatctgcataatttagagttgaaaggtcatgtttacagagaacacaataagtattttttatcaaactctactaaattggaagtggagcaagttttaaagttaggtaacttaataaatctattaaatgatttctttaatattttggataaacatcttgttgacatgattcctaatcagtcagttgctgaattatacttgcttggcaatgcatgtcttatggaatccgatggtgttgatgtatataggatttataaatatattgaagatgcactaaatgctgcagaagaagttaaatgtgttttgcctttttactatgaaacattcaatgataaactaaatgatttggttaaaaatgacaaaaaagttgaggcaatggttccacttagtctttttgaggtctttgatgaaaaatcggaaattggaaagttatcttttttcagtaatgataaaacctttttgttgattattactcatgaattaatgattttaggtctttttaaagaagatggttattttgatcaaaatagattattgacttctaaaaatagtgattcaataaaatgggctaacaatctgtatgaaaattttaaaattaaaaataaatga

SEQ ID NO: 6659 - DNA, 1695 bp, Methanobrevibacter gottschalkii
  source 1..1695: mol_type = genomic DNA
atgaatcatgataaaatgtcaaatataagttcaaaaagaggattcttatggccttcatttgaaatttactctggtgtgtctggttttacagattatggacctcttggagctagtctaaaaaataatatcatgcagaaatggagaaagcaatatgtatccggtgaaggattttacgaaattgaaggtccgaccgtaatgccaaaagaagttttaaaagcatcagggcatgttgataactttaccgatccgatgtgtaaatgtgaagactgtggagaagtattcagagcggatcacattattgaagaagttattggtgaagatgtggaaagccttgagaatgaagaacttgaccagatagttattgacaataacattaaatgtccggaatgcggcggtaacttatcaaacatttggaattacaatttaatgtttaaaacagaaattggagctaaaggagataaaataggttacatgagacctgaaactgcacaaggaatcttcattttattcaaacgtttggaaagatttttcagaggaaaactcccatttggagcggttcaacttggtaaagcatacagaaatgaaatttccccaagacaaggagttattagacttagagaattcacacaagcagaagcagaaatctttttaaaccctaaagaaaagacacatccaaaattctcacaaatagaaaatgtcatattgcgcctaaactcacaagaagttcaggaaaaaaatttagaaccattggaaatcactgctcgtgaagcacttgacaaaggaattgtagctaacgaaatgttaatctaccagttatacttagctcgtaaatttttaactgaaattggaattcctgaagatgttttaagattcagacaacacttaaaaggggaaatggcccactatgcacttgactgttgggacgttgaagttaaaaccgacaaatatggttgggttgaaattataggaatagctgatagaggggattatgacttaagttcacactccaaatacagtaatgatgaactaaacgtgtttattgaatacgataaacctaaaaaagttcaaaaaaccattgttaagccaaatttatctaaattcggacctatatttaaaggggattcacctaaagtaaaacaggctattgaagatgcaaatgttgaagatattaaatcagcaattaaatctgaaggtaaatttacagtagaattagataaagtatatgaagtgccagaagacttactcatctttgaagatgttgaagaagagataaccggtgaaaaaatcattcctcacgttattgaaccatcatttggtattgatcgtattacatattccgtcttattacattcatttacagaaactgaaggaaaagattacttcagatttgacaaaagtgttgctccagttcaacttggaatttttcctcttgttaacaaagaaggacctcgtgaaattgcccaagaattaactgaacaattcagaatgaacggatttaaagtagaatatgatgctaccggaactattggtaaaagatatgccagagctgacgaaattggtattcctattgcagttactgttgactttgatacattagatgataatcaggtaactgtcagagacagggacagcgaagctcaagaaagaatcccaatagcagaattagcagattacgtggaaaaatattataaatga

SEQ ID NO: 6660 - DNA, 585 bp, Methanobrevibacter gottschalkii
  source 1..585: mol_type = genomic DNA
atggctattttaagtgataaagacataaaaaaatatttagaagaaggtaaaatcggtattgaacctcttttagatgaaaaacagatacaaccatcttcagttgatatgagattaggagatgaatttaaagtatttaaagttattagaaaaccctacattgatccaaaagatgaagaagacattgcatcgtatatggaatcaactactgttaatgaaggtgaagcatttattattcatcctaatgaatttgcccttgccactacattagaatatgttaaagtacctgatgatttagttgcaagagttgaaggccgttcaagtatgggaaggcttggtgttacaatgcatgttacagcaggttttattgatcccggttttgaaggtaaaatcacattagaaatatcaaatattggtgcgatgccggttgctttataccccggccagagagtatgtcaaattgtatttgaaaccatgaccacaccttcagaagttccttacggacatccagataggcaaagcaaatatatggggcaaactagtcctgaaagtagtagagttaaattagattacgaattaaaaaaataa

SEQ ID NO: 6661 - DNA, 831 bp, Methanobrevibacter gottschalkii
  source 1..831: mol_type = genomic DNA
atgagaagaataagatttgtagacatcagcatattcgtccttaaatatatttttaactggagattttggattgcggagattaccaaaaaatctaaaatatacaaaaaattcatcgataaaatgctttttgaagaagatgaaattgttgttgtgcccaatactgttaatataaataaaaaaattgagtctgaaggctctgaatttttaccaacagacattattaaagaagttgttaaacgcagcgaagacattgtaattatgaacacatgcctttgtagagaatcaaatgactgtcaggattatcctcacgatatcggatgtatatttcttggtccaaccactagaaagattccgaatcatattggtaagaaagctactgttgacgaagcgttagctcaaattgacaaagctgatgaggcgggattaacccatattattggaagaaataaaattgatactatttggatgaatatacgacctggaaaaggacttttaacaatatgccattgctgtccttgttgttgtttatggaaagtttatccgaatttagatgaggatataagtgataaaatagaaaaacttaatggtgttgaaataaagcttcatgaagataactgcaaacattgtatgaaatgtttagatgacatttgcatgtatggctccatcagtttagagaataataaaataactattgattatgatacttgtaaaggctgtggcctttgtgttaatgcttgtaaatttgatgcaattacaatagattatactgctaaaactattgacaacatagttaatagaattgatgatttaattgaaattaaagaattataa

SEQ ID NO: 6662 - DNA, 909 bp, Methanobrevibacter gottschalkii
  source 1..909: mol_type = genomic DNA
ttgattaaaataggagatactgcagttagtgaggaaaaagtagttgaaactacctctctaaactcacctaaagaaaaagaaaaatcagatgatgagaaaaaatcaacttcaactaaaaaagctaagtctacaagccagtctagaggaactgcaagagcaaaattaataaaaaagcaggaaaaaaaagaaattagtctttttaaagaaaatatttacattgtttttgttgaatgtgaaactcccggaaatattggttttcttgcaagaactatggcaaatttcggattgaagaatttagtattaattaatccacccacattaacaaatgaagcatattatcaggcgacccatggcaaatatattgttgagaatgcaaaaatataccctaccctggatgatttttatcaatcccaaagaattgattttaaagttgcttcaacagggatggccggtggaagttataatttatcaagaattccaattagacccgaagaacttggcaggtcaatgaatgtttcaaataaaatagcaatattatttggaagagaaggaaatggacttacaaataaagaaattgaggattgtgacatttgtgtttcaattccgaccgatccaacttatcctattatgaatatttcccatgcagcggcaatcatattttatgaattatttagaaataaacatgactatggtgctgaaggacttgatgaaagtagtgatttggaaaaagaatttttattaatggatatgaaagagataatcaacagtttggatattccagaccataaaaaaagaaatggtcttaaaacttttaacaacataatttcaagagctttcattacatcaagagaagcacatacttttaaaggcatattaaggcgaatgaaaaataaatttggtgaacaatga

SEQ ID NO: 6663 - DNA, 1476 bp, Methanobrevibacter gottschalkii
  source 1..1476: mol_type = genomic DNA
atgattaaagtttatgtttcaagatttaatagagggattgacacagaaccacatctggagtgttatgacattaatgaaacacctaatatgaaggttcttgatgcacttcaagccattaatgaaaaatatgatgcagacattagttttagaagctcatgtagagcaggacaatgcggttcctgtggaattttatttaacggaaatggagcacttgcatgtcaaaaagaaattaaagatggagcaataattgaaccacttaaattcccagtcattaaagatttaattgtcgatacttcaagcattgaagcaaaagtaaaagatttagaattatctcttcagtgcagtcatgaatgtagcgaattagattccagcataacaaaaaaagatactgcagatactaaaaaagtaagaaattgcattgagtgttattcttgctattcaacttgtcctgttgtcaatattgcaacagaagaatttggtggaccttatttaatgagatatatcaataaatttgacactgatccaagagacaactttgataggcttaaagaggccttagatgaaggattatataattgtaccagttgcggcaaatgtttatctgtttgtccgaaaaatattaacacatttggtgatgcgatagaaaaaatgagagctattgcagttgcaaacggttcaggtcctctcccaaagcatgttgcatttaaagaaaatattttaaaaaccggaagatctgtaaaaactgacaaaccaacatttattgaagaaacaaaaaacaaaacaggttcaaaaatagcattttttactgggtgtatggttgattacaaatttccggaagttggtcataaattagttaaaatcttaaaagaaaatggaattgacattgatgttccagaaggccaagtgtgttgtggttctccacttttaagaactggtcagacagacattgtacaggatcttgttgataaaaataaagaagtattcaaagattatgataccattattaccgtttgttctggatgtggagctactttaaaaaataatcatccagaattcggttcaaaattaaatgtgatggacattagtgaatttttagtagataaactcgatgaaagtaaacttaaagacgttaatatgactgttacatatcatgatccatgccacttagccagaagtcaaggcattaaagatgcgcctagagagattattgagaaaatacccggtgttgaatttaaagaaatgttatatccttgtcaatgttgtggtgcaggtggaggaatcaaatccggaaaaccggaaattgcaatggaattggcaaaatcaaaagcagaaatggttaaagataccggtgctgatgcagttgttacaatatgtcctttttgcgaattgaatattcaagacggtttaaatgaaataggatatgacaacatcaaatgtatacatattttagagttattagataaagcttatgaataa

SEQ ID NO: 6664 - DNA, 780 bp, Methanobrevibacter gottschalkii
  source 1..780: mol_type = genomic DNA
atgaaaattaaagctgttaaattatttgaaaatggatttatgactcagccttttgcttttggtggtgaaaaaggtgcagaaaattttgatgcatcagttaaatataggtcaagtcttcaaaattatgtaatcgatacaggtgatgaagtgattcttgttgacacgggactgccttcagaacttccagaacagcctcgtgatgataatgcacctatatggagtggggataagattaaagattatgttcctgcattaaaagaggcaggttatgatattgaagatattacaaaaatactcgtaactcacaaacatttggaccatacgggggaattaaaaaaattcccaaatgctgaaatattcatgtcaaaaacagaagctggtgaagttgatttggaatctgataatataattggtgttgattttgatgatggggaatattataattttaagaaatcacaaaaaattgctaatggagtatatttaattgaagcgaaaggacatacattaggtaatagtatggttattgtagaatgtgatgatgtattttacatgttgcatggtgatattacatatactgatgaagcattatatgaaaataagttatctattgtttttgaggatattggtgctgcaagagaaactcttgacaatgtccgtgaattcattaagaataataaaaccgtatatctttcaacacacactccattaggttatgaaaatcttgaaaataataaaataattgatttggaaaatcctcctgaatctatttatccaaattaa

SEQ ID NO: 6665 - DNA, 1887 bp, Methanobrevibacter gottschalkii
  source 1..1887: mol_type = genomic DNA
atgaatttaaaagaattagtcacaggagattctggtgaaaaacgatttttactaggtaatgaagctgctgtaagaggtcttatcgaagcaggcatttctattgcggctacttatcctggaactccttcatctgaaattggaaatgtgttatcagtattggctaaggatgctaatatttattttgagttttctactaatgaaaaagtcgcaatggaggttgcagcaactgcagctgtatccggtcttagatcatttacattcatgaaacatgttggtatgaatgttgcggctgattcattcatgacaactgcttattcaggggtcaatggtggaatggttattttatctgctgatgatccgtctcttttctcatctcaaaatgagcaagacacacgtaattatgcaaaattggcaaatgtacctattttagagccatctaactgtcaggaagttaaagacatggtaaaatatgcatttgatttatcagaacaatttaaattgcctgtcatcgttagaacaactactcgcgtatctcacatgaggggtgttgttgaatttggtgatgtgagagataactcatcaaataatgataatcattggaagagaggtcattttaacaaagacccatcaaaatatgttcctgtacctgcttttgcaggggatatgcatgtaagactttgggacaaaatccgcaaaatcgaggaagtaagcaataaaagcaaatttaactgtgaatggggtactggtaaaaaatacggattaatagcttcaagcagtgcatttaattatgcttgtgatgttgtaaaattcaataatttagatattaagatcttaaaattaggattttcatatccgtttccacagaataaagtcattgaatttttaagtgatttggatgaagtatttgttgtagaggaagtggatccaatcattgagagagatactttagtttgtattggttctaaaaacctcaatgttcaagttcacggtaaattggatggaacattcccgatttatcatgaattcaactctgatattgttgctgagggattaaacaaagtattgaactttaaagaaaataaatcagttcaattcactcaaagtttagaaaaattaagtgaagacattccatctcgtgctccggttttatgtgcaggatgtcctcacagagcaatgtattatggaatcaatattgcaattgaagaattgggattaaaacccgaagatgtaatctttgcatcagatatcggatgttacacattaggtattaacccaccatacaatgcagctgattatttgctgtctatgggttctagtgtgggagacggttgcggattctctgtttcaacagatcaaaaagtagctagtttcattggagattctacatttttccatagcggtatctctcctttgataaatgcagtacacaacaaacacaactttgttctaactgtattggacaacaggattaccgcaatgactggtggtcaaccaaaccctggaattccagttgatggtatgggtgatgatgctccagaagtatctattcgtaaactggctttagcttgtggttgtgattttgtacgtgtaatcaatccatttaacttggagcaagttgttaagacttacagagaagcatttgaaagaaaagatgctgcagtaataatatcaaaagctccatgtactttaattaaaggattaactagaaaacctcctgtaaaattcattgaaagtaactgtaacaattgtgataaatgtgtaaaagaattagcttgtcctgctatttctaaaattaatggaaaaattactattgatgaatcccaatgtgatggatgtacagcatgtattcaggtatgtaaatatggtgccttggaagatggtaggtga

SEQ ID NO: 6666 - DNA, 648 bp, Methanobrevibacter gottschalkii
  source 1..648: mol_type = genomic DNA
atggatgtacagcatgtattcaggtatgtaaatatggtgccttggaagatggtaggtgagaaaatggataatcattataatatttatatttgtggtgttggaggtcaaggaattattaaaacttcaacaattattggtgaagctgcaatgaatcaaggtttagatgtagtaatgagtgaaattcatggaatgtctcaaagaggaggatctgtttctactgaattaaagatagggggttacaattcgtcaatcattccaaaacaaggtgcagatatgttactttcttttgaaccggttgagacaataagaggattggataaggtaaacagtgaaactaaaattgtttacaatactcatccaatcatcccctcttcaactgataagcaatatcctaatgtagatagtattactaaaactttaaaagaaaactttaaatatgttcttccaattgatggaactcaattagcgatggatgctggaagtgttttagcgttgaacatggttcttttaggtgcggtaacagctgatgacaaattcccattaacaaaagaatctgttattgaagcaatgaaaaacaatttaaaacctaaattccatgaaatgaatttaaaagctattgaaagtggatataactccattaaaagttaa

SEQ ID NO: 6667 - DNA, 279 bp, Methanobrevibacter gottschalkii
  source 1..279: mol_type = genomic DNA
atggcttataaaattgacaatgcaatcataaaaaaagataggaatgggaaagtaactttgattgatccagaaaatgtttttggtgatgaagatgcatttattgctgttaaaagtgatgatttaattactattcaacttttgatcaatgctattatgaaaaatgattttaaaagttggaaagaattaggtgctattcctgaaactgaaccaattaaaagcctatttgtccgcttaggttactcaagggaagatatagctaatatgctgaaagagttttag

SEQ ID NO: 6668 - DNA, 432 bp, Methanobrevibacter gottschalkii
  source 1..432: mol_type = genomic DNA
atggcagtaaaacaaatttcagttttcgtggaaaataaagaaggcagaatcaaaaaagctattaatacattagcagaagaaaacattaatattcgtgctctttcaatagctgatacaaccaaatacggaattttaagattaattgtttcagataatgagaaagcaatagctgctcttgaaaaagatggatttattgtaaaggaaaacgaagtcatacttttagcagttccggataaacctaatggattaaattcaacattagcaatatttgatgaaaaaggaattaatttagaatatttgtatgcatttgtaagtagtaaaactgatgcggctattgttgttatgagattagaaaatatggaaaaagctatcgaagcattgcaagatagcaatgttaaaatcttgaaaacagaagacattaaagatttatag

SEQ ID NO: 6669 - DNA, 1305 bp, Methanobrevibacter gottschalkii
  source 1..1305: mol_type = genomic DNA
atgttttgggacgaaaaagccgaatgtatgagtaaagaagaaaaagaaaaaatacaactcaaaagacttcaaaaatctgttaaactcgcatatgaaaatgtagagttttataaaaaaagatttgacgaaattggtttaaaaccggaagacatcaaaactttaaaagatattgaaaaaattccatttactactaaaagcgatttaagagaagcttatccattaggcttacttgcagttccacgtgaagacattgtagaagtacatgcatcatctggaactactggaaaaccaacagttactgcatatactcaaaatgatttagatatctggggagaatgtattgcacgtggcctcaaaatggcaggtgccaaaaaagattacattatccaaaatgcatacggatacggattattcactggaggatttggaattcaccatggtggaaacatgatgggaaccattacaatcccaatttcagcaggaaacactcaaagacaactcgacactatggtggatttccaaagtgatattttaacttgcactccatcttatgcagcatatatcggagaatctcgtgaaaaagctggaatttcattagatgagattaatttaaaagcaggaatccatggagcagagatgtggactgatgaaatgagaaaaagaatcgaaacatcacttggaattaaaacccataacatttacggtctaacagaagttatgggtcctggtgttgctcaggaatgtggtgaacaaaatggaatgcacattcaagatgatcatttttatccagaaatcattgaccctgaaactggtgaaacactaggatacggtgaaaaaggagaacttgtattaacttccttgactaaaactggtatgcctattttaagattcagaacaaaggatttaacttctttaattggtgaagcatgtgactgtggaagaacaaccgttagaatgacaagaatcactggcagaagtgatgatatgctaaaaatcaaaggagtaatggtattcccatcacaaatcgaaaaagcattacttaaaatccaaggtatcagccataattacatgattcatgtaacaagaccggatattttagatgaagtagaagttaaagtagaagcttcaaaagaattattctttgatgaaatgaaagaaatggaaaaagttgaaaagcaaattcaggcatctatcagatctgaaacaggacttagagtggatgtaacaatttgtgaacctgaatcccttccaagaagtgaaggtaaagcggtgcgtgtaattgatgaaagaaattttgaggactaa

SEQ ID NO: 6670 - DNA, 876 bp, Methanobrevibacter gottschalkii
  source 1..876: mol_type = genomic DNA
ttgatatcaatttttcatttattttttaaaaaaactatttatagttctttaattctaaatttaattggtgatattttgaattttaagtttaaagagtgtaaaacagagttcgatgggggaaattttgaagaagcattggatattttgggtgaaattgaaaatgatgatgaggattataaatttgctttgatgcttaaatataattgtctgatgggtcttggttgttatggtgatgctttaactattataaatatgttgattcatgaaaatccctatatgtctttattttggtttgataaggttaaatgtcattatttccttaaagatttaacaaatgctgctggtgcgttatatcatgttgaacatatcattgatttaaaggatgttgttgaaattattgactttgtgaaattatgtaatatgattggagagcatgtaattgcattgaaatattgtaatattgtattggatacagatgaaaaccagattgatgcattacttgaaaaatcattgatttcaaatattattgatgacaagaacatgatgaatgaatgtggtgataaactttttgaattaagtggagataatttatctttattgatggtttcttttgcactaaaattattttctgggatgtatcgtgacagttttaatattattctgaatataaattgtatggattcaaaaatggggttaatattaaagaaaattatttataatcagatgctttgtgatttaaatattcaaattgtgatggaaagcaatgctgaattaacaattgatgagtttatattattgttatttgattatagatattatggagttgaatctggtgaagttaaaaatgttaggtacatgatagtgaaacaagattga

SEQ ID NO: 6671 - DNA, 1611 bp, Methanobrevibacter gottschalkii
  source 1..1611: mol_type = genomic DNA
atgaacgtaatgattttagcaatcgtatttataatctacatattttcacttgtttttgtaggttattatgcatacaaaaaaactaattcctctgaagactttatgattgctggtaaagatactcacccattcatcatggcaatgagttatggggctacatttatttcgacagcggctattgttggttttggaggtgttgctagtgaatatggtatgagtgttttatggttagcattcttgaacattatcattggggtatttatcgcattcgtatttttaggaaaacgaactcgtaggatgggccatgcattaaattcattaacttttcccgaatttttaggtaaacgttttaacagtaacttcatccattatttctcaggattagttattttctgtgcaatgccgctttatgcagcagtagtattaattggagctgcaagattcttagagtcttcactattaattgatttcagcattgctttgcttatattgtcaattattattacattctatgtattgttcggtggtattcgtggtgtaatgtatactgatgctttacaaggaagtattatggttgtggctatggtatttttgcttgtatttgtttattggttacttggaggaatcgatattgcaaacactgcattaacaaatatggtcaatttatatcctgccaatgcaattgcaacaggaggtactggatggacggcatttccagaatttggaactccattttggtggtcacttgtatcttcaacacttattggtgtaggtattggagtacttgcccaaccttcattaattgtaagattcatgacagttaaatcagataaagaattaaacagatctgttttaattggaggtattttcattgcaatcatgccaactactgcatatattgtaggatctctttcaaatgtgtatttctatgataagttaggtaaaattgcagtagatgttgttggaggaaacattgataaggttattccaacatttattacaatggcattgcctgaatggtttgtatacattttcttattgtcattaattgcagctgctatgtcaacaatatcttctcaattgcacactcaaggtactgcatttggtgtagatatctatggtacattaagaaacaaatccaaacaaaaattagatcaagtaagtatttccagagtaggtattcttattgctattatttcagcattagtaatggcattttcacttccgggaagtgtagttgcactcggaacaagtttattctttgaaatctgtgcagcggcatttttacctgtatttttgggagcactttactggaaaggaatcacaaggctcggagccatttcaggaattatatctggaactttagtcagtttgttctggttaatgtttgtattcaaaaagactgcacttggacttggaatttgtaaatttgtctttggtgttgaaacattgctgcctgttgcaccatggccatttattgatgtaatgttgatagctgttccaatttcagcaatattcacaatcgtagtaagtttacttacaaaacctttggaacaagaggtaattgacaaggcatttgaaaacatagatgaaaaaggaagtgatgcataa

SEQ ID NO: 6672 - DNA, 114 bp, Methanobrevibacter gottschalkii
  source 1..114: mol_type = genomic DNA
atgatgattttgggaattgaagacccaatgatttggggagtatatgtcggaattatcttatctacacttttatgtgttgtttatggtattgtaaactggaataatggagattaa

SEQ ID NO: 6673 - DNA, 720 bp, Methanobrevibacter gottschalkii
  source 1..720: mol_type = genomic DNA
atgaaagaattatttagtaattttggaagaattcaaaaaaatgatcctgaatttcatgaaatatttgaaaaatttgcttatggtgaagtatttgaatattctaatttatctgaaaaagaatctattttagtgacattagcatcattacttgcatgccaatcacctaaagcatttaaaaagattttactggcggctcttgacatggacttaactgccgaggagattaaagaattactttatcaatcagttccatatgtgggatttgcacgtgcacacaacttttttgggattgttattaaggtgttcaataaaaaaggcatagaattacctttgcctaatagatcaaatactaatccggaaaataggcacaaaaaaggtcgtgaacttcaggataagtactttggtgctgaaataattcaaatgatgaatgataacactccagccgatcaacagcatttcaatagatttttagaaggattctgttttggtgatttttacacaagggacggtttaaatgatcaagaaagagaattaatcacttttgtatttttggcatccttaggaggatgtgaaagccaactaatgggtcatattcaaggtaatttgaatgccggtaatgataaagaaaaattaatttcggcattaactgttgtcatgccctatattgggtttccaagaacccttaatgcattaagtattgttaatgaaagttgtgaataa

SEQ ID NO: 6674 - DNA, 435 bp, Methanobrevibacter gottschalkii
  source 1..435: mol_type = genomic DNA
atgaatatatcaaatagaagtgtaaaaatgtcaaatatcgagaaagttgatgaaattttatcaaaagcagaagtattttatcttgcaacagtatatggagaaaaaccaaaagtaaggcccttaggattccatttattaattgatggcaaaatttactttggtgtaggaacttttaaagaagtttataaacagatagaatcaaatcaaaatgtagaaatagctgcatgggatggagaacactttttaagatactacggagtagcagatttaaccaaaaatgatgcaattgttgaaaaagcattcgaacttatgcctgaaatagctgaaatgtatgaagctaatggatgggaaatgggtgttttctaccttaatgatgcaaccgcagaaataaggaacatgatgaatgttgaagagacctatgaatttaaatattaa

SEQ ID NO: 6675 - DNA, 1077 bp, Methanobrevibacter gottschalkii
  source 1..1077: mol_type = genomic DNA
atgttaattattttgatagtgttgggtgttgccactcacttatttttgactccttctagtgtggaaacagaaggctctaaaaatataactgacatgttaaatagaactgttgaagttccaaatggggttaataatgttatagctacttctccgccaatgactactgtattatatatgctttcacctgaaaagttaaaagcagttaacttccaatggactgaagatgaattgaaatatgtgccatctgaatatgccaatttaccagttgttggtggttggtatggtacacaagatgggagctatgaagaatttattgctgctgaacccgatattgtgattgaatctattgatgaagggggggatggtgatgcattcactgttcaggaacgtcaagataaatttggcaaaattccagttcttgccgttaaagacactacaaatgttgaaaaaataggagattccatttcattcatgggtgaagttataggtacggaagacaaagctaatcaacttaatgagtttaatactaaatatttggatattgtacatgataaatcatctaaattagtggatagtaataaaaaaacagtttattatgcagcgagtagtgatggtttacaaacttacccgtcaggtgcttctcatggtcaattgattgatttgattggggggaaaaatgttgctgattcattaaatcaaggtaatactacttcaggtgtacaagtatccattgaacaggtaattaagttggatccggatgttataataactaatgatatgcatttctataataaagtgtataatgattcaagttgggctcatttgaaagctgttaaaaataaaaaggtttatgtatctccacaatctccatttaaatggtttgataaacctgttggtgctaatatgattattggtgttccatggactgctaaagtaatctatcctgaagattataaagatattaatatggtggatgtaactaaagagttctatagtaatttctatcattttgatttaaatgataatcaggcaaaagagattttacttgattcaggacttaaagaatcaaatttatag

SEQ ID NO: 6676 - DNA, 1014 bp, Methanobrevibacter gottschalkii
  source 1..1014: mol_type = genomic DNA
atggataatgattcaaaggatgttattagtatcatacttttaatttttctccctattattttatttttcacctcatttttattgggcagatatcctattagtccaatagatgtgataaatactatattgtgcccaatattcccacaattggaagtttcaccaactataactactattgtctttgaaattagacttccaaggattattgcagctattgtagttggggctgcacttgcgatggcaggagctgcatttcagagtatttttaaaaatcctcttgtctctccggatttacttggtgtgtctaatggtgcaggttttggggcggcattggcaattttaataagtggtgcaggtgttgtaactcaaatatttgcatttgcttttggaattatttctgtttcagtcacttatttaatttcaagagcatataaagctggtggaattttaatattggtattatctggagttgcaatctctgcatttttcagtgcattaatttcagctattaaatttatagccgatccagatgataaattgcccgagattgtttactggttaatgggaagtttggcttctattacgatggatcaattaataatgattattattccaataattgttggtatgattattcttttaactcttagatggcatatgaatttacttgctatgggtgatgaagaagctcaatctttgggtttaaatccaacaagagtaaggctattgattattgcaggttgtactttattaacttctgcagcagtttctgtaagtggaataattggttggattggtcttgttattccacatatggctcgtatgatagttggtcctgataataagatattaatccccgcttcattaagctttggcgcaagtttcctgttattgattgataatatttcaagagccataatttcaattgaaattccgattggtatattgacagctattataggtgttcctatttttttatacttacttaaaagggggtattctgaatgggcataa

SEQ ID NO: 6677 - DNA, 804 bp, Methanobrevibacter gottschalkii
  source 1..804: mol_type = genomic DNA
atgggcataactaataatttttatgaggttaaaaatatttcattttcgtatgatggcaatgaaatattctcagatattagtttttcaattgaaaaaggagatgtattgtgtattttagggccgaacggtactggaaaaacaacgttaataaaatgtcttaatggattacatgaaatcggttctggtgaaattttaattaaagggaaaaatattaaaaaattatcatttaaagaaatatctagaaatattggttacatccctcaaaatcacgcaccttcatttccatttaaagtaattgatgttgtgcttatgggaagagcaccatatttaaatttaattgatgctcctagaaaaaaagacatgggaattgcattaaattctttaaagactttgggtattgacaatctcaaagataaagaatacactaacttaagtggtggtgagatgcaattagtattcttggcaagaatattatgtcaacaacctgatattttgatattggatgaaccaacttctcatttggattttggaaatcaaattaaacttttggaaattattgataatttggcggcatccggactttcaattatcatgtcttctcattttcctgatcatgcttttttaagttcaaataaagttgctattatgaaagatggttgttttatagattttggaagtcctaatgatgttgtaactgaagaaaatttaaaaaaagcatattcaattgatgtaaagttaattgaattggaaaataaaagaaaagtttgtgttcctttaaaaacaaactttgaattaagtttataa

SEQ ID NO: 6678 - DNA, 570 bp, Methanobrevibacter gottschalkii
  source 1..570: mol_type = genomic DNA
atgaatgaacaagattatgatgaacaattagcaaaagcagcgaagtttcacggtcatatatgtggtggaattgcaataggaactaaattggcaatgtatgggcttgaattgcttggaatggagttcaatcaaaaacataaaaatttaattgtatttttagaaattgacaggtgtatgtctgatgcagttcagtctgttactggttgttctatgggtaaaagaactcttaaacaaatgtattatggtaaatttgcagctactttttataatcaggatactggtgaagctttaaggattactgatgcagatgctaataaaaaattcaaagatgaagaaacaaaagaagaaatgattgatcgttttagaagaactctccctgaagagctatttaaagtgaataaagtaaaaatcgaattaaatcctggagatatgcctggcaaaccttatacaacaacattttgttctgtatgtggtgaaaaagtatctgatggtcgtcatatacttaggggcggtaaacctatttgcaggtcttgtgctgaaggatcatattatgaattaattgaagattaa

SEQ ID NO: 6679 - DNA, 2061 bp, Methanobrevibacter gottschalkii
  source 1..2061: mol_type = genomic DNA
atgaggaaatgtttcgtgattatattggttctatgcttgttattttcattaaacatttgctttgctcaggatatatctaattcaacagattttacttttcaaaatagtaattttgattatttggaaaaaactgatagtgttaatttgattagtacttcagataaaattagcacacatattgatgtggtaagtaatactacatttgatggtactgtggactattttaaaattaaattgtctgatgaaaataacaaatcagttccaaatgctaaagtgatatttacagttaatggggttagttatgataaaaatactgattcacagggtatctcttcacttcaaattaatttggctgatggttcatataaagtcatttctaaattcgttggagactctaattataaatcttcatcaaaatcaacaacaattactattgataatactcgcattgtagaagatggattaaacaatgctgaaattcaaaatataattgatgatgctaaagaaggtaatgtgatattatttaaaggaaatagttattcaaatatcaatttagtgattaataaacgtcttacactaatttctactgttaatacagtattaaaatcaagttcatcatctccaacaattacaattaaaggaaaagaagcttcttattcaattgttaaaggatttaaaattcaaggaaatggtgatggtgttgtagtggatggatcgaattacgtaagaattttaaataatgacattactgctgatggagtaggaatcacggcatttaatgttaaatatatcaatattactggtaataatattgttaaaaatggtaaatgtggaattattctttattcaacagagaaatcttacataatcaataatgtaattaacaataataatgcaaatggaattgtattgacaaaatctgatattacatatatcgatagtaacactatttcaaacaatgctcgttatggtattttattaacaaacaaattcaatggtaattcttataaaaatggtcctgaaaatgtttatattactaaaaacactatcaataataataaatgggatggtatttctgtaaataatgcagaagataatattaacattaaaggaaatacaattgttggaaatgatgaaagtggtatttctgttaatgttgtaggttcctacaaaattcaatctaatattataactaatagttatactggtgttagattcgatgaggatcatgttcaaaagaaaaaccaagaaattacttataatgcaatttatggaaatgctcatgttcaaattgaagctaaatcatataatggtgttaatcctttatctgtaggagataattggtatactgatgatggattattatgtcctaaaatcaaaacaaataatttaaaatttactgtaactcaaattggaaaaaatcaattccaagcaacttttgttgattctaatggcaatattgcaagtttactccctgatagggagttaaaatataaaaccaatgatggtaaaatcgcaactgttatgattaaaggaggaataggaacatttactgtcacggcttctgatgcagatattattaagtctactgtggatcgcacaagcagaaaaaatgtttatgattcgaattctccaactaaaactccacaaaatggtcaatctccaacatatgattatcctaacatagattatggtggaggacaaggcaatggaaatggtcaaggtggaaatgcaaataatggtaatgggtcttcacaaaaatctagtgatgattctggaaatagctcaaatagtaaaaaaatggaaccaaatagtaatccagtaaatcaagcaaacgatgtatctcaaagttatgacacttcgcaaagcatggctcgagctgatgcatctgagattagtggtggagcaaattcaggctcacaatctattgcaaaacaaattataattgaagatgatgaattttttatagttaaaggtctttcattaatagtattgttaatattattaacaataggattttattatcgtgatgatataaatgagatgagatctaaactttaa

SEQ ID NO: 6680 - DNA, 1458 bp, Methanobrevibacter gottschalkii
  source 1..1458: mol_type = genomic DNA
gtgagtatcaatgataatctaggagatgcatcatcagatttagaaaatgaaatcattaattcaaaaaatggagatataatattgataaaacctggaacatataatatccacaatataaccattaccaataaaactatcacactccaaggaattggaaatccaagtgatattataattgatggaggtaaacagtcaagtatttttttgataaacaatattactacctgcgtaacatttaagaatttaacattcattaatggtttatcctacaattttggtggtgcaatatgcattaatacaggtagtgtttatatagataactgccagttcatcaacaacacagcactcaacaataccaatgcaggtgccatatccaattacggaaatgaagataacaaagcatacctccttgtaaacaacaccttattcatgaataatcatgcagaccatgatggaggggctgtaacaacatgttacgctaattctgacatgtataattgtgtatttataaataatactgcagttagagatggtggagcagtgcgagttagtgtttatgggtatggccatgtagaagattgtatttttatgtacaatcatgctgatgagtggggcggagcatactacagttggtcaggtacttctaaaatcaatagatgcatatttatgaacaatactgcaggaacaaatggtggagcagtaatggtttcaggcaatttagaccttgaaaattcaattattgtaaacaatagtggtggaaaaactggaggttcattctacattcaagaaccaatgtatcaagcaaaaacctatattaatgttaacaataatttaattacaaataattcttcacctaaaggtcaagaaatctatgtaaaatggagacattcacaaaacttataccctgactttaatgataatgattggggaagcgaagatccaaatgattacaaaataaatgacccggataatgttactgcaagaagtaaagtgaaaactacaactgataagtccaatttattagatgaattgaatttcaatgcattaaacaaatactatgatttaattaaagattacttcccagaaaactatttagaaaatatcaaaaaacaagcagaatcaaaagctaatcaaaataaagaaaacaataagaacaatactccaaataacaaagacgaacatggacttaaagattcaaacaataccaaaaatagtttaaatgattctaaaataatattatccaataaaacaaccgaaaatatagaaacagagaattatttaatttcttctaattcaaccacacccataggagatgatgaaaaagcatatgaattaaatgaaacaaaaagtgtttccaaatcccaatctccaagattactatacttagttatttgtttagtaattacaataatagcattatttattggatatggaaaagaaaattcaaaggataaatag

SEQ ID NO: 6681 - DNA, 2865 bp, Methanobrevibacter gottschalkii
  source 1..2865: mol_type = genomic DNA
ttgattggtgtggtctgtgctgaggataataatgtaacagaaaatgcaacgaatgaagattttcaagctattcagattttaattgataatgcaaatcctggtgattcgatatatttagaaaataaaacttatcagggtagtggatctccaataattgttaataaatctgttaatgtttatggggttgattcttctaagactattttggatgcaagtaacaaatcaagtatttttttaatctctaaagatgttaaagttaatttcaatggtttaactcttactaatggttataatgaaactaaaggtggagcgatatataatttaggtattttaaatattaccaactctaaaatttccagtaactatgctgaaagtggtgctatacgtaatgagggtactggtaaattaactatttcaaattctttatttgataaaaattgcggaagttttggtgcagctattgataattatgtcgggtatttaaatattgttgatacaacattcacaaataatgattgtcttgaaggtggagcaatctataacagatttggtgaatttttagtttataattgcacatttattaataactctgcagctcgtggtggtggagtttataataatagaggtggcatgtatatttacaattccagattcatagcaaataatgtttatgatttaggaggaggaattaaaagttggggttcttgtgaagtgtataatacagtattaataaataatactgcaaaacaaggtggaggaatttatgtatctgaatttacattaattgctgaaaattgttttgttgaaaataattctgctcattggggtggtggaatcgctgttgaagcaaaagctactgcaaaaattaaaaatgccactattataaataacttggctgaccgtggtgcaggtattgatataaatatgggatctattgatttacaggactccattgttaataataatgttgcaaaatatggtgcgggtggaatttactttgctttgttgtcttcaacagtaaaaaatacttatatatgtaacaacatcgctaatacatcaggtggaggttgttatatttatggatttaggggtgttgttgtaaatttcactaatgtgattattaataataattctgcttctaaaggtggagcaatttacagtactggaactgcaaatattcaaaacagtattttaaattcaaataatgcttataaaggtggagctatttataatgaacttaatttaacagttaaagattctcaattttttgaaaatacagctgatagttggggtggagctatttataataacttaaattcatttatagataatgttgttttaaattcaaatgaagttaaacaatttggtggagctatttataatgaaaaattagtcaatgctaaaaattctctttttgaatcaaataaagcattacaagcaggagcaatttattctacaaatgacttaataattgataattctcaatttatcaaaaattatgttaaacgtaactattgtgttctaatgcttagtaaaggtgatgtgaatattacaaattcattattcaaattcaacacaaatgctgatgaagggggttgtatttttaattataatgcaaatttattaattgatgcttctcagtttatttcaaatgatgcaagaagttatggtgcagctattgataattctggtaatttaactataaaaaattcattgttttataaaaataaagcatatggtgcagcagctattgataattcaggtaatttagttataatcaaatctaatttcactgataatgttgctactaataatggtggtgctattgacagcaatggtaaattgattattattggttcaatttttaagaataatctcgctggaaataatggtggagcattaatacttagaggagatacgactgtaacccattcgattatctataataatcatgacaaaaatggttatgcaattttcaataaaggtgttgaaaatatatctctttcaaataattggtggggcagtaataatcctgattttgaaaaattattgaacatgggaacttctgatgattttaattggattattatgagtttttcaagtaataatcaattaattcaatataaaaattctattttgaatataaatttcgataacgttaaagataaaatgggtaatgtttataaaattaactcaacagaattgttgcctatttttaaaatagcattgtcaaattacggtgaggttactatatctaatggatttaaatctatgaataaaaatattccattaatcacatctatttcagcaaaaattgataatcaaagtattattttaaaaattactccaacaaataaaagaataattgataataagaacattgttgttgattataatggaaaagttacttataaagttcgtgttgttggtgttgatggaaaaatcgtcggcgcaaatgtagctgtggttatgaaaattgcaggtaaaaaatacactgttaaaactaataaaaatggttttgtatctaaattattcagtttaactccaggtaaatattcaattattacaacatataaaggatttacagttaaaaatagtataactgttaaaaaagtattatatgctaaaagcatcactaagaaaaaatctaaaaagattacatattctgtctcattaaaaataagcaatggaaaaccaattgcaggtaaaaaaattacttttaaaattaagagtaaaacttacactgctaaaactaataaaaaaggggtggcagttgttagctttaagaatttaaaagtgggtaaatattcagttattgttaactatttaaattcaaaggttaaaacaactctaaaaataaaataa

SEQ ID NO: 6682 - DNA, 4419 bp, Methanobrevibacter gottschalkii
  source 1..4419: mol_type = genomic DNA
atgaaaattaataaaattttagtattattatcgtttatattggttgttcttatttgtactaattcagtttcagctttttcagatgatagtaatttaacagatgatttatcaagttttgcaagtgattttgataaatcaaatttaggtcagaatatcgaagtgaatttagataagttaagttttagtgaagattctcctttatcggatactataattgttgaagaagttgaaaaagatcacaatgaaatggatgattcaacaatacaaaaagcaatcaataatgcaaaggcaggagatacaataattatcaatgggacaagttatgtgcactgtcactttattattgataaaaaattaacaataataagtaatgttggaacaactatggaaccatgtggtagtgatgctgtatctggacataggggtattttttatatttctcctgaagctagtgggactgtaatcagtggttttactatacgaaatgatgttgctaaagctgatgattatggaattcttgtaagaggggcggatgatgttaaaattcaaaactgtgttatttataataatggattgtcttctgatgcaattagagtggaaaatacaaaaaacacagtaattgaaaatgtctcaatatcaaaagcatttaatgggattcgaattctagattctgaaaatgtcaacataagtgattcattcattgataatgcaaaatattgtattaatgttattgactctaataaaattaacttagtttctaataatattactaataataaaatttcaggaattgcaatttcaggttcaagtaaaaatattaatattctttctaataacatttctaaagggcatgttggtattaatttaaccgtagctaatcatgtttatattatcagtaattatatcggactttcggataaatatggtgtttatacaaattgtaatataactaaaatggaaattaaaggtaatttcatagataggaatggtaactacaatattttcaatgatcatcgtgttaaaaatttatttgtaaacggcggggagaataaacaagtaattaataataattatatgattggtggggataatcaagataggccagtatggcatcaagtttatgaatatcgtcctggaaagggtgataatacatataatcctgaaacagatacttatacttatgttggggaggataatggagattattatggtcatcaaagtggaacatttatgggttatgtattagctattaatcaatttttgcaatgtccaaacatatatttcactttccccactaatggtgtaactccatggacaaaaactggaaattataatttatatttaagtgaaattactcaagttaaaaaaggagtatattcaatttcaatagttgatgttgatggaaatttagctgaagagattagttctgtacctgttactttttatttaatgaaaaataacacggataataatggtaaacaaaaagctcctcaagaagatgatgtttctaaagttgtcatgatgaaaaatggtactgcaactgtgagattttacccggatgagtttaaggaatctgataatattttacttgcaagtttcccaggtatcggcaataacatatattctaatatgtatagtccatataaattattcagcattgatgataaattcatcccaggaaatgtaactgaaacaaaagtcactgtttctaatttaaatacatatcctaactcaaatgcaatttttaaagtaattttaatagatttaactggtaatgctattgcaaatgagttagtaaacttcaaaattaatggtaaatcttatggtgctacaacagatgttaatggtgtagctaaaataaagatttcacaatcaaaagaaggaacttatacaatagctgtcaattatattggtgatgatattgattatacttccagtagtgctcaagctaaagttgccgtcaaaaaaatatctactaaaattctatcttcaaatgtgtatatgattccaaatattgctgaatattattctatcactttaaaagatgcatcaggtcatggaatttcatatcaaaaagtgacttttaaacttaataagaaaatatacactgtaaaaacaaataaaaatggtgttgcaaaacttaaacttaaatttactaaaaaaacaacttattatattcatgttaattttgaaggaaatagtaaatacaaagcggtttcaaaaacaaataaaataattgttaaatattcctctaaaattgctaaattaacagttcctaaagttacaattcttccaaaaacatataaatattacacaatttctctaaaaaatactaatggtaaaggaattgcaaaacaaaaaatcactgttaaattaaatggtaaaacttatattaaaacaacaaatggtaaaggtaatgttgcaattaaagttaaattctcaaaacttggagcctataaagtatctgcaatttacaaaggaagtaaaatttataaaaaaacttcttcaaatggtaaaattgtagttgccaagtcatctactaaatttacagctcctaaagttacaattcttccatatgagaagaaagtatacactacaactttaaaaacaagtgctggaaaagctttaagcaaacaaaagattaccattgttcttaatggcaaaacatattctaagacaactaatagtaaaggtcaagctagtattaatgttaaattttcatcagaaaatgtttattctgttatattgaaatattctggaaatggatattataaatctagtaaagcaacaggcaccataacagtttcaaaaatatctactcagctaataagttataataaaacatttgctattgattcaactaaaaacttcaccatatctcttaaagataaatctggtaaaacattatcaaatcagaatatcacttttttatttaataatcaaaatttaacaaaaataacagatgaaaatggtattgcttctgttaatttagatgcaaatgtaggatcttttgaaataatctcaaaatattgtggaaataatcaatataaatctatatccaatacaaacatgattacaatttctaataaaacaaatgttgtatttgttgatgcaagtttgccaaattctgaaattcaaaaaattttcgatgattgtaaaaatggaagtaatgttgaattcttagggaacagttataatgatatttcattaaatattaacaaaccattaaatatttactctgaaaatagaattactttaaatgctaaatcaatgagtccagtatttaaagttttagcatctgatgtgaaaatttgtaatttatccattgttggaaactcttatgatggaattgagattaacaatgctgttaatgttgtaatatttgaaaataatattttaaatcgtttggatcaatctaaaataggtgaatatatgttgagtacaatttctcttccagggtatgggataaatgttattgactcaaaaaatgttgaaatttctaataattcaatcaacacatttgaaagtggaatttttgtttcaaattctaataatttaagtattaactcaaatgtgttaaaagaaaataattatgggattaagtatggatttaatgtttcaaattctaacattacaaacaatatgatttctgaaagtattggtttatatacaaatttagttcctgaaggtccgcgcggatatggtgtatttttaaataattctgcagtaaatgtaacaattgctaaaaataatatttcttggaatcatttagggatttccattgatgcaaattattcaacaggtattttaataactagtaatttaatttctgataatgtacttgagggaattaggtttaatgaaggttatgatttggctaaaaatgctattgaacctgttgtgactgataatgcaatatatagaaatggtagaggtccaagtatgatgattttaggtgaattaagtgcaaaccctgcaggaatttatggtcctggtgcatttaatgattctttaaaattaaaattaggtgctaattggtatggtaaaaatctgattgttacatgggataatgatactggggttgttggttatggaacaatgtgtccaagaattaatacaacaggaattgcatttaaagagataacttgtgtgaatccaggtacttattctattacattttataaaaatgatgaagttgcctcaaaattgccagtatttaatatgtatgctacgttaaatgacaatgttgaaattgtgtttgatgttataaatggtgttggggtgtttacttttgatactcaaaaattcactactggtgaaaatgtaattaaagtgtctagtggttctttaaatgattctgataggatttttaaagttgaaatgtctaagacattagatgatagtgaagttccaatttaa

SEQ ID NO: 6683 - DNA, 549 bp, Methanobrevibacter gottschalkii
  source 1..549: mol_type = genomic DNA
atgacaattaaaaggtgtagttgggtaactgatgaagaaatctatattaaatatcatgatgaagaatggggagtcccaacacatgacgaccaagaattatttgaaatgcttgttctagaatcattccaagcaggcctttcttggattacaatacttaaaaaaagagaaaatttcagaaaagcatttgataactttgattacatgaaaatttctgagtataaagaagataaagttaatgaattaaaagaaaataaaggaattattcgccacaaaggaaagattaatgctgcaatcaataatgctaaaatatttatggaaattcaaaatgaatttgaaagctttgattcatatatttggggatttagcaatgggaaaataattaaagctgaatttaaaactgaatctgaattatcaaaaaccatttcaaaagatttaaaaaaacgtggaatgaaatttgtaggtccaacaatagtctattcatatcttgaatctattggaattattgataatcatcaaaaaagttgttttaaatttaataaaactgattaa

SEQ ID NO: 6684 - DNA, 1353 bp, Methanobrevibacter gottschalkii
  source 1..1353: mol_type = genomic DNA
atgaataacgctttaaaattgaaattgagcatgttttttctcatgatgtttgtcatgattttttatatgttggtatttggaaaagttaatattgtaattggtttaatggttgttgttgcagcgttattaaatttaggtaatgatttatcatacaatcctaaattatcctttattaaagtattttctcttttaatgattttaggatttgcatcttatcttaataatcctataactgcttttggttgtattttaacatttttcatagtatttggaacaacatttacatcttatcatttgttcggaactcatgtttatttgccatttttaatgatttattttatgatggtagtcattccagtacctcttgaagctttgccgatgaggttattatctttggcaatcggagctattttcattgtgggcttaaatctaaaggttaatggtaaaaaatattctaaattatctaaatttacaatttcttcactgattaatgaacttcttgaagcaattgatttgaaattagatggaaaggaagtttcaatggatagttttaatgtagctaatggattttataggagtattttttctaaatttgaatataaatatttcccaaatcaaaagcatgaatgtatcttaaatattctaaaatcttttcaatatatcggttggagtttatctaattatgaattgtctgtaaatgaattaacccatattaaacgaattttaaatgatatcaaaaattttaaattttcagaaattgaagaaattacaggtgaaactaaagaaatgaatttaattcttttaaacttaaaaataattgtaaacgaagcaagtaaaaaaaatatagaaaaagagaagaaaattccaaataaatatgttgtattcaatgtattaaaacatttaattaaaagacaattttcatttaaatcagctaaattcacttttgcatttaaaatggctgttgttttaacattatgggaagttataacattaatatttaattttccatatacaaaatggttatattttgcatcaattccattaatgcttccatatattgatgatgttgcacatactgctaaaagtcgtatgggaggaacattaattggagtttctgcatttgcagtaatcatgattgctttacagtatattcccatttcttcttatattgcaatgattattgtattgatagcctcactatttggtatggttttttcacttcaaaataaattgaaattatcctcattcacaacattaatgtcagttacagtatctctgatgtatatcacaccacctaaggctattaaaaatactgtgggttattgttgcaatgattgttgtaacctttattaa

SEQ ID NO: 6685 - DNA, 426 bp, Methanobrevibacter gottschalkii
  source 1..426: mol_type = genomic DNA
atgattgttgtaacctttattaattatggatttttgccattttctgttgaaaaagagaccaagaataatttaaaaacatcttatgtgttaaatagatgttttgtaaatttaattaaattaaaatgtgagggtaaaaatattaacaaaacatcattgcttgctgtaagtagtatggttcatgaaaatattgaattaactaacaataataaagaattgtatcaaatgcaaactaaaacaacgaatatttctaattcaattttaaattatattgaaatttatggaatatcttcagaaatgaaagttaaaattattaaagtaatcgaaaataaaggtaattttgacaatcatgaaaatattattctatattctataaattatgtagtgaatttattgaatgaagaaaaaaatttaatagaatctatatga

SEQ ID NO: 6686 - DNA, 1143 bp, Methanobrevibacter gottschalkii
  source 1..1143: mol_type = genomic DNA
atggtagagttagggttagggatgatgagactcccggttttagatgaaaatgatttttcaagtgtagattatgatcaaattacaaaaatgattgatgcattaatggatgctggtttcaactgttttgatactgcttatccatatcatgaaggtttaagtgaagttgctttaagaaaatgtctggttgaaagatatcctagggattcttttaaggtcttcgataaattgcccacttttgcaattaccgaagaatcacaacttgaaccaatttttaaagagcagcttgaacgatgcggtgttgaatatttcgattattatttgatgcataatgtaagcggatattctgaaaaaggatggttggatgttgattcattttcatttgcaaataagaaaaaagaagaaggatacatcaaacatttaggattatctactcatgctaatgcagaatttttagataatatgttaacaatccatccagaaatggaattcgttttactccaaattaattatcttgattgggaagatgaaggaattgaatctaggaaatgttgggaagttgcaagaaaacacaataaaccaataatggtgatggaagcatttaaaggcggttttttatctgatgttcctaaagaagcagaaaaactcatgaaagagtatgctccagacaaatctgttgtatcttgggcaatgagatttgtagctaatttggatggtgtatttctagttttaactggtgcaagcagtcttgaacaagttgaagaaaatattgttgagtttaataatgcaactcctcttaatgatgaagaattaaatgttattagtgaagtttcagagattattaatgctaatattactgtagattgtacaaaatgcagatattgtgttgattcttgcagtgaggagattgatattgcaaaactttttgatttatacaataaagagaagattcttggtgaaaatgactggtctcctataggtaatgcttatgtgaattattctaaaattcctggtgttggaattgcttcagattgtactgaatgtgaattatgtattgaggaatgccctcaagaaatcaatattcctgaagttttaaaagatgttgcaaaaacatttgaaactgaaggttatggttttacaaactga

SEQ ID NO: 6687 - DNA, 351 bp, Methanobrevibacter gottschalkii
  source 1..351: mol_type = genomic DNA
atgatacctggtatgaacaaaagacaaatgaaacaaatggaaaagcaaatgaaaaaaatgggtatgaaaatggaggaacttgaaggagttcgtgaagttgttattcgttttgatgaaaaagagttaattattgacaatcctagtgtgagtttaatgaatgtgatgggtcaagaaacttatcaagttgaaggcaaagctcatgaagtagaacttgattatgaaattgaaattccagaagaagatattgagatggtagctaatagtgcaggagtttctgcaaataaagcaaaagaagcacttgaagaatgtagaggtgatcttgcagaagctatcatgaaattaaatcaatag

SEQ ID NO: 6688 - DNA, 744 bp, Methanobrevibacter gottschalkii
  source 1..744: mol_type = genomic DNA
atgactcttattgtgcatatttcagatttgcatgtttgtgaaaatgaatttgatgaagatatttttatgcaagctgtttctgaaattaataatttaaaacctgacatgattatattaactggggatataactaatagcgggtattactatgagtttcaacaagcaactaaatatttggagatgtttgaagctccgttatttgctgttccaggaaaccatgatgctcgtaatttgggttatcaaacttttgaagaattaattggggagcgtagttggaaattaactatgggcggtaatttgactgtaattggtcttgacagcagctctccggatgaaaatagaggacacattggtaatcctcaacatatgtggttagaacatcaattagatgaatgtacaattaatgagaacttttctatcgtagctttacatcatcatgtaatttctattcctcaaacaggacgtgaacgtaatgttttatctgatgcaggggatgtattaaaaacattaactaatcatgaagttgatttggtattgtcaggacataaacatgttcccaatatatggaaactaaacaatactattgtcgttaatgcaggttctctttgttctaaaaagcttagaggtaaaataaagaattcttatatgatatataatgttacagaagatgaaatagaaatttttctcaataatattaatggggaaaaatttttatttggaaaatacgcgagaaatgtgttataa

SEQ ID NO: 6689 - DNA, 1026 bp, Methanobrevibacter gottschalkii
  source 1..1026: mol_type = genomic DNA
atgaaagtggttgtagatgcttctaatgtagcttttagtgttaaaaatgaaatgggacaacctcaaatgtctaatattcttgcagctgttaaggcattagaagaaggtgaagatgaatttgtaataattgccgatgcatcacttcgtcatgatattgatgataaagaaacatttttgaaattattggaaagtgagaacgtagaagaagtccctgcaggtaatgatgcagatcattttattttggatattgcttcacgtgaaaaagcaaaagtattgtcaaatgataaatttagggattatgctgctgaatttaggaatatttcttctattaggattccattcataattgagaataatagactaacatttggtaaacctaagaaagctaaaaaagataaaaacatccttcaacacatatgtgatgaaattataaaagaattgaactttaaaaaatgggaaatttacacaggtaaagagggtttagaaatttcaccattaaatattgctaagcaagcgattattcgcattgataatgagaataatacggaatccaaacttgaaaacatcttttctaaaatcccaatgtttaataaaattgtagagatggttgatgatgttgaaatagctgcaccatatgtgatttttgtattggtgcatcctaaagattataaacttgctgttaaaaatgcaggtaacatatccgttactgttgcagatagattaggccttgagaaaaaacctctaattgcagttagaaatgatttattcaccaaacaaggtaattttgaattaaatattatgttggctgatgaagtaactgaatatgctccatataacatttcagttcgtgtatgtgatagtgatgaaatatttattaaaagaaattcaaggaatattgcaagcacaattgctggaaggctcggatcatggaaattcccatttgtttctgtaaaaccagatatgcttttagaaaaacctggtgattttgaaatagaactggaaaaaggaggaggattagatggttaa

SEQ ID NO: 6690 - DNA, 1203 bp, Methanobrevibacter gottschalkii
  source 1..1203: mol_type = genomic DNA
atggttaatccattaactaaatctttaattaaggtaactactaacttaactccaatttctgttggaactaaattttttccaacaaattcactagaaacagaatatgttgaattatttaattatactcaaactattctttttgaacttgataaagcagaaataacctccgattccattttagaaaacttaattcgggatgttggtgtggaaaaccttccaaaagattataatttttatgaattaaaaccagctgaaaaccggattgaagaatatgcattagtaagtaatattatcatgggcaatgatcgttatttttacatcgaacttcaaaatccttctcatttaattaatatttttgtaaaaatcattgaaaatgaaaaaggggaagttgtagaaaaaactgcaacagaattagttgctaaaatgctaagtaaaaatgatgcgattcgtgtagctattgaattaattggtattggtttgtctgaaggaattcaagtaatttctgctgttggaatgactggtgcggcatctattgaaagagcaatacattatactcaaaacgtaggcagttttccaggtattgcatttactaagttaggtggggaatatgcgcttgtttttgattctccatttttacttcaagaatcaaggcctgttgacttggaaaattatttattcattgatttaatcgattcgactaaattcattgataaaaatggtcgtaatcaacttgttgatttgatgacaggtattaaaaatttcattgaaacggaatgtaatggtgagttagaagggtatcgtgaaggtggggatgattttattgcaaggtttccatctaaagacttagcaatacgcgctggacttgatgcagcatggttcgcacttgataatggtgcgaaaataagggcaggtgttggtagaagtagaagggaagcaggtgagagagcccaacttgttgatgatttaaaatcaactgcaccattgtctttggttgtatttgaattagcaaatggtttgtatgcatataatattccgtctgaatttacaagaactttaattaatttaatagaaaatgaaaaagcaaaattaattggtgtttttgtttttgtgtttatatttgcatttataatgtccattttagggcttggagtatttagtttcataggtgttataatagcattagtttatgcatttgtagcttaa

SEQ ID NO: 6691 - DNA, 378 bp, Methanobrevibacter gottschalkii
  source 1..378: mol_type = genomic DNA
atgagaagaaaaaaagatgataagagggttttattttctccaaatagtaatcgtccaaagcattctaataaaagaaaattaaatttacctaattttcaacgtcaacctcaacgttcacgcaaacaaagtaaatggggcaatgttactgtatttcttattattttagctttagttgcatttgttgttggtgcaggaatgggggtatcattaagttttgataatgatgatggtcctcattggaagaatgttactgaagagatgactactaatttaaatgagactgataattttacttatgatgaagaagtagatggtgttgattttaatagtaatgaaacattaactgaactaaatgttactgttaaaccatcatattaa

SEQ ID NO: 6692 - DNA, 1224 bp, Methanobrevibacter gottschalkii
  source 1..1224: mol_type = genomic DNA
atggagtttattaaagatttatctggtggattttctgttatagaaaatcttatggtatctggagctcgtgaaggtaaatttggcgttgcaattatctattcaccaaatagtacagcatctgcagttttcacttctaataaagtagttgcagctccagttaactatactaaaaatgtacttaaaaaaggaattatttcagccgttcttgtaaatagcggcaatgctaattgttttacaggcaaaaaaggatttaaagattgtgaaaccttagctgaattagtgtctaatgatttaaatctacctaaggatgaaattgctatttcttcaacaggagtcattggccgggaaatgccgattgatattatttctaaagttgcttatgaatcactttcaaaattaggaaacggccctgaaaattccctggccgctgcaaaagctataatgacaactgatactttcccaaaagaatgtgcaattgaagttacattaaccactggtgaaactgttaaaattgcaggcattactaaaggaagtggaatgattgctccaaatatgggaaccatgctttcatttattgtaactgatgctgtaattccatctgatgaaattaataaagcattaaagaaatctgcagatatcagttttaacatgattgttgttgatggggatgaaagcactaatgatacctgtctgatgatggctaatggtacatctaatgttgaagttgtaaatgaaggtaaattggattctaatttccaagaagctctaaattatatttgcattgatttagctaaaaaaatggctcgtgacggtgaaggcgctactaaattcattgaagctaatgtttacggtgcaaaaaatgaaacagatgcaaaattggctgcaaaatcaatcatatcctcaaatttatttaaatctgcagtatttggtggtgacccaaattgggggagaattgtatctgcaattggttattcaggttgtgatttgaatcctgatattgtaacaatagctattgcagatgattcagatgatgtggatcttgtttgtaatggtaaaattttagcatttgaaaatactccaaatcttaaaagagctgaaaaaataatgcaatcaaaaaatgttaaagtaaatattgacatgcatctaggtgatggtgaagcaactgcttggggttgtgatttaacatatgattatgttaaaatcaatgcagaatatactacataa

SEQ ID NO: 6693 - DNA, 105 bp, Methanobrevibacter gottschalkii
  source 1..105: mol_type = genomic DNA
atggctaaagttaaaggaactaacagaagaactagacaaaaaagaagttacactaaacctggtagtaaaagaggaaggggagttaaacaaacttggaaaaaataa

SEQ ID NO: 6694 - DNA, 591 bp, Methanobrevibacter gottschalkii
  source 1..591: mol_type = genomic DNA
atgaatggacatagagctcatggattttcaagtgtacattttttagattctgatgaaattttaaatgagttgaatcttaaaggtgatgaaactttcatggatgctgggtgtggtgatggccacattgcaataaaagtaattgaggactatcttccaaaaggcactgtttatgcagttgatgtttatggagcgtctattgaagatatggaaacatataaaaatgaaaacaatgttgaaaatttaattaatattgaagcagatattcctaaaggaattccgggtgttgaagatgagtctgtcgatgttgttttgatggttaatgtttttcacggatttaaagcttcaagaactattgatgatgcaattgaggaacttaaaagaattattaaaaaagatggtaaaattgcaattatggattataaagcatgggatgttccaaagggaccaccaactgcatttagaagttctcctgaagaattagaagaaatttttaataagcatggtcttaaaatgacttatctaaatgaagaaattggtgaagatattcctgagggtaaatctcataactttattgtattccaaaaagagtaa

SEQ ID NO: 6695 - DNA, 804 bp, Methanobrevibacter gottschalkii
  source 1..804: mol_type = genomic DNA
atgaaatctatgaaaactgtagctgttgcgattatagcaatagtagttattgttgctgtagggttatatcttactggttcagtaggtacttcaaatggagacctaaatggccaagatgttcaattagctgctgcagctagtttgaaaaatgtttatgatgaaaaattaatccctatgtttgaagaaaaatatcctggtgtaaaagttactcctacttatgcttcaagtggggatttacaaaaacaaattgaaaatggtttaaaagctgatgtgttcatgtctgctggcaataaacagatggatgctttaatcaatgaaagttatgttgataatgattccaatgttaaatttttagaaaacaagcttgttttaatcgtatctgctgattcaaatgtgaatgtctcttcatttgaagatttaaaaaatgtaaatggcactattgctattggtgatcctgaatctgtacctgccggacaatatgctaatgaatcattacataatcttggtatttgggatgatgttgaatctaaattatctttgggaactgatgtaacagcagtattaaatcaagtagctcaaggatctgctgattgtggtcttgtatacactactgatgctaaatctagtgatgaggttaaagtaatttgtgaagctcctgaagattctttaaaagatattgtttatcctgtagctccaattaaagattctgaacatgctgatgctgcaaacaaatttatggagttcttacaaactcctgaagctcaaagtgtatttgaagactacggatttacaattcatgaatag

SEQ ID NO: 6696 - DNA, 675 bp, Methanobrevibacter gottschalkii
  source 1..675: mol_type = genomic DNA
atgatggattggacacctattttaatttctatgaaaactgcaagtttatcaatttttataactttttttttaggtttaattgttgcttggggcattgttaaaattaaaaaggactcaataaaaatagtacttgatggtatttttacactcccaattgtacttcctcctactgttgtggggttttttttattgtatatttttggtgttaggggtcctattggtagttttcttatagacttttttgctgtgaaaatagctttttcatggtccgcaacggttattgccgcagttgtcatgtcttttcctttaatgtatcgttctgccagaggagcatttgaacaagtcgattctaatttattggatgctggtcgtacattaggcatgtcggagtggaaaattttctggaaagttttatttgcaaatgcattacctggaattatcagtggtggaattcttgcttatgctcgtggtctaggtgaatttggtgctacagctatgattgctggtaatattgcaggacaaaccagaactctccctatggcggtttactccgaagtggctgctggcaatatgggggatgcttttaattatgtaatattcattattattattgcatttatcgctattttcattatggattttgtttctatacgtaaagaaaaacaatggaaatag

SEQ ID NO: 6697 - DNA, 1185 bp, Methanobrevibacter gottschalkii
  source 1..1185: mol_type = genomic DNA
atgagatgtgttggtactgttgtgcgtggaataagaacaccaattattaaagaaaatgatgatttggcaaatatagttgtagattcagttatggctgcaaaagaaagtgaaggatttgaatttaaaaataaggatattgttgcaattaccgaagcagtagtgggtatttcagaaggaaattatgtaactgttgacgacgttgcacaagatttgcaaaacaaattcccctctaaaaatataggagtaacaaatcctattttaagtagaaatagattttcgattattctaaaaggtattgcacgaggaatggacaaaattacccttttaacttcttttcctgcagatgaagtgggaaatggaattttagacgaagaagttttagatgctagtgaatataatttagcaagtgttatttctgaagaagaatacaaaaaaacattcggatcctggaaacacccatttactggaattaatatgattgatctttacagggaattaattgaaagtgaagactgtgaagttgaatttgttttttccaatgatgtaaaaacaatacttgattataataaagacattttaacttgtgacatacatacaagagaaaaaacaacaaaattacttaaatccgagggagctaatgtttatggattgcacaatgttttaagtgaaccgattggagactccggttttaatcctgattacggagtgctcggttcaaacaaagcaactgaagaaaaattaaaattattcccaaaaacaggaaataaattagtcaatgaaattcaaaaaagattaaataacattactggtaagcaaattgaagttatggtttatggtgatggagcatttaaagatcctgtaggacatatttgggaattagcagatccagttgtttcaccagcacatacaagtggattaataggaactccgaatgaaattaaattaaagtatgtttcagataacaaattcgcaaatcttagaggtgaagaattaaaagatgctattaaagaagaaattaaaaacaaagacaaagatttgactggacaaatgattacacaaggaaccacaccaagaagattaactgatttaatcggttcactatgtgatttaacaagcggttctggagataagggaacaccagtcatatttatccaaggatactttgacaatctagcaaatgactga

SEQ ID NO: 6698 - DNA, 594 bp, Methanobrevibacter gottschalkii
  source 1..594: mol_type = genomic DNA
atggagcataaacatcatggaaaatcaagtgcaaagtttctagattctgatgagattttaagtgagttaaatcttaaaggtgatgaagtttttatggatgctggatgtggtgatggatacattaccaaaaaagcaatcaaagattatcttcctaacggttttgtttatgcagtagacagttacgataaggctattgaattgatggaaatatataaaaaagataatgcaattgaaaacttgattaatattgaagcagatatttcaaaagggattcctgatgttgaggaagattctgttgatgttttattaatggttaatgtatttcatggatttattgaaagttcccatcgtgatgcagttattgaggagttatctcgtataattagaaatgatggtagaattgctatcatggattttagacctgttgaattgtcgttcggacctccaattgaaattaaatgtggtccggatgagttggagaaactttttaatgaatatcactttaaaaaaattcatctgaatgaaaaaatgggtccaaaaggtcctaatgggaattctcattatattataatatttggaaaggagcaattttaa

SEQ ID NO: 6699 - DNA, 711 bp, Methanobrevibacter gottschalkii
  source 1..711: mol_type = genomic DNA
atgatttttgctgcaattctggctggtggaataggatcaagaatgggtggaactgacactcctaaacaatttttaacattaggaaataaacctgttattattcatactattgaaaaatttgttataaatgaaaaaattgataaaataattgttttaacacctaaaaattttattaatcatacaaatcatttaattgaggaatatattttgtataaggatgacattattgtcattgaaggtggcagaacaagaaatgatacattgatgaatggtattgattatattaatgaacattatggaatagatgaagattcaattatcctcactcacgattcggtacgtccatttgtgactcataggattattgaagataatattgatgctgcaaaaaaatatggtgcatgtgatactgtaattcctgctactgatactattgttgagagcatcaatggtaagactattgaaagcattcctgtaagggattattattaccagggtcagacaccacagagcttcaatataaagaaactttttaatttaatcaatagtttaacggaagaagaatctaatattcttacagatgcgtgtaaaatattcgcacttaaagatgaagatgtatatctagttgaaggggaattgacaaatattaaaatcacatacccctatgatttaaaactagcaaatacgatacttgaggatattcatgattaa

SEQ ID NO: 6700 - DNA, 1017 bp, Methanobrevibacter gottschalkii
  source 1..1017: mol_type = genomic DNA
atgattaatattgtttatagattaaaatctccaaaattttttgaagaagcaattgatgaaattgaattagaaggggttattgttagacctacttatctttcaatatgtcaggcagatcaaagatactatcagggatcacgtccagcggaaatacttgaaaaaaaattacctatggcattaattcatgaaggaattggtgaagttgtatttgatgagtcaggtaaacttaaatctggagataaagttgttatgattccaaacactcctgagggaaaagatgtttatagggctaattactcttatgattccaaattcaggggtagtggttttgatgggtttacttctgatttaattaaattacaatctgatagggttgttaaaatacctaatgagtttaatcctcatgttgctgcatttatcgagttaatgacagtatcatatcaaggaatttccagatttagtgaaatagctatcactccaaaagatgttttgggagtttggggagatggaaatttaggattcattacagcacttttcctaaaagagaaattccccgaatctaaagtgtatgtatttgggaaacatttggaaaatcttaatttgttctcatttgctgatggtatttatcagatacataatgttccaaaagatttgctaattgatcatgcttttgaatgtgtaggttcaagcgcatctcaatcggcaattgaacagatcatagatttaatcaatccgcaaggatcaataaacttatttggagtaagtgaataccctatacctctgaatactcgtatggttttagaaaaaggattgactattcagggaaatagccgttctgaaagagaagattttgttggagttgtagaaaccctaaaacaaaaccctaaactttttgaatatttgggaaaattagttacaaatatatgtgaaataaattcattgaatgatttaaaagaatcttttgataaagactatatctctaattttggtaaaacaattttaaaatgggacaaataa

SEQ ID NO: 6701 - DNA, 525 bp, Methanobrevibacter gottschalkii
  source 1..525: mol_type = genomic DNA
atgaaaaaacaagattttctaatgaaaacaaaacttatacaagaaacttttaatgataaaaggaaaattaagtgccagattcctatacagaatttaaaattagaaaaccatatccatcaagagggcagcatttttattactgaaaatgatgagattattgatttagaactacagctaacaaactttactgaagatgaacttgtaaaatatgttgaacttgcagaagcattgtatgaaacaaacaacaaatatgtttcaatatacataatctgcccaaatacagttaatatttgtgttaaagaatgtgaaattaaatctgaagcggaatttagcataaaattagcagctgttgaagagaatcctgcagaaattttactcaatataataaaaaataaaatcatcaaaggcgaaatacttgataatgaagatttatatgcattatcaatgatgccattaatatgtaaaaaagaagagagaaattattttagaaaagaatatttcaaaataattaataatctcaattaa

SEQ ID NO: 6702 - DNA, 1365 bp, Methanobrevibacter gottschalkii
  source 1..1365: mol_type = genomic DNA
atggttaataaaaatgtagcattaatgaggggagaacctgaaatagctgtaaaaaaattagctataccaattatgatatcaatgattttaactgcattatacaacattattgatggtatttgggtagctggtcttggaccaacggctattgcaggaattggatttgtaacaccaatatttatggtgttaaacggagcgagtgttggacttggaaacggagcaacaagtagtatttcaagatttattggtgcaaaaaaccatgaaatggcaaataaatctgcaacacattcattatttatttttttaatagcatcaatcattttaacaattattttcatgatgatgcaaaagccattacttgtaagttatggagcaagtggacaaacattaaatgaagcaatagcatatgctacaccattatttttaggattgataggatttatgttttcaaatggatgtagtggaatccttcgtggagaaggagatatgaaacgtgcaatgtatgttgtaatccttacagtcatattaaatgcaatattagatccgttatttatttacacaataggattaggttcagcaggagcatcccttgcaacaatagccagttcatcaattgcggcattagttatgttatactggattttagttaaaaaggacacttatgttaatgttactattaaaaaattcaagttagacatgaatttaacaaaagatattttaaaagttggaatcccctcatcacttgatatgctaatcatggcgattgcaatgtccatttatctaatcgtaatatctcaagttggaggagattatggaatagcaacatttacatctggtcaaagattatatttatttgcaataatgccacttacagctattggatctgcagttattgcagtgtctggaagtgcatttggtgctaagaatggtgattatttatcacggacccatatttatggttcaaaatttggtttgatattaggaactataattactttaattttagtaatttttgcaacacccttatctacattatttgcatatacaccggaaaccaccaatttagttccgggaattgcattatatcttcaagtagtatgtccaacattaatattaacaggcataggaattccatcaagctttttttatcaagggattggaaaaggaatttatagtttaatgtttaccatacttagagaaatcatatttgtagttcctttaatctttttatttgtgtacatattccatttagatattttaggaatctggttaggattatgtataggaagggcaattgcaagcacattgaattacatatttgcaagatatgaagtcagaagaattagatcaaaatttggaaattaa

SEQ ID NO: 6703 - DNA, 1836 bp, Methanobrevibacter gottschalkii
  source 1..1836: mol_type = genomic DNA
atgagtaaaataaattttggtaacattgttgaaatcataaagcatgattttaaagcgtcattttcaaatcccatagtgacaattgtattaattgcaataattattctaccttcactttatgctcttctgaatatccaagcatgttggaatccatatgaaaatactaatgaagtagaatttgcaatagctaacttagataacggatcaacatttgaaggtacatatttaaatgttggaaatgaaattgttaaagatttgaaaaataatactaaattcgattggaagtttgtaactgaagatgaactgcggaaaggggttcatgatggggattattatgcaggcattataatacctaaaaatctgagtgaaaatatagcatccattacatctgataatccaaaacaagcggaacttgaataccttgtgaatatcaaatcaaatccagtagctacaaaattaacggacacaggtgcaaatacagtttatactacagttaatgcaaaaattgttcagattataaaccttgcagcttacggaaaactcggagatttaaaagatggtctttcatctggtgcaggtcagttatacagtggtggaagccagctttctgcaggtgctgcaaaaatatcttccggtgcaggacaagtatcctctggagtgagtgatgttcaaaatggagcaagccaagtgcaaagtggtgctaatcaagttcagcaaggttcatctgcaattaacaatggtgcaagtgatgttaagcaaggatcagcatcaattaaacagagtgctagtgacttagaaaaaggatcacaacaaatacaatcacaggtagatccatcaacacttccagaacctatgaaacaatatgttgaaggcaatattaaacttgcaaatggaagcggagaattagctaaaggttcatcccaattagccgatggttctgtaaaacttgcagatagttcatcgaaattggctaatggtgctagcaatgttgcgggtggtgcaaatcaagtagctggaggttctgttgaacttgcaaaaggatcattaagccttgcagcaggtgctcaaatgctttcaggttctgcatcacaagcattgttctcagctgctggagctctaagttcatctgcaaattcactttcaagcattactggaatcaatgaaactgaacttggagattatttctactccccaataaaattagataggcaggaagtattctcagtaccagattacggatccaatgtagctcctttctatatcgtattatcaatgtgggttggtgctattattacttgtgtaatgatcacaccgggaaccagtcaagggacaaaatacaaacccgttgaaatgtactttggtaaagttatactgtttgtagtaatgagcatgctccaggcggcagttactataagtggggcttatatcttaggcatttatataagtaattcaccattatttatattctctgcaatactggtatcggtaatatttatgattttagtatattccatcatatctgcattaggacaagtgggaaaaggaataggagtaatacttttagtgcttcaaatatctggaactggaggaatttacccaattgaaattatgcaagatttcttccaaacattatatccgtacttgccaatgacatatgctattacattgatacgtgaagcacaattaggtgttgtttggtctaattaccttccagcattagttgttcttgtatcgattggaatagttaccattattgtggctgcacttattaaacagaaagcagataaatcctcaaaatactttgaagaacgtttaaaagaaagtggattattttag

SEQ ID NO: 6704 - DNA, 204 bp, Methanobrevibacter gottschalkii
  source 1..204: mol_type = genomic DNA
atgaatttaatattgagtaatgaaaaagacattaatatgaaattttgtccaaaatgtatgagagaattaaagaaggtttttcatggtgaaccaacaactgaattagctattgagtcattagaaaatgaaataatcattggaaatagttgtatgggcaattacaactactactgtgaatactgtgatgaatttttccaattataa

SEQ ID NO: 6705 - DNA, 927 bp, Methanobrevibacter gottschalkii
  source 1..927: mol_type = genomic DNA
gtgagtgaacaaaaattagaagttttcaatgttttaaattttttagataatggctatgagattgatgatattttaaatgaaggtaaattcggaacttttccttcagcacaggactgtattaaatacatgattgatgaaggatatctcaaaggtgaatttaatgctgcaattcataatgatggcaaatcattaactgcagaagaggtatctaaaaaatatacagttgctgaattgaaagatcttttaagagaaaatggtttgaaagtttcaggtaaaaaacaggaacttgttgaaagacttttacctgcattaagtggtgaaattacagtagagccagataatggggaatctgttgatttagcattaactgataaagcacaagaattcttaaatgaaaatgattggatggatttatatatgttcgcacttgttgcattcaggtttgaggattatgaaacctacagaaaaaattcatcagaagacaatattcagactgctttaaaattctgtgatgaaattatttcaagagcattaatcgctaatcaatttttagtattcatcgatgcattatctgctaaagctcatgtttatgcttatgataaagattatgaatctttcttagattatgatttacaacgtttcattttaggattaaatcctatagtaatggattcacaaacttatgctaattatgatgctattaattatgcaaatgtaattaatttaaagaatgtaattgaacaacttgatttaggtagtttaaagaaaagatttgataaaatatgggataagtctaatattaaaagtattactgtgcctaaaaagacttgttataaaattttacagaaagctttggccggttcagatgttgaagagctcaattttaatgtaactcaaaaatattttgttaggaaatttggagtttaa

SEQ ID NO: 6706 - DNA, 591 bp, Methanobrevibacter gottschalkii
  source 1..591: mol_type = genomic DNA
atgagaaataaagttgctggaattgtctttattgttggtagtttgtattatgttctagctgaagccgtttctgcaactttctttaatgcttctttatttaatacttattcttttcataccatttccgaacttggaatccctaatgtaaattcccctttgttttggttaatgaattctgcgtttattttaattggtttgacacttatttttggtaatttttataaatttaaagattttttagttaaaaataggattataatctatattttaacactaatgacctcaactggagtcattatggttggttggattcatgggggaaatccatttactttaggttatcatatgttaggtgctatgatggctatttttggtggtaatgttcttctgattgttatttcaagatccatgtctgaatattctaaatttcaaaaaactacattggttctaggaatatttggtttagctgtattttggattatgtttttcaatatggaaagtatttacatgccggtttttgaaagactttcagtttatacaatgattatctggtgttttttaactggttgttatataatttctagagagtaa

SEQ ID NO: 6707 - DNA, 249 bp, Methanobrevibacter gottschalkii
  source 1..249: mol_type = genomic DNA
atgacaaacttagataaatctgttgaagaagaaattttagcaatcattgaaaaatatcaaaaagaagatactaaacttttgaattatcttattactgatgatgaaattacctttttctcaccattagcaaatggtaattcaattactgcagaagacttacacaaagttgcagatattttaaaaggaacatttaaaggaatgcaaattgttaatcaagaatacagatttactttcgaaatcggtttataa

SEQ ID NO: 6708 - DNA, 678 bp, Methanobrevibacter gottschalkii
  source 1..678: mol_type = genomic DNA
atgtctgaggataatgatcttaaaaattttcttataaaaaaaggtgcaagcaaagtaggatttgccaatgttgatggattagctgagggattcatagatttgccttatggaattagtcttgttttaaaaattcctaaaaaagcaatgatttacatagaaaatgaagattatgagtcttattggtcttgttttcattcactaatagacagattaactgaaatttccattaaaggtgaaaagtacatcaaaaatcacggatatgatgcatttgctcttacaatgagtagaaatgagtgcgatatgaaaagattattaagtatattgccttataagacaatagccactaaatccgggcttggttggattggtcgttctgcactttttgttactccagattatggatctgccgttgtattgggcggaatattgactaatatgccacttacattcggaacacaaattacagattcacaatgtgatgactgtgaaaattgtcaaaaagcctgccctgttggtgccattaatcctcaaaaatggaatactaaattaaatagaaatgacattatcgatatcggaaaatgtagagaatatattgttgagcaatataagaatggtttaggctgcacaaagtgtatgtatgaatgcaaacttacaaaaaaatatttggggagattataa

SEQ ID NO: 6709 - DNA, 864 bp, Methanobrevibacter gottschalkii
  source 1..864: mol_type = genomic DNA
atgaaagatatagatgttttaattgaagctttaccttatattaaaaaatttcatgataagaaaatattgattaaatatggtggacatgcaatggtggatgataaagcaaagtcctccacagctcgcgatactgttttacttaaatatgttggaatgaaacctttgattgtacatggtggaggtccagaaatctcaagatccatgaataaacttggaaaacaagccaaattcatcaaagggttaagagtcactgatgaagaaactatggaaataattgaaatggtgttagttggtaaaatatcaactgaaatcgtatcagaacttattaaacacgatggtcaggcaataagtttgtctggaaaagattcaagtctaatatttgctcacaaaaaaggagcaagtaaaattgatgaagaacttgttgatttaggtcttgttggtgaggttgattgcataaacactaatctgcttgaaatgtttctagataatgattatattcctgtaatttctccagtgggtattgctgaagatggaaccagtcttaatttaaatgcagatactgcagcaggggaagttgcaagtgctattggtgctgaaaaattaattattttaactgatgttccaggcgttttgagagatccttcagacccgacatcattgattcaaaaaattaaagttgatgagataccttctcttattgatgagggcattatctctggaggtatgattccgaaaatagaaacttgcattaatgctattaataatggtgttggatcatgtcacattattgatggtcgtaaaaaacattcaatacttttagaaatatttaccacaaatggtataggaactatgatttataaataa

SEQ ID NO: 6710 - DNA, 1470 bp, Methanobrevibacter gottschalkii
  source 1..1470: mol_type = genomic DNA
atgttaaatattactacatttttagatgccaattcaaaacgtctagacaaagatgttttattcaatccaactaccggagagaaatatagttctggagaaattttatcaatcgtctccgaaattggtaggatcttaaaagaattaggaatcaaaaaaggcgatagaatcctaatttatttaaaaaattcagaagaatacttgttttcactttttgcaatatggagaataggtgcaatagccattccaacaaacagagtttttacagccaatgaactcgaatacattgtcagtgactcaaaagcaaaattaatgattactgatgaagaagcaaaagacctcattaatgttgaaacatatattcctaaaaacatttccagttttaaaaattgcaaagtcctggaatctgaaaatactgattgggacgatttatgtcaattacaatatacttcaggaaccacagggcagcctaaaggtgcaatgctcacacatggaaattattttactgctatacacaacgagtgtgatgttttaactttaaaacaagatgatgtatttttaggaatttatccgatggctcatgttggcctatcatgggcaatagctgccttaagagccgctgcatattacatattaatagaaaaattcaatatggatgaatatttagaattatgtgaaaaagaaaaagtcagcgttttaactggaatgcctccagtaatacattcattaactacaattgatgcccgtaagcaacttaaaaccgtacgcgaaattatttcaggtggaggaccattgcataagaaaatatggaaagatttccaccagacttaccaaataccaattatcaatgcatatggactatccgaaacaattgtaattggaactggaactgtcatcaggccggaagactattgggaggcggatagatttgaaagtgtaggtcacccagtctgtttttcagaagtgaaaatcgtcgatgaacatgattctgatataattttaccaaaatatgaacagggggaaatcgcacttagaggaccggcagttgcaaaaggatattggggcaatgaggaaaaaacaaaatcatcatttttagatgatggatggtttttaacaggagatatcggatatcttgatgaagacaaccgcctattcattacagaccgtaagaaagatatgattgtaatgagcggctggaaaatttatccaacagaagtagaggaagtattgataaaatatcctgcagttaaggaaatagctattttcagcataaatgactgtcacaggggagaaattccagttgctgcagttgtttggaaagatggtgaagaatgtgaaggattagtcagttatgcgcgtaaaaacctatccagatataaagttccaagaaagatatttacacttaatgaacttccaagagtaaacggctggaaattgcttagaagagaattaaggaaaatgtttaaggaatag

SEQ ID NO: 6711 - DNA, 1059 bp, Methanobrevibacter gottschalkii
  source 1..1059: mol_type = genomic DNA
ttgaattatcatttaaatataattaatgcaatattattaatatacgaacaaattgttgtaagtgaaataatgtacgatattgcagtaataagtggagatggaataggcagagaagtaatgtctgcctgtgaatatttacttgataaattagacttaaaattaagtttcaaatatggagaagcgggttttgattgttttaataaaaatggaacaacattacctgaagaaacaattaaactagctaatgatagtgatgcagtactattcggagcatcgacttcaacccctggacaaccaagtccgattattaatttgagaaaagagcttaatgtttatgcaaatataaggccaattaaatcatacaaaggaataaattcaattcatgatgacattgactttgtaatcgttagagaaaatacagaaggattatattcccaagctgaatatggtgatgaaaataaagtgattgcagagagaataatcactcgcagagcatctgagagaatatccaaagcagcatttaatttatgcgtaaaaagaggtcaaagcaaagtcacttgtgttcataaaagtaatgtattaaaaaagactgatggagtattcaaagaaagtttttacaaaatagccaaagaatatcctcaaataaaaactgaagacttctatgttgatgcaaccgcaatgtatctaattacacaacctcaaaattttgatgttattgtatcgagcaatttgtttggagacatattatctgatgaaagtgcaggacttgttggtggacttggtctcgccccatctggaaatataggtgatcataatggattattcgaacctgttcatggatcagcaccagacattgcgggaaaaaatattgcaaacccatgttctatgatactatctgcttcaatgatgttagattatttaggagaatgggaaatctcaaatgatataaaaggtgcgattgaaaaagttatttccgactgcaagattagaactccggatttaggaggagactcttcaactatggaagttacaaaggcaatagttaaggagataatataa

SEQ ID NO: 6712 - DNA, 465 bp, Methanobrevibacter gottschalkii
  source 1..465: mol_type = genomic DNA
atggaaagcactattgaagaattaattgaattattaaatgataaggatgattacgttgttgaagatgcaataggacaattagaattaaaaggtgcagatgcacttgaacctttaatggatgcattatcacacagaaagaaaaatgtcagattacatgccgctactcttttaggtgcaattaatgatgaaaaagctattccttcattaattgaaacattaaaagacaataacaaacttgtcagaagagaagcatctactgctttatctcgtatgggtgcaccagctgttgatccattaattgaaactttggctgctgaagattggagagtaaggggagctgctgcttgggcacttggaaacttaggtgataaaaaagcaatccatgaacttgaaaaattgcttgatgatgaaagtgcttttgtaaaagcaggtgctaaaagcgctattgaatctattcagaaataa

SEQ ID NO: 6713 - DNA, 891 bp, Methanobrevibacter gottschalkii
  source 1..891: mol_type = genomic DNA
atgcattataccggaccagtttatcgccctccccctgaggcaaacacaccacttttggaagtaacatatggttgctcttggaatgagtgttccttttgcacaatgtatgatacgcaaaagtttggaatatctccaattgaagatatcgaggaagatttggctgagttatctcagttttatcctaaagatttaaaaagaatatttcttgtgaatggagatgcttttgcacttcaggcaaaaaagttatttgctatttcagatttaatccatgaatattttccagaagttgagtgcataacctgttatgcatcaattaaaaacataaaaccaaaatcagatgaggatctggaaaaacttaggcaaaaaggattcaatgaattatatattggtcttgaaacagcctataatccggcattaaaccagatgagaaaagaatatactcaaaaagatgaatatgaacaactcgaaagaattcaaaatgtaggaatggattacaatgctttgttaatgttaggtgttgctggaagaggcaattataaggaaaatattgatgcaacaatcaatttgttaaatacatttaagcctaagattgtaggtcctctaacaacatccgttcaaaatccttcccctctgcatgaaatgaaattgaaaggggagtttgttgaagctactgaaagggaaatgatttgtgaagaattaatgcttttggaaaatcttgagatggatgatgattgctttttcttcggtggtcatccgtataatttaataagattcagtgattcttttaaaaacaaggataaaatgattgaaaaccttaaaaatcaagtattccaaattgatgaattaagacagggaatacttgatactgtacttccaaggggcaatttgtaa

SEQ ID NO: 6714 - DNA, 528 bp, Methanobrevibacter gottschalkii
  source 1..528: mol_type = genomic DNA
atgagaatttgtctttatggatctggaagcgctgaaatagatgaaatttataccgatgcagcatatgaattaggctgtatgatggcacagaaaggacatactcttgttttcggtggtggagacactggaatgatgggtgcatgtgcccatggagttcaagacacaaatggaaaatcaataggaatagctccaaaatggattgaaaactttgaaccattatgtaaggaatgcagcaaatttatttatgttgactcaatggatgagagaaaaaataaatttttagaaaattcagatgcatttattatcacacctggcggaattggaactttagatgaattttttgaaatcatcactcttaaaaagctcgaacaacatgataaagagattattgtttttaatattgatggtttttacaataaaatgtttgatatgattgatgacatggctcaaaaaggatttttatataatcaatatgaaattttcaaaattgcaaatacacttgaagaaatttttaactatttcgactaa

SEQ ID NO: 6715 - DNA, 555 bp, Methanobrevibacter gottschalkii
  source 1..555: mol_type = genomic DNA
atggaaagtgaatacatattaatcgaacttaaagaattatcttcacatgacaccattacaaaaaaagaattaatgggtttattaaaaaaatatgccagcatcatatcagtatatgatttaatgatggctacagcacatatgagaaaagatggagaatatgttcatgctaattaccgtgaaaaatacctggaagtttatattaaatacttcatcatgcgtatgaaagaagtcttggaaaatgaagactacaattataaaactaacattgataagaaatctttcgatcaatcttttcccatgcttgagagaacatttgaaaaagaaagattaacagcatcaaaagatgataaattcccattaatctatgtcattactgcattatacacaacatttattttagaagaaccgattcatccagttggaagtgaattcccaggaagtttaaaagtagaaaaacgaaatggagaattttactgtccagtgaaagataatcagaaagataacaccaatgcaatctgccatttatgtcttgcagaacaaacccccgatatttag

SEQ ID NO: 6716 - DNA, 645 bp, Methanobrevibacter gottschalkii
  source 1..645: mol_type = genomic DNA
atgtctgaaaattttatggagattacaaaggaagatatcgaaaatatcgaaaatgcattaaaaagtaatgcagattataaattaaataatactaaatttgacattaaatcatttgaaaaaggtggggacattagtttaattcaatatgttgctgatgtggaaaatgaattggtttttcaaactaaggaggaaaacggcaaatattatatttcggaaatatttggtttatttatggacaacattattaacggaaatgtttcaagagatgttttccagtcagtaagcgattatttccatgaggttattgcaggtgaaaaaaacgactttgaagatgaaaaagaagagttaattaattttttagttttaactgaagaatatgatgcaaataaattggaaatggatttaaatccgtctaaaatacgtgaagattataaaaaagattatggtgaaatttatggtgatgactctttaaacagagttcaaaaaagtctagcattaaaggaattgttgcacatgtcaatttgtcaggttgttaatgacattgatttatttttcacaagaccttatgatttaactcctgaagagaatgctgaaaagaataaacaagaacaaaaagcacttgaaaatgaactgcaaatgtcataa

SEQ ID NO: 6717 - DNA, 468 bp, Methanobrevibacter gottschalkii
  source 1..468: mol_type = genomic DNA
atgataactattaccaaaaaagaagaagtggttttagaccaagttaaaatattcaacttggaatattctgatggaattccagtaaatattttaagaaaagaattaggatttcatgaatatgatttagttcatattcttgaagagctgcaagataaggatttggttatctttagagataataaagttagcttatctgaaagtgaaaaagaaattaacactgttaattctaaaaaagatattgaacagttagaattaaatttgaaagaaaaagaatcttataatttaatcaaaagtttggttgatgataaaaatctgatttcaaaatatactcttgagggtcatttactttacggcgatttaaaactcactaatttcaggatgtatcatattattttatctcttcagaataaaggtcttctaaaacctattgataaaagtgatggggaatattacctcttggttgaataa

SEQ ID NO: 6718 - DNA, 438 bp, Methanobrevibacter gottschalkii
  source 1..438: mol_type = genomic DNA
atgtcattaccaaaaaaattactcgctgattttgacgaagtactaaaagataggggatatcaatctcgttcaaaaggaattcgtgatgcacttcaggattatattgtgagatatcaatggatgaattccatggaaggtcaaagaataggtattgtaaccattatctatgatcaccactatactggtgttatggaaaatttggctgaaatccaacacagcttcagaaatgagattaacactagtatgcatattcacatgactgataaatattgtatggaaattgtagtggtaaatggagatattgctgaaattcgtgatttgactgaaagaatcatgagacttaaaggagttgaacacgtaaaactcacaagtacagcaaacggtgaagagtttagtgaacctggtcactcacatgatcatggttatcaccaccattaa

SEQ ID NO: 6719 - DNA, 768 bp, Methanobrevibacter gottschalkii
  source 1..768: mol_type = genomic DNA
atgaaatttaaaacaacatcttaccattttgatttacttaaagataatgatagagtttctgctttttttgaggccataaatgattatgagggaaataataatttagcttatgatttgggatgcggtattggtgttttgtcttactttttaaaggatcatttcggggaagtcacttctcttgaaattgataaaaaagcatattgttgtgctaaagaaaatttaaagtcattcgataatgttgaagtagttaatgaggatgttttgaaatataattttacaaaaaaagcggatttgattgtttgtgaaatgttagacactgcattaatagatgaagaagagatacctgttcttaattatgctaaacaatttttaaaagaagatggcaagattatacctcagggaattattaacactgccgaacttgttaatcttgaaagacattatgttcattgggatgaggaagtaaattatgaagtgtattcaaagccaatagtctattccgaattcaattttttaaatgaaattaatccggaatttggggcgtatctgacattaaaaacagataaatctgggattattaatggattgaagattacaagttatactaaacttaacgataagttaattgttggaccatcgccaatgttaaacccaccattattaattccattagatgaaaagtcagtaaatgtaaatgatttaataaatgtaaaactaaaatatataatgggaaatggaatagaaagtattcgcactgaatattattaa

SEQ ID NO: 6720 - DNA, 483 bp, Methanobrevibacter gottschalkii
  source 1..483: mol_type = genomic DNA
ttgtcttttgatttagaattaaatgattttataatggattttaaaaaattggtggtattgggtgttggtaacgagcttaaaagtgatgatggtgttggaccttttattattaagaaattaattgaggaaaatattgttaatgataatttaatactgattaatgccgagacggttcctgaaaatttcacaggcaaaatcagaaaagaacaaccaagccacataattattgttgatgcatgtttaatgggagctcaaccgggagatatcaaaattgttgataaagatgattttgcaaatattggcatttcaactcattcaatgtcattatcctattttgttagatatttagaaagaagtaatgactttaaaataatatttgttggaattgaacctgaaactatggagtggggtgaaaatccgacagaaaaagttgaaaatactgcttattatttcattgatttgttaaaggagtgtatattatga

SEQ ID NO: 6721 - DNA, 1095 bp, Methanobrevibacter gottschalkii
  source 1..1095: mol_type = genomic DNA
atgaaattattattcattggttcaagattatatgatgatatagattggtatgtaaagagaaaaaacattgaaagtgttttaacagaatctaatgaaaatgcgattaatcttgatttgcccgatcaagtatttattgttcctcgtggaatggatgggccaaaacaagttgcattaatgcaaaaagttgatgctattgttccattaataggaattgaccctccattaatggatgttgcactcatgaaagaagaaattgaggaaaaatatggaattcctgttattgctgcaggtgtcagggcagttgaactgacttctaataaaatcgaaactaaaaaattttataaagaaattggtgttgtaactcccgattatcaaattttaaacgatcctgaagatttaactttggattttccagttgtgctgaaacaaggtgaaggtcaaggtggaaaagatattaaaattgctaaatcaattgatgatgtcaatgaatactttgaaaatttcaatcaggcattgtgcgaagaatttattgaaggatctgaaatttctattgaagtattaggatttaatggagaatatgttgctttacctccgatatataagggtgaaactactttggaaggtacacatccactaaataaaattaaaactggcccttgcatggttcaaggattggataataatttggttcaacatactgcatataaaattgccaaaaacttagcatctgatggcattttcgagatggatttcatgtattcagcaaaaaaagaccagttatatgctattgaagttaatacacgtccgaatggaacaagatatttaacaactgcgacttgtggtgttaactcattatgtgaactggttaatatggctattggggaattttcattacataatatttcggataaattaggatattattattcaactgaaattccaattggaaattatgaaggtcctgctccaattaaacctgaaaaatcatttgagaataatgattttgttgtccatggtcctgcgggttatcaaagagttactgcaagggcggattcaaaagataatcttgaaagtttagtttcaaaattagtataa

SEQ ID NO: 6722 - DNA, 1071 bp, Methanobrevibacter gottschalkii
  source 1..1071: mol_type = genomic DNA
atgaataatacagatatgttaattctttttttaataacattatgtgctacaatattctttacatggtatattaaaagaatattaattaaagcaaggattgctgataatcctatagttagtgaacatagacataaaagtggtactcctacaatggggggtatcgcattcttatttacaatctctttaattattgcgttgtattatcaaaatactccgatcttgcttgtatcttttataatgcttgcagggggaattgtgggtttggttgatgatttaattggtcttaaagttaaagaagttcaaaaaatcgttgtaaatacttcaagtgatgttattactcttggaaggttggatgttgaacctaatgaagaagtacgtgtagctactcctaaagcaaaagctgaagttgatgatttgcttaaggatggtaaagtagaagttgttggtgaagttccaattaaaactgaacctggcgaacttgaaaaaattatatgtcaaattgtattgggattattcttcgctttaactggcatcattactgcagtaggtggtttcaaattaggtgttttagctattcctgttgttgtaatagctattcttggttctattaattctattaatcttattgatggtatggatggtcttgcagcaggtattgttggaattgcttcaattgcttgttgtgtatatggttatttatttggacctgcatcaattattcctccattcctaattctttcaggtttatgcttaggattcttagtatttaacaagcatcctgcatcaatatttatgggggatactggatcatttgttttgggtactggttatgcagctgctgttttagtatgcgatattccttactttggagttcttgcattaggcgtaccgattatttcagttgtggttagtttacttcacagagcacatattatcaaattaccagtagaaccactgcatcacactttaaatcattatggtatgtctgaaacaagaattatagttagttattggggaattacatttttattatgtataattggtattcttgctaagatgtatgtattttaa

SEQ ID NO: 6723 - DNA, 1431 bp, Methanobrevibacter gottschalkii
  source 1..1431: mol_type = genomic DNA
atggatattcaagagttagttagattagttgagggtgaacttgtcggtaatgttgattttttttcaattgatgggttttcgggtagatttacttttttaaatgatgcacacacaggagacattgttgtaagacattggattgatggtaatggtgttgctatggcatttaaaaagaatattgcatgtttaataacacaaactccaaaagatgatgctattgaaatggcagaaaaacttaattttccattagtgattacaaataaaattgaacttgctaatgctttagcactttcacatacaattgataaatattctcataattcaactaatgttgtcataaccggaacaaatggtaaatcaactacttctcatttaatttatcatattttaaacaatgctggttttcatgttctcacaaacactgatagtgaatctgaattcaacacgttaattgatccgatggtttctaaattaatttctgatgaagttaaaaaaaatggtaaattggattatttggttattgaagtttctgaggttcaaggatggcttggaaaactaatgaaaaatcatgcagcattaatgagtgaagctattaaaccacaggttggcgtaataactaatattgcaatggatcatattggtcttgtaaattccattgatgatgtgtttaatgaaataactgcagttccaaaagcaataggtgatggaatatgtattttaaatcatgatgatgaactagttaggaaattaaatgcaaaaaatccattttacacctcaatgtctaaaatagatggcgataatgcagtatattttgatgacgggactatttattataatgataatccaattttaactattggggagttgccattcaccggtaaacattttatacaaaatatattatccgctattggcgcatgtatttctctaaatttaccaattgaggatattgttgatggagttagatcttataaggcacttaatagacgttttacaaaattaaatgatgaacctttaatttatgatgattttgcacataatcctgatggaattaaagcaacaatatccgaaaccctaaaattacttcctgataatcaaaaattatatgttgtttgtgctattagaggatcaaggggtgttgaaattaatcaattaaatgttgaagctattgttgaatctatggatgatggcattgaattagtattatcttcaagtaatgatgttgttaataatttaaattgggttaatgaaaatgaaaaagaagttttcttcaatgttttgaatcaaaataatattgattatgttcattttgacaatttaaaagattgcttaaatgaagtttataacaaagcagataaaaaagatattattttattaattggtgctcagggaatggatcatgcggagttccttttaaaggacataatataa

SEQ ID NO: 6724 - DNA, 441 bp, Methanobrevibacter gottschalkii
  source 1..441: mol_type = genomic DNA
atgtttataaagattagaagagacacattaataattttattattggcgtttattttgattctttgtggtcgtttaattacctatgttgcgtttgcatcttctgatgaaataaacgatggtattgctatttctggtgttattattaaaggtaatgatatagttccggttgatactatcagatcaaatgttatgcaggcaggttttagggatggtagtgtaatttatggtgatattttaaaaacttccaaaagggaagtttcacttcaagatgctattcagacggctcaagaatttgcaacacggtcaacagtgcccggtacatctgtacaacctattactgcagctgatgttcaagtggataagaatacaggtgtagttacagtcactgttatagaagatttttcatctgttgaattagacaataaaacaagtggtggataa

SEQ ID NO: 6725 - DNA, 1260 bp, Methanobrevibacter gottschalkii
  source 1..1260: mol_type = genomic DNA
ttgaataaattaaaactttcacttgtattttttgcagtattgttattgacaatgagtagtgtagcagctacttgtaatattatagttatcactgatccttcgggtaatgatcctaatggtgcagctgctggaagtatgtcttttgcagataatatgttccagtcaactttcttattatctagatctaatcattttgctgtactttctggaggtactggtagttcagatactaggttggattctattgttgatgcagttgccagtttggaaaataatgcttctgcagcatcagctgcttcattagcttctcaatttaagggagcacgtcttgttgttggcggtcctaatattggtgctgctgttggaggttcatttaatgcatatgtaattacagttgacgattcaagtaatgatattaaagtaaccccttataatagtggtgtggcaacattgcagccgggtcaaaaaggagctattattcacttgaggaatactgctggaaatccattatatggtactgcagattctgtaagaaaagaaactgcaatgaatattggtaagatgattagggatggttatcctgcaactactattcttgctgaagctatgggtgaagtggctaaagattctggtgaaaaatatggtgggggtggagtaaaccttgtatctggcatttcaacttcagatatgtttacaccaaaagaattgaattccactggttatccgatggatgaagaatattccaaggtttgtgatagctgcggatgggcaatgggttttccagctgcagaagcctatgaaaaatgtcctgtttgtggtggagatcttagaactgtttatgcatatcaggcattaggtgatgcgttaactgttagctctaaagccgttagtgtttcagtctatggaagtgatagaccaggtttagcagaaactactaaagaaattgttgaagcatccgtttctaaatatggttatgatgcatctgcaatttcaggttcaattaatagaggtattaataatggtcttttagtaggtgttgatcatgttgaacctaaagatattaatgtaaaacaaggttcaaaagcagttggagtttattacaaatcacttcctagtgaaagatcatctcctgcgtgggatttaccgattgatggaaatattttaacaatacttggaagtatccaaacggctgttggtattatcttgattttattagtattattcagaagtagattgcttaaatctttccaaaatcggtga

SEQ ID NO: 6726 - DNA, 432 bp, Methanobrevibacter gottschalkii
  source 1..432: mol_type = genomic DNA
atggcattaattttaatcagaggagaaacaaattcaaaattacttaatgcaattgcagacatggaacgtcatggtaatttgaatttaataactaaacctaaggtggtcgactctaaatttgctgattcattggttgaaaaaattttaaattcaaaacttagaacaaaatctaaagttgccactgcgttttttgtaaaagaggatactacattgagtattatgcaagtaaaaaagattcatcctccagcacatgtagttgttgttagtgatgaatatgagggttatcataaattaaagaaattattagataatgctaaagtattccaaggttattattctcataaggcaaaaaatgatgggttaatagattattcaattaaagggaaaaaaagacatgttaaaaatgaaaaattgaacagctatataaaataa

SEQ ID NO: 6727 - DNA, 495 bp, Methanobrevibacter gottschalkii
  source 1..495: mol_type = genomic DNA
atggaatgtgaaatctgtggtaaaacagtacccgaaaataatccaattagagcaaaaattgaaggatcagttatggttgtatgtaaagagtgttcaaaacttggaacaatacaaaaagcaccacaacaaccaaaatttagacaacaacctaaaggaaaaaaagcaaagaatactaaaaataccggaaattattctagaagagatgaaccctcagaagaattaattgaagattttaacctaaaaattagaaaagcaagagagacaaaaaattggtctcgtgaggatttaggtaagaaaattaatgaaagagtatcagttattaccagaattgaaactggaaaaatgacacctgatactaaattaaccaaaaaaattgaaaaaactttaaatataaaacttcttgaaaaagtaaataatattgatttaaatcaatttataaatacctccacaggtgaacgcgccttaggaagtataatgaaaataaaaagaaaatag

SEQ ID NO: 6728 - DNA, 1257 bp, Methanobrevibacter gottschalkii
  source 1..1257: mol_type = genomic DNA
atggatgatttcaatgatttggaaaactcttcaaaagaacaattaatggaaaaagtagaagatttacaaaatgaaattgatttgttaaaagaagaaaaatccaaagcaaaaagtaacttaatgtggaaagttagaaaattagaaaaagataaagtcttaatagaaaatgaaaagattagacttgagagagaaactaaatcattacgttcagaagttgataggtttagatctccacctttggtgttagctactattactgaagtcttagatgataatagaatgactgttaaaagtagcacaggacctagtttccttgttaattactcaaaattcttagatgaaaaattattagttccgggttcaagggttgcattgaatcaacaaactttcggtattgttgaagttttaccgtctgaaaaagatgctaatgtttctggaatggaaattgaaactaaaccggatattacctacgaaaaaattggtggattggaagaacaaattagggaagttaaagaaacagttgaattacctttaactgaaccagaattattcgaaaatgtaggaattgaaccccctaaaggaatattgttgtatggtcctccgggaactggtaaaacattacttgcaaaagctgttgcaaatgaaactaatgctacctttattaaaattgtagcttctgagtttgttaaaaaatacattggggaaggagcaagattagtacgtgaagtatttgaactggctaaagaaaaagctcctgctattatattcatcgatgaacttgatgctgttgcagctaaaagacttaaaagttccaccagtggagatagggaagttcaaagaacattaatgcagcttttagcagagttagatggatttgaatccaggggggatattggtattattggtgcaaccaacaggccagatattttagatcctgcattattgcgtcctggtcgttttgatagatttattgaagttccacttccaaatgttgatggaagacgtgaaattcttaaaatccatactaaaaatatgtcttttgatgaagaagcagatcttgatttacttgcggatctaactgaaggtttatctggtgctgatttaaaagcagtatgtactgaagcaggcatgtttgcaattcgtgaaaaacgtgataaaataactgtcactgactttatggatgctattgacaaagtcatgagtaaaaataaagaagacgaaatgtttaatactgaagcaggagtaatgtttggataa

SEQ ID NO: 6729 - DNA, 960 bp, Methanobrevibacter gottschalkii
  source 1..960: mol_type = genomic DNA
atgttatttaataaaaatgagaataaagctaatgaacgaattatttataaaacaaaatcaaatgtgattttaggttgtaaaaaagctatctatgggcttgttttattgattattgttttatccatttcaccaatcatgattaaattcattgctaaaatgcaagtgtatttaatttctcaaattcaattacctttaactaggtatgcagctatagctttttttgttattattctcattattgtaatatatattatatggcatattattggatggtattctcttgaatatacattaactgattcaagaattatggtcaaatctggtgttatatcaactaaaaagaattacatgccttatgcaacaattcaagatgttactacttctcaaagtattcttgcaagattatttcatataggtactgtatctgtttttagcgcttatgataataatcgattagaattaaaaaatatttcaaatccttctgaagttgaagaaataatattttcaaatatgagaggttccagaactttccagcctcaacagtccagacctataaattatcaccaacaggataattatttagataatggatcttatctgggtagaaatgaaatgtatgatgaatttgaacccattactcctataactcatgaaaaagacagctatcagggaagagattatgaatattatcctgaagataggggttttgaaaattctgatcaaataagacatgaatatgaatatgaaccatatgatgatattgatagatttgttgaagaatttgaacctcataagaattatcctaatgaaatatatgatgatgaattggatgaggattattatgaatttggttcaaaaaatcattatgatgaaaaaagaaatgaagttatagacaacgattcaaacagtctatccagtgaaaaagttattagaagacattttgataaatttaaaaaataa

SEQ ID NO: 6730 - DNA, 1035 bp, Methanobrevibacter gottschalkii
  source 1..1035: mol_type = genomic DNA
atggaattattatgtatacagtcacaagaacatcctgaattacctcttgcagagttaaaagcggttatggaatgtgaaaatatttctgcagagatagatgttataacagaaggtttagttattttaaaaaatatttcaaatgataatattgattcgtattatgaaattttaactagaagattaggttatactcatgaaatacatgaaattataaaagaatctaatactgataattttgacgaggatatattatctatcaactggtcagagtatattgatgggacttttgctgttcgtgtgaaaagatttaatacagaaatcggtactgttgcaactgagcgaagagcaggttctttaattctttcaaattctgataatattaaagttaatttatcaagacctgaaaccttaatccgtatagttgttcataaaaatgatttttacattgctattgaaagaattaaattaaataaaaaacattttgaagatagcaaaccacataaaagaccatttttttatcctggctccatgaatcctaagttagctagatgtatggttaatttatcaagagttaaggaaggtcaattattacttgatccattttgtggaactggaggaatcttgattgaagcagggttaattggttgtaaattagttggatcagatatttactggaaaatgaaaaatgggacatcaattaatttagattattatggaattactgattatagaacatttaatattgatgtacgcgagcttaaaatgtatgaaaaagtaatggctgtagttactgatccaccttatggcatttccacatctactggagatattgaaggagaagatatttttaaagaattctttaaatctatctataacaatatgagggatgatgcttatctttgcatggctagtcctcattatgttgatttaaaaccaatggctgatgagatagggtttgatattgtagagcagtatggaattaaaatgcatagaagtttaactagaataatttccgttatttgtaaaaaacattag

SEQ ID NO: 6731 - DNA, 141 bp, Methanobrevibacter gottschalkii
  source 1..141: mol_type = genomic DNA
tcaataaaaagaatcacatacactacttttgtcgaaacaaaagaagaattaataaaattatttaaaaaagaatattataagataataaataatgaatcattctttaataaatgggtatcgaaatacattcttaaaagttag

SEQ ID NO: 6732 - DNA, 906 bp, Methanobrevibacter gottschalkii
  source 1..906: mol_type = genomic DNA
atgtttaaggataggatagttaattattatattgataaatcgatggaatatggtcataatcatttaaataaaaaagcaattgattgtgttgataaaatattgtttttggataagaataatgctagggctttgtcatttaaagggctttattatgcttttctttttgaaaaggagaaatcgtttgaatgtttcagtgaaatccttaaaaataatcctgatgatgtacattgttattatagaaaaggcttggcatgcatggagttagaaaagtatgaacaagcaatcaattgttttaaaaaagtattggatgttgatcctcatcatccaatagttttaaggtacattagttcatgttatttgtatttggaagaatatgatttagcttttaattccattaatgatgtattaaaagaggatatggaaaatcctgaactattacttagtttaagtctttattatgatgttttggaaatgtatgatgaatcattaaatattttaaataaaataattgaaaaaaatcctaatgaagataatgcattattacaaatggctattgtttatagaaatcaagaaatgtatgatgatgcattaaaatatattgaattggctttaaatattaatgccgattgtattgtttcaaaatcaataaaatataatttattagcttatgttggtgattttgaacattctttacagggttttgatgagatttctaaaacatattttgatggttggggtgtaattgaatcgtattatagttattatggcgagtcattggaggtaatggggaaatatgaggatgcattaaaggtatatgatgaatatttggaaaaatacccaaatttcccaaaaaaaatgattgaaaatatgaaaactgatgtcaaaaaattaattaaacaatgttaa

SEQ ID NO: 6733 - DNA, 204 bp, Methanobrevibacter gottschalkii
  source 1..204: mol_type = genomic DNA
atgggttcagctgaagaagtgggtaaatatttaaaaaagttatataaaaattataaagatgcgaaaagtaaaggtgaagtattaaagtttgtaaaatctaatattaaagaattatttgctttgtctttgtattttgaatcaattgaaactgtaaacttattaataaatttatttttatatgaactagaaaaagataagggatag

SEQ ID NO: 6734 - DNA, 753 bp, Methanobrevibacter gottschalkii
  source 1..753: mol_type = genomic DNA
ttgatagagattcatgataaattaggaacattggatgaattattggttataattgatgatttactacttgatgaaagatatgattataatgaattattagttcaaaaaggaaatatattatctattcaaggaaaggataaaattgcaatgaaatgttttgataaggtgttgcaagatgattcaactaatttatgggcttattattttaaatgctatgttttaaataaatctgatgatttaagtaattttgataagttattttcaatggttaaatcacaatctccagatgaatattatatatggttattaataggagtacttttttcccgtaacgacagatttgatgatgcattatactgtattgatgaaagtataaatagatatgatggacaagaagatagttggttgtacaaaggattgattttttatgaaatgggcaaatacgatgaagcgttgtctgctattgatattgctttaaaaattaatccaaaagattcttatctttatcttacaaaaagtgttattcttaatgcaatggaaaaatatgatggagcaattttttattctaataaatgtttagaattagataaaaataatgtattgtgtttgtataatttatccctgtctctttataatcaaaataaatttgatgaatcattaaaatattgtgaatctgctttaaaaatagatcctaactattgtttatcattgaatctttatgctgaaattttacgccataaaaaaaaggtttga

SEQ ID NO: 6735 - DNA, 900 bp, Methanobrevibacter gottschalkii
  source 1..900: mol_type = genomic DNA
atgtttaaggataggatagttaattattatattgataaatcgatggaatatggtcataatcatttaaataaaaaagcaattagatgtgttgataaaatattgttctttgataagaataatgctagggctttgtcatttaaagggctttattatgcttttctttttgaaaaggagaaatcgtttgaatgtttcagtgaaattcttaaaaataatcatgatgatgtacattgttattatagaaaaggattggcatgtatggagttaatagaatatgaacaagcagtggattgttttaaaaaagtattggatgttgatccccatcatccaatagttttaaggtacattagttcatgttatttgtatttgggagaatatgatttagtttttaattccattaatgatgtattaaaagatgatggggaaaatcctgaactattacttagtttaagtctttattatgatgctttggaaatgtatgatgaatcattaaatattttaaataaaataatagaaaaaaatcctaatgataatgatgcattattacaaatggctactgtttatgaaaatcaagaaatgtatgatgatgcattaaaatatattgaattggctttaaatattaatgtcgatagtattgttttaaaatcaataaaatataatttattagctcatgttggtgattttgaacattctttacagggttttgatgagatttctaaaacatgttttgatggttggggtgtaatggaattgtattatatttattatggaggtgcattggaggtaatggggaaatatgaggatgcattaaatttatatgatgaatatttggaaaaatacccaaatttcccaaaagaaatgattgaaaatatgaaggaagatgccttaaagttgattaagtaa

SEQ ID NO: 6736 - DNA, 4041 bp, Methanobrevibacter gottschalkii
  source 1..4041: mol_type = genomic DNA
atgttacaagcaaaaaaaacaataacagtaacagttaaaagtatccctacaagtttaacagtaaatgatttaacatgtaattatggggaagataattcttatttatatgctactttaaaagacactaaaaataataaatttctaaatgggcaaacaatcacttttaaaattaatgataaaattataaatgttgttagtgataataagggtagagccaaaatcaaaattgatgaaaaaccgggattatacaatgtgattgtttcatttactaaaagtccatatgcaagtattagtaaaaagattaatgttaatgtaatatcattcaatccaactgtgaattatgatgggggattttacaataagtcatatttaaatttatcattaaatatcaataatgctaaattgattaagtattgtttgaataatgatagttggagtcaatctgataaatcagtatcatttattttaacaaatgggatctatgatttatattatagtaatggtagtgggagtattttccatgaacattatttgattgacaataattgtcctgttgtttggagtaattttggttcagacttatatgattcttctattattgttaatttgtccagttgggataatcttgatgccaatcctaaaatttattattcgttagatgaatccaattttaaattgtatgaaaatttattgaatatttcaaggacaacattattaaaattttattcaattgattttaatggtcataaaagcgaaacaaaaacttgtaattatatttttgaaaaaataggtaatttgaattcaggaagaggatttacaacaatccaatcagcaattgatgattcaaatacccataatggtgatataattaaaattagtgaaggtttatacaatgaaccattaactgttaataaattcgttactatgattgggattaatgctactttaacaagtagggatccttcccgtccagttattggaattactggtggtggaagtaatagtgttatttatggatttaaaattaaagattcggagcatggtgttgttatttatcatgcagataatgtttctgtaattaataatcaatttatcaatgtggttaaatctatagaaatagatgatgataaaaatactttggttgcttataattctattgattcagataaatttttaaatttcatgtctggtgttgctattagaaaatcagataatctaatggtttttaataataatatttcattaaattctgatacgggtgctggtggaatcgttgttacaaatattacttcaaataatatttctattgttaataatagaataaccaataaaaacaatttaaatggtattggattgtatgttatctgttcaaatgtaagtattgattctaacaatgtttctaattttaatgctggattgtatgttgtttcatctaattctcatgtaactcacaatgaatttaaaaataataatcatggagtatttttaagagtctcagttaataatacttatgcttttaataatattcatgataatatattatgtggttttgttttagatacctctcttttatcgtataatgattcatgttacttgaatagattatgtgataattctcaatatgatttttactcagaagcaaacagtgattatgtaattaatgataattggtggggtgaaaacactcctaaaatttctattaatcgttctattcttgctaacatttataatgctactggaaatgtaattatgaactcttggatggttgcacatttattttcatcttcttataaaataaatgaaaataacaatattgaaagagctaaattttatgttgatttaacttataataatataggaaatgatttgtcatataaaggttatattccaaataatttaaaatcttttattggagtatttaatggggatggagctaaaaaatccaatatttcatatttgcatgagggtaaatcttttgttgattttgaattaaatgatttatttaaaaaccatgaaaatatcactgtcatgtctatttttgacaatgtaaaaatactaaactcttttaataaaaaggttacaattgatataatgctattttcttctgcatgggattttgaaaataattattttgtaaataagacttatcagattccattcagcaataatgcttcttggattacattttgctggtctgaaacaggattatttactggtaaaatttatgtaatagttaatggtgaaatcttagatgaaattaatatccacaatcttttttatcaaaaatttaaaaataattattccacaaatgtttttgaagctattaagttgctggatactgtttttgccagtacgaaagaaggtgtttgggcacctaatggttattatttcagttttgcaaaagcagctaatattgattttagagattataattctgtttataatagatttttaaattatattaaattatattatgatttaacagactctgatttaaattttgttaaaaattataaaggttttttcattgattttattgatatgactattgattttcatggtgatatgactccagatattaactttgattataatggagttcataaacttttaaagcctccatctagttatgctcatcgtataagtaatatttattacactgatattgaagatgaaaataatattagtattggttatgaaggtatgcgcagttttgcaattgttaaagataatttaactaatgatgatttgcaattttggttaaatcaaaaagaattatatgctccaggtttgatgaaagccgcttatggtacttttttaacttctttgttagtgatttatgaaaatgaccgtgtggctgatgaatctgcaattaaatttaatgtgacttggtctcgtattagtcctgtttgtgtttctttgtgtaatgattataattgtttatatgttactggggagtctgatcatggaatgggtcgggaagcgataggaaatattagtgatgtttggaagtttaattttgcaacaagtttcagtttcagtctggtggagcagttggtcggtaataatatttggaatgatacgacaataggtagtgttactcttggtttaattgaaagttattttaataatgaaacaatggaaatttttacaagtaacggatatatatttattaaatgtgagaatgacggtaatactttgttgtttttagatttgaagactggaattgttcgggactatttcagttattatggtttacttgggacaatgccatgttatcatgataacataacagaaaatgcatggaaatatggaaataatctattaaataatatgggcagagaattcaatgatttaaaaaatatttttggtattggagtaatatctgcaacgttaattggggaggtcgaattcattggtttagaaatgagtggaattggatcagctttaattgaaggatctgaaattggattattgtttggggaaatttcaattgctccaatcatgttaatatcattgccaattatcatgtttttattccctgaacaggttaatgaagtatggatgaactttgcaagcttatttaatccatattataaggattatcctgatattccaatttatgaaaatacttatcctgcaaatataataaatcctcctaaattagtattagatggtaaatcatcagatgattatattatttcacaacttaaaaataatagaaattttaataataagtataaaagatataattctaatgttaataaggataatataaattttaaaataaaaataggacctattcctagtggaaaaggtccaaaggatatggataatcttggttcagctgaagaagttggtaaatatttaaaagaattatataaaaattataaagatgcgaaaagtaaaggtgaagtattaaagtttgtaaaatctaatattaaagaattatttgctttgtctttgtattttgaatcaattgaaactgtaaatttattaataaatttgtttttatatgaaatagaaaaagataagggatag

SEQ ID NO: 6737 - DNA, 801 bp, Methanobrevibacter gottschalkii
  source 1..801: mol_type = genomic DNA
gtgaagaagttttataaagcagttttattgttgactttttgtttttttatttgtttggactgtgtttgtgcagtttcagataatgtagttgaaaatgatactttaagtgttgattgtcaagtaggagaattgtgctcggatactattgaagtttcatcagataactattatattgataataatgttgttaattcatcagatattaactttacagatgtttattccggtaatgttgtgaaaaaagttaaatctacagttaaaacatcgattactgcaaaagatataactaaatattttcaagatggtacaagtgttaaagcttatttgaaaaattcaaatggtaaagttttatctggaaaaaagatcactgttacttattctggtaaaacttactctcgtacaactgattccaaaggttgtgttagttgggatgttaaaaaagggcctggaacctattcggtgaaattttctttcaaagcaagtggttataaaagcagcagtaaaacagcaaaagttacagtaaaagcaatgccaacaacattaacagccaataatcttgtttttacatatggtgatacaaacaataaattaaaagcaacactaaaaaataaaaaaggcaaatcaattgttaataaaacagttgtttttaatttcagtggtaaaaaatatattaagaaaacgaattctaaaggagttgcgtgtctaacaattactgcaaaaccaaaaacataccctacagccatctcatttacaaatgctaattatgttacaagcaaaaaaaacaataacagtaacagttaa

SEQ ID NO: 6738 - DNA, 945 bp, Methanobrevibacter gottschalkii
  source 1..945: mol_type = genomic DNA
atgagaaaaccttatgttatactgattggaagtgcatcaggaattggaaaatcaactatttctgctgaacttgcaaaagcattaaatataaaacatttaattgaaagtgattttataagagccgttgttcgcggtattattggtaaagaatatgctcctgctcttcacagctcatcttatgatgcatacaaacatattagaaataaaagcagatacgacagttatgatgaacttgtatctgccggatttgatgatcacgcatcatatgtaattcctgctctggaaaagattattcaaagagcaattaccgattatgatgatatcattattgaaggagttcatctcgttccaggattaataaatatagaacagtttagagatgaagcaaatatttattttttcattttaatttctgatgaagagtctcataaagaaagatttgttaaaagagctattcagatccacagaggtggaaaacagctagatttctttaaagagaatagaatcatacatgaccacttattgactcaagctcaaaataataatgttaccatcatagatacagaatccattgaatcaagtttagagggaatcttatccataataaataaatcatgcacaacaatcaaattaattaacacaattgatgaattagaagatgttgttgatatcataagcaataaaaacaacggtactcttgaaaaaattacatataacattaaaggatttaaagaaccattaattagaaatattgatgtttacgatacaaaatccgcaaatagatttataaatagtattaatgaaaataaagataaaaaagaatacttatcacaattatacgaattatctgaattcagagaggccagaatttgcgcttcaaatcaagataacttagataaaatcataaaagaattacaaaataaaggatatgttttagatgaatga

SEQ ID NO: 6739 - DNA, 579 bp, Methanobrevibacter gottschalkii
  source 1..579: mol_type = genomic DNA
atgaatgaaatggaaattaatgaaatgattataaaatgtcctgcttgctctgttgaaggtgttgccaaatcaataatgaaagaaatcgaaatacctcattttggaaaagttttagaaacaacaatacaatgtcctgattgcggatttaaacatagcgacattatagccttagagcaaaatgatcctgccagatatgttattgaaataaataaaaacaatttatccgtcagagttgttagatcacagtcagcaactgttttaatccccgaacttggtgttaaagtagaacctggtccaaaatctgaagggtatgtaacaaatgttgaaggtatcctcactcgttttgaagatgcagttaaaaaagctttaaacttatttgatgatgatgcttcacaagaaaacggaacaaatactcttaaagaaatacaaaatcttaaaaaaggaaacggaactgcaactttaattattttagatccatttggtcaaagtaatgttgtaagtgataatgttgaaatttccgaaattcctgaaaatgaattaaatacattaaaaacaggttttagtcatatagaagaataa

SEQ ID NO: 6740 - DNA, 435 bp, Methanobrevibacter gottschalkii
  source 1..435: mol_type = genomic DNA
atgtctgaagaagaaatgatggaagaaacttcagaagaattcattgatgaagatggggaaaaattgcctttcgctaaagcagaagttgttcgtttaatgaaagaaaatcttgatgatgacaaaatgattagagaaagagtaaaagtagaaatgaacaaatttttaggtgatgttttaaaaaatgtatgtaaacaattaaatgattatccatacaccactgttgaatacgaaatgcttaaagaatctacttacccttacactaacattgaaaggataaaccaggaaaaagaaagaattttattacatttggaagctattaaagcagattgtaatgcattggctatggatgtgcaaaaaacattaaaattaaaagatgttgtagaggaagatacattcagcttcacagcacctagtgaagaagacgaagaagaataa

SEQ ID NO: 6741 - DNA, 4248 bp, Methanobrevibacter gottschalkii
  source 1..4248: mol_type = genomic DNA
atgttaaacaaaattcaaaagatagttattggcaaacctttcctcatttcattaatctttgtttgtctaatctttacttctcttggagttagcattgagcattcatatgctgcagatttaaacgagagtgataaattggggtctggtgtaaatgttgaagataaactagaaaattctcagaaaaataaatcaatgtcggatactaatcaaaatcccgcattaaaagcaaaaacttattcagtaaacggaggtacttttagggatattcaaaatgctattgataaatcaagtgcaggagatacaataaaattaagcggtaaatttgtttcaaaaggtgatgataccatttctatgtcaaagaaattaacaatcacttcaccatcccaagcaattttagatggtaaaaattcaacaacaattttaaaaatatttacaggagcaacacaatctaaattatcgaatctgagatttgtaaatggatattctgatagtaaaggcggtgctattgtaatttcagctaaatcaattgcatttgacaagtgtgtttttgaaaataattatgcaaatttaagttcgggagcaatacatactccatatagggcaatagctacacaaggtatgttaattaaaaattgtaatttcacaaataatggtgcaggaattgccgctggagctttaggaatattcggacatgattttttaattgagaattgtgcttttagttcaaattacgttaaaggatatggcgaatgttatggcggtgctattcagataggattggatacggaaccgtcttatggtaatgttagaaattgcagatttattaataataaagctatatcctctactggcttaggtcatgcaggagcaggatgtgttagaaatggttcttcctattataactgtatttttattaataatagtgcggattggggtgctgctttgacatatcatgcatctggcaatttaaataattgtactctgattaataataccgccactaaatatggtggtgctgtagctattatgatgaattacctgaatttcatgaatttaaatattacaaacagtatttttaaaggaaataaagctcctttaggtggtgcggttaaattggatgggttaaatataaaaattgaagaatccacatttgatgataattatgcatctgagtatggtggtgctgttaatatcaatgcaacaaatgttaaaatcataaattctaaatttaacagaaatattgcaaatattgatggtggtgctgtatttatcaaaggtaaagacactacagttaagaattcaaaattcatatcaaatgaagcaatacctgatgttaaaaaattaaatgatggattaggtggagctatttatgtaaacagtacaaaagtgcttgctcagaataatgagtttaaactaaatactgcaagaaatggaagtgcaatttactttgatagaaatggtcttgaatttaaactggtaaataatacattatatcaaaatcaggcttgggtttacaggttaccgatttttgctcatgatatctattatggggagtcagaaaacatcaaatcagtaatttatggagggaataacattgcagattttgataatttaaaagtatcaaatgcaatttataatgcagccagcaataataaaattgaaattgatggggaacacccagttttaggagcaactaccagcggtaagttatatcaggatgaccgtgaatataatgtgagggtattgatgatggtaagacatgaagatggaactattgtatacaataactctttaaacactaactatctaggtgcagtatctggtaagctggataatttaaagcctggaaagtattatgttaccgcaaaacattttgaagataattactacaaagcaattgccaatacaaccgtattcaatgttcttccaaaaactgataataaaatcttaaaatcaagtaatggaaactcaattgcttataaagacacagtcatctggacattgaatattacaaacaatggtccaaatgattcaaccggtgttgtagtatatgatgtacttcctgaaggattaatttgggtaaatgatgacagtaatggagcatataatccaaaaactggtgttttaacaataggatctttaaaagttggtgaaactatagttttaaatataatgactaaagttaatgctactggaaaaattgtaaacaaagctaatgtaactggaaatgaatatgatattaatttagacaataatcatgatgaaaaagaaatcaacgtacctcctactgttgatttggcaataattaagaaggtcaatatcaccactccaaactatggtgattcggttatctggacattaacagtttctaattccggtcctgatgttgcccatgatgtaaaagtaacagatattttttcagattcattaatttggattgaagatgactctcttggaaaatataatccgaaaactggaatttggaatattggaactttaaacaaaggcaaaacaattgaacttaatattgtctcacaagttaatcaaactggaaatattacaaataatgtttctgtgacatctcgtgaacatgatattgatttatcaaataatgtagctaataaaactatatttgttattaaatcaggagatttgtctattttaaaaacagttaatgtaagtgatgctaattatggtgaaatagttaaatggactctcactgcatataataatggtcccaacaaagttaatggggttacagttcaggatattcttcctaaaggattaatgcttcttaactacacggcaagtaaaggattttacgatgatggcgtatgggttgtgtgttgtcttgaaaaaggaaaaactgaaactttggagttaatatgtaaagtcaacagaacaggaaatattacaaatattgctaaaatctcaggaatagaatatgatcctaatctggacaataatctagacaatgaatctattattgttccacctgcatcggacatttcagtcataaaacaagttgatagtaaaaatccttactttggagatattataacttggattattgaagttacaaacaaaggtccggatagggcaactaatattagagtaactgatgaattgccagaaggtttaatatttaaagactatgtttcaacttgtggtgtttaccaaaacggtgtttggttcttagattatctaaatgcaggtgatagtgaatatctaaatattagttgtcatgtcgggcaattgggcattattgtaaatgatgtgtctgcaatagcaaatgaatttgacattaacctgtcagataatcattataatgagtcaattaatgtattgccagtctcagatctttcaattgaaaaatttgtcaatgtttcaaatgctaattataaagatttgataaaatggacactgatagtttcaaataatggttttaatgatgcaactgatgttgttgttgaagatattttacctgattctttagaatttattagtgcaaatggtgattatgaagagggtatttggtatgttggtgatttaggtgttggtaattcaaaaacattagatatagttacaagaatcattaaaacaggagatattactaatgtagccgctgtatattgtagtgaagacgatcccgatttgtcaaacaatgaagctgaggatactgttcatgttgggcctgcagctgatttgtcaattacaaaaacagtttctaaacatgcatatgaaattggacaaatacttacttacaatattaatgtaaataacaatggtcctgatgatgcggtaaatgttaaagttagtgaagaattccctaaatctttacatctgaaatcatttaagatgtcagctggtgaatttaatgcttacagtaatgtttggtcaatagataaacttgcagctggtggtgaggaaaaattacgcatggaatttgaagcgttgtctgaaggaatctttaaaaatactgcttctgttgtaagtgatacttttgataatgatttgaataataatcatgattcggctttagttaaaattattgctaatacttcagataaaattataaatgatttaactgataattttactaaaagtaatgttgttaaagctgaaaatatcaaacagccagtttattgtcttgaaaaacattctactgcaaatttcatagaattactatctatttctgtaattgtttctatgatttttggaggaggtgatatttttagaaaaaggtaa

SEQ ID NO: 6742 - DNA, 1149 bp, Methanobrevibacter gottschalkii
  source 1..1149: mol_type = genomic DNA
atgaaaaaacaaatagcgataatattaatgattctgttaatagctgcaccaattgtgcaaggagtgtgtgcatcaaaaactgcattcattacatcagataatttaatagatgaaaaaactgatacaaatatgctaaattcaattaagaattatgttgaagagataagtaacggtgaaattcaagtaatcgtcgataacgaagctccaggacctggagaaggttggcgatcaataagtgtaacaagtgatgtgagtattgacatagcagcatcagatgctggaaactacatacaacttgcatctgcagcaactgctggaaacaaacaaattatctttataaacactggtgattttgacttagataaccattctaattttttgagaagagcatgggatgacaattattcaaatgaatcacttgcaggagtgcgtgaccccggaacacttcttaacaatgcaggaatacaatatatccaacttgctaaagactatccggacaatattgataataatggtcttttagataaatatgatgataaaatgaaccatgaaatagctgagaaaatagtcaatattgttaataactatgacaacagttcaacaaaagaattaagtgataatttaatagtaaaaaataaaatatccccaaaaggaatggctgatgcaagtaaaatgcttgttgaaagtggagataaagaaatgaatggaccatatggttcctattcaacaccacaattactttatcagaccagtacttatctcaatggtgatggaattgacattcctaaagactataaaaaaccagacaacccattaggaatttcatttttaaccaaagacacttacagtgtttatgattatttcaaaatggcaggaatagttaaaaattatatggatgcgaatggaaaagcaccagattcgattgaatatgaaggagcccatataagctattatgatttaacatataattttgctaaaatagttcaaaatcatactgatgcaaatcatatgggctttgaaagtgagtatcactttgataaagtaaacgattcaatattattacatatattaccatttgtattaatatttgttgtgttattcctagcatatatgcttatgaaaagaattaaaagatttaaaagaaaatag

SEQ ID NO: 6743 - DNA, 684 bp, Methanobrevibacter gottschalkii
  source 1..684: mol_type = genomic DNA
atgaaaagatatatatcagaattaataggaacaatggttcttgtattattcggttgtggaagtgctgctattgcaggttccatgttaggtacagttggtattgcattagcatttggtttatcaattgttgctatggcctacgttattggagacatctcaggatgtcacatcaaccctgctgtttcaattggtatgtggattgatggaagattagaaacaaaagatttagttatgtacatcgtattccaatgtattggtgcaattattggaattggtcttttagctattattattaactctgcaccagttcttggaggttatgaagccacaggacttggtcaaaatggatttggatctgcatccagtgtaggtttaaatgtttttggagcaataattgttgagataattctgacctttgtatttgtatttacagttcttggagttactaaaaaagcagaaaatggtgcggttgcaggcatagttattggtttaactcttgcatttgtacatattatgggaattccattgactggaacttctgttaacccagcacgtagtatagcacctgcactattcctcggtggacaagcactcgaacaagtttgggtatttattttagcaccgattattggtgcaattattgcaggtaccttatttaaaggattaacctcagaggatgaataa

SEQ ID NO: 6744 - DNA, 693 bp, Methanobrevibacter gottschalkii
  source 1..693: mol_type = genomic DNA
atgaattttcaagaacaaatttacattagaaaatcttgccgtaaatatatggatgatgctattgacatggatttgattcatgattttatggaatcggttaagctattaaatagcgaaattaattataattatgaaattctaacccatgaggaagttaatgttcgtaaccgttggtctgctccttactatttagctatttactccgagaaaaaagaaaattatttaacaaatataggttttattttccaacaactttgcctatatcttcaaagcataagtattggaacttgttgggttggaatggatgttccaaagaataaatcttctgattttgtaattgcaatagcttttggtaagtctgatgagatgacaagggatttatctaaattcagaagaaaagaattatctaaaatctgtgattatgaagatgaaaaactaattcctgcacagcttgctccatcagctattaactcacagccatggtattttaaacatacaaatgagggttttgatgtttatcaggtaaaacagaatatattgaaacgtcaagttcttaaaaaatggaatccaattgatatgggaattgctttagcccatatgtatgtgtctaatgaaaaaagatttgaatttgaaattaaagctaattttgatagtattgaaggtcatacttatattggaagtattaaaatttaa

SEQ ID NO: 6745 - DNA, 678 bp, Methanobrevibacter gottschalkii
  source 1..678: mol_type = genomic DNA
atgaaaattgtaatcgcaattggaggatcaattttacttaaagaatatgattgtaaaaaatttcaggaatatagtgctattttaaaagatttatctactgaacatgaattattcgttgtagtaggtggtggaaaacctgctagagaatatattaatgtagttcgtgatttaggtgccggtgaagcacaatgtgatgacattggaattgaagtaacaagaatcaatgctaaattaatgctttcagcccttggtgatgcggcatatcaaagagtacctcacaatttccaagaagctttagaattctcagctactggaaaaataatagtaatgggaggaactgaacctgcacacagtactgatgcagtatctgcaattttagcagaatacattcaagcagataaactcatcaacttaacttctgttgatggaatgtatacaaaagatcccaataaatttgatgatgcagagcttgtttctgaaattaccgcaactgaattgcttaactttttaagtgataaagatgttaaagctggaacttatgaattcttcgacactactgctgttcagatgattaaaagatctgatttggaaactgttattacaaacggttttaaaccagaaaacttaattaaagcagtcaacggagaaactgtaggaacaaaaattattaacgaatag

SEQ ID NO: 6746 - DNA, 789 bp, Methanobrevibacter gottschalkii
  source 1..789: mol_type = genomic DNA
gtggataatcttgttgatattggcctgaatttaatgcattcttcatttaaaaaagacagagttgaacttattgaggaagcaaaaaaagtaggtgttaaccaattcattatcacaggaactaatgttcattcaagccagatggcagctgaatatgcttcaaaataccccggaactttgttttcaacttcaggtgtccatccacatgatgctaaaacatgcaatggacacacaatgttcgaacttgaaaaaatagctaaaaatgattgtgttgtggctattggagaatgcggtcttgattataacagaaacttctccccacaagatttgcaaagaaaatggtttgaagctcaaattgaagtggctgaaaggataaatatgccattattcttacatgaaagagaagcacatgaagatttatacaacatattaaaaagacatgataatgttattgaaaaatcagtagtgcattgttttactggaacaaaacaagaagcacaaaattatattgatttaggttgttttattggtgttaccggatggatttgcgatatgaaaagaggaagaaatcttcaagaagcagtaagtgcaattcctcctgaaaaattaatgattgaaacagatgcaccctttttaataccaaaaaatttcgaatttaaacctaaaaaaaatagaaatgaaccaaaatatttacctcatatcctcgaaacaattgcactttgcatgggaatagatgctgaagagcttggagagcaagttagcagaaatactaaagaattttttaaaatataa

SEQ ID NO: 6747 - DNA, 192 bp, Methanobrevibacter gottschalkii
  source 1..192: mol_type = genomic DNA
atggcagtagaacctcacaaacattgtccgatatgtggaactccaattccattaaatgaacttgtatgctcaccagattgtcaaaaagtctgggatgcaagattagcacagactaaaagaactagaattatattgtacataataattgcaatattcttaataatatgggcaattatgacctttatgaaatag

SEQ ID NO: 6748 - DNA, 324 bp, Methanobrevibacter gottschalkii
  source 1..324: mol_type = genomic DNA
atgattttaacctcttcaaatacactcgttaataaacaaatagttgaatataaaggattagttactggtgaatcactcatcggatcaaatatctataaagacttattctcgggtgttcgtgatgttgtaggtggaagaacatccaaatatgaagaagaattaaaaaaagcaagagatattgcttttaaaagtatggaagagaaagctgaaaatttaggtgcaaatgctataattggacttaaaatatcttacgataatctcggcggcactatgggaaatacaattcttgtaactgcttatggtactgctgtgaaatgtgaataa

SEQ ID NO: 6749 - DNA, 849 bp, Methanobrevibacter gottschalkii
  source 1..849: mol_type = genomic DNA
atgaaatttaaagtaccggaaaaacctgaaaatttacaagaaagactcatatgcataattttcggcacttttgttggaactgcagtctatgtattattcttatacttgaatatagcaattttaggctggaatttaggattgatttttgcaccattgcttgcaggatatgctgaaacaatgcttgcagaaagaatgctgagtagtgataccggtgctataagcgcatttattctttttgcaggtacaacattttatagttttattctagtaaatcctacacttggtgcaaattttatcacattcggagcaaccgcagtaatcttacaggcagcattccctacattaatcaattacatattacttgttattataattggagctatcttttacattttaagatttgttaaaaaaacacttacaagaatttatcttaaaataaaacatataatatacaaatacattcttaaaaagccatttgaagtcaaacctaaagctattgaatattatgatgaactcagaaataatcaagaaattaatagccttggagttatttttatgaccagtactgatgttcccgataaacatgttattaatttaggtcagtttcagtctacagtgattttagaaaaagaacctgacctattggatttaaatcccaaagaaagggaaaatcacacattgacaatattaaaatcaggaaaagacaaatgtttaattggtttaactgataaaataaaagctgctggtggtaatggcattattgatttagatattcaatacattaaaattggatttggtggtgaaagttaccagataagtgcaatgggaatgggagtatatataaattaa

SEQ ID NO: 6750 - DNA, 204 bp, Methanobrevibacter gottschalkii
  source 1..204: mol_type = genomic DNA
atggataaaaaaatgattgtatcaataattggatatattgtagcattgttaatccctattgttggattagtatatggagcaatattgtttttctttaaaaaagaagaaccaacatatcgaaaacatggcagattgattatttatttctcaatcgtgatttttgttgcaactttaatagccaaattattaataggcggattctag

SEQ ID NO: 6751 - DNA, 360 bp, Methanobrevibacter gottschalkii
  source 1..360: mol_type = genomic DNA
atgaaggaaaatagaaaaattggagaaaattttgatgttaatgatgcagaagatatttttgataagttaaggaatgtaaaagggaaaacaaagcctaaaggtgaaagtaaatttaagaatatatcttatcttatgaatgaagctcagtacttggaaaaaaatggccaacttggtgaagctgttgagttatacaaacagattatttttattctaccagattctataaaagcttatgaggcaatagccaatatttatcaaaagcaaggagacattgattctgaaaaagagattttaaaaaaagctattagtaactgtaaggaaaatgatgagtttaaaaaaagattaaatgaaataacttga

SEQ ID NO: 6752 - DNA, 810 bp, Methanobrevibacter gottschalkii
  source 1..810: mol_type = genomic DNA
atgtttacaatcgaatattttgtaggtttgattttaattggtatatttgcaggtttcgcatcaggacttctaggtgttggtggaggatttttaataactcctcttcaatttttcttattaaagtatattggtgttgcaccagatcttgctatactaatatcttttggaacaagccttgcaatcattattccaacatcacttagtggtgcttatagacacacaaaatcaatggataatattttaaaaccaggaattcgtttaggtatttttggagtaattggtggttttgtagggggtttcgttgcatcagcacttccttcaagaacattagaaattatatttggtcttttattattattcatagcttttaacaatattgttaatattaataaagaaagagaaaaagctagaattccatttaattggacaagtattggactcattggtttgcttgttggattttcatctggacttttaggagtcggtggaggaatatttttaatagctattttaacagcacttcttggattttcaatgattgaagcaattggaacctcttcaatatttattagtctaacagcaatcgggggatttttatcttacatgattactggttggggagtaagcacatttccatattcaataggttatgtaaatatcattaacttagttttaattgcatgtttttctgtacctatggcgtcatttggtgcaaaaatggcacatagggttcctcaaaagaagttaaaaataatattctcaatagtaattttgtacatggcattgaaaatgttaggagtattaccttaa

SEQ ID NO: 6753 - DNA, 1059 bp, Methanobrevibacter gottschalkii
  source 1..1059: mol_type = genomic DNA
atgaaagttaataaaactatcttagttggatttttattcttattgattggagcattcatatttgtatctgacctcttaaatccccttataagaccggtaactcatttatttttaatgggatcatcgaaaggaaaagacattatattttttggtcttttaggattgcttctaattttatcacaagtaatacccagaaaaatcgatgctacccgatatttgaaaatatcaattgttatcggatttgttttacttgtatttggaaatcttctggaagttgtatttagactacaaatgggaatcaaacttaacactgtgttttgttctatgtccagcacgatgagttctacaagtattttacatactcatttgttaaagtccattttaggtgaagttttaactaaaataattggaccattcattcaaagcaacatcaatacaggtgttggactatatgcatatgtcccagatattagttttttagtggttttaatcattccaattttatttatcacacttattttagcaaatcaaaaaagaccatggtttacaaactttttaattgcttttttttcaagttgtcttcttatcggatcatttgatggaggtctttgggccacaccctcccttgtaggtcttttaggattatggattgtttatagaaatggatattacttaaacttacatttaggaaaaatcataaaagataaaaaattattaaaggctaatgaaaatatccaaccatcatatagaaatattggtttaagtgaagcaaaatatttattcaatagatttttaccaatcctaataattcttattgttatagctttaagatttactgtagcttttgctggtgcagaacccgattattatacagtagaaatagtcaacatgacagataatgttgattttggagacattccaatagaaaaaataagcaatgaaacatatcatgtagattccaattataatgaaatggaattaattaatgatttaaaagtaccattaaataattcctgcaagtactacacagtttcttggaatgcatattcctatttatag

SEQ ID NO: 6754 - DNA, 1032 bp, Methanobrevibacter gottschalkii
  source 1..1032: mol_type = genomic DNA
atgttaaattcaatttttaaatattcttatggtgtaatagtttgtttaatcatcgctattccatccttaattttggggaatttatttccagttattggcggtccaattattgcgattatcttaggaatgttgattgcttttgcatggcatgaaaaagaaagttttgatgaaggaataagttttacatctaaatatgtcttacaaacagcagttgttcttttaggatttggattaaacttgaatataattttaaaaactggaattcaatctcttccaattattattgcaacaatttccgtcgctttaattgttgcatttattatgcaaaaaattctaaatatcgaggaaaaatcagcaatactaatcggtgttggttcatcgatttgcgggggttcagctattgctgcaacagcacctgtaattaatgcagatgaagaacaagttgcacagtcaatttctgtaatattcttcttcaatgttcttgctgcaattattttcccatttttaggaaaaataattggtttttcaacagttgatgggggaccatttggtctatttgcaggaactgcaattaatgacacttcatctgtaactgcagccgctgctacctgggataatatgtggggacttggaagtcaaactcttgataaagcaagtactgttaaattaacacgtacattagcaattattccaatcactttagcattatcagttttcacttcaaaaaaatcagagtatgttggtggggaattttcacttaaaaaagcatttccaatgtttattttatattttgtaattgcttccgttatcacgactcttgcagtaagcttaggtgtggatgcaaatgtatttttaccatttaaagaattaagtaaattctttatcatattggctatggctgctattggattacatactgatattgtaaaattagttaaatccggaacaaaaccaataattcttggagctacctgttggattgctattattattgtaagtatttcaattcagtttactttagggataatttaa

SEQ ID NO: 6755 - DNA, 888 bp, Methanobrevibacter gottschalkii
  source 1..888: mol_type = genomic DNA
atgaaaaaaatctattttattttacccatcctagccggaataatgtttggatccggtggagtatttgttcgaacattaatggtaaatggaattgattcaacaacgcttctttttttaaggttttcaatagcaataatccccataatgatagcaattttagtaactgataaaagtttgttaaaaatagatttaatagacatttcattatttttagtttgtggaatatgtattgtaggacttaatttgtgctacaacgaatcaatgggaaatattcccctttcattagctgcagttttattatcacttgcaccaatttatgtcattataattgcttattttacatttaaagaaaaaattacaagaaaaaaaataatttgtatggcattagccatatttggttgtattctaatgactggtgttttggaaactagtttaagcaacattccattttacggaatcactgcaggtattggtgcgggattattctgggcgatttatttaatggcttctaaaaaatcaattgaaaatggaaaacacacatttacaatacttatttattcaattacaattatttcaatgggattgcttccatttacaaactttggacaaatcacaaatttcatttcaattaatcccattttagttataatattcttaataatgcactcaacattttcatttgcccttccatatattttctcaactgtgagtttagagcatatagattcaggaatagcttcaatattattatctggagcagaaccgtttgcagcacttatatttggattaatattctactcagaaattccaacatttctgatgttttgcggatttatattgactatcattgcaatgatggcgttaagtagaaaagaagaaatcaaataa

SEQ ID NO: 6756 - DNA, 1896 bp, Methanobrevibacter gottschalkii
  source 1..1896: mol_type = genomic DNA
atgattttaagcattattatacctacctacaatgaagaaaaatacctcccaattctcctagagagcattaaaaaacaaagctttgaggattatgaaattatagtagctgatgcaaattcaactgacaatacccgaaacatagcacaagaatatggttgtataatagtagatggaggcttacctgcaataggtagaaataatggtgctaatgttgcaaaaggagatattttactttttcttgactcagatttaaaattaacagatgagtatctaagagatgttgtatatgaatttaaaatggagagacttggaatagcaattacccgcatggaaccactttcaaacaaagttgaagataaactattccatgattttgcaaatttcttcatggttagtgttgaaaacattaaacctcatggtgcaggatgctatggaataatctccaaaagaaaattgcacgaagagtgtaatggatttgatgaatccctaacttttggagaagatactgattatattgaacgattagcaaaaaaagaacgttttagagtattaagaaaagctaaaattggtgtttcaacaaggcgacttgaagaagaaggaattacaacattaatcagacagtacggtaaaagcactgtaaatgactttttaggaaaaagaactgatgctaatgagttaaattataaatttgaccatggacatgatagaattgctgaatcaaaaatgtcaggaattgaaaaaagtgcagaaaaaattaacgtaattaaagagacttatgatgaatcaaaagaaaaagtcaacaaagcaagatcccttctaaacactaaaactgaaagagataaaaaaatagtcttttactgtgtttgtggcgaaggaatgggtcatgcaataagaactggagtaatcgttgataaaattaaagatgaatatgatgtttacttattttcaagtgacagagcttacgaatatttaaaatccaaattcaataatgtttataaaattggaggatttaacacagtatacattaacaataaagtaaataatttaaaaaccctttcaaatgctctgaaaagaaatcccggcaatataaaaacaggatatgaaactttatataaaaaagcaagagaacttagaccagatgttattgtaacagattttgaaatttatgcaacaatggtttctaaacttctaaatattccattaattagtttagataacatccatatgattactcaaactaaaatcgattatccaaaagacaaatatgttgaaatggttaaagcaaaaggagtaattaaaacatatgttgttaaaccaaaagtacatatccttacaagctttttttatcctaaattaaaacctaaaaagaatgctataatctaccctccaattatacgtgaagatattttaaatttaaagcctagtaaaggtgaccatgtaattgtttatcaaacaagtaaagaaagtggaaaacttgttcgtaagttaaaatctcttaataatgaaaagttcattgtttatggatttaataaaaatgaaatagatggcaatttaacttataaagagtttaatgaagatgttttctacgatgatttggcatcatctaaagcggttatttgtaatggaggatttacattcatatcagaagcaatacatcttaaaaaaccaatttattctgttcccgctattggaaacttcgaacaaacattaaatggatattatgttcaaaaattaggttacggagaataccatgaagttatgaatgcttctaaagttaaaaaattcttatcaagactttcaaaatatcaaaaaagacttgataaagttaaaaaaacaaacaatgatggaattgtgcgtgaattaaaatatagaattgaaaaatattcaaaacagtaa

SEQ ID NO: 6757 - DNA, 1455 bp, Methanobrevibacter gottschalkii
  source 1..1455: mol_type = genomic DNA
ttgttgagcaaaaaattaatactgattacagtactattaggtttattggcaatttcaactgtaagtgctgctgacaatactgaaagtgacattattggagccgatgggttaaacagcacaagcaatataccaatggatgctccaagaacatttactcagttaaatgaagcaataactccatacaccagtattgatttagagcatgattatagatatgataatgagacagattccgaatttgctaatggagttcccattaccaagaatataactattgatggtaaaggtcatacacttgatggaaattatcttgcccgtatttttattataaaagaagattgtacggcagtttttaagaacattaacttcattaacggtaaggcaagcaccaatggcggagcaatttatggagtttgtaatgcagaaaactgcaatttccttaataatactgcagtaaaagatggtggagcaatacatctaagtaacgccaataactgtaattttattaacaattacgtattaaatggtagaggtggagcaatgtataaaggttatgcaacaaactgcatatttactgacaactccgcagtgactggcggagcactctttgaaaactctgcaacaaaatgtaagttcaccaataattttgcaaaagagaatggtggagcattatatggaggatttgctgttcaatgtaattttaataagaattccgcaaagaataatggtggagcactttataaaggttcagcccactactgtaatttcagtgataattatgcagtaaatcatggcggaggaatgtatggaggtgccggtgaatactgcttctttaaaaacaatgcagcaaaatcaggacatgatgcatacagaagctccctcaaaaaaactaagacaactatttatataaagcctacaactactgcccattatggtgattatgtagttataaccttaaaaaatattaaaaacaaagttgtgagtggtgttaaggtaagtgtttttattaatggtaaaaaatatgctacaaaaattaccaacaaatatggtcaaattaaaattgatacacgaaacggttttgttattaaaaaatacactattaagtcaaagtttgcagaagattccaattactacgcatcatcaaaaacagttaaaattactattaaaaagtcaacaccaaaaataactgcaaattcaaaaacattcaaaaaatcaactaaaatcaaaaaatacagcataaccttaaaaaccaaacaaggaaaaattatgaaaaataaaaaaattacattaaatgtcaatcatagatattattatgcaacaaccaattataaaggaattgcaacatttaaaattaccaaactattatataaaggtaaatttactgctacaactggatatgctggtagtaaatattacaatgcattaactaaaaaatccaccattattgtccgatag

SEQ ID NO: 6758 - DNA, 297 bp, Methanobrevibacter gottschalkii
  source 1..297: mol_type = genomic DNA
atgattattgttcaagctaaagctattcctaaagatgaaacaagtaaaaatagaataattgaatttgctcaagatttgattaaaaaatcgaaagaagaatctggtaatattgattataatttatttgttaatacagatgataatacattattatttgttgaacaatgggattctgtagaaattctcaaaaatcacttgaaaacagaacattttataaaatttggtgaaaacatatcagatttagttgtaagtgatttagaaattaatgtatttgatgcaaattcaatatctttataa

SEQ ID NO: 6759 - DNA, 1077 bp, Methanobrevibacter gottschalkii
  source 1..1077: mol_type = genomic DNA
atggcaactttcaaaggttttgcaatgaaaaaattaaatgaaactggttgggttgaaaaagaagttcctgaatgtgggccactcgatgctattattaaacctacatgtgtatctccatgcacttcagatattcatactgtatgggaaggagcaattggagatcgtaaggacatgattttaggtcatgaagcagtaggtgaggtagttgaagttggtaaattggtacaaaactttaaaccgggtgataaagtaattgtgccggcaatcactccagattgggatgatgaagctgcacaaagaggtttcccttcacaaaccatggaaccattaggtggatggaaattctcaaactttaaagatggtgtttttggtgaaagattccatgtaaatttagcagatgcaaacttagcacatatgccagatgggttgtcagatgaaggagcatgcatgttagtggacatgtggtctactggtatgatgggttctgaaaatgctgatattccgttaggtggaagtgtacttgtcataggaattggagctgtaggactttcagctattgcgggtgcaaagttattaggtgctggaagactatttgcagcaggaacaagaccaatttctgtaaaagtagcaaaaaagtatggtgcaactgatataattaattataaggaagggccaattgatgaacaagtaatggaattaaccgatggtgcaggagtcgattctgtagttattgccggaggtaatcttgaaaacacatggaaagaagcaatttcaagtgcaaaagcaggaggaactgtttctaatgtaaattatttgagtggagcagacaatgttttaatacctcgtgttgaatggggttgtggtatgtctaacataaacattaaaaatggattatgtcctggtggtcgtgttagaatggaaagactagccgatcttgctttatgtggtagacaagacccagaacttttggtcactcacaaatttgaaggtttggataaaattgaagacgcactttatttaatgaaagaaaaaccaaaagatttaatcaagcctgttgtaatgcttgatttggattaa

SEQ ID NO: 6760 - DNA, 261 bp, Methanobrevibacter gottschalkii
  source 1..261: mol_type = genomic DNA
atggatgacgaaacattaaaaaaatttgcatatgtaaatatcagttcttaccgtgtgaaaacaatgaaagctcttaaagatgatgtaaaaacaccaaccaatattgcaaaagaagcaggaatacttccaaatcatatttcaaaagtccttcgtgaattaaaagaaagtggaatagctgaatgtattaatgaagaagcaagaaaaggacgtttatacaggttaacagatgttggagaagaaatagttgataaattagactaa

SEQ ID NO: 6761 - DNA, 936 bp, Methanobrevibacter gottschalkii
  source 1..936: mol_type = genomic DNA
atggctaaagcacaggaagaagaacttaaagaaccaacagtatgtcctgaatgcggatcaactgaattaataggggactatgaaagagcagaagttgtatgttctcgttgcggattagttattgatgaaaatcttgtggatatgggtcctgaatggagggcatttgaccatgaacaaagagacaaacgtacaagagtgggtgctccaattacatacaccattcacgataaaggtttaagtaccatgattgattggagaaataaagacatctatggtcgtgatattcctgcaagaaacagggcacaatggtacagattaagaaaatggcaaaggaaaattagaatttccggagcaaccgaaagaaacttagcatttgcattaagtgaacttgatcgtgattcctcaagattggggcttccaagaagtgtaagggaagctgcaagtgtagtgtacagaagtgcagtagataacaaattaatcagaggaagaagtattgaaggagtagtagcagcatcattatacgctgcatgtagacgttgtaatgttccacgtactttagatgaaattgccgaagtatccagagtaactaaaaaagaagtgggccgtacatacagattcttgactcgtgaattaaacattaaattaccaccaacttctccagttgattatgttcctagattcgcatcagaacttggactttctggtgaagcacagtccaaagctattgaaattattgaaaaagcaatggaaaaaggattaacttcaggaagagggccgacaggtgtagcggctgcagcattatacattgcatctgttttgcttggagatagaaaaacccaaagagatgtagctgaaatcgccggtgttactgaagtaactatcagaaacaggtataaagaactcacagaacagttagaaatgggtgttactttataa

SEQ ID NO: 6762 - DNA, 303 bp, Methanobrevibacter gottschalkii
  source 1..303: mol_type = genomic DNA
atgaaattattaggcaaaagtttgcatatagcaaattcaggaaaattaattgctcgaacaaccaagacaccttcaccgggagctatagtgtttgatagtaataagaaaaaaattggtaaagtaggctatgtttttggacctactgcgaatccctatgtatcaattagattatttagacaagcaaatagggaagaaattgagagaaactgtggtgaaaaattatttgtatcaaaaccaaaatccaaaaagactagaaaaaggaggatgagatcacgccaaaagaaaccacaaaacaaaaaatag

SEQ ID NO: 6763 - DNA, 744 bp, Methanobrevibacter gottschalkii
  source 1..744: mol_type = genomic DNA
atgtcaattagtccaaaggatttattaaataaaaataaaaatttgaacaaacgattagatattagtgaaatttgtttagataatgttacaattaatgatttaaaatttaatggggataactatgatgaatatattaatctccattctcttttagaaaatatatcgacatgccaggtttcagatgcatttaacgggatttcaagacaatccggtgtaattcaaaagataaaaccaattaataatcgaagagtattcggcagaatatttacagcagaaactactagtggggactggggaacttctgcaatggcaattgatgaggctgatgagggagacatattattctttaaagttgacagtgaggagatggcaatttggggtgagcttgcttcaacttgtgctcgtgataatggaattaaagctaccgtaatttacggttcagcacgtgatttggatgcattgttgtatatggattatccagtatttgcatcaaattactgtcctaatgcagggttggctctaggtttaggtagcttaaacgaatcattggatatagaaggatttaaagttaatcctggagattttttaattggagatgaatgtggtattgttgtaattcctcaagaattgtttgtaaaaacaatgtttgcttctttagatattaaaattaaagaatccctcatcattgataaaattgcattgggaaatacattatcgcagattgtgggtcttggaaaaaaatag

SEQ ID NO: 6764 - DNA, 1260 bp, Methanobrevibacter gottschalkii
  source 1..1260: mol_type = genomic DNA
atgggaaaaggtgaagaattaactacaacaaaatatttaattcatgctcaaattactgctaatggtattgtagaaaaacctgatgttgttggtgctgtatttgggcaaactgaaggattactcagtaatgatttggatttaagagaattacaaagaactgggagaatcggaagaattcaagttaacattcattccaatagtggaagagcaaaaggagaaattgtaattccatcaagtttggacagagttgaaactgccatccttgccgcatctcttgaaactattaatcgtgtaggtccttgtgaagctgaaattcaaaccaccaaagttgaagatgtaagggcggttaaaagagaacaagttgtcaaccgtgctaaagaaatttacaaaaacatggttgaaagcgttggtcctaccagcattaaaatgattgaagaagtaagagaggcaatgagagttcatgaaatctccgaatatggagaagatcgattacctgccggccctgccatccactcatctgatgcgattatagtagtggaaggacgtagtgatgttttaaacttactcaaatacggtattaaaaacactgtcgctgttgaaggtgtaagtgtaccccattccattggtgagttaagtaaaaaaagaaccacaactgcattcgtcgatggagatagaggtggagaactcatcttaaaagaacttttacaaattggtgatgttgactttattacacgtgctccaaaaggaaaagaagttgaagatttggaaaaagacgaagttttagtcgcacttagggacaaagttcctacagcacaattcctagctaccaccaatatcttaaatgaaaatcctaaaaaagaacacatcaaaaatcgtaataataacagaaacaacactaaatacgataaaaaacaaaaatacaataataaccgccgtgaagaacagcatgttgtagatgaaccggttattgaagatgatgaagtaagtctaatgaaagacatgcttagagaattcgaaggaaccggtgttggagcaatattggatgaagcattaaatatgactaaagaagttgaagtggaaaacatctatgaagaaattaaaaacatagaaggaactgctgatgctgtgatatttgacggagttatcagccaaagattagttgatgcagcctcagaaaaaggcattaaaaaattagtagcatttaaatccgtcaatattgttaaaaaaccgcataatgttaaaattataactattaattaa

SEQ ID NO: 6765 - DNA, 612 bp, Methanobrevibacter gottschalkii
  source 1..612: mol_type = genomic DNA
atgaatattaatattgaaaactactacagtactagaaaaaatgtttttgaaagaattcaagatgctggtactgcaaccaaagtactcatgtcattaatgatggcatgttttactggtataatggcacaaataattattccattaccatggactccagttccagttactgctcaaacatttgcagtattatgttctggtttattattaggtaaaaaatatggatgtctaagccaaattttatatgttgttttaggtgtagcatttattccatggtttggaggaatgaccggtggatttgaaacattactcggatcaactggcggattccttattggatttattattgcatcctgctttatcggaacaataactgaaaaatatgctgatgctcgtaatttcaaaaaaatggcggctgtaattggtattgcaaatttctcattaatttacattccaggacttttaggccttgcattatggttaaacttaactcaaggcacaagcgttggtattgttgatcttttaatgatgggacttgtaccatttatcgccggagatattgtaaaaatattaggtgcggcatccgtgtccaaagtatttttaccaaaagaataa

SEQ ID NO: 6766 - DNA, 399 bp, Methanobrevibacter gottschalkii
  source 1..399: mol_type = genomic DNA
atgaaacttattttaagaggacatcatttattgtgtcttaaaggttttcaaggctatggatacgatgaaaaatttacaaaaaacatgactgatattaattcaaagcgaaaatcaccagagacagttattaaattaacaaactctcctgacgatatttgtaaagcatgtcccaatttaagaaacaatatatgtgagaatgaagctcaaaatgataaaattgttttaatggacgatcaagtattggaaaaattagattcctcaaaagaatataattcagttgagctatttaaaagaattgaacatatttttaatacaaaagagagtgtttgtgaaatttgctttaactgcatatggcatgagaaatgtttattttatcaaaagattggaaaacgaatttag

SEQ ID NO: 6767 - DNA, 810 bp, Methanobrevibacter gottschalkii
  source 1..810: mol_type = genomic DNA
atgaaagaaaaagtaaatctgtctggtgttagtgaaacaatgctagttccattatattcgagagcattggaaagcaatagaaaaaatcctgcattctatgataaaactgcaataggaattgttaaaaatcttgattacaattttaaagaacgatttaaagaatctaaaaataaaatgaacttttggggatgtgcggcaagaactattatattggatgatgaggtttctaaatatattaaaaataatccggaatgttctgttgttaatttagcatgcggtttggatgatagatttagtagggtcgataacggtaaaataaattggtataatattgattttgaaaatataatttcgttaagggataagctcatagataaaaaagacagagttacagatattcctacttcagcacttgatttttgttggattgataaaattgaaaataaagataatgtactgattatagctgaaggttttttaatgtatttatctgaagaagatgtaaaaaatttgttttttaagatttctgaaagttttggaaaagttgaactgcttttagaattaatgactcattggatggtaaaaaaccaaaagaaacatgacactgtaaaacagactggagctgtatttagatggggtataaatgaaaccgaagactttgaaatgatttgtccaatgtttaaaatgactggggattataatttaacaaatgtgatgaaaagatattctccgatttttattacaattgcatctccatttttaaaacctagaaataaccggattggaaaatttgaaaaattaattctataa

SEQ ID NO: 6768 - DNA, 225 bp, Methanobrevibacter gottschalkii
  source 1..225: mol_type = genomic DNA
atgttcaattcaaagtttttaatattaattattggtgttttaataattggtttggcattatcctgttatttctattcgtcagataatttccatgagtctgattctagtttaaatgaaaggcatgatgatgtggtttatctctggatgttggatgataacggaaagttgaaactggttccgacaactgaaacttattctgaagggtctgcaagtgatccagactaa

SEQ ID NO: 6769 - DNA, 2289 bp, Methanobrevibacter gottschalkii
  source 1..2289: mol_type = genomic DNA
ttggaaaataaaatcaacgcaggatacggttccacaataacattagaaaatgattatgaatatgaggaatctggatatagttctggaatagaaattactcaggatataactattgatgggaaaggtcatacaatcgacgccaaaggacaaacaagaattttcgatgtggaagcaggcaaggtaacattgaaaaatattacttttaaaaatggaatgcaaaacttcttttttggtggtggagccattctctggaagtcacttgatggaatcattactaattgtacttttataaataactatgctccgtctggtggagcaattcgcttggaagcctgggacaatacaatatctgattgtactttcataagaaacactgccaatcaaggaggagctataaatttgaatacaactaattacgcttcaatttccaattgtgtttttgtgaataatgatatttactcagtgcaaggtgatggatgtaaaataaacaacaatattttcatgagttgttcaattggttttgactttactcgaaattataatattgataataattggtttgggaataatgcaagtaattatacttataaaccaaatgagttttgtaataattggttgtttttaaatgcaacaacagatcccaacacagtttcagtttcaaacactgcagacattatctttaaattatatgcctataattcaacttcaggaaacatctctaaatatgataatgcgccatttaaaaatcttaatttaacaatcactgcaacaaatggtaatattgataagaatattgctaaattaggagaaactatcaaatatactgcttccagtgttggaactggcaatgtatctgccaaagtggaaaatgtagaatatacaattggattagacatcattccaatagaaactaagcttatacttaattcgactgatacaattattgatagcatcagtactgttggcatcaatgtaactgatattaataataatcctttaagtggtgttgttaaattaacaatcaaagataataaaggtaatgaatacaacactactgtaacagtgaaaactggcattactacttacatatatcctgcagataaaacaaatatcagtaaaattgtaaatataactggtttttatcttggaaatgatactttagggtatgttgattctccagtagcagaaaccaaatttagggttgataaacttaacgctactgtaaaccttgtagtaaacaattacacaatcagaaacttctcagtaaacattacagtaactggtaaaaatactgacagaatagtagaaaatggtagtttaataatctatgcaaatagagaaaaaattgacgagataaatattacagatggtaaagctgaaaatatattattaaatatcaccaaaataggaaattatgaattatcagttgcatatagtggaaataacgtattcaatgaaaacaatactttttcaaaaaatgtaactgctataaaaataagtactattatttcagcaaataacattatcactacttataacactgataaatacttagaaattactttattagatagtgaaaaaaatccattaaacaatgcaacattatctgttgacttgaatggggctaaaaaatacacaacttataaaaatggacaaataaaaatagcattaggtagtttagttccgaaaacatacactgcaaaagtaagttttgccggaaatgatatttatagtccctattctaccagctttaaggttgtagttgaaaaagcgacaccaacaataactgcaaaaacaaaaatctttaaatttgaggacaaaaccaaaaaatacactataactctcaagaacaacaaaggaattgtaatgaaaaacacaaaagttactttaactattaatggaaaaacctacactgcaacaacaaacactaacggtgtagcaactttcaaatttaataaattgaataaaaaaggaacatatactgcatctatcacatattcaggagataaatattacaacaaactaatcaaaaaagctaaaataaaaataaaagcacctgcctggaaaacagtagcaaaaggtagcaaaaataaggcaatagttaaaaaaattcaaaagactttgaaaaacaatggatactaccttaagtacaatggaagatacttgaaaatagatggaattttccaaaaatatactcaaattgccgtaaaacatttccaaaaagcaaataaacttaaaacaactggaaaagtagattacaaaactgctaaaaaactaaaaataatttaa

SEQ ID NO: 6770 - DNA, 147 bp, Methanobrevibacter gottschalkii
  source 1..147: mol_type = genomic DNA
atgaaagaaattaatattgtagaaataattaaaaataaagataaattagaaaaacacgaaggatatcttcccatacccattttacattggattgacataggtaaatgggagatatttttagaaaaacatgataagaagttatattag

SEQ ID NO: 6771 - DNA, 144 bp, Methanobrevibacter gottschalkii
  source 1..144: mol_type = genomic DNA
atgaaattattcaaaacggaaattacagttttaggaaatgaaaatacaaaaggattagcattaaatggtcgttgttctcatggtaaatttcaggacatgctcgagaacatgaattattacttggaaaaaatacataatatatag

SEQ ID NO: 6772 - DNA, 1185 bp, Methanobrevibacter gottschalkii
  source 1..1185: mol_type = genomic DNA
atggaaaaattgttacttattggaattgatacaagaagcatgattaacagtgcactccagcttgatttcgaactattttccaccagttatttttcaacttcagacacaccaaccattaaaaatcaaaaaattattttaaaggaaaagtatggtgaaagttgcggtgcttttgaaaatcagtttagtaacctcgacattttagaattttcaaaagattatcttgatgaagttgactatatcattcccatttccggtgtgtctccaagtgatttttctaaaagacacaaaaggaaaattttgggaacaactaatgtttgtgatattgaaaacaaatttaaatttttcaaaaagatcaaaaatgaattcttaactcccatgacttttaagttgtctgatgtagatgaagcaattgaaattgataagagttatccgaatagtcaatttattttgaaacctgtaaaaggaagtggtggatataatataaatctcttaaataatgtaagtgattttcaatttaatgatagcgaattcattttgcaagaatatgttacaggaatcaatgtaagttcatcaattttatcaactgcccatgctgcaaaaacaataatgaactcaagattacttacactgaatgattttggaaaacaagataatttcatatacgctggaaacatactgcccttaaccaatgaatcagtaatggcagaatttaatggaatagatgacattattaaagagatgaatgaaacttcagagaatttggcacttgaatttaatctcctcggttctaatggtgtcgattatatcattaatgaaaaaggactgtatgtaattgaacttaacccaagacttcaaggtacatttgaatgtgtggaaaaaacacttggaataaatatgcttgatgcacacattaaagcatgcagaggtgaacttgttgatattcccgaaccaaaatgttattcctataaaaaaattatctactcaccaacaagaatgaaatacgaaaaaataaatttggataacatttatgacctgccgcacataggatcaataactgaaaaatcagaaccattactcacaatcatagacagcgataaggattttaaaaaattatacgaaaaagtagaattagctagtgaactaattaataagaaagctaaattacaccaatcagatataaaataa

SEQ ID NO: 6773 - DNA, 234 bp, Methanobrevibacter gottschalkii
  source 1..234: mol_type = genomic DNA
ttgtttatttttaaaataagctattataatttatttactgtaataaatttttttactagaaattttttaaagaacggtgcaaacatgaaaagaaatccaattgaccaatttatgaaagatccggacaataaggctaaaatatttatctggatgacacgagcaatgattataactacatttatgattacaattggagttatattatttattttatatctgattggtgtaatttag

SEQ ID NO: 6774 - DNA, 684 bp, Methanobrevibacter gottschalkii
  source 1..684: mol_type = genomic DNA
atggcacaagatattatagatggaattaatccaactcgtatggaattgttatctcttaaaaacagaactaaacttgctatcaaagggcatggtttgctcaaggaaaaaagggatgctttaattaaagagttttttgatatcttggatcgtgtcaaaggtattcgtgaaaacgcagaacaaagtcttaaagaagcaaatgatgctttacttgaagctcaaattgcaatgggtgatttagctgtcagaaaagcagcattatctgttaaagaatctattgatgtggaaattacatcaagaagtgttatgggtgttgctgtgcctgtaaccaatgttaaaatggaggaaagatctattattgacagaggttatggattttctgataccactatccagttagacgaagctgctaagaaattcgaggaatcattaaagtatttaattgaacttggggaagtagaaaaaactattttcttacttgctgaagaaattgaagctactaaacgtagagtaaatgctttagaacatattatgattcctagattccaaaatactgaaaagtatattgatatgagactccaagaaatggaaagggaaaacttcgtaagattgaaaatgattagatcaactattgagaagaacgaaaaagctgctgctgaagcagctgctgcagaaaatgcagaataa

SEQ ID NO: 6775 - DNA, 1392 bp, Methanobrevibacter gottschalkii
  source 1..1392: mol_type = genomic DNA
atgaatacaaatattaaaactagagaatatactactgtatccgaagtctcaggtcctttaatggttgttgaaggagtagaaggcgttggttacaatgaaattgtagatattgaaacacctactggtgaaaaaagaagtggacaagttcttgaagtaactaaagatgttgctgttatccaagtatttgaaggaaccactgacttgaacactaaagatactaaaaccagatttactggtcaaaccgcaaaaattggcgtatccagagacatgatgggacgtatttttaacggtatcggtaaaccaattgacggtggacctgaaattattcctgatgaagaattagatattaatggggctcctatgaaccctgcttcccgtgaattccctgaagaatttattcaaactggtatctctaccattgacggaatgaacacattagtgagaggacaaaaacttcctatcttttcaggatctggtttacctcacaatgacttggctgtacaaatcgctagacaagctaaagtattaggtgctgatgatgaatttgcagtaatttttgcagctatgggtattactaacgaagaagcaaacttcttcatgagagacttcgaacgtactggagcattagaaaaattaacagtattcatgaacttagcagacgaccctgctattgaaagaatcttaactccaaaaatggctttaactactgctgaatactacgcatttaccttaggcatgcaagtgttagttatcttaactgatatgactaactactgcgaagctttaagggaaatttccgcagcaagagaagaagtacctggaagaagaggttatcctggttacatgtacacagaccttgcaggtatttatgaaagagcaggacgtatcgacggtaaagaaggttcaattactcaaatgcctatcttggtcatgcctcaagacgatattacccacccaattcctgatttaactggttatattactgaaggacaaattgtattaagtagggaactctcaagaaaaggtatttatcctcctgtagatgtgcttccttcactttcccgtttgatgagtggtggtattggtggagacaaaacaagagatgaccacagtggtgtatctgaccaactctattctgcatatgcagaaggtcgtgaattaagagatttagttgcggttgtaggggaagaagcacttactgaaagagatcaaaaattcttagaatttgctcaagcatttgaagaccaattcattacccaaagtaaagatgaagatagatctatcttcgaatctttggatcttggttggaatttactcaaaatcttacctaaatccgagctcaaaagggttaaagaagaattcattgaacaataccttcctaaagatgaataa

SEQ ID NO: 6776 - DNA, 1743 bp, Methanobrevibacter gottschalkii
  source 1..1743: mol_type = genomic DNA
atgattattgaaggaaatattattaagattgctgggcctgttattgtcgcagatggtatgagaggggctcagatgcttgagatggttagggtaggtaacgaaaagcttattggagagattattgagcttgaaggtgacactgctactatccaagtatatgaagaaacagcaggtatccaacctggtgaagtagttgaatgtactggtggagcattatccgtagaacttggtcctggtgtaatgagttccatttttgatggtattcaaagacctttaagaattatcagagaagcttctggtgatttcattgctagaggtattgatgtagattccattaataaagagaaaaaatgggaattcaaacctgttgctaaagtcggagatgtcttaaaagctggagatgtacttggtgaagtacaagaaacttctgcagtattgcacaaaatcatggttcctcctgcacttgaaggtgaagttactgaaattgcagctgaaggtgaatacaccattttagaggacattgctgaagttggtggacaaaaagtacaaatgctccaaaaatggcctgttaaaaaaagccgtccttatgtaagaaaattagatccagatgtacctttagtaactggtcaaagagcacaagatactttcttctctgtagctaaaggtggagcggcagctattcctggtcctttcggatccggtaaaactgttacacagcaacaattagctaaatgggcagatgcagatatcgttgtatacattggatgtggagaacgtggtaacgaaatgactgaagtacttactgaattcccattccttgacgaccctaaaactggtaacccattaatggacagaactgttcttattgcaaacacttcaaacatgccagtagcagctcgtgaagcatgtgtatacacaggtattactattgctgaatattaccgtgatcaaggttacgatgtagcgctcatggctgattcaacctccagatgggctgaagctatgagggagatttctggaagattagaagaaatgcctggggaagaaggttatccggcatacttagcatccagattagctcaattctacgaaagagcaggaagagtagaaactattggttccgaacctcatgtagcatctatttctgttgttggtgcagtatctcctcctggtggggacttatctgaacctgttactcaaaacacattacgtatctgtaaagtgttctgggcattagatgcatctcttgcagataaacgtcacttcccttcaattgactggttacaaagttattcattatatgtggacagtattgaaggctggtgggctgataatgtagctgcagactggagagcaacccgtgaccaagctatgggtttattgcaaaaagaatctgagttacaagaaattgtacaattagttggtcctgatgctttacctgaaactgaccaagctactttagaaacaactcgtatgttaagagaagacttcttacaacaaaatgcatttgacgatgtagacacttactgtgctcctactaaacaataccaaatgttaaaaactattctcttattctacaaagaatctcttgcagctgttaacagaggagctccaattgcaactattgcagctttacctgttaaagaagaaattggtaaaatgaaatacataccacaagatgaatttgatgcaaaaattgcagatattcaagctgcagttgtaaaacaatgcagtgaggcttaa

SEQ ID NO: 6777 - DNA, 318 bp, Methanobrevibacter gottschalkii
  source 1..318: mol_type = genomic DNA
atgagttcagtagcagttattggtgatattgacaccgtttctggttttagacttggtggtgtcaaacaggcagttgttgtaaaaacttctgaggaagctattgcagcttttgataaatttttagaagacgaaatttcaattattatcattactcaattaatggcaaatgaaataagagaacatattaataggaaaattggttcaagtgttttaccaatgataattgaaatacctggtaaagatgggtcctctgaaggatcatctgatcaaataaatgaccttattagaagagttatcggggtagagatggttaaatga

SEQ ID NO: 6778 - DNA, 1155 bp, Methanobrevibacter gottschalkii
  source 1..1155: mol_type = genomic DNA
atggcagatcaaattgctactttgataagttctgtaggacttacacaagaaacattcttagtgctctgtgtaatctcattacttgttgttggtgcagtagtagtaatcattacatctagaccaattttggacatttatccttatcttaatccaagtgcaagagtaagagctagaaaaggaagattgtttgatgaaaaacaaatttctgaaattgttgaaaccagcaatattgaagaagttgaaaattatctcaaaggtgttcctgaatatgctgatgttttagatgaatatccccttgataaagcattagatgttgaacgtgctaatacttacgagtttattgcaagattagctcctaaagatattaaagctcctttcgcagtaatgtctaaaaaagcagatattgacaatatcaaaagtcttttaactgcaaaagaagtcggttatgatgctgatgaaaccaaagaattattaattccttgtggtgctttatataatgacttagaatctttagctgatgctgaaaatgtaactgatattgttacaagtttggataacacagaatatgctgcagttttagaagatgctcttccacaatatgaaaatactaacatgattcttccattagaatctgctttagataaatattacttgggcaaattattacgttctactgatgttccttctgatgaaaataaacaaattttatatgcatatgttggaactcaagtggatgtaactaatcttaaactaattataagggctaaagaagatggccttgattatgatgcaatctctccttatatattagatgaaggataccaattacgtgaatggaaacttaaagatttaatggaatctcctgatgttacaaatgtagtgtctggattggaaggtaccaaatattctagtgcattaactgatgtggttccagtttacaatgaaactggctcagttgcagtatttgaaaaagcattggatgtttatgcttccgaatattcaaaatctttagcatctaaaaaaccattaggtattggtccaattattggttatttaagtcaaaaagaaaatgaaattaaaaatttaaaaattattgcaagagcaaaaagagaagttgatttccctaatgctaaaatcatggagatgttaatatga

SEQ ID NO: 6779 - DNA, 612 bp, Methanobrevibacter gottschalkii
  source 1..612: mol_type = genomic DNA
atgagctcaggcacagataaaattgtttcaagcattatgtctgaagcccaagagaaagctgatgtaatcattcaagaggttaatgcagaagtttcagctattcaggcaaaagctgataaaactgctgaagttgaaaaaacaagaatcttagaaaatggtaaaaaacaatctgatatgagatatcagcaaattatctctgaagctaagatgaatgctcgtagagcaaaattaggcgctaaagaagaagtaatcgaagctgctttcagtcaagctgttggtgaattaaaagaaaaagcttcttccagaagtgcagattatgaagattcattaattaaaatgattaaagaagctgctgatgaaattggcggtgatgatttaattatccaattaaatgaagctgacacaaatcaatttaaaagtgaaatatcttcaggtaatgctttcgaaattgaaggaatcaaattcgaattaggtgaacctatcaatactattggtggagcagtcttaaaaactaataatggagatattgaagtaaataacactattgaagcaagattagatagatttaaaagtatcttacgtagtgaagttgctaatgtattatttaaataa

SEQ ID NO: 6780 - DNA, 486 bp, Methanobrevibacter gottschalkii
  source 1..486: mol_type = genomic DNA
atggtagaaattgctttaggtactgctttagcagctattggtgctggagtagcaattggatttgccggtttaggttccggtttagggcaaggtatggcagctgctggttctgtaggagcagtggcagaagacaatgacatgtttgcaagaggtattattttctctgcattaccagaaactcaggctatttacggtttcttggttgcaatcttattattagtattctcaggattattaggtggaggtcaaggattacctactgaagccggtattgtagctataggtgtaggtgcatctattggttttgccggtttaggttccggtatgggacaaggtatggcagcagcatcctctgttggtgctattgttgaagacaatgatatgtttgctcgtggtattattttctctgcattaccagagacacaagctatttacggtttcttgattgctattttacttatggtattcggtggaatcttaggttaa

SEQ ID NO: 6781 - DNA, 2001 bp, Methanobrevibacter gottschalkii
  source 1..2001: mol_type = genomic DNA
atgttcaagacagctagaatgcgtaaaattagaattgttacacttgataagtatgtagcacctacagtggatgctctccacgaatcagggcttatacaagtcagtgatatttctgaaagcattcagcaagatcctgaattagcagaattagtaactccttcaaaagctacaccttacacaggtaagttatcttcacttctcatgaaaacaaatggtatatctgaactattaggaaattctatatcagaaggccatgggttaaaagacactttaatgtcttttattagtcctgatatgccagttcaaaaagaagtagaaaaattggatactcctgcttttattgaaaaagctgaagaaactttagctaaggtggaaagtaagacaagtgttattgaaggcaaacttgctgcactcgactcagaaacaagtgaactaaagtctaataaaagtttggctaaacgtttatctcattttgacatggatttagcgcttttaaaagattcaaagtacacttctactactgttggaaggattaatgctgaatctacttcagaaatcaaaaatgaattaagtaacttgactgatgaattagaaatatttactgttcctatggatgatgatgacggtgaagtcattgctgtagtgacattaaaagaatttagtgatgatgtttattcaacacttcgtaaattcgactttgagaaaattgaagtagctaatgttgaaggcactcctcaacatattatttcaagtgctgattctcgtttattgactattgaatcagaacgtgctgctgttaaaaaagaattaagagcagtcgctgaacaatgggatgatgaaatattagctctcaaagaacaattagaaaatgaaaaagataagaacgaaattctttcatcttttgttcaaactaaagatgcttatgttcttgaggcatgggtacctgtaaaagatacagaggaagttgaacaattagttgaaaaaagttctgagggacattgtgcctttgaaacaattgaaattgaaggtacagatgatgaagatgttcctattttacaacaaaatggatggtatgcaaaacctttcgaattcctcgtagatatgtactctccagtacgttacaacgaaattgatccaacaatatttgttgcaattacattcccgttcttcttcggtttctgcttaaccgatgcaatttatgggttagttgtatctgcaattggtgtagtaattattagaggtttaggtaaagttaaagaatctatgcgttcatttggatggattttggtttgggctggtctatgggctgttattttaggtttgttaactaatggttttattggggacttcccagaaagaattgcaggattccgtttaccaactgtatttgctccagtcgaagcattcaaacatcctgatactattttattaatagctatcggagtcggtcttctttacactaatgttggatttttacttggtgctattgacaacttgagatacggtaatgtgaaagaagctattggatctcagctctgctggtttgttttcgaagctggtattattctcctcgctttaggttacatgatgcctgcaatcggcatggttggcatggctttaggtggaattttaattattgcaactattggaatgttggtatgggctaatggcgcatatggtgttatggatattttcggttacatgggagatgttttatcttacgcacgtcttttagcattatgtttggctactggtggtattgctatgacagtaaacatcttagcgcaaatgttaaacaacatggttccgcatgtaggtatagtacttgcgatatttgtctttatatttggacatattgcaaactttgctttccaggtattaggtgcatttattaattctttacgtcttaactatgtagaatttttctcacaattctttatgagtggtaaaggaaaattcgaagcttttaaagcaaataggacatttacaaaacttaaataa

SEQ ID NO: 6782 - DNA, 315 bp, Methanobrevibacter gottschalkii
  source 1..315: mol_type = genomic DNA
atggcagagatatcagacgcaatcgcaatgataaaaaaagcagaatctgatgctgaacaacttattgcggattcacaagcgcaatcaaaagatatgattgctgatgcaaacttaaaagctgaggaatccgtttcagaagttaaaatttcagcagaagaagaagctcaaaaaactgtttttgatgcagaagataaagctaaaaaagaagcacaatctatctctgaacagtccaaagttgaagttaaatctttaaaagataaagctatgggcaatgttgatgaagcggcttctattattgtcaaaaatatattgtag

SEQ ID NO: 6783 - DNA, 351 bp, Methanobrevibacter gottschalkii
  source 1..351: mol_type = genomic DNA
atggcaaatattaaaatgttcaaattactaggggtattagtctctttattgttaatcatatggggaattcttccattcttaagacatcaaccaataacaacagatgtcattgctactgcaatcatattgattatgatagctgttgcttacatgattatcatgttcaatccaagttggacaaaggcagttttcttctttgaaggtattattattgctgttgcaggatatatgttacttgcatttccatataacttagagttcgcattagtgggtgtaattataattgcaattgctattcttgcttatttacagaaattacctcctaaaatattaagattgttttatagataa

SEQ ID NO: 6784 - DNA, 330 bp, Methanobrevibacter gottschalkii
  source 1..330: mol_type = genomic DNA
atggaacgagcagtctggataattttaaacaataatttttcacttacattagacagtgaaataaaagatgaaaaaatagtaaataaaagattctcaccgggaagtgatttatggacatcagaactcccgcaattaagttttagtgacgaaaatattcaaaaggattatgatgaatttatatctgatatcatctcattattctctgaaccaagtgttgataaaatatttattgatgcaaagattggtgaagaatccgaatatgtgaatgctaaaaatccattagttataagaaaaatagaagaatatagtgtggatgaaattataggatag

SEQ ID NO: 6785 - DNA, 339 bp, Methanobrevibacter gottschalkii
  source 1..339: mol_type = genomic DNA
atgaaactttttatattgtctgctaacgattcaagagatatggatgacatatctcaaaaattatctttaaaaaaattcaaaattactcaaactgagaacaattatattttaatgtgtaaaaaaaggtatgggaatattttaatccatgcaatctgtttaataattgctctttcatatgtttggccagttttaatagtaaatgttatttattttacttattcatatttatgggcttctccaaatgtattaatcactactgagagtctagatgatgaaggtaatcctttggaattcagcagcatggatgaaatattaaaaaaagctacagctatcctataa

SEQ ID NO: 6786 - DNA, 510 bp, Methanobrevibacter gottschalkii
  source 1..510: mol_type = genomic DNA
atggaatttatagatgtgataaatgaaagatacagtgtcagaggatacttagacaaagaagtagaacaagaaaaactagaatttgtattaaaagcagcaacaatagctccgacaggagtcaacaaccaaccttttaaagtctatgtcattgattctaaaaaatataaagagaaattatctaaaatttataaagctaaatggtttgttgaagcgccatatgtattggccgttgttgcattaagaaatgaagcatgggtaagaccatgggattctaaaaacattgcagatattgatgccactattgtaatggaccacatgattcttgcagctactgacgtagggcttggaacatgctatgtcggtgcatttaagaaaaattatgcacacaaattcttgggattaaatgaaaatgaagaagtagtgctattcactcctcttgggtatggtaatgttgaacctcgtgagactccaagaaaggatttaaatgattttgtagtatacaaagattaa

SEQ ID NO: 6787 - DNA, 804 bp, Methanobrevibacter gottschalkii
  source 1..804: mol_type = genomic DNA
atgcaggaaaataattttaaaattgataggcattctttaaaaacagcgatttcacgtgttgaaactgataaaatcgtaacaagagggtataatcaaagagatttaattgaaaaaataagatacagtgatatggtttttttacttttaaaaggaagattgccttccattattgaaggaaaaatatttaatcatgttcttgtttcattttgtgatcatggtgtgactccaccaagtactcaaacagcgcgtatcgttacctcttcaggttcgccagtcaactcagcagttgccggtgcattattgtcttttggacataagcatgccggtgctattgaaaaaacaatggatttatatcaatcaaaaatcaattcattgtacttaactgatgatgctgaaattgataacaaacaaattgctggtttagctattgaaatttatcaagaatatatacttaaagataaaaaagtacctggttttggtcataggtatcataatattgatccaagagcagataaattaatggaaattgtcattaaagaaggttttattggacctcatataaagttagcattagctcttgaagatctaatttaccaaaaaaagcaaattcgtcttaatgtggacggtgcaaatgcggctattttatcagatttaggtttcactccagatttgggattaggaatatttataattggtagaattccaggaattattgcacacattcatgaagaaaaaatgaatgaagatgaatttagaagattttgcgatcttgatgacgtaatataccaacaaagaggtaaataa

SEQ ID NO: 6788 - DNA, 873 bp, Methanobrevibacter gottschalkii
  source 1..873: mol_type = genomic DNA
atggatattttggaggatatttcaaaaacaatcattgatgcatcaacaactctttcccaagacaaattcaatgcattgaaaagatctattgatgcagaagataatgaaaatgctaaatgggcattggaacaaattttagagaattataaggtagctcaagatattaaattccctttatgcgatgatacgggcattcctcatgtaattattgaaattggtgaagatagagaaatttcaggagatctgctcaatcagattcataagggaatagagttaggtttaaataatcttccagcaagaccaatggctgtaattggagatgaagttcaaagaattgaacaaagtaaaggtttatttgaaaaacctggaatgcttcgcccagtatctatattaatagacacggcaaatgatgaatcaacatataaaagggacatatcttctgatacgttaaatattcattttttacttgaaggcgggggtccagaaattagagctaacacatttagggtgtatcataaaagatcttttgacaatgtaattaataccgcatgtggctggcttgaagaatctctaagaatgttgggttgcactccatcaatcccatcaattggtatcggtagaacacattttgaatcaacttctcttcttttaaaatccattgcttatgggaatttagataatcaaagtgaacatgaacaaaaaataactcaaagattaaatgaaacttgtattgggcctatggggtttggcggaaaaaccacggttttgggtacttatctaaatattggaaatcagagagcaagtggtgttagaatagtgtctgttaggccgtcttgttttgttgagccaagagtagcaacattaaaattgtaa

SEQ ID NO: 6789 - DNA, 903 bp, Methanobrevibacter gottschalkii
  source 1..903: mol_type = genomic DNA
atggagaatacaaaaaaattcctcaaaaaaattggtataaaggaagtttacgatgactttaaatcagataagcgttttgatgatgggggacaatatcgttttgaagttcctggaattcaatccccaaaaacaatggaggctcttttaaccgaatcaatcaaacagggcatttttattcatagggtaactcaaactaaaggaatcatgatgttgactgatgaagagattggtaagatgattgatttagccattgactacggatgtgaattgttcttggcagtaggtccaagagcaacctatgatacctcagcaacagtccatactaaagagggaagcagaataggatatcgtcttagaggttatgataacctagtttatgcaattgaggatgtaaaaagagcttgcagattaggtgttcgcggaatattgctgtatgatgagggactgctttgggcattaaatcaaatgagggcagaaggtgaaattccagaaaatgttcattttaaattatctgctcatgcaggtcattcaaatcctgcttctgctaaactgcttgaagctcaagggttaaattcacttaatcctgtaagagacttgcaaatttcaatgcttgcagctattagatatgcctgtagtatggcaattgatctgcatactgaaaatccaaaatcaactggagggtttattaggcattatgaagttccaaaatttattaaagttgcatctcctgtttatttaaaaactggtggttcggttgcagcaaatcataactgggatacaacggaaaaagaagcattagctcgtataaaacaagtttcacttgtaaaaaggattattgatgaatattatccggatgcaatagtatctcctgtgaaatctagtgatttgtctattccagagtga

SEQ ID NO: 6790 - DNA, 1407 bp, Methanobrevibacter gottschalkii
  source 1..1407: mol_type = genomic DNA
atgtttttacaaaatatttctaaatttatatcgaactatcgttatgaacaggcaacggtggaatcactgactactgtaaaagctgcttttttagatttttttggagtaacatataggggaatgagtgaagaagcgccctcaattgcattaaatactattgaagagatattgccaaaaaggaattcaaatcttactgcatccatcattggccaaaatttcaaaacagatattttaagtgctgcttttgtaaatggtattgcggcacatgtattggaattggatgatggtcataggggggctcaacttcatttgggtgcagtaatattctcaacagctcttgcaatttcagaagcttatgacttaaccggcagggaatttttggaaggtgttattgtaggttatgaagttggaattttactcggtcaacttgtaaatccaaaacatagaaataagggatttcatacaactggaacaataggaacattcattgcaggggtagttgcttctaaattattaaaacttgatgaaaaacagactttaaatgcattagggttatgtggaactcaggctgctggtcttttagaatctgatcatgggggatccatgggtaaagtattgcatgttggaaaagcatcatataatggtattttatcagcatttcttgctagaaatggttttactggtagtggaactatatttgatggagatgaaggttttttaaaaacaatggttttagataacacaaatcatgatattgatgagttttcttttgaaaatgctctcaaaaatattggaaaagtaagggttagggatatctattttaaaaaatatccattctgcagacacttgcattcttcaatagatacagcattaaagcttaaagcaagtattggggatgaatataatcatattcaaaatgttgcagttaaaacatatgaaattgcagcagaacacaacaatttccatcctaaaaatttggaagaattaaaacaaagccttccatatgctgttgctatttctcttgttgtcggtgaagttagtgttgataaaattaatcaattaatcgaatttggtcttttagaaaattattctactgttgatgatgtgaatgctattaaaaacattgtaaatgggatgattatcttatcagatgataagttaaatgagttatatccttctaaaagaccttcaaatgtcattattaaattagatgatgttttcagaaatggaattttccaaaatatcacattccttccaaaaggtgattttgaaaatccattacaattaagagaattaattgataaatttaaaggtttgaatcctcattatgatattaaaaatctaacagttattgattctcttgaagattataatatgaaatatgttgttcgtaaattgaaagggtag

SEQ ID NO: 6791 - DNA, 489 bp, Methanobrevibacter gottschalkii
  source 1..489: mol_type = genomic DNA
atggttgatattattgatggttcagaaaatatatcagttcatggtattttaaactgggttttgcttttaactatattctcaatcattactgttgttggaaattacattggttataaacatcctattggcgatgcattaattggcatgttcttattatcattaattacgcttattggtgtttggatggagagatatttgccattggatatttcttcaattatttatatcagtataattggtattgtccttgcatttcctggaatgcccacatctaagactttactttactatgtttctcaagttgaattaatatccattgttacagtatttttagcatatgtgggtattggtatgggtaaaagttgggatgaatttaaagcattaggtccaaaggcagttattattacaattcttgttattgcatccacatatctgggtttagcattggtggcacaagttatattgatgttgactggtgttcaaatctga

SEQ ID NO: 6792 - DNA, 897 bp, Methanobrevibacter gottschalkii
  source 1..897: mol_type = genomic DNA
ttgtcaataatatcaaagagaaataatgatacggaagatattaggcatatttatcgtgataaaactgataggcgtattttaaaaaagaacccatggaaggactatggattgcacattagtgtacttattttggttgtaattgcagagcttattggaccaatgaagattcctgtagcaaaaggagtcgaaatttcaataatgcctttgttatacacaatgattctaggtttaatattttatttagcaaaaccaattacttggattcaaagaaagcaatctagagttgctgaaggagcaatgatgctatttattggtgttttaattgcaaaattagcagtttctagtggccaatctattcatttaatttttgaaatgggtccggctttaatgctgcaggaattggggcatttagctacaattttaattgcacttcctattgcattattgcttggatttaaacgggaagctattggtatgacttcatctattggtcgtgaacctgaagttgcagttgttgttgacaaatatggttttaattcaccggaatcaagaggtattttcgcactttttattgttggaacaattattgggacagtattcattagtttcttaactagtatctgtgtttcagtaataccgctacatccatatgcattcgctatggccagtggtgtaggcagtgcaagtatgaacgctgcttcactagctccgactgttgcggcatttccacaattagcaactcaaattgaggcatttgcaggattcagtaatttgctctctttttccgttggtatttatattgtaatatttgttgcaattcctttaacagaaaaattatatgggattttagaacctaaaattggaagagaccctattgtagatgaggaggaggggtaa

SEQ ID NO: 6793 - DNA, 1269 bp, Methanobrevibacter gottschalkii
  source 1..1269: mol_type = genomic DNA
gtgattataattaatattttacatattggaatagatgatactgattctcctgatggaatgtgtactacatacttagcaagccagattattaataaatttgaagaaaatggaatcaatttagtggattatccacgtttgataagattaaatccttttgctcgttttaaaactcgtggaaatggtggggttagttttaggattccaaaggatgataatgtggatttagctaaaaagattgttctggaagaagttgaaaaattatccatgtttgactgtgataatacaaatcctggtgtgattttctatgatggagaaattacagaagagatggagaattatgcttttagagcaatttataagttcatcactattgaagaagctgaaaagcttgcaaaatctgttggctgtgaaattcacaaattcaaaaaaggaagaggaatcatcggatctgttgcagctatcagtttaccgttgaaagattatacttttgaactgttaacttatcgtgcatctgagaattatggaactaaaagacaaattgattatgattctgtttataaaatggataaagaaacctttcccgatacttttgaaaatattgattattctgaggagtatattgcaattgaacctaaaacaccatgccctgtgttatatggtatcagatcaaataatgttgagtcccttaaaatcgcaaaagatattgttcaagtttcagaacctattgctgattggtgtatttttaaaacaaatcagcatactgatatgcacattcaaaaagttagtaacatttcctctatggaacaatttggatgttatgagattattggagaagttaaaaacaaacctaagattattgatggagggcatatgtttttctatatctctgatgattctggtgagattgagtgtggtgcatatgaaccaactaaaaattttagaaaattaatttcacatttgcgtccgggggatattataaaggtctttggtgggattggcgaacaaaatacatttaatattgagaaatttcaagttgttaaattaaatgatactgaatataaaaatccaatttgtgaatgtggtaaaagaatgacttctgctggtaaaaataagggattcaaatgtaaaaaatgtggcaataaaattcaatcagataaaaaagttcctattaaggtaactcgttttttaaaaaatgctcaattttatgaaacacctgtttctgcaaggagacacttatcaaaaccaatctgtagaatgtatttagattaa

SEQ ID NO: 6794 - DNA, 933 bp, Methanobrevibacter gottschalkii
  source 1..933: mol_type = genomic DNA
atgttaactcgaggaaacttgttacaacaaactgaaaaattattaaaatcccaaggttttaaaacctcagatatctatgaacacggttcatttgatattgtagcgagaaaaaacttgttaattttacttttaaaaacatttttaaatattgacagcattaatgaacagaatgctcatgaaatgaatcaattagcaaatatattccttgcttccccgataattatcggagaaaaatcaagaaatggtatccttgaagaaggagtaatctatgaaagatatgacattccaacaattggatttgaaacttttaaaaatatgattttatacaatgaatatcctgaaatattagctgatcgcggaggttattttgttaaaattgatggtaatgttataaaacagtaccgtgaagaatattcaatgtcacttaaggatttagcaaaccttgcacatgtatcccgcgcaacaatgtataaatatgaaaacggcattgtccgtgcaaatactgaaactgcaatgattttagaagaaatattaaatacaaaagttacccttgacattgatttgttaaaacaacctcaaaaagataaaattgaatatagtgatgatgttaaagacttatccaaattaggttatggtgttctatcaactaacaaaagccccttcgatgctgttgcaaaaatgaaaacttcagacaaacattcaccattaatggcaaatgttgaaaaaaacagaactgaaaaaaccttgaaaagaatggctattcctctaaaagacttatcactggttacaacatcagaacctgtttttataataaataacgataaaattaaagaatctattggtaaaatcccagttatcaaatcttgggagttaaaagagtttgaaaattcaaaagaattattaaagatgattagagaaagaaaagaaaattag

SEQ ID NO: 6795 - DNA, 387 bp, Methanobrevibacter gottschalkii
  source 1..387: mol_type = genomic DNA
atggaaaatttacaaattacaaaaatggaaaaccacccaatcaaatggatttgcaactttaaaggacaaacagctattggaatctgtggtaaaactcaaaaaatagctatgtttgcatcagatgacagagtttcaaaaatattagatgatattgtaatcggaactgatgaatctcaagagggatatggttgtgaagaaaaaaacagatgctgtaattttgattgtgaactttgtgaaatttcaccaagacaatacctgcaaatcactggtaaaaaaccatccaataaaaatataaaagatttaattaacggtttagcagatttgaataattctcttgaagaaaaaaatctcgtcccgtttgaagaatatgaagttgttaatttttaa

SEQ ID NO: 6796 - DNA, 795 bp, Methanobrevibacter gottschalkii
  source 1..795: mol_type = genomic DNA
atgttttttgatgatttaacatttaaagaaaaaataattccaaaaacaattcttggatactctccatttgttgctgaaccatttttggggcatcgctccatgttatataaaagggatttgtatgataatccacaagctattgcagatgttattgtagaatcatataatcagggagttagggctattaatctttttaatgattcccaattacttaaagcatatgatattgcatgcgatcagggttgcaatatgaaggtaatagctactattggtaaaactgaagttgattatttaaatccaaattatgaaattgcaaaagaaaccgattgggatgatgatattgagttatttaatagctatgattgtccattaatgttagttgatgagtttattgtcgatgcttatgactggagattaacttcaaagatattggattgcattaatgatacagattctctttcaggattaatcacggcatttccacttaggacaactaatttaattcctgaaaatttaaatatggatttatttgatttttatatggttcctttcaatgctatttcttatatgatggatataactgcttttaatgcatctcaaagggaagaattcaaacaaaaattaactagtttaaataaaaaagtaattgcttctaggatttttgcatgtggcattctaaaaccgaaagaagcatttgaattctataaaaaaatagattacattgatttaatttcaattggtgtggctaaagtcgaagaagctcgtgaagattttactcttctaaaagaatattaa

SEQ ID NO: 6797 - DNA, 339 bp, Methanobrevibacter gottschalkii
  source 1..339: mol_type = genomic DNA
atggttagtatggaagaattcccaatatcaagtgcaaattttatttcaggatataagattgttgaaaataaaggatttgtatatggtttaactgtacgtgcaagaggtattggtggagacattggtgctggtcttaaaggacttttgggtggagaaattaaacaatatgttactatgatggaagattcaagagaagaatctattcaaagatgtattgaacatgcaaaagaattgggtgcaaatgcaattatttctgtaagaatggactctgatagtatttctcaaaacatgcaagaagttttaacttatggaactgcagttataattgaaaaagaatag

SEQ ID NO: 6798 - DNA, 1575 bp, Methanobrevibacter gottschalkii
  source 1..1575: mol_type = genomic DNA
atgaaagtacttattgctgatgctattaacgaaaagggtattgaaaatttaaaagaagtagctgatgttgttgttaacaccagcattactcctgatgaattagcagataccatccatgaatacaatggaattgtagtaagaagccgtacaaaattaactgcagacattattgaaaaagcagacaatttacaaattattgcaagagcaggtgtcggagtagacaatatagaccttaatgctgcaactgaaaaaggaatcatggttgtaaattccccagaatcaacttcagttactgtagctgaacacacaatgggattaattttaagtatggcacgtaaaatttctatagcagataaatctgttaaagaaggaaaatgggaaaagaaaaaattcatgggtgtggaacttagaaacaaaacccttggtgtaataggaatgggaagaattggatctcaagtagtaaatagatgtaaagcgtttggaatggatgcaatggcatacgatccatatttaccagaagaagttgcaaaacaaatgtgtgtggatttaactgatttagaaactgttcttaaaaatgcagatttcattacaatccatgtaccccttacacctgaaactaaacactcaatttccacagaacaattcgaaataatgaaagatactgcatttatcgtaaattgtgctcgtggtggaatcattgatgaaaaagcattatatgatgcattggttaatgataaaattggtggtgctgcacttgacgtgtatgaagaagaacctcctgctgaagattcaaaattatttgaacttgacaatattgttttaacaccccacatagcagcttcaactaaagaagctcaaagagatgctgccattattgtagctgatgaaattatagatttagcaaatggaaatactcctaaaaatgtattgaaccttccacgtatcgataaaaatacttacaatgaattatctccatacatggaattatgtgaaaaattaggttgttttgtttctcaaggaattaatggcaaactcaaagaaattgaaattatttacagcggagaactttccgaaattgataacctcgaaatattatccagaactgtcattcaaggtgctgtaaatccattcttaagttcaccagtaaacgcagttaatgctgcattagttgctaaagatagaggaatcagcattactgaaggtagaaaaaataattcaaaaggatatgaatccttaattaaagttattgctaaaagtgaaaatgaaaccttcacggctgaaggaacccaattacatgaatccagaattttaaaagtaaacgattattgggttgatgttattcctaaaggacacatgttcattgctaaatatgaagatgttcctggaagtattggtaaaattggtactaaattaggcgagcataatgtaaacattggaattatgcaagttggaagagatgaaaaaggtggaagagcaattatggttctaactttagataaagaagtgccaaaagaagtaattagtgaaatccaagctttagataatgtttatgaagctactggaattgaattataa

SEQ ID NO: 6799 - DNA, 681 bp, Methanobrevibacter gottschalkii
  source 1..681: mol_type = genomic DNA
atgagttttatttcaaagttattcggaaataatgatgacgaatttgaagaggttagagttgatcgggaagttctgaactctgtaatttattattcaaaacaggcatatccaaatgaatttttagcatttttggatggtaaaattaaaaacaggatattgtacattactggtttaatatttattcctggtgaaacctgcgagactggggctgtcattcacagtgagatggttccaatgaatacaaaatactttggatcagttcactcacaccctggaccaagtgcaagtccgtcagatgctgatttgatgactttttcaaaaaacggatattttcatatgattgtatgtttgccttactcttacaatacatttaaagcatatgataggcatggagaatctattgattatattgttggtgattatgcttatttggtcaatgatgatcttgatgaattttttgatgaggatgatgtactgactgataatgatgagtttaaaccaggatttttcgatgaagatgatgatgaatttttcaaaaatcttgatgaggaaaaagtcaatcactatgatgaattcgaaaaaaggaatcaaataaacaatcaactaccgaataatgtaataaaaatagaacttaataatgatggcaatgtcaaaaaaatttcaaggcgatttaaagactga

SEQ ID NO: 6800 - DNA, 723 bp, Methanobrevibacter gottschalkii
  source 1..723: mol_type = genomic DNA
atgaaggagtatgaagtttattcttcgctgaaagttccaataaactctaaaattattgttcgtttggatggtaggaattttcatcaattagctcgtgatttaaatttaattaaaccatatgatgaaaatttctataaagttctttctaaagtttgtgaagatttatttaaagagttttcacctatttttatttatgcattctcagatgaaataagtcttcttttagataatattcccttcaatggcagaatcgaaaaaatcgattcagtaatggccagttttgcatccagttcttttgttattaattataatgccaaattcaaaaaaccaccttcttttgactcacgtgttattccaatttcagatgatgatgttttagaatatttcaaatggagacaggatgaatcctggaggaactgtgttaattcccatggcatatttcaccttagatctaactatccggaaaatctgtcaaataataaaataaaaggcatgaacttaagtgatatacatgaattattattccaaaatggcattaacttaaatgacattgacacttataaaaaaagaggaattggagtatataggaaaaataaaaaagttgtaggtttcaacaaaaaagaaaataaaaaacagatatcatacagaagttatgtttgcacagattggaatcttccaaaatttaacaaagaattctttaagaacatgggtgttttaaaatga

SEQ ID NO: 6801 - DNA, 765 bp, Methanobrevibacter gottschalkii
  source 1..765: mol_type = genomic DNA
atgaaagtcggtattataggctgcggggctattgctaatattattactggcagcatcgctcctgaaaataatggtattgaaattgcatacttttttgataaagatgtagaaagagcagagaatttggcaagtttggctggtggtgtagcagtacttaattttgatgacatgttgaatgatgtggatttagttttggaatgtgcttcaccagattcagttaaaaaatatgctccaattattcttaaaaaaggaattgacatgattactatgagtattggtgcatttatggataaagatttttataatgaagttttaaaaattgccagagagaataatgctaaaatacatttgccatctggtgctgttgttggcctcgatggaattaaagcggtagctaaattcggtcttaaagaaattaatcttgtaacccgtaaatctccaagatctcttggaaaaaatattgatattgaggaagttttattcgaaggaaaagcttccgaagcggtcaaacaatttccattaaacattaatgtagcggcaacaattagtatggcatgtaacagggacattgatgtaaagattattgttgatcctaaagttgatagaaatgttcatgaaattactgctaaaggggattttggtgaatttaaaacaaccacaatgaatttcccttgtgaagctaaccctaaaacaagcatgttagcggcactttcagcaattagactacttaaaagtttcaatgaaaccattagtgtgggtatgtaa

SEQ ID NO: 6802 - DNA, 402 bp, Methanobrevibacter gottschalkii
  source 1..402: mol_type = genomic DNA
atggtagaagtttcaaaattacgcagtttagatatttatactaacacaggacattatgttggtcgtgtagaagatgttgttcttaatattaggttaggaactatttcaaaattacaggttagagctattgaacaagaaagaaaacctgctggtgttcttaactcttttttaggaagtatccgtggggaagttccggaagaaaatgatatgaaatctttccaaaatgatttattaacagtggactttgataaggttcaagctattggagatatcatgttaattaaccctagagatattaaaaaaataaaccctgaaccgcaagttcctgatgctgtagctccaaaacaacctgaaactcaaccacaagaaactcaagttcaatttgatgctgaaagattatag

SEQ ID NO: 6803 - DNA, 723 bp, Methanobrevibacter gottschalkii
  source 1..723: mol_type = genomic DNA
atgtgggatacaacaaaagattatagaattttagtagcaagtaaagcaagagaaaattatctcaatctcattccaacagcttcttttagaggaagttggaacaaaaaacaagctattgatttaggaaaacaaatgaatagcgatttccaatcattaatttattcctacctcgaaggagaggaattagtaaactctccggatgttgcatcattaaaagaaaaaggggaaaaaattattgaatatttaggaggtccagattggaataagaaattcttaagtaatgctcctaaagaagatagggaaaaaacccaagaaaatattgcaaaagtaagatttttcttagatacaattattggcttaaaagacagattatctcttggtccgattaatgatcccattattggggttgacattagagttggggaggtaatgagcgttactaaacatcctaaaaatgacaaattactgatctgtaatgtgaatcttggaaaacgtgcaattacagtcctcactaacgatttaaatgttaaagatgataacaaagttggtgtctccctactcccaccacaatcctttagtgacattgtaagtgaaggaatgttccttggaatgaatggaaatatacttaaaagtgttgaaggagaacttggtgaaatgccaaaaggaattccaatggaatcccttaacgaaacacgcaaccttgttgaaaactatctaaaataa

SEQ ID NO: 6804 - DNA, 1413 bp, Methanobrevibacter gottschalkii
  source 1..1413: mol_type = genomic DNA
atggatatgttaatcggcggaaaacacatttcaagtgaagatttagaagatgtaattaatccgtatactggtgaagtaattgatactgttccaattgctcatagacagactgctgaactggctattgaatctgcaaataatgccagagaaagtttatctgaaatgtcagcatttaaagtttcaaataatttgttcaatgttgttcttaaattaaaagaaaaacgtcagatgtttgccgaatctttaactttggaagttggaaaacctataattgaatctctacttgaagttgataggtcaattgaaacattaaaacttgcagctgaagaagcaaaaagaatttatggtgaaagtgtacctttagatgcaggaatgggaggtaaaggattttttgcatttactcaaaaggtaccattgggtgttgtagtggccatcaccccatttaattatcctcttaatttgacaatccataaaatagcaccagcaatagcatgtaaaaataccgtaattgtaaaaccgccaacagaagcaccattaacagttatgaaattctgcgaattattaaatgaagaatttccagatggtgttgtaaatgttgttacaggatatggttctgaagttggagatcatttggtggtatctccggaagttaacaaaatttcttttactggaagtgtaacaaccggactcatgatttcacaaaaagcaggaatgaaaaaaactactttggaacttggcggaaatgacccaacagttattttaaaagatgctgatttaaataatgctgtaaaaggaattgttaatggagcatttttaaatgcaggtcaggtttgtatgggtgttaaaagagtaattgtagaagatgaaattgccgatgaatttgcagagaaattagtggctgcaactcaaaaattagtcatgggaaatccattggattctaaaacaactcttggaacattgatttccgagaaagctgcgatacaagtggaagaaacagttaataatgctgttagtatgggtgcaaagatattaactggaggtaatcgtgatggtgcattttacgaggccactgtaattgataatgttacaacagacatggatttaattttaaatgaaacatttggtccggtagcacctattattcgtgttaaaaatgtagatggggctattgaagttgctaataacacggattatggtcttcaggcaggtgtattcacaggtgattatgcatctgcaatgagatgtgctcaagaaattgaaactggaacggtttttattaataaacagtccacatttagaactgataatatgccttttgggggatttaaaaacagtggtgttggcaaagaaggaataaaatatgcagttgatgaaatgactaaaacaaaattaataggtctaaatttaagataa

SEQ ID NO: 6805 - DNA, 582 bp, Methanobrevibacter gottschalkii
  source 1..582: mol_type = genomic DNA
atggaaactacaagatttgaaacattttttgatgcaatcatagcaattatcataacagttcttgttttaaaagttccccaaccagcaaccccaacgattggtgctattttaaagttaaatacaatatttattgcatatttaatcagttttttaactttatacaacctttggtatgccaatcataatctgcttaaaattatagatattattgacaattcagctgtttggagttatggagcaatgacatttatcctttcattattaccctattttactctttggcttgctaatgatattaattcaatacctgcagaaacaatgttcggattaatattcatttttacacatattttcaatagattggctactaaatcaatttatagaagcaacccctataataaacagttgattgaattgaattttgattcacatatccaaagtatcccattaattattttaatcatcggatttatcctaacttatacaatttatgctcctggaatctatgttagctgtctgcttgcagttattttttggatttctctcagtaaaataaaaagaggatgtaataatggaaactga

SEQ ID NO: 6806 - DNA, 573 bp, Methanobrevibacter gottschalkii
  source 1..573: mol_type = genomic DNA
atggaaactgaaagatttgaagcattatttgatgcaattttagcaattataattacaatgattgttttggaaattccccttgcaagcacaggcagttgggaagctctttttgatttaaaatatgagtttctgatttatgcagtcagttttatagtatgttttaacttttggaattacaacaataatatattccatcttgtaaataagatagattataaagttatttggacaatggcaattacattatttgtattttcatttttaccatatcttacctcatttgttggtgaaaacttctatttattcctaccacaatttttgtatggtttgagctttatcatcactgcaatcctttcaatgataattggtaacttcctaaaacaagcagatcctggaaatattgcattgcatattgcattaagtaagcactatccgatgtatgcaactataatcacagtttcaattggaatgattattggttatttcatatatcctccagcaattattgcatgttgtttactttccattttaggagtatggttcataccaagaattatattccacatgaaatag

SEQ ID NO: 6807 - DNA, 948 bp, Methanobrevibacter gottschalkii
  source 1..948: mol_type = genomic DNA
atgaatttggtttttaaatttattgaaaagtattattgtttaattcttttatttttagttgtcattgctttaatttatccaatttcatttaattgggttttaaatagctatggtaatcttaatattttaaatttgcttttaagcattgttcttttcactatggggacaacccttaaggtggataatttcataagtgtgtttaaaaatcctaaagaaattattattggaatttcatctcaatatattataatgccttttttagcatttgctcttgcaagtattttttcccttgatgcagcactaactgttggagttatcttagttggcacagttccggggggtactgcttctgatgtaataacatttcttgcaaaaggagatgtggcattatcagtatctttaacagcaatatctacttttttatcacctattgtaactcctttgataactttggtgttaatcggcaatcagattgctttcaatccggtggatatgtttttatctattgttcagattgtaattgttcctgtcatattgggattattgcttaattataaattcccctcattttgtaaaattttagaggaatatctgccgggaatttcagcaattgtagtttgtgtgattgttgcagggataatgggtgcaaataaacaagctattttaacatcatctcttgttataatggtagttatcataactcaatatttcttagcaatggcattaggttgtttgatgggttatttatttggaatgaaaagggaacatattattacaatagctattgagcttgcttttcaaaattctggattgtcaaccagtcttgcaaaaactcattttccaaatttattgattgcaactgttcctggagcattatattctgtttggcagaactttgcaggttcaataattgcttatttattaaacagttattttattgaagaataa

SEQ ID NO: 6808 - DNA, 183 bp, Methanobrevibacter gottschalkii
  source 1..183: mol_type = genomic DNA
atggatgatagtgctcaaacatcagcggagttcattttactttttggaggaatatttgtagtggttttactggttatttatatgtataataattatatggatgatttgggtggtgaaattaagtcaaaagaagttaatgaattcaataatcaattaaatgctcttaaggtttatttcaaatag

SEQ ID NO: 6809 - DNA, 927 bp, Methanobrevibacter gottschalkii
  source 1..927: mol_type = genomic DNA
atgaaatttaatataatcaataatttaactttatttttagacaataatgttcctgagaaatatttatttaaaataaatgaatttttgctgagtgggtctatttctacagaagcaagtaaagttttatctataattataattttcattcttgtaacagaaatttttctagtaattgcattaactctctttaatttgccattttcaatattaatattcccatttttcataattcctataatttttacatatattattgtccaacaagaaaaaagagctcaagaaattgagcatactgcaccagattttttaagacaactttccagcatgcttcaggtgggtttaagctttgaaaatgcaatggaggacatgtcccattattctagtggaccactttatgatgaaatcagaagggcaataattgaaattcggatgggtcaaaattttgatgatgcatggcgtgcaatgtctaagcgattaaaatcaaaagagttagagcgaatttttggtattatattggatggtaggaaaagtggatcaagtatttcaacagtattactcgatgtttcaaatgatttaagggatttaatggcacttaaacgtgagagaaaatcagctgttatgatgtcagtcatgtttttattaatctcggcaattgttgcaactccatttgcaatgggtatggttagtgtttattctaattttatgcaaagctatggaatggaatctgaaatgattatttccgccccattagttggtgaaatgtatcttataattcattcttttttggttggattcataataagtgttataatgtatggtgaggtaaaaacgggacttaagttttccctgcctcttgtagcagcatctttcggaatattttatataatttccacatttggcggaacactgtttatggggggtttttaa

SEQ ID NO: 6810 - DNA, 1017 bp, Methanobrevibacter gottschalkii
  source 1..1017: mol_type = genomic DNA
atgaacttacatttaaataatattctaaaagacattaaaaaagacggtgttcaagcttatttacttacacaatttacaaatatcgaatatatttcaggatataaaccgaccagttttgctttttgtatacttaaagaaaatccaatcatttatgtgtctggaatggatatggaaattgcaaatcgcgattcaacaatcgaagttaaacaatatgaatcctatgatttaatgataaaagagctaaaagaagaaggaattaaaaatcttgcaattgaaccaacactaccttacagtacttatgcccgttttaaggatgattttgaaatatctgataaatcatatgttgataagcaacgtatgattaaaacaccttctgaaattgaaaaaatcacaaaagccacagaaatagctcaaaaatcatttttacaattagatattttaaataataatggaacagaaagggaagtggcttttaatcttgttcgttacatgattgataatggagcttcaaaagaatcatttgaaacaattgtaacaagtggagctaattcaagccttccccatgcgattcctgaagctaaaaaattggaaaggccaattttaattgattggggagctatttttaagggatattgttctgataatactcgtacaattgtatatgctgaaagccagcaagaaatttgggatattgttgcagaagctcatgataaggcaataaaatctgttaaagtgggtatgaaatgttgtgaagttgataaagttgctagggatattattgctgaatatggttatggtgataattatattcactcaacaggccatagcttggggttaaatattcatgagactccaggtttttccgctcgtgatgaaactgtcattgaaaaaggtatggtaataacagtcgaaccgggaatatatttggaagggaaatttggagttagacttgaagatactgtgatcatttctaaaaaagcaaatgttattggcgatttgccacttaatattgaataa

SEQ ID NO: 6811 - DNA, 642 bp, Methanobrevibacter gottschalkii
  source 1..642: mol_type = genomic DNA
atgtttaaatttacaagtagtgaaataagagatttaataattgcgtttatcgttatctctctcagttttgcaatagtaaatggtggaagaaacccctctgctgtgcttagcattttaccaattgttatggttggtgtgggagcaggtttcattctgcacgaacttgggcataaatttgtctcaatgaaatatggatattgggcagaatttaaattatggcctcagggattgatatttgcacttgttagttcatttttaggattcgtatttgcagctccaggtgcagtatatacttatgcaaattatatgactgatgagattaatggtaaaatatccattgcaggacctgttgtcaacattattcttgcattaatatttttagcaatatgtgttgcaatttatccatctgcatttaactccgaaacatcagtattaatattcattatttgttccgtaggttattcaatcaacagttttcttgcggcattcaacttaataccaattggaaacttagatggatctaaagtattaacatggaatgctggaatctggactattacaattgctattgccggaataatgacagtgatgtctatgacaatgggtgttgaaaccatagtaagaattattttaggattttaa

SEQ ID NO: 6812 - DNA, 1203 bp, Methanobrevibacter gottschalkii
  source 1..1203: mol_type = genomic DNA
atgacagagaagctcacatatttcgaaggaacacacagagttattgcaccgaaaaaaacaattgaaattaacgaaaataagttaaggattgctggaattacacgtattgcagacattactgatttagataggataggaatgcctgttttcactgcaattagaccaactgcagaagatggagcaattagcatttatggtggaaaaggaatctcaaaagaccatgcaaaagcttcagctatgatggaaggttttgagagatattccgctgaaaaacaagaagctgatgaaacattaattgcaacaaccagtgcaattactcagaaaggaaaatatgccaatcctaaaacattaaatctgcctcaaaaatatgaaaaagaggatattagtaaaatacctcttgaatggaatatagcaactgatttaatttcgggtgaggaatattatgttccttcaaatgcagtattccacccttataatcatgaaaataatgttcaaagtttatttaaatcaaacaccaatggccttgcatccggaaatattttagatgaagccattttgcatggaatctttgaagtaattgagagagatgcatggagtatttttgagttaactcataaaaattattcgcaaattaaattagatagcattgaaagtgaattaattaacacaataattaataaattcgagtctaatggaattaaaattaaattaatggattttacagcagacattaaaattccaacaatagccgcttcagcagatgacaccattacaaaagatgcaggactattgacattaggcatgggaacacatttagatcctgaagttgcagtcttaagggctttaacagaagttgctcaaagtagagcaacacaaatcaatggtgctcgtgaagataccgtaagagcagattttgcacgtgaagcaggctatgaaaggatgaaaagaataaataaatactacttcagagaggaagaaaaacaaatcaacttccaggatattgaaaataaatccacaacatcaatcaatgccgatttagatatcgtgaaaaaagaattaatagctaatgacattaaacagattttatacactaacttaacaagaccagaacttaatgttagtgttgtaagagtaataattcctgaaatggaaatatatgctcttgatccaacacgtgcaggatacagatttttaagagtatga

SEQ ID NO: 6813 - DNA, 651 bp, Methanobrevibacter gottschalkii
  source 1..651: mol_type = genomic DNA
atgaaaatcataatttatacaggactttcaattccttttgatgaagcaaaagaaattttagattcacatgataacatcgaggtaatctacaaaaaacctattaaaagaggagatttgggtcatgacattaaagagaatcctgatataatagcaataatagatggtgtatttcaccaaaactctgcagtaggacatagagaaattcttagtgtgatgaaaaaaggagttaaagtttatggttcttccagcatgggtgcacttagagcatcagaacttgacacactcggaatggagggtgtgggatactgttataatgaatatgcaagtggaaatgtcacttcagatgatgatgttgcagtaatgcttgactcagataccttagaagccatttcagttcctttaattagtatgaattatgtttttactaatgctgtaaatgaaaatatcctcacccaagaagaaaaagacgagttaatcagaattacaaaagaaacttattatcctaaaagaaactatgctcagacattatcaaaatctggtctgaatagggataaaaaagaaaaactaattaattttattcgtacttcagaagatatcaaaaaagaagatgcaaaagcattactaagccatattaaatatgtgattgaatga

SEQ ID NO: 6814 - DNA, 1011 bp, Methanobrevibacter gottschalkii
  source 1..1011: mol_type = genomic DNA
atgagattagaagataaaatcaatatcgttaggaatatcttaaaagataagaatgtggctatcggtttttcagggggaagtgattctacattaattatttatttagcttcaatgtttgcaaaaaatacgttagccgtaacaatagataatcatctgatgccgactgaatttattgaacatgcaaaaagagtaacatcctccttaggagttaaacatgaaattattgacatagatttctataaagaccctgattttttaaaaaatactcctaaaagatgttatacctgccgtaatttgatgtatggagaaattaaaaaagttgcaaatgaaaatggatttgattatatttgtgatggcaataacattagtgatctagtcgataatcgtccgggaattttaattacttatgctaatgaatttaaaacaccattaattgaagcaaaattaacttcaaaagaaattcatgaatacttagataaaaacaatattccttattcaaaatctactacttgtcttgcaacaagaattaaaactaacaccccaataactaaagaaaaaattgaaaatattagttattgtgaagattatattttatcaaatactgagtgcgaaactgtaaaagttagagatcttggaagcatttgtatgtgtgaagttgacaagattgatgaaattattaatgaaaataaatttaaacagattaatgatgaattaaaaaaacaaggatatgaaaaagtatcattaaacttatcagaaattaaaaataatggagagattattcttaattatattgatggttcattttcatataaacttccattcacaatcaacattgccgatacaaaaaaacaattaaaaaataaaattatttgccaaacaaaagaaaaaatagaaatagaaaatattgatatttttgatacgggattaataaaaggaaataattttaagaactatgaagatgcattaaataaatttatgcatgttctaaccaaattgagaaggaacatttag

SEQ ID NO: 6815 - DNA, 459 bp, Methanobrevibacter gottschalkii
  source 1..459: mol_type = genomic DNA
atggctgttaatccagtattagtgattaaggtagttgataatactagtgttggcgttcgtgcgagattatatgatgatttctctgaacacaacattgttttaaactctgttcttacttattggtgggcaaataatatgcctccagccgttaaatttttagaactttttgattctgttatcaaaagaaccatcaatgaaataatgcctcataaaacattaaatttaaaatatgaggttaaagcagatgatattttagaaaatgcttctcaaattgaaataactttgatttctatctcggcagatggtgtagggtttaaaattgatgggaaatctgttttcttaaaagatttaagaaaagttgaagaggattttgaacctaaagaattttcaacaacttttgatcaatgcatcgaaactccggatattgttttaaaaaaatataaggaaatgaaaaactaa

SEQ ID NO: 6816 - DNA, 846 bp, Methanobrevibacter gottschalkii
  source 1..846: mol_type = genomic DNA
atgttagttaaaagaacaatgtctaaaaatgtagttagtgtttctgttccaggtaacagagacaaagttttagacttaatgaggaaagaaaaaaaagcagtattgccagttgttaaaggagacactgatatattagtaggaatagttactcgttccgatttaattaataatcctgatgaagaacaaattgcaatgttaatgagtagagatttaatcactgtaagtcctggtgatgatgtaattgatgctgctcgtaaaatgatggataatgatgttagaagagttcctgtagtggatgatgatggaaaattagttggaattatcacatctttcgatttagtatctaatgctttaactaaaactgaaattaatgatgttgttgaaaattatatgattactactgttccaacaacttgggaaaaggctccattaaatgtagcatttgaatctatgaatcaatttggtctaaaatctattttagcacttgatgatgatgctaaattgtctggaattttaactgaaacagatttcatttctgaaattgaaattatctctgaaagaagtgaacacagttctactgtgggtactgaaggagataaatggtcttgggacagcacttcagtattgtacatcgagaaaaatcatttaaaattcactgataaaactgtttgtgatgttgctgtaggtaatgtcgaagtagctaattctaaaactaaagtttcagactgcgctaaaaaaatgaaaaccttaaacattgaacaaattcctgttattggtgttgaaggtaatttagttggtcttgtaagggctagtgatttaatcaaagcattagttccacaagaatag

SEQ ID NO: 6817 - DNA, 423 bp, Methanobrevibacter gottschalkii
  source 1..423: mol_type = genomic DNA
atgtataaaaaaatattggtcccaacagatggatcagaattcgcaaaaaaagctcaaaaacatgctttattcttagcagagatatctggggctgagataattgctataagtgttacagagaataattttgttaacggacttccattagatgatgaagtataccagttaaatcaaatcttaaaagaaagatctgaagaaaatcttaaagaatttgataaattaaatgaaaatgatttgaaaattactcatatagttagagaagggtcacctgctaaagttattcttgaggtggcaaaagaagaaaatattgatttaatagtaataggtagttctggtaaatctggattcgatagatttattatgggtagtgtagcagataaagttgttaattcagctaaatgtgcagtgcttgtaattcattaa

SEQ ID NO: 6818 - DNA, 1155 bp, Methanobrevibacter gottschalkii
  source 1..1155: mol_type = genomic DNA
atgtttactatagcaaatggaatcatattgaaaggtaaagatttggttcctactcgtgaaaatattgttgttgatgatggaagaatcattgaaattggaaagggattcctagagggtaaaattattgatgttgatgggtctgtagtttgtccttcttttataaatggccatatgcatattggtgattctattattaaggatgaggggtatggtttatctttaagtgaaatggtgaaacctcccaatggggttaaacatgttgcattatccgatgttagtgatgatgaattgatacaggcgatgaaatattcaatgtgggatatggtttatggtggaacaacacatttcattgattatcgtgaaggtggattaaaaggtgttaaacttttaagaaaggcatctgaggacattcccataaaaccaattattttaggccgtgacgatagtttttatggtgatgatccagatttaagcaaagttaaaatagctattcgcaaacttcttaaatttgcagatggcattgctccaagtggttttggagaaataacaatggatgttgcagaacttatttcaaaggaatgtgaaaaagcaggtaaaatttcatcaattcatgttgctgaatctgaattgaatcaaattgaatctcttaatgcttgcggattaagtgaaatcgaaaagggagttattaataatttttctcagttggtacaccttactaatccaaaaaatgaggatttaaattcagtttcagtatctgctcaaaatgttgttgtatgtccaagagcaaatgcaacattgaatgtgggaatagttcctttaaataaaatgcttgatttaggaataacacccttgcttggaacagataatgtaatgattaattcaccgaatatgcttcgtgaattggaatttactttaaaaataatctctgtttattataaaaagtatattgatccttccaatcttttaaaaatggcaacaacaaatatttgcggattcggaattaacaatgttattgataaatcactaataactgaagataatttagctgaatttaatgtattcaattctttttccaaaaatccttaccttaatataataaatcgttgtgaaacgaaaaatatattatataggattaatagaagaacaatcatataa

SEQ ID NO: 6819 - DNA, 531 bp, Methanobrevibacter gottschalkii
  source 1..531: mol_type = genomic DNA
gtgtatagagttaagtacaacaataaagattatggggagtttaaaaaattatctgacgcattatatgaaagagatgcattatttttttgtaattttgattatgatctgcttgttgaatgtgatcttgaaaacaagtatgaaaatatggttctaccaccattccctgaaaaaagaccaaaaggtagaattaaaggaaccaaagttaataaaaaagaaagagaaggagaaattctcttcaaccacaaaattaaaaaattctacattcaaaaaggcgatgaaacaattggccaatatgatacaatgaccgaagctttttactacaaaaagatattaatggccaacaagtgggataaaaatattttaaaaacaaatatcactaaaaaaattgaagttaatataattattgatccagcagttgaatatgaagtacagttaaacttttgccctaaatgtaaaaatagattaaaaattggagagaccgaatgtccttcctgcggaatcaatatcgaagaatatttatttaatagataa

SEQ ID NO: 6820 - DNA, 3177 bp, Methanobrevibacter gottschalkii
  source 1..3177: mol_type = genomic DNA
atgccagttgataaggatattaaaaaagtattaattattggttctggacctattcaaatcggacaagcagcggaatttgattattcaggatcacaagcatgtaaatcactaagagaagagggaatagagacagttcttgttaacagtaatccggctacaattcaaacagacattgacatggcagatactgtttacacagaaccattgactccggaagttgttgctaaaattatcaaagaagaaaatgtagattcaatattgccaactatgggtgggcagacaggattaaatatcgcaacaggtcttggagatttgggattgcttgatggaattaaagttttaggctctgatgttcagacaattaaagatgtagaggatcgtgatttattcgcaaatcttatggataaaattggtgaggagattcctaaatgtcatgcagttgaaagtgtagaagcagcacttgaagcagtagatgatattggttatccagttattgtaaggccggcattcaccttaggtggtactgggggtggaattgctcataacgaagaagaattaattgaaattgcaactcatggattagatatgagtttcattaatcaggtactcatcgacgagtcagttctcggatggaaagaaatagaatttgaagtaatgagggataaagaggatacttgcatcattgtatgtactatggaaaatatagatcctatgggtatccacacaggagacagtgttgttgttgcccctattcaaaacttatgtgatgaaactatccagaagatgagggatgcatccattaaaattatcagagcactaggaattagaggcggatgtaacatccaatttgcacttaacccagaaactgatgaatacaaagtcatcgaagtaaatcctcgtgtatctagaagtagtgctcttgcgtctaaagcaacaggttatccaattgctaaaatctcttctaaaatagctttaggattaactttagatgaaattaaaaatgacattaccaaagaaacaccggcttcttttgaaccagctattgattatgttgttattaaaattcctagatggccttttgataaattcaaaggtgtaagccgtgaagttggagttcaaatgaaagcaactggtgaagtaatggctatcggaagaacttttgaagaggcattccaaaaagcacttagatcacttgatatgggattcgacggttttgaatacattgattacactgaagaagatttggcgcatcctactgataaaatctacttccaaatttattcagctattaaagatgggatggatattgataagattagagaaattaccaatattgataacttttttttatataaaatcagaaacattgttaactttgaagatagtgtaactgctgataaattaaacgatgaagatttcttaagaaaagctaaacaaattggttgttctaataaaagattagctgatttatctggccaaactgaagagtatattaaaaacttactttcaagatataacattaaaccatcatataaaatggtagatacttgtgctgctgaatttgaagcaaaaactccatattactatagcagttatgataaaggaaatgagcttgtatcaaccaacaagaaaaaagttgtaatccttggagcgggaccaatcagaataggtcaaggtattgaatttgattactgttgtgtacattcttctttagctttaaaagaagaaggaattgaaactattttaatcaacaataatcctgaaactgtaagtactgattatgatatttctgacaaattattcttcgaaccacttacatttgaagatgtaatgggtgttattgaacaagaaaaaccagatggggtaattgttcaatttggtggtcagacatctattaatttatcagtgccattggcaaatgctggtgttaaaatcttaggtactccatatgagagcattgatagagttgaagatagggaattatttgctgaacttttagaaaaattacacattcaccaagctccatatggaacagctaattcatttgaagaagcaaaagaaattgcagaaaaaatcactttcccggttcttgtacgtccatcatatgtaattggtggaagagctatggaaattgtttatgataacaatgaacttgaagaatatatgaaagaagctgtaaaagtatctccagaacacccaattttagttgataagtttttggaagatgctattgagcttgatgtagatattttatgtgatggtgaagatgtgttcattgcaggaatcatggaacatattgaagaagcaggagttcactctggagattctgcatgtgtaatacctcctcaaacaattcctgaatatattttagatactattcgtgaaaattcaaccaaattagctcttgaattaaatgttaaaggattaatgaacattcaatatgcagtaaaacttgatgaagaaatggtttatattattgaagctaatcctcgtgcaagtagaactgtaccatttgtaagtaaagcaattggtgttccattagcaaaagtagcaacttggattatgcaaggagctaaattaagagacttcgatttaactaaagaaattaaattaaatcatgttgcagtaaaagagtctgtatttccattcttaaaacttccggaatctgatactgttcttggtccagaaatgaaatccactggtgagagtattggtattgatgaaacttatggcatggcgttctataaatcacaactttcaggaggtatggaattacctaaggagggtaaaatatttatcagtgttaaagaggcagataaaaagaaaatcagacctattgctgagactgcagctaatttgggttttgatttaatagcaactgatggtactgctgatgctactggtattgattcggttgaaaagatattaaaagtatctcaaggttctcctaacattagagatgctattttaaacaaagaaattgatttgattattaacacttctgaaggtaaacaatctgctaaagatggttatataattagacgtcttgctattgaacttggtattccatatgttacaacacttgcaggagcaagagcagttttaaatgcaataaaagctattcaaaataatgaaatcaatgtaaaatctttaaatgactatgttggtggagaataa

SEQ ID NO: 6821 - DNA, 1083 bp, Methanobrevibacter gottschalkii
  source 1..1083: mol_type = genomic DNA
atggtaaaaatagctaaattagctttagaagatggtactattttaaaaggtgaggcattcggttatgaaaccactaaattgggagaacttattttttctactggtatgggtggttatactgaatctttaactgatccgtcttttaagggagaaattttaatgtctacttacccattagagggaaatcatggtgtaagtgagaagtggtatcaatcagataaaattcaagcggaaggttttgtttgtcgtgaggtttgtcgtgaggtttcaaatttcggacctcaaaaaacattggatgattttttaaaagaatttaagactcccggaattagtgggattgatactcgtgatttaacacttaaaattcgtgaaagaggttctcttaaagcggcaataacaactgaaaatatttctgatgatgaactaattaatttagctagttcacaaccgagtattgaggatatggatgttgtcccgttagtgtctacaaaagaaatcaaaatgttcaatggagatgctgataggaaggttgcattaattgattgtggtgttaaaaagaatattattaactcatttttagaaaggaatattggtgtaatattattcccttatgatactgattataaaactgttttagattattctcctaatggtttaatgattacatctggacctggaaatcctgatagggtatctgaaactattgaaaccatgaaaaagttatcaaacagattaccgatttttggtatctgtatgggtcaacaactaatagctaaatcttttggagctagatcatataaaatgaaatttgggcacaggggagaaaaccaacctgttaaagatttaaatactggaaaagtatttattacttcacaaaaccatggattcaccattgataaagaatcattaaaagaaactgatttagtattaactcaaattaacttgaatgatggaactccagaaggtatatcacataaagaattgccattacattgtatacagtaccatcctgaagcaggacctggccctaatgatacaaggaatatttttgacaaatttaatcaaatgatggatgattactaa

SEQ ID NO: 6822 - DNA, 1521 bp, Methanobrevibacter gottschalkii
  source 1..1521: mol_type = genomic DNA
atggatgcaaaatctgaagaaatatttaaaaaacatttaaacaattctaaagaatatgtaaaattcaaaaaacttgttaatgaaacaagagtttatgatattccaaaagaattaaccggtgaattaagagcataccaaaagataggttattcctggatagttcagaacattaaatataactttggatgcatattggctgatgacatgggtcttgggaaaacaatacaagttttaactgcaattcttcactttaaagagcaaaaacattatgattatgagccatccttaattatagtacctcctacattgttatccaactgggaaaatgaaattaaaaaattcacgcctacactttcctattatatttatcatggtgctaacagaacattcccattagatgaatatgacattattttaacatcatatggagtaattagactggatttagatatgtttttagataaaaaatggttcatatgtgttattgatgaggctcagaacattaaaaatccaaacacacaacaaacaaaagcaataaaaagtgttcctgcatttaataaaattgctcttacaggaacaccaattgaaaataaactaactgattattggtcaatatttgattttgtaaataaaggctatttatcaacattagacaatttcaaaagagattatgtttttagaatcgaaaggttggaagaaacatcaactttagaaaattttaaaacaataactaagccatttgtgttaagacgtcttaaaactgatgacaacatcaaagatgagcttcccgacaaaattgttaatgacatatactgtagcttaaccaaaaaacaagtattactctataatgcaataatggaaggaatttttgaagatttggaaggtaaaacaggtattgaaagaaaaggaattattttaaatattataactggattaaaacaagcctgcaatcaccctgcacaatatttgcgttcagataatcctaaaattaatgaatctggaaaaatggagttattgataacaattttagaaaatattttagatgttaatgaaaaagtaataatatttacccaatatgccaaaatgggtgagattattaaaaaattagtttctaagaaattaaaaacagacgttttattcttacatggctcacttacacaagaaaaacgatcagatataatttcaacattccaggaagatgaagatcataaaattttagttgcaacccttaaaactggaggtgtgggattaaatttaactgccgcacaaaatgttattcattatgacttatggtggaatccggcaatagaaaatcaagcaacagatcgtgtacatcgaattggtcaagaaaaagatgttatggtatatagatttataacaaaaggaacattagaagaagtaattgatgagatgagtaaaaataagttgaatctggctgaaaaagcaattagtaatgatgaaactttcatcaccgaaatgagtgatgaagaacttaaggaaaaattatctttaagattataa

SEQ ID NO: 6823 - DNA, 825 bp, Methanobrevibacter gottschalkii
  source 1..825: mol_type = genomic DNA
ttggatagaataattgaatatatgcttgaagaagataagggatttggagatattacttctgaagcacttgtggaaaaagatttggaagttaatgcatatatcatttcaaaagatgaaggtattttggcaggaatgaacattgtcaaagatttatttgaagagtttgatgttgaagttgtatataatttagaagatgggagtaaaattacaaaaaaagatttattgatgtctgttaaaggtaatgcaaggacaattttacttcttgaaaggactgtgctcaacttatcaatgaggatgagtggagtggccagtgccgctagttattattcttctttagttaaaaatcatgatgtgagaattgctggaactcgtaaaacttctccggcattggctaaatttgataaatatgcattaaaagtaggtggtgtagatactcatcgttttagtttggatgatatggttttaattaaagataatcatattgccgtattcaaatctcctttagatgctcttttaaaagcaaaagctaatgttagtttttctaaaaaaatcgaaattgaagttgaaacattatccgatgccattgaatgtgtaaaaaataaagcggatattgtgatgcttgataatatgagtggaaatgaagttaaagaggtcatcgatgaacttgaaaaattaaacattcgtcaaaattctttaattgaagtttctggcggtattactgaagacaatatcatggattatgttgaatctggtgtggatattatttcaattggtgctttaacccattcctctagaagtttgaatttcagtttgaaaattgaataa

SEQ ID NO: 6824 - DNA, 894 bp, Methanobrevibacter gottschalkii
  source 1..894: mol_type = genomic DNA
atggaaattatatttttaggaacttcatcagcagtacattcttatactagaaatcaccctgcaattattctaaaagcatttggtgagattatattatttgattgtggtgaaggaacacaaagacaattaatttttgctaaaataagtcctatgaaaatatctaagatttttattagtcattatcatggcgatcatattctaggccttccaggactattacagtcaatgaattttagaggcagagaaactaaattaacaatatatgggccaaaaggtttgaatgcattaaaaaatgcaatattaaacttaggatattgtaaaattgattttccaattgaatttattgaaattggtacagaaactattgaatgttgtgaagaatacataatccgatcacaacatgtcaatcaccaagttccatgcttagcatatgctgtagaagaacttaaaaaaccaagatttctccgtcaaaaagcaattgaattaggcgttcctgttggacctgcttttggaaaattacacaatggtgaagaaatagaaatcaatggtaaaataatcaaacctgaacaagtattagggcctgcaagaaaaggaattaaaataacttattctggtgatactgcaccctgtgaagaaatgattgattttgcaaaagattcaaccattttaatccatgaatcaacatatatgaatgaagatgccgataaagcagaagaaaacttccattcaacatcttcggatgctgcaagaatagctaaaaaaagtaactccaaacaattagttttaacacatttcagtacgagatatgcaacattagatgatttacttaaagaagcaaaaaaaatttttaagaatacaaaactggcaaaagattttatgaaaatagagatttaa

SEQ ID NO: 6825 - DNA, 756 bp, Methanobrevibacter gottschalkii
  source 1..756: mol_type = genomic DNA
atgaacatatcagtaacattaaataatcctgcatggacgttaatttatattttaatagttattatcgccacatcttttttaactagactaattgcctttttaatgaataaaatgaaacgttttcacaacaatgaggctgcaatttatcttacaagagatataataaattatataatctattttattgcattaatgattattttacaattttttggaataaatctggcaggaacattattgagtttgggaatagcaggtatagctttgagttttgctgctaaagatttaatatcaaatttattctcaggaataacattgattattggaaaaagtattcaagttggggatacaattgaaataaacaataaaaaaggaattgttgaaagaataacccttagatcaactattatttctgatgacagtggtgttaaaaagattattccaaactccacattgacaaattacccctacttacactttaaaactcctgaaaaatatagagtagacatccaaaccggattgtcattaaatattgatgttgaggaatttgaaaaatacattgttaaaaaaatattagaatatgatggaatattaaaaaatccaaaaccatccgtttattcaaaaggaatcacttttgaagaaactcagctcaaagtatcgttttgggtaaaagaatttaatagtaaagataaatataaattaacaattacaaacgaaattagaaaatttacaaaaatgggtgaaaaagatgagtaa

SEQ ID NO: 6826 - DNA, 918 bp, Methanobrevibacter gottschalkii
  source 1..918: mol_type = genomic DNA
atgagtaatacacttcaaaaagaaattttaaaattaaaagaagaaaaaaatgcaataatacttgcacataattaccagccaaaagaagttcaagaaatcgcagattttcttggagattcattagaattatgtattaaagcttctgaaattgatgataaagatttagtaatattttgtggtgtagatttcatggccgaaaccgcatttatattaaaccccgataaaaaaattgttattccaacattagaagctgaatgtccaatggcacatatgttgcctgaagatgtgcttttaaaagcaaaagaagaaaatcctgatgcaggagttatcctttatgtaaacagtattgctgaagctaaacaacatgcagatacattatgtacttcagctaatgcagtaaaagttgcacaaagcttgcctcatgataaaatattatttggaccagataaaaatttaggaactcatgtagccgataaaatcgataaggtaatcattcctgtgcctaaagatggtcattgttatgttcatagattattccatgttgaagatgttgagcttaaaagagaacaatatcctaatgcggaaataatttgtcacccagaatgtgatattaaagttcaaaaagcatgtgataaagtaatgtccactggaggaatgttaaaatacattgcaacaagtgataaagaagaatttgtaattggaactgaaattgacatgattacaagaatcaatgcagaagtacctggaaaaaaattatatcctttacttgaaggagctatttgtgaaacaatgaaattgcacacacttgaaaaaataagagattcacttgtaaacgaagctccacaagtcacattaccaaaagatgttgctgataaatcaaaaaaagctgttcaacatatgcttgatgtatcaaaataa

SEQ ID NO: 6827 - DNA, 1029 bp, Methanobrevibacter gottschalkii
  source 1..1029: mol_type = genomic DNA
atgtggggtgttagtatttttcgagaattaaatattgaatttagcaattttatcatgtcttcttttgaatttgaatctggtagaattcttaaagatgtcaatgttgaatatagtactatgggatttccaaaatatgatgaagatggaaacattactaatgcgattgtattttgccccactcttaaaggggaacgttctgttttagctaatcttcataatgctttgactatggataatatttctaatgatgatgagtttgcttttatccgtgataaaaaatatttttttattaggattgtttcattaggttctccggagtcatgttctccttccaccactgatttaaaacataattttcctaattatacttttagagactgtgttaattttaaaaaacagtttttaaaagaaaaatttaatttggattcagttttagctattgttggtgaaggagtagggggttgtgaagtatttacctgggcttgtgaatatccggattatatggaattcatattatccatgaataatctggctaaactatctggaactagttatatatttttcaaaagcatggaaagtgtattagaatcaaacgataaaatttattctgatgtatatgatccatctttgtccaaattggttgttgcagttaacaagatgctgttcttaaattatttatcaagaaacatgctttccaatttatcaagggatgaacttgatgcgttattggataattttgtagaagatggtttattcagggatgttcatgatttgaaatacctttgtgattgtcttttagagtatgatgtgaatgataaattatctaatataaaagctaagaccatacttatagcaatagaaggtcaatttttggtaaatgttgaaaaagaagttttaccactggaaaatgcaattgatgatgtggaggttatggtgattcagttagatgaaggggaatttgataatggggagtcatattcttctgtttttaaaatattttcatttttaaatgaatatggagtagaataa

SEQ ID NO: 6828 - DNA, 279 bp, Methanobrevibacter gottschalkii
  source 1..279: mol_type = genomic DNA
gtgattgttaaaattttaaattatggtgatgttggtaatcttaaattcattgaatatggcatatatggattattatcaactcaaattgattatcttatggaaaatttagaggaggaaacctcaattaatgaggatgtattaatcattaaaatgtattttgaaagtaagttatatcctttccaaagtggtgctgcaaaattcagattagatgatttcgtcgctcgtgaagaaatagaaatggctatgtttttgtcaagttttttagaggatatggtgtga

SEQ ID NO: 6829 - DNA, 1011 bp, Methanobrevibacter gottschalkii
  source 1..1011: mol_type = genomic DNA
atgtgggggattataatttacgatgaaaattattttatatcaaaaaatgaatattttacattgaattcatttgaatttgagaatggtggtgtattaaatgatgtaaacgtggagtatatgtcattcggaactccaatttatgatgacaatggaattataaaaaatgctattgtctattgccatggatctttaggcagttactcttcaataaaaaaacttgcaccattattaggtgaaaatgatgcttttgatgaaaataaatattttttcatttgtatttcagcgttaggatcaccagggtcctgttccccatcaagcactgatttaaaaaataaattcccaaaatattctatcagggatgttgtaaaatttcaaaaaaaatttttagctgaaaaatttaacatcaatcatgttttagggatgattggtaattccatggggggttttgtttgtcttacttcagcaataaatttcccagattatgcagattttattatttgcggtgttagtagctataaagttgcggggcatgattttatactatcacaatttgtaaatgaaatcattgaatctgatccggattataataaaggagatttgacttattctttaattagaacattaagaatagcttgtttggctgaatttaattttggattatcaaaaaaagcattaagggatatgtctaaaattgaattaagttctgaatttgaaaattttggtaatgaaagtattgaaacagatatttatgatttaaaatattgtaatgaagcatgcatgtattttgatgttgaagaagaattgggcaatatcaaatcaaaaacattaataattgcatgtaatcaggatcctcattttccacctgaattggatgctattccaatgtctaaaatgataaatgggtctaaattagtaataatggattcagatttagggcatttatgttttaatgaattggatactatttcaaatgaattaaaggagttcatggagggattgggtgattgttaa

SEQ ID NO: 6830 - DNA, 783 bp, Methanobrevibacter gottschalkii
  source 1..783: mol_type = genomic DNA
atgaaatataaaattttagaaaagcctagttgtgaagatggatatgatctggttcaagaagctctacgtaaaaaaacaacaatactaatctttgcttgctgtaaagttagttatgaaggaagggcattaagtgaactcaactggggagaacgtataattatgattaaaccagatggaacatttttaatccatcaagaaaaaaaagtagaacctgtgaattggcaacctccaaaatcaagaaccagaagttacattaaaaatgacaatttgttcttagaaagccatagaagaactccaaaagaattgctgactgtagaaattagaaaaatccaatttataaattatgcaaatattgaagactttgaggaacttgaacaggcaggatatgaaaaagatatgggtgacatgataatggaaaaaccacacatgattgaagaaggttttacacctactgcccgcgaatatagtgtggaacatggatttatagacattttaggaaaagacagtgataataatttaatggttcttgaattaaaagcacgaaaagctggaattacagcagtgaaacaacttagaagatatcttcaggatttagaaaatacagacaatgattatttaaaagagtgtgaatctcaaaagaaaaaaattagaggactgcttgttgcaccttcaattatggatgatgctttggaattactggaaaatgaaggtatcgagtttgtatctattgaacctccacgtgagttaaaaagagataaaaaagtaacattagatgcattttaa

SEQ ID NO: 6831 - DNA, 480 bp, Methanobrevibacter gottschalkii
  source 1..480: mol_type = genomic DNA
atgcttagtgaagaaatgattgatattaatgatataaattatgctatttataaaattgggcattgggaaaataactatgaaattaatcaaattggtttatctaatgaaattccggttactaaaaatactttaaagcatgtaaaactttcaatggtagaaattaggacttctagatttgaattatctgataaaatagttaatggttttgtagctattgcaattcatttaaattccaatgttcaaaacatggaattggatgaactgattgaacttgaagaaaaagaatatcaaaatattttaaaggaacttgataatctggaattattggatgataatgaatccattcctttggatagtgaagactatcttatttataaattggaaaaagattgccatgtaacgaaatctgttcctgctaatttgtacaccataaattatcataacaatgaattgaagaaaattgaagatgcattagattaa

SEQ ID NO: 6832 - DNA, 693 bp, Methanobrevibacter gottschalkii
  source 1..693: mol_type = genomic DNA
gtgaaaaaatgtcccgaatgtggaaatcctagttatgatggagccccagtttgtggaaactgtggatataaattccctaaagctaaaaattcagtgcctaaaggagaagatatcttcaaaaaagaacacaaaaaggaaccttccaatgacgaaagtacacttactattataaaacagaaaaagcttattattggaataatcttagttataactttaattttaatttgtggaatctttttaactggatcaaccaataaatcttcaccgattcaaaatgttgacacagaaaaatatagtgcaggatcattttcattcaaatatcctggtgattggcaggaactaaaccaaactgatgaagaacatccaggagctatattttataaagcagcaaacaacacaactgttgaatattacaatgtcagcagtagtgcatcatctttaaaagaaataaaccaaaatagaatcacacatgctcaaagtgtaggtgcttctgtcacccttcttgaaacaataacattagatggtagaaatgcatcaaatattatcttagaaaacgctgatggaaactacacaagatatgtttcaatgtttagtaatggagaactatatgtattcagactttctggagattccgtcaattccattacatctgatgaaattaatagtgtgataaattctgcagacatagcttaa

SEQ ID NO: 6833 - DNA, 828 bp, Methanobrevibacter gottschalkii
  source 1..828: mol_type = genomic DNA
atgacaaaaattaaactcgctttatgtcaaatgaatgttgttgataacaaaaaagaaaatatcaaaagagcacattcaatgattaaagaaagcgtatctaaaaatgctgattttataatattgcccgaaatgtttaattgcccatattcaaacgataaatttattgagtatggtgaaaaagaaaataatagtcctacacttaacgagatttctgaattagctaaaacaaacaaagtatacattctcgcaggatccattcctgaaagagaagagaataaattgtataatactagctatctttttgacaaacaaggaaatgttattgcaaaacacaggaagatgcatctttttgatattgatgttaaaggaaaagtaacattcaaagaatcagatgtgttaactgcaggcaataaagttacagtagctgaaactgaatttggaaaaataggcattggaatctgttacgatatccgttttcccgaacttgcacgaattatggttgaaaatggagcattaatactagtttatcctggtgcttttaacatgacaactggttcttcccattgggaactgctatttcgctcaagagctattgacaatcaagcattttgcattggcgttgcacctgcattaaataaaaatgctagttatcatagttacgggcattcgattattgtaaatccttggggaaaagtaatagctcaagctagtgaaaaagagagtttgataatttcagaaattgatttaaatgaaataaaaaaaataagggaagagttacccctcataaaaaataaaagaaatgacatctacaagattattctaagataa

SEQ ID NO: 6834 - DNA, 849 bp, Methanobrevibacter gottschalkii
  source 1..849: mol_type = genomic DNA
atgtctaatttaagttttgatgaagctatttctaacttatctgctgaagatgttggagttagaaaagaagctataaaatcattagttggaattactgatgaaaaagctattgaaccattaattaaagctactactgatgataatgcacaagtcagattcaaagcggctgaaattttaggaaatatgggtgatttggctgttgataaattaatcaatgaatttaataatgctgaaggtaaagataaaagatttttggcttttgcacttaaagaaactgaagataatagaattattccttattttgttgaagcaactgaagatgatgattttggagttagaaaagttgctgtacgtgctttaggagaacttcaagctataaatgaacttgaatcaatttcaaaatgccttaaagatgaagattggggtgttagattagctactattcaagctttaggtgattttgcaactgatgaatcaattaaattaattaaagatgctagaaaaagtgaagatgataaggacttcaaaaagtcttgtaataaagccattaaaaaagctgaaaaaagacaaaaagcaaaagcatctggaaaagccatagtaaaagtcattccaatgagcactattaaagaaatggaaaagagcaatatacaaaaagccattaaagaatatgaacgatatgttgaagcaaaacaagcaaaagatgctccatacaaacgtttatgtgtattgtataggaaagctaacgactatgaaaatgaagttagggtaattgaaactgcaattgaagtatttgcagataatgataaaaaattatcttactttgagaaaagattagctaaattaaaatag

SEQ ID NO: 6835 - DNA, 771 bp, Methanobrevibacter gottschalkii
  source 1..771: mol_type = genomic DNA
atgaaaaactattttgatattaaagacaaagttgcagttattactggtgcttcttctggtcttggctggcaaattgctcaagcatatgcaagccaaggtgcaaaattagcactatttgcaagaagagaagaaagacttcaagaaaatatcgctgaaatagaaaaagaattcggaaccgaagcgatctatgccgtatgtgatgttggaaattatgacagtatcactgaagctgttgcaaaagttatggatgcttatggaagaattgacattttagttaatgcggcaggtatgggaaacaacaaaatggttactgatcaatccaacgaagaatgggaaagacacattcacattgacttaagtggtgtttattacatgtgtaaggctgttggagaagtcatgattgaacaggaatatggtaaaatcattaacattggttcaatccactctagagttatcttccctggtggaggaattagtgcatactcctcagctaaaggtggggtaatgaacttaactaaaaacttggcagttgaatgggcaaaatataatattactgtaaatgctattggtcctgcagtatttgaaacagaattgactgttgattcaattgaaatggatggatttatggatcttattaaagcatattgtcctgctggtcgtttaggtaaacctggtgaattagatggtatagctatttacttagcatctgatgcatctagtttctgtactggtcaattaatttgtattgatggtggatggactgctatttaa

SEQ ID NO: 6836 - DNA, 2598 bp, Methanobrevibacter gottschalkii
  source 1..2598: mol_type = genomic DNA
atgattgaagagcaaactaaaatctactctaaaaaacaaatttttaaaaccttacatccatgggttcaaaaatggtttgacttacaattcgaagattttacacctgcacagaaaaaatcaatcatagacattcacaaaaggaacaacattctaatttcatcaccaacaggatctggaaaaacattaactgcatttttatccataattagtgaattaacaacacttgccgataccgatcaactagaagataaagtgtattgcatttacatttcacctctaaaggcattagataatgatattgaaaaaaatctagaagaaccattaaaaggaattgaagaaatagctggaaaagatttaggaatacgaaaagctgtaagaacaggtgatacttcacaatatcaaagacaaaaaatgcttaaaaaacctccacacattttaatcacaactcccgaaacattatccatattacttgttgcccctaagtttagagaaaaattaagtggagttaaatatgttattgttgatgaaatacattcactagccgaaaataaacgtggagttcatttaagtttatctttagagagattgcaacacttaattggacaatatactcggattggactttcagcaactgtaagtccgcttgaagaagttgcaagattccttgtaggttatgaatacggtattgaacgtgactgtaaacttgttaaaatcaactatttaaaagaactggatatgcaggtaatgtgtcctgtaagtgacattgtaatagcagatgaagaagatactcgtcttgggatgtacgatttattagatgatttaatccaagaaaataaaactacattaatctttacaaatacccgtagcggaacagaacgttttgtttataacttaaagaaaatgtatcctatgaattataatgattcaaatataatggcccatcactcctcactttcaaaagaagttcgtcttgacacagagaataaattaaaggaaggaaaactcaaagtagtagtttcatcaacatctcttgagcttggaatagatattggatacatagaccttgttgttttaataaattcacccaaatctgttgcaagagcacttcagagaattggaagaagcggacacaaattacatgaaaaatctagaggcagaattattgtaacgaatcgtgacgatttagttgaatgctctgttttgcttaaaaatgcaaaagaaggaaaaatagacaatattaatattccaactaactgtttagatgttctagcccaacatatctatggaatgagtattgaaaatccatgggacattgattatgcttatgatgtgataaaaaaaagctattgctataaaaacttaccaagggatgattatgaagatgtattaagttacatggccggcgaatatcctgaacttgaagagagatatgtttacgctaagatttggattgactataaagaaaatacttttggaaaacgtgggaaattagccagaatgatttattcaactaatattggaacaatacctgatagttctggtgttttggtcaaatgtgatggagaaactgttggaaaaatcgaagaaaacttcatggaaagattaaaaaaaggagatactttcgttttaggaggtaggatttatagattcaactatgggaaaggaatgacaatcaatgtaactcctgcaagtggacctccaacaataccttcatggttttcacagcagttaccattatcttttgaccttgcaatggatattcaacgtttcagatcccatatggaaaccaaatttgaatatcgaagaagtaaagaagaaataatggattttatttttgattacttatatgttgatgattttgcagctaattccatttatgaatattttgttgaacaatataaatatgccaaaattccaagtaatcgccttttactcgttgaatactataaaggatttggtggaagaaattttgtaatatttcattcattatttggaagaaaagtaaatgatgccctatcacgtgctgttggatatgttgttgcacatcaatataatacaaatattacaatttcaattacagacaatggtttttatttgagttcagatggtaaaattggtggattagaatcatttaaacaattaacccctgaaaactttgaaacaatattaacaaattccctaaacaaaacagaaacacttgcatcacgatttagacactgtgctggaagatctctaatgactctaaggaaatacaaaggagaatccaaatcagccggtcgtcaacaagttcgtggaaaaatattgctaaaatttgttcaggacatggacgataatttctcaatattaaaagaagctagaagagaagcgcttgaagattacatggatattaaaaatgctttgaaagtaataaacatgattgataacgaatccatggaaataaaaaccataaatactgtgataccaagcccatttgcatttaatttagtttcacaaggatatttagatattctaaatcagaatgacaaagcagaatttacaaaaagaatgcataaagcaatacttgatcagattaaagataaattaaaagacatttattag

SEQ ID NO: 6837 - DNA, 462 bp, Methanobrevibacter gottschalkii
  source 1..462: mol_type = genomic DNA
atgaaaaccttactcgtttattattccaggacagatgtaactaaaaaaatagctaaaatgattcaagagaaaattaattgtgatattgaagaaataactgacgacgacaaatattctggaaaacttggatttttaaaaggtggaatgaatgcttcaatgggaagaacaagcgacattaatattatttcaaaaaatccaacagattatgatttaattatcattggaacaccagtttgggcttcaaatatagcaactccaatttacacttacttgatgaaatacaataaagacttcaaaaatgtagcttcattctgtacatgcatgggcaacggatatgaaaaaaccttaaaaaatatctcagaaataactggaaaagaacaaatttccaccatgttttttactgcagaagacattaaaaacccagaagaaaaaataaatatttttattaatgaaatcaaataa

SEQ ID NO: 6838 - DNA, 369 bp, Methanobrevibacter gottschalkii
  source 1..369: mol_type = genomic DNA
atgactaaatggaaagcagtgattataggtttcatattagctgtaatagttaaatcatttttcgcacaatatgaatttattggattattatttgttggattcatcacaggttatatcgcacatgacggagcacttagtggcttatggaatgctgctgttgctggagcattaggaaccattgtttgtgctatattatttgttttagttgcaactttaggtggaagtttattcggtattttcggaggattaactggatttaccctctcaggaattacaagcataaccatagtattaggttatttaatttattattcaatcgtaatgggaataactggagcgttaggtggaataatagcttctaaaaaataa

SEQ ID NO: 6839 - DNA, 408 bp, Methanobrevibacter gottschalkii
  source 1..408: mol_type = genomic DNA
atgaatatgttttcagagataaatataaaggcattagtttttggagctgcaatagctgcagcatgtatattaataggataccagtattgggattggttatatcccttttcagcgataggacttatctatgcaggatatggacaatcaaacatcaaaattggaactgcaatgggagcattagcatccacaccagtagcaatattaacattacaaggatatttaggaacatttaaagaaggattttttacaacagaaaatggaatacttgcagtgaccctgaccgttattgctgttggtgcatttatcggttttgttggtgcatgggctaaaagagatcgcataaaagcattagaacaatataatcaaaaacagaaaatcggtaaaaacaaaaacaagaaacaaaagtaa

SEQ ID NO: 6840 - DNA, 1092 bp, Methanobrevibacter gottschalkii
  source 1..1092: mol_type = genomic DNA
atgggaaaagttaaaaaggaagatatcttggatatcttggctaaatatgacaaaagtgaaataacaatagctacccttggaagccatacctccttacatattttgcaaggtgcaaaagaagaaggatttagaacagctattgtttgtgaaaaaggaagggaaattccatatcaaagatttgatgttgcagatgaatatatccttgtcgataaatttaaagacattgtaaatgaagatgttcaacaaaaacttagagatatgaatgctattgtggttcctcatggatcttttgttgcatatgctggtttggataatgttgaagataagttcaatgtccctatgtttggtaatagggatgtacttagatgggaggctgaaagggacaaagaaagacaattgcttgttgaaggtggcgtaagaatacctttcaaatataatggtccttcagaaattgacaggccagtaatggttaagttcccgggtgcgagaggtggaagaggttactttgttgcctcatctactgaagaatttgatgcaaaaattgaagctatgaaagcacgtggatggttagaagataaagatgtagaagcggcacatattgaagaatatgtttccggttgtaattactgcatacactatttctattctgcattagatgatactgttgaattaatgggtatggatacaagatacgaatccagtattgatggttttgtaagaatgcctgcaaaagatcaattggatattgatttaagtccttcttatgttgttactggtaaccatcctgctgtaattcgtgaatctttacttccgcaagtatttgatatggctgataaattaactgaaagtgctaaaaagttagttgcaccaggattgaatggtcctttctgcatgcaaactttagtaaatgataatttagaagtaatctgttttgaaattagtgcaagaactgacggcggtacaaatacatttatggatggttctccttattcatatctaacttatggtaaaccaatgagtatgggtagaaggattgctcttgaaatcaaacgtgcgatagaaagagaagaattagaaaaaataataacataa

SEQ ID NO: 6841 - DNA, 531 bp, Methanobrevibacter gottschalkii
  source 1..531: mol_type = genomic DNA
atgttaatcggtttaatttcagacacacatattcctgatagagcaaaagaaataccgcaaaaagtaattgatgcttttaaagatgttgatttaatattgcatgctggagatttaacatctatgaaagttatagaagaattggaaaaaatagcaccaactatagtaatacaaggaaatatggacagaataaatggaattgaccttccaaaaacaaaagtaatcactgcagaagacctgaaaattggtttagtgcatggagaagtttatcctagagcagacacacaacaattattatatattgcaaaacaattacaggtcgacattttagtatctggacattcacaccaaccaaaaattgaacaaatagaaggtgttttacttttaaatccaggcagtccaattgtgccaaggcttgcagatagaactgtgatgttacttgaaattaacaaacaagaagtaaatgtagaaattaaaaaaattggtgcgcctgtctgtagtgcacttgactttgacaaatataagagggattga

SEQ ID NO: 6842 - DNA, 639 bp, Methanobrevibacter gottschalkii
  source 1..639: mol_type = genomic DNA
atgggaagcagatggcagatggaaaaacataatgacccatattataaaaaagctaaacaagaggaatatcgctcaagagcatcatataaactcaaacaacttgataaaaaatataaactaatcaaagaaggaaacacagtcgttgatcttggagcagcacctggaggatggtctcaagttgctcttgaaaaagttggagatgaaggaattgttgttggagtggatttaaatagattcaaaaaattccatgaagaaaattattatgggctcagaggagacttcacaacacctgaaattcaagaaaaaatcatgaccctcattggaggaaaagcaaaagtagtaatgtctgatgcatcaccatcattatgcggaattaagaatattgatcagcttagatctattgatttagttaatgttgtaatcgaaattgctgaaaacatattagaagaaaaaggaaatcttgtaatgaaagtattccaaggtcccgaatataaaaacatgctagattctcttaaaggaaaattcagacatgtgagaacaacaaaaccagcatcatcacgtaaaaaaagttctgaaatgtatgttattggcttagaatatatgccaaataaacgaaatagaaaaaaaagaaaaaattag

SEQ ID NO: 6843 - DNA, 420 bp, Methanobrevibacter gottschalkii
  source 1..420: mol_type = genomic DNA
atgagaaaatctagattaagtttatttaaatctacttctatgatgatttctgttgttggaatcataatgataatttcaacaattatcgttgtggcatatgtggggtatagtattgtttcatccagtattactaatgatatatcctctggaacacaatatgatgagcttgcagaacttaaagctgaatacagcaatttgtctgttaaatttgataatattaaatcaacatattatgcaggtgatgctgatgatgttaaagtttataatgatgctaaactagagttatctcgggctaattccgctattgaaaatgttcaaagtgctttagatgcagataaaccatctaatgatgttgatagtagaattgtttttgctaaagaaaaacttgaatctgctgaaaaggcttataatagtctctaa

SEQ ID NO: 6844 - DNA, 2004 bp, Methanobrevibacter gottschalkii
  source 1..2004: mol_type = genomic DNA
atgaattcaactactaaatcacaaacatcaattgcaaaatttgaagaattttttgctacatcatataaggacgacgtattcaaaatccttgaacaataccctgatgaacgatcacttaatgtagattatcgtgcattagaaatatttgatcctgacttagcagatttattaatagataaaccagaagaagttatcgatgctgctaaaatagctataaaaaatattgatccacttgttaaagatgcagatatcaacattcgttttgaacatttaagtaacattattcccttaaaaacacttttaagtaaatatatcggaacttttgttgctgcagatgggattgtaagaaaaactgatgaaatcagaccccgtattgaaactggagtgtttgaatgtagaggttgtatgagattacatgaagtagaacaaagttcagcaaatagaataatagaaccttcattatgtagcgaatgtggaggacgatcatttagattacttcaagaagaatcaaaatatgttgatacgcagactgcaagaatgcaagaacctttagaaaatttatctggaggaactgaacctaaacagatgttaatgatattagaagatgatttagtagataaattaaatcccggagataaagtaagaattaccggaacattaaaaactttcagagaggaaagaagcggtaaatttaaaaattacatttatgtaaatcatattgaaccccttgaacaagaatttgaagaattgcaactttccgaagaagatgaagaacaaatcatcgaattatcaaaagaccctaatatttatgataaaatcatcaaatcaacagcaccatccattagaggatatagggatgtaaaagaagcgatagccctacagttatttggaggggccgctaaacaactagaagatgaaaccaaattaagaggagatatccatattcttattgttggggatcctggtattggtaaatcccaaatattaaaatatgtttctagactcgctccaagaagtatttatacaagtggtaaaggtacaaccggtgcaggtttaacagctgcagctgtaagagatgaacttggaggatggtctcttgaagcaggagcattagtgcttggagatcaaggtaatgtttgtgtcgatgagctcgataaaatgagatcggaagatagatcagcacttcacgaagcattagaacaacaaaccgtaagtattgcaaaagcaggcattatggcaacattaaattccagatgttccgtacttgcagcagcaaaccccaaatttgggagatttgacagatacaaagtgcttgcagaacaaattgatttacctgccccaattatttctcgtttcgatttgatttttgtaattgaagataaaccaagtaaagaaagagattcaaaattagcagagcatattttaaaaactcaccaattcaacactgttgattacgaaattgaacctgaattacttagaaaatatatcgcttatgctcgtaaaaatgttaatccaagattaacagaagaagctaatgaagttttaaaagaattttatgtgagtacaagaaacagcaatcctgaagaacaaggagcagttcctattactgcaaggcaactagaagcaattatccgtttatccgaagccagtgctaaaattaaacttaaagaaactgttgataaagaagatgcagaaaaagctgttagattacagttagcttgtcttaaggaagttggtgttgatcctgaaactggagaattagatgctgatatcgtaagtggtggaacaccaaaatcagatagagataaaatacaaagagtaacagaagaaatcaaacagcttgaagaagaatatgctggacaagctcctttaaatgtattaatatccaatatgagtgacaaatatggagtaagtgaagataaaacagaacaaattgtcaaaaacttggtccagaaaggagtcatataccagccagtgaatggatacttcaaacgtgtggtttaa

SEQ ID NO: 6845 - DNA, 408 bp, Methanobrevibacter gottschalkii
  source 1..408: mol_type = genomic DNA
atggataaatacgaagatttattagaaagagcaattgaccaattacctcctgaagtatttgaacataaaagatttaaaatccctaaagcttattcagatattcaaggtaatagaacattcattaaaaacttcaaagatgttgcagaaggtttaaacagagatccgcaacacttactaaaattcttaatgagagaattaggtactgcaggaaatattgaaggtcaaagagcaattttacaaggtaaatttactcattacttaattaatgaaagaattgaagattatgtagataaatatgtaatttgtcatgaatgtaacagaccagatacccgaattatcagagaaggtagaatattcttacttaaatgtgctgcatgcggtgcaacagcacctttaaaatctttatag

SEQ ID NO: 6846 - DNA, 1044 bp, Methanobrevibacter gottschalkii
  source 1..1044: mol_type = genomic DNA
atgttttgtccagagtgtggaagtactgataaaaaaatgattggcaacatctgcataaactgttttttaaaagattttcagatgattgaactgcctaaaagaatcgaagttcaaatttgtagccattgtaatagtaaacttgaagaaggaaaatggagcgaagaattcattcccgaagaagaaataatttacagagcacttgagcgaaacataaaaatagatgataaagtctcaaatgaaattattaatttagaaattgaccaaatgaaaggtacaatcgccaaatgctatgtagaaattgttggagatgttgaaggaactgaaattgaagaaactcaagaaactgaagttaaaattttaaaaaccgtttgtccaacatgcagtaaaatacaatctggatattatgaatcagtcatacaattcagagcagataaaagagaaataaaaagcgaagaatatgacaaagctgatgaaatagttgaaaaaactttaataaaacaactaaaaaatgacaaattagcatattgcccacaaatagcaaaacctaaagaaggtcatgattattacattggatcactgaaaagtggtagaaaagttgctgaggctttaaaagaagagtttggaggaacaattaaagaatctccaagacttatcagtgaagataaatctactggaaaaggattatacagaatttggatttcagttagaatacctgaatttgaaattaatgactttatcatgtttgaagataaactaattcaagtaacaagtattgataagaatagaattgttggtaacgatattaaaacaggtaaaaaacagaatattccattaaaaaatatggaaaaaattaaacttattaaaaaatcatcagatattgaaacaacaacaataatttcaatgtctccaagtacaatacaaattttagaccctgctgattactccgcagttgatttagaaatgaaagatgaatttgctaattataatattggagacgaaataagacttataaaaatcgataattacacatatttactaaactaa

SEQ ID NO: 6847 - DNA, 963 bp, Methanobrevibacter gottschalkii
  source 1..963: mol_type = genomic DNA
atgaatattgaagaaaagattcagttaatcgaagagggaaccttagaagttatagacactgaagaattaaaagaagtacttgctaaaaaagaacctatagcttatacaggttacgaaccttctggtaaaatccatttaggacatgctgtaactgtacaaaaactcaaacaattgcaaaaattaggattcaaaataaaaatcctcctagcagattaccatgcatttttaaatggaaaaggaactattgaagaaattgctgaaactgctgagtacaataaaaaatgttttcaagctctcggtcttgatgaaaaaactgaatatatttacggttcatcattccaattagaacccgattatactgataaagtctatcaattagctacaatgaccactttaaaaagagcaaggagaagtatggatcaagtaagtcgtgcagatgataatccaaaagtagctagtgtaatttatccgattatgcaaactgtagatatggctgcacttaaagtagacattgctcttggaggtatggaacagagaaaaatccaaatgttggcacgtgaaaacttagagaaaattggggaaaatgttcctatttgtattcacaccccattattacatggtcttgatggagatgcaaaaatgtcttcaagtaaaggaaattatattgcagttgatgactccattaaagatattactaaaaaaatcaataaaagttactgtccacagggtgaaattaaaggcaatccaatgattgaaattgcagaaacatttgtttatccaaatgaagaaaagttactcattaaaagacctgaaaaattcggtggagacattgaactcacacatgatgaattaataaaagaatttagtgaaggtaatttacacccaatggatttaaaaaatggaattaaagatttcttaattgaattctttgctcctgtaagagaatacatggaggaaaactaa

SEQ ID NO: 6848 - DNA, 210 bp, Methanobrevibacter gottschalkii
  source 1..210: mol_type = genomic DNA
atggttgaagaaaaagaagaattcgaaatgggtttgccaaatggtgttggtgaacaaatgcttgctcatgcattcgaaaaatttgatattaaattagagcagactgagtttggacccaaacttatcggagaatatgatgaacttataaaagtaaaagaattcttagaaactggaattcgtgacagactaaaagaattagaaggagaataa

SEQ ID NO: 6849 - DNA, 579 bp, Methanobrevibacter gottschalkii
  source 1..579: mol_type = genomic DNA
atgtatattgtatttgaaggaattgatggtgctggaaaatcaactcaaattcaattattaaagcaatggcttgaagataacgggtttagagttgaaacgttagttgaaccaacagattcagaagttggaaaactaattagaaaaatattgcaacgtccagatgcaacaacagacaatgttcaaaaaacattggggcttctctttgcagcggataggatgttaataatggataaactggaagataaatcgaaaataattatttcagataggtcttttatttcaagtttagcttatcaagaacctgttgattggattgaagttttaaataagtatgctaaaaagcctgatttattagttttacttgatttggatgttaaaaaatcagttgcaagaacctctggtgaggatacattcgaaaatgaggaatttttaatcggtgttaaagataattatttaaaattagctaaaaattatacaagtgaaattattgacgcaaataatggtgtaaataaagtatcttcagatatcaaaaaagtgattgcaccatatctcggaatctgtccggattgtatacaataa

SEQ ID NO: 6850 - DNA, 2535 bp, Methanobrevibacter gottschalkii
  source 1..2535: mol_type = genomic DNA
atgaataatcaatcaaggtgtaaaaataaaatggttttaaaagaattattagctccagcaggttcctatgatgtattagtaactgcggttaatgctggtgcagatgcagtttatattgcaggaccaaattatggtgcaagagcatatgctaaaaactttacaattgaagaactggaaaaagcagtgaactatgctcatttaaatggtgttaagattcatgtaacagtcaatacattagtcaataactttgaaatagcagatgtgttgaattatttatttaaattatatcaaattggagtagatgcagttattgtacaagattttggattaatttggcttttaaaaacttttatcccagatttagaagttcatgcatcaacacaaatgggattaaataattacagttcaattaaatgggcttcagacaataatataaaaagagtagttttaccaagagaagttaatataaatcaaataaaaaaaacctataatcaacttaaaaaagacaatatcagtatggatcttgaggtatttggtcatggcgcattgtgttattgtgttagtggaaaatgctatatgtcttcatacaatagtggtagaagtggaaatagaggagcttgtgcccaaccatgtagaagacaatatcgtttaaaatacagaggttacaatataggaaatggatttttactttcaactcatgatttagctacttacaaaaatataaaagaaatttcaaatgcaggagttaaatctcttaaattagaaggcagaatgaaatccaaagattacattggaacaatagtaaatagttacagaaacattattgatggcaaccccggaaactatgaaaaagatttgcaccttgtttttaatagaaattttaccagcggatacattatgggcgataaacctggagaagtaatgggaagagaaagttcaggtcacgaaggattatacataggagatataaccaacattgaaggaacaaaagttactattgaaataaaaaataaagaaattccggttattttagaacctggagacggaattgcatttaaatataatggtaaaattaaagggatttatttagaaaatatcataaaacaagatgaaaatgaaatcataatagatacaacacgtctcgttaaagaaggaactgaagtatttatcagttattcttcatcaacccatgaatatcttaaacaatttgaaaaagaaaccattaaaaatcacattggccttaatttatcattaacttgggacaaggaattgaacttatacaccaaagttgaatattatgttgatggagaattaattaattttagacataaatcactggacatgttcgaaaaagcaaaaaataaaccagtagatgaaaaaacaattgaaaatcaacttaataaaactggtgaaacaccattcttcattgaaaaaatccagtttaataatatgcctaatgatatgttcatacaaattcgtaaaattaatcagattagacgtgagatactagataatgcaaccgagttgttaatgaaacattacacaccaactaaaaaggcagtaaaagaagtgcgtaagaacttaactaaattttttgaagattatgaaaataacaaagggaaaattaaacaaaaaacacctaaattgtcattattcattgatgacctatcacagataagagcagcctcaggatttggcttgaaaagaatttattttgatggtacctgtcattataacaacccagatgattattttaaaaatattaaagataccttaatgaaaggcagtttaatggcatcacctacagaatttgtttgggttttatcctcctttatgacacaaaaagatgcaattaaatgtaatgaaattgtaaaagaacttgaaaatgaaggaatcatcatttctgtaatgggagattttcctggaatgaatgatatatttgaatgtccagtatatggaaatcataatttaaatgtttggaatagtttttgtgtacgtgatttaaacgaagcaggatttaaatcattaattttatcatctgaactctcaggtcatgaaattaaagaattaatacgtaggaatcatgatagaaatattgatttagaaatgattgttaatggaaacttagaagtgattgtgagtaaagatgacttcactaatttaaatgacggtaaagatttcattatttcaaatgatgcggattatgcaatactagaagataaaaaaaggaaaaaattcaaatataaagtgttctttgactacaacagacaaagtcacatcatcaataaagattgtttatgtttaattgaagagataaatgaaattaaagaatttggtcttgattcattgattcttgattgcagatattctaacgaaaaatatacaacacaaatattatcaatttataatgaaagccttcataataaagatcaagatgagctgtccaaatacaaatatcaaattatggatttttcacaatcctacattaacaaaggaaattacattgaaggcagattacacgaggataaaaaatga

SEQ ID NO: 6851 - DNA, 2418 bp, Methanobrevibacter gottschalkii
  source 1..2418: mol_type = genomic DNA
atgaggattcctgaactacttgcacctgttgggtcaatggatcatttaaaagttgcaataaatgctggagctagttctgtttatttatctggaaaagaatatggtgctcgtaaatatgcaactaactttactttagatgaaattaatgaagcagtagacacagcacatatacataatgttaaagtttatgttactgtgaatacattaattaaagaagatgaactggaagatgtaatcaactatgtttccaatctatatgcaataggagtagatgctgttttagtgcaagatttaggattggtcgaattgattaacaaacacataccaaaattaaaaattcatgcatcgacacaaatgacctgtgaaaatcagttaaaattaaattatttagaacaaaaaggaataaaacgtgttgtactcccacgtgaaatgagaaaagaagaaatcaaatcacttaatacaaatatggaacttgaaatatttgtacatggggctttatgttactcttattcaggacaatgcttaatgagtagtttcaaaggtggacgtagtggaaatagaggaacctgtgcacaaccttgtcgccaaaaatataaaattgaaggaattggaaaagaaaattattatttgtctccttgtgatttaagtttatttaacaaattaaaagaaattttagaactaaatattgactgtatcaaaatagaaggcaggatgaggaacaaagaatatttagctattgtaattaatgcttatcgtaaagcattgaataaattaaaaagtaaaaaagagattgaaaacgaaaatataaatcttgtattcaatagaggtctgtgtgaaggattatttaatgattctccaaaaagaagtttaaaagccggacatattggattaaaaattggtcatgtgataaaatccgagaaaaatcaaatcgccatcaaattagatgattccatcaaaacaatacctgaaaaaggagatggattgttaataattaaaaataatgatgattatggatttgaaatatcccaaaatccaattataacctccctaaatcattttaaaactggtaaaaataaaccaatgaaaaatttaacccgtagagacaaaattttaattgttaaaaaagtatggcaaaataaaaagagtacttttaatttaaatgaatctgacgtgtatttaacaaaaaaaaacaaattaactaaaaaagttaaagaaatagaatcaaaaggatccagttttatcaaatccaaattagtacttacattttccattaaaaataagtatccaacacttaaaggaaaattaacgcttcaaaataaaaaagaagttgaaagtgaagttattggaaatactccttttgaaaaacctatcaaaaagagcattaatagagaggtaattaaaaaacagctccaaaaaattgataattacccttataacattattcaaattaatatcaattatgacggaacattatttattccaataaggaaaattaatgaacttagaagaaatttatttgaaagattagaaaaagaagctatcaattcctttaaacatgaaaataaaaaaattaaattaaaacaatataataatgaaactaatgaatccaaatacaatatttctttttacacaaacaatttaaaacatttagaacacattgaaaatgttgaaagagtttatctagaaattccaaataatgatgactcattaattctctcagaagaaaaacctaatattagttatatgattaactttatcaaacaagcttatgaaatttcttatgataaagattataagttaatctggaaatggccagatataactcatgataacttaatcaaatcattgaataaggtaaggggcatattaaataaaatgcattatactttaccaattatgagcaatagttttaatggggagtatggattttattcaatgaatattacaaataatgagacaatcaacagtcttaaggactataaaattttaacattatcaccggaattaactaaaaaagattatgaaaatattattaaacattgcagatatcctaaaaaagttgaaatcttagttcaaggatcagtcgaacttatgaaaactagatatccgttactttatggtgcagaagttaaaaagaattataaaaattatttaattgataagaaaaacaataaatatcctattcataaaagcatttcatcacaggaattaagcatttttaatgatagcgaactttctttaattaatgaaataaaacatttgaaaaacatcaattattctaattttgcaatagatggaagatataaggacgatgaatattataaaatgattgatatctataactgcgcaattaacggatacattaacgaaaaagagttaaaaaaatatagttctaaaaatacaatcgcgaattattaa

SEQ ID NO: 6852 - DNA, 1926 bp, Methanobrevibacter gottschalkii
  source 1..1926: mol_type = genomic DNA
atgcaaagggaaataattacattgcagaatattaaaggaattggagataaaatctctgaaaaaattataaaaagtgttggaggtgaaaaagaactccaaaagattgttgacaatgctgatgttgaaaaaataaccaacattgatggaataagtcaaagaaaagcaattgatatcatgaatcaattactgaataatccgaaatctgaatttataaaaagtgatagagctatggaaatttatgaagacatcattaacaagatattagcatattctaacacttcatattcaaaaaatagaatattattactttcaccttcaaaagatattaaaaaaattaactcacaacttgattttgtaatggatgcaaaagaacatgtttcaaaacttccaataatcaaattaaaaggattgatgaagaatctaaaagaagttgaagaagtaaaaaccgaatatgatccaagtaaggtcattcttgttgaaagtgaagaagataactcatatcttactgatttaggattaaaccagtattatcccataataactgcaagtgattcaccattactccaagaggaaatgatgaattatgatttggtattttatgtatattcccaagggatacttgattttgaagggatgccaaatcttataatgataaatattgaggataatgattatgaaatagttcccgaaaaaataatcaatttctttattcaaaataaagatttattcacaagagttcatgaaatacaaaaaatccgaaataaagacagtgtacttggagaaatagtccccattattgatgaattaaatatcattgataaaagagaagtcaatattgaaaaacttgtttattcccttaaagaggatatggataatgaattagaaaaatcaattaaacaaattgatcttgaaggaaatgaaattcttaacctattaaataataatttccctccaaagattagtaaaatatttgatgacattatcaataaacgaaaagatattatccgtgaaaaaactggattgagttttgatccatttttaagaacatatcccattgaaatagatgatgcagaaatacaaagaataacacttgaacaatcctctaaaaaagaaaacgatatttttgatattaaaagaagtgcagcaatagaattaaattcaattaaaaagaaagctattgaagaagttgaagatgctataaaatttgactacgaatttagcttaggcagttttgcatacgaatatgatttatgtagacccaagtttagtgaagaaattcaactaaccggagcattgcatttagaactagcacttaaaaaagataaagaattcattcaaaaaataaattaccaactgacacaaaaagaaaatatttcattactaactggagcgaatagcggtggtaaaacaacactgcttgagactttaacacaaatatcaataatggcgcaaatgggactcccagtatgtgcggacaatgtacaaatcaaattattcgatgaaatttatcatttctctaaaaaaagatcactcgatgcaggagcatttgaatcatttttaaatgtattcataccaattgtaactacaaatagtgaaaaattagtattattagatgaacttgaaggaataacagaacttgatgcagcagttaaaatcatatcaacattcatagatatgataaaagaatcaaattcttatggagtaatcgtcactcatatggcaagagaactcatgaactatactgatattcgagtggatggtatcgaagcgaaagggttagatgaaaagtataatttaattgttgatagaacacccagaatgaatttccttgcaaaaagtacccccgaattaattttaaaaagaatatatgaaaaatcagatgataatttgaaggctgtttattctagaatattggaaaaattctaa

SEQ ID NO: 6853 - DNA, 1482 bp, Methanobrevibacter gottschalkii
  source 1..1482: mol_type = genomic DNA
gtgatttttttgaatattaaagtatttgatactacattacgtgatggagaacagactccgggtgtttctttaactcaacaagagaaattaagaattgcaactaagcttgatgagattggtattgattatattgaggcaggttctgctattacttcaaaaggagaaagaaaatcaattaaaggaattgcacaacaaggttttaatgcagaaatattaagtttctcaagacctttatcagttgatattgattattgtttagaatgtgatgttgatggtgttaatttagttgttccaacttctgatttgcatatttctgataaattaaaaattacacgtgatgaattaattcaattgtccaataatgctgttgattattgtaaggatcatggtttaattgttgaattatcagcagaagatgcatcaagaagtgatactgattttttaaaatctgtttatctaagtgctataaatcatggtgctgatagaatttgtgtttgtgatactgtaggtatattgacaccagattcttcatttgaattatttgataaattaaatgaggatattaatgttcctattgctgctcattgtcataatgattttggtcttgctgttgctaatactttatccgccttgaaaggtggtgcaacagaattccattcaactattaatggtattggtgagcgagcgggaaatacttcttttgaggaatgtgttgttagtattgacagattattgacaaatttttcaactaatgtcaatattcatgaaatttatgatatttctaaattagttgccagatcaactggtgtgtatattcaacctaataaagcaattgttggtgaaaatgcatttgctcatgaatcaggtatacattctgatggcattattaaaaattctgcaacatatgaacctatgactcctgaacttgttggccgtaaacgtaagtttgttataggaaaacacatggggactcatggtttggagaatagacttaaagaaattggtttatcagttaataaaactcaacttcaacaaatttgtaatgatattaaagagttagctgataaaggaaaaactgttactgatgttgatttacatgtaatagcggataatgttttagagataaatcatgaggataggattaaacttgatgagttaactattgtttccggaaataagataatgccaactgcatcggttaaaataacttttgatgatgaagaaattcttaatgctggagtcggtttaggtcctgttgatgccgccattaatgctgttaaaacagttgatgcattcagtgatgttgaattaattgagtatcatgtagatgctattactggcggtactgatgcattcattgatgtaatcattaaattacaaaaaggggataaagttgtatctgctcgtggtacggaaccggatatcattaatgctagtgtgaaggcgtatatttctggagttaatagattattacgcgattag

SEQ ID NO: 6854 - DNA, 492 bp, Methanobrevibacter gottschalkii
  source 1..492: mol_type = genomic DNA
atgtatatggaaaatattcagattttaggtttaaagggtactattgattcagttagtgaaacacttaatttaattgatggtattaaagaagatagtgaaataatccaacttttaaatgcagattccattgcttcaagaaatcatataattcatggtgttaatcaagcgattcttgcttttgatagatgtgaaaatttagctaaagatttaagtgttgaaattgttcttagatgttctgcccaaaggcagatttcaaaagcatttgaaattttaggtttaaaagaaggatacatgaatttatgtgcaattttagttaatagtaaaaatcatacttctgaattatctgaaatattctcattagatgataatgtttttattccagatgatgagattttaatgaaaatctataaaattagtgatattgagataaaaaacatgtctcttgaagatattattattgacagaattacaaaactcactgtaaattattaa

SEQ ID NO: 6855 - DNA, 954 bp, Methanobrevibacter gottschalkii
  source 1..954: mol_type = genomic DNA
atgtttaaatttaaaaccccctcagagaaaacaagacaaacaatgtctaaagttgcattaggtaaaaccaatataaactttgaagaaagatgcacagaaaaaataaaaaggttaaccgaaaaggaagaagttaaaattacttcaagtggaaataacagtatttttattgcactttcagctattaaaggagacattatcattcctgatcaaggaggttggcatggatttaaacagattgcaaaattcttaaataagaatatcattacattaaaaacagatttaggtttaattaaccctaaatatattgatgaactggatttaagagaaggttctgcattaatttatactagttttgccggatactgtgccgagcaagacactaaatcaattgcaaagtattgtaaaaataataatattctaacaatcgaagatgcttcagccggaattggagatagtgaaaaaaaacttggaaaatattcggatataatacttgcatcaacaggatcacctaaaataatcaatgttggtcagggcggttttattgcaagcaatgaaagtgaaattttcaaagaagatttaatgccccaaaaattaagcaaaacatcagaaattgtatgtagtggtatagatagtgaacttgataatattgcagaaaaattaaatcttacagtaaatgctacaaactatctaaaaaaatatattaataatgcattacatccaaataaaagaggtgttaatgtaattatactgcatgatgatgcgaaagcaattggttggaatttgaaaaaaaaattaactaccgataaaagtggatttattacaacttgccccaattataatcgtgtgaaacaaaaagcaatatcaattgaaattaaaaatcttgattacaattgccttaaaaaagagcatttagataaaataattgaagaaatggaaattaataatttacagtga

SEQ ID NO: 6856 - DNA, 1173 bp, Methanobrevibacter gottschalkii
  source 1..1173: mol_type = genomic DNA
atgaaaactactaaaaatgcttatcttgccaaattaacggaacaaatccaaatgaaatccgttaaagttggaaaaaatcttgaaggaacaactccaccatcagtgtttattggaagatggtcatatccaaaagtatatgctggaccaatgatgagttcacaaatgggagacacatctatcatggacacaccagaagattggattggtcaaaataaaacacaagatgaaattattaattatagaatgaatcttgtacgtggaaagcaattaataaaaattgatgatttagaaaatccgtttattgaaaaacttcaagacatatcacttgcatccaaatcaattgatagtgaagcgacctttggaagaagaccaactggatccgtgcttacagaagacagtatgcctcatggtccaagcgcagttattgaaaaatttgatattgatgcagttaaatgggataggcaacttgaaaaaacattttatgatacagatttaaaatcaactgatgcaattgttaatcttcacaataaagatgtgccatttaccgctatgcagaaagcattttcggttggtgctattgggactaaaaacaaaagaaaacttgttccaactcgctggtccattacagcatgtgattcgacacttgcagatgaatttttaaaaaaggtaagaaaattcgaaaaattagatacatacagagtctttgaatttggtgctctaaacaattattatgtaattatcttaacacctacagaatggcaatacgaatggtatgaagcatttattagattaatgaaaaatgaagagttaatcttttcagattatgaaacaaatggtggtaaaaaagagtattcaattgttggtggatgttattatactgcaaaaatggtagtcttagactatttaatgcaaatcaaaaaacaatcagggcttttaattttaagagaagcttatgatggttatgtgcctttaggtgttttcaatgtaagagaaaacataaaagaagcaatgcaaagaccatacatagaatttgaaaccctagaatcatgtcttgaatacgcaggaactaaacttcgaatacctatcaatagatatgtaaaacagggaactttaatgaatgaaatgctccatacaaaacaaaccacacttgatatgtactttaaaagtggataa

SEQ ID NO: 6857 - DNA, 936 bp, Methanobrevibacter gottschalkii
  source 1..936: mol_type = genomic DNA
atgaataaaatgttaagcccaaaagagtttattgaagattcaatacaaaaaattaaggatcaaattggtgatgaaaaagcaattattgcattatctggaggagtagatagttcagtatgttctgtcctcgtgcaagaagctattggtgataatttaaccgcagtatttgtggatcacggtcttttaagagaaggggaagttgaacaagtaactaatacttttaaagatagattgaatttaaaatttgttgatgcttctgatgaatttatggatgctcttgatggtattgaagatccggaattaaaaagaaaaattatcggaaaaatatttgtagatgtatttgaaagagaagcaattaaatctggtgctaaattcctagtacaaggaactattgctcctgactggattgaaactaaaggtgaaattaaatcccatcacaacttagcccttccaagtggaatgaaattgaaagtatgtgaaccaatccgtgacttatacaaagatgaagtaagagaaatcggtgacgaactcaacatacctgcatctacagtttacagacaaccatttccgggacctggtcttggcgtgcgtgttgtcggagcacttacaaaagaaaatgttgaagtatgcagaaaagcaaacaaaattgtttgtgatgaaatcgaagctgcaggtatcgataaagatgtatggcaatactttgccgtattaaccaacaccaaagttaccggtgttaaaggagatcaaagagactttggatacttagttgtagttagagtagttaactctattgatgctatgactgcatctgtcgctgaacttccttgggaagttattcaaactatatcaaaaagaattacctcagaaatttctgaagttacccatgtcgctttatctgtaagcgataaaccacctgcaaccattgaattctgttaa

SEQ ID NO: 6858 - DNA, 258 bp, Methanobrevibacter gottschalkii
  source 1..258: mol_type = genomic DNA
atgattgataatgctgatgatttaagagataaagcaaatgaatttaaaatcggattaaaaaaacaatccataaacgttcaaattggagacgaagaatacagttttagaatttctggaattggacaaaaatctgtaaaattagaaaaatatgttaaatttgatgaaatatttgaagctattgaatcaggaaatgacaatggtcttgaaactataatcaaacagttcatcgaggattacgaagaagaggatgatgaataa

SEQ ID NO: 6859 - DNA, 558 bp, Methanobrevibacter gottschalkii
  source 1..558: mol_type = genomic DNA
atgacaattttagtaattaataacaaaggccaatataaccatagaatcgctagaagtttacaatatttaaagattccctcaaaattagtttcaaacaatttatctattgaagaaattgaagctgaaaatcctattggattaattttaggtggtggaccatcaatagaagatgctggtttaagtgaagaatacattaaatattttgacatacctattttaggaatatgccttggtcatcagttaattgctaaagtttacggaggagaagttactacttcagatactgaaagttatgctcaagttaaaattgatattaagaatgatgaaaacttattcgaaggcctagctcctgaaatcgatgtttggtcatcccataaagatgaagtgaaaacaattcccgatgaattcgaaatcttggctagttctaacttatgcaatgttgaatcatttaaacataaagataaagatgtatatggaattcaattccacccagaagtacatcacactccaaaaggagaagcaatatttaataatttttataaaatctgtaaaaaatag

SEQ ID NO: 6860 - DNA, 147 bp, Methanobrevibacter gottschalkii
  source 1..147: mol_type = genomic DNA
atggaacttaaagatttaatatttgttattgctgcaattttaatagcagtagttttacttaaaatatttttctggttattgccagtgattgtagtattaataattgcattctttatttatgtatacttgcaagatcgttataactaa

SEQ ID NO: 6861 - DNA, 915 bp, Methanobrevibacter gottschalkii
  source 1..915: mol_type = genomic DNA
atgaatcaatatgatatcatcattatcggagcaggacctggtgggttgactgcaggaatatatgccggccgtcaaggaactaaaaatttaataattgataaagacctggcaggcggacttggccgtgaagttcctgaaatggaaaattatcctggttttgataaaatttcaggacttgaattagtagagaaaatgaaagaacaagcaattaaaaactgtgatttgcatgaaatggaaaatgtggaagaaatcataagaacagatgatgaatacagattcactgttaaaacagataaagacgcttatcaatcaaaaattattattcttgcaactggaagttcacataggcaattaaatgtgaaaggtgaggaagaatttagaggaaaaggagttagttactgtgcaacttgtgatggatttttctttgctggtcgtgacattgtaatggtgggtggaggaaacagcgctcttcaagaagcgttatacttgaataatcttggagctaatgttacattaattcatagaagaggtgaatttagagcccaaaaacacttacaggatatgattaaaaaagaaggcattaaaacaattttaaatgcaaccgttgaagaaataaaaggtgatatgcttgttgaatctgtcttattaaaagacaatgaaactaacgaaatgaaagaagttccaactaatggtgttttcattagtgtcggttatatgcctcacacaaagcttgcatatcaattaggagtcacattagatgaatctggacatgtcataattgacaaatctcaaaaaactaatattgactatgtatatgcaataggtgatgtttgcattggtttaaaacagtgggttgtagcttgcggagaaggtgcagttgctgcaacttccgcatttgaagacattcaaaattag

SEQ ID NO: 6862 - DNA, 432 bp, Methanobrevibacter gottschalkii
  source 1..432: mol_type = genomic DNA
atgttttgtgaaaaatgtggtaaagaaattccagataatacacgattttgtagtaattgtggaaaccaaattaaaaaaccaaacaacaaaataactgaagagaagaatatgtatcttgcattattcctttcaatttttttgatgggtttaggaatatattatgcaggaaataagaaaaaaggaattatactttttattttcatattaatatccaaccgtatgagaaaatttcaaatattcattataattgcaataatactctggatatatgcaatatatgaaacatacatagatgtcaaaagagcaaatggtgaggaaaatccaaatttacttgaagatataaacaatttcaccacttctaaacattttgttcatataatcgcaatagcattattatttgcagtatcttattttttaataagcaaattgtag

SEQ ID NO: 6863 - DNA, 750 bp, Methanobrevibacter gottschalkii
  source 1..750: mol_type = genomic DNA
atgaaaatgtgcaatcgttgcggtgcagaaaataaagataaaagtaatttttgttcaaactgtggtgctatattaaataatcctaaacctactcatagctatgataaaaaattaatagaacgatttatggatgctaatataattcttaaattaatcataatcattgttgcagtttttgtattttttgttgcttcagcatggatagggcatattttttttggaatgcctttggaattttatactgagggagatgcaacttatcatttatctcaatttaataaattggaccttgatggtgatggcaatcttactttttatgaagtaaaaggtttagcatcagatatttcgcaggataatctttcagggatatttgatgccgccgataaaaataacaatggtgttttaaaaggatctgaatttgatggctatcttcagtttattgataaatattataaagaattaggaaagcagcaaaaagctgaaagaaaaaattcagcacaacaaaaaagtagttcttcttcatcaagttctaatccatcatttcaagatgagggacatgaaatctgcccagtgtgtggtggaaatcaatttactgaattttacaattcacaatatggtgaaatgaattggcaatgtgattactgtggtgaaatatttcgcagtgatgatgagttttatatagattattgggaatcaaatggcattaagtgtatattgcctgcactggagaataatttagatataatctag

SEQ ID NO: 6864 - DNA, 1041 bp, Methanobrevibacter gottschalkii
  source 1..1041: mol_type = genomic DNA
atggaagatgaaattgtttgtcctaaatgtcataaaagaaatgatcttcataaattctgcatttattgtggtcataaactgttggatgatgatcagattggattaattcttgataatcctgaacagtattgtcttaactgtggaagacttgttaagaaaggccaaaagaaatgtgaatgcggatatgaatttagtgatataaactgtccagaatgcaattcaaaaaattcatatacaaacagattctgcacaacatgtggaaagaaactttggacatctaatgtgtataattataaatattctaaacatctttttgaaaagcatattctgaaggaagtgttaccatattcattacgtaatacatcattataccaacgtcccaaaatggattttacacttaatcatttattgtattgcaatgagtatcttaatggattaaaaagcgctaaatctaaaatagatgagtatttatgtgaaataggttcaagatggaaagttgtttctcctaattattgtataaattgtattaatataataaagccggatgaatgctcctgtacaaaatgtggatcgattttatttgcggataaaaaaagagttgattgtcttcaaactaaaaataaatatgttaaacctaaatttgataatgtggaattgaaatggacttcaaaattttctaatgattatttagattctttagctcctgcaatcggcgaatcacagtttgaatatagggagagacttaaatgggaatttgctgaaaataattatcataaaataagcataattggcgcaattgaccgtaaacggaaagatgaaggccgtaaaagacagatagaagagcgtaaaagactggaagaagaatatataaggcaatttggaggaggttattgtagttcaagttgcagatatcactacgaagaaattataactcctcgcgggataagtgctgattatactgatgatatgtatggtgttgactattgttgtaggttaggacattttgtatctcatggaagtttttgtaaagattatgaatag

SEQ ID NO: 6865 - DNA, 753 bp, Methanobrevibacter gottschalkii
  source 1..753: mol_type = genomic DNA
atgacaaataagatatgttttgaatgtggaattgaacaagatgatgcattcaattactgcataaattgtggggcattactttctaatgaaaatgatgattcattatcaaacagtaatgaatatagattgccagaagatattgaaaatcaaaatgatgaatatgataatctcaatgatgtaaaaacttgtcctaaatgcgggattgaacaggaaatttttgctaagttctgcagaaattgtggggcttcattttccagtgaaaataaggatgaaatcacaattagatgtgagtattgtggtgctgagttaaatgatgaggcattctgtcctgattgcggaaaagccactggcataacaatatgtacaaactgcaggcaaaaaatagtgaatgaagacttttgttctatttgtggatatcaaattaatcataaaattaaaatatgtgctaattgtggaagtaaaatcgatgcaatggctaaagtctgcgcacattgcggtgcaaaaataattaaaaaaaatcctcttatagcattaggtttttcatttgttttcccaggattaggccaattatataataatcaaaaccataaagggtttattcttattattgctaatataatttcttttatattgtgttttatttttattggaataatattagtcattttaatatggatatatgcaatgtatgatgcggccacttctgcaatagctataaataagggagaaattctcgaggacaaactcttttaa

SEQ ID NO: 6866 - DNA, 1866 bp, Methanobrevibacter gottschalkii
  source 1..1866: mol_type = genomic DNA
atggattatgaaaaattaggattgaaaatgggacttgaaattcaccaacaactaaacagtgaacataaattattctgtccttgtaaaacagaacttgttgatgatgattttgacggaatagttcaaagaaagttaagaccaacccaatcagaacttggagaaatcgatagagccgcacttcaagaatctttaagaggtttaaatttcaaatacgaaaacttcgcaaaacatacctgccttgttgaaaatgacgatgaaccacctcacagtttaaatgaagaagcgcttgacatttgcattacaatagcttgtttaatgaacatgcacattgttgatgaattccatacaatgagaaaacaggttattgatggaagtaacactggtgggttccagaggacaggtatggttgcaactgatggatacttggaaacaccatacggaaaagttgtaatcgaaagtcttggtcttgaagaagatgcggcaagaagaattgaaaccaaagatggatttactgaatttagattagacagattaggcatacctcttgctgaagttacaacagacccttcaatgcaccatcctgatcaagtacgtgaagttgcatacatgcttgggcaaatattgcgaagcaccaatgttaaaagaggtcttggaactatcagacaagatttaaatatttccattgccgaaggcgcacgtgtagagattaaaggtgtgcaggacttggatttaatggcagaaattgtaaaccgtgaaatccaaaggcaattagttttaattgacattaaaaaagaacttgtagctagaaatgcagaagtattagatgaaatccatgatttagatgaattattcaaagacactgaatccaaaatattaaaatcggccgaaactattaaagcagtggttttaaaaggttatgatggtttaattggtcgggaagtgcaacctggaagaagatttggtagtgaaattgcaagctatgctaaaaaacgtggagtatctggtattttccactctgatgagttaccggcatacggaattacccaagaagaagtagataacgtgactgattacttaaacattggtgaggatgatgcgtttattattgtagctcacgatgaagatattgcaatatcagcacttgaagaagttaaaagaagagcttcacttggcctagatggtgtggttgaagaaacccgtaaagcattagaagatggcaatactgaatatatgagaccccttccaactgcaaataggatgtatcttgaaactgacattccgttgtttaaaattactgctgatagaattgaacctatttcaaataatctacctgaattgcctgacgttaaacaagcaagaattattaaagaatataatttaagtgaagatttagcaacacagcttgttaaaagacaagaggcagacatgtttgaagctattattgctgatgttagcatagatgcaacacctgtagcatcacttcttgcatatgatctacgtgagatcaaaagagaaggtcatgacattaccgcgttaggtcttgatcactttaaagaaatattcactttactcgcagaaggcaaaattgcaaaagatagtgtgcgtaaacttgcaattgaaacaattaaagcacctgaaagcgatgtggctgaaattgcagagataaacaacttaactatgcttagcgaagatgatgttgtaaaaatcatttctgaaattgttgctaaaaatgaaggaatggtaaaagaacgtcaaatgggagctatgggtcctttaatgggaatgtgcatgaaacaacttaaaggaaaagctgacggtggcatggttaacaaaactgtgcgttcagaaattcaaaaattaatttag

SEQ ID NO: 6867 - DNA, 1311 bp, Methanobrevibacter gottschalkii
  source 1..1311: mol_type = genomic DNA
atgacttacaaagaaaatgctgagaaatttattgaaacctatggtttaagcataggggataaaatccaagtaaacaaggaagatatcacctatactggtatcttacttgataggcccgaggatgctgatgatggatatttagtcttgaaattatccagcggatacaacattggagtagctattgagaatactgctgctgagttaattgaaaaaggtgaaaaacctaaaatcggatttggaaaaagtgaaattccagcagatccaaaaaaacagaatatttcaattgtttcaactggaggtacagtgtcctccgttattgattataggactggagcggtgcatccggcatttacagcttcagaccttgtaaaagcaaatcctgaattattggattatgccaactacaatgttaaagcattatataatatattaagtgaggatatgaaaccagaatactgggtaaaagcagctcgtgaaatagctaatgacatttcaaatggaagtgatggtgttgtaatagcccatggtactgatacaatgcattatacggcagctgcattaagttttatgttaaaaaccccagtgccaattatattaactggtgcacaaagaagttcagataggccttcaagcgatgccaacattaacctgattgattctgttgttgctgcaaaatctgacattgcagaagtatgtgtatgcatgcatggaagcttaaatgacaaatacacttacttgcacaagggaactaaggtcagaaaaatgcatacctcaagaagagatacttttagaagtattaatgcccaaccaatagctaaaattgaaaacaaaaaaattaacattaacccggattatgcatacaccaaacgtggtgtaaatgggttagaattaaatgcaaatattgaagaaaaggttggatttattaaaagtttcccgggaatttcttctgattacattgaatatcacattgataatggatataaaggccttgttgttgaaggaactggtcttggacatgttcccaatgacttaattgactcatttaaaagagcaagagatgaaaatattccggtcattatgacttcacaatgcctatatggaagagtgaatatgaatgtttattcaactggacgcaatattattgattctggcgtaatttccggagtagacatgacacctgaaactacttatgtaaaattatgttgggcattaggtcaaagtgacagttacaatgaagtaaaagaaattatgcatgaagatattgcaggtgaatttagtgaaaaatcttccattaaagatttcttaaactag

SEQ ID NO: 6868 - DNA, 1446 bp, Methanobrevibacter gottschalkii
  source 1..1446: mol_type = genomic DNA
atgagtgataaagaaattggtaaagattatgaattaaaagtacgtagaaatccacaatcccttttagaagaatatccaagaaaaggaaacaacatccaatcaactcactattgtgctggttgtggacacggaattatacataaattaatcgcagaatgtatggatgaacttggaatacaagatcgatgcgttatgatttctcctgtcggatgttcagtatacgcatacttctattttaactgtggaaactttcaaactgctcatggaagagcacctgcagtagctactggtatttcaagagcagaagataactcaattgttatgagctaccaaggagatggagacctcgcatccatcggtttaaatgaaaccttgcaagcggctaacagaggggaaaaaattgcagtattctttgtaaacaatactgtatacggaatgaccggtggacaaatggctccaacaacattagttggagaaaaaactgtcacttgccaaaccggaagagatcctaattatacaggacaccctacccatatgtgtgagctaattaacactttaaaagctccagtatacattgaaagagtttctcttgcaaatccattgaaaatcagacttgcaaaatatgccattaagcaagcattaactgttcaaaaagaagggaaaggatattcatttgttgaaatcttatccccctgtcctactaacttaaaacaagatgtgaaaagtgctcaaaaatttattgaggaacaaatggaaaaagagttccccgttaaaaatttcagaaatgatttatacaaaagagaatctatccaaagaccagttagtgatttttccactgaaacattagacaaagtattcaatgtaaatagagatggaaactccggttatgttgatgatgcaagcatcagttcaaccagtattaaagtatccggatttggcggtcaaggagtattaagtgcagggcttactattgctcatgctgcttgtgatgaaggaaaacatgtttcatggtatcctagttatggaccagaacaaagaggaggaaaatccaattgttcagttgtaatttcaaatgaaaccattgggactcccgttgttgatgaaatggatattcttattgcattaaataaaccttccctagaacaattctcacaagatgtaaaaactggaggaacaatactttacgattcaaaaattggtgaatttgaaactgatagagatgtcaatgtaattgcaatgccttgtgtggacattgcagaagaacatggaaatgcaagaactgcaaataccgcattactcggtggattgactgaattaactgatgctttaaaacgtgaatcttatgaaaatgctattcgtgatatgtttgcttcaaaaccaaaagtaattgatgtgaacattgatgttttaaaagcaggagcagaatggttgaaaaacaattcatag

SEQ ID NO: 6869 - DNA, 1116 bp, Methanobrevibacter gottschalkii
  source 1..1116: mol_type = genomic DNA
atgagcaatcaaatggtaaaaggaaataccgcagttattattggtgcaatgtatgcaggttgtgattgtttctttggatatccaattacacctgcaagtgaaattttacatgaagcatccaaatacttcccaatggttggaagaaattttgttcaagctgaaagtgaagaagcatctattaacatggtttatggtgcatctggaaccggtcatagagttatgactgcttcatcaggacccggtatcagtttaatgcaagaaggatttacctaccttgctggtgcagaattacctgcagttatcgttgatattatgagagcaggacctggacttggaaacattggacctgaacaaggagattacaatcaaattgttaaaggcggaggacatggaaactatagaaatatagtcttagcaccaaacagtgttcaggaaatgtgtgacttaaccatgaaagcatttgaacttgccgataaatggagaaaccctgttgttgttttagccgatggtactttaggccagatggcagaaccgttagaatttccagctgaagctgttaaacctgaaattgatgaatcttgggcagttaggggaactgaaaacacaatgggaaatcttattacctcaattttcaatgactttgatgaattagaagacttcaactacaaacttcaagaaaaatatgcgaaaattgatgctgaagaagttattgttgatgaatatcaagttgaagatgcagatattgttttggtatcatatggcattagcagtagaatcgcaagatctgctgttgacaaaagccgtgaaagtggtataaaagttggacttttaagacctatcaccttatctccttttccaactgaaagaattaaagaattagctgataaaggtgttgaatttatttctgttgaaatgagtaatggtcaattactagctgacgtgcaatttgcagctcttagaagagaaaaaactcaccttgtaaacagaatgggtggaaacctaattgaattaaaacaaattcttgctaaaatctatgaaatagccggatttgaagatcatgatttagatttatctaaaagaagcgctgaaaaggctagtccaaatattattgactga

SEQ ID NO: 6870 - DNA, 291 bp, Methanobrevibacter gottschalkii
  source 1..291: mol_type = genomic DNA
atgattgaagaagagatatcttacccagttattaataaagagatttgcaaaggctgtatgagatgtatagtcggatgtcctcaaaatgcaatactactcagtgaagacatgaataacgcaggatatcaatttgcttattatagtggaaatggttgtactggatgtaaagactgttactttacttgtccggagccattaggattagaagtacatcaaataaaaaatattactaataattcaattgcaaaaatgattaaagctaaagtggctagcaaagggggaattaaatga

SEQ ID NO: 6871 - DNA, 1674 bp, Methanobrevibacter gottschalkii
  source 1..1674: mol_type = genomic DNA
atgacatcattaataggaaatttcgtagaaagagttgattttaactcttatgaagactttatgaaaaatttcaagctcaaatatgaacccgactacaactttggatttgatgtagtcgacaaatatgcagaaatagatccggataaagttgctttaatctggactaacgacaatgacgaaaaccacactttcacattcaaggatatgaaagagtactctaacaaaactgttaacttacttagaaaattaggaattaagaaaggcgataaagtaatgctcactttaaaaaacagatacgaatggtggttctgtatggttgcattacataaaattggtgcaattgtaattcctgcaactcacatgttaaaacttcacgatatcgatttcagattaaaacaagcagaagtgaaagcagttatcagtgttgaagaagattcgttgcttcctgattttgaagaagctgaaaaaggattagattgggatttaataaaacttgtaattgaaaccgatagagatggatggattaacttcaatgaagcgattgaaaaagaaagttccgtttatgaaagaccaactggtgatgaaaacccaatggctgatgaggtattcttaatttactttacttcaggaacaagtggaaacccaaaaatggtttcacatgcacacacttatggtttaggccacattccaactgctaaatactggcataatgtaatagaagatggtgttcatcacagtgcagcagatactggatggggaaaagctgtatggggaaacctttacggccaatggattgccggaacttcagtatttatttatgattacgaaagatttaacggaatcaaattacttgaaaaaattattgaacataaagtgaacactttctgtgcacccccaaccgtttacagattcttaattaaagaaaatattgaaggatacgacttttctaatttaacttatgtaacaactgcaggagaaccacttccaccagaagtgtctgaaaaattctatgaaatttcaggtttaagaattaaagaaggatttggacaaactgaaacaactttatctattgcaacattcatttggttagatgcaaaagttggatgcttaggtaaaccttctccactttacaatttaaaattattagatgaaagcaataacgaagttgacattggtgagaaaggagaactctgtttcgacatatccaatggaccaactccaggactgttcaaagaatattataaagaccctgtaaaacaagcggaacagtgtcatgacggtttttactactgtggagatactgcatgggtagatgaagatggatatgttcacttcgttggaagaaacgatgacatcattaaatcttcaggttaccgtattggaccattcgaagtagaaagtgcagttttatcccatgaagcagtattgcattgtgcaattactgcatatcctgatgaagtaagaggtcaaattgtaaaagcaagcattgttttacaaccaggatatgaaccatcaaataaacttacaaaagacattcaaaatcatgttaaaaatgttacagctccatataaatacccaagaatggttgaatatgtagatgatataccagaaaccataagcggtaaaactagaagagttgaaatcagagaaaacgatcagaaaaaatttaattag

SEQ ID NO: 6872 - DNA, 663 bp, Methanobrevibacter gottschalkii
  source 1..663: mol_type = genomic DNA
atgaattatcatgattttgaaaaacctttatataatgataaattcaaactttctatatgttatactattaacataattattaaaatcaattataaaaaacaggtgtttattttgaatgaatacaacaaagatattggaaacagaattagagaattaagagaattgtcagatattaccattagtgaaattgcatctgacttaaacattaaagaagaaacatacattcaatatgaaaatggagaagtagacatcccagcaagcttcttgtatgaacttgcacatatttttaaagttgatttaggattattattaaccggtgaagaaagcagaatgagcatttttgacgtgacccgtgcaaataaaggtgttgcagtagatagaagaaaagaatatttgcatgaaaacttatgttcaaaattcatccataaaaaagcagaaacattccttgttgttgtggatcctgaaaaaaaccctgttccttcactcaattcacaccccggacaagaattcaactatgtccttgaaggttctttaaaaatatacatccacaataatgaaataatacttaatgaaggagactcaatattctttgactccgcccacagacatgctatggtagcacttaacgataaaccagctaaattcttagcagtaatcatataa

SEQ ID NO: 6873 - DNA, 372 bp, Methanobrevibacter gottschalkii
  source 1..372: mol_type = genomic DNA
atgtcaactaatgagattggtactaaagtacttttcaaaaaacaattaggtttgaattatgagatagaccagaaatatgttggtttaaagatgaaggaaaataatattttgtctttcaatttcagagttcctggtgatttaaaagatgaagttgaagcatattttaaaagatttaaattaggtgaacccattttagttgatattggtggaactggagatatcaaatgtgattttaaaggtatttcacctgttttaaaaaataaagatgaatttgatcaatatttcatttcagctactcttcaggaagataaaacttatgatccgatggaagaggaaaaatgtgaaacttgtagtggatgcggattccactga

SEQ ID NO: 6874 - DNA, 390 bp, Methanobrevibacter gottschalkii
  source 1..390: mol_type = genomic DNA
atgtttaatttaatagatagtaccctattttttgcttcttatggcaacatttttgggcttgctaatatagcagttagtccgattgatatcattttagcttatgttgtggctattgttatctcaattattatggcttttgttttaaaagttccattattgccaagcaaaccatataggtattcttttgatgtttgtgcggtatatccaactccaattattgccattggtattttttcaatatttttagtattgaattatacttttatatataatggtttagttttagctattataattggtattttatctgcattatttgtgaaatatttatttaattttgtatttccaaaacctctaaatgaagatgaaggggatgaaattaatgaatga

SEQ ID NO: 6875 - DNA, 498 bp, Methanobrevibacter gottschalkii
  source 1..498: mol_type = genomic DNA
atgaatgaggtaattggaataataattgccgcagttctatgctggttgaattttgttattgtagatacatattttggacttcccgagcaacctggtgttagaggggctgggataattggtcaagatgtcgaaaaaagagggggagacattgctggtggatttttccaaggaaacattacatgttctccggatgcatctgctggcacattattagcttctattggatatttagttttaggaattcccggtggaataattgctgcattttttgtatttattggaaatagattatgtgcagatcctgggtatgcagggacctgtggaagcctaacagcaacttgcattatattcatatgttcatttttaggtatgactccagaaatgttcattgtggggatggttattgcaatattgactgttatgggcataagtcagaccaaagcttcagtcatattaggtaaagttgcaaaaaaattcaataggcatgctagagagtga

SEQ ID NO: 6876 - DNA, 249 bp, Methanobrevibacter gottschalkii
  source 1..249: mol_type = genomic DNA
atgtatggagaaattattggtgtcatagtcatattcgtagcattaagggctttagtaacaagaaatagggcagaacggctattgtacttaaatgtcataggatttggggtatcagctattgtagcttttgtaattaatactccatttgctctcattgttgctgcagcattctttatatgttctacaattagtgctaatgcgattgcttataccttaaaaaggttagatgacgaaattcttttggagtag

SEQ ID NO: 6877 - DNA, 270 bp, Methanobrevibacter gottschalkii
  source 1..270: mol_type = genomic DNA
atggagtttttcgtatcaattattgcaattgctttaatgattatcggtgcatttggcatcatattcatgaaaaaaccattggacaaagtcataatgttttcagtgctggatgcgggttttgtattggtaattgttttatttaaatatttggatgttgcaatgtttgcagcattagcagatccattgtctactttagtattcattttagctattgttaaaataaatgaggttagaaaaaagaaaattataagtggtggtacagatgattag

SEQ ID NO: 6878 - DNA, 261 bp, Methanobrevibacter gottschalkii
  source 1..261: mol_type = genomic DNA
atgattagtgttccattattcttttactttggaattttccttgcaattgtaggaagtattgctactgcatggggtcctggtgttaaagatccgattataagaacattcaatactgaagtagcttcaattggggtctgtctggtgttattatgttacaaccatgttttggcattattgacattacttgcaacaactgttattattagtctaattttatttagagctattattcgtttggaagagatgggggcaaacatatga

SEQ ID NO: 6879 - DNA, 594 bp, Methanobrevibacter gottschalkii
  source 1..594: mol_type = genomic DNA
atgagaattggagttttatggaataaacttgctgagcctaaaaatattccacgtttgtttgcatttagtttaggaataattttaattttagggcttattgtcccaatggctttaaatcctgatcagttatatgtaagacctgctccacaagagcaaattggtgatggtctatctattgcaccttatgataggggtggagaagtattaactcaacctggacagattaatccccaatatccagataattccagagaactgggaatgataacagcttatatgtctccaatatcacaatgggtatcttcaatttccccatactttggaacatcaatttattcatctcctggtgggctcatagatgaaatattatattatacaagaggttttgatactatcttggaatcttcaatcttgatgatgtcattcattattgcttcatggttgtctattaattatacaatgaatagaaaaaatgatgaatctgaaatcaaaaaagatgttaaaaaagctattaaagattcaacaaaagtagctaatgaaattagtgttagcgatgctaaagccagagcaaaacagttaaggagggataattaa

SEQ ID NO: 6880 - DNA, 696 bp, Methanobrevibacter gottschalkii
  source 1..696: mol_type = genomic DNA
atggtatttataccacagttcgttcccgctgcattcttaaatatgtatttgcctgcaatttatgcaggtttaattgttggttttattggatcaatggcaatagcattaaaaagagaggaaattcatattcttatcttaactgatattgtaggtcttgctatgatatttattgtatctgctgttggaactgaccttgcagaagcactgatcttgccgggtttagtagtggaacttgcagaaaccttagcgatttcagaaattttgattacaagagaaatgcgcataattgagaataatccgagaaaaaacttatctaattcatcttccctattcccgcaactatttgcattaaatatggagatattgaatacagcacctaatttcattgcattagtattgattgcttatggtatatttttaaccggttttactggaggggcagtagctggtggaggaattgtattatatgcattgtctaaaaaggcaagaggacttccagtacttgtcttggatggtattgctggagtctcaggtattgcatggtgtttatggataatcggatttttatttttctttgtaactccacaatattggttattaagtttattcttagcagcatgcggattattattaaaagtagcttcaaaagttggtttaattggactacttatgagagaggacatagacaaggagtaa

SEQ ID NO: 6881 - DNA, 672 bp, Methanobrevibacter gottschalkii
  source 1..672: mol_type = genomic DNA
atggattttgttacactcggtggaaatttacttggaacaattccccttggagatattgtattatatttgactccgtttaatttgttcttatttgcagtcttacttggattcacagtaatgataggattaagtaaacctgaaactcagattgaagctacaatgcactatttaagtaatacggaagttaaagttggagaaaaagaattcaagcaaagaagatttttatctgtactttgcggtattgcatctgcaggtgcaatgattacgggggatttatttaacttcacattattcatggcattggttggaatgttgaatattggtatagtgtcagctgtaagacaaactagtgtattgaactccgcatttaattatggtttaatcgctatgatgtgtagtttaccattgtttggtggtgcatcaatcattcttgcatcaactggaactttgtcccttgcagtgttatctcagatgcctgtaagtccgatggttgtctttggtgcaacattgatgttactgggtattttaggtgaaagtggagtagctccgttctttgcaagtaaagcagagatgtttaggactgctggatctccatttattgttattattcatttaagttcattatttataattgtaagggcagtcgaaattttattattggtattatggtaa

SEQ ID NO: 6882 - DNA, 231 bp, Methanobrevibacter gottschalkii
  source 1..231: mol_type = genomic DNA
atggtaagtgatagtatggatagtcaaaaaagtttatgtattattttattggtattatcaacaatagctattatagcttgtttagttgtaaacttcgaggcatggattgtttatactatagctatctttggtataccggtatgggtattatctttaggtttgctcactatggctaaaccaagacctgaagatgcagaagaaagggtgaaagaaccatttactggatattag

SEQ ID NO: 6883 - DNA, 873 bp, Methanobrevibacter gottschalkii
  source 1..873: mol_type = genomic DNA
atgaatttaatggcagatattttaattcaagttattattgcattcattgcaggaagtttgcttcttggtctgcataggaaaatcatggcccgtgttcaaaagcgtccaggaccacctatagttcaacatttgttgcactctttgaaatttttctttaaagaaactgcattcccaaaaactgtttcaaaattattttacataggtattgtatttatattggctttaatatggattgttggtgttattgcaggtcctgtagctcatgattctttattaatcctatttggtgtgtatgctgtttacaaaattgttgaacataactccggatcaagttcaggttcaccatatggtaaattaagttgtgtaagggcagtattgtctgcagcaactgaacttccattgtttgcagcaattatatttgtttatttggtaaccggttcaatgaacattggggaaattattacttatcagtctgttaatggtcctttagtatttactattccacttgcagctttaatgttctttatgctgattattacaaaatcaccatattctccatttgcaataacaaaagataaagcattaatttcaggttttgaaacagaacattttggatttttaaggggattcatgttattttcagaatctattgcatggtatgtgatgttgtgggtattcttaactatattcttcggtcctctaaatgctgttggatatgtgattggaatgattgtaattacatttattacaggatttattaatgctacaactccaatactctctccaaatcattcagttatgactcaaatcactattggtgcaatctgcttctttggaacaataatcatgttatttggtggggtggtgttatga

SEQ ID NO: 6884 - DNA, 255 bp, Methanobrevibacter gottschalkii
  source 1..255: mol_type = genomic DNA
atgaatagtgaggatgtaatagtttatttcacagcattagttgctattggtatagttgttgtaggtttgttaacaaccgtattccattcatcggttattgctccgatagtaattattggaattattttaagcatttttgtattgtgcactcgaagtaatttttcacataagatagaaagtattgaaaagatatgttttgtaataacattaattgcaattatttgttcatttatattgctttatagaccaatgtag

SEQ ID NO: 6885 - DNA, 306 bp, Methanobrevibacter gottschalkii
  source 1..306: mol_type = genomic DNA
atgttagattatatgatttatattcttgtatttgctgtaggttccattcttggtttactttacagttacaaattacatggtgaaccttatgttgtagacactgagtttaatgtattattggctgttgtttcagttgcaggttggtgtttgggtttcttatcaggtaacataattttatcagctattggtttcctcttggcaggttttgtgatggggggaagaccaggatatggtaggagagaaactgctgttggtttaatagttgcaattgttgcatatttattattgaagtgtgggatgttgtga

SEQ ID NO: 6886 - DNA, 393 bp, Methanobrevibacter gottschalkii
  source 1..393: mol_type = genomic DNA
atggatgaaaatgctaaattaaaagtaatgcaagaaagaataattaaaagttatgcttggcaaagagatattataattccactttctaatgaatttaattgcactaatgaagagttggaagaattattcttcgatttattggatatgaattcacttgaatctttacacggcacatttgattcagctagggatatttgtttatatcaaaaattcaatgctgatttaagactatgttggtttatcgattctttagaagtgatatctcaagaggaaggtaaaaaactaaaaatgagattagttgaagaagttaaaaaaggcagatcttatgatgatgttttaaaagaaggaagattggaattatttgaattattaaaaaaagaaactaattattga

SEQ ID NO: 6887 - DNA, 450 bp, Methanobrevibacter gottschalkii
  source 1..450: mol_type = genomic DNA
atgttagacgctgttaaagatgctgtgaggaaaagctcaattcatgtctgtattgtgaattgtgggggatgtaatggctgtgatgtggaagttgttgcattattatctccaagatatgatttggaacaatatggtatttatgttcagaataatcctcgtgaagctgatgtcttattgttaactggtgctgtaaccgaacaatggattcataatctaaaaagagtttatgataaagctccagaaccaaaaattgtagtagctgttggaaattgcccccaatccggagatgtatttgcccaagaaggaggccatgttcatgcacctgcatctaattttatcccagttgatgcggctattcctggatgtccacctagacctagtgaaattttagaagctattctgtctgtgggtccacaagctattgcagatcgtgggagggaagagaaatga

SEQ ID NO: 6888 - DNA, 1125 bp, Methanobrevibacter gottschalkii
  source 1..1125: mol_type = genomic DNA
atgattgtaccgattggtcctattcatccagctttaaaagaacctataaggcttaaacttcaaactgagggtgaaagagttgttaaagcagaaattgaatatgggtatgttcacagaggaatcgaaaaaataattgaaggacaaacatggcagaaaggaatttatctttctgaaagagtatgcggtatttgttcatatgaacatactcaaacatttgcagaaacaattgaaaagatttctaatgttgatgttccactaagggctcaatttttaagggtaattacaaatgaactagatagaattcaaagccatttgcttgctaattcaacatttttcaaatcaatggatcatgaaacattatttatgcatgttttggaattaagggaatatgcaatggattctattgaattattaactggaaatagagttaatatgggttggaatgttgttggtggagtcaggatggatgctgatgaacgtcacttcaaacctatattggaaaaccttaaaaaaattgaagaaggttttgacactacaagggcattgtttgccgaaggtcctgctttagcattaaggtgtaaaggaattggtcacatgagtaaaaaggaagctattaaaggacgtgctgtcggtcctattggaagagcttcggatattaaagaagattataggattggccattacacttatgatgattactttgattttaaggtaattagaagaaaagagggagataactacgcaagaacattaactagatttgatgaaattccagaatctataagtttgatcagacaagcaattgaaaacatgcctaagggtgagattcgtactcctgctgatttgaaatctggttatgcaatgaataaaaatgaagctccccgtggtgaagttacatacatgattgaaactaatggtaatttaattaagcatatttctattagaactccaagtattgcaaatatggattcatgtgcaaaatacatgattcgggatgttccaactgttgcagatgcggtttcaacttatgcatcatgtgatccttgtgttgcttgtgctgaaagagtagctattactaatgaacatggaaaaacagaacttaaaaatatttatgaggtgatatag

SEQ ID NO: 6889 - DNA, 1026 bp, Methanobrevibacter gottschalkii
  source 1..1026: mol_type = genomic DNA
gtgtcatctctaatgtggtatatctttgattttgcaagaaaagcatgggctgatgcattcactaatgcaaaaactaatcctgagattgcagaaaaaccagaaagatttagagattttcctaaagtaaataaggaatattgtataggttgtggagcatgtactgtttcatgcccttctccaaacgcaattaaaattgtaagggaaaaagatgatgaaacaggtgaaggttcaacatatccagttattactccgggtgcatgtatccgttgtggtttttgtgcagaagtatgtccaacagaaccgaaaacattggaatgtggtttaaatcatttgattttacctgaatttaatcttattccgtcaaaaagacaattcattgttgatgattatttatgcattaaatgtaaaaagtgtattaaaaaatgtcctgttgaagcaataagtcttattgatggtaatgttgtagttgatcaacttaagtgtatttcttgcggggaatgtctagaggtatgtccggttaatggtgcaatgaagggtgtttttgttgataacttacaagatcagaaagaattaattttattgactgtaaattatcttgaagagtttattaatagtaaagaagaggatttaagatcattagatcataatggtcttttacaatatgatgtgccgctttccaacatttgggatgaagcattgaaaataattcctgatgaagaaatatcacttgaaatcattactaatgctgttaacagacttaaagttagaattattgattgggataaatcaaaatgtaaaaaatgccagttatgcatacctgattgtccaactggttgtatttcatttgatgaaattaatgatacaattgtaagggataaagatagatgtttaagatgtagtatctgttatcagacctgtccattttcagttattaaatatttcatagctaaattcgcctttgatgatggtgaaaatattcatgttactgttaaagcatctaatttaaatgaggatattgtggagtga

SEQ ID NO: 6890 - DNA, 1359 bp, Methanobrevibacter gottschalkii
  source 1..1359: mol_type = genomic DNA
atgattgatagttatactaaaacaccaagaccattaagacatgttgatgttgagtatttaatagatcaaacaaaatgtgctaattgtaaagataaaccttgtcttgaatcctgtcctattgatgctatctatttggataatgaagaaggtcttattaaaataaaaagtacttgttttggttgtgtattgtgccgtaatgcttgtccatatgatgctatttcacttgaagtacatatggattcacctataaaagaaaatgttccaaatattaatgtaaaattatgtaaagcatgtggggcctgtgttcaagcatgtaaaaaaggttcaattcatattgtttcagatggaaaacaacctcctcatagtgaaattgataaagatacttgtgtgcgttgcggatactgttttagagtgtgtccgactgatgcgattaaatatggtcaattacttcctaaaacagttaaaggaggtaaggcagttgttgttaaccaggataattgtattggttgcatgacttgtataagagtttgtccatcaatgggagctcttaatgttgctagaactaacaaattgccttatattaatccgggatattgtgcaaggtgtgaggaatgtatgcattcttgcccatcaggagctattaaatattcttcacgtaaaaaagcttataagatgtacagtgagataaaatcttttgatattgtatctgaaattgttgatcatgatattaaaatactttcacttgatttgatcagtttaaataaagttttacaaaaagtaggcaaatcaatagctttagaatttaatgaccaaaactttgaaaatttcattgagtataaagtaaatgatttaatggagagggaattgagtattagtcttaattccaatattgaagttggagaatttacaaaacttgtcggatcttatttaatggataggaatattgaaatttataataataaatgtattgcttgtggagattgttataatgtatgtccggttggtgcaattgagctaaatggtccaaatccaatctccatttcagataattgtatttattgcggaaaatgtgttgaacaatgtaaatttgatgcgataggtgcttatgatgattatttctatagtaaagatactgatttgtattatgccagatcttatttacgtggtcaaagattaggggattttacactttcgaattcaaaatgtcaggcatgtgcaatttgtgtgaataattgcccaactggtgcattaacattaggtgatgatattattgagtttgatgatgaaaaatgtatttattgtagaaattgtgaggcaatatgtcctcttgacgcaattaggatagttaactttaggtga

SEQ ID NO: 6891 - DNA, 1047 bp, Methanobrevibacter gottschalkii
  source 1..1047: mol_type = genomic DNA
atgtttgaaaaatcatttatcacggattgcgaaggcccactgactttaaatgataatgcatttgaattggcagccaattttattgaaaatggtgggaaattatttaaaatacttagtttatatgatgattatttggtagatattgttaaaaaagaaaattataaggcaggtaatactttaaaattaattttaccattttttattgctgaaaatttgaaaaatgatgatttaattgatttttcacaaaaacatatttattcagttgaggattcaaaattccttttaacttatttgcaaaaagtaatgaatacatatatagttagtactagttatggtcaatatattgaagcaatatctaattatatgaatttaccttttaagaatacattttacacaaaggtaaatctagataacattacaccaactgtccaggaaatcaataaaattaatgaattcaaacagttgattttagaaaatccaaaagattatgatctatttgatgatattttcttctcacgaattacaaaaatggacatctatgaaaaaatcaaaaatgtggaagtagtcggtgggcaaggaaaaaaattagctattgaccaaatcattgaaagagataatatcgataaggatgaaattttctatattggggacagtatcacagacgtggaacctttagattttgcttgtataaacaatggaatcagtgtatcatttaatggtaatgaatatcccctcaaggttgctgaaatagctattgtatctccaagtgcagttgcaacagcagtaatagctaatatatatgtaaattatgataaaaataaagtaatggaatttattaaaggttacaataatttaaatgattatgaaaaattatttgatgattacaatgtcgatggagaaattaagaataggtttttctcatttttcaatagtggaaaatatcctttaatcgaaattatcaatgaaagtaactttgatgaaattttaaaagcaagtaaggaaatgagaaacaatattcgtggtaaagatataggcggattaggttaa

SEQ ID NO: 6892 - DNA, 891 bp, Methanobrevibacter gottschalkii
  source 1..891: mol_type = genomic DNA
atgagttatgaaaaagtaaaagacacattcttcgaggcttttgaaggaaaatatgtaagagctttaattacaggacctagtgaaaaaattgtaaaatgggcggcttatgattccacttcaactcccagtgcagttatcggaagagtggaaggtggtgttgaaggatttttagatgaatcccagactccagatggaagattcggtgctgttgtccaatattggttagggggagatgatgttggcaagttcgcttttgaattgtcctacagattaagacaagatgttttagtaaaaccatttacacgtatttttgattattctgcatccaacagtgatgaatgcattgaaatgatggatattgtaggccactgtggtgatggatatgaatggattgttgaagaatatggtagaaaaatgattaatgttccgattgcagttcctgattttcaaattgaagaaaaattcaaaattaacaatgggattatgggaggaaacttctggtatttgtgcactacagctcaagcagtaatagaagcaggtgaagcagtaattgatgcaataatgaatgttgaaggagctaccacaccatttgatatttgttctgcagcttcaaaaccagaaacaaactatcctgaaattgggccaaccacaaatcatgtttattgcccttctttaaaagaatctttaggagatatttctaaagttccggaaggcattaattatattcctgaaattgtaataaatgcagtggatgaaaagtcaatgaataaagcagttaaggcaggtattgatgctgctttggaatttgaaggagtagttggaatatcagcaggcaattttgacggtaagcttggagataaaaatataaatttattagatattttgaagtaa

SEQ ID NO: 6893 - DNA, 948 bp, Methanobrevibacter gottschalkii
  source 1..948: mol_type = genomic DNA
atggaaattctagacgatgatattaatgcagaagtagtgggatttggagcactgaatgttgataaactttattctgttgcaaatattgcaggtaaagatgaagaaagttttataaaaagtgaaactgacactccaggtggctctgcagcaaacactattgtgggactatcaagattaggttgttccacatctattattggaaagatagctgaagataatgatggtgatttaatagaatacaatttagccattaatggtgtttactcaaataacttaatttattccgaaacaggttcaactggaaaatgtttgggatttgttgatgatgagggtgagaggtgcctatatatcaatcctggagttaatgatgaaattcagcttggtgaaataaatccattaaacataatgagatgtaaaataatgcattacacctcttttgttggagattcttttaaaacacaaattgaattattggatttattaaatgaaaatactgtattaagttttgatcctggaatgttatatgttcaaaaaggatttgatgagttaaaacctattcttgataggacaggcatattgctcattaatgaatctgaattaagattattatgcaataattataaatcttccttaaaagaattggctattggatttttagatttgggaattgaaaccgtcgttgtaaaacagggagctaaaggagtgtttgcaattaataactcaacagattgtttcgtcgaatcttatgaatgtgatgttgtagacactactggtgccggagacagttttaacagcggatttttatattctttcttaaaaggatatgatttggaaaaatcttgccgaatcggaaattgggttgctagtaaatctattgaaggatttggaatggataaatttccttccgctaaagatttagaggacttcttaagtgaatttaattattaa

SEQ ID NO: 6894 - DNA, 828 bp, Methanobrevibacter gottschalkii
  source 1..828: mol_type = genomic DNA
atgaatgtatcttttataaagcagatgaaggatttagaacgtgaagtccttttaaaatctgttgaattagatgatgatagtgatgatttccaatttgaactagatgattttagtgcaaatgatgaaatcattgcagttgcacctaaatgtgtaaggtgcaatacatgtgttggggaatgtccggttaatgcaattgaaccagctaatatttttagaatagctaaaataactgacaagtgtgttaaatgtgaaatttgtgttcaatcatgtccagtttctgcaattaaattgattgataactcaatcgtttatgatggggagaatgaagaaaatataattgaatataaattatccaatatcagttcccgtcatagggtagtccgtatgaataatatttcaatcgattactcatgtgataataattgggatgactgttcaaaattatgtccaacaaatgcgttcactcttgaatttaaagagttttttgatgatttggatatggatttaggtattgaactcatagatgatgagttatatccatatgttaatgaaaaaatgtgtataggatgcggagcttgtgctgaaatatcacttaatgacaatgcaatagaattggaccgttatattgggccgattattcacagtcgtttcattgatgttaatcatgatttgtgtgtgaattgttatttatgtgaagaaaattgtccgaccggagctattgagttagttgatggtaaagttgttttagatgatgataaatgtattagatgtattgaatgcactcgtcattgtccggtagtagctttaaaaagagttgagattgaataa

SEQ ID NO: 6895 - DNA, 636 bp, Methanobrevibacter gottschalkii
  source 1..636: mol_type = genomic DNA
atgagagctaaagagttaatggataaaaattttgtatatttaaatgcaaatgatagtgtaattgaagtttcaaaagtcatggaagaaattagacgttttacttgtcctgttgtaaatgataataaacaattaatcggatgggtaacttcttttgatattactaaaggtttaagggaaggtaatgaaaaaatttcagatataatgagcggttatgaagaaattgggactgttcatgcagatgatcctgcaagaaaagcagtaattttaaccgcaaacaataaattcgtaactgtacctgttgtaaacgatgataaacaaatcattggtatggttcgtgcttgcgatattgttgaattgttatctgaattatacgatattaaagtttcaaaattatatgaagcaatgcaaaatcaacttaaaggagttacttgggaagaattaatggctgcatctgctcttgtttctcaaaaaactactggtgttaagatttctcctgaagcatatgaagaaaatattatgaattccacttttggagaggctatctggtctactggtggtttggaaaaattctttgctggtttaatctctgttggggaattggtaattgctcgtagagttggaaaagcaagaagataa

SEQ ID NO: 6896 - DNA, 642 bp, Methanobrevibacter gottschalkii
  source 1..642: mol_type = genomic DNA
atgaatttgaattttgactttactgaaaaaagagtaattattactgcatttttctgtatggctttcacaattgcaaatttaatcactgttaaagttatcaatattggatttttaggtatggaaactcctgccggggttttaatctatcctttggtatatattttaacaaacgtaatcgcagatgtttatggtgaaaaaatagcgcaaagaacaattattttaggtctttgtgttgatattttatttgtcttcatgacaactttaatattgttcttaccgtctccagcgtactatactggagattcaagccttgcatttgtatttacccaaactccaagaattcttgttgcatcttacattagttacttaatcggtaacttcgtaaatgcaagaatcactgctaaagtaaacgaaggtaaagaatattcatctaccaaaaacttaggtattcttgctttcagtgagctaattgataattttgtatttatcggtcttgcattcgttggcgtattcgcagttactgatattttaataatgattgtttctcactggattttaagtttgatttggagtgcaattgctcaaccatttacaaaaatgactgtaaaatgggctgaaaaaggaaaacctgcagaagcttaa

SEQ ID NO: 6897 - DNA, 366 bp, Methanobrevibacter gottschalkii
  source 1..366: mol_type = genomic DNA
atggaattaaaatatataatagtattatttgatggtgaatttatgaaattcaaatctaaattttttatttcattgttgattatttttgttttgagtattgtggctgtacctgctagtgatgttaattctacagatttttctcaattaaatgatactgttctagattcaagttttaatgataatttaagtactgttgaaacttcaaacaactcgaaaacagtaaataatacaaataatggtgatatggttcaaattattaaaaccaatcctaaaatcactgttaaatcaacatatttaaaaagtaaagataaattagaatttaatttcaaaaatgcttctggaaacccactgaaatctaaaagctga

SEQ ID NO: 6898 - DNA, 1572 bp, Methanobrevibacter gottschalkii
  source 1..1572: mol_type = genomic DNA
atggtcttcatcggtaataaaaaatattcggtttacactaattctaaaggtgttgctaatttaaacattaacttggttgctaaaacttataaattaactatttcttttgaaggtgatgataattataatgctgttaataaaataatgtatttacgcatctctaaattatcaactagaatcacttgttataaaaactttgtagttaaaggaaataatttgtatttctatttatttgattcttattataatccagtctcatgtaaaaaattgattgtaaagtacaaaggaaaaacagttactaaaacatcaaataaaaatggcagaatttcttataaaatcaaatcatcaggatctaaacattcccttcatgttaaatttaaaggtgatggtcagtttaagtcatcttcaaagtatcataaattttatataacaactttttcaccattgaaaataggcaactctaaacttttaactaatggatatttaagaatttatttaaatggtttaactaaatcttcaatttctaaaaaaacaattgtaattaaagttgcgagcaaaaaattttctaaaaaatcctcttctgaggggattgttgttttaaaaccaaatgtatgtgctaaggcatatactgttagtgcgaaatttggcaaatatgttgtttataaaaaaatgaaatgtattgaaggcaatgtgaaagatccattgaaatataatattccaacaaaaagtggtgttccagatattgatgtaatgcctggaaattatgttatgggagacaataatgcaagatacacattaacaaaaatacaatataatgaagttataaaaagagacagttattgtttgtttttaaataataaattatccaaatatactttttttaaaacaaaaaataatcccaatactaatcatattattcagcgagaaaaatggaatgttattgaaagggcaataaatcttaagattgttgggaaaaataaagctaattattggctaagtgaaatttcagttttacttaagggtaaatcatataaatatcctgaagtaaggaagactcaatctacaaactattattgtggtcccaattcagctagtgtttgtactcaggttttgaaaaattattattgtgaaaaatatctcgcaaagttaatgggtacaaatcgtagggagggtacaaaatgtcaatggattattgatggtttaaataaattaggttttaatgcaacttacttctacaaagcatcttttgataatgcattaaatgagcttaaaaaaggcggtgctgcattagtattccatgcacctcgccattatgtttctattttggatatcagttctgatggtaaaaaagttttagtgagcaattcttatggaagttatgataatattccaactaaatggactaaaataagttatatgaaaactaagttttctaaatgggaggagagtgtgattgtaagaagtaattacaagctttctgattctgtaaatgatagtgtaaattgtttctataacagtatgggtacaaattggtatcgccatagtactagtcaaaaaatgggtttagtttaa

SEQ ID NO: 6899 - DNA, 1290 bp, Methanobrevibacter gottschalkii
  source 1..1290: mol_type = genomic DNA
atggttgaagaaaatagtaatatgctacttggggttcgtgataagcctcctgcgcttaggtgggttttacttgctatacagcatgtatgtgcaatgttcggagctacaattttagttccgatagttgttaacaccactgcaggtgcagatgttttatcaattcctgtagcattagtcacatctggtataggtacattaatctatcttgtttgcactcgtggaagaagtccggtatacttgggaagctcttttgcattcattgctcctatggttgcagggtatgcattagctggtaaatctagtgtattttcagctttgatgcttgttggtttggtatatgttgctgtatcatgcattattagaatttctggtaaagcatggattaataaattattgcctccggtaattgttggtcccatgattatggtcatcggattgtctcttgctccaactgctattagtgaaatcggtttagatttagcagtagtaccatggaaaaacctggtcgttgcattgattgcatttttaactactgcatttttggcagttcgtggaaaaggaattttacgcgtaatcccttttttgattggtattattgtaggatatattgcagcggcggctcttggtatggttgattttactcaagcattaactgcaaatgtggttgaaattcctaaattttacttgccatttatgaattataatttaaactttgctgcagtccttacaattgttccaattgctttagtaacaatggtggagcatattggagaccataaagtattgagtgaaatcattggtcgtgatctaattgaagatcctggtcttgacagaactttgcttggggatggtcttgcaacattccttgcagcattattgggaggtcctgcaaacactacttatggtgaaaacacttctgttgtaggcatgacacgagttgcatctgtttatgttattgctcttgcagctattatagcaattatatttgcattctcaggacatttgacttcacttttaacagcaattcccgctcccgttttaggcggtatttctgtattattatacgggtttatttgtgtaaatggtcttaaaattttaattcacaaccaagttgactttaacaacactaaaaatgttgttgtagctgcaaccatgcttgttttaggtttaggtggagcaacattatccgttgtttatggcaatttgtctcttgctatgtcaggaatgtctcttgcagcagtcatcggtgtaattttaaatcttgtaataccggaggaaaaacatgaatga

SEQ ID NO: 6900 - DNA, 627 bp, Methanobrevibacter gottschalkii
  source 1..627: mol_type = genomic DNA
atgaatgaatttgttttaaatcacccattgataactcataaacttgcatttttaagagatatcaatactggaactaaagaattcagagaacttgtaactgaaatttcaacaattcttgtttatgaagcaatgagggatgcacaacttgaaaaaacaactattgaaactccccttgagaaaatggaaacaggaacccttaatgaaaataactatgcaattgttccaatattgagagctggaatgggcatgattgatggagtgttaaatgtaattccaaatgcaaaaattggtcatattggtctttacagaaatgaagaaacattcgaacctgttgaatattattataaaatgcctgaagggattaaaaatagggaagttctagtagttgatcctatgcttgcaacaggtggaagtgcatcagcaacaatttcccggcttaaacaagatggtgtaactaaaatcaagttgttatgtattgtagctgctccacaaggtattgaaacaatcgaaaacgaccatcctgatgttaaaatattttgtgcaactgttgacagggaattaaacgaaaatgcatatatccttccaggtcttggagatgctggagatagggtatatggaactaaataa

SEQ ID NO: 6901 - DNA, 993 bp, Methanobrevibacter gottschalkii
  source 1..993: mol_type = genomic DNA
atggtttcaaaagaattcattgaaaaagaatggattaaagcatataatgcccttaatccttttttagatgttaatggagcatatgaactccgtaaattattatgtgatttaagaaataatgaaaaattcatatttatttcagataatgttgattatacctgtattattgaacttgatgaattaaaagatgatattccaatttttaaatatgcatcagattgttttaaaatttttggaatttttagtaaatctcaattgagcaaacttcattttgcatctgtttatgatataattgtttatagttgtgttagtgaacttaaaagagatttatcatataatgagagaaaaaaaatttattactgtaatttaattcataaattgactttgaatcaggatatttcatctaatttcaatcaaaattttaaatataataatgaactatttaatcaaatgaaaaaaataaggtggaattcttctgcaaataagttaaaaaatattatatacagagatttgatgggtacactcactttagaattaaatactgattcaggagttacttcttcatttggtgaatgtgcagagtatttagcatgttgtaatgtatttaatgataatcgtttagaagtaatgcctgatgatgtggttaaatcttggttattaacattgaatttatttttaatggatttacgtccctatattaaagattttaattcagctagtgatatgattgctgatactggaagtgaatttaaacctattaatatttcggaaggtcaatctaacaataaatcatcatctataattcgaaaagtcttagcgggagttttaagcataattattgtctttctgttgcttattgtaatgtcaacgatattaatattgatttttggagatgctttggataatttcattggtttacttaggccagttggtataataggtttggctttggctgcagctttgggtaaaaaaatatacgataaacttgtttga

SEQ ID NO: 6902 - DNA, 993 bp, Methanobrevibacter gottschalkii
  source 1..993: mol_type = genomic DNA
atgtttgaattttattatgaaaaggatattcaaaaaaattttggagatttggataaatttgatgatgttttaaatttatttgaacttaaaaatttaatcaatgatttcattaataatgaaaaatatgttttcattattgaaaatattgattttgaaatgtttgaaactatggaaaaatctagaaaatattcaacatttattaataatgcttttaatggtttaaaatcatttaaatattggattcaaccatcaataatgaattttaattcatttactagtgtttattcaataattgtttatagttgtattattgcatatggtagaatgttaagtaatgatgaattagaatcaataatcttttcagattttccaattaaattaactttggtcatggatgatttttacaacataaataatgttccattattggataaagatttcttcaggacaattcgtgatgttaaattagataaatcagcaaaaaaattagataaatttatttatcatggatttttacttaatttagcagaacctggaaatcattatgtagctgttgttgttgaattttcatattgtgcaagttatttttccagatgttatgcatattcaagaaaaaataaatttgttacaattaatgacattgctgatggatggattttaacttttaaattatttttaaatgatataagaggttatattgatggtttggagtcaaatagtccttgtgctattgtcccttctctaaaatcacataaaaagattaaagttgaagaagaaaataatggaagttttaatattaaaaagataattgcaatattcttatccatattgtttttttgttttttaatattagttgttgaagatatttcatatattctaactggaagttattattattctggtgcaccaactactcgttatgcaatatttggatttattttatttttaactagtatgttttattctttggttaaaaatattctcaaattttaa

SEQ ID NO: 6903 - DNA, 990 bp, Methanobrevibacter gottschalkii
  source 1..990: mol_type = genomic DNA
atgtttgattataatttcaaaaagagtattgaaaaaaactttaatgaattagaaaaattcaattatttgaaaaattttaatgaacttaaaaatttattgttaactatatctgaaaatgaaagatatattttcatatcgaaaaacattgattttaatgcgcaaccgttaatggataaacctaaaaatcattcaaaatttataattaatgcatataatggtttggaatcttttaaatattggattaaactttcaattatgaattataatttttttgttggagtttattctattatcatgtatagttgttcatgttcttatggaagacctatggatattattgaatttgaacatgttctaaattcgaatcttccttataaattaactgtatatttggatgatttcgataaatatgatgatttttctagtcttagtgaagaattttttagaacaattagagatatgaaactagataaaaaggctaatgaaattgaaaagattatttacagaaagttttggtcaaatttgactattaattatggcactgaaaatagggtggatgtacagtttgcatattgtgcaaattatttatctaggtgttatgcatttaatagggggagaaatgttgtctctgttgaagatattgctgatgcatggattttaactttaaaattatttttaaatgatttacgtccatatattagaggtttagaatcaaatagtccttgtgctagtttaccttctgtaaattcttacaagaatattgaagttgacaatgataatggttcggttaatgtaaaaaagatatttgcaatattgttgtcaatattgtttttttcattaataattatggtttttcagtataccgccaatttgttaactggagattattattatcctaattctcctcaagacagatatgttttagcaggcatttttttattccccactagtatgttttatggaataattaaaaagattcttaaaatttaa

SEQ ID NO: 6904 - DNA, 993 bp, Methanobrevibacter gottschalkii
  source 1..993: mol_type = genomic DNA
atggttcagtttcctcaaaagactattgatgaatggattaatgaagattatgaaaaacttgatgtatttatggatgctgattctatggaggatctccgtgaattgattttaagttttaaatatgatgataaatttgcttttctttcagaaaatattcattatcagacagatattaataactattcagataataataatttatatttggatgcaaatgatgttttgggagattttggttttatttttagtaattctcacttatcatctgtttgtattgattcattattttttgtgattgaatgcagttgcattggtgaacttcgtagggaattgtcaaatattgagaaagaaaaagtttattatagtgatttgggttataaattaactttaggtcaagaaaattttttaaaaataaagaactatgaagtaatcaataaaacatttttcaaaaaacttagcaaaattaaatggagtagtaattccaaaaatttggataaatatattaagaacttttgggatactattacattacaatatgatacatattatcatattgttagttcatttagtgtttgtgcaaattattttgcttgttgtagagcattgacttctggtaggttggaggtgtcgaatgaaggggtaattcaatcttggttattaacattaaatttatttttaatggatttacgtccatatattaaagattttaattcagctagtgctatgatttctgatactggaagtgaatttaaacctattaatatttcggaaggtcaatctaacaataaatcttcatctataattcgaaaagttttagcgggagttttaagcataatcattgtctttctgttgctttttgctatgtctgcaatattaatattgatttttggagatgctgtggataattatgttgattcacttaggccagttggtataataggtttggctttggctgcagctttgggtaaaaaaatatacgataaacttgtttga

SEQ ID NO: 6905 - DNA, 960 bp, Methanobrevibacter gottschalkii
  source 1..960: mol_type = genomic DNA
atgaagcaagaaaatacctattctccagttagtagtttgttttcaaagcaattaaatctttcggattttggttttgaaaaacccgcactcaaaaaaattaaagaaattaacaaagagataaaacccaataaactcttaaaattcatcaaatatacatttaaatactcaaaaattgtgttaaataagtattcaagtcatttttcgaagcatgacttcacacaacctgcattattcacacttttagctgtgaaaatctacacaagaagtacatacagacaaataacagatttattagaactttctgacaaaatacaggaacatttacacttaaaaaaggtcccacactacacaacactccagaaattctttcaaagacttccaacatcaatattacaagaattaaacaaattaatattacaaaatcatcaaataactggtaaaataattgctttagatggaagcggcttcactaatgactacgcagacaaatattacgcaataatgaggcgaaaagaaagaaaaagctacataaaaaaccatatttcaatcgatgtagatacaagattaatactccatttcgcagctcaaagaggcccaagatttgacacacgatttgcaatccctgcaataagaaatataaagaaatataacccaaaatacatactagcagaccgagcatacgacacagaacccatcagaaaatgcattaacgaagaagcaaaagcagaagatcaaataccattaaaaaccagagcaaaaaacggacattaccgattaaaaagtaaaaaacaattcaaacaagaaatatattccagaagaaacaatgtagaatcaatattcagcgtaattaaaagaatatttaatggaacaaatagaagcagaagcttacaactgtcaaataaagaaacaaaactcaaaaatacaatttataatatttacagatcaactcaaattcaataa

SEQ ID NO: 6906 - DNA, 777 bp, Methanobrevibacter gottschalkii
  source 1..777: mol_type = genomic DNA
gtggaaaaaggaattcgttttgatgaaaattttattagtgaagttattttcagaattgaatttccaactattaaaaagttaactggtaatgatgaagaagtagttaaagattttgctaataaaatttcaggcactttccctatttcagaagttattcctcataataaaattaatttagatattgatattaattcagggcaacttccaaaaattactcgagaaggagatttagtttggatatttaaaagccataataacaaaaagattgttacattgacagctaatgatttagttttagaatatcgagatagggtatattctggttttactaattttttagatgaaattttattactgatggacgcttttaatcagtttgattaccaaaaattaaactttttaggattaagatatattaatcaaattactgataaaaatgttaataataatgtttctgaattttttagtctggatttaacaaatatggcgattattaataatcttgagaaaaataatgaaaatttggtacagatatttactaaggtaaattttaaaaaagatgattatttaatgactatgcaatatggattatttaatccacgtttccctaatgtggatgcagataagatgttcatattggattatgactgtgtgcttcataatattagtcatgttggggaaattaaagataatttaattgatatgaatcatttaatttttgataagtttgattattcaataaccgctaagtttgaaaaaattattaaaggagaatga

SEQ ID NO: 6907 - DNA, 447 bp, Methanobrevibacter gottschalkii
  source 1..447: mol_type = genomic DNA
atgagtcctccagaagttattcgtgatgatgatacatatattacattgcctgctagtttaaaggatgaatattttgaatcaaaacctatatcttactctaaatattttgagtcatttgaattcaaatttaatgagttatctaatgattttaatcttattaatattatggagattcaagattttattttacttcatgatgatttatttgattatttgagtcaaattaaattattattgcaaaaatatttctcagaatatgattattgtttagaattttattcagatccagaaatacaatcattaaatcaattagtaatctatattaatggagatgaatcttcttttgatgaggattggagttcattaaaaagaatgaatagtgaaattaatgatttatgtaatttcccaaatagtgttaaacatttaatttctgtggacttgtggtga

SEQ ID NO: 6908 - DNA, 1275 bp, Methanobrevibacter gottschalkii
  source 1..1275: mol_type = genomic DNA
atggttgttaaatatttgccaagaatattggatgatgatttggaaaaatgtcttacaatgattggtgcaattcttattgttggaccaaagtggtgcggcaagacaactactgcagaacagcatgcaaacagtgtattaaaactacaagataaagacaattacaaatcaaacatgatgtgggcagacatagaaccttcacgattattgaaaggggacaaaccacgattaatcgacgaatggcaggtggctccagtattatgggattcagttagaacaagcgttgatgaaagcgaagattatggattgtatattttaaccggttcgacagtagttgatgaagatagtataatgcattctggaaccggaagaatccataggatgttgatgaggcctatgagcttgtatgaaagcggcgaatccaatgggcaaatttcaattatggatttattcaacaatcctgacatcaacattaatgaatgtgaatccgatttaacaattgatgatttgatatttgcagcatgtcgtggcggatggcctgattcactgaaccaaaaaacccgagagggcaaactgtttgttgcatataattatttggaaaatatctgtaatactgatgtttctgccgttgatggggttaaaagagatcctgatagagtaagattattattgcgttcacttgcaagaaacaattctacattggctaaggaccagactatcattgatgatatgaatgctaatttcatggatataagtaggccaacatactattcatatgttgatgcattaaaaagattattcgtaattgaagacaataggggatggtcacctaacatcaaatccaaatcagcaatccgatcaggaaataagaaagtgttcatagacccttcaatcgcagtagctgcactaaatgcaaaccctgaatccatgattaatgatttgaatacattcggtttcatttttgaaaacttatgcattcgtgatttaagcatctataccaattctcatggtggaaaagtttcatattaccatgacaagtcaggtttggaaatcgactgtgttgttcacttaagagatggaagatatgcattaatagaatgcaaacttggaaatgatggaatagaagaaggctctcaaaatctacttaaaatcaatggtttaattgaaaagaatgacaaattggacaatcctacatttcttgcagtattgaccggtggaaaatatgcatacactcgtccagacggggttaaagtttttccaattggctgtttaagatag

SEQ ID NO: 6909 - DNA, 96 bp, Methanobrevibacter gottschalkii
  source 1..96: mol_type = genomic DNA
atggttgaaaaacaaaatctaagtacaactgaagaaggtagggcttctattagtgaaagatttttggaaaaacttttaggaaaaatccattcttaa

SEQ ID NO: 6910 - DNA, 222 bp, Methanobrevibacter gottschalkii
  source 1..222: mol_type = genomic DNA
atggctgaaactacagacaaagttattgtaattgtaggatatcttcttgctatatttatacctatattaggtttaattgcaggaatagtattatactttgtaaaaaaagaagatccattctaccaaaaacatgcaaaatatattataatcgtttcaatagtcgtatgggctttaagcgccatatttgtgggaatgctcaatgttggattagacggtttttaa

SEQ ID NO: 6911 - DNA, 1116 bp, Methanobrevibacter gottschalkii
  source 1..1116: mol_type = genomic DNA
atgaataaaagtgatttgaaaagagatttttatatgctcaaagggccacttgccaagaaaggttatgactggtggtggcattccttaaccgcatatgataaagaaactggtgaagaaaaacctttcttcattgagtactttgtatgtaatccagaattagctgaagaggaacctactcttggacaattgcctgaaaatcaaaaagccggtaaaaaaccatcttattgtatgatcaaagcaggcacctggggtaaaaatgcaaagcaaattcataatttttactcaatgaaatattttgaatgtccggatgatgaattaaatatcaaagtaggggattgcagcttaacagaaactcatatgagcggatttgcaagagttagtgaagaagaatctcgtgatcatccagaatatatgagtgatgctggagatatgatgtgggatttagacattgataaacaaatcgcttttaatgttggttatggtgctaatggtcttttcaggaaattaaattcatttgaaatgttttggcatgctgaaggaattaaaactcaatatagtggaacaatctggcttgatggtagggaatatgaagtgattcctgaaaaatcttatggttatgcagataaaaactggggaggagacttcacatcaccttggctttggatttcctcatgtaacttaactagtcttaaaaccggtaaaaaattaaataattctgcttttgaagcaggtgggggaagaccaaaagcattcggaatttccattcctcgcaaattattaatcggtttttactacgaaggtaaaatgtatgaatataactttgctagattctggaatatggttaagattgattttgactttgaagaaggtgaagacgtacatacatggcatgtaaatgcaagtaacaaagactctaaaatggaattggtgctttattgcaaacgtgaagatatgttgttaatcaactatgaggctccaacaggtaaaaaattacacaataggttatggaatggaggaaatggatggggtgaaatcaaattatacaaaaaagatggaactctcattgaccatgtaaaaatggaaaataccggctgtgaatacggagagtattgctaa

SEQ ID NO: 6912 - DNA, 699 bp, Methanobrevibacter gottschalkii
  source 1..699: mol_type = genomic DNA
atggtattcacagacatcattgcattaattgtggtttatatttatgtagctattatttttgtagtggctgaaatggttttaaaaacaagacctgaaatttcacgtaaatttttgcatatcatggttggtaacatgatatttgcaatgccattttttgcaaatccgtggaacatggtttggtttttaacactgcccattacaattgcattattcttcttaactgactactcgccaattaaaatagaaaacagtgtaactgagtctggccatgcattgggattgtttttctatgctggaatttggacaatattaattgcaatatttacaataattgctcctgctagtgactctaagttattcctttggattgtagcattagctattgtccctatggtatatggtgatggatttgcagcattaattggtcaaaaattcggtaaaattaaatatacagtatttggaggaaccaaatctcttgaaggatcacttacaatgttcgttgttacctctgtaatgggtgtatttgtgtggatggtattctattcaatcggttgtacaatgcctgaatttaatattgttagtatcttggcaatttctgcagttgcaacagcatgtgaagcattcagttacggtggaattgataatttaacagttcctgtaatcacttctattttatatttcttagtggctattttatag

SEQ ID NO: 6913 - DNA, 420 bp, Methanobrevibacter gottschalkii
  source 1..420: mol_type = genomic DNA
atgaaagtaaaattaattgaaaaatttgcattaggtgcttttgtaggttgttttattgtaatgtgtgtcatggttttaatatctctttatcagggtcctcagaatattcgatttagcggcattgacataataaattcatttttcgggtcaatcgttgcaggttggggatttactttttcaggatttatttatgataaagaagatttgcctttaacatttcaagttatcattcagatgggtgtcggcatgacaatattgctattaattgcaatttatcttaaatggatgccgattaatttgggtatcggtccaatagtaacttggattgcaatagcttgtatatttgccattattttctggtttggtttttatatttattattatttagttgcacgtgacttgaataataaattgaaataa

SEQ ID NO: 6914 - DNA, 1779 bp, Methanobrevibacter gottschalkii
  source 1..1779: mol_type = genomic DNA
atggataataaaaagatatttctgtctttcatattgtttattctcattgcaatttctgtaagtgcagtttctgcagtggatgctgataatgctactttggctgaagatgcaattccgactgatgcggatgttgttcaaactaaagttaataatgcaaattcaggagatactattacattggaagacaaaacatatgattttgctaatcaaactgtaacaattgatggtagggataaaatcaccattagaggtactggtaacactattattaaagggcatggtggccaaaattcaaaaacaggtgctttatttatagtatctgaaagtattggtgtaacttttaaggatattactttcattgacaccaacccaaataataatttcacttatgatggtaatgtggaaggatatggtattacttttgatggatcaggtgctgaaaatggtgttgtagataattgtagttttgcagattttaatactgctgttaatgtgaaatcttgtaattatgtaactgttaaaaacagtaaattcagtggtggttatgctactaaacttattaatgatccaactgtaaacaaagaaaagggttctaaagttgtaagtgctggtggatctttattcctcagtgttttaaattgtacttttgatggaccaatgctcgatgcagtatctatctatggtggtagtggagatgctaaaataattggaaatactttcaaagataatgtatatgctattttctttggtggtgcatctactgaaggtactttcattaatgataatactttcattgaatgtggtcaatttgttaaagatgcaaatactacttggggaggataccctgtaatcagtatagaaaaagcttctgatagtgtttacatgaataataatactttctatgcagttaataataataaattaattgcagctgaatctgctaatactgctcatggcgctccaagtactttaggcgatattaacatcactaactctaatgtaaatcttgctaatgataatgttgttgctggttctgtaactttcttacatattttaagtagaactggagacatcaatcctaaagctcctattactttaactggaaataaatatgctaaaggtgttaaagctgttgttgtatggtacaatgactggggtgttgaagattcagaaaatattgtgattccacaagctcctgaaccaactcctgctcctgttgctgtttcaacttctatttcttctgctaatttagctatttatgctggtaactccggtaagattaaactcactttaaaagatgcaaatggtgttgctgttgctaataaaactgtaaatattgtaattgatggtgttgctaaaactgtaactactgatgataatggtattgcaattttatctgttaaatattctaattctggaactcattatgctactttagctttcactggtgataatgattacactggatctattaaaacagttaaaattagcgtacttaaaaaagtcactgctttaaccattactaaaaaaacatttaaagttaaaactaaaaataaaaaagtaactactgttcttaaatctggtaaaacagttcttaaatacaaaaaggttactttaaaagttaaaggtaaaacttacactgcaaaaactaattccaaaggtattgctacttttaatattaaaatagctaaaaaaggtacctttaaagcattaactaaatttgctggtgatggtgcttacaaagcagcaagtaaatatagttatgtttatgtaagatag

SEQ ID NO: 6915 - DNA, 651 bp, Methanobrevibacter gottschalkii
  source 1..651: mol_type = genomic DNA
atggatttgattggggggtatttattagtaattttactattatttactgcaaatattgctttaatattaggcgattataaacttgataatattaaattagttgctttatcttcaatttgtttcattgtttcatttatattgatgtatgcttcaagttttttaaatgtttcattgtcttttttaattgatacttttagttatgtcttttttattatttttcttgcacttgttgttgtaataattaagtatataaaaaataataattttaaacatgcattatatctaactttagttacatttttaattacaatatttctgtttgcttctcagtcaaatctgaatgtttttaacataattgtgtactctttatttatttttattattttatttgttgtttatcaactttcaaaattattgcatcatgcaaaaatgcaatataatgtaataacaagtgaatatatgtttttattttcaatagttatttttatttttgctttaacttatgattccactaaatctctcaactatacttcatttaaggcttttttaattttaactcctacttatcagttaatttatgtgattattgcatttgttgttattttgattattggtgtatttataaatgagattaaaggaggaaattcatga

SEQ ID NO: 6916 - DNA, 642 bp, Methanobrevibacter gottschalkii
  source 1..642: mol_type = genomic DNA
atgattattcaaggaactgagacattaacttcgattattcatatattttccgaaagcttattaacacctgttgttgtgttacttgttgtttcaggagtaattatcattcttgctttgggtggtttgattaatgagtatatttcaagaaaacctattagttcaaatgatttagaaaatttagttaggagaatttcattttcaaataatgtggatcaaatgaaaagtgaaatcactaatagtaatttatttaattatcaaaaagaaattttaattagaattgctaataattatgatattggttgtgatgcaagaaaagcatttgctagtgaactaatatctgcagaagaaacaatattaataaaaaaaacgaataaaactgatattttagtccgtgttggtcctagtttaggtcttttaggtactttaattccattaggcccaggtcttgcagcacttggaacgggagatattgcaactcttgctcaatcattaactattgcttttgatacaactgtaactggtttaactattggcgcattagcatttgtagtttcaaaatataaaaagcaatggtatgaggcagaattaatagatgttgaaactcttgcagaaactgaattagaagttatcaataattggtga

SEQ ID NO: 6917 - DNA, 300 bp, Methanobrevibacter gottschalkii
  source 1..300: mol_type = genomic DNA
atgcttagaaaaaaaagaaggatttcagaatctgttgatgatgatccaatgggtggtttaaataatctttcagatgctatgcttgttttagctttaggttttttaatatttgcaatcatggcattatctgttaatccagacatgattactgagcaaacccaaacaaaagaagtttcaacagcaaatacatttactcaaaattatactgatgctggtggactggaagatagtggatatagtgaagttggtaaagtttatgaggatccaagtactggtaaactggtaatggtatcaggttaa

SEQ ID NO: 6918 - DNA, 402 bp, Methanobrevibacter gottschalkii
  source 1..402: mol_type = genomic DNA
atgaaaatgccagaaactttagattcgaaattactagcaccctgcggaattaattgcattagctgtgaaaaataccaaaatccatgttccggatgcttaataagtaatgatgggaagagcaaagctagtttgaagtgcaaaattaaaacttgttttgattccaaaagttttagttattgcggacgatgcagtgaatttccatgtcctctaatgaaaaaacactcaaagaaatatgttaaaaggcatgatttaaacactcttgaaagtgctaaaagaataaaaaccaccggtattggacgcatgatgagtcaggatcatgatgaatggttatgtccggagtgcggcggtgttattaaatttcaaactaaaaaatgtagtgaatgtggcattaaaaaagaatag

SEQ ID NO: 6919 - DNA, 741 bp, Methanobrevibacter gottschalkii
  source 1..741: mol_type = genomic DNA
atgtcaattattatttctcctgaatttaagaaattaaaaaacagattatctgatttaatattgatacatcatgaacttttattgcagatttgtccaaatattgaaagagagtatcttcttaagtttggttctcttgaatatgagctttataagaaagacgttaaattatcaatgcttaagcgaaaacttcaattgatacaaattcaaattagcactgaagaagaaattgatattgaacttattgatgaaatattggaagaggaattctttaagtataaggagaatattaaaaaacacatggatgaattaaatggtgcaatggaagagcaacacatttgtttattatcaaaaaaagatactaaaaggcttaaattaatatataaacaatgtgttttgaaactgcatcctgatttaaatcctaatttatctaatcgtgaaaaagatttatttattcaaattacagaagcatttaaaaatggcaacttgaatgcattggaatctttatattactttgttccaaataaaaaagtagaatttgaatctgaaatagaacgtttgcaggaattaatcgaatgtgaggaaaaggagatagctgagattaaagaaaaatatccatataataaaaaagagttgttattagatgataatgaaatttatgagtatgaagtcatgcttaataatttaatcactcaatttgatgatgatattcaaagatgtatggatgaaattgatttgatttaa

SEQ ID NO: 6920 - DNA, 558 bp, Methanobrevibacter gottschalkii
  source 1..558: mol_type = genomic DNA
atgtataaatatattagagatgcatggaaaaatccggatgagtcttacgtacgtgaactcatgtggcaaagagctcctaaatggagaagacaaaaagtagttcaaagaattgataggcctactagactcgacagagctagaagcttaggttacagagctaaaaaaggtttcgttttagtaagaaccagagtaagacgtggtggaagaagaaaaactcgtcgtttcaacggtcgtaaacctaaaagaatgggtgtaaacaaaattacccaagcaaaatctcttcaaagaattgctgaagaacgtgtagctaaaaaataccctaacttagaagtattaaactcttactgggtatgggctgacggaaaatataaatatttcgaagttattttagtagatccacaaagtccttctattgtcaacgataaaaaaatcaattggatttgttctaaaaaacacactaatagagctctcagaggtttaactagtgctggtaacaaaggacgtggaattaaatctaaaggaaaaggctcagaacaagctagaagaagaaaattataa

SEQ ID NO: 6921 - DNA, 423 bp, Methanobrevibacter gottschalkii
  source 1..423: mol_type = genomic DNA
atgattcataatatcaaatttagagctttcgtttatgaaaatgaaagtgttgatgaaatttctcaagctattttaaatttacttcctgaagctgaaattaatgtggaggaagctgaagggttgctggaagataggattcttattttaactggtgtcgtatctaaaaaaagatacacaaagactttttttaacaaacttttagaatctgctgatttggataagttaaacaatgatttagagtgtaaaatggatgaaaaaggaaattggtttttaagatttgataaaactgatgctctagatgaaaaattaaccattttagataaaggcgattcgattcacttaaaaattaaaattgctgcttttccagctaaaaaacaaatcgcagttgataaagtacgcaaagctatttcaggttgtgtttaa

SEQ ID NO: 6922 - DNA, 378 bp, Methanobrevibacter gottschalkii
  source 1..378: mol_type = genomic DNA
atggaaaaacaaagtaaaattcttattgttttattaatcgtttttttaatatgtgttggtgtattctggtttcagtttaacaataatgtttcaacattcatgattgtcaatgaaactcatgtaactgaaaacagttcgttttctgggatgttagtcgattcttatggcaatggcgtagcgaatcaaacaattgcctatcacgaacctggagggaatgtgggaactctaactactgatgaaaatggtgagtttactgttgaacttgccaaatatttatccaattcaacaagtgacaattattatggtgatttcaaattctctggaaatggcaaatatcagggatgcgcatatgaaggtaatgttactgtaggaatttaa

SEQ ID NO: 6923 - DNA, 1191 bp, Methanobrevibacter gottschalkii
  source 1..1191: mol_type = genomic DNA
atgactgatttgccttggggaaataaccagaatttaactgatgaagaattttacaacagagaaagcgaattgataaacatcaaaaatatcttgcattcaactggtcagggccatgccccggatttattattaacaggtataaggggagtaggtaaaacagtctttctcaaaaaactaaaaagggaacttgatggcgaatatttggttgtatatattgatttttcaaaatccaaatgttatcaaaaaaatcagatgagcattatcggattgatgggacatttcttcaaagaattgattcttgaatcaaaaaataaaggattaaacacattagacaagcagatagaaaaatatttcaaatccaatgattttaaaatcagagagtttatacggcttgacaaaatacctataccaatattctcaaaagaaacaaacgaagaaaaacttattgattttgcattaaatctgcctgaaaaaatatatgatgaaaatcaagataaaattaaaggtgttttaattttcattgacgaatttcaaattataaaagaactaaacaattacaaagaatcgtttttatggaaaattagaagctacattcaaaaccagagaaacatagcatacatattttcagggtcaatgagcctacaagacaaactaatatcagaaattgcaagccaaaacggggcatttggcggaagaatgatttcaattaacataaacccctttgaaaaagaaacagtcaggaattatttatccaaaaaaaccccgtatatccaattcactgatgacggttttgatagattttacaaattcacctctggagtcccgtcatatgtaaatatattcgcatcactgcttccgataaacgagcaactggatgatgatgcaataaaaatgtattttgataaaaaaatccaagctataagttctcatttaataaatatatgggcaagattatcttttagagaacaaaccataatcataactctacttgaaaaaccgctgagaagaatagacatagcaaatgaatttggaatatccacaggatcattaagcaattatttaaacaatcttcaaaatcaaggattaataagtctcaacaatggtttatacgagattgctgagcctattcttaaaagatggttggaattagaatttaaagaaaaaggaatttatccctacagaaatatataa

SEQ ID NO: 6924 - DNA, 348 bp, Methanobrevibacter gottschalkii
  source 1..348: mol_type = genomic DNA
atgaaaggtgaagtattttatggaaaaggaattagagaattggaaggagaataccctgatttatatgagttagtaacagatattaatgatactgtttggaatggtaaggtattggattataaaactcaaaaattgattgcaatcggtattactgcttctcgtgctgatcctagagctattaaaaaacaaattagaagtgctattgaagtattgggaattaccaaagaggaaattgtggatgttttaagggttgttttattaacatctggaatgccggcattttccaaatcacttcaaatattaaacagtgttacagcagctattgaagaagagaaacaagaagaatga

SEQ ID NO: 6925 - DNA, 933 bp, Methanobrevibacter gottschalkii
  source 1..933: mol_type = genomic DNA
atgaattcaaacaaaaaatttttctcaagaataggatttaattacttaatttatgcagtattttcattagtaattacaatgattttagcaaatattattgcatatacaagtccagaaatccttaataatataaatacatcaacaacaataacagctatatgcaattatattttaccattacccgttttcatatatttaatgggaaaattagattcaaaaaaactagaaatccataaaataaatgctagaacatttttaaaatatctctgcattacatttacattgatgtggattgggaatattatcggagttataataactaccgcacttagcggagctattcaaagcgacatatcaaatcccattcaggacctgattaattcaactggaatctggttgaatatcgtgctgataagtattatcggacctgtttttgaagaatttttctttagaaagctattgattgacagaacaattaaatacggtgcaagaacttcaatagttttatctgcagtcatgtttggactgttccatggaaatttaaatcagttcttttattctgcattaataggtggattttttgcatatgtttatattaaaaccggaaagataacttatacaatactattacatatgattattaacctactgggatctgttgtaagtttatttttaaacagtagtgtgactaacctcatcaccggtacaatcaatccatttgatttaatttttgtacttttgtacttggcaatacttataattacattaataattggtttaactaaccttttaaattataaacaagcaaaatttaatggacaaaaaacagaaatatcattacagaaaccattaaaaacaatattcctaaatctaggaatgttctgttttataatattttttacaataaaaatggtcttgcaagtgataaattaa

SEQ ID NO: 6926 - DNA, 267 bp, Methanobrevibacter gottschalkii
  source 1..267: mol_type = genomic DNA
atggtacatagaaatattttaaaaaaatgtgttgaacataagcatgcgttgctctttgcagcaggtattgcaactgcagttgttgggaaaaaagtcattgaatcaaaatctgtaaaaaatgcagcaacaaaaggcatggcaaatgtaatgtctataaaaaaagatgctgaagaatgttttcaagatatgaaagaaaatgctgaagatattgttgtagatgcccacaaggaagataaaaaagaaatttatgatgaatcacaagaataa

SEQ ID NO: 6927 - DNA, 2130 bp, Methanobrevibacter gottschalkii
  source 1..2130: mol_type = genomic DNA
atgaaatatgaggtggtgtatgataacggatctcgcctaagagttcgttctggccaatgggctttcactaaagaggaaggttatggtcttgcttcattactgttaaatcaaaattttatccatgaggtgctgacttcacatagaaatggtagtattttaatgtattatgatgaaggcattgataataaagataaaatttttgatattttggataagattggtttggatgatttatttgaagctgaacctactcaaattcaaatttctaaagaaatcagtgaagatttttataaaaaaatagctaaaatgattctaaataggggaatttataagttatttttaccaattcccgtaagaaatgctttaacagtatatcatgccatgaaatatatatggaatggttttgatagtttaactagttttaatgttgatgtggcattacttgatggtgctgctgttgctggcgcattattaaataaacattacaaacctgcaagttcaatgatgttcttattgtcaatctccgatgcactagaggactacacattacaaaaagctaaaagcactctaaaagatagcttagctttaaatattgatacagtatgggtagtaggagaagacggtgaagaaaaacaatgttcagcagtagaaattagtaagggggataaaatcaaagttcacatgggggatgtaattccagtagatggaaaagtaatcgaaggtgaaggtttagtcaatgaagcttctatgaccggtgaaccattagctgttcataaaatgaatgggaagacggttcatgctggaactgttgttgaagaaggtaatctgattgttgaagtatattcgatgaataaagaaacaagattaaataaaattattcatctgattgaaaattcagaagaattaaaagctgaaagccaaagtaaagcggaaaaacttgcagattcaattgttccatacagttttattgcaactgctttaacttactttattacaggaagcccaacaaaagcattgtctgttttgatggttgatttctcatgtgcaattaaattaacaacaccactatctattatttcagcaatgcgtgaagcatctgataatagaatgatggttaaaggtggaaaattccttgaaaattatgccaatgcagatactattgtatttgataaaactggaactttaactaatgctgctcctaaggttgttgatgtaatttcaatgtctaaaaaatacgattgtgacgagattttaagaatggctgcatgtattgaggaacactttgcacacagtattgctacggcgattgtaaaggaggctgaaaaacaaggtttaaaacatgaagaagatcacagtgaagttgaatatattgtagcacacggtattgtaactgaatatgaaggtaaacgtgcagttattggttcaagacactttttattcgatgatgagaaagtcaaagtgactaaaagtcaggaaaagaaaatcaatgagaaaattaaagaacattctgtagtttacttggccattgatggcaaacttgaaggtattatctgtattgatgatcctatacgcaaggaagcaaaatatgttatagaagaacttaaatctttaggtattgaaaatattataatgcttaccggtgacagtgaaagcggggctcgtgctggagctaatgctttgggaataacagattatagatcacaagtacttcctgaagataaatcaagaattgttgaagaattaaaagcagaaggcaggattgtaataatggtgggggatggaattaatgattctcctgctcttgcagctgcggatgtgtctgtttcaatgaaacattcatcagatatcgctcgtgaagttgcagatatttccttattgtctgatgatttatatgaccttgtcactcttagaaaactaagtactggaatgctggataaaattaataataactatcataatattgttgcagtaaatggttctcttttagttttaggtgttttgggaataatcccgccagcaacatcttcaatggtgcataatttatccacgatgttatttggacttttaagtacaagatccgttttaactgacgaggaatatattaaagatatagaagtgaaagctatttaa

SEQ ID NO: 6928 - DNA, 750 bp, Methanobrevibacter gottschalkii
  source 1..750: mol_type = genomic DNA
atgttagataattataaaaataaatttattccattgattttaccagtagttttaatatttttttggtatattataactaatgcactggcattgttctcttcatatattttgcccggaccgcttgatgtggtaaattcagcattagtagtaatagaaaatggtaaactcttgacaaatactattgatacattatataaagtatttgctggtttgattttagcatccattgtagctattcctcttggaattgtacttggatggtataaaaccttagaagatatatgtactttcgtaatcagcattttaagaccaattccaccagttgcatggattccattttccatcttatggtttggaataggtacttttccagctgtattcattatatttatgggttgcgtatttccaattttagtatatacaattgatggtgttaaaagaacagacaaggttttagttgaatctgctcaaacacttggtgctaatgactggaatattttaagaagagtagtattgccttctactataccatatatcgtttccggtttgaaagttggtattggtattgctttaatgtgtactatttcagcagagatgattggatcaagtagtggtttaggttatatgattttaattgcaacaaacctttttgatacaggtacaactgttgttggtatggttgtaattggtttgattggacttgtatttgactttgtatttagcagagctcaagataaaatcttctggtag

SEQ ID NO: 6929 - DNA, 753 bp, Methanobrevibacter gottschalkii
  source 1..753: mol_type = genomic DNA
atgtcaattgaagttaaggatatttataaaaaatttgaaactaaaaaatcagaaaatctctctgttttggaaaatattaatttaactattgatgatggtgaattagtatgtcttttagggccgtctggatgtggtaaaacaactcttttaagattgattgcaggtcttgacactccaacttctggtgaaattgttgcaaacggtgaagttgttaaaaaaccatctggtgatagggcggttattttccaacaatattcattattcccatggttaacagttcttcagaatgtaactttcggtttggagatgacaaaaccgggttctaaagaagaaaatattgccgccgctgaaaggtacttgacaagtgttggtttaattgactttaaagatagctatcctcatgaactttctggtggtatgaaacaaagagttgcaattatcagatctttgcttaatcattcacctatcttactgatggatgaaccgttttctgcattggatatgcaaaatagacatagtcttcaagaacagctaattggtgtctggaaaagatttgaaaatacaatagtttttgtaactcacgacgttgatgaagcaatctatttagcagacaaaattgttattttagacaaaaatcccggcaggattgcaaacattgttgaagtggatttggaaaggccgagaaaaagagaatcacaagaattcctcgctcttcaagaatctatagttagtcaattaaatatggatgaatga

SEQ ID NO: 6930 - DNA, 372 bp, Methanobrevibacter gottschalkii
  source 1..372: mol_type = genomic DNA
atgaatcgtgatgatttagaagattatattgaagataactattctgcagaacctgaatttccatggctgaagttcccaaattatgaagtgttccgtcatgatgataatcggaaatggtttgctctgattatggatgtttctaagagtaagctgggtttggatggggatgaaattcttgatgttgtaaatttcaagtgtgatcagatacttatagattctttaactactgaaccgggatttttcccggcatatcatatgaataaagaaaactggattactgttgctcttgatggaagcgtatctgatgaaaaaataataatgttgctggatataagctttgagttaacagcatctaataagaaaatagattag

SEQ ID NO: 6931 - DNA, 813 bp, Methanobrevibacter gottschalkii
  source 1..813: mol_type = genomic DNA
atgaacattctaatatctaatgatgatggagttaatgcagcaggaatcttagctgccaagcaggcagttgaggatttggccaatgtttatgttgtagcaccagataaaaataatagtagtgtaggccgtcgcatttcactatttaaacatttaaaaattgattcatgtgaacttgaagacggcagtccagcatgctctgtttcaggcagtcctgctgatgctgtaattgttggtgcagattatataatggatgaaaagccggatctggttataactggaataaatcaaggactgaatatcagttgtgatataacctcgtcaggtactgtttgtgccgctttggaagcagttagtttaggcattcccgcaatagctgtttcattgtttattgatccaaaaacttcctataaacaggatgaaaatggtgaatggtatatggattatgattttaattttgcaaaaaaggttttgcatgatttagtattaaaaataatcgatgaaggatttcccaaaggagttgacttatttaacttaaacataccgaccaattataaatcccaagaggttaaaattacttacttatcacataaaatgattgataaaaaagtcattgataataccaatgaagaaaaaaaggaattatttaactatcccttagacgaaaatcaagaaagtgatgatttaattatgattgcttccgatttaatcaaagaatatgaggaaggcagtgatggatacgctcttcttgttgagaagtgtcctagtctaactccccttaatgttaatatgacctcaaaaaagttaaattggtaa

SEQ ID NO: 6932 - DNA, 735 bp, Methanobrevibacter gottschalkii
  source 1..735: mol_type = genomic DNA
atgatagtaatgtcaattgcaggtgttgatccatcagctggcgcaggtatctatgccgatttaaaaacatttcaagctattggagtttatggaaccggaattgtaacagcacttactgcacaaaatccatataaattcttttcagcttcaccagttttaccagaatacattgaagaacaaatggattcagtgcttgattcatatgaagtagaatttatcaaaactggaatgttatattccccagaaattattaaattagtttcaaaaaagattaaggaatatgacctgaaagcagtagttgatcctgtaatggttgcaacatcaagtggaaatctaacaaaagaagacattgcagatgcatttaataagtatttacttccaaattcaatattaaccacaccaaacatagctgaagctgaaaaactaacaaaatttgaaataaaaactaaagaagatgcttttaaagcttcaaaaaggatagtttgcaataacattattacaggaggtcatttagacggcctaaatactatcaatattgatggtgaaattacaactataaaacaagaattaataaaaacagacaatttacatggtacaggttgtaatttatcatcagcaattgttgcatatctcgctaaaaacaatgaacttgacacatcaatcataaaagcattgaattatgtgtatgaaggaataaaaaatggaaattatggaacattaatagctaaaatataa

SEQ ID NO: 6933 - DNA, 672 bp, Methanobrevibacter gottschalkii
  source 1..672: mol_type = genomic DNA
atggataatatctatgcaataattccagtcagtaagttcaaaaatgctaaaaccagactttccccatttttatcagaagaagaaagggaaaaactattaaaggtaatgcttcaggatgtaactgacactttaaaaaagcatgtagataaaatattcattattagcagagatgaagatgttttaaaatatgcaaaaagcttaaacttagatactatcctggaaaataaagattcaaacctgaataaagcattaaaacaagctatgaaggaatgcaaaggaaaagtaaggaaagttattattgttccttctgatgttcctttgattggaaaaacaaatatttcaatcttaattgaagcttccaaaaacttagatttcattattgttccgtcaaaaggtggtggaaccaatatgattataatgaagcctatggcaatacctactaaatttgaaggattcagttacagagagcatgttaatgttgctgagagaaaaaaattaaatccgcaggttcatgattcatttttcatggcattagatgttaatacagcgcaagatttaggtgaaattatgattcatggagaacatactcataccaggaaatacttgaaagaacttaaagttaaagtagaaccttaccgtggaactgaacgtttaaaagtaacaagaggatag

SEQ ID NO: 6934 - DNA, 1404 bp, Methanobrevibacter gottschalkii
  source 1..1404: mol_type = genomic DNA
atggtggaaaattttgatgaatggtttcatgatattttagaaaatgcgaatattactgattcaagatatcctattaaaggaatggcaatttggatgccatacggttttcaaattagaaaacactcaatgaacattattaaaaaactactggataaagatcatgaagaagtactttttccaatgcttgttcctgaaagtgaacttgcaaaagaaggaattcatgtaaaaggattcgaagatgaagtatattgggtaactaaaggtggtcaaagagaattaaacgaacaattagcacttagacccaccagtgaaactgcaatttatccaatgtattcattatggattagaacccacatggatcttccaattaaatattatcaaattgtaaacacattcagatatgaaacaaaacatacaagacctttaattcgtgtcagagaaattacaacatttaaagaagctcataccgctcattcaactaaagaagaatcagatgaacaaattcaagactttattgcaatttataaagaattttttgatgaattaggaattccatacctaatttccaaaagacctgaatgggacaaattcccgggtgccgattatacaatggcttttgatgtaattatgcctaatggtaaaaccttacagataggcaccatccataacttaggtcagacttttgcaaaaacatttgatataacctttgaagataaagatggagaacacaaacttgtatatcaaacctgtgcaggagtatctgatagagtaatcgcttccgtaatcgggattcacggagatgaaaccggtttacgtttaccacctaaagtatcaccaaaccaggttacaattattccaatcttatttaaaaaaggaaaagaagaagttttagcaaaatgtgctgaaataaaagcccaattagaagaaacaggacttagagtaaatatcgatgatagggacataaggcccggcaaaaaattccatgattgggaattgaaaggaacaccattaaaacttgaacttggacctagagacttggaaaataatattacagtagctatgagaagagatgaaggaaaaaaaatcgaaattgctcttgatagctcattatcagataatgttattgatctattaaataaaacccaagaaaacttatctgaatctgcttggaacttccaaaaatcccatgttaaattcacagaaaggttagatgaaattaaagatcttgttgaaacaggcaatgttgttaaattccattggtgtggagacgaagctatcggtagagacattgaagaaaaaacaggatatgacatattaggtatccaggaagaaatatccgaaggtgaatgcatctccggtaaagggaatgcaaaatacattgctttgatggctaaaacatactaa

SEQ ID NO: 6935 - DNA, 1044 bp, Methanobrevibacter gottschalkii
  source 1..1044: mol_type = genomic DNA
atgactaataggaaaatacaaatgcctcgtgaagtttacatagatccgggtattgtacatgatacggctgaaatttgtaattctttacatttgggtaatgattttttaatagtaacaggttctcatacttatgatattggtgcaagacctgttattgaaagcttagagaaaaataatttatcttatgatgtaattaaggttgatgttgcttctgaagaatccatttcagaagttgaagaattaatcactccagaaactactgttttaggtgttggtggaggaaaagttattgatgtagctaaattatcttcattcaatcagggtgtatactttgtatctatgccaacaacagcctcacatgacggtatcgtatctcctttagcatcaataaagaatccaaacacttcaatatctgctactgcacactccccaatagcagttattgctgattctgagattattgcacagtctccattcagattacttgcagcaggttgtgctgatttaatagctaactttacagctattaaagattgggaattggctcatcgtttaaaaaatgaagcatttagtgaatctgcagctgcattatccataatgtcagctcatttaatcactgataatatagctaatatcaaacctaatcttgaacccagtgcacgtattgttatgaaatctttattcagtggaggaatggcaattagtattgctggttcatcacgtcccgcaagtgggtctgaacatctgttttctcatgcattggataaaattcttgataaacctgctttgcatggtgaacaatgcggtattggtacaataatgatgatgtatttacatggtggtgattggagagttattaaaaacgcattggaatcagttcaagctccaacaactgctgtggaagttggtatttctgatgaagaaattattgatgcattagttatggcgaataaaatcaggcctgaaagatacactattttaggggataatggtgtttctcgtgaagcagcctatgagcttgcttataaaactgaggtgatttag

SEQ ID NO: 6936 - DNA, 438 bp, Methanobrevibacter gottschalkii
  source 1..438: mol_type = genomic DNA
atgattacattaataggtaaagatttggctaaagaaggtcaagaatttgtttttttaggtccggctgatgaatgtgaaaattgcagatttaaatcatcttgtgttggaaacttagaattaaacagaaaatatgttgttgtaaatgttaaggaaaatgagcaaaaatgcccgattcactccagtggacttgtaattcctgttgaaattgatagggcacaaattgatgtattgactgcttctaaaaatatttttgaaggatcaacatttacatttaatgctcctgattgtgatgaggtatgtgaattccatgatttatgtttccctgagggattacaagaagatgacaaatgtcttgtcttgaataacaatggcaaacataatggggaatgcaaaaaaggattcaaactcaataaacttactttaggatttgtgatatga

SEQ ID NO: 6937 - DNA, 690 bp, Methanobrevibacter gottschalkii
  source 1..690: mol_type = genomic DNA
atgatgaaaaatactagtggtaacagttccagtaaaaagaatgcaggttataaagctgcagagtatgtagaagatggaatggttttaggattgggaactggttcaacaactcactttttcattgaaaaggtgggcatgagaatcaaagaggaaggaataagcataaaaggtattccaacttcatttcagtcattattgattgcaaaacaatggaatattccaataaccactttggaagaaaatgatattgatttatctgttgatggggcagatgaagtggacagagaatttaatttaattaaaggtgggggagcagctcatacaaaagaaaagatagttgattatgctgcaaaacaattcattgttattgtggatgaatcaaaatttgttgataaattaggtgattttcctgtacctgtcgaagtattgcctgatgcatcccgtatggcaattaaagagttagaggacatgggggctgaatgtgaaattagaatggctcaaagaaaagatggtcctgtaatcacagataatggtaattttgtaattgatgctaaatttgataaaatagaatcaccaagacaccttgaaattgatataaatactattcctggtgttgttgaaaacggtatatttacccaaatggttgataaagttattattggtactgatgaaggtactaaagaattgtag

SEQ ID NO: 6938 - DNA, 222 bp, Methanobrevibacter gottschalkii
  source 1..222: mol_type = genomic DNA
atgcctattggtgctggaatgccatttgatttaaaagatatgagttacaaaatagcaattattttcggagctttacttgtaatttatggtgttttgtggttgcttgctgagttgaaaataattcctgcaatattatttgttatatttcctcaaattgtattgattttaattggaatttgcattatttactttgctttcgatcgtaagaagaaatattactga

SEQ ID NO: 6939 - DNA, 2985 bp, Methanobrevibacter gottschalkii
  source 1..2985: mol_type = genomic DNA
atgaataaaaagggatatatattagttatatcattagttttaattatgttattttgtttaagtacagtatctgccaaagatacagatttaaatgcaaatacattagaaaaaagtaatgatgtgactatattaaatgaaggcgatagcaatgttagtcaaatacattcacaacataccgttaaagttggatcagatagtgattccatccaaaatacaattgattgtatgaacgatggagacatacttaattttgaaaccggaacttacaaggatatatgtatttatgtaaacaaaagcattacaataaatggtaatggagcggaattaataggatatgacactccttctaaaagcaacactcctgaaattatctacaacgataccggtaaaggaggatatgcaattggaaattttgctactttatacattgttaaggctgacaatgttgtaattaatggtttgaaaataaccggcggtgcaaatagtacttccacttattctaatgcattaatatatgcaatgaactcaaaaaatttaactttcaaaagcaatgttttagagggatcttcttggggattatacttccaatactgcactgacggacatgtaacaaacaacatcattaaaaatcaggcagtgactggatttttaaactttggatctgcaagaacctcaattgaaaacaacaaagtaatcaatgctaaaaaccatggcatcgatgtaagacatggtacaggaccaaacgttaaaattattaataacacagtaattggttcaaaagaaggaatctatttaatgcattctacaggacatgttgcagctaacaacactttaataaactgcactattagttcaattagttgttacggttctaaaaatattaaattaaatggaaataaaatgcaaaaatctagaattggcgttttactcggaggaggatacgagaacatcactgttggtgaaaacatgtttactttagataatttaccatatcctccaacatttgcatattatattgcagaagcaaaatctgaataccagaatgatgaagatataatgggtacttttagtgacagttctttatatactcctaactttgtagcatttactggaattgacgtccctaaagatattggaattaattatgatcccattttagaaaaaacaggaccagaatggatagttccagaaggagcttcaagttctgagattcaaaatatgattaataatatgaacaatggcgatactctaagtttcactcaaaatgctatttacaatgaaatttcaatctacacagacaaaaacattaaaatattaggtaacaatgccactttagtcggatgcagtggaattaactttaacaatacccactacttggataatgtagctgaaaaagttagaaaatcaactaatgagggtggatatgcaataggatacaatgcagtattatacatattgaatacaaccaatgttgttgtaagtgacttaaatattaaagcacaataccctaaatatgattctagcaaagttgaaacaactactaatgagtataagacagtggggatttatgccgattccaattcaggattagtaattactggttgtgatgtaaccggtgcttcttggggtattttccaacagtattgtaaaaatagcaccattatcagaaataatattcatgacatttacactacaggcattatgaactttggttcacctaatggaattattgccggaaatacagttactgatgctgccaatcatggtatcgatgtaagacatggtacaggaccgaacgtgactatctttaataacacaatttcaggtgcaaaagaaggaatttatcttatgcactctaaaggacactctgcatacaataacacgattctaaattgtaaaatcagtgggattacagcctacggatctggaaatgaagtgctttttaacaataccatttctggaagtagacttggtattttgcttggaggaggatattacaatataaccattggtaaaaatacattcaagttagattcattaccatttccacctacttttgtaacttatcttgcaagagcggataataaatatcaatctgaagatgatgtcattagaacttactccgataaagaaactgcagcagttgatgctaacgacataactgtcggatataaaaaaggtgaattcaacattactttaattggacaaaatggtgataaattatcatatgaagatttatccatatctattaatggtgctaatttcacagctaaaaccgatgaaaagggcattgcagttattcctctttcattaacaactggaatttataatatgaccattaaatttgcaggtaatgacaattatgcaccaataaatgtgactaaaactgttacagttaatgatgacagaattaaaaccattttatctgcaactagtaaaaccctttatttaactatcatttctaaaggatattcatacaaagtcacatttaaagatatgaatggaaaagcaattgcaaataaaaaaataagttttaaaattgatggtaaaacctatagtgcaactacttcttcaactggaatagctaatattaaaataaaagctacaactactggaaataaaaaagcaacaattagctttaagggtgatgataaatatgctccagtcactaaaactttaactgtaaaagttataaaacaatcatccaaaatcagcgcttataaaaagacttttaaagtaaaaataaaaactaaaaaatacaccattactttaaaaaacaataaaggtaaagcaatttacaaaggcactgtttatattaaagttaaaggcaaaacttataaagcagttaccaattctaaaggtaaagctacatttaagattaccaaattaactaaaaaaggtaaattcactgcaaccatcaaatattacgggaacaaatattacagttccaccagtaaacaagtattaataagaacaagaagataa

SEQ ID NO: 6940 - DNA, 1716 bp, Methanobrevibacter gottschalkii
  source 1..1716: mol_type = genomic DNA
ttgaataaatctttaaatattttattcatatgttttgttgctttattggtcatttcatgtgttaatgcggcaaatgacaatccaaataattctgatgatatttccaattatcaaataagttctgatttatcaaatactgaaattcaaacaatgttggataatgcaaaagaaggagatcaatttgaatttactgacagggaatataagaatatttctttagttgtagataaaaagttgaatattgtctctaaaaagaattcaaatattcatacttcaaataaaatagctgataaagcaagaaatttgggattaaacaattctttcggattttatttcacttctaatagtggtggaagttttttatatgggttaacaattatatctaatagtgattacggtatcgttgttgataaatctgataatacgacaattaaaaatgttgttataaaaaatgggaatgttggtattttggttaaaaactccaataatgcggatataattcagaataatatttcaaaagcaaattccaatagtattcatttagaaaatgtatctaaatcaataatttcaaaaaatacaatttcttataatgggagatctggaatccatgcttcaaatatatactattgtaatgtaactaacaatactgttcatcataataaatttaatggaatttcattgtacaataaaacaactggaaatatcattaaattcaatttagcttatgaaaaccctaatggaatttatataaattcacagtcagattttgatgttgttaattcaaatacattcactaaaaatcgacgtaatactgattatgaattaggtgctttcgaatcaggtaatggactgctatttggtgctgattttaaaacggcaaaagagggaaagtcttcaagattggaagttaaatataatgttttaactcataatgagggataccaggctaaaaacaatccggatcttccaacatttaaacttggggataactggtttgactcaactgatgatgagaatacttttgtttgtccaatgcttcttgcaggtattatgaaaatgggaactatatctgttaaaaacggttttggtcttcagatgtatgatacaaatggtgaagcagtcacagaatttggtacatttgacaccacagttaatgttaatggaaaccaatatacagcaaaatttgtaaatggtaaagcaattattgatgccaatctggatccggataaagaatatgaaattgaagtaattattggggataaaccagttaaatttacttatagaacctcatctggtgataaaaatgatgaatcagattcacaaacatcaacagatggtgacttcggaataaatcatcatgattttattgatgctatgggaaatgatgcttcaaaaggtgttgggaactcagaaaatggaacttcaagtgctcattttgcaaattcagaacaatctggagctcatggaactaatgcttcgggtaattttcaagattcatctgataatggtgatagtgtattaactaatgggaatgctaatgctggagattccagtaaaggtgaacaatctgaagaaggaaaagcatatgaaatagttcctcaaagcaaaatttcaaaagaaatcactgatacttcaggtattattgtattaagtattgtttctattctgggaatgattatttatgggtactggaggaaacctgaaatagagaattaa

SEQ ID NO: 6941 - DNA, 405 bp, Methanobrevibacter gottschalkii
  source 1..405: mol_type = genomic DNA
atgaaagttaaatctgtttctttaaaaataagtagtaatgaaaaatttgaaataattgatattacatctaaaattaatgaattaattgaaatcgatgaaggcattgtatctattttttcaaaacattccacatcagctattgttgttaatgaaaatgaggatggattattaaaagatttggaagttagtcttgatgatattatttcagataaatttagctattcccatgatatgattgacaataatgcaagatcacatttaaagtcttttttattgtcttcaagtgaaaatttgcctataaaaaatggcagactggatttgggtacttggcaatcagtattttttgtagaattggatggaccaagatatgataggacaataattttgacaatggttggtgaataa

SEQ ID NO: 6942 - DNA, 1659 bp, Methanobrevibacter gottschalkii
  source 1..1659: mol_type = genomic DNA
atgccagttataacatttaaatatcaagatttaaaagatttaggaatcaatatggaaaaaaatgaactaatagacactttaccaatgatgtctagtgatattgaagactttaatgatgaagaaattaaagtagaattcttccccaacagaccagacaacttatctgttgaaggggtggccagatcatttaaagggtttattggtcaggaagtgggttttccagactataaaattgaagaatctggagaatatgttatcgtggataaagatgttgcagcaatcagaccatacattggatttgctaaaattaataatgttgatttttctggagataaattaaaatatattatggatttccaagaaaacctccactgggtaattggaagagacagaaaaaaagtagctataggtattcacaatgcagatgccgtaaatggtccatttaaatatattgcaactccaaaagatgcaaatgctttcgttccacttgaaaaagatattgaaatgactcctgatgaaatcttaaccgaacatgaaaaaggtaaagattatgctcatttaatccgaaattttgataaatacccattgattcttgataaaaataataatgtgttgtctatgccaccaattattaatggagagttaactaaacttaaagaagacacacataacattattgttgatgtaactggtactgatgcaaaagcagttaaccaaacattgaatattatctgttcctcatttgcagaagttgggggtcaaattaaatccatggaagttaaatatgaagataaaactctcgtaactcctgatttaactccacaagaaatgaatgttcatgtagatactgctaatgagttaattggtggaaccgatttaactgcagaagatattagagaattattattaaaagcacgttttgatgctgaaattattagtgaaaacgaaataaaaactattatcccctcttacagagtagacattttacatgaagtagatatcattgaaaatatcgctgtacaataccatattaacgatgtgatagctgaacttccagatatcaatactgtagcttatgaaaataactggtttaaatcagaagcgaccattcgtgaagtaatgattgcaatgggattccaagaagtgatgagtttaatgcttactaacgaagaggcacattacaagaaaatgaaccaagaagaaaagcctcatgttcaagttgcaagacctattacaattgatagaaccatgattagaaccagcttaattaattcacttatggagtttttagaagacaacaaacacgaagatttacctcaaaagatatttgaaatcggagatgttttatacttagatgaaactaaggaaaataaaactgtttcttctaaaaaattagctgcactcgtttgtcactccactgctaacttcagtgaaataaaatcaattatgagcagtgttttatcaaatctaggatacactatggatattagtgatagtgagaataagaccttcattgaaggaagggcagctgatgtggttggtgaggctcaaaaaggtataatcaaaggattctttggtgaagtatcacccgaagtcattacaaattttacattggactatccagtaatcgggtttgaaattgaatttattaacaaataa

SEQ ID NO: 6943 - DNA, 357 bp, Methanobrevibacter gottschalkii
  source 1..357: mol_type = genomic DNA
atgcaaatgatatggttttatgttgctattgttttagctataagtgatatattacacaccacactcatgtggaaagttttaaataacttttatatattattgggtgtttttattcaacaatctacacattctacatggcagacttgggtaatacatgaaataatggaagctgcatttcattttatcattttatcaatagttttcttaaatccaactattggactgctagcagccctaattcattttgtaatagatgtatcccatacagtattaatacgtaatatgggtgaattagaacatagagctcttcattttgttgttgaatctctattcttcatattaatctatggattatag

SEQ ID NO: 6944 - DNA, 2712 bp, Methanobrevibacter gottschalkii
  source 1..2712: mol_type = genomic DNA
atgtcaaatgaagaaattcctaaagactatgattttaaaaaagagaagttttgggagaaaaaatgggaagatgaagatatctacagatatattggagatggatctcgtcccagatacataattgatactcccccaccatacccaacaggacttattcacttaggtcatgttttaaattgggtttatattgatatgaatgcaagatatagaagattgaaaggacatgatgtattattcccacaaggatgggattgtcatggtcttccaactgaagtgaaagttgaagaaactcatggtattaaaaaaaatgatgtttccagagctcaattccgagaatattgtgtcgatttaactacaaaaaatattgctagtatgaaatctcaaatgaaagcaatgggattttcacaagattggaatcgtgaatttattaccatgactcccgaatacagaaaaagaacccaatattcttttttaaaaatgtatgaggaaggattaatctatcaaggcattcacccggtaaattggtgtcctcgttgtgaaacagctattgcttttgcggaagtagaatatagtgataatactacatttttaaactatgttaacttcccgcctgcagtagatgattcatatgatgatattgtatcttcacaatcatctggtaaacaggctagtccgaatgatgaaggtattttgattgcaactacaagacctgaattaatggctgcttgtgtagcagttgtaattcatccagaagatgaaagatacactcatcttttaggtaaatatgttgaagttcctttatcacatcaaaaagtaaagatcattgcagatgaagaggtggatcctgaattcggtacaggtgcagtaatgatttgtacctttggtgataaaactgatgtaagctgggtaaataaatatgatttagaaatcattgatattatggatgagacaggcattttgaccgaagctgctggaagatatgctggaatggatttgccaagtgctaaaaaacaaacaattgaagacttggatgctgaaggttacttattaaaacaagaacaagtagaccaaaatgtcgggcaatgttggagatgcaaaactcctattgaaattcttgttaaaaaacaatggttcgttgctgtaagggaattaatcaaaaagaccaaggatgcagcagaagaaatgaactgggtaccggaacacatgaaatctcgtatggtaaactgggcagattctatggaatgggattggtgtatttcaagacaaagaatttttgcaactccaattcctgtatggtattgtaaagactgtggtaaagtcattttgccggatgtggaagatctgccaattgatccaactcaagataaacctaaacatgcatgtgaatgcggatgcgaagaatttatccctgaagaagatgtacttgatacttggatggattcctctatttcaccattatctattgcaggatggcctaatgaagactatattaaccacttcccagcggatattcgtccgcaggggcatgatattattcgtacttgggcgttctacacaacacttagatgcttagctctcacaggtcaaaaaccgttttcggatattgtaattaatggtatggtatttggtgaagatggatataaaatgagtaaatccagaggaaatgtaattggtccggaagaagtcattgaacaatatggtgcagatgcacttagaacttgggctgcaaacagtgtaccgggatctgatgtaatatttgattggaaagatattaaacacgggtatcgtttcttaagaaaattctggaatgcattcagatttatcagcatgcaaatttttgatgaaaaggtatcctatgatgaaattaaagatgatttagggcctctagatttatggattttatctaaactcaacaacttaaataaaaatgtcgacaaggcatttgccgaatacaactttgcagatacaattagctcaattgaaggatttttctggcatgatttctgtgatgaatatattgaagctgtaaaatacagactatacactgatgtatcagatgaatctaaaagagcagctaaatacactttaagatgtgtagttgaaacatccttaaaattgcttgctccaattgttccattctttgttgaagaagtatatcaatacttcgataatcaatctatccataccacttcatggccggaagtaattgaagagttaatcagtgaagaaatggaagttaaaggtgaaactacagttgaattaattgatgaagtaagaagatttaaatcagcatcaaaaattccattaaatgcagaactctcagaagtcaatgtatacacatccaacaacgatttaattgatgtatttaatcagtttgatgatgatattaaaggtactttaaaaattaacaatctagaaattagttctggaaaaccagaagttcatgaaaaaacaattgaagttgagccggatatgtctcaaatcggacctaaattcaaaggagatgctggtaaaattattggatatttaaagtctaccgacattgaagaaattgccaatgttttagatgaatctcatgaacttactattggtgaaattgttgttcctgaagacatgttaaatatcaaaaaagagattgttggagcatcaggtaaaaaggttgatatcctacagtctgaaaacttagacatgattgttgaagtaattagataa

SEQ ID NO: 6945 - DNA, 630 bp, Methanobrevibacter gottschalkii
  source 1..630: mol_type = genomic DNA
atgagatatctagtacatgttcaagaagcagtttctgaaaataagaaattaatattgcttatgtcagttatttttatcatatctgttgcggtaggctttatttttcaagacattatttataaagaaatatcaccaatttttgaaaagatggttagagagtttgttaatgatcctaatagtaatttaggatttgaaatattcattaataatatcagagcatccctacttacatatgttctatcagtattttttgctttaatggcagttttttcgttaatattaaatggaattatccttggtgctgtaggtggagcatacatgtccgcagatccagtttacaatgggataatgtttttggctttaattcttcctcatggaatttttgagattcctgcattaattttctcatctgttgcaggaattcttttattcaaattcatattcaaatatctcaaaacatttgtcaaaagggatgatttgagtttaaaagagatattggatatgcataaagttatcattaaacattcaatcattttattgattctgtcttttgttttatttgttattgcagcagctattgaaggaaatttcactggtgcttttgctaaatggattcaaactttattttaa

SEQ ID NO: 6946 - DNA, 165 bp, Methanobrevibacter gottschalkii
  source 1..165: mol_type = genomic DNA
atgactaagattaaaataagattatttggtattgttagaaatttaggtttactggatttatgtgttcatttttatccggaactgaatcaaaaaacaacagaatgtaaaaaaataggtgatattatacataatagaaatattaaaataaagtttgaatccatttag

SEQ ID NO: 6947 - DNA, 405 bp, Methanobrevibacter gottschalkii
  source 1..405: mol_type = genomic DNA
atgggattactcgataaagtagtaggtcatgcagaagtaggtggagacacccaaattgtagaagaatatctcgctccaggtgaagaaattatccaatcattccatttcctaagagatgcagttatattgactaattatggaatatatgacattgatgtacagggattaagtggtaaaaaagtgcaagttaaattttatcctaaaaaaacaattaaaacaatttcgtttgaaagtgcaggctcttttgattttgatgttgatatcaaaatcggagtaagtaacaatccagttgttttaatggaaggcggagcaatgaatatgccaatctcattcaaagttccaaaagcacaagctgaagaagcaaaacaaatcatacacttagtaaaagaacattacttattataa

SEQ ID NO: 6948 - DNA, 1317 bp, Methanobrevibacter gottschalkii
  source 1..1317: mol_type = genomic DNA
atgattcttaaggtaaaaaatatttcaaatattggtggtgaggttaaggcacctccatctaaaagttattctcacagggcagttatattagcttcattagctaaaggcacctctaaactttatgatatgctattttctgaagatactttagcatctattagagtgtgtaaggcattgggtgctcaaattaataagaaagatggttatttggaagttataggaactaatggcaggcttcataattcctgtgatgggccaattgaccttgcaaattcaggaactactctcagattgatgacatctgtatctgcattaagtgataatgaagttattttaaccggtgatgaatctcttaagacaagaccgatgggtcttttgatggatgctttaaaaccattgggagtcgaaaccgaatcattgaatggtgatgataaagcaccaatattgattaaaccgggttatcttggtggtgaaactaatatcatgggtaatgttagctcacagttcatctcatcaattttaatatctgcaccattgtctaaatgtggtgttaatctatatgtgctgcccgaatttaagtcaaaaccttatgtttatatgacttgggacatcatgagaaaattcggcattagatcagttaaggcttattatttaaagcatgattcttgtaatcaggaacaccaaagctgcagaattgatgaatttaaaatcaaaaaacaggagtatattgcttgtgattatactgttgaaggagattattcctctgcatcttatttgcttgcattgattgccattaatggtggcagtgccagagttaaaaatttattcaggacatcaaaacaaggtgataaatttattttagatattcttcaaagaatgggtgcaaccattgtacgtggtgatgattatgttgaaattacatcaaagggtaatttaaaggcgattgatgttgatttatccaatgctcctgatttattgattactgttgcagttctggcggcaatggccgaaggaacaacaaatattacaggtgttgctcatgcaagagtaaaggaaacggatagaattgatactacttgcagggagctggaaaaacttggatgttgcttggaggaacatgaagatgggatgagcataactggtggtgtatcatcaggtgttgttgattctcatggagaccacaggctcgcaatggctttttccctaattggccttaaacatgacattaaaattacaaatggggaaatatttgatgtttcattccctgatttcatagaaacaatggcgaaacttggatttgaattggagttggtatga

SEQ ID NO: 6949 - DNA, 630 bp, Methanobrevibacter gottschalkii
  source 1..630: mol_type = genomic DNA
atgaataaggaagaaaggataattagattagttgaatgtttggacaatacttttgagataaggacatttcagaatcatgatccctatcaggtgttaattagaactattctctctcagagaactcgtgatgaaaacacagatcaggctactaataatctattttctaaatataaagatatttatgaagttgcagaggcaccgattgatgatgtaaaggaattgatcaggcctgcgggattttataatgtaaaggccgcaagaattcaggaggtttcacaaattttaattgaccagtatggtggtgaagttccaaatactgttgaagaaatgataaaacttcctggtgtgggtagaaaaactgctaattgtgtaatggtttttgcttttgaacttcctgcaattccggttgatactcatgttcatagaatttcaaatagattgggtttggttgatactaaaaatcctgaagatactgaagttgaacttactaaaattgctcctaaagatttgtggatcaagttaaatgatttgatggtgcagtttggtcaaaatatctgcaagccaatgtctcctcaatgtgagatttgtccttgtagtgaaatttgcgattattttaaggaaaatatttga

SEQ ID NO: 6950 - DNA, 948 bp, Methanobrevibacter gottschalkii
  source 1..948: mol_type = genomic DNA
atggtaaatgttccagaattaaaaagaggagtacttgacagtgttgttgatgcgattggaaacacaccaatcataaaattgaacaatttgactaaggatttggatgcagaaattgatgtaaagatggaagcattcaacccaacaggcagtgtaaaggatcgtgttgctgttgcaatgattgaagatgcagaggaaaaaggattgcttaaagatgattctgtaattattgaaccaactagtggaaatactggtattggaataggttttgccgccgctgcaaaaggttataatgtaatattgactatgcctgaaaccatgtctgttgaaagaagaaagcttttagctatctatggtgctgaaattgtattgactccaggttcggaaggtatggatggagctattgcaaaggcagaagaattacacagagaaaatcccaactcagttattttaggtcaatttgataatgaagctaatgtggccatacactacaaaacaactggccaggaaattttaagagatactgaaggaaatgttgattatgttgttgcaggggtaggtactggaggtactgttaccggcattggtaaagcattaaaagaagttcttcctgatgttaagattgtcgctgtggaacctgaagaatcacaaacattggccaagggtgcaaaaggacctcataagatccagggaattggtgcaggatttgttccgtcaatttatgattcagatgttattgatgagattattccagtacctagtgatgaagcaggaaaaactttaattgctcttgctaaagaagaaggtatctttgcaggtatttcttcaggagctgctacttgggctgctttacaattggctatgcgtaaagaaaataaaggtaaaagaattattgctatcttaccggataatggtgaaagatatctctctgtagaatggttatttgaataa

SEQ ID NO: 6951 - DNA, 714 bp, Methanobrevibacter gottschalkii
  source 1..714: mol_type = genomic DNA
atgtttaataatttgagggctgagattaaagctattaaggaaaaggatccggcggcaaggtcaacattagaaattttcttatgttaccctggattttatgctttattgatgcataggattagtcattggctttggaatcgttctttaaaacttctcgctcgtatgaattctaatttagctagatttataacgggcattgaaattcaccctggtgcaacatttggtaaacgggtgttcattgatcatggtatgggtgttgttgttggagaaacagcaattgtaggtgatgatgtattgatttatcagggagtaattcttggtggaaccagtacggaaaaaactaaaagacatcctactgttgaaaaaggagttattattggtgctggtgctaaagtaatgggcaatattactattggggaatattctaaaattggtactggtgctgttgttttaaaggatgttcctcctgaatctacttgtgtcggtgttcctggtcgtattgtgaaacgtaaaggcgtacctcatgaaaaagttgatttagatcacaataaacttccagaccctgttgcagatgcgattattactattaataagcatcttcaagaaaatgatgagcatattaaaattttgtttgacaaaaatgaaatctgtttaactgatgatattagggatgaacaagaaaccctagaagatttatttaaaagagaggagtga

SEQ ID NO: 6952 - DNA, 375 bp, Methanobrevibacter gottschalkii
  source 1..375: mol_type = genomic DNA
atgaaaccgccttgtgaaattgtagtctggtatgtaatacctgctattagatcagaattagcgaaagaattattgaatttaggaatgaaacaaaaagatgtttcagaacttatggatattactcagccagctgtatcccaatatattactgacaaacgtggcagtggaattaaactagatgataatgttagggacatgattaaaaattttgctcgccaattgtctgtaggtgaagctactaaagctgatttgatttcaacaacatgtaaaatttgtaatcatgttaaattatctgacgttttagatcagcttaatattgacaagtctgagcttggtgaagattgtcaatcttgtttgggttctgaagtaaattag

SEQ ID NO: 6953 - DNA, 1347 bp, Methanobrevibacter gottschalkii
  source 1..1347: mol_type = genomic DNA
atggatgtctattcaactttaactcgtagtaaggagaattttgtaactattaataaaaatagggttaacttatttgtatgcggtccaactgtttatgatgatgctcatattggtcatggaagaacatacatttcttttgatacaataaaaagatatttggaatacaagggttatgcagtattttatattcaaaatattacagatattgatgataaaatcattaacagatcaaaagaaagtggaattccagcaagcatcctagctcgtaaattcgaaaaaagatacattgaagacatgcacaaattaaatgtcaatggtgttaatttatttgcaagagcaactgatcatgttgatgaaatattggatcaaatacaaagattaattgataagggatttgcttatgaaactgaagatggggtttactttgaaattgataaattccctgaatttggtaaactttcaaacagaaacgttgaagaattagaatcacacagagatattgtagaaactactaaaaagaatcctcaagattttgcactttggaaaaaacgtattgatgtagatgaaccaacttggccatctccatggggtgaaggaagacctggatggcatattgaagatactgcaatcactgaatattactttggctctcaatatgatgcgcatggtggaggattagatttgattttcccacatcacgaagctgaaattactcaaatggaagcagtaagcggaaaagctccaatggtaaaattctggttacacaccggatttttaaatgttaatggcgaaaaaatgtcaaaatcattaaataacttcattaccatacgtgaattacttgaagattatgaaccagatactttcagattcttcgtactttcaactcattataggagtcccattgatttttcaaaagagtcacttcaccaatctgaaaaaagcttagatagaattagaaaatactatgaacttttagatgttgaagttgatgaaaataaatatgaatgtgatgttttagctcctcacatggaagaattttttaatagtatggatgatgactttaacactccaaaagctattgcagctatttttggattaataaatgatactaaaaaagaattatctgaattttctagtgaagataagagagctattaaatcatttttagatgatgcatcccatatttttggtgttagctttgaagctgaagaagtaaatgctggattggatgatttgcttaatgtaatttctgaagtcagatcagagttaagggcaagcaaacagtatgatttatctgataaaattagagatgagctgcaaaaattaggttatgaaataaatgattaa

SEQ ID NO: 6954 - DNA, 210 bp, Methanobrevibacter gottschalkii
  source 1..210: mol_type = genomic DNA
atgttgaaagttcggatatggaaattattattaggtgtcctgattttatccaaatcttttgaaaaagagattatttcagaagatactgcaaattcattatggattgctatggtaaataatggtatacatttgcctaaagatttgtttttggattattgtagtagactttatgaaattgattgtgaaaagttcttaatggattatttttaa

SEQ ID NO: 6955 - DNA, 1299 bp, Methanobrevibacter gottschalkii
  source 1..1299: mol_type = genomic DNA
atgaataataaagattatggtttagcaacattaggtgtacgtgcaggtcaacaaccagatcctgcaactggggctcaagcagttcctatttatcagacaacttcatatgtatttaaagatgcaagtgaagctgctaggagattcgcccttcaagagtttggtcaaatttattccagacttactaatcctaccagcgatgtatttgaagcaagaatagctgctattgaaggtggtaattcaggtctttcaacatcaagtggtcttgcagcaatttcatatgcaattttaaatgtaactggtcctggagacaacattgtttctgccgacaacctttacggcggtacttaccaattatttaactatactttcaaagatttagcacgtgaagtcaaatttgtaaattcacaggatttgcaagctttcgaagatgcaattgatgaaaaaacaaaagcaatttatgtggaatctattggtaatccaaaattagatgtacctgactttgaagcattagcagaaattgcacattctcatgatattccattgattgtggataacacggtgggtgttggattagttaggccattattacacggagctgatgtaattgctgcttctgcaactaaatatgttggcggtcatggaactgctgttggaggatatattgttgactccggtaaatttaactggggtaatggcaagttcgataatttcacaaaagcagatccaagttatcatggattagtattttgggatgcatttggtgatgttccagaattgggaaacattgcatttactgtaagagcaagggcaagacttttaagagatctgggagcaactcaagcaccggtacatagcttcattttcttacagggacttgaaagtttagatgtacgtgtaaaaagacattctgaaaatgcactcaaagtagctaaatttttagaatcacatcctaaagttaactgggtaaattatcctggattggaatctcatgcaacttatgaaaataataaaaaatacttaaaaaatcattttgcaggtatcttaggatttggtgttaaaggtggagaggaagcaggtaaaaaggtcattgaaaacttaaaattgttctccatacttgcaaacattggtgatgcaaaaagtcttgcaatacatcctgcaagtacaacacaccagcaattaactcctgaggaacaggaagcaacaggtgtaacacctgattttattaggctttctattggtttggaagatgctgatgatttaattgaagatttaagtcaagctttagattgtattgactga

SEQ ID NO: 6956 - DNA, 1206 bp, Methanobrevibacter gottschalkii
  source 1..1206: mol_type = genomic DNA
atgtatttagacaactcagctactacacaagttagcaaagaagtttttgaagaaatgaaaccatatttcagagaagagtttggaaatccttcaactctttataaacttggtcgtgaatctaaaaaagcgttagatcaagctcgtcaaagagtggcgaatgccattaatgcaaagcctgaggaaatctatttcaccagtggtggatcagagtcagataatttggcaattaaagggattgtttttaaattagcaaaaaaaggtaaacatataatcacaactgaaatcgaacatcctgctgtcaaaaggactttacaattcttggagtctttggattttaaagtcacttatctgccggtttatgaaaatggcattattaaaattgacgacttgaaggaagctattactgatgaaactattttaattagtgtcatgcatggtaataatgaactcggcaccatacagccaattgaagaaatcggtaaggttgctcgtgaaaaaggaattaattttcataccgatgcagttcaaactttcggtaaaattgaagttgatgttgaaaaattaaatgtggatttgcttgctttatcttctcataaaatcaatggaccaaaaggtgtcggagcattatatatcaaaaaaggaactcgtttagaaccgttaattcatggtggaggtcaggaaaaaggaattcgctccggtactgaaaatgtccctggaattgttggatttggaaaagcatgtgaattagcagcagatcaacttgatgaacactatgaaaagttaacatcaatcagaaatgaaatctctgataaaatattaaatactattcctgaagcttatttaaatggtgatgcagaaaaaagattgccgaatctacttaatttcagatttaaagctattgaaggtgaatctttaattttactgcttgatgcaaaaggttatcaggcttcaactggatctgcatgttcttctaatacattagaagcatccccagttttaacagcattaggattggatcctgttgatgtacatggatcacttagaatatcccttgctcctgaaagtgaagaatttgatgtagatgattttgttaatactgttgccgaatcagttgcaagattaagagaaatgtcaccactctggaatcaggaaattgattatgatggtgtaatgtgtagaaaaaatgataattgtaaaaggtgttaa

SEQ ID NO: 6957 - DNA, 372 bp, Methanobrevibacter gottschalkii
  source 1..372: mol_type = genomic DNA
atggattattcagaaaaagtaatggatcatttcgcaaatccaagaaatagtaggaaaatggaagatgcaaatggggttggaactgttggaaacccgacatgtggagacttaatgacaatttatattaaagttgaagataacattattaaagatatttcattccaaacatttggttgcggtgcagcaattgcaacaagtagtatgattactgaaattgctgttggaaaaacattagaggaagcattaaaaatctcaagaaatgatgttgcagaagaattggatgggcttccaccagttaaaatgcactgttcaaaccttgctgctgatggtcttcaagctgctatcgaaaactattatgaaaacaatcaataa

SEQ ID NO: 6958 - DNA, 372 bp, Methanobrevibacter gottschalkii
  source 1..372: mol_type = genomic DNA
atggcaaattttgtaaaatgtgataaatgtggaagtattttaggtatgtttgttaaaggtgaaggagaagtctgcagtccagatttacttgaaattcctgtacaaaccgaaggagacaaagctcctaaacacaaacctgttgttgaagttgacggagacaaattaactgtaaaagttggagaagttgctcatcctatggatgatgatcattatatccaatttgttgctgttgaaattggttctgaattatatgcaaaatgcttcaaaccaggggatgttgcagaagcaactttcactattggtgcagacaaatctgctgatgctgtagcatatgcattctgtaatttacacggactttggtccagtgaataa

SEQ ID NO: 6959 - DNA, 519 bp, Methanobrevibacter gottschalkii
  source 1..519: mol_type = genomic DNA
gtgtctagttatagtaaattaataatttttattttagttttattatttatttctgcagctattttctttattgatagttcaatggatagtattaatagaaccatgcctggtgttagtgattctattgttaacggggataaagagtataatgaagctgttcaattagtcaatgataaaagttttgatgaagcaaagactaaagcagtatctgcagagaataactataataatagtttaattaaattaaatggtatacgaaataatttttcttctgatataaatgaagttcaagaagaatatattggcactgttattaaagaattggaattaaaaattaatgctgtcaataatctaaaagaagctattgactgttttaaaatcaattcaaattacacaggtacgaattatgcttcaaaagctaatgatctaatgtatgaggctacagagtaccagcatgaacgtaattcaatagtaaaaaataattcaaatttattcaaacaacaaaattttgttatatga

SEQ ID NO: 6960 - DNA, 2283 bp, Methanobrevibacter gottschalkii
  source 1..2283: mol_type = genomic DNA
atgaccaaggagtttttaaagttgaaaacaaagtgtccaaaatgtaaaggaattggttcagtagttgtggactataaagaatgtaaagcctgtggtggaactggctatgaagatgatgcttttaatattggtaatcattttaaaggtgtaaacagtaatgcaaaagcgaaatttgacttaggcggagaagaagatattccatgtgaagcatgcaatggaaaaggtcaaatcgaagtttttgaagaatgttctcattgtcatggaactggtcagattaatgtatgtagagattgcgggaaatcaattggagatcaacatgatttatgtgctgagtgcgaggagaaaagaaaattggaaaaagctaagcacgataaatttgaagctcgtagaagtgcggcccgtgatgtttacatcttagattcattatgtaaaatgagtgatattgacaaagacaaattatacaaaggaagaattacaagggttgaaaaatatggtgcttttgttactctaaacaataatgtttggggacttatgaggggtgacaactttggttataatgttggagatgatgtaattgtatatgttactgcaattaaatctagagaaagaaaaatagacttagctccagctcatgttgaatcttataatattaaaaaattaactaaaacattcccaaggactttaataggtaaactcgaagagaaaaaaggtaggatggttagaattgatggggaggttcaacagatccaacaaacttccggtccaactatattcataattagtgatgaaactggttctagtgaaattgcagcgtttgataaagcaggtgagagatcatatccggaaatcgaactgggtgatgcagtgcaagttgtcggtgaagttaatgaacatggtggaaagacacaaattgagtcatcttcaatggtaaaactcaacgaagaaaatactgcaaaattacataaattaattgacgatgcattaaacaagaaagctgaaccacaacatgttgatttcttagttgaaagtgatattttaaacagacttaaacctaagatgagggaagctgcacaaaaaatcagaagagcaatacttgatggtaggacaattttactcagacaccataatgatgcagatggtatttgttcaggtgttgcaatggaaaaagctattattccattaatagagaaagtaaatcctagcaatgatgctcaatattattatttcaaaagatctcctagtaaagctccattttatgaacttgaggatgttgttaaagatttatcttttgcactggaggatcaagaaaggcatggtcaaaaattgccattaattgttcttttagataatggatcaactgaagaggatattgttgctttgatgcaagccaaaatttatgatatcgaagttgttgttattgaccatcattctcccggtgaattacttactaaaaatattcaagatggaaaaatatatggagctacagttgcagttgatgaatatgttgactgtcatgtaaatccttatttggttggtggagattcacagcttactgcaggagctcttgcaacagaagttgcacacttaattaatccggatgtaaaagaagtaatcaaacatctgccggctgttgcagcattaggagataaggctgaatgcagcgaggctgaccaatatttggaaattgctaatcagaaaggttttgaaagagaacatttagctaaaattgcagaatgtgttgactttgaagcatttttcttaagatttatgaatggccgaggaataatggatacaattcttgctgttgataatattgataaacatgaaaagatgattgatgcattatataaggaatatcaaaaaagagttgacactcaacttaaagcaacacttccgaatattaaaagaactcaatttgaaaacggaatttactttaatctcattgatgttgaaaaatatgcacataagtttacattccctgctccaggtaaaacttgcggttttgtccatgataatgtaaaacaggagttaggtgaagataaacctattgtaacattagggcatggtcctgattttggagtgttcagagctactgatgctgttaatgaacaatatggatttaatgtaaatgaaattgtatctaaaatgatggattcagtgcctcaagcaggtattgatggaggaggtcatgaatgtgccggatccatcaaatatattgagggattaggggaagaagttttatcaaaagttattggagaaatccaatccttatctaaaaactaa

SEQ ID NO: 6961 - DNA, 894 bp, Methanobrevibacter gottschalkii
  source 1..894: mol_type = genomic DNA
atgactttagagaattattgtaaaaaatgcggccataggattcttccaaataatccatattgtcccggatgcggatgtaaaacaatttacacagaaaatgacgaatcttatgtttttacaccaccggtacatgatattggattttttaatttttcaattgatttttctccatatattatgagtaatcgggatgatttcaaatatgatatatgtcattgcggatacctaaatgatgtaaccaatgaattttgttatatgtgtggtgcaaaaagattccatagtaaactagctagatttttaaaaaacagatccaaaccaaaatttaatttggataatgttttatgtgaatgcggtgctgttaactctaaagagaattccttttgtgaaatgtgtggaaaacagctgcatgaacatgaaactaaaatatacaaaagtaataattacagtaattttaatttggaatttaagaattctgttttctgcttttgcggtgaagaaaacgaagaatcttctcaattctgtagaaactgcggattgccgttgataaattatggtcatttatctgacatggcattattatgtgtttgttctactttaaatgatattaactcttctttttgtattgaatgtggattaaacttaaaaaaagagaattctcttattgtttgtgtttgtggacataaaaatcctatttcggctaaattttgtcaaaattgtgaaaggccattaaatcctaaaagattaattaactcaaaaatcctttgttcatgtggggaaattcttgactggaatacagagttctgccctaattgtggcaaaaatattaaaaataggatgattataaggaattctattaacaatacagtaaagagtcttaaaagtatatttaggtag

SEQ ID NO: 6962 - DNA, 978 bp, Methanobrevibacter gottschalkii
  source 1..978: mol_type = genomic DNA
ttgaaaaaatgtgatgtttgcggaactttaaattttaaagataataattactgtactcattgtggcaataaatttatttttgagcatgtctgtccttattgtggttcaattaatgaggattatgcgaatttctgtgctaattgtaatgggcaaatcaatccaatttctattaatgatttcgatatattatttagtgaatttaatgaaaattgtttattaaatgctaaaataagtgatgaaaaatataatgatttattaagaaatatttttttaagagcagattttacagaaattcatggcaataccataaaagataaaattctaaacttagctagtattttcacgcaatgtaaacctaaatcaagaggctatgaaagaggatttatatttttaggcaattatatttattatgatgatagattagacgaatctgttcaaattgcaactattattcatgaattagcacattatttaatattcagtattattgaatccttattgtgtgatatatttaatgtaaaaacatcaacaacattacaaagcttcatatggtattttttaatgattcctgaatttaaaatcatgaatgaatactgtgcacatactgttgaaggcagattcattccatatggatatcagaattatggttcttttaatctattggtaaaaaacacatcttttgatgaagattctataaaaaccatggaaatgttcggtaattcatttgcaaatgaaataatcatttatctggaaaaatatattggaaatgatttaagacaggaaataaaattacaatataaaatggatttaaaaagtccgagttatgattcaatattaatggaaactgatgagtgttttaatttaaatgataaaaataggatgttattgaaaattttgtatgatgtttttaaggaagcttcaaatccaaatgttatatgtgagttaaaaaatattaaagaggggattgatttaaattaa

SEQ ID NO: 6963 - DNA, 297 bp, Methanobrevibacter gottschalkii
  source 1..297: mol_type = genomic DNA
atgggaaatgaaaaagacgaacttttgaaattaacttcatatgttcaaatttctaaatatagagaaaaaacactcaaatccattggtgatgatgtaaaaatacccactaacatcgcaaaagatagtggaattagaactaatcatatttcaaaggttctaagtgaattaaaaagcaaagaaattgttgaatgtataaatgaagaagctcgtaaaggaagattatacagattaacagatactggaaaggacgtattagaaactattaaagtaaaagaggaaaaagaaaataaggattaa

SEQ ID NO: 6964 - DNA, 612 bp, Methanobrevibacter gottschalkii
  source 1..612: mol_type = genomic DNA
atgaaatgtaagtattgtggtattgagaataagaaaagtgctaaattttgtacaagttgtggtaaaccactaaatgaaagtcccgaacctaccggagggaactctaaacttatcataattgcattaattgctattataataattcttgttggaactattggattttttgtattgaacaataattttaatagtcatgatagtgagattccaaataatacagtttcttctcaggaaagtaactctgcaaatattcaagattccgataatggtggggatgtcaaaactcaggtgacatcatctcagacaactaactctaaatcatgggagccgattggaagttattcaggttcaggttcaggttctaaaacaattacggtacctgaaggtaaaataaaagtggaattttctgcatatcctattaaaaattatgctactaattatttaacagtttccggatctaatggtgagtctggtggagtagattggggttctcatagtgctgttaagactaaatctgattcatttatctatacttccagctcttctgagacatttactattgattattatgaaactgtaagttgggaagttcatttttacaggtatcagtaa

SEQ ID NO: 6965 - DNA, 711 bp, Methanobrevibacter gottschalkii
  source 1..711: mol_type = genomic DNA
atgttttttgatctgaatattaaagggagtacattagaaaataatatcaaattagctaaagaagcttctttttatggttggaatcatattaatttttcatataatgcaaacaactttttaaatgcattaaattttaaagatgagttgaataaggcattgggagatatcattgactttgattatactttagaaatcaaatcgtcaaacattaatgatattcggaagtctgttaataaatttaggaataggtcctcatgtatctccgttgttggcggtgatttaaaggtcaatagagccacattagaaaatataaaaatagatgttttatcaagaccatatcttagaagatatgattgtggtttaaatcatgtacttgcaaaggaagcagaaaagaataatgtagcagtcgagttatgttttaaggatgtattgaaaagctatttgtcttatagatcaaaaattctttctaattttaaagatatttatacattgtatagaaaatttgactttcctttggtgctgtcttcaagagcggaatctgtatttgatattagaactactcatgattttattactttttttaaacaaaccggtttaacagatgcagaaattaataaatcctttaaaacagcagataatattttaaaatacaataagaatagggaaaatttaattttgaagggtgttatgagggttacagatgaaacttaa

SEQ ID NO: 6966 - DNA, 357 bp, Methanobrevibacter gottschalkii
  source 1..357: mol_type = genomic DNA
atgaaacttaaggtattgccacctacacttaggaaaaataataggtatcttactgtagatgttaaggttacctgtcaaattacaaaagatgatttagttgcaattgtctgggatgcatgtatccgttttcagggggaacttaacactgctaattttaatttatgggttatgaaattctttgaaattgaaaaacgtgatgattattataggtatagatcaattatcagatgtcaacgggattatgttgatgaagtaaggtcttcttttgctttgaccaatagatatggtaataatatgatttcaattactactattggattgtcgggtactataaaatcatctggaaaatacatttag

SEQ ID NO: 6967 - DNA, 768 bp, Methanobrevibacter gottschalkii
  source 1..768: mol_type = genomic DNA
atgcaacctttacaaaatgctggatatgatagagcaattactgtatttagcccagatggaagacttttccaagtagaatatgcaagagaagctgttaaaagaggaactacatctataggtgtaaaaagttctgaaggtattgttttagctgttgataaaagaactacttctaaattagttgaagcatcatctattgaaaaaatattcaaaattgatgatcacattggagcagctacttcaggtcttgttgctgatgcaagagctttagttgaaagagcaagagttgaagcacaaataaataaaataacttatagtgaacctattcgcgtaactagcttatctaaaaaattatgtgacatgttacaattatacactcaaaatggtggagtaagaccatttggttctgctttaatcattggtggagtatatgatggtgtatgtaaattattcgaaactgacccaagcggagcattaattgaatacaaagctacagctattggttcaggcagatctgcagctatggaaatctttgaagaaaaatacgaagatgatttaacattagatgaagctattgaattagcattaactgctattaatgaagctactgatcatgatactgtatctaataatgtagaaatagccgttattaaagtcgatggcgaaaaatatgtaaaactttctcaagatgaagtacagaaatacattgatgaagtacttgttgaagaagaggaagaagagtctgctgattctcaagaagatgaagaataa

SEQ ID NO: 6968 - DNA, 702 bp, Methanobrevibacter gottschalkii
  source 1..702: mol_type = genomic DNA
atggtaaatattgatgaagctattatcgctaaatatgaatactgtggtgaacattttgagatattggttgaccctgatttagcagctgattttagaaatcctgatggcccagatgttgccattgaagatcttttagctgttgaagaaatttttaaagactccaaaaaaggggataaagcttctgatgaagctatgaataaaatatttgaaactactgatcctattgaagtttctaaaattatacttgaaaaagggactgtacaattaactgctgaccaaaaaaggaaaatgcaagaagacaaaagaaaattagttattaataaaattgctaaggaagcagttaatcctcaaaatggtttacctcatcctgtccagagaattgaaaatgcatgtgatgaggcccgagttaaatttgatcctttcacttctgttgaccagcaagtacaaactgctcttaaagctatcaaaccacttattccaattagatttgaaagagttaaagttgctgttagattacctggagcatctgctggaagtgcttattccattattcatggatttggtgaaattattaatgaagaatggcaacaagatggctcatggattggtattattgaaatgccgggtggtcttcaagataagttttctgcaaaaatggccgaaatttcaggtggaaatgcagaaactaaaactattaaataa

SEQ ID NO: 6969 - DNA, 921 bp, Methanobrevibacter gottschalkii
  source 1..921: mol_type = genomic DNA
atgatatatgtggaaaataaagatttagttattcctggtcagatattagctgacgatgaatactattctggaagaggtacctttaaagagaatggtaaggtttgttcttctttaatgggacttgtttctttgaggaataaaaaacttagagttattcctcttaaaagtaaatatgttcctaaaaaaggagatgttgtaataggtaagattagtgatgttagattctcaatgtggaatgtagacattaattcaccttattctggaattttacctgcttttgaagtgttcggtcgtgaaaaaaaagaactcaataaagtctatgatattggggatgttctatttttaagagttgtcgatgttgatgaaatcaaaaaggcaaaactcggtttgaaaggaagaggaatgggtaaatttaaaggaggaatcatcgtagatattgctccaactaaagttcctagattgattggtaaaaaaggttctatgatcaacatgattaaggataaaactaattgtaaaattgtcgttggtcaaaatggtcttgtctgggtaaaaggtgacaaggacatggaacagcttaccaaaaatataattcatttaattgaagctgaagctcatacttctggtttgaccaataagattaaaaacaaattatatttagctattgatggggaactgcctcctgaagaagctgaagaagagcaagattttgttttggaaaaacctaaacttcaagattttaaagaagaattagaacaagaagaacgcgcaaaacatgaagcaaaagaaataaaagaaaaaggagataagcctaatattgctgaagttatcgaggagttaaaaagaaaaaataaaagtaaaaaagataatggattatcttatggagataactcaaataattcttttatattgaataataaataa

SEQ ID NO: 6970 - DNA, 696 bp, Methanobrevibacter gottschalkii
  source 1..696: mol_type = genomic DNA
atgtcagagtttattagaaaggatggtaggaaatatgatgaattacgtcctattaaaattgaagcaggtgtacttgaacgtgcagatggttcagcttacttggaatttggtggaaataaaattttagtagctgtttatggtcctagagaatcttatattagaagattgcttaaaccaaatactggagtaattagatgcaggtataatatggctccattctcagtagatgacagaaaaaggccaggaccagatagaagatcatctgaaatttctaaaattacagcggatgcattaaggccagctttaatgttggaaaattatcctcgttcaatgattgatgtttatatagaagtaatagaagctgaaggtggaactcgttgtgctggaattacagctgcttctgttgcacttgttgatgcaggaattcctatgaaggatattgttgtaggttgtgctgcaggtaaagttgatgatgaagttgtacttgatttatctgaatatgaggataaagaaggtcaagcggatatcccaattgctataatgccaagaactggggaaattactttattacaaagtgatggtgacttaactgaagaagaattccaaaaggctatagatttagctatggaagggtgtcttaaagttagtgaacttcaaaaagaagctttaatgaaaaagtattctacagaacagtga

SEQ ID NO: 6971 - DNA, 786 bp, Methanobrevibacter gottschalkii
  source 1..786: mol_type = genomic DNA
atggatatagtaccagaaattacaagacaaagtattgctgaccttatcaaaaatgataaaagggaagatggtagggatttaactgaatatagggatattactattgaaactgatgttatctctaaagctgaaggttctgctcgtgtaaaacttggtggaactcaagtcattgttggtattaaaccacagcttggaactccattccctgatactccggatttgggagttttaatgactaattgtgaaatgttaccaatggctgatccttgttttgaaccgggacctcctagtgaagattctattgaacttgcacgtgtggttgataggggtattcgtgaaagtcagttaattgatttggataagttatgtgttgaagaaggaaagcatgtatggatgttgtttgtagatttacatattattgataactgcggaaatctttttgatgcatgtgaattagcagtcatggctgctttaaaatctactaaattgcctgttgcaaatattgttgatgatgaggtagttattagtgatgatgaaacttttgatttaccaattaataatgaattagcattatgcacttttgttaaaattgctgataaaatggtaattgatccaacattagatgaacaaagagttgcatgtgctcgtttgaatgttggtgttactaaagatggtcacatctgttcaatgcagaaaggtggcgaagaacctttaactaaggatgaaattttctattgtgtaaatactgcaatgggaaaagttaatgaattaattgaaaatctttaa

SEQ ID NO: 6972 - DNA, 630 bp, Methanobrevibacter gottschalkii
  source 1..630: mol_type = genomic DNA
atgagtaatacaattaaaaatgatgaaaatattaaatcttgcatcattttatgtggtgggcaaagtagaagaatgggtcaagacaaaggttcgatgattattcaaaataaacctatgataaaacacatactttctactttaaacaagcatatcgatgaagtaataattgttttaaatgaccaagtaagagttgataaatatgctaaatttatcaatcctgaagaatacacctattccatcacattcctaaaagataaaattaaaagtaaaggaccactgtccggaattatgactgggcttggtgaaataaaaagtgattacgctttaattttaccatgcgacagcccatatgtttcagaagattatattcaaactattttttcacagatagatagtgattatcaagctattgttccttatcatgatgaaaataataaattgaaaacatcagagcctcttcattcaatctataaaaaagataccattaccgaaattgaaaaactagttaatgaagatgtattacatattaaaggattaatagaaaagataacaacaaagtttattttaattgataataaaaaaatagaaaaaaaagaatttagaaatcttaatcgtccagaagacatttaa

SEQ ID NO: 6973 - DNA, 762 bp, Methanobrevibacter gottschalkii
  source 1..762: mol_type = genomic DNA
atggatgaacatgagaaatggaaaattaaattttcacttttaatggttgttttaataatcattatttatggatcaaattacctcgtactaggagacggagaacatattatttcatatgtttggacacacttaggttttattcctgtagatattctcgttgtagcattcttacttgaaggaattatcgaaagaaaagaaaaagaagcaatgcttgaaaaattagacatgctcatgagtactttcttctctgaattaggtaatgatttaataactcaattaagtactgctaacagacataaagcaagtactgccagtttaaaatcaattaaaaattgggatgacgaagattatgaagataaacttgaagaacttaaaaattccccaattgaattcacagcaaatattgcaccagaaaatagagagaagtttttagaggatttaagagaattgcttgttaacaaaagagaatttatccttaatttaataaataacccaaatctacttgaaaaagaagaatttactagtttgattaatgctattcttcacttagatgaagaattagagcacagaaaagatttagctttagtaaatgatattgactttggacatttaaatggagatatgaacagagtatacaatattctagtacatgaatgggtttattatttaaaatatcttaacaaacatcacccatacatgattgcattaatgatacgtactaacccatttgacgaagatgcaagtgtatatgttacagaataa

SEQ ID NO: 6974 - DNA, 564 bp, Methanobrevibacter gottschalkii
  source 1..564: mol_type = genomic DNA
atgttagatgataaggattttattaaatcctgtgatgtgccgggacctacaaaagaagctattagggctataattttatataaatcagaagtaacatctaaagacaaagtcgtcgattgcggatgcggaactggaggaattacttgtgaattttcccaaagagccggtgaagtaatatcaattgatacagacccagaagcaattgatgtgacttcaaaaaaccttaaaaaatttggtcttggagataatgtcactttaattaatgataatggctcaaaagcattaaaaaatattaaagatattgatattgccattgtgggaggcagcggcagacaacttgaaaatatcttagatatcattaatgaaaacttaaattcaaaaggtagaataattattacagctattttagttgatacaaaggttgaagcaattaataaactcaaagatttaggatataatccaaaaataatggaagttaatgtttctaatggaagagttcttgatcgtggtgttttaatgattagtgaaaacccaatagcaattattactgctaaaaaaagataa

SEQ ID NO: 6975 - DNA, 549 bp, Methanobrevibacter gottschalkii
  source 1..549: mol_type = genomic DNA
atgatagttgtcggaattactggagcaagtggagtaatatatggaataaaactccttgaagctctaaaagaattaaatattgaaagtgcattagtgataagtgatttagctaaagttgttattgaatcagaaacagattatacatttgaggacgtaataaaattatcaaacacatattttgattttcatgatttaactgcatctataaatagcggatcatttaaaacagatggcctagtcatagtaccatgcacaatgaaaactttatcatcaatagctaatggatatggggcaaatacaataactagagtggcagatgtcagtttaaaagaaaaaagaccaactattattgtccctcgtgaaactccacttagaagcattcacttacaaaatatgctaacattatcacaagaaggagcaacaattttaccagcaatgcccggattttactcaaatcctaaaacgattgatgatcagatcaattttgttgttggaaaaattttagactcgttaaaaattgaaaataatttatttaaaaggtgggaataa

SEQ ID NO: 6976 - DNA, 1227 bp, Methanobrevibacter gottschalkii
  source 1..1227: mol_type = genomic DNA
atgagtgaaaaaaagaaatttatcagagatagtgtctatggagatattaacctaaacgattttgaagtaaaaattatggatatgccgcaattccaacgcctaagacgaattaaacagttgggattgattagcttaatttatcccggtgcaacccatactagatttgagcattcaattggaacaatgaatttaggatcaaaacttgcagaagaacttgatttgaaaaaagatgagatagaattaatcagatcttcatcattattacatgacattggccacggtccgttttcacatgtatccgaaggagttctatcggttcctcatgaagaattaacaaaatttgttgtcactaagacatccatgagagaattacttgaagaaaaattcgatgttaatgaaattgtagatattgttaatggaaaaggatatcttggcccgatcgtttctggtgaactggatgttgatagaatggattatcttttaagagattcacataataccggtgttgcatatggcattatagactatgaaaggattatatccaatttgaaattagaaaatggattaatattagatattaaaggagttcaagctgctgaaggagctcttgtttcaagatacttcatgtaccctagtgtttaccaacaccacacaactagaatcgtcaattcaatgtttagaagagctttaaaaaagattattgatgagaaaataatcaatgaaaaggatatttacaaatatgacgataccgacatgattagcatatttagacattgcgacaatacatttgcaaatgacattatgaacagattagacaatagacgcataatgaaaagagtgaaaacaataaggctcaataatttcaaatttcctgaaaaaatgtataaaatcaaagcaaaaacattaagaaaagctgaagaagaaattgctgaagattatggtcttgataaagattatgtttttataaatattgctgaataccctcgttttgatgaaatgaaaacacaagttaatgtagatggaaaattatatccattgacaaaaatatcaaatattattggtgcattaagtaaagcaagatttaatatacctgacataagtgtttatgtagacaatagcgaaagatccaagtttgataaattcaaattagaaaattacttagaattacctgagattgacagagaaaagttccatggaattcattatgaccagattaaattaatatag

SEQ ID NO: 6977 - DNA, 288 bp, Methanobrevibacter gottschalkii
  source 1..288: mol_type = genomic DNA
atgaaaggctcagttaaagcgaaattaattgtatttatggttattgcactacttgcattcggtattagttctgcatttgctagtctaataataagtgattcgcctgattcatacaaattgattcccatcaaaaatgattcatttgaaccgaactacattaataaagtcccgactattcttccgaaagttgaaacaaataacactacaaatattactacaaataaaactaattataacatgaccaatttgaattatacaaatcagtgggttgaaacatacgaaaattaa

SEQ ID NO: 6978 - DNA, 1218 bp, Methanobrevibacter gottschalkii
  source 1..1218: mol_type = genomic DNA
atggttatgtttagtgcgggtgacactgcttgggttcttgtttgtacacttcttgtacttttgatgagtattccggcagtagcattcttttatggaggattaagcaaaagaaaaaatgttcttaatacaatttttttaacttttattgcattttcaataattagtgtaatatgggttatttttggttatcaatttgcatttggatcagatattaatggattaataggttcaccaactaatttcttcttacaaggaattggaattgatgacttaagtggatcaattccaacattattatttgtcatgttccaatgtgcatttgcaggattaacttgtgcaattatgtctggagctttggttggaagaatgaaaacaaaagcttgggttattttcactgtattgtgggtatgtcttgtttatgtccctattgctcattgggtatggggaggaggatggctaatgcagatgggtgcacttgactttgcaggtggtgcggtagttcacattaactcaggtatttcagcattggctgttgcattagtattaggaagaagaaaaaacacatcattaattccacataacttaggatatgctgttttaggtgcagcactactctggtttggatggatgggattcaatggaggatcaggcttagcagcaaatggacttgcagcaaatgcaataatagtatctaatgttgcagcagcaactggtcttattgtttggacaattattgatacatatcttgttggaaaaccaacagttttaggtgcaatctctggtgcggttgcgggacttgtaggtatcactccggcagcaggatttgttgatgtatatggagcattaattattggtgctgtagctccattagtatcttactttgcagtatattacttaaaaccaaaacttggttatgacgatgcattagatgtatggggaatacatggtatgtctggtgtgtggggtgcagttgcaactggtatatttgcagtgcctgcagtaaatgaagcagcaggattgattgctggaaacgcaaatcaggttgtgattcaagtgatgagtgttgtagctacaattgtttatgcatttacaataagttttattcttgctaaagtgttagataaagctatggatggaattagagttgaagaaagtgatgaaattggtggattagacaataatcttcataaagaatctgcatataatttcaattcataa

SEQ ID NO: 6979 - DNA, 339 bp, Methanobrevibacter gottschalkii
  source 1..339: mol_type = genomic DNA
atgaaacgtatcgttgcaattataagacctgaaaaatttgaagatgttaaaagagaattaatcgaagtcggctgtgagggaatgacagtttcagaggtaaaaggaagaggaagtcaaaaaggcataagggaatcctacagaggttcaaatttttgcattgacctaattccaaaaacacgtattgaaattgttgtcaatgatgacagattagatttaattgttgataagattattgaaggagcttatacaggaaacattggggatggaaaaattttcatacaatctgttgataatgtaattagaattagaacaaatgaacatggggatgaagctgtgtag

SEQ ID NO: 6980 - DNA, 612 bp, Methanobrevibacter gottschalkii
  source 1..612: mol_type = genomic DNA
atgattcaaatggctaaaaaaaatattttagctttaataatacttattctgattatcattatttttggaatgaatctgtttaataatactgtaaacatctatcttgatggggaaaatgtaagtgttgaaacacaaacttttgaagatatcgattctaacagtttaaacaaagatatctgtagttatacattaaatgttatgaataatacaacatccgatgtggaaactttaaaaaatggagtagaaaagctttgttatcaacatggtcttgaagatgctgaaataaacattgattcaagtttaggacatgatcagatcccaattattgtccatgttgacggaacatcaatgcttccaacattacaaaacggacaaacagttttagtaaataaaactcatgattttgaagttggtgatattgttgttgcagaatctaaggaatatggtggaattattaaaagggttgacaaaattgatgaaaataaagttcatttaataagtgacaacaaaaatatttcatatgagtatattgatggagcactatatcaaatcaaaggtataacaacatgggtagatatttctgatgtcaacggtgtggttattgattattaa

SEQ ID NO: 6981 - DNA, 678 bp, Methanobrevibacter gottschalkii
  source 1..678: mol_type = genomic DNA
atgtattctcagacaaaaatcgcaattccaatttttcaaaatgattataaaaatgtaattgaagtagctaatgactgtatcaaaaagggagcagatgttttagaattcagaattgatgctcttgaaaatccaaatattcgtgaaataaaacaaacaattgaagaaattaattttccaattattgctactaacagaataattacagaaggtggattttttaaaggaacagaggaagaaagatttaacatattatatgaatgttgtgatttagttgattatgtggacattgaacttcaaagtaacgacgaatacattaataaaattcatgacactggagttacaaccataatttcttatcatgattttgaaaaaacacccaaattaagtgaaataacatatattgttgaaaaagaacaggaattgggagatattgccaaagttgcatttatgccacaaaaccttgatgacactttaacaatcttagccgttctttcccattgtaaagatacaattgccatttctatgggtgaattgggaagctatactcgcattatggcttcaaaatttgattcaccaattacatttgcagccgggagtgatgttacagccccaggacaaattgacatcgaaactatgaaagcattactcaatatgaatttaaatataatggatgaatga

SEQ ID NO: 6982 - DNA, 726 bp, Methanobrevibacter gottschalkii
  source 1..726: mol_type = genomic DNA
ttgaaaattactgcaataggtgcagatatatcaaaaaacgatgtatcttgcagtactatgctagtagaaaatattgaaaaaagcctttataaagttaaaaaattaggtgcaagagatgttgctttaactaatgtcacaggtgatgatgttgttgtaagcgcatttgttgaagatgatttgcttgaaattgtaaatgaaggtattgttaatgttttaaaagaaagtgcagagaacttaggggatttatctggaatttcacaaactcctgaaggtgctggtgaaggaatttcatatgccgaatcaactgttagaaaagatagatatcctgatgctattgttttaggttttgatacatatgggggggaaccatttgttgcagatgttgctaattcaaccatcgatgctgcaaaaggcatgaaaaatttaactgatgtttcggattacatcgaatctaaaataagaaaaatacctggtgtcggttatgtttcaccagaaaccgatgatcctgttgttgtagctaccgttgaaaatatagaatctgttggtgtaatagctagtgcaatgattggggctgcactcggaaataaaaatgtgtatttagttaaaagaggaacaacttgtaatgtattaccaggtagtgtaatattttcagctactgcatttatgaatgggaatataattgatttggctgttccatttgaaaataaaactaggatattaagatag

SEQ ID NO: 6983 - DNA, 864 bp, Methanobrevibacter gottschalkii
  source 1..864: mol_type = genomic DNA
atgattttattaaataaagatacaaaatgtttagttcaaggaataactggcaaacaaggttcattccatacagaacaaatgttaaattataatactaatattgttgcaggaattactcctggtaagggcggacgaatgtttttggaccagattccaatttttaactcaatagaagaagcaaaagaagaaactgacattaatgcttcaattatttttgttcctgcaaaatttgcaaaagatgctgcatttgaagcaataagacacttggatttagttgttattatttcagaacacattccagttcatgacagtatgcagattatggcatatgcaaaacaaatgggaacaaccattattggtccaaatactccgggaattatatctccgggaattggcaaattaggaatcatgcctactcatatctttaaaaaaggtaatgtcggcttaatttcaagaagtggtacattaacatatgaaattgctaatgaacttactaatgctggaatcggtcagagtacagcagtaggtattggtggggatccggtaactggggataattatgtggatattttaaaaagatttgatgaagataaggatactgatgctgttgttttaattggtgagattggaggaacagcagaagaaagagctggaaaattcattgctgaagaaatgaccaaacctgttgtatcttacatagcaggaagaactgcacctccaggtaaaagaatggggcatgctggagctattatccaagggaattctggtactgttgaaagcaagaccagagctttaaatgaagctggtgttgaagtagcagcaaaaccgtctgaaattgtaaatttacttaaaaaggttatgtga

SEQ ID NO: 6984 - DNA, 1203 bp, Methanobrevibacter gottschalkii
  source 1..1203: mol_type = genomic DNA
atgtcaaatcaggaaattattgataaattattaaatggtgaaatgaaactttatcaggtggatagggaagtttcagcaaaagaggcaacagatattagaagagaatttttagaacaaaaatattctattaaattagataatatctcaaattatactcttgatatggaaagagcatctgctcgtaatattgaaaattccattggagtattacaacttccaatgggtatagcaggaccattaaaaatcaatggtgaatgctgcagtcgtgaagtatttgtacccctcgctacatctgaaggagcacttgtagcttctattaataggggtgcatcaactattactgcgtctggtggtgcaaatgtaagaataacctcagatattatgactcgtgcaccagtaattaagtgtgaaggtgtgggtgatgcattaaaaattaaacaatggtttattgataattttgatgaattaaaatctattgcggaaagcacaacttctcatggtaaattaatcaaaattgatcctattttaatagttggaagttatgtttatccaagatttgttttttcaactggggacagtatgggaatgaatatggtaacaatagcttctgaaaaaattttagataaactggcacaagatactagtgcagttcatgtggcattaagtggtaatgtttgtgttgataagaaacctgctgcgataaacattgttgaaggaagaggaaaaagtgttatagcagatatattggtgccaaaagatatagtgttaaaaaagcttaaaacaactgctgaagcaattgttgaagtgaacatggctaaaaatttaattggttcggcagcagctggaagtatgggatttaatgcacattatgcaaacatggttgcagcaatatttttggcaactggtcaggatcctgctcatgttgctgaaggttcattaggtattacaacagcagaagatagggatggagatttatatttttctgttaatctgccggatttgccagtagctactgttggtggaggaacaagtcttgaagttgctcatgagggattggagattcttggtgttgcaggttctgataaagcacgtgaatttgcagagattgttgcatgtactgtacttgcaggtgaattatctcttgttggagcattagctgcaggacaccttgcaagagctcatcaggaacttggaagaggataa

SEQ ID NO: 6985 - DNA, 207 bp, Methanobrevibacter gottschalkii
  source 1..207: mol_type = genomic DNA
atggatgattttcttgatgaattatatccggaaatcactcttgaaactgaggatattgtaatgacaatatcattaaaaaaagattattctcagactaaagatgttaatgtgagaaaaaaggaatttataaaggatttaaatgattttataaaagaatttgaagagacttcggaatcattggagtttatgagatattttgatgattag

SEQ ID NO: 6986 - DNA, 639 bp, Methanobrevibacter gottschalkii
  source 1..639: mol_type = genomic DNA
atgatttttgattcattctatacattcttaggacagcttgtagtttttttagcaatcctcattataatattattcattgtcatattagttttaggagttttaatagctaggaaaaatgaaattaaatttccaagatttattttatttgttgttgattccctatacttcccgttcaaatcaatagcaaactttttaaaacttgatgaatacttgattgatgatatctcaattaaagtaagagatgaattgaacaaagaaaaatttagatcaataccctctgaaaaaacattaatattcctaccccactgtttaagacataaaaattgtcctgcaacactccaaaaagaaggattaaactgtactgaatgcggattatgttcaattggtgtcgttaagaaaaaagccgaaccaatgggatataaaatgtatattgttccaggatccagttttgttaaaaaaatagttaaagaaaacaagttcaaagccgtgcttggagtggcttgtcatgaagatttgaaccagatgatgatgttattatctgatttttgccctcaaggagttttgcttgaaaaaacaggttgttttgaaacaaaagtaaatattaagaaaatattcgaaaaattagactcaaaatactaa

SEQ ID NO: 6987 - DNA, 453 bp, Methanobrevibacter gottschalkii
  source 1..453: mol_type = genomic DNA
atgaatattgattttaaaaataatgaaatactatttcttgaaggagaaactggaatagtgggtattgttaaagtagcacatgataataaaatgttatttattgcaacacatgataaccaggaaatagttcaatttttagaatctgatgatattattgctgtgtctaactttaaaaaagataaaagaacaattcgctcacaggcttatctcagtcgtgaagaatcttcaccacttatcattttaaacaaagaccatccttcaactaaacgtttagaaactgttatatcaattggtgatgaagttaacctaaattgtaatattatccccggaacccatcctgaacaaaatgttttatgttcatgtgacagtttatctggacttaaaataataaaaaccccaactgggatcaaattaaataaagaatttgataattttacaatcgaaaaattttag

SEQ ID NO: 6988 - DNA, 156 bp, Methanobrevibacter gottschalkii
  source 1..156: mol_type = genomic DNA
atgtgttccggtggagggccaatggccgatattgatataaaaaaattaaaaacaaaaaaatacttttgtaaagactgtggaaattcatttaaaggccttggaaaaaaagtagtttgtccatcatgccaaagtgaaaatgttgaacttgtagagtaa

SEQ ID NO: 6989 - DNA, 1017 bp, Methanobrevibacter gottschalkii
  source 1..1017: mol_type = genomic DNA
atgtacgaaaaaataataaacaatattaaattaaatttaggtgaaaataaagatttaaatcggaaatatctggcatcacaaatagaaaactataaagatcatccatataacctggaaattacaaaagagatttcacgcatgatgtgggattgtttaagtgatgaggaaaaaagagaatttatagaaatttcagaaaatgaaactccggtaattgatattttagaagagatttacccaatgattgaaatgggaaagtatgataatgcactagacaagcttaatggatttatgaaaactttccaaccaatgtttgaagatgatgcagtaaatgaataccacttcttcaccaatcaattggaagaagaaatattcaataaatatattggtgctaaaaaagaaatgagatacataccaaataaccatcctctacttgatttgtattatgtatatggattcctccttttagaaaaacatgaactaaaagaagcagaattttatctaaaaaaggcactgaaaattaacccagtttcttcaaggatactgttagagttatctgatatttataagactaaagcacctaattttaataaattttacatgtacacaatacaagcacttgaatatgcatattacccgcaggatcttgcaagatgctataggaacttaggtcagttttatatggaagaaatgaatttcgagatggccgccgcattatataattatagtatgaaatacgaattaaatccgattgtatacagcaaacttcagtatataaaatcaaaaggaaccaatattgaattggagttagaagaatgtttaaacactttaaaagataaaaaaattcagattgatgtgaatccatttattttaaaaacattagaagagttatcagataaatatgatgaaaaacaagcattacatcaagcattatatttttatgaattacaatatgacctgaatcatgaacaagatatacttgaaaaaattaataatattaaaagagtaatgaatcattaa

SEQ ID NO: 6990 - DNA, 1644 bp, Methanobrevibacter gottschalkii
  source 1..1644: mol_type = genomic DNA
atggcaaatcaaccaattttcatccttcctgaagggactgaaagatattccaaaagagatgctctaagaatgaatatcactgccgctaaagttttagcaggtattgtaagaactactttaggtcctaaaggtatggataaaatgttagttaattcattaggtgatgtaactgtaactaatgatggtgcaactattatgagtgaaatggatattgcacaacctgcagctagaatgcttgtggaaacagctaaaaaacaagaagaaattgttggtgatggtactacatctgttgttgtaattgctggtgaattattatctaaagctgaagaattattagatgatggaattgcaacttctgttgttgtaaaaggatttagaaatgcaacagaaaaagccgtggaacttttacaaggtattgctattgatgctgatgataaagaaactcttaaaaaagtggcagttactgcaatgagtggtaaaggatctgattatgctaaagaacatttagctgatcttgttgttgaagctgctttaagaattgaagaagatggaaaatctgatattgagaatattaatattcaaagagtctccggagattcagttgaagattctttcttggctgaaggtattgtaattgataaagcacccctttctaaagctatgcctaaagatattaaaaatgcaaaaattgctatcatgaaatatcctattgaattaaaagatattaacactgatgcaaaaattgatattactagtcctgatcaatttgaaatgttcttaaaaaatgaagaacagatgattagggatttagtggataaagttgttgattctggagctaatgtattattctgtcagaaaggtattgatgatatggcggaacattacttgaaaaaagcaggaatcatgactttcaaaagagttaaaaaatcagatatggaaagaattgcaaaagctactggcgctaaattagtaactgatattgaagatttgtctgaagataaattaggttctgcaggtcacgtatatctcgataaattatttgatcatgaattgacattcattgaagaatgcgaaaacccaaaagcgtcttctattgttcttagaggcagtacccgttatgtaaccgaacagatttcaagagctattgatgatgcgttaggtgtagttgccgctactatcgaagaaggtaaagtcctcattggtggaggagcatgtgaaattgatttggtaaaacaattaagggattatggtgaaacagtaaatggaagagaacaattagctattttaaaatatgctgaagcattagaagttattcctagaaccttagttgaaaatgcaggtttggatactattaacttgattgctgatttaaaagctgctcacgaggagtctaatttaattggtattaatgtattcactggtgaagttgtagacatgaaagaagctggtgttattgaaccgttaagagtgaagatccaggctttacagtcagctggcgctgctagtgaaatgattttacgtattgatgatatgattgcagcaagaaacgcacttaactctactggacctgacgagtctggcaatgatgctagcggtatgcctcctatgcctggcatgggtggaggaatgcccccaatgatgtaa

SEQ ID NO: 6991 - DNA, 3939 bp, Methanobrevibacter gottschalkii
  source 1..3939: mol_type = genomic DNA
ttgaacaaacaattattactcacttttctttttgtacttgcagtgatattatctgttagtgcaatttcagctagtgatgtaaatgttacagattcttacacaacaagtgtagcggatggcgcatcaaatgtctcagttcctattgaaaattctgatgattcatcagtactttctctatcaagcgaatcagatgttggcaatgtatcatctaagaattctgaatctgtaaaatcaaatactttatcaactaactcggatactaactctttaagtaataggggaaatgatgttttagaagtgaataataccgcttctccaactattaatgcatctgaaactattgcttcaaaagatattactaagtattataaaggaagcacaggttatactgctaaatttttagatatgcatggtaatccattaaacgggtcagatgttaaaattactgttaatggtgttacttatactaaaaaaactaatagtgtaggtgttgcttctttagcgattaatcttaaacccggaacttacaaaatagtttcagaaaatctcattacaggttataaattaaccaatactattaaagtattgtcaaccattaatgcaaatgacgttactaaagtttatactgacggaaagaagttttatgcaacctttttgaaaagtaatggtaaagctttagctaatgcatatatcaagtttaagattaatggaaaaacatactctaagaaaactaatagcaagggtgttgctagtctatcaatgactaaccttaaaaaaggtacttataaaatggtctcttataataaggatggtctaactaaaactaatactgttaaagttgtttctaagactagttcaaagcttaataccaatgcctatactttccttaaaagcgatagtaaaaatattaaagttactttacttaacggtttaggatatgcaccaggttcaggtaaaataatcaagttcaccgtaaatggtaaaacttattctgctaaaaccaacagtaaaggtgtagcttcacttaaattaccttatttaaaagcaggtacttatacagtaaaatacaagttttctggaaatacattttatactgcatctagtgcatctaataaattatatattcttccaagtaaaactgctactttcactgtgaaaagcacaacaacttttggtaaaggtgctaatactcctttcaaggttgctttaacttcaggtagtgttcctttagtaaaaaaaactattactttaactgtaaatggaaagtcatatgataaaactactgatagtaatggaatcgtttcaatacctattgatttacaaaatggcaaatatacagtaacctataaattcaatggtgattctaaagtaaatgctaaaaccggatcttcttcaattatagttaaggaaagaacttccactaaagttacttggaaaagtggaacatctttctatcagggtgctcagtcttataaagttttattgcaggattctaatggtaaagctttagcaagtaaagttgttaaattaactgtaaatggtaagacttattcagcaacaacttcatcaaatggatatgctacatttaatgtaaatttagctcctggaaattactcaatttcactaaaatatcctggagataattcttatgctccaagcaatggaaatgtaaaagtcagtgttgagaaaaaagaaaatacaggatatgggtattgggtttatggtgaagacatgagcaatgttgaccttaaatcattagcttccaaaggaactagcgatttattcttaaactttaaagcaattgagcttcatggtcaatctaaagttgaatcatggattgctagcgctaataagttaggaatgagagttcatatttggatgcaaatattctatgaaggtggaaaatgggtcaatcctgttaaaaatggaaaaccatatgaggcattttttgagaaaaaaataactgaagctcaaggatatgcaaaaatcaaaggtgtggcaggtatacactttgattatttaagatattcaggtaatggtgaaagtgctgctcataaaactcctggtggtgctgcagcaataagtcaattcgttgaggatgctactgaagctattcataatattgattctaatattatcgtttcagctgcattgatgcctgaaactaccagtattttaaaatactatggtcaggattactcggtaattagtaaatacttagatgtagttattccaatgatttataaaggaaattatggtaaaacttcagcttggattactacaactacaaaatggtttgtagataattctaatggtgctcaagtatgggcaggcttacagggatataaatctgatagtaatgttactaaattgtctgcttccacaatcaaaactgatgcacaggctgcattagatggtaaagctccaggtgtaattatatttagatggggtgtaactaactttgtagatttcagttcattatctgacaaatccacatccccaagtactactggatccgtaactattgcagatataattgcagcagcaaataatttgaaaaatgttattaattcaaagaatacaatccctgcaacagttagcgttggtgggtcaagttattcaactgctcagtttttatacatgatgaccgaagctgttaagaagattaatggtggtaaaacttcatcacaaatattgcctatatctgttggagttccaacaaatccatctggttcatttaaatcaggtaatatcgcatccagcgaatatgtgaatatggcaatcagtattaatagtttcattatggaaaatggtagagctccgaatttcgcttcatcatcttcattaggcactattgattatgattctttagttgaaatgtttgctgatattttaacagactataaagataataataaattgccaacttctgtaaaagtggacaatggtacaaaatccgaagtcataactgccaaaacaatatccatcaaggatatcgttactggtgcgactaatttgaaaaaatattataatgattataagaagttgccttccactgttactgcaggtaaaattacattcaaattatctgaatttgtttacttgatgagtaaagctattaatcaaatcggaaaatctaatacaaaggcaattactataatcactggtataggtaatccaacaaatccttctggagataatattaattcaaaatatttatcaaaatcagagtatcttaaagttgcattaaatgtgactaattatataaataaaaataaagtagctcctaattatgtttcatccagtcttggtaaaattatctactctgaatatgtcgatgcattttcacgtatcctggcattttatggtaatgaaaatcgtttaccaaatacagtaactattagttattcatcaggatccggatcaaattctggaactggtgcaactggaactggtttaaatgaagcacttaaaaatggtactgagttgtcacaatatcttaaagctactaaaaattgtcaggtagacaattctaagattaaagatattgttaacaaagtgactaaaggtttaacatctgttaaagataaagctactgcaatttataattatgtaagagacaatttggattatagtttctattacaatactaaatatggtgctgtaggtgctttaaatgctaaaaaaggaaattgtgtcgatcattcacacttgttagtcgccatgtttagaactgctgatattcatgccaggtatgttcacggtaaatgtacattttccagtggaagtacttatggtcacgtatgggttcaggtgttagttgataagaaatggacagttgcagatgcaacaagttcaagaaattctcttggaaaagtagcaaattggaatactaataaattttcatttaataattattattctgaacttggtttctaa

SEQ ID NO: 6992 - DNA, 714 bp, Methanobrevibacter gottschalkii
  source 1..714: mol_type = genomic DNA
atggctaacggtaaaattagtgaaaatattgaagaataccttgaagttctttattgcaatggaagtaatggggaacaggtttctaccactaaattatctgatgaattaggtattgcacctggaagcgtaactcaaatgcttaaaaaattagaaaaattaggatatattgattatactccatataaaggagctactttgactcatgaaggcatgaaaatagctagaaaaattacaagaaaacatagaattttagaaaaattcttgttggatgttttaaaagttaaagaagaaaatatccatgaacaggcttgtgaaatggaacatgctttatcagatgaagcggaaagagctttatgtaatatgttacaacatcctgatgtatctcctgatgataatgttattcctgcttgtaattttaattttgaaagttgcagtcaatgtttttctcagaaagattttgatcaaattatcaatagggaattcaacttattgtctatttcagaattaacctctgatactgaaggaactatttcattcattcgtggaaataccgaccttttggacagtattgcagatttgaacattaaagttggatgccagttaaattatgcaattaatgataataaggatgaagattcttatttggttttcattgatgatgaagagtttaatattcctaaagaaatggctaataatatttttattagaatttaa

SEQ ID NO: 6993 - DNA, 516 bp, Methanobrevibacter gottschalkii
  source 1..516: mol_type = genomic DNA
atgcgtggtagtttatcaaatgatattgtatctattaagattgaagagggaagcaaaaaaccaatagctttacatgaaaaaagtctttttggtaaaattgaagctgattcattaaatctttctttaattgaagcttgttatttgttggaaaaaggtcgtttaaatatttatgaagatgatttcgaatgtagtgttggttacatcattgatcttttaaaagaacaagatttatttggaaaatatgttgtttaccgtgatttaaaagaccgtggttttgtaattaaaactggttttaaatatggatctgaatttagattgtataatcgtggaagaggtccgggtcagggacattctgattatttagttaagattatttttgaaaattatgaaattaatgctcttgactttgcaagctatgttagagtttcacatggagttaacaaaaaactactgttggctattgtggatgatgattttgatattacttactataatattgaatggactagaccttaa

SEQ ID NO: 6994 - DNA, 1116 bp, Methanobrevibacter gottschalkii
  source 1..1116: mol_type = genomic DNA
gtgagtgttggtgataatatggggaatttgatagatccatgggcatcatttagtttagattatgataagttagttaatcaattcggtattggtaaattttcagatattataaatgaaattaaaaatcctcaaagattaatgaaaagaggagtgatatttggacatagggaattcagtgaaattaataatttaatcaatcaaaataaagattttgctgttgtaactggtatgatgccaagcggtcaaatgcatattggtcataaaatggttgttgaccaattaaaatggtatcaggaaaaaggagcaatgctgtctcttcctattgcagatttggaatcttatgcggctcgcggaatgagttttgaaaaaggtcgtgaaattgcagtaaatgaatatttaacaaactggatagcactagggcttgatttggaaaaagataatgtaaatgtatatttgcaatctcaaaataaagcacttcaagatttggctttcatggcatccagtaaaactaatttcaatcaactcaagtcaatatatggattcacaccttctacaaatattgcccacattcaagcaccattggttcaggttgcagacatattacttccacaaattgaagagttcggaggtccgaaaaaggttgtagtcccggttggaatagaccaggatcctcatattagattaacaagggatattgctcaaaaacttcatgaagatttggggcttttaactccggcatctacatatcataggtttttgacaggtttgactggtgataaaatgagtagttccaaaccatctacagcaatttatcttaatgatgatacaaaagaggctgttaaaaaagtcagatctgctaaaactggtggtagggaaagcttaaaagagcaacaggaattaggtggagaagttgataagtgtgtaatttatgaaatgttgttatatcactttattgatgatgatggtgaacttgaaaaaattaggcatgaatgtttaagcggaactctccgttgtggggactgtaaagttaggactgctgaattggtggaaaaattcatggatgagttaaaagaaaaacaggttgaggctcgtgaaatagctaaaactttattataa

SEQ ID NO: 6995 - DNA, 1197 bp, Methanobrevibacter gottschalkii
  source 1..1197: mol_type = genomic DNA
atgattagatgtgtatcttgtggagaagaatatggtgatgatgaagtaatctacacttgtgaaaaatgcggatccgtacttgaactcgtcaacgaaatagatgtttctaaagacatttttgatggtagaaaggatactttgtggaaatttaaagaatgcattcctgtagatgaaaacaaaattgtttctcttgaagaaggtggaactccattctgtaaatgtgataaactgggaaaagaacttggagtaaatttgtatgttaaagtagaaggttctaatcctactggaagttttaaggacagaggaatgactgttggcatgactaaagcaatggagttaggtgttgatactgttggctgtgcttcaactggaaatacttctgcatcgttatctgcttatgcagcccgtgcaggattaagatgtattgtgttcttaccttctggaaaagttgctttaggaaaattagctcaagcaatgttccacggagctgaagtaatgtctattgatggaaacttcgatgaggctcttgaagcaatgactgctcttgcattggaaaaacatctttacttattaaattcaattaatccatacagattagaaggacaaaaaaccattggttatgagattgttcgtgatttaggctggcaagctcctgacaggattattttaccagttggcaatgctggaaatatttctgcaatctggaaaggtgtttcagaattttataatgccggatttattaaagatttgcctatgatgacaggtattcaagctgaaggtgcttgtcctgtaactaatgcatttaaaaaaggagatagaaaagtggtacctgtagaaaatccagaaactattgctacagctatacgtataggagctcctgtaagtgatattaaagcactaaatgcaatttatgattcaaatggttattctgaaactgtaactgatgaggaaatccttgatgcgcaaaagttgcttgcaagaacagagggtattggtgttgaaccggcttctgcagcttctattgcaggtcttaaaaaacttgttgatgaaggtgtagttgacaagggtgagacaatcacttgtgttgttactggacacttattgaaggatcctaatactgctattgaagcatgtaccaaacctactcaggttgatgctgatattgacaccttaagaaaaatcttaatgaataaataa

SEQ ID NO: 6996 - DNA, 201 bp, Methanobrevibacter gottschalkii
  source 1..201: mol_type = genomic DNA
atggctgaattaccattcgctcctgtaggaagaattttaaaaaatgcaggtgcacaaagagtaagtgatgatgcaaaagttgctttagctgaagctattgaagattatggaaatgatatcgctgctaaagctataggttttgctcgtcatgctggtagaaaaactgtaaaagctgaagatgtaaaattagcaatcaaatag

SEQ ID NO: 6997 - DNA, 369 bp, Methanobrevibacter gottschalkii
  source 1..369: mol_type = genomic DNA
atggcaaacatttatgtaaaatttgacacacctgaagaattagctaaacaagctgaagaagcattagaaactgcttttaccactggtaaagtagcaaaaggaaccaacgaagtaactaaattcatcgaaagaggagatgcagcattagttgttatcgcagaagatgttgatcctgctgaaattgttgcacacatccctgttttagctgatgaaaaagaaattccttacgtttacttacctactaaagaacaagttggtggagctgctggattaactgttggtactgcatctgcatgtattgtggacgctggtgatgctgaagctgctgttgctgaaatcgtagaaaaagttgctgaattaaaagattag

SEQ ID NO: 6998 - DNA, 207 bp, Methanobrevibacter gottschalkii
  source 1..207: mol_type = genomic DNA
atggaagaaggaactcctgctgaagtcattaaagttttaaaaagaactggtatgactggtgaggtaatgcaaattaaatgcagaatcctcgatggtagagataaaggaagaattttaacaagaaacattatggggcctgtaagggaaggtgacattttaatgttacttgatacaattagagaagctaaggaaattagaactccttaa

SEQ ID NO: 6999 - DNA, 162 bp, Methanobrevibacter gottschalkii
  source 1..162: mol_type = genomic DNA
atgagaacttgttcattctgtggtaaagaaattgaagagggtacaggtaaaatgtacgtcaaaagagatggctcaatttatttcttttgtagcagtaaatgtgaaaaaaatatgattaaacttggaagggttccaagaaaagttaaatgggttaaagaatga

SEQ ID NO: 7000 - DNA, 453 bp, Methanobrevibacter gottschalkii
  source 1..453: mol_type = genomic DNA
atgattcaaaaaagttttgttatgatgaaacccgacgctgttcaaagacgtcttatgggtaaagttttgtctcgttttgagcaaaaaggtcttaaaattgttgcttgtaaactgattcagattgatgaagaattagcaaaaactcattatggtgaacatgcagataaaccattcttcccaggtttagttgaatacattacttcttcaccatctttagctatggtaattgaaggagacgaagctattaccactattaggaaattagttggtgcaactaatcctttagaagcagatcttggaactattagaggagattttggtatggatactggaagaaacattattcacgcatcagatgctcctgaatctgctgaaagagaaattgctcttttctttaatgaagatgaaatttgcgattatcaaattgttgataacgatttaatttatgaataa

SEQ ID NO: 7001 - DNA, 1791 bp, Methanobrevibacter gottschalkii
  source 1..1791: mol_type = genomic DNA
atgaaaatcagatccccgattgtatcagttttaggacatgtggaccatggtaagaccaccttgttggattatattagaggaagtaccattgcagataaagaagcaggcggtattactcaacatattggtgctacagaaattccaaatgatactattgaagaaatctgtggaaatttcatatcaagattaactatcaaagatttaatcccgggattattctttattgatactcctggccacgctgcatttactagtttaagaaaacgtggtggagcattagctgatttagcaattttgattgttgatattaatgatggatttaaaccacaaacttatgaagctttaaatattcttaaaatgtataagactccatttattgttgttgctaataaaattgatagaatttttggttgggagacccatgaaggagcttcttttagtgaatctttcaatcaacaagctcaaagtgttaaacaagaattggatcttaaactttacgaacttgttggtactcttcataaagaaggtttccaatctgaaagatttgacagagtcagtaattttgcttcacagattagtattattcctattagtgctagatcaggtgaaggtattattgaagtattagcaatgctgctcggactcgctcaagaatatttaactgaacaattagaaattaatgaagatgctcctgctaaaggtactatcttggaaattaaagaggaagtaggattaggtcttactgttgacagtattatttatgatggtgttctacgaactaatgatgaaattgctttaatcaattcttcaaatgaagttgtaactactaaaattaggtctattttaagaccacttccgcttgaagaaatgagagattctaaaaagaaattcagaaaattagatgaagttgttgcagctgcaggtattaagattgctgcaccaaatttagatgatgttgtttcaggttcaccacttagagtactaagtgaggaagaagacgttgaagaacaactcctgaaagaaattgaagatattactattaacacagaagatgaaggtcttttagttaaagcagatacattaggttctcttgaggctgtagttaagttgttaagagatttaaatatacctattcgtgaagcagacattggtgatgtaagtcgtagggatattattaactctaaaattgcattaaatgaaaatgaagcgcatggtgccataattgcttttaatgtggatgttcaccctaactctttagatgatttaagcaactctgatgttaaacttttcaaaggagatgttatatatcaaatcattgaggactatcaggaatggactgatgaaattgaaagagctaaaaagaaagcattttatgatgctatagttaaacctgcaaaatttgttgcattacctaaattagttttccgtcaaagtaaaccggcaattattggaatcgaatcacttagcggtacagttaaacaaggtcaagttttaattaacaaaaatggagaatatgttggtgtaatagccagtatggaagataaaggtgaaacattgccttctattcctagaggtcaaagggtggctatggctattaaagatgctattgttggaaaacatttcgatgaaggtgatgaattatatattgatgtttctgagaaacattataaattcattgaaagagaattcaaggataaattaactgaagatgaatttgaaactctttatgaactcgtagagattaaacgtaaaaaagatcctgattggggtaaattcggtctttttgaataa

SEQ ID NO: 7002 - DNA, 384 bp, Methanobrevibacter gottschalkii
  source 1..384: mol_type = genomic DNA
atggcattcaaagttgttgtatctcaaggtgctgaaactcatcaaattgaagtagatgaaactaaagcttttaatggtttaactatcggtgaagaatttgatggcggacttgtcggtttagatggttatactttaaaagtaaccggtggtagtgataaaaacggtttcactatgaaaaaagatgttactggtactagaagaatcaaaagtttattaactggcggtatcggttatcatcctaaagctgacggtgttaaaagaagaaaaactgttagaggaaacactattgctgaagatattgtacaaatcaacactgtagttactcaagctggaaataaatcaatagctgatattattggtgctggtgaagaagaggaagaatag

SEQ ID NO: 7003 - DNA, 1215 bp, Methanobrevibacter gottschalkii
  source 1..1215: mol_type = genomic DNA
gtgaacgtacaatcagatgttaacataggtttagttggtcatgtagatcatggtaaaaccactcttacaaaagcattgtcaggaatctggactgatactcatagtgaggaaacaaaaagaggtatttctatccgtttaggatatgcagatattgaatttaggaaatgtccagaatgtggtgaacctgaatgttacactactgatgataaatgtccgatttgtgggagtgaaacagaattaattagaaaagtgtcatttgttgatgctccaggtcacgaaactcttatggcaactatgttatctggtgctgcaattatggatggtgcagtattagttattgctgcaaatgaaacttgtccacaaccacaaactaaagaacatctcatggcgcttgatgtcatcggtgtaaaagatgttattgtagttcaaaataaaattgatattgtttcaaaagaaagggctattgaaagttataatgaaattaaggaatttgttaaaggtacttgtgcggaagatgctttgattatccctgtttctgctcaacaaggagctaatgtagatattttgattgaagcaatgcttaaacaaattcaacctcctgaaaggaatgttgatgacactgcattaatgcatgtagcaagatcatttgatattaataaacctggttcaggtgctgataaaattaaaggcggggttattggaggcactttgattcaaggtaaattcaaacttggcgatactattgaaatcagaccgggccctactaatgatggtaagaggatgactttaacatcagagattattggtcttgaagctaatggtgaacaagttgaagaaattggtcctggagggcttgttggtattgcaactaaattagatccatctttaactaaatcagattcactatccggtacagttgctggtgaagaaggtactttacctgatgtattagatagtttcaaaatggatgctaatttacttgatcgtgttgtcggtactaaagaagaacgtgatgttgctccgattaaacttaaagaacctttaatgattaattgcggtactacaacaacaatcggtgttgtaacatctactaagaaaaacgatgttgaagtaacactaaagttacctgtgtgtgcaagtccgggtgatagagtagctttaagtcgtagagttggagcccgttggagattaattggttacggtattattaaatag

SEQ ID NO: 7004 - DNA, 393 bp, Methanobrevibacter gottschalkii
  source 1..393: mol_type = genomic DNA
atgaactctaaagaagttgtaattgataccaatttttttatggttccttttcagttcaatgttgatatcatcactgaacttgaaaaattattaccttcttataatttgactactccaagctttgttatcaatgaattgaagggtttgaaaagaaataaaaatgcaaaaacaaggttaaatgcaaatttagctttaaaattagctaattcttcaaaagttgaaataaaggatatttcattgcttgaaaatgaaactgtggatgatgcgttacttagagtttcagaagttttagctacgaatgatattgaactgaaaaatcgtgcaaaggacaaaggtataaccgttgcatatttaagacaaaaaaaatatattgctgttgatggcaaaatataa

SEQ ID NO: 7005 - DNA, 585 bp, Methanobrevibacter gottschalkii
  source 1..585: mol_type = genomic DNA
ttgtattatagaacaaaaattaaggatactgtaagaattccaccttacaagtttgaaagtcctattaatgaagtcgctattgaaactttaaacgaacagtatgctggtcgtttagataaaaaattaggtttactcatttgtgttaatgatattcttgaaattggtgaaggtaaactcattattggtgatggagctacataccataatgttgttttcgaagcaattttctttaaacctgaacaacatgaaattttcgatggtgaagtaattgatattgttgattatggagcttttgtgagaatcggatctatggatggtttaatccatgtttcccaagtaactgatgattatattacttatgatgctaaaagaggtgctttacttgcaaaagaatctaacaaagttttagaagaaggggacttagttagggctagagcagttagtgtttctattaaagatgaatcaaataataacattgaaaatagtaggaattctaagattcctctcacaatgagacaaactaatctgggcagatttgaatggattgaagaagcaaaacaaaaaagtaagaaggttaaagaatga

SEQ ID NO: 7006 - DNA, 177 bp, Methanobrevibacter gottschalkii
  source 1..177: mol_type = genomic DNA
atgaaagcttgtactgtttgtaaaatgatttcaaataaagatcattgtcctaattgtggaaatccaacttctgacaattggagcggtcttttgattataactgatcctgaagaatccaatgtagctcgtgaattgaatattactgttgcgggcgaatactgtttaagagtaagatag

SEQ ID NO: 7007 - DNA, 507 bp, Methanobrevibacter gottschalkii
  source 1..507: mol_type = genomic DNA
gtgttacgtttggatacagaaaataaagatataatgtctgagctcaaaaggcctttaggtaaattatatcctaactttgaagatgcaattgatgaaattaaatcttctgagtttttaatttctgttggtgatgcaacattcggtaatcttactaaatatgaattatacccgaatattggtataattgataatgtaattcaaagaaaaaatcatactcatgaaattatacgtgcagaacatattttgaaagctgaaaatcccgctggaactattactgatgatctatgggaaaccataggacacgctcttgaattatctaactctggcgaatgttatgtaattgaagtagcaggggaagaagatcttgctgttcttccttgcatcataatggcaaatccggaaactaccattttatatggtcagccaaatgaaggtttagtgcttttaaaagtttctgatttaaaaaataaagctaaaaaacttattgacggatttatcaaagaataa

SEQ ID NO: 7008 - DNA, 315 bp, Methanobrevibacter gottschalkii
  source 1..315: mol_type = genomic DNA
atggaaatcgaatttatcgaagaaaaagaaaataaattatttaacagaaaagaaattaaattctatgttgattatgatggtgaagcaactcctaaaatcttagatattaaatctaaattagttgctttgttaaacactaaaaaagatttaattgtagttgataatgtacagcctcactacggtgaacctaaagcattaggatatgctaaagtttacgcaactgtagatgacttaaaatacattgaaactaatcacgtattagctaaaaacgaagaacctgaagaagctgcagaagaagcagaagatgaagaatag

SEQ ID NO: 7009 - DNA, 153 bp, Methanobrevibacter gottschalkii
  source 1..153: mol_type = genomic DNA
atggtaaaaaaatctgatctgtataaagtagatggcgacaaaattgaaagaaaaaatccaatttgtcctcgttgtggtgaaggtgtattcatggctgatcatggtgacagattcgcttgtggtaaatgcggatacactgaaatgaaaaaataa

SEQ ID NO: 7010 - DNA, 1422 bp, Methanobrevibacter gottschalkii
  source 1..1422: mol_type = genomic DNA
ttggataatattagaaatggtcgttttaaaactggaatgactgatgaagctgcaatttacacttcatcacttgaagcggataaacttctttttgaagctgatattaaaactaattttgctcatacttcaatgttaaaacatgaagggattgttgatgaagaaattgcggataaaattttatgtgctcttgattctcttaaagaagaaggttatgatgcattagtattcgacccttctgttgaagatgtgcacatggctattgagaactatgttacttctaaaatcggccctgatgctggttttatgcatactgccaaatcacgtaatgatcaagtggcttgtgatgttagattagttttaagagaagaaattatcaacattcaagttggtattttagaatttatggaaggccttgttgaaatggccggtgaacatttggaggatgtcttcattggttttactcatttgcaacatgcccaaccaatcactattgcccatcatttaatggctcatgtacaggctcttaaaagagattatgaacgtttaaatgacacttataaacgtgttaatttaaatccattaggttctgcagcaatggcaactacgagttttccaattaataggcaattaacaactgatttgcttggctttgatgcatatttggaaaattcaatggatggagtttccacaagagatttcattgctgagagtgtttttgacttggtatctttatgcactacattatctaaaatctgtgaagagttagttttatggagcacctatgaatttggcgttattgaaatggcagatgagtattcatcaacttcttctattatgcctcaaaagaaaaatcctgatgttgctgaacttgcaagaggtaaatgcgcaattgtcaacggtgaattggttactattttaactattcttaaagcaattgcatacacttataatagagatttacaagaaattactccgcacctatggaattctttaaaagtaactaaagacactttatctattgtgactaaaatgttgttgtctgttgaatttaaaactgaaagatgtgctgaacttgcaggtaaaaattttgcaactgcaactgatttggcagatattatggttcgtgaaaaacaaattccatttaggactgctcataaaatcgttggaagaattgttaatgaagcaacaactaaaaacatggtggaagaggacatcacttctaaattcattgatgatatttcagctgaattaggttttgacaaattaaacttggctgatgatttaattcaaagagctttaaatcctgttgaaaatgtaagaattagatctgttcctggtggacccgcacctgaaatggttgaaattgcacgtgaaaacattaaagaatttttaaatgctgaatttgaaaaacatggaatttaa

SEQ ID NO: 7011 - DNA, 189 bp, Methanobrevibacter gottschalkii
  source 1..189: mol_type = genomic DNA
atgatgcataaaatttgtcctagatgcggatctagaaaagtaaaatggataataccgcaaaattggtctcaatgggtttgttatgactgtgattacacaggaccagtcattgagggcaatgatgatttagctgaagaaatacacgaaaactatctaaaatcaaaaaacaagaaaaacaaaaatgattaa

SEQ ID NO: 7012 - DNA, 1017 bp, Methanobrevibacter gottschalkii
  source 1..1017: mol_type = genomic DNA
atgtatactgaagaatttattttaaatgaagttaattcaataagagaagacattggccatgataaagtaaatatttatattgaagaaatttattttaatgaaaacaccaatgaattatggattatcactgaagacaggccagataaatcagccattattggaaaaggaggttgggttgttggtaaactcagagaaaaattaggtcttgaaagcattcatgttgaatcatatggtgactttttaaataaaaaatacaaattagacttatcaaaaaagactattctaaacttaaattcagattcagttggcttaaaaaacctggaaaaagttattgacgataagatatcaagtatttacagttttaatttcgagaattatttaagtgaaaatgaatttaaaaaatcatacaaacatgaagcagtagttgcattgtccggtggtgttgacagtagtttttcattaattttagctaaaaaactcggattcaaccctattgctgttacagttgatcctggaacaatcatactcccaaaacaatttaaacggaatatcaaaaaaatatgtgatgaattagatatttctcatgaatacctcagaactgattattcagaggttattaatgaatcatttacaggtaaggttcatccatgcggaagatgttcaaaaaatactgaagaactcgtaagagaatatgcaaaatcaaaagaaattccaataattatctttggtgatatgcttgcaactggtagtcaatgtataaattcacaatatgattcattatatcgattgaatcttccagcaagtttaagtaccagcaaacaagagataaaatcattgattgaaaaatataatttaagtacattcaaaggattcggttgtccacttctttatgaagttcacagaaaatttccacatatgaaaaaattttcaatacagagaattcttagagaaacacgttcaggagcattagaacctggagaagcattagatttaatatggagcttttataagatttga

SEQ ID NO: 7013 - DNA, 2049 bp, Methanobrevibacter gottschalkii
  source 1..2049: mol_type = genomic DNA
atggggagaggatttaaattgaaaattgataaatttttattattaattttgatattttttattttgttatcttgtgttagtttagtttctgcttccaatactgttgatacaaatttaactcatgatgcaagtagtgatgctaatatcggaattaatgatattgaatcttattcttctggtgttttttctgatgatgtgaaatcaacaggtaatgttattgttaatcagagaaattataagatgtattttgatgatagcaatgttttaaaaaaggagtatggcggcaaaatcatcgcgtttagtggtaagttcactgataaaggtgttattactattgattccgaaaatactaaaattactggtcgaaatacattgtttaacaatactgtttttaacatcaaatctaatggtgtgatgttgactaatttaaattttgttttaaataaggaatttagtgataatgaaggtgcttgtgtactgattaatggtgacaatgtcactgtctataatgttgatattgattataatgtgcctaaaaatgttaccggatttggaatctattccaatggtttggatgaaagtttatctgatgttaaactggtcaacaatactgttcggcttcatggtaatgctttaaatgatgggtataattatggggtggtattgactaatactcgtgatgctattgtttatggtaatattattgattgtcagcttcctttgagggctgttaattggatggctgaaatatatggaggtataagtatggatgcagtatccgggctggctgcgggctcatgtaatggcttaagactttccaataactacatcagatgtgttgtcaatggtgttgctcagggcgaacctacattggatgctgtactgatttatgcatgtcacaattcgacaatagaaaacaatacaattattgaaaatgattatgttacaaaaaagggtgatgttaattatttgtatggtttggatttgtatttgtctaatgatgttgtaatctatggtaatgacattcatattcgcacaagcggaggtaaagaggctcacggtactgcttatccgattcaagtaactggacaggcagaaaatatcctgattgcatttaacaatttgagcagttacagtaacggacctaatataggtatttattcacaaaactattatggagtaactcatctggatattattagcaattttattaatgttacaggtcatgcaagcaaacacagttgggctttggttgctggaattgaagtgcaggattccgatgacagaataatgaacaataccattattgttgatactgtgaataaatttgaaaaaggatacaacgtttacggcataagctattcacaacgaaccgatggagatcacaattataatattcagtataataatgtctcaaccaatagtgaccatgctgttgcactgaaaggcagtggcagttccactgtcagtaattccattgttgccaataatattttaaagggcagaaaatatggtggaaaccgtgcagcatacattactggaggaacaggtaatgttattattaataatactgatgggtcccgtcctgttcataaaatgactgatgatgagtattccgataatttgaaattttatctttcaagtccttttaaaggaaacggtctgggattgggttggcttgacggtgatggaaactccataatcggcaatggtgacagaaatggcaattcattaaataatggaaatagcggtttggttaacaataaggtttatggtaataatcttaattatagtgaatcgcaagcacgtaatggtgttttaaattcaacatattacacttatggttcttcaggtactgatattgccagtgcttcttcatcttctggttcaggtgctggaagcagtaactctgagtcatctgatgtgaaatcctatgaagtaactaaaaaaattaatgataatttaattcatattcctattgttattatggctgttattgcattaattttactaatcatcggatataaaagaaaagaacacaaagaataa

SEQ ID NO: 7014 - DNA, 3300 bp, Methanobrevibacter gottschalkii
  source 1..3300: mol_type = genomic DNA
ttgaaactgaataaaataatcgttttatcattattccttgtacttatctgttttattggagcagcaagtgcaactgaagatgtcaatgatacagcaattgctgattcagaaattgatgaagtaagtgctgtagatattgaacaatctgttgacgataatgagataacagaaattcaaagcagtgatgaatcaaataaggttcttgcaaggggaacacctactactgcgaaggattggaatacattaagaacaaaatgtgaaaaaacaactgatcaatatataacattgactggtactagttatccaattggaacttatataacttttaaaaatagtgctacaattgttggtagtgatgttagttacattactggaggttctacttcaaatactccttttgtaaataataattctgctttaacactacattttattaatgtgaaatttttaaatgttaatgctaagaatttgttagagcttgatggtactgtttatttggataattgtacttttgataatgttcaaactgcaaccggacacaattctgtaatttataatactaataatttgatgtatttgactggttgtaatattactaattgtcatactggttatggtgctgttagtaattataactctggaagtacaacaagtcctgtaatgtatgttgatgattgtaggtttattaataatagtgctagtgtagaaccgggtgctattaataattgtggaattttatatgtaaataactctgaatttgatggtaaccatgcaaactggtgggctggagcaattcatactcatacaaatgctcaaacagaaattgaaaatactaattttagaagaaacactgctggatggaatggtggtgcattattcacctacagcaaacttaaaataaaaaattgtacttttgaagacaacaactgtaccactaacaatggtggtggagcaatcggagcatacaactatggatcaggatacaatataacaatagattcatctagatttaattataatacaaacctttgctatgcatacacaaatatttcaactacttcagttggtcgtggaggagcaatctctgtacttaatggaggttatttaactgtttataattcaaatttcactggaaactatgcaaaaataggtcaggcaattgcagctgcaacctataattatgaaaatggaactggtggaaacccacacattaaaatatgcaacaataaatttacagaccacactgcaactggaattgatactgtagttattactggaaatgattatatattcaacaacaatgtatttataaatagttatcaaaacaccatttatacaggaactggaaacacatacaattctgcagctttgccgggtaatctgaattccaaattgaatttaaaaacaaaattaagagcaactaatactgaaattttatctgattatcaggatcatgatgttgtttatgttaatgtttcttcagataaagatgcagaagatgacaatgttcatggtcaaagttgggatgatgcttatggtggtttggagtgttttgtaatggcaataaattatcttcataataatgggataatttatattgcagatgggcgttataatgaggactatggctatgaatactcaatagctcatggaaactttactatgattggtcaaggtccaaaaactaatatagagaagattataacaactgtatatggaggtagtgatcaaaattctactcataattttatcaatttatctttcactggtaaagattttggtataaatgctaatttcattaattgtacatttttaggttcaatttcaatttcaaaaggtctcacatatcatgatcctaatcatgttgtggaatatggttatgctcaaacttatttcatgaactttaataactgtgttttcaaggatgtcaatactactaatgctttagttactctttataagtatggtgctgtgaactttactaattgtatttttgaaaatattactgctgattcaattgtttatcgtaatgatattaattattttgaagaggatggaatttcatttaaaaactgcactttcactaactgtaaatataatggtattgctgattccttagctaattttgatgatgctgttgttattgaggattgtacttatgatagtgaagttgctttaggaacaactgaagttaatggtcattattatataaatgctactaaacttaaagttactgctgttggcacaagtatttcaattaaatctaatgaaaataatgtaattgttaatttaactgatgttaacggtaatcctgttgctaatgcaggtataatttatagtattgccggaaccaatgccagtgcaactactggcgctgacggtactttcactctttctaatttaaaaggtattgtaaacatcactgtttactattcaggcaatgaatcttatttagcttctaataaatctgataatttcatatttaaatacaatactgctgtttccagtgcggttaatggtgatgatattctaatcattttaaaagatgatgagaacaatccaattgcaaacgctaatgtaatttatacagtcaacggcattgactacaatgcaaccacagatgaaaatggaacagtaactgtttccaatttaaaaggtaaatttgcattcaacgtattatataaaggagacacactacacacagcttccaatgcttcaaacacattcatcttcaaatatggtacaaaaattacagcaaaaaaagtaacagccacttacaatgttgctaaaaacttagttatcacattaaaagatgaaaacggaattgctattgcaggtaaaaaagtaaccgttaaagtcggatctatccgcaagactttaactactaatgctaaaggtcaggctactttaaaagtcagcaatcttttgcctaaaacatactctgcaaccgtaacttatgctggtgatgatacacacattaaatcctcagttaaagttaaggttgttgttaaaaaagcaacacttaaagtatctgctaaggctaaaaaattcaaaaaatcattaaaaaccaagaaatattctattgttttgaaaaataatgtgggcaaagtcctgaaaaagactaaagttacattaaaaataaaaggaaaaacattcaaagcatacaccaacagcaaaggcattgccacatttaaaattaccaagttaactaaaaaaggtaaatacaatgcttacattaagtttgctggaagcaaatactacaacagcttaaacaaaaaagtcaaaataaccttaaaatag

SEQ ID NO: 7015 - DNA, 360 bp, Methanobrevibacter gottschalkii
  source 1..360: mol_type = genomic DNA
ttgaggaaaataaaatcattaatcaatcttagaattgttaattgcacaaataacgagttaaaatcagaacttaaaaatattttgaccgatgataaactagatgaaaataagatttacaataaattaaaagaagaaaatacattagaaacattaaaaaatgaatttaatgaattcatatcaaacagcaatagttctgaaaaacaatttttagtaaaaataaagaataaagcaaataaattaaaccctgaaaaacacacaaacatagaaaatattcaaaaagaaataatcattaaattactaaataaagacaatataatcaataatttacaaaaaaagaaaatttgtactaatattggataa

SEQ ID NO: 7016 - DNA, 5595 bp, Methanobrevibacter gottschalkii
  source 1..5595: mol_type = genomic DNA
ttgaaaaactcagatgatgttttaaatatcgatgttttaaaccaaaattctactgttaattatccaaggagccataaaacaattgaaattacacaggataattatgaaaattattttaatattagaacaggaaagattattgatgcctcatgtatttctaagggagatactttaaaaattggcaatatttcaaatagggcttttgttatagatcgtcaacttatattaatgccaatctcttctaatgataagattagtaatggttttatccatcttattaaaggaagtgatggttctactgtaacaaatcttactattaataatacaaaagatagattaaatattttaggtggaaatgtaggtcaattacatggtatttggttatcaaattctaataataatcttatttcatataatacaataaggattgcaaatgctgcaggcgtttatgccatgcctatgggttggtcaagcaataatagaattatttacaataatatgaaaacatatatcacatgtaatatggttatgggacaatgtcattataatttaatttcacataatagtttagaattgttaagttattccgatacatctgttacaaatttaatttattttaatccttttgggcatgccgattatagtggttctggattatgtaaatataatatgatttcattcaatgattttaaaggtttttctaatgggcctatgtccattttattacaaagtgtttatgaaaatcatgatggcactgttattgcaaataacactttttctaaaggctcatatgctattcatttatttggtaacaatatttctgtttatggtaatgtagtactcaatagtggtattggtatttctgtttttggacgtaatttttctgttcataataatgctgtaattggtgacagtcaaggttatggtattatggcagaagcgaatggtggttcgctgtgtaatgtttataataataatattacttttatagatgtttataatgcaatatttattggtaatcatgtcaaagcttataataattatataaatatcaaagaatatggggtgagtatatttattaaaggtaactgctccaatattcatgataataggattaataacaaacatgatgctggtatatcagtattaggtaataataacactataaataacaatattattaataccaaaaatataggtattacactacctgctagatctactaactgccgttattataataatacatttaccaataataaaattaatagtgaaagttatggtatttatattgatggtttagtttataattgtataatattggataatattattgaaactaatagtactatgggcatttttaaagacataactgatgaattatccaatattgaagaaaataacatggttaatggtgttattttagattcaacatatattattgtcaataatactaactatcataaatattttgataaatatgggcatttaacatttaaattcgaaaaaaataaaactaaaataatatttttaacatttttaacaaataaaaatttaatttttcaggaaaaaataaatgtaattagtaataaaatgaacaatttactaattaatgttacaattacttttgaaaccaatgccagtggttcattaatacgtgattttaattttattaatcatgataaagaagctattattctaaatggtgttaatgatgttacagtcactaggaataatattacaaatttatttagaaatggcagtttatctaattcagctgtattgattcaagatgtttgtgaaaatcttataatatcctataataatatatatgtaaattcaagaacacattgttatacttatgcaatcaatgctccttcaattaatccagctactcataaaatgaataacaaattatctaaaagagttaatattttagataatacaataatcatgatttcttcaggtattacagaagctatttacactgatactctatctgaaagtaattttatttctaataaaattaatattatttctaaaaattatggatatggtattgcagtttctaatatgattggaaggttatctgatattaatgtttcaaataatgaaattgttatccatagtgagcaaatggcatatttaatcgaacttctccaagtggataattcaacaattgaaaataataagttatatggtaaaagtaatggagtctatgctattggtatatattggtctgataatatttctgttaataataatgccatttctgtatttggtggaaatttatctaaaattttagaaatatctgatgtattaggtatcggaaattcagctatagcaatacttaggaattcatctaaaattattatttccgaaaatattatttatgctaatctttcaaaaacaatatttgacaatactactgatgggattataaatgcatcttttaattcatttattattgataatgagaactataactgttattttaatgaggttggagaattatattctaatgttgtaataaaaaatagtactttgctaattcataatttaacaaaaaatcaattattgattataaatgatctagttaaaatctcatcttatgatttaaattcaccctcttcaatttcaataatttttaaaaataatgcatcaaattcaattatttccaatgcatcttttattaattcttcaattgatttaatcaatgtttcaaatattaatattataaataacacttttaactcttcaaatagttgtatattaaatattaatggtggagaaaaaaatttatttgttaataatgagctatttattaattctactgatatttcagtgattaatctcaataaaactttattaaatattataaaaaataataatattaaattcaatacatctaattctaaaattataactattaataattctaatttcacattgattagtaataatgtaataataggcatatccgattcattaatttttatttgttctaagggttcaagttatgataatatttataaaaatatattaaatgctaatgcttcgtcaatatgcggatatttagcttctaatgcaaaatggagtagtattagttataataatattttaattaataaatcaaccaatcagtcagctatatattattgtaataactcatctaataatacaattaatgaaaactatattatttcatattcactaaatgctaatgactatgcagtttcagtaatttcaaatgaaagtttatcaaatttaataattaaaaactatttaataagttctaatggatttaaacgagctaattttgcagtatacgctccatttgatttggttaaagataattctccatttgacatttatgtttcatgtaatggaagtgatgttgtaggagatggtagtattgataatccttatgctacaatcaaaaaagctattgaaaatagtttaaatttgtatgttatacatgtatttgatggaaattatactgagtctaatattattattgataagaatttaacacttgttgctgttaatttaggtaaagttttcattgatgttcaaattaatcaattatttgatatacttgaagataatactttatcaatttctggctttttaattggaaatgctcataatgttgatggaggatccgtatttattaacaatggtaagttgttcattaataatgtagttatatttaattcctcatcttattttgataattctcatccaatatttgaccaaaatataacttatcatgaagataatttaattgataaagcacatacagttgattgttctaatacaggtaaaggcggagcaattctcaataacggtgaattaattattaattcatctatcttttttaataattttgggcatcgtggtggtgtaatagctgattatggcaaaactattataaattcatctattttttataataatcggggaattcatggaggatgtatttattcagattcaaaaaataatttgtttgtaattaactctatttttaataataacacagcagtaacttcaatagacttttgtaaaatcatgttacattccattggttggtcaattggagagaattatatttataattataaatctgaatgtgattcaccaattggtgctggtggagtaatttatactaaaaatacttcagtattaattaaaaattcatcttttatttataattctgctcgtattggtggtgtaatagccacacaatgtgatatttttacacaactatcaaattttatttctgatgttaatttatatattgataattgttattttaatagtaataaggctaatgatactagatttaaagatgatccactttatttaaagaactatgattattttaacgattataatggaggagttgtttatggaacatacaataaactatatataaatgcttctaatttttattataatcaggttattaataatggaggagttttatatgctaaagctaatgatggtaagataatagactctattttcaataataatcgtgcaggaagtaatggtggtgctttagatatttcaaaaaatttccttatcatgagatcaattatttcaaataattcagctagatatggtggagctattgaatatgattcttatacctattatgggcatattcaagacaactttaacatttataattccaccatatctaataataaagctttaaatgctggtggtgcatttaacataggttctggaaatgtttctgttcatgattcaaatattgtaaataattttgcaccttctggtactacaataaattctcatggaatcaaatacgctattgatatgagatataactattggggtgtattgccaaatggtcatattggacctgatgactcagtttggaatgtgaatcataatttatttaaaccatggtacaaacaatgggtagaatggaagccaaaagtcattgaatcaaataattctggttttaactctaattctagtaatcataatccttatatcaatcctaattccaactctggtggaaataatcataataatccaatatctacaggatctagttcttccactacaacttcaattggtggagctaatgggaataatcatggatacggtaatgggaaatactttggttcaggtgatggaaataatttgggtccgagtagtggaaatggaggtttttatttagctattccaggttataataaatataatgggcaaaatgtgaattcaaatacctcatcaaattcacataagtctcaaaatcgtggaaatgttgattcagatagcctcagtaaatcaaatagttcaaaatataatcctgatttagtttctgctggttttactgttaatgctgcttcatctccatcaagttctcaaagaggaatagaacgtgctagtaaggaatcaggttctttaagtgattcagcatcttatgaaattactaaaaaaattaaagaagtcttttatgatgagaaccatataactacgtttattttatttataattattatattgtttttaataattttaggatacaaatatggagttggtaaatttgatgaatga

SEQ ID NO: 7017 - DNA, 6582 bp, Methanobrevibacter gottschalkii
  source 1..6582: mol_type = genomic DNA
atgtcatatactaaatttattttaatattatcaataatattcctactgtttgcttcaatagcttttgttagtgctgctgatactaatacgagcattgtagaagaaccaatggatgttaaacataatttatgtgatattaataattctttagaaaatcaagaaatttatgtcagtccattaggtgatgatgatgctaatggaagttttcaaaatcctgtttcctccattcatcatgctgttgcaatggcaaaaaataattctaaagttattttaatggagggggaatataaaggtgcaaataatacatttattttaattaataaaaatttaacaattgaatctttttcaaataatgttgttattaatggagagaataaacatgcattttttaaaataaccccctcttcttctttaatacttaataatattaaatttattaatggatatacagattcttattctcaattaggtattattaataatcttggaacattagtgataaacaattcttcatttaataatatgaactctattatgggaacattttttaatgaaggaactttaaaaattgaaaataccaaggttactaatgcagtttctttaacaatggctcaaatattaactaatattgggaatactactatattaaattcccaattaattgaaaacaatgaatattcttcaattgatgttgttgtttataattataataggattagtattgttaattctcaagttaataatttattttcaaataagaaatattctgaagattcatataatttagcttcaattcttattaataattctaagttagataacattgatcttgaagatgcatttgtttgtattcacaactctcaaatcacatttaaatctatttttaatggttgtaatgtttctgttgatgagagtacatttctttataataagtctcttttttcaataattaatgtaatgaattcaaattttacagcgattcattcagtttttaattctcctatttcaactaaacgttcgcatgttaatataacatattctgcaattttaagatcaatatctggaaatgcctataaatgttatctttatgctccttataattggtggggtattaattcaggtccatcttatcaatactttacagatgttaatgttagttattgggcaatatctactttcgaatatgaatctgactatattccaattaatcctaattccacttttacaacaacattaaataaatggagtgatgggaattctacatttgaatttaaaacagaagaatatttaccgtttagacatttgaaatttgaatctcaaaatggtaaatttttatattcatctgcaaatatcgaaaaagttttttcaaattatttaattggaaacaatcttgattgtcaagttcatgttattatagactttcaaaggttgactcttagaattggagaaggtttaactaactataattattttgtctcaacagaagggcatgacggtttaggaaatggtactttcgaacatccatttaagacaataaattatgctgtttccaaagtaggaaatggaaacactatttgtttattagaagggatttataaaggcaattggaattctaatgttacaattacgaagaatataactattgttggattaggaaatgtaaatttactaagatctaatgattatagtatcttcaatattaaagaatggggaagtttgtctttaaaaaacattaatttctctgttgatataattgattatgcacatccattaattattttaaatggtgggaatttatctattatcaattgttctttttcaaatataacttctacaaatgttatccacacatctaatgggatagaacataatggaattgttaatatatctgattcttattttgcagatatttcaggctcaatattaatagggtctgctaaagtaagtgtttcaaattctttatttgaaaaaattaaatgctataggataattcaaggatatgaatattataatgtactatttgcaatttcatcttccatagaaatttatagttcctgttttcaaaataatttaatgggtattgtaaatttacatccatttttttattcatcatcaaaacttagatattctcaatatagtaatgcatattcaagatatgcttatattaaaaacacaaaatttgaaaataatgtatttttcgataagaattcttattattcaagtaatggaattggattggatatttataatgaaaatgaacatttttatggaattatagataactgttcattcattaataataaaggtcaattagccatcgccaccagtgttaattcatcaatatttatgaataattttgaatcccgttatggttatagtatggtttatgctgatttaattaataattcagtttttattaataataaaaatctgtatgaagattataataatgtatttatcggtaatggcatagctagtgctggatgtatattggagtctatttttatgtataatgaagctgcttttggtggagctattgcagatacaaaagaagcccattattgtgtttttgtaaataacacttctaaatatggtggtaacgatatttattcttattcaggagatgtagattattctagtaattggtggggtgataatcaaaaaccaaactctgataaagtttttattttccttggaactttaactttgaataattgggtcataatgacatttgagtctgtttcaaattctattattaaagcttcattaaatgctcttaataatggggaaggtaatatttgtaaaattaaccacaacatgccttctcgcatggtttatttcaaaattaatcatggaagtctttctccagagaatactttacttataaataattctgcttatacaaacatgacttataatttaaatttagattttaaagtctatgcaagaattgataatcaactattagagttagatattagaaatacaaaaactctcttaataatggaagatgttatttttaaaggtaaaagtaataattttgctgttgatttaatcaatattaatggttataaaatatttaatcaaacattagttgttgaaattattgatgagaataatacacagaatatatttacaattcaaactgatgataatggtcatgcagaatttaatgtagattatccagttggtatttatcaggtaaatattaattatttaggtaatggatattttgataaatgcaattctacttctataatgaaaataataaaatctaatacttatttaattagttataatcaaacatattacggcaaaaataacttgtttaaatctgtattatttggtgaaggaaataagaaattaagcaacatgactataaaattcacgattatagattctaaaggtaatttaagggaaatctattctttaacaaatcaagacgccactagtgaaattattatcaatttggatgtaggtgagtatacaataaggtctgaatttttaggtgatttatggtattcttattcaagcagtatttctcatatattggtcaatcctgttagttccacactaattgtttctaatgttacattatatggtgtgggtgatgtttataatattactttaaaagatattcatggatcattgatacgtggtgaaaatattattgtcacaataactcaaggagcatcatgtgataaatttacattaaaaacagataataatggtgttgcaaaattaactataaactatttacctggagtttataatgttaaagctcagtttttaggagatagtatatatgcccctactagtggtgagggagttattaaagttgaaaaaatttttactataatttcagggttccatcattgtattttaccattaaatgggatatacacagttgttttaagtgatatgtatgggcgacgtgtcaataatgaatctgtaacattatccttatataaaggcaatctaataaagaaatacacaattaatactgatgctaatggagaagctgattttgttataaaccttgaagaaggaacttatctaacaacttttgaatatggtggaaataaatggtattgtgatgcaactaatgctgcaactattgttattagtaaaaaagttaatttatccaacattaatataaattcaacagatttggttcagtattatggggaaaataaatatttcataataaaatttaatgatcctaatgcatatagccaatatggcaaaaaaattggagttacaatatcttctggctcatggtcacaatcttatgaagttttcactgatatttttggtcttgcacgtttaaaaatcaatttgaatcctggagaatataatattacttacaaatattcaaatagtcattataatatatttggcacatcttcaaatactatacatgtttataaaatgcctgctgttttaatagcgaataatattgtgatgaaaagtaatgaacaacaattatatgaaataaatctcagagatattaataataatcctatcaaaaacatgcttgtaaatattgatattgatggtgtgaaatataattccactacaaatgatgagggtatagctaaaatattacttagtttgggtgttggaaagcatattattagttataattttatcaatccaaattatttgtcctcaaactcatcatctgttattctagttgttgatagtgataaaataccttcaaatttatattcacaagatattaatgcatttgataatcaaatattaaatttcactatacgattgtcagacatgttaaataatagcatatcaagttctgaagtaatacttgagctttttacattttatggagagtcaattattaatattactggtatcacagattccaacggaagaattagctttgatttaaatttagattatggaaaatatatagctaatttacattataatggaaatgctttgtatttagctagctattcaactaatacgattaatattgaatcagctgataatcgtacaaaaaccattttatttaatgtagagacaaaattaactaattctaaatattatgttattttgtccgatattaatggaactttgcttgttaataaagaaattaaatttatcattggaaataaaacaattacttccataactgatgaaaaaggaagagcttacttggaattaaacctaaatcctaattattatattataaaagctatttttaatggggataaggattacaaatcagtttctagtttgaaaaagatatttatttcaggtgaactaacgcatttatatgctataccattagttaaatattataggaatggaactcaatttcatgcaagacttgtgaattctaaaggagttcctttaattaataaaatattatctattttattggaagggaattattataattgtacaactgatgaaaatggatggattacattaaatattgacttaaaaccaggattttatgatgtggaatgttactattattcaaataatactgatgaaaattcttttgataaaaccaatatcacagtattatctactgttttaggtcaaagtgaagtgaaatattatggagattatccttatttaacaattaaatttttagatggtgcgggaaatctaattaaaaacacaagttttgttattgatattgatggtaagaaatactctgcacaaactaatgatgagggtatttttaattttaatcttaatttaaattcaggaagtcatcttatttcagttaacaatccttatgatgggttatttgtgacgtataaattagatattttaacaactatttgctcaaataatctagttaaagtttttaacaatggagtttcatatactgcgcaattacttgatagctttggaaatccattaaaaaataaaaacgtaaaaataattattaatggtgttttatattataaaaaaacagatgttaagggtattttagaattaaatatggattttaatcctaaaatttatcttgtgacagtttttaatccagttactaaagaatatattgaaaatacagttaaaatattgccaacacttattaataacaagaatataaatatgtatttctcgaattgtgctttttataaagttcgtgccattggaagtgatggtaaaattgttgaatcgggggtaattgttaaaattaaagttaatggaaaatcttacaaaattaaaacaaataaagatggttatgctttgtttaaaataaacttaaaacctggaaaatatataattactgcagaatacaattcatacattgtatcaaataaaattaatgtaaaatcattactaacagctaaaaacatttttcataaaaaagctaaaaagattaaattttcatctaaattagttgatattaaaggaaaagcattaaaaggtaaaaaaataacttttaaatttaaaggaaaagtctataaagttaaaactaataaaaatggaatagccacacttacgattaagaatttaaaagttggaaaatatactataatgtcaatatggaataaattcaggataaaaaacactattaaaattaaaaaataa

SEQ ID NO: 7018 - DNA, 5736 bp, Methanobrevibacter gottschalkii
  source 1..5736: mol_type = genomic DNA
gtgagtaaaattctgaaaataaataaaataatattagttggtattgttttattgactattttatcattaaatgcagttagtgcatatgataattcaaataacactgaagagtatctttcttcggaaaattatgaggaaatacttagtgcagactcttttaatgataataatattcttgcttcagcaagttataataaaacaatttatgtaaattacactggagatgactcaggatcaggcagtcaaaacagcccatatgctacattaaataaagccatatctaatgtaaatgattctgataatgcagttgtatatttaagtgctggaagatttagtggtgaaaataatacggatttaagtattaatttagctcataggaattataacagtagtttaactattattggagcaggtaatggtcaaactatactcgatggaaatgatgaatcagccattttcacatcaattagtgctgattctattgtaactttaataaatattacatttacacatggaaaatctgaaattggttcagttatgactacttctggaaatttaaccatagataattgtatttttgataataattatgctactagttctgcagcaatttatgcagaaaatacagaagatataaaaattacaaattcagtatttaaaaataattatggacatgaaggatgtgcagatttttattgtgaaggcagtgaatcaacaataatagatattatcaattctacatttataaattcaacaacaccatatttatatagtttaccctcttttttaatccaatattcaaatgcaaatattattggaaataaatttgaaaatataactggagtatatcattctggaacatttgaattaaaatatggatatggtaaacgtaaagtaattaataatacatttattaattgtaattatactggaaataacgatggaggcataatttatatttcaaatacctatcttaaaaataatcaatttataaactgtacttcaaaaaaagctttaatctattctttaactgaatttaatgcatatctcaaatttaaaaatgcgacaattaatggaactgaatttaaattatattgtgaagtaacagatgatttaaacaatagtgtaagtacttatggagaagttcatttctttattaatgatgaaaaaataaagtccagcagatccaataatggtactgcttcaatatctgtgattaaattattagataatggtgattacacacttagtggaacttattactattatgaaaatccatttgaagttaatgtgaaaaatgcaacactccatgttgattttaatcatgaccccctagaattatgggtatcaaatgatggtaatgatacaactggtaatggaagtgaaaataatccatttaaaacacttaaacatgcattaaattatggatttgaaaatacaatagatttaactattcacatgaaagatggagtttatactggaagtgacaataaagatttatcttactctaatgttggtaaattaactatttttggtgaatcttatagaaataccataattgatgcagaaaacacaaaaaagatttttaattttggtgaatatctaaatgtgacattagcaaacctgaccctaagaaatacaagtggaaatgtcatttctgcttatattctaaaaatctatgattctgttattgaacatgctgattctttaaatggagaatatagtgatacatctaaaataatttttaataatctaacttacactaacagtggtggaatatacatatacaatgcagaaatttacaattccaaatttaaaaattgtaacaatactaaaaataattgccttttacggataggttctcttggaaataatataatacatattgaaaacactactataatcaacaataccgttaacggacgacatggttcttctattgttagtatctctggaaatagtgtattaataaataacgattacattaataatactgttattagtgaaaattcgaagtatatttttcaaagttattctaataaattaatatctgtaaacgaaactttcataggaaacaatgtgtccagttatatagcatattatgatattaatggaaataacgttgaaataataattgaaaatattacttttaaaaataattatgtaaaaaccgatggatccgggttagctattaagaccggaagaattaaaggtgcaaaatttattaataatactgctttaaataatggcggagctattattatcttacctcattataccggcagtcaagttccgaaatgcattcttgaaaatgtattttttgaaaataatagtgcaaataatggtaaagacatatttattgaaaaggccaatatcggttatgaaaacggacaattagacaacattacagtaacttttaatagcttaattacacataatttacaagatattgtgattgcaaatattagtcatgttagtggagctgttattggtggtggaatgattgaatttgatttaaatggctcatatatgggagttgcagaagttattaatggtgtagctaaattaaattatttaggatttacaaaaaacggcaattatactttaagtggttcatataactatgaatcaaacaccaccatttataatagtgctgttgttaatgtaattcttaatccattaaaagaaaatattacttcatatgtttctgatagtagaggagatgatgaaaatggaaatggttcatatgaaaatccttacaaaaccattgaaaatgcattaaacgaaggttataaacaatctaaagtaatttttatcaaagtattggaaggtaactataccggtaaattcaataataatattacaatttatgattctttaaatatcacaattattggtgaaggaattgataaaacaatcatcacaggaaataatactaaaaacaactggtttataaccgtattacatgcaggtaatggatttttaaaattaataaatatgaccattagtgaaattaattataattataaaaacatgaatagtcaaaaatctgcggttgttattgaaaaaggtgctaatgtatttattgatagtgttaaatttactaaaaatcgtggatacaacggcggtgcaatcaataatcaaggtacattaaacattattaactctattttttataataatggtgattcaagttatggtggatctatatataacaaaggtataacaatcattgacaattcatcatttattgcaaatcatgctaaatattgttctgatatgtttaatgagggtattttaaatatttacaattcaaatattcaagattctatgcgtaccaatggttggacaggaaacacccttgtaattggaggccttggcaatataagcattattaattccaaaatatttaggacaggtaaaatgcctttagaactcattgatccagacgatacatatgctgataatccagcatttactataagtattggaacaattggaagtataacattaataaatacaacaatagatggtcatgatgccaaatatactggacctaatttttatattacaaataatgctgctataagttggtctgtctctacaaatattaaaattcacaattccagtttcttaaatttaaataacattctaaataatcaaatgggaaatttaataataaagtcatcatttattaaaaatgtatccaacctgattatgtcaacaagcaattataatctaactgtaataaactcttactttgcagatggaacaatatccactgaaaaatacgatatatccaatatttacttaaataataattggtggggaagtaattctaaacctacttataaagtagataatgttgatacaactcctgaaacctggttaatactaacattaaatcaaagtaataaagaaagtttattaaaagacattattttatcttttaaagttactgatggtgaaaacataacagattatacaggatatttatatcctagaccatttacaatgtctgctataaacgctacattagaatatgccaatggaaatattattaatcatcttatcaatcaaatcaatatggcgaaaaatgcaactagttattatatagaagctaaaatagataaccaaacagttaatttaacaagtaatataacccataatgttactatcattgctaatgatatagaatttgattatggaactaaaacaattactgtgaatgttttattcgacaacttatctgcagatgatgaaattattactttaaaagttaataataaagagtattctactaaaatcaataatggtatagctatctttaatattgacacattagttcgtggaacatatacattaaactacagtataaatgctactgaattacatgacaatgtaataaattcatccacactaattgtaaacggaatagatccaaatattaatgcaagttctaaagcagtgctggttggaaataatgtgacagtaacaataacaataccttctgacttaacaggaacaataaatgttatcttaaataataaaacatatgtggcagaaatacatgataataaagctattgcaatcattcctaatttagcacaaggaaattacttagcaaatgttatctattctggagacgaaaaatacttagctaaaaatacaacattaaacattaaagtacttgaaattaatatttcagcaccgaatgttgaaaaatactacaaaggttctgaaaaactacgagttatcgtaatagatagtgaaggaaatgcaattgttggtcaaagtgttcaaattaaacttaataatgtaaattacacagaaatcaccaaccaggaagggattgtaagtgtaaatcttgacttaaatgttggaaaatattctgcaacaattttagttaatgataaaaaaattaacacagaaataactatcaaatccacaatccaaggatttaatatgatcagaggatataatagtggattagattatcaagcaactttattaaatgatgatggaacaccattagacaatacacttgtaaaactcaaaatcggaaatagtatatatgaagttagaagtaatgcaaatggagttgttaaattaaacaaaaaattagcaattggaacatacactgtattaattacaaatccatctaattttgaaacacaaacagctactttaaagattgtttctagaataaataataataaaaacataattggtgattatttatctggatttagctataaagttcgcatcattggtgataatggtaaatccgtaggagctagagaaattgttaaatttaaaattaacaaaaaaacttacaatatcaaaacagataaaaacggttatgcaagtttaaaaataacattaactccaaaaacatatcaaattactgcaacatacaaaggtcaaagtgttaagaacaaaataaccgttaaacaaatacttaaaacagcgaaaaaaattaatatcagaaaatctgcaaaaaaattaactttaaaagcaacattaaaaaaatccaacaaaaaaccacttaaaaacaaaaaaataacattcaaatttaaaggtaaaacctacaccactaaaacaaacaataaaggaatagctaaaattatcattaaaaagaatgttattaaaaaactcaaggcaggtaaaaaatatacagtaaaagtgacctatgtaaaagacataatcacaggatccgtaaaagttaaaagatag

SEQ ID NO: 7019 - DNA, 1152 bp, Methanobrevibacter gottschalkii
  source 1..1152: mol_type = genomic DNA
atgaaatacagaaagttaggaaatactggtgttgaagtatctgaaatagcttttggtgctgaatttttagtagaaaggccttatagggatactgaagttttaattaaagcatgtgaggaacacgggattaattttgttgattgctggatgagtgaacctgatgtacgttcacatttaggtaaagctattaaacctaatcgtgaaaaatgggtaattcaaggccacattggagctacttggcaaaataatcaatatgtaagaactcgtgaaatggataaggtaattcctgcttttgaagattttatggaaagatttcaaattgacacacttgactttggaatgattcactatgttgatcaaattgatgattataatgaaataattaatggtcaattcattgaatatgttcgtaagttaaaagaagaaggaacaatcgctcatattggattaagtactcataatcctgatattggacttttagctgctcaaaatcctgaaattgaattattaatgttttctattaatcctgcatttgacatgtttggtccaatggaggatattgaggaatataggaaagaggatgcatatggtgatgaaaaattatcttctattaacccccaaagagcagaattatatgaatcatgtgagaagagtgggactgctttaacagtaatgaagggttttgccggtggaaatttattaagtgctgaaacatcaccatttggtgttgtattaactccagttcaatgtattcattatgctttagagcaaaaaggggtttcaagtatttttgttggtgtgaaaaccgttgatgaacttttagaatccttaaaatactgtgaagcaacagaaaatgaaaaagattatgcagaaattttaagaacagctccaaaacactcgtttgagggacaatgcacctattgtgggcattgcactccatgcacctcggaaatagatatatcaatggtaataaaattatttgaccttgcaaaaaatcatgatgaggttccggcaagtattagggaacattataataatttaaaatatgatgcaacagattgcagtgcatgcggggactgtgaagaaagatgtccatttgatgtagctattgtggatgtgatggaaaacattcaatgcttattctctcaatga

SEQ ID NO: 7020 - DNA, 1452 bp, Methanobrevibacter gottschalkii
  source 1..1452: mol_type = genomic DNA
atgtatgaaaaagaagaaattatcagcgattacattaaagaggaattatccgatgtacctaatattttagataatgaattaacattggatggcagaagttttgaacatagaaaagagtttgaatttattaaacatcatattgatgagtttttagaaaaaacaaccaataaccgttatttcgcacttcccggcttaagaggtgtcgggaaaacaacactactataccaaacctatgagtacctgtttaaatccaaaaacatcaacccaaatcaaatactgttcatttcatgcgaaaacctaaatgacatagtggattttaaaatcatagatgttgtaaaacagtttttagaaacctaccacaacaccaccctaagaagactggacaaaaagatattcctgctcatcgacgaatcacaacatgacaaaaaatgggcattgtccggaaagaggatatatgacaaaaccaaaaatatattcatgattttcacaggttcatcagcattgaatcttgaatacgatgcagattcagcaagaagactgctcaaagaaaacatcactccactaaactacaatcagcacctgaaactaaaatacaactacaatgccgccaacgtttcagcatccctcaaaaaattaattttcgaaggagacataaccgatgcagtcagctgcgaacaacagataaatcaggatttaatcaacatcaatggctattcaacaaccgactggaatgaatttttaaaatatggaggatttccaacatcactctttgaaaacaacccccatataatctgcaaaaacataactggaatgataaataaagtaatatcacatgatatgggaacaatatcctcaataacctcaaccagccaaacacatgccaaccgcttactgagatttctggcactccaaaagccaggagacatttcacaggaaaaaatgggaacataccttggaacctcaaagggcaatgttagaaacattctagacattcttgaaaaaacccaactcatatttcactgcgaaccccatatcgcatcacctaaaagatccatcaagtcatgggagtatttttttgcaacatcaagcataaaacatatcctgacatcatcaataggcaatcttaattcaaataaaaatgcatatcttggagttcttttggaaaatcttgttgcatcaacattattctatctgagcaatgaagaaggaaactatttcacattatactatgatcctgaagacagagtcaatgtcgattttgtaattcagggcgagttccaaaaggcaatacctattgaagtgagcatgggcaaaaagaagaaaaggcaaatagcgactgcaattgagcgttacaatgcggattatggaataataatttcaaatacaactaaaacaatagcgaaaaaagataatattatttatctgcctccaaaaacattctcatttttataa

SEQ ID NO: 7021 - DNA, 846 bp, Methanobrevibacter gottschalkii
  source 1..846: mol_type = genomic DNA
atgcaatttttaattttaaacaatggaattaaaatgccgattttgggatttggaacataccaaatacctccagaagaaacaaaacaggctgtacttgatgcaattgatgtaggttatagattaattgatacagcacaattctataaaaatgaaaaagaagttggtgaagcgattaaagagtgtggtgttgaccgtgaagagttattcattacaacaaaagtatggataaataattatggttatgaaaactgtcttgattctattaaagaatccttggaaaaattaggtctggattatattgatttggtcttaattcatcaacctttctctgattattatggtgcttatagtgctttggaagatttatacgaagcaggcattatcaaagcgattggggtatctaacttttatccagatagattaactgatatctgcttatttaatcgcagaatcatccctcaaatcaatcaggttgaggtaaatccatttaatgggcaatatgctgcacaagcaaacatggagaaaaatggagttcaaatgcaggcttgggcaccatttggacaaggtaggcatggcatgtttgaaaatgaaacattaaaaaaaattggtgagaaaaatggtggcaggacaccagctcaagtaattttaagatggttggttgaaagaagcattgttgttttagcaaaatcaactcacaaagaaagaatggctgaaaacattgatatttttgactttgcacttgatgaggaggacatgatggaaataatgaatttggataatggtgaaaccctgtttttcaaccaccaaaatccggaagttgttgaaaggtttgaggatataagttaa

SEQ ID NO: 7022 - DNA, 1287 bp, Methanobrevibacter gottschalkii
  source 1..1287: mol_type = genomic DNA
atggcatatgaaattaaaaacaagaagaatatttcaacaattggagtgcatgcaggccaagaggaagttgatgaaacaggttcacgtgtaactccaatttatcagacaacatcttatgtatttgactcaccagaacaggccgcaaatagatttgcacttaaagaaggaggaaacatttactcaagacttacaaaccctactactgaagcatttgaaaggagaatggcagctgttgaaggtggaacatctgcatatgcaactgcaactggaatgtctgcaatcttttatgcaattatcaacataacctctgttggagataacattgtatctgcagataatttgtatggcggaacctatgaattatttgaaaatacattagaagatttgggacgtagtgtaacttttgttgattcacagtctcctgaattattcgaggaagctattgatgataaaacaaaagcaatttatgtggaatctattggaaatccaaaattggacatcccagattttgataggttagctgaaattgcacattcacatggaattccattaattgcagacaatactgttggaatcgggtctgtaagaccatttgaccatggaacagacattattgcatcctccgctacaaaatacattggcggtcatggaactactcttggcgggattatcattgaaaagggtgactttgactggatgagtggaaaattcccatcattgtccgaacctgatgcaacatataatggattagtatttggagaagcattcaaagattctgcttttacaacaagaatcagaacagtcgttggaagagacactggtgctgtaccttctccattcggatcatttttacttttacaaggtttagaaacactaggacttagaattgaaaggcatgcttcaaacgcaatggctgttgcagaacatttggaggcacatcctaaagtagcttgggtaacatattccggtttggaatcatctcctaaccataagatagctaaaaaatatgctgaaaaaggatatggtggaatagtatcatttggtcttaaagcaggttatgatggggctttaaaattcattgaaaatgttgagttaatctcatttttagcgaatattggtgatgcaaaatcattagttactcatccggcttccactactcattcccaattgtctgaagaacaacagttatctactggggtaacaccggatttaattagattttctgttggtattgaagatttggaagatattttggctgatgtggatcaagctttagataaaatttaa

SEQ ID NO: 7023 - DNA, 5112 bp, Methanobrevibacter gottschalkii
  source 1..5112: mol_type = genomic DNA
atgaaattttttagaaaaaaaccaagaatatttttgatacttttaattgtaatgatatgcttttgtttattctcacaactggctttcgccgaaaatatcaatgaaagtgaagttgttggaaatgcagaaattgaaaataatttaagcagtactaatgataattttgaagtttcaaaagatataggttataacgtctctaaaaagatttcaacggataattcaaatgaaaatttaagaaattctcaacacatgactttatttataattagtgataatccgggaacaaatattctggataaagctattttagaactttccaatgaaaataagataaatggtgtaaatttaattattagaaatggaaatcaagtaaaatcaatgaatgaaaatgaattaagttatttattatctgattgtgatgcttttataggtgaatggattagtagtgatgtcgattctgtattgacaagtgttttagtaaaaaatcctgatttgtctaataaaaaattatttcttgtattggaacctccttcaggcaatttaaactcggggtccagttcattgaatctaattaggaataataccttgaattataataagatatttacaaattattccaatgaagagttaattaattattttaagaatactaaaaggggcaactcatattctaacattaataattatttaacaaatggaaacggaaaaaatttcgattcaatttttaatcgattagttctttataaggatttgaatgataaaaataatttgaaaaatcaaatattgtttattttaaattatttgggcgttgatgttagttatgaacagccaacatttaccggtgttaaaaactatggtatttatagggatagatggtactccttggatgagtatatttctactttttttaaagcaactaataataggacggttgggattttagaaagtaaaatgtatattgaatctcagcagttaaacacttgctattcaattataaactcattggaatcaagaaattataatgtaattcctgtctttgctgatggaggatctgctgaacaattgaaggtcatggttgaatcctggacaagtgcgggagatgatatttcaggatttttatctaattcttctaattttgatgtttatattgatgcgattgtatcgatggtggcatatggtgttggtggggaaaacttcacaaaagcaacatctttttttgaagaagctggtgttcaggtatttagggcggttcactcggatcatgtttcaaatgaacagtgggaattaggttctactggtttaactacagaaaaaagtgataaatggtggcacattactattgctgaagcgcaaggaataattgatgccacattcattggaggtaattcaagttatatatcaaatttaaccggagctcaaattaccacttatattccgcatgaagggaacatagggttacttgctgacagaatcgattcttgggtggatttaaaatacaccttaaatgaggataaactgatatctataatttattataactatccaccgggaaaacaaaacatcggttccagttatttagatacaataaaaagcatttataatatactttatactttaaaagctgcaggatacactgttggaagtttgccagttgatgttagtgaacttgaatatctaatgcttacatgcggtataaatgtagctacatgggcaccgggagaacttgaaaaaatagctaatagatcttgcataactttacttccggtaagtgaatataactcctggtttaattcattagatgaaattgtaagaatacaagtttctaacggtactgttgcatatattggtgagttaactaaaagagccgttgaattagattataccaaaacaattggaagcacaattgacgactggtataatcaagttgtttccttacttccagatgaaaaatcagttgaagcaaaagaagttttaagtaatattgtcagggctttaaaagattatgctaatactcattcacaagactattatagattatatttaaaatattttgatgaatttaaggaattaaacattcaaggattaaatggatggggtgaaactccaggaaatgtcatggtagttaataaaaatggtacagattactttgtaattcccggattgacatttggaaatatattcgtggctccggaacctcaaagaggatgggagtctgatattaaaaatctttaccattgtactgctgttgctccaacacatcagtatttggctgcatattattatatgcaaactagaaatccaaatgccatgattttcactggaaggcatgcaacacatgaatggttgccaggcaaagaaattcttttatctgcaactgattatggatcagttgttgttggtgatgtacctcaattatatttttacattagtgatggcttaggtgaagctattcaagctaaacgaagaggatttgcagttattatctctcacttaacttctccaatgtcctatactcatttgtatggtaatttaacttttcttgctaatctgataaatgattatcaaaaagcagggagcagttcagaaaaaaataaaattggagaaaaaatacaagatttgataattagcaatgattattcaaccaatttaggactcaataagagtcaaataaaaagcatttctattgattcattaatagaaaaaattaatatatttttaaaatcaactcaggatactttacatccgttaggccttcatgcattaggagaatattggagtgaagaggatattgctagtacagtttctgcaatgctttctcatgattttgttttagagaataatcagggaacacttaatttatttacagaactttctaattattactattcaaaatcatatggtgatttaactccatttgaaagggaatttgtattgaataaatcttatgatatatgtaaagcattgatttattgggatgttaattctgtaagtaatgtattaattaatggcaatgttaaatttaacaattctaacttctatgcttgtttaaatttggctaaaagctacataaatcttattaatcaaagtatttcaaatgaactaaatgccatgcttgatggtttaaatggcagatatattcctacaggagaaggtggggaaattgttgtaaaaccaagtattttaccaacaggtacaaacattttccaagatcaatcatctgaactaccaacacaggatgcatggaattatgcaaaaattcttgcattattaactttagctgatttaaatgacactactgaaaaaattatcatggggatatggtgtgttgaaacagcaagggatgatggtgctttggtttcaactgttctttatttgttgggcatgaaacctgtttggacaaattcttcaagcgccggctttgatgatgaaggaaatcctactggaaaaaaagttggtgcaatgcctgaagtcattaaattaaatgatttaactcgtcctgagggttggaataaaaaaagaatagatgttaccataattactagcggattattcagagatttatactcttctcagtctgttttaatggataatgcatttagagtagcattggcaaggtcatatttaacattaattaataataaaactttaatgaatggaaaatatggcaaggaattaagacaggcattggactgtgtcatggagggtataaattattatagggcttctaatgaagctttaaaagataattatgttgctcagcattggattaaagattgcctatattatttgagtattggttataatgcatcttatgcaggggaatgtgcaattacccgtatattcgcaccacctaatggagattatggtgcaggaatatcaaaattggtgtcaatgtcatggacttggaacaacacagacgaattagctcagttttacttaggtcgaatgggaaatatgtattctaaaaattactggggagatacaaatccattagtatttctaaaagcattatctaactcagacacaataataacaagccgcaatacaaatcagtatggtgtaatggataatgatgacttctttgattattggggtggtttatcaatggctgttgaacatgtttcaggtaaatctccaaaaatgaatgttttaatgtatgctgataaggataatgcatatatttcttcgcttgaagaagtcatgtatcgtgaaattgcttcaaggtatgacaatcccgaatggattaaaggaatgatgaaagaaggatacagtggggctcgttatatgtccaataaatttgttagcaatctattgggttggcaagtgacaagaccggattcagtttcagatgatttatggaatagggtgtataatacctattataaagacaaatacaatctgggtgttaaggattggttaatgagtggaaataatgcctattcccttatttcaatgagtggaacaatgttgagttcaattcataagggatattggaatgctgatgatgcaacaataagagatattgcaaatacttgggcgcaggcaacagttaaaaatggtgttgcatgttgtgattgcagctgtggtaatgtggctatgatgcagtgggcagttcagtatgtaaatcctgatattttagcacaattattgccgaaattatatgatgcaactgaaaatccagtattcttaaacaatactcataatccaaatactaaacctgaaaacaataatgatcctcaagtagaaccttcaactccaaatcctactgatggttcttcttctagttcaactatttctaataatgcaacttccacaaattctaatcagcattcattaagcaatagtcaaaattcacaaggaaatgcggtttctgatgtgggagacagtagttccagtgattcaggtacttttagttctgaaggtgctgatgttaaaaaagcaattgaaattaatcctatcacccaacaatctgcaagtgaagttggtatgagtttacttgcagttttaggagtcatatgtttgatccttatagttggagtcggttattttagagataatggaaaagagaaaaaaggcagtaatttagatgagctttttaatgaaaaattataa

SEQ ID NO: 7024 - DNA, 708 bp, Methanobrevibacter gottschalkii
  source 1..708: mol_type = genomic DNA
atggatgtaataaatatattgtggcaattaggaattttgtctgctgtattgatatttggaattaaattaggattagctacaggattagctaatatgtcgaaaaagtatttggcattagtctcaataggttatggtggtggtgttttaatattaacagagatatcatcatttttcacagaacagattacaggtttaatttattcttataatttcgaattctttttaatcatggccattataatgattctagcgggaattttcactattagggaatataaggtctttgaaaaaaatactgctgcagctacttgtatggcagttgtagctccttgtccatgttgttttggatcaataattgtaagcattatgttagtagctcctgctgtaggtttgggtcttttaaatttaagtgtttatgttgctgctgcactggttttaactattgttttaacatactttgcatcaaactatcttattaaatttataaataaaccatatcccattgttttgggaaattttatgttatttttaggaatttacttcctgttgtcagcattatttttaccaaacatcacgtctatgatacaaaatcctatggatgcaattgaaatagcatctccggaatatctggttgctgtattggtattaatgattattatgatgtttttaggcggattttactttaagaataatagttatttggattaa

SEQ ID NO: 7025 - DNA, 645 bp, Methanobrevibacter gottschalkii
  source 1..645: mol_type = genomic DNA
atggttacaacaattcctggaagtgaaatattaacttctggtttaaatatgatttctcaaagtttacaagttcctgtaattatatttttagtaatttttgcattttttgcagttgttactttaggaagtcttattgcagagtatacatcacgtaaaaaagtctctcctgacctacttgagaaattaatttattcaatatccagagcagattctgttgaggagttgatgagtattattaaaaatgctggaatatatgagaatcaaaaagtaattttagttaaaatattgcgtgcagattcattacctaataaaacaagagaaacattagctaggaagttaattgaatttgaagaaactgaacttggaaaaacaattgaaaaaacagatattattactcgtattggtccaactttaggattgatgggaactttaattccaatgggtcctggacttgctgctttaggtgccggtgatgtaaatactctggctaatgccattattgttgcgtttgacacaacggttgtaggtattggtgctggggcggtgggatattttgtatctaaaattagacgcaggtggtatgaagaagatttatcaaattcagatgctttggctgatgcattacttgacaaattaaaccgctaa

SEQ ID NO: 7026 - DNA, 336 bp, Methanobrevibacter gottschalkii
  source 1..336: mol_type = genomic DNA
atggctagacgaaaatgtaaaaaaagatttagtgataatgaagaagatcccatgactggaacttcaaatcttgtagatgcaatgcttgttattgcagtaggatttttaatttttgttgtaataagttggaacatgcagagtatagtgttttcagacacatcgcatgatcaatctcaaagcgttcaggattctcatatgaatgttactgaggtaagtgaaggtcaagaattaaatgacactttggattctgttgaaagttcgggtcaaggttatatggaaatgggaaaggtgtataaagatccatcaacgggaaaattaataatggttgaaggataa

SEQ ID NO: 7027 - DNA, 2541 bp, Methanobrevibacter gottschalkii
  source 1..2541: mol_type = genomic DNA
atgatagttttatcaattagttctgtttctgctgatgatttacaaacaaaatatgctggtgaagtttcaggggatgttaatgtagttacggttaatccatggaccactagcggcagtttaacatatgatattccttcagaagctaaggatattaggagtgcagatgtttatgtaaatgtttatgggggcagtgctaagaatacttacggagcaaatgctaatgtaagtttaaaaactgcaaatggtgaaaatcaaatagctaatgaatcgttatggattgaagaaggaagtagtgatggaactatttatgctgtgaatgatcatatcaataaatgttattctgattatcagatgcattatgatattactaattctataaaagggcttaatggttcgtcaattacaattaaagtggatactttcaaaatggaaaataaatcgtttgatggtaaaattaaattaattgctttaattttagcatatgatgatggggacagtgatgtaattaattattgggtagatgcaacccaaaaatggacaaaaactaatgttacaacaatattcaatacagaaaaattatcaaacattaatggtgctaatttaatcaatgttgctctttcaagtggtgatggaagttttaaagttaatggtgaaataataggagatcctattgtccatgattctggtaattattatcagtataattcatgggatatttctgataaaatgaaaaaaggtcaaaatactgaattattatccatgaatgtggggtctggttcttatgcatctcttaaaaatgttttgtctgttttaaaagttaatcctattaaagcgaatgtttccctagcaactgagtatgctgatacttgctatgcaggtactaataatacaatttcaattaatgttatctccgataagaaagagaaatattcaatcgaattattagctgatggtaatgttgtaaatagtacggaaattgagttagatggtgaaaatcaaacaattttattcttaactgatcctactgttcgtgaagttgatgattcaactgttaatggggcagataatgttaaagtaaattatatggtaaatgtcagatttaatgatgttgttgtttcaagtgcaaataaaactgtgcctgttttatacaacggtaatcttggaaaagatttgtcttatccatcaagcggatttgcatcatttgaaaatatttcatttactggtgatattgtaattgatattaaaaatgaaagttcatataaatctggttctactggtacaattgaaattttcaatgttaacttaggtaaagattccactattgtaaaaggatttatttatgttccatacaactggtttaatggaaagaaatatgttgaaaatgaaaccatgtttaatgtaacattcaataatcagactatctgtccagctggattccatagggatcaaagtaacttaggaaattatggcaaatatggatatggggtagtggtttatgatgtaacaaattcaattaaaaatggtaataacacatttgtcttaaataaaattaacccaacaccaactatatatccaagtactttaatttacatgtacaacacaaccggtagtgaagtaattaaaaatatttacattattaatggtgcggatctactttcaaacacaagtaacaatgctggaagagtagttcaagcaaattcaaatattaatattaattctaaagatattcttgatgcaaaattatatgtatttgcttctggtgctcaaactaatgagggaaatataattataaataataatgtatttgaaaatgtttggaatggaactagtaaaactacagacttatttgctacagatataactgatattgtaaaagattcaaacgatattcgttttgttgctactggttctacaattttagctttacagcaatttattgtaaccactaaagatgctccaatcaaaactagtgtaaaaccaacaaaattatccactacttatgattcaggtaaatattttaatattaaagttttagataatcataaaaaatcagttaaaggtttaaaacttaaattaaaagttttcactggtaaaaggtatgcaaattattatgtaacaactggttcaaatggtgttgctagctttaaaaaagcttctaaattatctattggaactcataaggtggaaattacaacaaataataaaaattatgttgttaaaaaaactatttcttatattaaagtatataaagctaaaacaatcgttaaagcacctaaaataactgtaaaatttaaaaaatctaagtattttaaagtaaatgttaaaaacaaagcaactaaaaaagcggttaaaaatattgcagttaaactaaaagtcttcacaggtaaaaagtacaaaatctacaagattaaaaccaataaatacggtaccgcctatttaaaaactaaatacttgaaagttggtagccataaagttattgtatattctggtaattctaaatattcaattggtgcaaaaagttcaattaaagtaagatggtag

SEQ ID NO: 7028 - DNA, 741 bp, Methanobrevibacter gottschalkii
  source 1..741: mol_type = genomic DNA
atggcaaaaaatgcgataattactggcggatctagaggaattggtaaagcaatggcattaaaacttggtgaacttggatataatgtagcaatcaactacagaagtgactcatctaagcagttaacagaagatttaattgaagaaattaaatcagaatatggtgtggatgctattgctgttcaagcagatgtaagtaaatttgaggattgtaaaaaattggttgaagctgctgttgatgcattcggtgatgaaatcgatgcattagtaaacaatgcaggaattactaacaattctaacttcattgacttggaaccagaaaaatatggggctgtaatcaacacaaacctcgttagtatgatgcacatgtgtcatttatgtcttccttacatggttgaccgtgatactgcaattgtatgcactgcatctgtaggaggtttgactggtgtaattaaccaagcagattactgtgctgctaaaactggtgtaatcggtttatgtcgagcattagcattagaatttgcaccaagaaaagtaagggtaaattctattgctccgggtatgattatgactgatatgcttaggggagtaaatcaagacgaattaaatgcacttgctgcaacaattcctcttggacacatcggtgaagtagaagaaatagcaggggctttagaatacattttaaccgcaggatatttaactgggcaagttatttcccctaatggtggatttgtattgcaataa

SEQ ID NO: 7029 - DNA, 1806 bp, Methanobrevibacter gottschalkii
  source 1..1806: mol_type = genomic DNA
atgagtccaagaccaattaaaagaagacctcctgaaaaagctgttgataataaaaaagctattatgaatatattaagtattttaaaatgccacaaattcaaattagcattaacaatagtttgtgctgtgatctcaactgcatttacaataatagcccctctgattattggtaaagccacaacaacaatttttaatggaatcaatagcatttcaaaacacacaggcacaatggattttaacacattatttaatcttttaactattgttgtgatattgtacatcattagttcattgttttcatacttacagagcttctttttagttgaagtatctacaaaaataagttatgaattaagagaaagattaatggataaaattttaagtctgccaatggaaagtgttgatgaaaataaaagaggcgatatcctatcaagaattactaatgatgtcgattctctccagcacggaattacacagtcatttttacaattaactacagcagtaattacccttattggcgtatttgtcatgatgttaactattaacatctggatgactcttgcaacagtcatcctcatcccaattgcatttttagtaattagatctattactaaattctctcaaagttatttcttaaaacaattagtctttaaaggttcccttaatggtcagattgaagagacatttactggccatgatatcattcgtatattcaaccaagaagaaatctcaatgaataaatttgaaagtgacaatgaaaattggtttgatcaggaatggaaatcccaattttattccagcttaaatggacctttaatgaactttatttcaaactttacatatgttataatagctgttttaggcgccatatttgttcttcaaaaagcaatagctgttggagatattcttgcattttttcagtacacacaaagtttcacaagaccaattcagcagattacaagagttatgaatcaaatacaaactgcaatggcagcaagcgaacgtatatttgagtttttagattatgatgatgaggaaaatccatcagacaaacagttaactgaaataaaagaaggaattgcatttgaaaatgtgagttttagctacacacctaacgagaaaataatcaaaaatatgacatttgacattaaaaaaggtcagaaaatagctattgttggagaaactggagctggaaaaacaactattgttaaattacttatgagattttatgaaattgactcaggttcaataaaaatagacggtgttgacatcgaagaatatgacaaacattcacttagatcacacataggaatggttttacaagattcctggctattttcagatacaattgaaagcaatatacgttatggaaacttagatgtcagtgatcatgaaattattaaagcttcaaaacaggtttatgttgataactttgtaagaaagctctcagatggttataaaaccattttaaatgaagattcagataatatttcacatggtcaaaaacagttaatcacaatagccagaacaattctttcgtcaaaagaagtattaattttagatgaagcaacttcaagtgttgatacaagaacagaaaaattaattcaaaaagcaatggataaattaatggagaataaaaccagttttattattgcccacagattatcaacaattaaaaatgctgataaaattattgtaattgaaaatggcaggataatcgaaaagggcagtcacgaagaacttcttagattaaaaggatattactataatactttaaatacccaatctgaagacagcccaatataa

SEQ ID NO: 7030 - DNA, 1707 bp, Methanobrevibacter gottschalkii
  source 1..1707: mol_type = genomic DNA
atgaaaaaattaatagcacccctaaaaaacaaaatcggacaaatctttgcaatattcctgtttttagtggttcaagtttattgtgacttgacattaccacaatacacatcagatattgtggatataggtattcaaaatgcaaatttccagtttattattgatactggtatgatgatgcttttaatggttgcaatatctgctcttgcaactgtcggagtttcatatttttcaagcagagtttcctcaggttatgctaaagatttaagaaaaatagtttacagcaaagttttaaaattctcaaatcatgaactaaacaagatttcaagatcttctctgattacaagatcaaccaatgacattaaccagctccaaagtgtgcttgcaatgatttttacaacaatattatttgcacctctccttggagttggaagtatcataaaagcatttgagcttggaacaaatttatcttggatcatttttgtaacttttattggtgttgtaattcttttagttattgttattgtaagagtgcttccttactttaaggtaattcaggaaattatggataagatcaatagaacatcaagggaaattttaataggaatacctgttattaaagcatttgtaagacaggattacgaagaagagaaattcaggaaaatcaatgaagaattctatgatgtcaacatatatgtttttagaaatatgcttataatgcttccattaatgactcttcttatgaatttgatgattgttctgatcctatatttcggagcctatgatgcaatgagaggttctatcctaaccggagatattatagcattcattcagtattcaacccaagttgtaacatcatttctaatgattggtgcatttttcattattcttccaaggttacttgtttctggaaggcgtgtgaatgaagtattaactactgatttaacaataactgatggtgaacttacagacatttcagaaaatcctacaattgaatttaagaatgtttcatacaaatacccgaatagtgaaaaagaaactattaaagacattagtttttccttaaagcccagtaaaaccactgcaattattggtggaacaggtagtggaaaatcaacaatacttaatttaattccccgtcttcaagatccgagttctggtgaaatcttaatcgatggtaaaaatattaaactctttaaattaaaaggtttaagagataaaatcagttttactcctcaaaaggctattttatttcaaggggatattaaatcaaatatgttgactggaaaaaatgatgcaacagatgaagaaattgaaaatgcacttaagatggcccaagttgattttgtatccaatctcaaagaggaagtaagccagggagggtccaattattctggaggccaaaagcaacgtctatcaattgcaagggcgattattggaaaacatgacttttacttgtttgatgattgcttttcagcacttgatatgaatacggagagattaataaaaaacaatttaaagaatttaaaagattcatccattttaattgtatctcaaaggatttcaaccatcattgatgctgatgaaattcttgtaattgataatggggagattattgataggggaacacattctgaattagttggaagttgtgagatatataccgaaatcgttaatacccaaattgacagtatggaggcattatcatga

SEQ ID NO: 7031 - DNA, 645 bp, Methanobrevibacter gottschalkii
  source 1..645: mol_type = genomic DNA
atgaaaaaacttgcaatttttgattttgacggcaccatatttaattcaataactgatgtaataatctgctttaataaagcattatcaactaatgattttcctacattaacttatgatgaatatgttgaaattttaggtggaaacatagatgagcttgtttcatcatgtttaaaagataacaatactcctcaaaatatggaactcgttaaaaatacatataatactatttatggcaaatcaaataaggagaattctcttccttttgatggaatgcatgatgttttattaaaattacaagaaaaaggaatattgcttacaattaattcaaatagaaataatgattcaattagaacttttgttgataaatattattcagacattgattttcaagctattgaaggtcataatcctgtttatccatcaaaaccaagtccttttggaattaataaaatattgaatcaattaaatgtatcaaaaaaagaagcgttatacattggggattcttcaactgatattaaaacaactcaaaatgcagaagttgactgtataattgttaaatggggttatgggaatcaaaatgattatggaaatgaatatgtactgaatgtaattgaaaaaccatatgatatacttaattatttttaa

SEQ ID NO: 7032 - DNA, 351 bp, Methanobrevibacter gottschalkii
  source 1..351: mol_type = genomic DNA
atgttattcgtacaatatccaaaatgctcaacttgcaggaaagctaaaaactggttagatgaacacaatatagaatatgaatcaaaacacatcgtagaagataatcccactgcttctgaattacgtgaatggtggaaaatatctgatttgccacttaaaagatttttcaacacaagtggtatgaaataccgtgaattaaaattaaaagataaacttcctgaaatgtcagaagaggaacaattaaatcttttagctactgatgggatgcttgttaaaaggccgatagttgtaactgataattttgttttagttggttttaaagttaaagaatgggaagaaaaattattatga

SEQ ID NO: 7033 - DNA, 372 bp, Methanobrevibacter gottschalkii
  source 1..372: mol_type = genomic DNA
atgaatgcaaatgctcaattaatgaatttcccaatagataatgtaattcaattaattaggaaaaaatgggttgtacaaattataaatgatttgttctttggtaaaacccgtttccatgaatttaaagaaaacaaacctaaattatccaacagagttttaagcagttgccttaaagatatggaagataatggtttaattcaacgtattgtagataaatacgataaaaagaatgttagatattacctaacagaaaaaggccaatcgttaaataaaattatttatgaaatggcaatttttagtgtagattcagaaaactatactgataaaactaaaactgaactcaaaacagtttttaaagaaaaattattataa

SEQ ID NO: 7034 - DNA, 1278 bp, Methanobrevibacter gottschalkii
  source 1..1278: mol_type = genomic DNA
ttgttagatataaaattattcagagaaaatccagaaataattattgactctgaaaaaaagagatttagagacacaataaatgtcgaaaaagtaattgaatatgataatttatggagagaaggtgaaagaaaacttaattcccttagatctgagaaaaataaattatccaaatcatttaaaaaagcaaaagaagaaggcaattttgaagaagtaatagccaaatccaaacaggtagctagtgatattaaagaactaagtgctaaaaatgtggaatatcttaaacttagggatgattatagatataaagttggaaacctacttgatgaagatgttcctatttctgatactgaagatgataatgttgtagttagaacttacggtgagattccggaacatgatttcgaattattaaatcatgtagacttaattaaaaaaatcgatggtgcagatcttgaaactgcagcagatattgccggggctcgtttttactatttaaaaagagatattttacatttgaatttggcattaattcaatttgcattatcagaacttgaagctgaagggtatattccaatgcaaaccccattctttgtaaaaggtgaggttgcagcagagacatcagagcttggtgaatttgaagaaacattatacaaggtagaaaatgaagacatgtacttaattgcaactgctgagcaaaccttggcagctcttcacagaaatgaaataatatcacctgaagatttgccattaaggtactgcgccctttcaacttgctttagaaaagaagcgggatctcatggaaaagatactttaggaatatttagagttcaccagtttgaaaaaattgaacaattcatttactccactcctgaagattcaagaaatcagcatgatcatttaatggaagtaaccgaaggaatatatcaaaaattaggcattccatatcaagtaatagctatcgtatcatctgctttaaatgataatgccgctattaagtatgatttggaggcatggtttccgggttctaaagcatttagggaattagtgtcctgtacaaactgtaaagactaccaagcacgtaaaacaaaaacacgttatggaagagcaggttctggagatgctcaggttttacatacattaaacagtacagctattgctactgaaagaactatgtgctgtattctagaaaactatcagcaggctgatggcagtgttaaaattcctgaagtgttagtcccttacatgaatggaaagactgtcattgaagctaaatattag

SEQ ID NO: 7035 - DNA, 633 bp, Methanobrevibacter gottschalkii
  source 1..633: mol_type = genomic DNA
atgaaaacaatcattgttaatgcaagtccaagaaaaaaatggaacactgctgagataatgcaatccgctcaaaaaggagcagaatctgttggagctgaaactgaatattttaatttatatgatttagtatttacaggttgtcgaagttgtcttgcttgcaaactcaaagaaaaaactaaaggaaaatgttactggagagatgatttaacagaagtcattgaaaagattttagatgctgatgcactgcttattggttctccgatttactttggccaacctacaagtgaattcagggcattggttgaaagattaatattctgtataatgtcttatgatgatggatcaagctattttacaggcaatgtaaatgtgggtattttttacactatgaatgcccctttggatttttatgaacaagctatgaaagaaagtttatccagtactgagtttttattctcatttttaaacggagaaattgttgcttatcctgtttgtgatacaattcaggtaagtgattattctaaatttaatatggctggtttttcacaagaagctaaagaaaaacagtggattttacaatttccaaaagatttggaaaaagcttttgaaattggtgccaatttaagtaaataa

SEQ ID NO: 7036 - DNA, 876 bp, Methanobrevibacter gottschalkii
  source 1..876: mol_type = genomic DNA
atgtatacattttataaaaatgaatacatttatatatcatgtcattacaatattgtattgtatacaaaaatatattttgtaatacaagatggatgtgatattgtgacaaaccaaaaaagaactagaaaatttgcattcggaaacgaaagatttggaggatcatatactccaggtgaatttgaattcaatttcccggaagatatgacacgtgaagaatttgaaaaaatatttacctcaagaatgcaagctttacacaaaaaaggtaatgatttagcagaggagatgtttgatcataaatcaagaaaagaaaacttaaaacctctaagtattcgtgtaaaacagcacacaaaagaatttttcaaaagccagtctattttatctccaagagatgtgcttgaaatgtatgaagaatacaataatggcagtgaagcttttattaattcattaattgaggatcaaaaagaacttgaaaatgaattaactgaaattcaagaaaaactacataatgcaaagctattcagagataaactgtctgaaatgaaacctccaagcgagatttcaactgatgaagataatataattaaattacaaaataaatatcaaaatagtgaaattaaatctattggtaatgaaacttcggttggaaaagctgaaagcgatattataagggatattcaaatgtataatactcttgatgttcatatccggaataatcagtatttaattatcactgtttataccaatgctcaaccaattctatattatttcaaaaatgaatattgtgaagaagatattttaaatgttatttcacgcattgaagagtattgcgaaagcaatggcattgattttagtagaagtgaaaatgaggaaatttaa

SEQ ID NO: 7037 - DNA, 2235 bp, Methanobrevibacter gottschalkii
  source 1..2235: mol_type = genomic DNA
gtgagaaaattaagcaattcaacgaaagtattattattaatattggtaacgttcctttcactgaccgttgtttcagctcatgatgcaaatgcaacagagctgataagtgataattcaaacggaacgtgtattgtatcatcagctgctgttgctgaggataatcaaatattaggtgaagttgataaacctgatctggtggtaaatattacttcggataatattgatgattattttataagggggcgattaaaatccatttacgcatatgctacattatgcatatctgaagatattgatgatttgggcatattaacaataaaatcaaataatgttacaattaatgggaataatcacacattaaaaaatacggttttcagtattgaagcaaatggcgtaacattaaacaacatcattttaaatataactgaaaaatttgaagacaatgaaaactcagcaattttaatatggagagcaaataatgtgaatatttataatacaaatattaattatattcctccacaagatactaccgcatatggaatttattctgaaggaacaaaacgtagtttaaatagtaatttaaaaattattaacaacactattaactttgaaggaaacaacccatctgaaggtagggattatgctgtttgtctggaatactccccaaattgcatatttgaaaacaatactgttaatgccagactgccattaagaacaatagcattcgatttaacaacagcatatttatattcagaatttgcactggcaatggggataagcaactgcaataattcaacatttaaaggtaacattattaattgtgatgttaatgaaagacctgaatgcagctttccaacattggatgcaatattcatttgtgattcaaaagactgtgaattcatcggtaatcaattgacgttaactgatttcaaatcatataaaaatcaaccaaattacttgtatggtttagatatttatcgagctgataatctacttgttgaagggaataatattcatgttgaaacaagtggaggaacttttgctgcaggaactgcttatccaatacaattaacagggcctgcaagtggaataatcattaaatataatgaaatattttcaaaatgtaatggtccaaatattggtatatactcacaaaacttcaatggtgaaaattatattactatcctgaacaatcatataaatgttactggacttgcaggaaatcatagttgggcactggtagcgggaattgaagcacaagacgataatgatattataatgaataatattatagaaattcataatattcgcaaaaccaccaaagaggataacttatatggaatatcatattcacaagaaacaaaagggacacactcttataaagtagttaataatactgtaataagcgacggatactacttatctcatatgttagatgcagacaatacaacagtaactaataatacattagttcgtacatataaatatgcagataccaattatgatccattcaaacgtggggatgcaataggtaaagacactgatgaaatcaaaaataatgatttttcaggaaatcgtgttatcacaatatttgaatatgaaattgaacaacagggcgatgaaattgatgaaggggatgaattcaactatgaaccaccaactaatactggaaaccattccaatattattaatggaagtggaatttctccattaaaaccaggattccccggaggaaacccattaattcctggaagcaattctggaggaacaataaacaccggaggtaatggtaatgttggaggattcacaaatcctgatgttgcagatggtgataaggggtatattggtcttcctgacttaagtggagatgatggtaaaagtttatcccgtaaatttaatcagagagctaatgttaaaacagttaattcatttaataatcaaggagatgcaagtaactcttataacaatcttgtatcaactgaaaactcaacatctagtgaaagtcccagtgttaatggagtaaccgctagtggaactatttctaaatcagcatcttcagccggtgcagctggaagtagtggtgcagcacaggaaagtctaaaagcatatgaaataactaaaaatattgtagaaaatggtccttatgatatgataagattcataggattggctataatatgtgaacttctacttattgttggatacaaacgaaaagaaacaaaaaatttagattaa

SEQ ID NO: 7038 - DNA, 5568 bp, Methanobrevibacter gottschalkii
  source 1..5568: mol_type = genomic DNA
atggaggcaataataaaaatgaaaatcaaaaaatacatgttaataatatttattttattgacactggtgaatataacttgtatcgctgctatggataacgatacttttacaacaaatgttagtcagaatatttccaatattaatacagatgaacaaataaatatcctaacacaaaaaacagaaaatatcaatgaaatacaccaaacaacagaaaatgatcaattatcattctctatgcatccgccagacgataattattataataataaaaagggtgaaatttatcatacacaattaatattaacaatcgaaaatttcacaacattcagtactgcaaatactacaatgaatgtccatctagattgggacttatacatgtcaaaagattattatgatacatgtcagatacgaatatatgaaaacaacacaaaaatccatgcatttaacgtatccgaccaaaataatgctgaatatgaacacaatgcccatcaaacactagatgtaacatttccatatacaatcaaagatagaactgaattgaaagccgtgattttacaaattgaatcaaatacattaagttttgaagaaataaaaaaaattaacttaactaatttaaacaacaataatattatagtcaataatacttatttttcaaatgaaaactggacaaatcaaatcaaatacttaaaaaaagcaataaatgatgcgccaacaaatagtataatttacttaaacaatatggaaatactgaatgatgaggatataacgatcactatcgataagaatatcacaataatcgcaaacaacaccataataaatggattggatcatggaacaatatttacaataaactcccaagcaacactaaccttaataaacctaacattcaccaacatctccactaattacataatgcagaataatggtaacttaaaaattgtgaacaataatttcaacaacaatattggaagattaataagtaataatggtaatttaactatagaagacagtattattgaaaatacaacaaaatactatgcattattccttaacaatatcaaaacaacatccgaaaacggattaatatacaataaaaaaacactaaacattaaaaatactacttttaataatattaatttgaatccattaacaaacaataataaaaaattagattggaatgcaataatcgttaactatggtaaagccattgtaactgactcaaaatttacaaacatcaattatagaacaatatacaataatgcaatacttgaaataaaaaacacaataatggaaaacataacctcaacagacattttttctcatacaatacaatacacccggcaattaaataatactggaaaatatttttcatatatacgggcaacctcatctcttgaaggaggagcaatatacaacatcaaacactccacaataacaaacaccacatttcaaaaaatcacaggaaaaagtggtgcaatatacaataaaaaaacactaaacataacaaacaccacattccaatcaataaacaatggagcaatatacaacaacgaagatttaacaatatcaaactccaccttccaaacaataagcggagaagcaatatatactaaaaatgcaaatataaccaatagtagatttcaaacaatcagtggaaaagcattatacaatataggaacactaaacataaacaatatattaataaacaaatccacaggaatacataatgatggaatattaaccataaataatacgataataaataaatgtggaggcatatataataataaccaattaaatgtcaataatacactatttaatagatgtagtggggttggtgcagcagtatacaataataatattgcaaatattgaaaactgtgaaattatagaaaaccatggagatgctgataccaagtggagatatgtagagcagcctaatggtcaagtattttcatatattgttgaagtatattccggtgtaatttataattataaaaatgctaaaataaacattacaaaatcaattattaagaacaatgatatttcagaagaaagcaatggtaactgggatacatattatggaatcattaaaaatgatggggaaatgaaaataactggctgtattcttgatggtaataaaccaagagagtggattgctttttggggtggtgatggttcaataaacatttacaatactggaaagttaacatataaatacaattacctgctaaatacacaatattataccggaaatattcataaaccaagcagttttttatttaatactgggaatggtgcatgtgatgtcaattataatttttattgtttaaaaccatccagtatttttgcaaatgcaaattataattattattttgttccttattttggtgagtatattccgattaagcttaatgaaaccagaaatatcactttgtcattaggtctgaccaatggtgctgattatatgaccttcaatgattgggacaaattattaactccaggattaaacgcaaccattacaacaattgatgaaaacggtgaatacaaaaacataacaacacttctaaaagacaaatacacatttaatttcaactacacccatgttaaaggcgaatacataatatacagcaatatcttgaattttaagagtagtgctttggttgatgtgggaaaagaatttgcagaaatggaagtaaactacaataacataacctataaagagggcaacataacattccatattaaaattaagggaaatctcaccacacaaccaaccggaaacataactttaagatacaacaatgaaaaaatcatattgaacctaacagattccgaatgcagcttcaccattcctgaaatattaaaacctgacaattatactatgaggattgattatgatggcgatgatgaatattttaaaatactaaatcagtattttatttttgctgtgtataaaatacctaccaatattactgtagttgctcccgaagttaaatatggtcaaaccggtctgataacaatcaccatcacaccaggtgaggcgaaattaaaaggtaaactatacattaacggaatatacactaaaaatgctgatacacagggccataggattttgaggattaataggaatcctggtgtgtataatattagtgtggtttttgaaagtgatgagtattatatgggtggtgttgcaaacactacttttattgtaagcaaatggaaaaccaatttaaccttaaccggcaaggatattaatgctggtgaggatgcaattgtcaatattacaattgatcctggtgatgttcgaggtgatgcgatattgattattaatggtgtgaaccaaacaatatttataaacaatacagtaacacctattactattagtaatcttcagaacggaacatatcatgttagtgtttattatccgggtgataaaaaatatgctccatctaatgccagcactacttttactgtttcaatgaaaacaacaaaacttacagtaaatatcactaataatgatgatttaaccggcaatatccatgttaatactgattataatgattgtactggtgaagtgggagtgtatattaataatgataatgttttgattatgaatttgactaacgggtcttgtaatttccctgttaaattcaaaagaggcaacaattacatctacatacattatattggtgataaatattattcctatgcctcttggaacactacaagatttattgagggaaaagcaattatcaacacaaactacaaccatacaatcgatgagcaggaactaggttattacattataaaaatatttgatagtgacaataacccttatgaatatacaaatttcactgccttattccagaataaagaaatacatttaactactgatgagaatggtgttgcaaaactgcctatacaatgcagagccggaacctacaacataacagtcaaatacaaaaatacagttaaaaagagtactgttgtggtgaatgcaaccagaatggatattgatattaaggacattcttgcaggtgaaaatgaaacaatcacaatcagattaccttacaatgcaactggaaacattacatttaaagtagataatactgtaattagtaaaagattgagtaatggtcttgcgattgtcaatatttctgctttgactttaggagaacataaattaacagtattctatagtggcgacaataattatactgatcagaaaatagaaaaaatattcagcatcaaacattccctatcccaaatcattgcatcatcatccggtgtcacatatggtgaggatgttattgtcacttcaaaggttacatcaggcgcaagcggtagtgtgacatttgtccttaaccatgaaacaataactgtgaatttaactgatagtcaggcaaatgctgcatttactaatgttcctgcaggaaattatgttataactaccaggtataatggtgataagacatataaagggtctgtttgcgatgttaaaatcaatgttaaaaaagcagtacccaatataatggttaatacaagtcctttactgttaaatgaaaatatcaggattgatgctttgctaaacaatgatgccatgggtaatgtcaccttccatattcagggtcagtattcaccaagaaacagaacagtgaataatggtgtcagttcatggctaatcagtccattaagtaaaggttcatataatctgattgtaacatactgtggtgacagaaattatgaatccataacaacttccaaaatacttgtattgaatcagaatgagactgtcttgaatgttaatattggtgatgtaaatgcagatgatgatttaatggtatatgcaacactaaacagtgacaataagtataaaataacaggcaacattactcttgagattaacgataaatactataaggttgttgttagtgatggtgtgggattaagaaatcttggtgagtttaaagccggcagatacacttatactgcaacatatacaggttcagatttgttttcaatgtccaccattaaaggttcctttaatgtaagatgcaatagctataagataacaggaaataaaaatattgttcagtattatggcacatacaagtcttataaagtgcgcttattaaacaataatgtccctgttaaaaaagcaattattaccgttaaaataaataagaaaaacattaaagttaaaactgacaataaaggttatgcaacattaaaacttaaattaaaggccggtaagtatagcattactgcttcttacaaaaaagtcactgttaaaaataaggtaacagtgaaacctatcctgataacaaagaacatggtggttaagaagggtaaaacagtaacctatactgccaaactgctaaacaaatatggtaaaaaggttaaaaataaaaaggttatctttaaggttaaaggtaagaaatatattgttaaaactaataagaaggggattgccaaaattaaaattaaaaagctgaaagttggaaaatataaaatacagagcatctatgggaaagttaaaaacaccaacaccataaaaatcaaatag

SEQ ID NO: 7039 - DNA, 2589 bp, Methanobrevibacter gottschalkii
  source 1..2589: mol_type = genomic DNA
atgaaatacaaaaatattttatttttttcaatattcatcctgtttattgtaggaatcagttgtgtttctgcacaaaacatagatgaaattggtaattcatcatctgatgacacgattagtctagatgatgatataagtactatcaatattgttgataatgagatttcaactaatgttgatggagaagtgatttgtgatggtaaatcaactcgagatacatattcttgggctgattttaaatcagaagtcgaaaatgcgaatataaatacaatagaattaaataaaggaaatattgctccatcaagcgatagttccaatcagattagtataaaccatgacataaatattattggaggttatggttattatatcggtggtgacagttggagcagttcaacaaaatacaactatattccaattattacttctggatctaatctgaatgtaaaatttgaaaatgttacattccaatacttatctgacaatgtttttatgaaattgatgggtaacggaaattatacatttaaaaactgtgtatttagcaatattaatgcaactggatcacatcagtcagtaatctggttaaattatggacatgcattaattgaaaactgttcttttataaaatgtaactgtagtttcggtgcggtaactaattattattcctcctggggtactgctgttaacaatgctagaatgacagttagggattctacatttaaagataattatgctactactgaaccgggagcaattaataattgcggacaattagttgtttatgattcaacatttgaaaataatgaagcagtttggtgggcaggagcaatccatacacacagtaatgcaaatacaaccattattcgttctaaatttaaaaataattatgcaggatggaatggtggtgcattatacacatacagttatttaactgtcatcaactcaactttcacagccaatactgcaaaaaccaatactggtggaggtgctattggagcaagcagttatatgagcacaccaaaagttgttattaaaaattcagaatttaaatacaacactgcactaacaggtaatggtggagcaattgttataagttcaggaacattgaatgtggaaagttcagaattcacaaataatactgcacttgaattaaatggtggtgcaatttccagcagcagctgtactgcagcaatctctaactgtaaattcataaacaatactcttaataaaacagcaggaaaaggaggtgcagtttatggtactggaaaaggcagattaacagttgataaatgtgaatttattaacaatgctgctaaagacaataactctggccatgcacttgcatattattatactggaaatagcaatactgcagcatacttgacctataccaataatatattccgtggaaaggataatggtactgggtctgtttttgtagctaatgataaagtaaatattgttcaatacaataatagtattgatgatattactaattacattgaacctgaaaacaatacaaatggcactagcagtggaaatataacaatccctataggcactgatatactttcatctagttgggatgttatattgggtgacaatttaaatggtacctctgttattgcaggtaattatattctaattcctgcaagtcatgatttgtactgttacaattacatcacccaagatcttgtttggaatttcacaaccgaatttggttatttccatgagttattggtggatggaaatattgtttatgcacctgcatcatgggacgcattatatatctttaacttgacaaatggtgaatctttaacttattcaaacatttatcaaggatccagcctctataaaccagtaatttataataatactctttatgtaagtagtgaatacggttatggtattaattccaataattggatttccatgattaagcatgattctgattactactactatggcagtattttagagctaaataatgtatcttatggcactcctgcaatattgtcccaaccatatatacacggcaatactctttatgttaacaccatacaaggtttaattgcctataatttagttgatggcactagccataatgttagtggcactgtaggtaatcctattattgatgccaatggcaatatctgtattctatcaaacaatggtgctgctatttcattacttaattccaatttagaagttgttgcttcaaccacactagatggtacatgcaacaagttaattagtgatgctaatggtaatatttacactgttgataacaatggctatatctattatgctacatacaccagttcatcaataacctgcagtaaaactaaattcaacattaatcctgtttcatcagctatggcatgttatgatggtaaactttacataggagacaacaacggaatactatgggcatttaatactagtaaactagatgaacccgtacttaataatgctgtatatagggtttttgatgctggttctgcaattgtaggaaatattgctgttgataatgatggcaccatatatattggtacagataatgggcatttttatgccatagaatattag

SEQ ID NO: 7040 - DNA, 4578 bp, Methanobrevibacter gottschalkii
  source 1..4578: mol_type = genomic DNA
atgagattaaataaaagtgttttatttgtatttatgattatttttttattgagtttgaattttattgttgcaaaagatattaatgaaactaacttaaatgcagattcttttgaaatagattatgatgattcaatttctagttcatatgatacaaatttacaaaaattaaatcaaaatgatattgaaaaaactgatgaatcattagaaaaatcagataattcatcaaatagactattaaacgaagacaataataatgggttgttgggtgatggtgatggtttaaagcatctttatgttgcaccaaatgctactggtagtggtttagatgaaaatgaccctggagattttataacaatattaaacaatactgaagataatactgttatccatatgcttgaaggaacttacctactttcaaacattactccaatttatcaagatggttactatcactttatttcaattaaatcaaagaataatataagtattgttggagagaatccagataaagtaaaaataatttccaatttaacacctaaaaaaagaacttcgtttatatttagtttgcataatactaataattttaaatttgaaaatattacattcagtgctattaaaaaagatcccaaaaaagaaaagacgaagtcttatttccttttgaataagaataattatatttttgaaaattgtaaatttatagatgcctattccaaatttgctattatagaactggatgagggtactcatctaactattaataattgttattttacatcaacggatggacatgttggaagagaaatatctccaaggttattttgttcagtccttttaaataatactatttttaaaaattgttgcagatattctgattataaaataggtgttatgggtaattatagtatttttaattctcaatttctagaatatgatgataatccattattgtattttcaaccatattgtaatttgatttttgagaataattatgttgaccacccatacaattttgtttttttccaaccatctgatcattacgagggttcaaatagaatgttttgttcacatactactcttacttttttaaatggtgaggatagtgttaatgttaattgtggagatgttattaatcttaatgcttctttagtagatgatttaggtaatattcttagtctttataaattgaagttcaatctttttgaaaacgaccttacatatactaatggggtttatcaaaaagaagttactgttcctgatgtgcctggtgaatattacattgatgttagtgatgaaatgttcactaaatatctgggcaattgtacagtgaaagctcctatttttattgttaaagaagctcctgaattcctatttgatgataaaaacagcagcacttatggtgaggatgttattatcaatgtggattcactggatattccagatggaaagttaactttcagattcaacaatagtgaaataatcaaaaacatcacagactacagatgcagtattaatttgggagtattgcctgcaggtgaatacgcaattactgcttattatgcaggtgatgaagtttatggagctaaatcatacacaaaaacatttaatgtaactaaagcaaaatcaacaatcagcttaactaaaggccatgttgatgccattaaagataatggtgatgttggtttctacttcagcacaactgaaaatggcaatgaaaacaccataggtattattttaccggataatgcaactggtaaattaacatttaaattggacaccgatacttatagtattgacattaccaaaagaaaagtactgctcggcaatttggactatggtagttatattattgctgttaagtatgatggtgataataatttcaatgaaagtgaggagtgtacttttaccttagttaacagtaagccaagtgttgatttaaccttaaattacagtaatattaattacactaatccgtttaatgttaatgtaactttaaatcaggatgtggttaaagatacaatcatctttgaagttagagatttagaggacaatcttattaactcaactactggaattattagcaataaatctgctaatgctactttcacaggtctaaatgcaggtgaatacaatatcattgcaatttatgaaggtgatgaaacttattgtaattccattgcaagtcaaagatttaatgttaacaaaattgatttggaatactttacactaaaagctgacaaaacaatcagtattcacgataatattaaagtggaagctttaattccagtcaatgtaggtggcagcataactttcagaataaatggtcaggacatgactgttgagatttttaataatcgtgctgaggctattttcgataatccgggtttaggtaactatacagtttatgcgacgtttaatggtgatgataattataatcctcatgaggaaaacattaatatcactgtcattaaagccgatgctaatttaagtgtttctgcagaaaatgttgattggggagaagaattagttgttgttgttaaaaccgacactagattcacaggcaatcttagtgttaaaatagatggtgtggagaaaatagttgaaatcacagaaggtcaaggtaatgtttcattttctaatcttaaagcaggtaaatataatgttgctgttgaattcaatgagagcgaatttttcacttcatcacaaaaagacattaatgtaactgtcaataaaatagattcagcattaactctggataatgatgagatggtctttgattatggtggatctgcttcagttacatttggttatgatggtgcagttaatgttacagctgaagtagttaatcatcctgaggctgtaattaagattaatgaggattgtattgttgtttctgatttggatgctgggcaatataccttgaaagtcactactgttcctgatgaaaaccacactggtgtagataaagaatttgaagtgactgtcaataaaatagattcagcattaactctggataatgatgagatggtctttgattatggtggatctgcttcagttacatttgattatgatggtgcagttaatgttacagctgaagtagttaatcatcctgaggctgtaattaagattaatgaggattgtattgttgtttctgatttggatgctgggcaatataccttgaaagtcactactgttcctgatgaaaaccacaatagtgtggataaaacaatcagcattacagtaaataaggtaaatgcaaacatcaatattgaggatattgttttagactatggttctcatgacattacagtatttacaggtgaaggtattgaaagtgtcaatgcaaatatcttaaatcaaagttatgcaaatgtcattgtttcaggcaataatattagcatttacaatttaaatgtaggagaatatgttttacagttaattgttaatccagatgaaaaccacaatagtgtgagtaaaaatgttaaggtaactgttaataaaatagattctgttattgatattagaaatgaagtggtcttcacatacggtgatgctggttattgtgatgtttatagtgagggtgctgttgactttactgtaaaagtaatcaatcatccggaagcagttattaacatcaacaagaatggtattgtcaaggtttcagctttaaatgcaggaacatatattatggaagttaccactaatccggacactaatcataattcagttaccggtagagttaatgtcactgtaaataaggctgattctaaaatcattattccggatatcatatttgattatggtaattcaggtagtgtgaatattcttgtttacaatgcaactggaattggcaatgtcaatgttgttggtcatcctgaagccataacaaccattaatggcactaaaatcagtgttggtggtttgaatgctggatcatatattttaactgctactgcacttacaggtgacaattataatcctgtaaacgtcagtgccaatgttattgttaataaattaaccaccattattggtgttaaaaaggttaatggtgtttacggtagttccggtaagcttattgttactttaaaagacagtaatggtaatcttttaactggtaagttgttacgtgttaaagtaggcagtatttcaaagactttaactactaatcgccatggtcaagtctctgttaatgttgcatatttaattcctaaaagctataatgcaaaaatcagctttgctggtgataatgatttagtcgaatcatcaaatactgctaaagtggttatcaagaaagcaactcctaaattaacagccaaaactttaaaaacaaaagttaaaacaaaaaataaaaagcttaaaataactttaaaaaacaaaaaaggaaaagctcttaaaaatacaaaagttactttaaaacttaaaggcaaaacttataaagcaaaaaccaataaaaaaggaattgccacatttaaaataacaaaattaaataaaagaggaacatttaaaggaacagttaaatttgcaggaaacaaatacttcaaagccataaacaaaaaagtaaaagttatagttaaaaagtaa

SEQ ID NO: 7041 - DNA, 486 bp, Methanobrevibacter gottschalkii
  source 1..486: mol_type = genomic DNA
atggaacgtgaaaacttatcaggtatttttagtattgttctcggtttgatattcatattattcccaatgttttcatcaaatctaatttcaataattgttggtttaagtttactattctttggtctgtcagcggcattcatgggttttaccatgagaagaaatggaattccatattctttaatatcaataataattggaattgttgcagttattttaggatttggatttatattctatcttgatgctctttcatttttggttggattccaattatatattgtcggatttattatgattgtatttggaataaccggattaatctcaaaattaaatagaatatcttcttttacatccatacttgttttattaatgggtattgtatcaattgctcttgctatatttgctctcaaccaaccaatatacattgcaattattattggtatcgttttaattattgaaggagtatctttccttttaaatgattaa

SEQ ID NO: 7042 - DNA, 519 bp, Methanobrevibacter gottschalkii
  source 1..519: mol_type = genomic DNA
atgtctgattttgaagaaatcataaacacaagaagaagcgttcgccagtatcaggataaggatattgctgaggaattaatactaaaaatcttaaaagctggaatgcaggcacctggttctagactcggagcagaaccttgggaatttgttgtaattaaaaacagggaaattttatcgaaacttggtgaaattaagcctcgtgtaactaatgctccagttgccattgtacttgttgccaatattggaagggcattttataaaactgtttggcaacaggatatgggtgctgcagctgaaaacatgctgcttgaagcagtgaatcttggattgggtggtctttggaatggagttgcgcctgatgaagaaaaaatggctaaaatcgggaatataatcggaattgatgatattgctgatttaaaaccattttgcattatcacattaggatatcctgctgaaggctttgaaaataaattcatggataaatttgatgaaagtaggattcattatgaaaaatactga

SEQ ID NO: 7043 - DNA, 1176 bp, Methanobrevibacter gottschalkii
  source 1..1176: mol_type = genomic DNA
atgaaaaatactgactatgattttgaaagtgtcattgatagacataacactaattgtgtaaaatgggattattttgatgatgagttgcctatgtgggtagcagatatggattttaaagtagctccggccattgaaaatgctgttttaaaaagagcgatgcatccgatatatggttatacaattgtttcagatgaactattcgaatcatatattaactggtgggatagaagatatggatttaaaatgtatcgggaggacatgttatattctattggtgtaatgccgtccatatcttcaatgataaggtgcttaacagatattggagatgggattttgattcaatctccagtttatcatgtgttttatcatgtgattgaagagaataatcgtaaagttgtagaaaatgaattggtctatgaaaatgggagatataatattgattttgacgatttggataaaaaattatcaaaagtaaaaatgatgattgtttgcaatcctcacaatccaattggcaaaatttggtcaagagaagaattagctaaaatcggttatttatgcagtaaatatgatgttattttagtatctgatgagattcactgtgatctaacagatcctgatatcagatacaatccttttgaaatttcttcaggttatgaaaaagcagtaacttgtttatctccttcaaaatcatttaatattgccggttttaaaagttccattgttcacacaaaaaacactgaattgtttgagaaaatcagaacacagctgcatattgataactcggattcttgtaatgtatttgcagcaagtgctgtaattgccgcttataatgaatcagaagaatggttaaatcagcttaaagaagtgttattcgaaaataaacagattgttaaagaatatctggaaaaggaattgcctgttataaaattggttgactgtgatgcaacatatctattgtggcttgattgttcagcattaaatgctccctcaaaagttttatctgagtttttaagaacaaatcatggattgtttttatctgcaggtattgattttggtcaaaatggtgataacttcttaagaatgaatattgcctgtcctcaaatactgttaaaagatggtttggaaagattaaaagctggaataactgctttgagttatataaataatggattataa

SEQ ID NO: 7044 - DNA, 801 bp, Methanobrevibacter gottschalkii
  source 1..801: mol_type = genomic DNA
atgattgagaaatccatttatgaaaactaccaaatcgattttaacgaagagatgacaccagccgatgatgattatatttttatttttaatcatgaccgagaattgtacttaaataaagataaacaattagcgaatagtttagatgattttgatgttaatttttgtttatatatcggaaaatataacaataaaaaagcttttgtagcaaatgttaatacttcagattcattttatcaacttatggaagtttatgaattcaataaaagtctttatttgatgggtggaaaagctgttcttgtcaacgattggtatatatcacatcaatattgtggaagatgcggtactaaaactcaaatagatgaaaaagacatgatgttaaaatgtcctgagtgtggtcaaaaccattatcctcgcattgctcctgcaattattgtagctattagaaaaggtgaagaattgctaatggcaaatcacagttatcatgaaacaatacgatatgccctaatagccggttttgttgaacctggcgaatcaattgaagaagcggtcaaaagagaagtttcagaagaagttggaattgaaattaaaaatttagaatataaaagaagccagtcctggccatttccaaactccttgatggtgggatttactgcagaatatgaaaatggagatataaaagttgatggagatgaaattctaaaagcaaaatggtttaaaaaagatgaaataattagatatgattctgacatcagcatatccgattggttaattcaagattttattgattcagccaatccatga

SEQ ID NO: 7045 - DNA, 507 bp, Methanobrevibacter gottschalkii
  source 1..507: mol_type = genomic DNA
atggtatctaaaaatatggaaaaagcattaaatgctcaattaaacgctgaaatttactcaggatatttatatttatccatggcggcttattttgaagatgaagacttagcaggatttgctaactggatgagagtacaagcaaacgaagaattagggcacggaatgaaattctatgattatattattagaagaggatcttctgttactttaactgcaattgatgcacctcaaactgaatgggacagtccacttgcagcattcaaacatgttttggaacatgaacaaatggtaactggtcttatcaacgatttagtaaacatttccattgaagaaaaagatcatgcaacaaataacttcctgcaatggtttgttgaagaacaagttgaagaagaagaaaatgcaatggatttacttgcaaaagctaaattggctgatggagataatagattaatttacgaattaaataaggaattggctactcgtgtaccatctgaatctcaagactag

SEQ ID NO: 7046 - DNA, 648 bp, Methanobrevibacter gottschalkii
  source 1..648: mol_type = genomic DNA
atgaattatcccgatggtcccaccagtgaagctcaagttgattcaactgaatttgatgcagatttattgcatgaaaatgatttggggtcagtacacattcatggtcattttggcaatgttgaatctgaagttaaaatagcttatttgattgggatgcatcctcttgagagcaaatctcacagagcattatttgaaaagctgatctcaaaagaagatttgaaatattgttattatttgtataatattaatgtttcaaataaaaacagtgaatctgaaggaagaaatgaaggtcaacttttggctcaggaatctgttcaaaaagatattatttctaaaaattatgacttatttttagatattcactcaaatagggggcctgatggtcctggagattataaaataactaattttcttttcgctccaggttttgatgataaatccagtaaattcatgaatgaaatacttgatcaaattgatgaaattgtatattatgcacctaaattcagatcaagtcctagttatattactgagccaacagcagaagcaggaattccaactttagtttatgaatgttattcctcagaaccaatggaatatacattgtatttggctgaaaaattaatctctgttgttgatacattattttaa

SEQ ID NO: 7047 - DNA, 981 bp, Methanobrevibacter gottschalkii
  source 1..981: mol_type = genomic DNA
atgataattagagcaccttcaagaatacatatgtcccttattgatttaaatggatcatataggagagttgatggaggtattggattagcattagctgatccccaattcgttttagaagttaaacagattgaaaatggaatagaacttgaatttgcagataatgtaacagacgaggaagctatcgaagaatgtagggaaaaaatccctgatgcagccagaaaaactattgaacactttaatattgattccggttttaaatttattgttcatgaaacataccctccacactccggatttggaagcggaacccaaattgctatttcaacagcccatttaataactgaaactatggatattgaagtagaaagcagagtacttagcagtgttgttggaagaggaggaacctccggtattggaacatatacacatgatttgggtggatttatcttggatggcggacatagtaaggaagaaaaaccattatttttaccttcaggcgcatcccaagcaaaaccagctactttaattgcaagatatgattttccggaggaatggaatattttaattgcaattccggaaattgaaaagcatatggagggggatgatgaagtggatgttttccagacttattgtcctattccaaaggaagaagtggagcaagtgtctcatctgatcttaatgaatcttgttccgttcatgcttgaaaaggatattaaaaattttggctgggctgtaagtgaacttcaaaaagttggatttaataaactggagcattctcttgatgctagctatttgccaactatgcaggctattgaaaaagctggagcttatggtgtgggtatatcttcattcggaccggttttatatactttctttgatgaatcaaatgaggatatcgtagaaaaaacaaaagaaattattggtgaaaatggtactgtctttgtaactaaagcgcaaaaccatggtttcactattgaatag

SEQ ID NO: 7048 - DNA, 993 bp, Methanobrevibacter gottschalkii
  source 1..993: mol_type = genomic DNA
atggaaaataatagaacggtgtttattgattacttaaaagtaataggtcttttatgtattatcttagcccatatttcaacagatgaaagtatattgcagattagaaactttgatgttccattaatggtaataatttcaggatttcttgcagtaaattcttttaaaagaaatcttaaacaaaacagatcatttttaagatattactggaaaagaattagccgtttattgtttccaacatggacatttctaataatattttttattgtaatggcatttttaccaataaatggcatctatcattatgatgccgatttcatactcaacagtttcttattgcttgatggacttccatatgtttggatcataagaatatttcttatttgtacattcataacgcctgtaatctattatttcgacaagattgaaaatgactatattcaatttttaattttactattaatctatatattatacgaattatcaatattcttaaaaataaatgaaacaaacatcatttttgagtttatattagcttatgttatcccttatggaataatatatttgcttggaatgatttctacaaaaacaagtccaaaaatggatagaaatgtctcaataatctgtttaattgcatttattattcaggcggtcataatttatttgaatactggaatattccagccaacacagattatgaaatatccgccaacagtttattacataagttatgcgctgtttgtatctttcatgctattaagcatatttaaaagaattgatttgaagccaaacagagttatagagttttgttctaaatcttcattatggatctatttatggcacatattattcctgaccgttataccattaatttttggagaattaaattggattttaagttatatcattattgtagtatgtgcagttggagcaacatatattcaaaataagattcttgatttaaccaatgcagatataaaagtattaagaggataa

SEQ ID NO: 7049 - DNA, 432 bp, Methanobrevibacter gottschalkii
  source 1..432: mol_type = genomic DNA
atgaaaatcaaacaattatctatatttttacaaaatagaatgggcagcttatcaaaaccattagaagtgctttcaaaaaatggtgtgaacatcagagcaatgtgtatggcagatacttctgaattcggtattttaagacttgtagtggataatcctgaaatgggaaaagaagttttagaagaacacaatttccttgttaaaattacagaaataattggtgttgaaatgaatgatacaccagggggtcttacaagtgttttgaaagttattaaagataatggaattgatttagaatatctttatgcatttacacatgataaagaggggaaagctattttattactccatgctgatgatatagataagttaatttcttccctacaagataatgatatagttatcgtgccatcagatgaagtttacaacttatag

SEQ ID NO: 7050 - DNA, 1302 bp, Methanobrevibacter gottschalkii
  source 1..1302: mol_type = genomic DNA
atgttttggaatgaagagattgaaactatgtcaaggccagaccttgaagaattacaattaaagaaacttcaagcgactgtaaaaagagcatttaataagataccttattataataaaagatattcagaagttgaagtttatccagaagatatcgaaactttaaaagatattgaaaaacttccattcatcacaaaagatgatttaagagaaagctatccatttggactttttgcagtagatataaaagacataaaagaattacattcctcatctggaaccacaggaaaaccagtagtatcaggatatactgaaaaagacttggacacatgggcggaaacaacagcccgtggacttacaatgatgggtcttggtgaaaacgacattatccaaaatacccatggctacggaatgtttaccggtggttttggagttcattatggatctcacaaaatcggtgcggcaatcattccgatttcaaccggccagaccagaagacaaattgaaattatgagtgatttcggcactaccggattaatttttactccatcctacggaatacatatcggagaagttgctcttgatgatggaattgatccgaaaaaattaggaattaaagctattggatttggagctgaaatgtggactgaagaaatcagacaaagagtggaagagctatttggtgccaaagcatataatatttacggattaactgaacttatgggacctggtgttggtgtggaatgtgaagcgcaaaaaggactgcacattgcagaagatatctactatcctgaaatcatcgatccgaatacagaaaaagtgattggtggagacaaacctggtgaattagttttaactaaccttgaaagagaaggaatgcccatcataagattcagaacaaaagatttaaccacacttacttatgaaaaatgcagttgcggcagaactcatgcaagaatgagtagaattactggcagatccgatgatatgattaaagtaaaaggtgtagctattttcccatcccaaatcgaaaaagcattacttaaagttggtgatgtagagcctcattacatgattatagttacaagacccggaactttagatgaaattgaagttaaagtagaagcatcacaagatattttcttcgatggcgtgaaagaaatgatggcaatccagaacaaaattggcaaatcaattgaaaatgaaacaggcattcgtgtaaaagttacattggtagaaccaaaaacattaccaagattcgaaggaaaagcaaaaagagtaattgacgagagaaacttacactag

SEQ ID NO: 7051 - DNA, 711 bp, Methanobrevibacter gottschalkii
  source 1..711: mol_type = genomic DNA
atggatatgataagtgttttatggcaagttggaatctttgcttcagtccttgtttttggaataaaaatagggctggcatcaggtctggctaatttgccaaaaaaattatttgcagtaatttgcatgtcttatggtggtggagtgattcttatttcatatattgcttcatttttcgctgaacaattagttcaagcaatatacagttataatacaatattttatattattatggcttcaatcatgattattgcaggtttatttacaataagggaatggaaaatacatgataaaaatacatcaactgctacttctctagcgattattgcaccttgcccgtgctgttttggttcaattattgcaagtgttttaattgttgcaccaactataggtatcagttcacttaatctaagttggtatgcttcagcagcattagtcgctgttatggtagtaacttattttgcatccaatacaattattagatttactaataagccgtatcctattgttttaggtaatttcatgttattgctcggtgcatatttcttgctttcagctattgtaattccaaatattgcatcatcattaactaaaaatacaagcccgattactattgcttctcctcagaacatactcatggtaattttaacatttgttattttacttgttggaggcatggtcttaaataaaaaagggagaaacattttagattaa

SEQ ID NO: 7052 - DNA, 645 bp, Methanobrevibacter gottschalkii
  source 1..645: mol_type = genomic DNA
atggttttaaacattccaggtggagaatttttaactggttctcttgatgtaatctcacaaagcttaacaattcctgtacttgttattctacttgtaattgttattatttcaatcattacattaggaggaattatagcggaatatacttcaagaaaaaaagttccgataggaacaattagagatttgatttatgatattaatctttcagaatctattgatggattaaaaaatataatttcaaaagctaaaatcccaaattcacagaaaaaggttttaatcgaaattgcatcagctgaatccttaggtgtaaattcacgtgaagctttagctcgtaaactgtttgaattcgaagaagaaaagactatggaaacattaaagaaaactgatatcattactcgtattggaccgacattaggtttaatgggtactctaattccgatgggtcctggacttgcggcactcggtgcaggggatattaatactcttgctaattccttaactgttgcattcaacactactattgtaggtattggttcaggtgctttatgttatttcattggtaaaatcaggtcttcatggtatgatagatatttatcagatttggatgctttaattgattcagtattggattatatggataaatag

SEQ ID NO: 7053 - DNA, 324 bp, Methanobrevibacter gottschalkii
  source 1..324: mol_type = genomic DNA
atggtaagaaaaagtaataggcgcaggtcaaaaagagttgaagaagatccaatggcaggtacatctaaccttgtagatgcaatgcttgttattgctgttgggtttcttgtttttgttatcataagttggaatatgcaggctatgatagatccagatcaaagtatacaagaaaaaatgcaacaacaaaagacaaccgaagtggatcagggccaacagttaaatgaaactccggatacttcaaacagttctggtcaagggtatactgaaatgggtaaggtatacaaagatccagctacgggtaagctgattatggtggaaggttaa

SEQ ID NO: 7054 - DNA, 318 bp, Methanobrevibacter gottschalkii
  source 1..318: mol_type = genomic DNA
atggaattctgtcctgattgtggtgcaatgttaatgcctaaaaaaggtaaaattaaatgtacatgtgggtatgaaaagtctttaagtgatgatgatttggttgaacaatatcatatgaaaggggaaactaatcctgaaaccaaagtaatagtaacagatagtaataatgttgcattgccaacaacaaaaataacatgttataaatgtggtgggacaaaaggatattggtggacagtacaaacaagatcagcagatgaagcaccaactaattttatccgatgtgctaaatgtggcaacacttggagaagttctaattag

SEQ ID NO: 7055 - DNA, 816 bp, Methanobrevibacter gottschalkii
  source 1..816: mol_type = genomic DNA
atgaaaaatacaaaaaagattgttattgtagcaattattattgttattgttgcaggtattgcacttctttcaggtgttggaagttcagaaaatatagatattgtaggttctacatctgtgcaacctgtagctgagaaacttgtcgaaacttataaacaaacacaccctgatgctaatattaatgttcaaggaggaggttctagtgtaggaattaaaagtgcacaagatggtagtgcagatattggaaccagttccaaggagttaaaagaagatgaaaaacaaggattaactgaatataatattggtcaggatggtattgtaatagctgttaataatgaaaatactgtaaatgatttatcaaaagatcaattaaaagatatattctcaggaaaaatcaccaattggaatcaagttggaggtcaagatggtgaaatcaatattatcactcgtgaagagggttctggtactttagatgcatttgaaaatattgtaatgggcaaagatactaaaattagaagtgatgcagttgtgcaaagttctacagaagctgtgaaacaatctgtaaaacaagattcaaatgcaataggttttgtatcatttgctcacatgtcaaatgatgtaaaggcattatctattggtggtgtaagcccaagtactgatactattgcagatggatcatatgaattacaaagaccatttttattccttgttaaaggaactccatcaggtgatttaaaagaatttattgactgggtaaatagttctgaaggtcaaaaagttctaaatgaagaaaaaattattaaatcaacaaattag

SEQ ID NO: 7056 - DNA, 864 bp, Methanobrevibacter gottschalkii
  source 1..864: mol_type = genomic DNA
atgtcagaacagtttattgagaaaggtttattaataactgcaatgttctcaatttttatcatattgattattttaggatttattataattgaaggattacctgcttttcaagattatggtttcattcaatttttattcggacaaacttggtctcctaatgaagggcaatatggtctattttcaatgattataggatccatttgtgttactatatttgctttaattattgcagttccattatcaattttatgttctatatttatggcagaggttgcaaatgaaaatattaaaaattttttaaaacctgttattcaaactttatcaggaattccttcagtagtttatggattttttgggcttattgttcttgttccaatagtaagattctattttggaggtactggttttagtatttttacagcaggcattattttatctgttatgattttacccactattatttcagtgtcatttgactctttatgtgctgtaccaaatgaatataaggaagcatctcttggtttaggtgctacaaattggcaaactattaataaggtaatatttccagcatcattgccaggtattgtgactgcaattattttaggtatgggtagagcgattggagaaacattagctgtaattatggttgcaggtaatgtacctggaattcctaattcaatattttctccagtaagaactttaacttcaaatattgctttggaaatgagttatgcaacaggattacatcacaatgcattatttgccactgcaaccatattatttgtaattattttattgttactggtaattgctaattatattcaacgtaaatataaaatggatgttggaggtggcactttatga

SEQ ID NO: 7057 - DNA, 852 bp, Methanobrevibacter gottschalkii
  source 1..852: mol_type = genomic DNA
atgaaatttaattatatttctcctaagagatctcaaaaaataatgaatggaatatttatattttcaggagttcttacattatctattttaattattattttaggttacattttgattaatgctgttcctatattaagttttgattttatctttggtcaagttattgacgcaggtaaatctggtggaatttccccaatgattgtatccagtttatatgttacatttatttcaattttaatagctactcctttaggtgtaggtgcagctatttatgttacagaatattctaaaaatggattattaataagattaatccgttttggtgctgaaactttagcttcgattccttcaattgtatttggattatttggattgacattttttgtagtttttttaaatttaggatggtcaattctatcaggtgggcttgtacttgcaataatggcaattccaacaatttttcaagttacagaagtttctttatcatcagttccaagttcatataaagaaggaagttttggtctaggagccactaaatggcaaacaatttgtcatgttattttacctgcagctattccaggtattgttactggaattattttgggattaactcgttctatatctgaagcagcagctgttatgtatgcagtaggttctgccactacaataccaatatctatgtttgatccaggtaggccattaccattgcatttatatgttttagcaacagagggggtttctttgcctaatgcatatggaactgcagcagttttagttattattgtattaataattacattttttacaaattatattgtaaatagatatcaaaagaaaataatgggtaattaa

SEQ ID NO: 7058 - DNA, 753 bp, Methanobrevibacter gottschalkii
  source 1..753: mol_type = genomic DNA
atggatagaattatagttaaggatttgaatacctattttggtaattctcatattcttagaaatattaatgttacatttccagaaaataatgtaactgcattgattggaccttctggttgtggtaaatcaacttttttaaggtccattaataggatgaatgatttaatttccacatttcatcatgatggttatatttatattgataataaagatatttacgattctgatgtggatgttgttgaattaagaaaaaaagtagggatggttttccaaaaaccaaatccttttccaaaatcaatatttgaaaatgttgcttatggtttaagaattcatggttatgatgatgaagattttataaaagaaagagtaatcgagtctcttaaagcttctgctatttgggatgaagttaaagataaacttgatcaatctgcaatgggtttatctggaggtcaacaacaaagattatgtattgctagaactattgctaataatccagaagttattttaatggatgaaccttgttctgctttagatcctatttcaactctcaaaatcgaagatttaatgcatgaactcaaaaaagattattcaattattattgttacacataatatgcaacaagcttcaagagtttcagattatacttcatttttcttaaatggtgaaataattgaaagtggaaaaacagaacagatatttgttaatccaaaagaagaaaaaacagaagaatatattacaggaagattcggataa

SEQ ID NO: 7059 - DNA, 657 bp, Methanobrevibacter gottschalkii
  source 1..657: mol_type = genomic DNA
atggataaagaatacccaagtatttcatttaaaaatagatttaaaaaaattgaaagtgatatagaagagctaaatgatttagctattaaatctaacatggatgttgttaaattatttgaagaatttaatgaaaatttatattttgatattttgaatcgttctaatgaaatggatattaaaacaattgatttagaaagggaatgtattaaatttatggcaacagaacaacctgttgcgcatgatttaattttcatggaatctgtaattagagttataagccatattaagagaattggtcgtttatttttaaaaattgctcaatcaattaaaaatattaaagatgttgagattccagaattaataataaaaaaattatgttatatgggtgattatattgaagtcatgttgaaaaaatccatttttgcatttttaaataaggatacacaaaaagctaaagaattatctcatgatgatgatgaaattgatgaattgtatgagtttattttaaacgattctattgatatgattgaagatagaaagattttaattgagattatttcaattgcaaggcactttgaaagaattgcagataaaactgttaatattggttcaagaattttctttgtaatggattttaaaaggccagatatagaataa

SEQ ID NO: 7060 - DNA, 1299 bp, Methanobrevibacter gottschalkii
  source 1..1299: mol_type = genomic DNA
atgagtagaaatgcttatattaataaagatattccactttctaaaattcatgaagttaaagctgatttaaagcattatatagaagtttatgagaaaataacattcattgaagatatatatgctggtgaaacagtaaaatatgctatagaaaaacgtggaaaaacaattccaactggccatacatggttaaaatcttggaatgaggaaggatttgatggattactcagaaaagaaggatctggacgaaaaacaaaattaactgaaaatcagttcaaacaactaaaagaaaacatcataaaaaaacaattaacaagtgttcgtgaagtaaaacatgaaatattcgaagaatttagtgtaagttatagtgatagacaaattcgacgcattatgaaaaaattaggctttggatatggaaaaccttatgtcatacctgcagaagctccaaaaaatgcctcagaacagttaaaaaaaaacacagaaaaaatagatttaaaaaaagacattttaatattcactgatcaaacagcagttcaaaataaagacaatacaaacagaatatactacgaattaggaacaaaaaatagacagacaaaaataactacaagaataaaattaaatgcaaatggctatcaagcagtaaacggcaattcattaatactatttcaacaaaatacccatacatttgaggaaataaaatcattaatcaatcttagaattgttaattgcataaataaagagttaaaatcagaacttaaaaatattttgaccgatgatgaactagatgaaaataagatttacaataaattaaaagatgaaaatacattagaaacattaaaaaatgaatttaatgaattcatatcaaacagtaatagttctgaaaagcaatttttggtaaaaataaagaataaagcaaataaattaaaccctaaaaaacacacaaacatagaaaatattcaaaaagaaataatcattaaattactaaataaagacaatataatcaataatttacaaaatgaaagaaaacttgtagtggtattggataattactcagttcataaagctaatttagtgattcaagcatgtgaaatattaaatataaaattaattcatttacctccccattctccccacttaaatccaatagaacaagtctggaaatcaataaaaaagtatatggcatattatttatttgatacaataaaatttatggaagaattattcgaaaaagaattttatagaatcgtaaatagagattcctactataaaaattggatcagtaaattcatcatggttaactaa

SEQ ID NO: 7061 - DNA, 888 bp, Methanobrevibacter gottschalkii
  source 1..888: mol_type = genomic DNA
ttgacaagaagtaataaaacattagaagatattttggatgttattttttatgacaaaccatccactcaagaagagattgctgaaacattaggaataagccgcagatatgttacccaattacttaaaccattaattgaagaggatattgtaaaaagatcatatgtcattgatttaaataaatacgatgaaatttatggttcttcaaatccaatttttaattcaaaacagcattcagcttactttttaattgaaaatatgttaaaaaatatggcagaacatgttaaaaaggaagttcaaatgtcttttgatgctattttgaataatgatgaaaaaatggccgaagaagctttggaactggatttcaccacaaacaacatgtttgaaaaagttcgttcttctgttgaaacagttgttaatatagatcctcattcaaaactttctaaaattttactatttaacgaagcagcatataattatgaacgtattggagactattccggtcacattgctaaatttgtcataaatgaaaaaacccctgttgatgaagaactcttagacatattaaaaaaaatgcacaaatatgctcaaaaatctatttcatatgcaactgatgcatttgttagtgaaaaattagaattacgtggcgatttaatggatattgaagaaaaaatgcatgaaaagcaacatgatgctttaaatttagttgctagtcaaatggctgagaattcatttgaggatattgaaaaatataattattatatttatatttcaagagttgttaaatcatttgaacggatgggtgatattgcagttgaaataattgaattagctgcagaatttcataaagatataccaagaccaacaactcctcgctcatttagaaaatag

SEQ ID NO: 7062 - DNA, 1062 bp, Methanobrevibacter gottschalkii
  source 1..1062: mol_type = genomic DNA
atgaaaggtttagcaagaatagatcaagatgtaatggattgggttgaaaaagacaaaccaaaatgtgggccatatgatgcaattgtaagaccaattgctcttgcaccttgtacttctgatgtacatattgtttggggtaatgcatacatgagtgatgcacctaatcgtatccttgggcatgaatcaactggtgttgttgaagaagtgggggattttgtcactgatttcaaacctggagatcgtgttattgtcccagcaattactccaaattggaacagagttccttcacaaaaaggtttcggacaacactgtgatggaatgggtactggaatgacatttattacatttaaagatggaacatttgccgagtactttaatgtaaatcatgcagatggtaacttggcacacttacctgacaatgtttctcttgaccaggcggttatgatatcagacatgatgactaccggtttttatggtgcagaacttgctgaaattaaaccaggtgaaacagttgcggtatttggtattggtcctgtaggactcatgggtgtagccggtgcacatttcatgggggcatcaagaatccttgctgttggaagcaggcctgtatcagttaaagtagcaaaagaatatggtgcaactgaaattgttgactatcatgaaggtgatactgtagaacaaataatggatctgactgatggtgaaggtgtagataaagtagttgtagccggaggaaacgcaaatactgttggtgaagctttatcagttctgaaagttggaggtatccttggtaatgtaaaccattatgatggtgttgaatctatcccattacctgcacttgcatggggtgcgggacttgctgataaaacaatccgtggtggtgtgtgtcctggtggacgtgctagaatggagcagcttgttaaactagttgaatatggtcgtttcgattcaagtaaattaattactcacagatttactaacttcgatgatttatatgaagctatgattttaatgagggataaaccacgtgatttaattaaacctgctgttattttagaatag

SEQ ID NO: 7063 - DNA, 1557 bp, Methanobrevibacter gottschalkii
  source 1..1557: mol_type = genomic DNA
atgaagaatcttgaaaaaacattaaaatcagtgactgaaaatccaaaatatattttccgtttaacagttcaaggattaatggttggtatattcgctggtttgatggtatgtttatatcgatttttactttatggttcggaacatattttaagagattatttaaatattatacatggaaatatattatatattattttatttttcattgcattggctataatgggacttttagtcgattggttaatcaaatgggaagttgattcggctggaagtggaataccccaagtttatgctgaggtaaaagggcatatggaagctaactgggttaaaattcttttttctaaaatggtatcaggtgttttaacagctcttggtgggttgtctcttggtcctgaaggcccttcagttcaaattgggggtatggcaggaaagggtgttgcccgtttatttaaaggatccaaaacagatgaattaagattaatcttagttggttctgctgtaggtattacagccgcatttaatgcgccattggcaggagtattatttgttttagaagaaatcaatcatggatttgataaaacattagtatttattgcactggtatcggctattgtatctgattttatatcaaaagttatctttggtcaatccactgctttaacatttccaattcataatattccattaggaaattattggttacttcttgttttaggtgttttaatcggattattgggttatgtttataatattggtatgataaaatcaagtgatttcgtaaatcagcttaaaatcccgtcttggcttaaatttgtattggtttttatggtttctggtgttgtagcattgttaatacctgaaataagtgatggcggacactttatgatggacatgttggatgtggctatgccatcgctgggtgttttagtatttctgctagttttaaaatacttgttctctttgttctcattctcgtcaggtgcgcctggaggtatatttttaccgattttagtattgggagcatatattggtgcagtatttggggttgtaatcgtttctgtatttggattggaacatacattaatatataaatttgtggtcatttcaatggcaggatttttcgccgcaacagtaagatctccgattacaggtgttgttttaattgctgagatgtgtggttcaaccgaatcattaattgcaatgatcatcgtttctttaatagcctatgttgttcctacacttttgggtaatgaaccgatttatgaatcattatatgataggctgcttttaaagaaaaacagggaatttgttaaaaaaccttcaaagcatgttttatccgaatatttagttccacttgactgtaattatataaatttcaaagttaaagatattccatttccaaaaaatgctattgtagtttctgttatccgtaatggtaaatatgtaattccgacagaggattttaaaattaaatatagtgatcagattcatattttagctgatgttaatgattatccatttgttcgcgaggaaattgaagagttgtttggtggttag

SEQ ID NO: 7064 - DNA, 501 bp, Methanobrevibacter gottschalkii
  source 1..501: mol_type = genomic DNA
atgagtttaatttttaaaagaaaaagtgttcgtaaatttaaggatgaaaaagttagtgaggaggtaataactaatctattaaaagcaggtatgcaagcaccttcgtcatgcaattctcaaccctgggaattcattgttgtatcaaaaaaggaagataaattagccatttctcaaatgcatcaatttgcaaaaccggctgccaatgcatctcatttgataattactgtaggaaatcttaatgaagcaaaagtcattaggatgatcgaacaggacttaggggcttgtaatgaaaacattttacttcaggctactcatgagggtcttggtgctgtatggttaggtttccatccaatcgaagatagaacactaaaattaaaagaatatttgaatattccggatcattgtattccattttcagtaatttgtgttggatatcctgcccatgaaagtgaaataaaaattagatatgatgaatctaaagttcattttgataaatattaa

SEQ ID NO: 7065 - DNA, 714 bp, Methanobrevibacter gottschalkii
  source 1..714: mol_type = genomic DNA
atgtataaaaggatattttcaatattaattgtcatggtctttttgatgttttcagttagtgctgtttttgctgaatctgatgctgttcaagatacgggtggggagagtacttcacgaatcattaatgtaaaagttatctggaatgatgatggccaaacaaataatcgtcctgattcagttactgtaaggcttttaaataatgggagtgttgttgattcagtaatattaaatgaaagtaatttttggaatggtacttttaaaatacttgataatggaaattatgacgttgaagagacaggtgatctttcttcatattcgatttctttaactggcgatatggataatggttttgtaattacaaacactattaagcaagctccaaataacggcagtgatgatatgattgttgatgaaaattctacagataattcatcagatgatgttaatggtattattgatgattccaatcatactgttgatcaaaatgatgctaaagatgaaaatcaaacagaaaatatttcccaagcaaaaaatacaacttataataataatgataaagaaaaacaggtaataaaaaaagaaaataaatctgttaaaaagaataatacaaacataacggggattaaattaaaaaacacaggacttcctgttgtggttttagttgtagtgttatttattatagtcattactccaatttcacgttggaaaaaataa

SEQ ID NO: 7066 - DNA, 972 bp, Methanobrevibacter gottschalkii
  source 1..972: mol_type = genomic DNA
atggtaagtgtaaacattgaagcaaaaaaaaccgtagatgtaatgattgaaaaagcagatgcattaaacatcgctgtagaaaccttaaaaaatggtgctactgttttagattgtggtgtaaatgttgatggaagttttaaagcaggtgaactttatactaaagtttgtctcggcggacttgcagatgttggaatttctattccaggagatttgtctgaaaaattcgctcttccttcagtaaaaattaaaacagactcaccatccatctcaacattaggttctcaaaaagcaggatggtccgtatctgttggagatttctttgcacttggttctggtcctgcaagagcaattgcattaaagccagctgaaacttatgaggaaattgattatgttgatagtgaagctgatttagctattttaactttagaagctgatgtattgcctggtgaagaagttgctcaatatattgctgatgaatgcaaagttgatgttaaaaatgtatacttactcgtagctcctacttcatctctcgttggatctattcaaatatctggtagagtagttgaaaacggaacttacaaaatgttggaagctatcaaatttgatgtaaccaaagtaaaacatgcagcgggtattgcacctattgcaccaattgacccggatggacttaaggcgatgggcaaaactaacgacgcagtattgtttggtggaagaacttattactatgtggaatctgatgaaaacgatgatatttctgatgttgcagctaaattgccatcttctgctgctgacggatatggcaaaccattctttgatgtatttaaagaagctgaattcgatttctacaaaattgataagggaatgttcgctcctgctgaagttgtaatcaatgacttaactaccggtaaaatttacaaagaaggatttgttaatgtggagttgcttaaaaaatccttcggattagatgaataa

SEQ ID NO: 7067 - DNA, 846 bp, Methanobrevibacter gottschalkii
  source 1..846: mol_type = genomic DNA
atgaaggtgtttaatatggaaataatagatattattaaagaagcatttattttcccatcaaataatttagaaaaacttgcaatttatatagttttaacatttgtaatgggaatgttagttgttgggggaatattttctttcgtattcagtagtcagtctagtgctcttttaattgttggtttaatattatgtattgctgcaataattttagcattgataatatcaggttatcaacttaaaatcatgaaatctggtattgaccaggatgaagaggctcctgcatttgactggaagaatgatggaataaatggtattaaagtaatagttcttggtattgtatactttattattcctgccattattgttggaattgtagcattaattactaatgttccgggcaatttagtgcaaatcattcaggaatattctacaagtataaatgcaactgctgctgttaactctactgcatccgcaatgcctgctgtatcaagtgctagttgggcagcattaggaacttcattagctattaccgctattattgcatttgttttattcataatatttgcattcattcaaactatgggtcaggcaagattagcaaatacgggtagtcttggcaatggacttaatattgttgaagcagcaaaagacatttcaagaattggtgtaggtaaggtaattgctgttattcttttagtgtttatagttataatggttattcaaggaattttaggatatatttatggtcaaatcccacaattatcaattatttcaattataataactccttacttcgtattctttacacaaagggcatatgggttattatattctgatattgcataa

SEQ ID NO: 7068 - DNA, 546 bp, Methanobrevibacter gottschalkii
  source 1..546: mol_type = genomic DNA
atgtctgatttaaaaggtactaaaactgaagaaaatttaaaagcagcatttgctggtgagtctcaagcacatactaaatatcaatacttcgcagctaaagctaaagaagaaggttatgtccaaatccatgatattttcatggaaacttctaaaaatgaaagagaacatgctaaaatctggtttaaattattaaatgatgaagctattcctgatacaatagctaatctcaatgctgctgctgacggtgaaaacgaagaatggacttccatgtacaaagaattcgctgaaaccgctaaggaagaaggtttcccaatgattgcattcctatttgaaaaagtaggtgcaattgaaaaagaacatgaagcaagatacagaacattactcgataatgttgaaaaagaaactgtattcaacaaagctgaagatattgaatggaaatgtgaaaactgcggatttatattttcaggtcctaatgctcctgaaaaatgtccagtttgcggacttccaaaagcacactttgaagaaagagctactaacttcaaataa

SEQ ID NO: 7069 - DNA, 546 bp, Methanobrevibacter gottschalkii
  source 1..546: mol_type = genomic DNA
atggcagatttaaaaggcactaaaactgaagaaaatttaaaagcagcactcgctggtgaatctcaagcacgtgtaaaatatgaattttacgcatcccaagctaaaaaagacggttatgtggaaatcaaagagattttccaagaatcatctgataatgaaaaagaacatgcaaaaatatggtttaaacttttaaatggtggtaaagtacctgataccaaaattaaccttgcagatgcagctgctggtgaacatgaagaatggacttcaatgtacaaaggatttgctgcaactgcacgtgaagaaggtttagatgatattgcagacttatttgatgctgcagccgctactgaaaaagctcatgaagacaggtataatgctttatcagataagattaaagcaggtaaagtatttaaaaaggatgaagaaatcgcatggaaatgtaacaactgcggatacatccattatggaaaggaagctcctgaagtatgtccattatgtgatcacccacaagctcatttcagaaaacaagatactagttatatctaa

SEQ ID NO: 7070 - DNA, 1410 bp, Methanobrevibacter gottschalkii
  source 1..1410: mol_type = genomic DNA
atgattgaaaataatatatgtttattaacagatagctataaagtaacacatcattatttttaccctaaaggaacagaaaaaatctattcataccttgaaagcagattaggttctgaatttaataaaactattttttatggactccaatatattattaaaaaatatttagaaggttctgtcgtaaatcagcaaaaaattgaagaagctgataaacttatttccaatcacattggtgaagatatattcaataaggatggctggtattatattttagacaactatgatggttatcttccaattgaaataaaagcagtacctgaaggaacacctgttaatgttagtaatgtattgatgagcgtagaaaatactgataaaaaatcattctggttagttaattacttggaatctttattattgcaagtctggtatccttcgactgttgcaacattatctgcagaggtaagaaaattatcaaaattttaccttgaagttactggttcttcaaaagacaatttagatttcatgttgcatgatttcggatatcgcggagctagttcaacagaatcatcaatgttagctggttcagctcatttactcagtttttccggaactgacactattcctgctctattaattcctaaaaattattataatgattcaaatttatatggattttcagttcaagcaacggaacacagtgtaatgacttcattaggtcctaaaggtgaatttgatcaaattttgaatgtaattgataatgctaaaaatggaatattgtctatggttatagattcatatgattataaaaattttttaaccgaagctggaaaatcagatagccaattaaataaagctataaatgattttttagcagttgaaggaaataaagttgtatttagaccggatagtggtgaacctgtatcaacaacaattgactgtttgaatatcctgggaaaaggtttcggatcttatctaactgacaaaggttataaggtatttgattcaaatattggtcttttatggggtgatggtttagactatcataaaattagggatatattatttgcaatgaaatctaatggctgggcggctgaaaacattatctttggtatgggtggaggccttcacacctatgtaaatcgtgatactcagagaaatgcatttaaatgttcagcacaattacgtgatggcaagtggtttgatatttataaaaatccattggattccagtaaaaaatctaaaacaggtaggtttaaattaattaatgaaaataattcatttaaaacaatatcaattgatggatatggtgatgattgtctcagaactgtatttaaaaatggaaaattgctaattgaagatacatttgcagatataaaatcaaaaacgttaaattattcaaattttttgtaa

SEQ ID NO: 7071 - DNA, 3657 bp, Methanobrevibacter gottschalkii
  source 1..3657: mol_type = genomic DNA
ttgcacaaaattagaaaagctattatcatatgtttaatattattaattgtttttattccaactgcatatgctgcggataatcaaacaaatttaggtttaaacagtaatgatgtaatgttatctgattcatattattttgatgctaatgttgatgatgatttggggaatggatcattggattttccttataaacagttaaagagtaacagagttatagataattctacaatctatttaaatgatggaatatattatggatttaataaagaatttagtaatttaactgtaatcggtaaaaatagtgaaaaaactattataaaaaatattcaatttgatattaaaggttctttgataattcaaaatgtaactctgattaattctaaaataaccaataatgcaaatataacattggttaattcaatttttaaagattcttcatcattcattggaggagttttaaagtcaaacccaaatacttttgtaactataactaattgtacatttttaaataatcatgcaaataggtatgctggagttatttattcaaataattctaatttaaatatctgtaactcaagttttgttggaaattatgctaattattatggtggagctatttattgtgagaaaaattcaaagttaacaattataaatactgatttcacaaataatcatgcaaaaaatgatgctggaggagcaatatatggtatggattcagatattcttgccaattatttaagtatttcaaattcttcatccactttcggtggtgcaataactgcactcaatacaaatttgaatttaactaatttcaatgcttggaataataaagcaaaatatcgtggcggggttatttattcagtttatggttattatattgttatgaactccacatttgaaaataacacagcatctgatggaggtgcgttatttattgactcaccacattcagtgaatgtttcatcaaacaaattcattaaaaacaacgctttaaatattggtggagctgtttatataatttctaataaaaattatttcattcctgataatttatttttaaataactctgcaagttttaataatgatttttataaaactatgttgtctaatttaactattggaaataataattatgttttaattaattataatggatcccatataggtaatcttccaagcagttatgatttaagagaattaaatcagacaacttctgtaaaaaatcagggatctgggggtaattgttgggcatttgcagcaatagctagtttggaatcctgtattttaaaagctacaggaaatgcatataacctttctgaagaaaacatgaaaaatctaatgacattatactccaattatggatggaaagtttctcctaatgatgggggctatacttcaatgggcattggatatcttacttcctggttaggagctataaatgaaagtgatgattcatattatgagtcatctgcattatcaccagtacttgacagttttattcatgttcaaaatattctatttttaaaaagaaatagttatactgataatgatgaaataaaaagagctatcattgaacatggtgctgtttcaacaagtgtattttggaaagtagagaaatatgctaatggtgaaaattactataattatgaatatgcttcgggttctaatcatgcagtagttattgtcggatgggatgataattattctaaaaataattttattaaaaaggctccaggagatggagcatggataattaaaaacagttggggtactggtagtggtgatggcggatattattatgtttcttattatgatgcacgtttagcaccaataaatacttcatctgttacttacacatttgttttagcagattcgattaaatatgataaaaattatcaatatgatatcccaggaatgactgattatctattgaattcatcggatcgtgtctggtataaaaataagtttacagcgactgacgatgaatatttaaccgctgtttctacatacttccaaaaagaaacttcatgggatttgtcaatctatgtaaataataaactgatgttaactcaatcaggtaattctagtgcaagctactcaacaattgaattaaaccgattcataattcttaaaaaaggtgacatttttgaaattgaatttaaaataactgttgatggtgatgcaggggttccgatatcagaaatagcttctcttaataatctgttttatggtgaaaatatttcatatgttagttatgatgggaaaaaatggattgatttatttgatgtaagatggacatatcctggccatacatataatgattcgcaagtagcttgtattaaagcattcacggtattgaataaaattaactccactattgtcctaacaattacagatgagaataatccagttgaaataactgctaaagttttaaaccagtatggaaatcctattaaaacgggtaaagtcacttttaatattgaaggaaaagattacattgctaaaattaataatggatttgcaaaattgattcatatttttaatggaaatgaaaataaactaatcattgcttcttttagcggtgccggatttatcgaatctttctcagatataactttttgtccagagcaggtttcaattaaagcaagtgacatggtttcatattataataaaaattcttattccataactttgcttgacatatactcaaaaccggttgcagataaggaagttaaatttaaaatcaataatctggaatatgttgcaataactaatgaaaatggtattgccgcaattacatttaacttatatcctaatgtttatgatgttataattgggtttaattctatcaattttgataattataatgttactaaaaaaatcactatcaaatctacaatttccattccagaaaataccgtttatacctataattcaaaatatccaattaaattgttaaacaataatggaaatccattatccaattgtaaattcaaacttgttattaatggcataacaaattatgcacatactgattctaatggtgcttttaaatacaatattaatttaaaaccgggaaaacacactataacagttatcaatacaaaaacaggtgagaaatctacccaaaaaattaaagttgtctcaagaataactcaaaataaagatttttcaatgtattatggtgctggtagaaattataaagttaaagttgcagatgattatggaaaagttaagaaaaatcttaaaatatcttttagagtgaatggcaagacatattatagatatactaatgaaaaaggttatgcatatctaaaaatttctttaaaacctggaaaatacactataactgccaattataaaggatataaagtatccaataaaattcgtgttaaaccaacaatcataactaaaagtattgcagtcaaaaaaggaaaaacaggcaaattcacagccaaattattgaataacaaaggcaagattttaaaatataaaacaatcaatttcaaattcagaggcaaaacctacaaagttaaaaccaataaatatggaatagctactttaaagattgctaaaaaatataaaattaccagatattcaataattactagttatcgtagtgaaaaaataaagaataccattaaaattaaaagataa

SEQ ID NO: 7072 - DNA, 699 bp, Methanobrevibacter gottschalkii
  source 1..699: mol_type = genomic DNA
atgctaaccattaatcaatgttatttagattttgtggataaaatcttaaaacaaggaaaagaaacttataaagactctaatcatcatttaatagaaagtttagggaatttttatataattgatgatccgttagatttgaaattcagagctaaatatcaacattacactacaaaaatgatgttagatgacattaaatctggaaaatttgacatagaaggttgtcctattaaaagcgatgcactttatgaatatgtaaaatccgcagaaaatccggatgatcagggatttgtatacacttatccaaatcgtatctttgcacattttgatgttgatcagtttaacacaatgaaaaaaagaatattgacagcaaccggttcaaatcgtgcagtagccgttacaatagaccctgaacttgacgctgatagagaagatataccatgtctccaatttttacaatgtattgtccgtgacaatgaactaaccattcactgcatattcagaagtaatgatattttcggtgcattctactccaatatgtttttcattgcatatttaggccttaaaatgaaagaagaagtaaacaaagaaattgttggtgaaaagctgaacttcggtggagttcactaccattcaacctcaggccatatttacaatactgatttaaaggcagcccgtaaactgataaaaacaaataaataa

SEQ ID NO: 7073 - DNA, 573 bp, Methanobrevibacter gottschalkii
  source 1..573: mol_type = genomic DNA
atggaacttgaagaatatctggaatatgtaaatagcggaaaaagaatttatgccggctccacacaacatttatttatgcatgaatccttgaataatgcattgaaaattactcataaaatcaatagtgaatatcatactcctgaagaaattcaaaaattatttgctgaattaacaaataaacctataaataaaacattagggttaattcctcctttcaatactgatttcggtaaaaatatccatattggagaaaatgtttttataaattcaggatgcaaaatgcaggatcaaggtgggatattcattgatgatgaggttttaataggtcataatgtatgtcttttaacattaaatcatgcaaaagaacctgaaaacagagcagacatgtatccttcccccatacacattgaagataaagtttggattggttcaaatgtaactattcttccaggagtgactatcggtaaaggagccattgttgcagcaggagcagttgtaactaaaaatgttgaaccagaaactattgttggaggagttccggtaaaatttataaaaaatgttagtgatgattag

SEQ ID NO: 7074 - DNA, 573 bp, Methanobrevibacter gottschalkii
  source 1..573: mol_type = genomic DNA
atgacaaatgaaaattttgcaaaaaaaattaaagacataagagctagacagaacatgactattgaagatcttgctgagagaagtggggtaaaacttgaagttttaaaagctatggaatctggagaggttattccatcactcactccattaacaaaaatggcaagggcactaggtgtacgtttaggcacatttttagatgatactccggaacttggtccagtagttacaagaaacggaaaaactgaaaattctctttacttctcaggtagggaagatgtaactaatgcaactaatttagaattccactcattaggtgcaggtaaaattgatagaaacatagatcctttcataattgatattgaatttgaagaaggtgaaaaagaattatcttctcacgaaggtgaagaatttatttatgttttagaaggtgaaattgaagtaatttatggaaaagattcatttactattggaaaaggagataccatcttttatgattcagtagtgccacaccatcttcacgcaagtggcgaaaataaagcaaaaatactcgcagtattatacactccatattaa

SEQ ID NO: 7075 - DNA, 156 bp, Methanobrevibacter gottschalkii
  source 1..156: mol_type = genomic DNA
atgtttgagatagaattaaaacaacaaaaaattagcaatggtttaatcagatttttcacaagtattttggatttgcattctttgttgttgtgtttgcaagaatattttacaagtatgaataatgttgaaattaaaaaaatggaggttttccaatga

SEQ ID NO: 7076 - DNA, 1665 bp, Methanobrevibacter gottschalkii
  source 1..1665: mol_type = genomic DNA
atgagtgaattatttactgaactgccgttagggaagtttttcgaatcaatggttgaaaagcagcctgatcatgaatttatcatttatccggataggaacttaagatttacatataaagaatttgatgaaagagttgacaatttagcaaaaggaatgttagctattggaattgaaaaaggagatcatgttggcatatgggctaaaaatgtacctgaatggttaacttacatgtttgcaactgcaaaaattggtgcaacaattgttactgttaatactgcttatcagtctcatgaattggaatatgtgcttggccaatctgatatgagagcattagctatgactgatgcatttagggatattaactattttgatattataagtgagcttgtacctgaacttaaaacttgtgcaagaggtcatttggtatctgaaaaatttcctcacttaaaattcgtgttccatgtaggtcaggaaaaacatcgtggaatgtataatactaatgagttattattactgggcatgagttatgatggagaaaaatatcaggaaattaaagattcagtttcacaaaatgatgtaatcaatatgcagtatacatctggaactgaaggttttccgaaaggtgtaatgttaaccagccgtaatattgtaaacgatggttattacataggggaaaatatgaattatacatctaatgacaaattacttttacaagtgcctcttttccattgttttggaactgtacttggtgtaatggcggttattactcatggttccactatggttgtacttgaagagtatgatccgctgcttgccatatcctccattcaaaaagaaaaatgtacagctatttatggtgtacctacaatgtttattggtatgatgaaccatccaatgttcgatatgttcgacatgtcttcattacgtacaggtattatggcaggatcaacttgtcctgttgaaacaatgaaagatgcaatagaaaaaatgaacatgaaagaaattactagtgtatatggacttactgaagcggcaccgggtttcacacaaacaaatgctgccgattcatttgagaaaaaaatcaatactgtgggacgtaaatttccaaatattgaagtaaaaatagttgatcctgagactggtgaagaagtgggcgttggagaaacaggtgagataatgtgcagagggttcaatgttatgaaaggatattataacatgcctgaaaaaacagcagaaacaatagaacctgatggatggttacactccggagaccttgcaacagtagatgaagacggatattattcaattgtcggtcgtattaaagacatgattattaggggtggggaaaacatttacccgcgtgaaattgaagaatatttattcactaatgaatgtgtgcaagatgttcaagtggcagggattcctgatgaaaaatatggtgaaatcgttggggcatttattattaaagaggatggttttgatgatgttactgaagcagacattcgtgatttctgcattggatctattgcaagatataaagtgcctaaatatgtgttctttgttgatgaatttccactcaccaccagtggtaaaatacaaaaatataaattgggagatttaggtcttagattattagatgaaaggcgccagagaggagagttataa

SEQ ID NO: 7077 - DNA, 3609 bp, Methanobrevibacter gottschalkii
  source 1..3609: mol_type = genomic DNA
atgaggaaaaataattatttagtatttctattaatattttcattatttttaactatttcttcagtatctgcattaaacgtggatgataatgcgacaatagaagatactaatttgaattcaatggatgttaattttgatatttccaatggcgaattcaatagtattaatattgataaaacgttcgatacaaatatagatgctgatgcaggaaaagacacaaatattgaggaaaaaactattagtattactaattctaataattccattctttccactaaagagaataatgttaaaaataattttaaattaaattccggttcattaagagcaggtaatataatttatattagttctgatggtactggggatggtttgactagtaataatccaacaaactgggctaatggatacattaatgctcaatcaggcgatacaatttctttccttgatggaacttataatcttgtaaatgtaaatttaaataaagatttagttttaaaagcttttaatgaaggaaatgcaataataaatgcaaatagagctggtaatgtcttttctattaataataatagaaatataaccataaatggtttaacatttataaatgggaaatctactggaaatggtggagcaatttcatttaattcaggagccctaactgtaattaattgtagatttattaataatactgcaagttcttatggtggagcaatatatcttagagatggaaagttaaccatagtcaatacaactttcgtaaataattcagctgatgttggtggagcagcaatagcagacaccattagtattactcattctgatttcattaataatactgcagatggttctggtggagctataagagcttatgataatttaacaattgttgattctatttttactaataatacttctataaatggtcaaggtggagctttatatactccaaatgttgacataaataattcaatttttgttaataatacttcattaaatggtggaggggcaatatactccagcaatgaatatttaattaataattctgtattcgttaataactctgctattgatggtgatggtggagcagtttcatcatatcgtactggcaatataaacaattctaattttaccaataactctgctaaaaaaagtggtggagcagcatatgctagagagagtattgaaattgataattctagcttcaataaaaattatgctggtgctggtggagcagtacgtgctcaatcagaagttaatattactaattcaaattttaccaacaatgttgctaacaatgagggtggagcaatatattctaatggaaaaattgttgttaataatttaacttttatcaacaactctgctattgaaagtgatggtggagcaatattctctgtagaagatgttgaagtagataattccaattttataaataattatgcaggtgaacttggtggggcaataagtgcttataatgaacttactgttaataattctaatttcaccaacaataatgcaaaatattatggtggtggagtttatgctaatgtgttgaattctaatagagataattttgttaataatactgcagaatataatggtggaggagcttatgtattctctaatgctaatattaatgggtcaaattttgattcaaatactgcagtgaatggtggaggattattcagcactggaaattctagtgttaataattctaatttcattaataataatgcttatgatggatctgcaattattagtggaaatttacatttaaataataacaatttagaaaataacacatctagaggttatggaattgtatatgctgaaaatgcaactattgaaaataataaatttatagataatgatgcattagaagataaagaaatctatgtattaaatgaattaagtcaaagcaataatactttaagccctaatcaaatagaaaatattaatgctaatacagtaaaagtgaatactattaatggtactacttatttggttgatttagaagatgggttaaaaggatattgtttacaaagaacattaaatttccctgattatgtatatttattaaataatcttagtttagcacataaccaattaactggtgaagatgttagtgaatacttaaagattttaatttataaatattatttctcagataaaaaagacaatataacttacagtttatgggactttacagacagtgattttagaaatagtaataacaatttaactaaaaaagtaattgcattatataattctggattccgtgtacctgattctaatgctagtttaatattggataatggtactcaagtattatttgatttttatagtgctggaagttcaacaactcaaaatttattcctatttaatattacatatatgggaaacaattatgacatgaaagttgaaaaaattacattaaacaaatctgtaattaatggaaataaaacaaaattcataattagagtaacaaacattggtgatacaattctccatggtgttactgtatttgaaaaagagtatgatggtttagtttatgattcatatattgatgaaggaaataattggaattataacaatggtaaatggatttacaaaaaacaattaaacattaatgaatctgcagaatttactgttgtatttaaaacaataaaatccggtaatttcacaaatatcataatttcatcatccaatgaaactacaaataaaaccactaacaataccactactgtttacactcctaatctaactgttgagaagctttctttgaatagaactgtttatgttggtaatcagactgtctttactattgttgtccgtaataccggtgattgtgatttaggtgaggtttttgtcgttgaaaaagctccagaaggtcttgcttacagttcatttaaaggcaccgactggtcatacaacaatggcaaatttacttatggtaaaactttaaaggttggtgagtctgttagttttgagattgtattcgatgctgttagttctggtaattggactaatgttgttgttgcaggttcaaatttaacaggtaataaaactggtaataatactactaaggtttataatcctggtttgaaggttgaaaaaatcactttggatcctgttgtgtctgttggtgagattacatcttttgaaattatagtgactaatactggtgattgtaaacttggtgatgtttttgttcatgaagatagttatgaaggtttaaggttccatagtttcaggggtgatatgtggaaacagaaaggtgatactttctattatcagggtgttttaaatcctggtgagtcagcatcatttgtaattttatttactactttaaaacctggaaatttcacaaatattgttactgccggttccaatgttactaacaataccactactgaaaacaaaaccaaagtaatagaaaatcacactaacaataatactaatggtattaataaaacagttaataatgaaaccaaagaggttaatgttcataaggttgatacttcaagagcaactggtaatccgttactagcattactcatggttcttttaatgattagtgtgacttctgttagaaaattcaaaaaataa

SEQ ID NO: 7078 - DNA, 966 bp, Methanobrevibacter gottschalkii
  source 1..966: mol_type = genomic DNA
atgacttttttagataatatttcagataaaattaactatgaaactttgaacaatattataaaatttgaatttgatggtgtttcaactaattggatggatgaaaatgatccattcattgaaagaattcaaaaatctagtttgaataaagttttcttaaaagaacatattctaaaagaaattgaaattaaaaacattttggatgaaggtattgactttttaaattcacaaaaatatgttaatgcaatagaatcttttgatgaagtgctgttttatgatgaagggtatgcagaagctttaattaataaatcatatgctctttttggtcagaaacattttgttaaatctttaagatattataaacgtgccattaaagtgaataatgatttgaaagatgttgaatatcataaattgcttttaagttgttccaataaggaaagaagtaatttttcaaaattaaaattaaatatttattctggggatgaactatttgcaaaaggagaatataaaaaagcacttgaaagatatgatggtgctttagctaatccatctctatttaaagataaaatactttttaagttactcaataaaaaagctacaacattacttaaattaaacgattttgaaaatgcattggcatgttttaaagagtctttaaatgcaaagattagtgattatgcatattatggctgtggcgtatgccaatatgaattgaagttagatggtgcttctgaaagcctatctcatgcaaacaatgttaaaaaaaatcaattactggaaaaaggattaatttttaatgaaattggtttatatgaaaatgccttaagtactttcaatgaaatattcaataatcattttaaagttgatgaactttatatcaaatccttaaatggtaaaatgcatgcaatgaggagtttaaaaatggatatggatgaaattgaagatatttattcaatattgctaaactaa

SEQ ID NO: 7079 - DNA, 375 bp, Methanobrevibacter gottschalkii
  source 1..375: mol_type = genomic DNA
atgaaattttcaggattcatgaatgtttaccaattagatgacatgagttgggaatatcagtttggaggcaaatcacttaaagctcaaacattaaaagaattagaagttcttgttggtctttatggtttaaaatggggtgtactggataaaaatctggttgaaaagtctcttgaaatagataaaaacaatgtcactggttttttaaatgtttataaaaaagagggtttctggcactataggggaactgatttgaaatcccatagtcttgaagtgttaaagaaaaaagttttaagcgaaaacctcgattgggtagaaactgacagggaacttgcttataaaaattggaaactggatttaaggaaatttaaaaaataa

SEQ ID NO: 7080 - DNA, 843 bp, Methanobrevibacter gottschalkii
  source 1..843: mol_type = genomic DNA
atgagtgtttttgttccgggtcatgtaaccggtttttttaatattgaaaatcatgagtccaaattaaaaaatggatcttgtggagttggatttttactaacaaaaggtgttatgacaactgttattgaatcagataactttgaatttgaagttaatcttggtgatgacactattgtctgtgaagtcttaagaattttgaatttggataacagtaattttaaaattattcaggatattcagcttccaatcggggcaggatttggaacatctgctgcttcagctttaagtttaacactggctttaaatgattttcttaatctgggttattcaaaagaattatgcggtcaaattgcacatatggctgaagttaatttaggtgcgggtttaggtgatgtaatagctcaaacaggcagtggtttagttttaagaacaaaatccggtgcacctggtattggagaaatcaaatcattcaatcaggatgtttatattgcatacaaaacttttggaccaattgaaacatcagagattatcacggatgccaattataaaaagattatttcagaagtaggtttaaagtatctggaattatttgaagaaaaacctagtttggataattttttaatcttttcgaaaaaattttcctgtgagactggattaatgtctcctgaagtgaaaaaacagattgaatatttcgaatctattgatgatgtattaggcagttcaatggcaatgcttggaaatacagtatttgcattgtcatataatgaagatacatttaaaaaattaaacattgaagagttacatatagataaattaaataataatggtattgtttatgattaa

SEQ ID NO: 7081 - DNA, 534 bp, Methanobrevibacter gottschalkii
  source 1..534: mol_type = genomic DNA
atgattaaacttagctatgatataaagaattatagaaagcaaatcttagatttaactcaaaatggagatacgataatagaattgggttgtcatgtgggcaatacgacaaaaattctattggataattttagagattcaaagataatggcacttgataattctcctgaagcaacaataaaaatgaatgaaattttgtgtgataatttggaatttattaatgctgatgtacgtcttcatgaaacattgcttgaggtatttaaaagaattcaaaagtgtgatattttatccattgatttaggtggaggatatcatcccgatacggtttttaaagtattttatatttggtcctcaacatttaaaccaaaacatacattaattagaaataggggtattttagaattttttaattcggcggggagcagtgatgaggattatgaatcatgtgagggatttctcgattcttatcatgattcgggaattcccccacaaattaaagaatttgaattatggacaccgaatcttgggaaatattga

SEQ ID NO: 7082 - DNA, 792 bp, Methanobrevibacter gottschalkii
  source 1..792: mol_type = genomic DNA
atgataggtaaaaagattcgtttagaaagaatcataaatagaaatactggcagaactgttattgcaccaatggatcatggtgtatcaagcggtccaattccgggtataataaatatggatgagactgttgaagaaatcgctcagggaggagctgatgcaatattaatgcataaaggtattgtgcaacagggacaccgtggttatggtaaagatattggattaattgtacatttatctgcaagtacttctcttgcaccggatccaaatgataaagtaactgtaacaagtgttgaaaaagcaattcaacttggagctgatgcggtatctattcatgtcaatctcggaagtgaaacagaaagcttgatgttgcaggaattaggtcaagttgcagaaacttgtgattactggggtatgcctcttcttgcaatgatgtacccaagggggcaaaaagtggaaaatgaacatgatgtggaatttgtaaaacacgctgcacgtgtaggttcagaacttggagtggatattgtaaagaccaactacaccggagatcctgatacattcaaggaagttgttgaaggtgctattgtaccagtagttattgccggcggtccaaaagtagaaactgatgaagagttattgcagatggttagagattctcttgatgttggcggggcaggtgttgcattcggacgtaatttattccaagctgaaaatccgggtaagattacaagagcaatatctgaagttgttcaccatgatttggatgttgaagaagctttagaattcttaaaatag

SEQ ID NO: 7083 - DNA, 1131 bp, Methanobrevibacter gottschalkii
  source 1..1131: mol_type = genomic DNA
atgcaaaataaattcgcttggataagtactcctgatgaattatgggatgataagaaagagatgatcactactgcattagaatcaggtattgactatgttttggattttgatgatattgaagagattaggaaacttggcaatgtgaaaatcattgcaaatactgatgatgcagatatctatttggtaggtattaatggtgaaggagatggctttgttgaattaaatgatgatttcactgattcaattgatattgctaatgcaaaaaaagcaaaaagcgaaggaaaaactgtatgcgcctatataaaaataactgataaagcccatgagcaattagctgtaagattaggttcaattgttgattatattattttaattggtaccgactggacaattatcccacttgaaaatattattgccgatttacagaagttggatgtaaagattattgcagctgttcgtgatgtggatggtgctcgtgttgcccttgaaactttagagcatggaactgatggcataatatttgaagcaaatgacttcaataatattaaaaaaatcgcccaaaatgttattgaagcatcacaagtaaaatatgaattaaaactagctactgtaactaaagtaaaacccttaggttcaggcgatagggtatgtgttgatacaactgacatgatgaaacctggagaagggatgttaatcggttcctattcaaaatccatgtttttagtgcattcagaatcacttgaaagtgaatatgttgcttcaagaccattcagagtaaatgctggccctgttcaagcatatgtgatggttcctggaaataagacaagatacttatctgaacttgttgccggagatgaaatattaatcgttaataccgaaggtgaaactagaactgcatatgttggaagaagtaaaattgaaagaaggcctttattattgcttgaagcaaaatatgaaggtaaaactatcagaacactcctgcaaaatgcagaaaccattagaatagttgatgaaaataacaatccattgtcagtggctgatgttaaaccgggagataaagttaaagtttatatagaaactaatgcacgtcattttggaattgctattgatgagacaatcattgaacaatga

SEQ ID NO: 7084 - DNA, 558 bp, Methanobrevibacter gottschalkii
  source 1..558: mol_type = genomic DNA
atgtcacagctacgggcatttttagctatagatttggatgacgggttaaaaccaaaaattaataaaattattaaacagtttaaacaaattgatgcaaaaataaggtatgtagaattaaataatatgcatttaaccttaaaattctttggagaaattgacactgatggtttggaattgttggaaaataaaatagcagatgttgtatctgaattcaaaccttttaatataaaaattaaaggatgtggcgcatttccaaattatagtcatataaaagtgatttggattggaattgatgaagattcaattatcaaagaattgcatgataaccttgatggggaatttgttaaattaggtttcggtaaagataaaaacttttcaacacatctgactattggacgtatgaaatcagctaaaaataaagttcaagtcagatcaactatcggggaatttagtgatattgaaattggtgagatgacagtaaacagtattactttaaaaaaatctactctaactccttccggaccaatttatgaagatttaaaagtatttgaattgtga

SEQ ID NO: 7085 - DNA, 1356 bp, Methanobrevibacter gottschalkii
  source 1..1356: mol_type = genomic DNA
atggattatagtttaatattaaatgatataaaaccaacaactgatgaaacaaaagaaattaatgaagtttcatcaagaataattaattttttacaagttttgtgtgatgaaaataacataaatgctaaagttaatctagttggttctgtcgctaaaaacacggctcttaaaggcaaatccgacattgatatttttatagcatttccattagatactgataaattgtatttaaaggaaactggtcttgatttagctcataaatgttgcagggaatttaaaagcgttccagaacatcattttgcatcacacccttatgtaactgcagatattgaaggttatgaggtggatattgtcccatgctatgcaattgaagacggaagccagctaaaatctgcagtggatagaacaatattgcacactcgttttgttaaatctaatttggttgaaggacaggaagatgaagttttactattaaagcgtttcatggcaatgactggaacatatggttctgaatttaaagttggtggatttgcaggttatttgtgtgaattattaattattcattatggaacttttgaaaatacattaaaatcagctattaactggcaatatggccatgtcattgatttggaaaattatggaacttccagattattcaatgatcctttaattgttattgatccaactgatatgaatcgcaatgttggagctgcacttagaattaataaattatctgaatttattcaatctgctcgtaattatatattctcggataataaaaaaaactatttttatccaataaaacgaaatttaaacaaaaatgaattaattaaggagtttaatactagaaatagtgatattattgctattaaattcaatgttccgaatattcctattgatactcttcatccccagcttaaaaaaacaacggaagctcttgaacgtaagttaaatgatgaggaattcaatgtttttaaggcagattattggagtgatgaattgttttcttgtgtaattttacttgaaatggcatcatcaaacttaaatgatattaaagttaatgtaggacctaaaatattctttaataaagcatgtgaaaattttgttaaaaaatacggtcgtgaaaattgttatattcaagaggatttcttagttcacacacaaaaaagggattttaataatgctttaaaattaatcgaacatatttttacttctgaacacattggtcttattaaagttggtaaaaaccttaaaaagagcattattaacacttatgaattcattgatcttgatgaaatttctagtgaggagttcttggatgattttatccatccaggacaacatataattagatga

SEQ ID NO: 7086 - DNA, 552 bp, Methanobrevibacter gottschalkii
  source 1..552: mol_type = genomic DNA
atgtctgagattaaaaagttaactgcagatgttgatgtcggggaatattttgaaaagtatgttgattttgaaaaattttcaaaactttgcattgaagaacaggaagagttagggtataattggaactatcctccctttgattttgatgtagaagaattatggaaatcatataacaaacttaaaattattgcttttaaaattgatttttcaaaagaagaattggaccatacctttgaagagaaagaactggaatttgttttaaaaagatttgagcgtataaaaggcagattaatgaatgatgtttatatgcttgaaaatgaagattcaatgggattatatatgggcaaatgcaatctctgcatgagatgtacaagggaatttggaatgccttgtaaaatgccagttaaaatgaggtatgcatttgaaggattaggtgcagatgtggataaaactattgaggacttatttggatataagatactttatgctcataatggtaaactgcctgaatatttaatatttgttggtggattgctgtatgataaaaaatag

SEQ ID NO: 7087 - DNA, 687 bp, Methanobrevibacter gottschalkii
  source 1..687: mol_type = genomic DNA
atgattgtaagtgttataggtggaactggaccacaaggccttggaatcgcagaaagactagctattgctggattagaagtaattgttggttcaagaaaagaagaaaaagcattagacatagttgcaaaagctaaagaagaatttgctgactatgacttgaacatgactggtatggcaaatgaagatgctgcaaaagcaggcgatgtattgattatcaccgtcccattagctgctcaaaaaccgactcttgagggaatcaaagaattctgtaatgataagattgttatggatgcaactgtacctttagaaacagctattggtggaaaaccatttagattcgttgatttgatggaagggtctgctgctgaaaggacagcttctatattaaaaggaactggtgcaaaagtaatatgtgcattttgtaatatttcaaactcacatcttgcaaacattccagaggaaattgactgtgactgtttaattgcaggtgatgataaggaatctaaagaaattgcagctgaaattattgataaaatacctggagtcaaaacaattgactgtggcattttagaaaaagcacgtattatcgaaaaaatcactccattgttaataggattaaacattaaatacaaatcccattacggtggtttaagaattacaggaattcctgctcttgataaggaataa

SEQ ID NO: 7088 - DNA, 624 bp, Methanobrevibacter gottschalkii
  source 1..624: mol_type = genomic DNA
atgaaagaaatcaaattcaatttagatgaaaatccgtttattaattttctatcagcaagatactcaatgagtgctaaaataaacgttgaaaaattatggaagtggtgtcatgaaaacaataaatcattttttatcatgagtcttggctgtttaatgaatgctgtaaattcagttccagaacttaaaagaagaataattaatggaaaagctattgaacatgattatcttgatggcgtaagtccaataatggatgaaggaaataaaatttatagagaaatgagagtcaaaacaccacaggagtttaatgacattttaaaatggcatgattatataaaagattactcaaaaaatattttaagtggaaaagaagaaggatttactattgaaatggaaaaaagagatttggaaaatattgcaaacttttcatgcattccttgggttgactttgatatgattacaaactgtgttttatccggaaaccaaattcagccattaattacttggggaaaagttaatgaaaagtatgaaatgagcatatccattacggtaagccatatttttgttaatggacgtgaattaggatatttttatgaaaatgctcaaaaagagtttgataaattttag

SEQ ID NO: 7089 - DNA, 1332 bp, Methanobrevibacter gottschalkii
  source 1..1332: mol_type = genomic DNA
atgaaagttattattgtaggtggtggagctgggggtatatctacagcttcaaatattcgtaaacttgatgaaaatattgaaattacagtcatcacaagagataataaagtagcatattccccatgtgctattccttatgtattgtccggtacaatcgaatcttttgatgatattgtaatgagaactcctgaagattataaaaataaaaatattgatgttattattgaagcagaagttacagctgtggattctaataaaaaaacagttacctatcaaaaaaatggtaaagaaactgtcatggattatgataaattagttcttgcaactggcggtaatccttttatccctccaatgcagggtgttgatttggatggtgtattcagaattcgcaatattgatgatggtatgaaagttcaggaagctttaaaagatgctaaatgtgcaattgtcactggtgcaggcttaattggtattgaaattgcatttgcacttaaaaaaagaggtttaaatgttattttaagcgaaatgttacctcaaatagttccaaggtctcttgataaagatatgtctgatattctggtgaaatatcttgaaatggaaggaatccaagttgttttaggaaaacctattactaaattaattggtgatggaaaagttgaaaaggcatgctttggagatgaagatatctatgatgcagacatggttatcatggccactggtgttagagctgaattggatttagctgaaatggccggctgtgaaattggaagatgggcaattcttgtcaatgacagaatggaaacttcagtagaagatgtttatgctgttggagattgtgtggaatctaaagatttaattttaggttcaaatactatttctcaattaggcactactgcagttcgtgaatctaaaacattagctcgtactatttgtggtaaaaaatctaaatttaatccggttttaaactcaatggtttcaaaagttggggatctggaatttggtgcagttggatatactactagttttgcacaacaaaatagaatcatgcctgttgtacaaaaggtacaagcacttacaagagctcgttattatcctaatgctaaaccaatggatattaaagttatctgtgatgggaacggaactattattggttgtcaaatcatagcggaagaaagagtagctgaaagaattgacactatgactttagctattactgaaggtttaacatgttttgatttaagtaatatggaatttgcttatgcaccacctgtttcaatggttacagacccattaatacttgctgttgaagaagtaagtaaaaaattcagttaa

SEQ ID NO: 7090 - DNA, 981 bp, Methanobrevibacter gottschalkii
  source 1..981: mol_type = genomic DNA
atggcggcacatggacatggtcatcatggtcacggaggccaaatgacacctgaacagcaaaaacaaatgatagaacaagatttaagactggctaaaaatttaggccaaatcaaacataaaattgttgttatgagtgggaagggtggagtaggaaaatccactgttgcagcaaatattgctgaaactttacaaaaattaggttttaaaacaggtattttagatgcagatattcacggtccgaatattcctaaaatgttgggtgtggatttatatggtgaacaattcaatgaataccaattcaaggtatttaaagaaattactgaatctggaatggcagataaggacttcaaaaatgatgaagaaaaattagcattcattgaagctaaaaaagaagaatataaacattccatgtttccagtagtagctccaagtggtcttaaagtaatgtctatggcattcttgttggatggtattgacagacctattatttggagaggacctcaaaaaacaggtgctattaaacaattaatttcagatgctcattggggttcacttgattatttaatcattgataacccgccaggaactggagatgaaccattgaccgttttacagactattcctgatgcagatgcagttattatggtaactactcctaatgttgtatctcaagaggatgttttaaaatgtgtaaaaatggttgaaatgatgaatatcaaacaaattggtcttattgaaaacatggcttactatatttgcccacattgtgatgaaaaactttacatatttggtgaaggtaatggtgaagcatttgcagaagaaatggaaatcacttacttaggcgatttgccgattgaagaaaaagtttctgatgcaccaaataatgaaggggcaatttctgtaattgatcctaatgatgaagtttcaaaaagatttgttgaaattgttaaagatattcaaaaagagtttataaaagagtag

SEQ ID NO: 7091 - DNA, 396 bp, Methanobrevibacter gottschalkii
  source 1..396: mol_type = genomic DNA
atgaaattaaaagaaattaaacatcctgaattgaaaaatcatattaatatgatttatatgcatggtgaaaaccaaaataaaactgcaattaataaaacagaagaagaaattaaaggttatatcagaaataaagaatttataatatctattgaaaatggaaaacctgtgaggattccttatgcaaatgacggagagtatttagttccaatttatacagatgaaaaagagtacattatcgcaatggattatttttcactaaatgatatggctgaaaataaggaatatataattgaaaaattagattactttaaaaaattaaaaaaggatcctaatttcttaggatatattgtaaatattgcaagagtaagttatattattaaccctactcttttataa

SEQ ID NO: 7092 - DNA, 870 bp, Methanobrevibacter gottschalkii
  source 1..870: mol_type = genomic DNA
atgtttgcaaatcaaaaagttatttacttggctgggggatgcttttggggtgtcgaggcattcatttccagattaaaaggagttaatcaaactgaggttggatatgccaatggtagagatttagcaccaacatatgaaaaagtttgtagcggaaaaactgggcatgcagaaactgttaaagtaacatacaatcctaaaataattacattagaagaaattttagaaaattattacaaaataattgatccatttagtgaaaatcgccagggaaatgatattggaacccagtacagaacaggaatttactggcaggaaaatccgcaaaagaatattattttaaaatttataaaagataaacaaaaattagaatcaaatagaatatctattgaattatctccaattaactgtttttatgctgctgaggagtatcatcaaaaatatcttgagaaaaatcctcaaggatactgtcatgttgatttaaatctaataaacaatgaagaatttaaccacttaactaaagaggagtatgaaataacacagctatccatgacagaagcgccatttagtggcaaatatacaaacttttttgaagatggtgtatatgtagatgttgttagcggtgaagttttattttcttcacaggacaaattcgactcaggatgcggttggccatcattttcaaaaccgattaataaagaagcagttataaaaaatagagattattcccatggaaccacacgtatagaaattagaagcgctaaatctaactcccatttagggcacctattctatgatggtcccggaggaagtcccagatactgcataaattcatctgctttaagattcataccaaaagatgaaattgaataa

SEQ ID NO: 7093 - DNA, 195 bp, Methanobrevibacter gottschalkii
  source 1..195: mol_type = genomic DNA
atgttttatagtacaataatgaaaattgattcaattgatagattgagggatatcagagatgcattgctcgttgaacagggtattaatcctacccgtcaaggagagcaggctataaaagtcgttgttgaaagaattgacgaaattcaagctacattagataagtctgcaactaaaaatttaaacagaaatagataa

SEQ ID NO: 7094 - DNA, 276 bp, Methanobrevibacter gottschalkii
  source 1..276: mol_type = genomic DNA
gtgataagacgtgtaacaagtggcagacgtttacttagaaaaagaatgtataaatcaccacatgcccgtcataaaaatgccacatatcatcgggaaaataaaagccttgttaaaattcatcaaaataagtttaaagatatgaacggtcctaatataaaacctaaaagaaggcctaaacgtgaagttcttgatggatttaaaatgtcttatagatataaatattacaatagggatattgtagaagaaactgaagaatcagatgagaaatctgattag

SEQ ID NO: 7095 - DNA, 309 bp, Methanobrevibacter gottschalkii
  source 1..309: mol_type = genomic DNA
atgtgtagagataaaaaactattagaaaaaatagcatatgttcaaggatcagaacacaggaaaaatataatattatatatggaatataatttatatactccaaaagaattgggagatgctattggcgttcgcacaaatcatattagtaatctattatcacaattaaaaaaacagaatattgtttattgcgcaacaccgaatattcacaaaggaaaattatattccctaacagatgaagggaaacacatttttgaatatcttaaatcaaaagaagaagataaaataaatcgtataaacaacagcatttaa

SEQ ID NO: 7096 - DNA, 264 bp, Methanobrevibacter gottschalkii
  source 1..264: mol_type = genomic DNA
ttggataattcagttaagtatattttaaaatcgtcttatcgtgttcgtgttcttcaggcaatcggtcatgatgtaaaaacaccctcccaaattgcaaaagatagttccgtgttaaataatcatattagcagaacattaagacaattatacgaacatgatttaatagagttgattaatcctgaaatgcattgtggcagattgtatagacttactgaaaagggtctggttgttttgagtattattaataatgaatctgtccaataa

SEQ ID NO: 7097 - DNA, 4830 bp, Methanobrevibacter gottschalkii
  source 1..4830: mol_type = genomic DNA
atgaaattatttaacaataattttatatctgtattattaatattattcgttttagttcttgctgttaattcagttagtgctactgataataatattacggatataaataatgttaattctaatttatccaatgtattgaaaagttcttctagtttaaatgatggagatgctatttcatatgatttaatggataataaagatgttatttctcaaaaattttcttcaaatagtaatacaaatgataagtcaaatatgtctgatgtggttgattctattgaatctgttgcagaacctactagtttggatagtcctatactcaggtctgttgttcctagcggcattacatttgatggagttttccatgttggtactggacaacaatattcaaatatacaagacgcattagatcaatgtaggagaggcggatataattatcaaattattatacatgaaggtacatatactggatatggtaataaaaatttagttattgagcctactacttggtggaaccctaattttggttacttggatattagaactgcaaatgatggtgatgtggtaatattaaatgcagaaagatctccaagcattttaactattaattctagaaatgttcatattactggattgacatttatgaatgcttataattatggtagtggtggaacatctggtgctggtgttgctataaatattaggaaaggaactgtatctatagataattgttcttttattaataatgaagctagaaatctttggggaggtgcagtccatattgattcaagtataacaaatcgtatttctaatatagatattacaaactctttatttgttaataatagtgctgaggtaggtggagcattccgttctgaaagatattctagtaatattaatataattaatactacatttattaataatactgctactgaacatggtggtgtagcatgtttatttagtacagatgtgacatttgcaaattgtacttttataaataactctgctccttcatctggaggtattcattttcatgttggcggatcacatatcgataattgtacttttataaataatagtgcttatggtactggttcttctgaagaaggttatggtggagctattgcgttagtttatagtactagtgatggtgttattatttctaattctagtttttccaataactttgccggtaaatatggtggtgccattgatgtaaatggcagtggtagtaatgctaaaatattgaactgtaattttgaaaacaatactgccggttatggtggcgctatccgtgttcaaggttctaacactgttattgataataacagtttaattaataataaggctattaatactgatggtggtggaattcatgttgaaggtagtaatactcaaatttcaaatactatttttagaaataattctgctgctgctaatggaggtgctttagctattgttgctggtgataatacatttgtttccaattcagtcattgctaataacactgctgtgaatggtgcgggtgcttatattcaaggaagaagagtaactatatccgattctattgtcgctaacaatactgcagaccaaaatggtgcaggagtttatattgatggaagttatgctactataaaagactctactatttataataataatgctactgttaatggtggtggagcttatataaatggtagggatgctactatctccaatgttaactttgtgttaaacaatgctattcctgatgaagaagctttggatgatggtcttggtggagctatttttattgctggtagtaatagttatattgaggatagtaattttacttataatactgctcgtaatggttctgctatttatatagatccgacaagttctatagcaaataattatatttataactgtaatttcactgaaaatcaagcttggagttattggttacctattttctataatgatgtaactaaaactattgaatctaatttaactggtggaaataatatattaaatgctatttacaataatggaagtaacttacatattttcattgatggcgtaaatcctgttttgggatgggaaaactctcaaaatggtacaataatgtatcaagataaccgtgagtttaatcaaactattgtaactcttgtttgggataggcatggtaatttagtatttaatgaaactgcagttactgatttagcaggtaatgtttgttatgatattcctcaagatacacatttatggtttatagttagtatgactcatttagaggatacttattataaagaaattactaatattacgggtattaatattaatcctggtttgactattactgatgtaactatgtatgagggtaattcaactcctcaaacaatatatattgttttagctgatgatgatgctaatcctataccaaatgaaggtccaatcatgatttatgtcatggttaatggtaataagattcttcttggtagtggtaatactagtaagaatgcagtattgattcttaatgaaagtgctgtatttaaaacattaaatcccggcaattatactattattgcagaatgtacatatgcatattataatgaaactactcaatccatatctaataaaactgtatcaactgaaggtattttagaagttcttccatatatctggagtcttaataaaactatttctcatgttaatggtattccatatattgagggtatggttatccagataaatgataatgttacttttaatataactgtatttaatgaagttaatactacgttatatggattaaaattaattgatttaaatactgaaggattaagttatgtttctactttaccttccaattggaattatgaaggtaataatgtatggacattagataatctagttaattatggaaattcatcattatttgttacttttaaagtacttaaaactggtaatttaactaatattgttaattgtagttttcttgatggttttaaaaataaaagtgctaacattacttttgcagttaatttaactgctgatttgggtgttagtaaggttgttaatgtttctaatcctaattacggtgattttattaagtatactgtagttgtttctaatgctggtcctgatgatgctactggtgttgttgttaatgagactttgcctgtgggtttggtttatgttagtgatgatgctagtgttggtagttatgatcatgttgctggtttgtggactgttggtagtttggctaaaggtgatagtgctactttgattgttgttgtgcgtgttggtggtactggtaatattcagaattttgtgaatgttagtggtgctgagtatgataataatactggtaataataaggccaatgttactgttgctgttaatgctagtgctgatttgggtgttagtaaggttgttaatgtttctaatcctaattacggtgattttattaagtatactgtagttgtttctaatgctggtcctgatgatgctactggtgttgttgttaatgagactttgcctgtgggtttggtttatgttagtgatgatgctagtgttggtagttatgatcatgttgctggtttgtggactgttggtagtttggctaaaggtgatagtgctactttgattgttgttgtgcgtgttggtggtactggtaatattcagaattttgtgaatgttagtggtgctgagtatgataataatactggtaataataaggccaatgttactgttgctgttaatcagcttaaaacttatattatcgtttttaataatactgtttatcctggtgatgatgttactgttattgttactgttactactcaaaacggttcattatttaatggtaatgttaatgttgctttaaatgatactgcaaacactactaaagtggttactattgttgatggtactggtagttttaaggttacagttgataaaaatcttgttaatggctatgtaattggtattaatgctagttatgatggtaatgatacttatattggatctaaaggttttggttggattaaggttttaccagtcaaattccatgttgaaaaaactattgtaaaaggtaatgaatttttcattggtgatgagataatatttaatattactgtttataatgattgtaatggtactttatacaatttagttgttagtgatgttcttcctaatggtgttgtgcttattaatagtggttttgggctttggacttatgatggtggctcttcttggagttatggtgatttaagtgcaggcgctagtgctactttgattattaagtctagtgcagttaaagctggtagtttcactaatgatgctaaagctacagtaaatgatgttcttgataatagtagtttggttgatttcagtatttcaaaattaaatactagtatcagtgtatctaatgttacagggcatcctggtgatgtagttgttataactattaaagttagtactggagataatgttccgtttaatggtgatgttgatgttattttactcgatggtaaaaaaattattgttcatgtaactaatggtattgctaagtttaaatggactattcctaaaaatgctaagaataatactatatttagtattttcgtatcatttgctggtagttcaaaatactttggatctaataatactggatttatcaaagtaattgataataaacaaaacaaaactaatcatacagataacaatgattttactgataaatgtaataaagggattattaaaaatactggtaatccattattagttttattaatttcaattgttattttggttatatcattaaaacgtagaaaagactattaa

SEQ ID NO: 7098 - DNA, 270 bp, Methanobrevibacter gottschalkii
  source 1..270: mol_type = genomic DNA
atgaactttatttgccctacaataggtgaaggtcatgaaaaagattttcttgttactggaagtcttgatgattttaaaataattgtattttcaaacatggaagaatacaaaaagggttttgaatacttaaaattagctgattatataccttatgaagtttcaattgaattatttaaaaagcttgcaaataacgatgatgaattttccggcattattttagacatacattctaaaaataaaattattttaaaagaagaattattaaaataa

SEQ ID NO: 7099 - DNA, 444 bp, Methanobrevibacter gottschalkii
  source 1..444: mol_type = genomic DNA
atgaatattaaagattacgaagattaccaaaaaaataatgtgaaagcttcaaaaagccaattaaaggaatatattcaaatatatgcagatatggccaaaaaactcaagagcgaaaatgctcttgagcttgaagttatcaaaaaaaatattaaaaacacatttcctaacgagatttattttacattagtggatgagagtggaaaacctgttaaattaactttaactgaaaaaagcaaaaaatatattattccaatttttacagatattagagaatatgctattggaagtgcaaaaatatccaaattattcttagataaattagagatgaatgtcctcagtccagaagacatatctaaactagctgatgaagatgaatattttcaaggatttgtaattaatccacattcacagaactttaatatggatagaaatgcgagtttttag

SEQ ID NO: 7100 - DNA, 549 bp, Methanobrevibacter gottschalkii
  source 1..549: mol_type = genomic DNA
atgttcatttgttttaaaaaaaaaacttattttaatgattattacacatacggtgatataatgagcgaacttaaagaattagttaaaaaatttattgaaattgatgatgatttaaacgaaaagattgaagcggcattaagcgaatcagaagaacttgatgacacatttgaagaagagcacaaagaacaaatcgaacaattaggtaacatttatcatgatattgaacacattgttttcagcgaagaattcattattgtatctaatgctaaaagtgaacaaaaagaaattgttgcattaattataagtgaagaagatgaagaagtagaggaatttgttattcctgtttttactgatgaagaagaagcaaataaagctattgaacttttcaaagaacaatttgaagaaaatgaatttgtttgtgataaaaaaactggtaatgaaattgtttctgaatatgctgaagatgaagaattcattggacttgccattaatgcaccacaatgggattttgtaatcggtggtgaagatgttcacgaatgttgtgaataa

SEQ ID NO: 7101 - DNA, 1743 bp, Methanobrevibacter gottschalkii
  source 1..1743: mol_type = genomic DNA
atgaatattaataataatatgaagttgggtctaattgcagctatatctattatagctctttttgttttatctttatggatttcccaaacacctgctaatgatgataattctattcgttttggtattttaacattattgccgcctttagtagctattggtttggcgtttattactaaagaaacaatcttgtcattatttatgggtgtatttgtgggggaatttatgttgtgtgtaaatgatttaaatattgtttccacagcaattaatgcatttttacaaatgggttctcaaatcatctcatgtatggctgatccttggaatgcaggtattattcttcaatgtttacttattggaggtataattcaacttgtaacaaaaatgggtggagcaaaagctcttgcagatacatttgctaggagagcggatactccaagaaaagctcaattattcacttggtttttgggattatgtgtattctttgatgattacgcaaactctttgattgttggtcctattatgagaccagttatggacaaacttaaagtatctagggaaaaattagcattcattgtagatgcaactgcagctcctgttgcaggtattgctattatttctacttggattggtttggaaatcagtttaatcgctgctggatttgaatctgttggtgtaactaatgtcacaggtttcggtatatttttacaaactatcccatacaggttctacaacattttcattttacttttcatagttatttcatcaataactttatatgaatttgggccaatgaaaaaagcggaacaaactgcacgtaaaagaaaagaaaatgaagaaatcattgttccaaatgctcctggttttgatgaggttaaaccagttgaaggaattaaattatctatatggaatgcaattatacctattggtactttaattataggtgctcttattgcattctattggagtggatacaccactattttaggtggagaggatcaagctctcattgctataatgaaatcatctccattatcatttaatggtgtttttactgctttatcacaatctgatgcttccgttgctcttttccaagctgcacttcttgcttctattgtggctatagtgatggctgttggtgagagaatactcactattgaagatgcaatctctgaatggattggaggtatgaaaactattgttattactggtgtaatattgcttcttgcttggtctttaggtggagtaattggtgatgttggaactgctaattatttggtgggtgttcttaagaatacattgcctcaatttattgttcctgcattaatctttattttaggtgctttaatttcatttgcgacaggtactgcatatggtactatgagtattttaatgcctttggcaattccattggcttgggcagtaggtagtggtgacatgtcatttactattgtctgtactagtggtgtattgactggagctatctttggtgatcactgttctcctatttcagatacaacaattttatcatctatgggaactagttgtaatcatattgatcatgttcagacacaaatttattatgcaatattcgttgcatctgttgctatcttcatcggttacatcccagcaggtttaggaatcccttggttcatttcaattcctattggtgttgttgtaatgtatgttggacttaaaattttaggtcaaaaagtagattttgatgaagttgaggaatcatcctcatag

SEQ ID NO: 7102 - DNA, 711 bp, Methanobrevibacter gottschalkii
  source 1..711: mol_type = genomic DNA
atgaaattatcaaaatcaaaagttaatacatatttaaaatgtccgcttgagtttaaatttcaatatattgatgaagttgaagttccgcaaaacaaatatatggctcttggaagtgatgttcatttaatcgctgaaaaatttgctaaaaagtttggtgataacctagataatattgatattgataatgaacttttaaaaatagttcatgaagaggatatcggatatgatttaacaccgcatgttgataatctaagttctttttttgaagaagtgtttgttgaaaatgattttaaactctattcacaggaagaatatttacttgatgaagaaaatcgtttttctggaatctgtgatattattttagaagatgaaaatggtgaattagttgttattgattataagacttccaattcaagttctttttcaaaatatcgtcgtgaactttgttattataagttgcttgttgaaaatgtttgcagaaaaccggtttcacgtgtgggagttttctttactaaaaatggtcgtttaaggttacttgatatttgtgatgaagaaaataaacgtaaatatttaaattataaagaaatcgatgaagcaatcaaaacacttcatgaagtcagaaataacatcaataatgaaaagttcccagctaaaaaacaatttttatgcaaatattgcacttataaacatctttgtgatgcatatttttag

SEQ ID NO: 7103 - DNA, 507 bp, Methanobrevibacter gottschalkii
  source 1..507: mol_type = genomic DNA
atgaaaagattatacgccttacttattatattgattgttatttatattgggattaattcattcagtttgattttcaatgataatggaactaatgatgccaatgatgttaatgaaagtatgataactgtaggagcaagtagtttgcccgaaattgaaaactttacagacaatactttaaatgatacaactattagtttagttgattcaaataaaaatatgacaattctagtttcagaaattgataattcccaatcaattagtgatatcttcaataattttgtaagcagtaatgatattagttcaactcagactattgatcaaaatggtgtaacaacttatttggcatacagcagtggaagtgattcatataatgctgatattttctttaataaaaatggtcaaaattattgtattagtggagataatattttatcttcagatagtgattactttataaatcactgtaaaggtattatagatgcaattagtataaattcaactagttaa

SEQ ID NO: 7104 - DNA, 543 bp, Methanobrevibacter gottschalkii
  source 1..543: mol_type = genomic DNA
atgaaaattgtagcacttcaagcaagtcctcgtaaagatggaaattgtgatgtattaatggatgaaatgattagaggtattgaagagaatggtggaaaagtaactaaatattatttggaaaatcaggaaattgcaccatgtaaagcctgtttatactgtgctgaaaatccggaatgtgtacgtgcagacgatggaaacaaaatattggatgaaatgattgaagctgatggagtaatatttgcaactccagtttactatggtcaaatgtctgctcaaggtaaattaattattgatcgtttttacagtattggccaaaaccctaataaaagtttatctggtaaagcagcattgattttcactgaaaaccaaccagaacatacttatgatagttacattgagcttacaaaagcatctccatttgaatttatgggttatgatgtaattggacatgtggatgcaggtaatgcaggtccagcaggtattgttgccgaagaacaaaaagataaattaaaagaagcatacgagcttggtttaaaattttaa

SEQ ID NO: 7105 - DNA, 240 bp, Methanobrevibacter gottschalkii
  source 1..240: mol_type = genomic DNA
atgggattaagttcattttttaaaagagtaaaaaaagatgccaaaaacgaagaaattgttgaatgtcacattgacatcaatacggatgattgtgatggatgtgaaaaatgtggtattgcatgtccaaataatgtttttatgatggttgataatgtttctaaagtacgtgattctcaagtctgtaaaaattgcaaaatatgcatggcaatttgtcctaatgattgtataactgttaactaa

SEQ ID NO: 7106 - DNA, 297 bp, Methanobrevibacter gottschalkii
  source 1..297: mol_type = genomic DNA
atggattttttacttgttttagcaaaaattcaacctaaggaaggttgtcaagacagtatcttagaacttgcagaagaattaatttatgaatctttacttgaagaaggtaatattgattaccaattattgaaatccagtgaagatgattcattgacttttgttgaaaaatgggaaagtccggaatatcttaaaaaacacatggcttcaccgcactttttaaattttaatgcagactgtgaagaatttattgaaagcaatgatattcaacttattgaagctaataaaatagaaatataa

SEQ ID NO: 7107 - DNA, 693 bp, Methanobrevibacter gottschalkii
  source 1..693: mol_type = genomic DNA
atgatatattcaacagaaattgaaaatatgtgtcttgttcgcaaaggtgcaaatcatgaccctgctccaatccctgaagagggtaaatgggttaaagcaaaagaaataagtgatatttctggttttacacatggtattggttggtgtgcaccgcaacaaggttgttgtaaattaacattaaatgttaaagatggaattattgaagaagcattaattgaaactttaggatgttcaggaatgactcactcagcagctatggctggtgaaattttagttggaaaaactattcttgaagcattaaacactgatcttgtttgtgatgctattaacactgcaatgcgtgaattattcttacaaattgtttatgggagaactcaatctgcattttcagaaggaggtcttcaaattggcgctggacttgaagatttaggaaaaggtcacagaagccaagtcggaacaatttactcaacaaaagaaaaaggcccaagatatttggaattaactgaaggttatattactgaaatcgggcttgatggagataatgaaataataggttataaatatatcaatcttggagtcatgctggattttattaaagagggtattgacccattggaagctataaaaaaagctactggtcaatacggaagatttgatgatgcagttaaaaaaatagatcctaggagtgaataa

SEQ ID NO: 7108 - DNA, 1002 bp, Methanobrevibacter gottschalkii
  source 1..1002: mol_type = genomic DNA
atgagtctgtttgaaagttatgaaagaagaattaatcaaatcactccggttttagagaaatatgggattaaagaccttgaagaagcaaaacagatatgtcttgacaaaggttttaatccatatgatattgtaaaaaatgttcaaccgatttgttttgagaatgcatgttgggcatatactcttggagctgcaattgccattaaacaaggctgtgtgaaagcttctgatgctgcaaaggcaattggtgaaggtttacaggcattttgtattcctggaagtgttgcagatgaccgacaagtaggattgggtcatggtaatttagcatcaatgcttttgagtgatgaaagtgaatgtttcgcatttcttgcaggtcatgaaagttttgcagctgctgaaggagctattggtattgcaaactctgcaaatgaagtacgcaaaaaacctttaagagttattttgaacggtcttggaaaagatgctgcattaattatttctagaattaatggttttactcatgttgaaacagaatttgattatttcactggtgaagtaaaaatagttaaagaaaaagcatattccgatggtgaaagggcaaaagtaagatgttatggtgctgatgatgtgcgtgagggtgtagctattatgcatttggaaggagttgatgtatcgattacaggtaactcaaccaatccgacacgttttcaacatcccgtagccggaacatataaaaaagaatgcattttacagggtaaaaaatacttttctgttgcatctggtggaggaacaggtaggactttacacccagacaatatggcagcgggtcctgcttcatatggtatgactgatacacttggaaggatgcattctgatgctcagtttgcaggttcttcatcagttcccgctcatgtggaaatgatgggattaataggtatgggtaacaacccaatggttggtgcatctgttgcagttgcagtagctgttgaaaaagcaatgaaacaataa

SEQ ID NO: 7109 - DNA, 420 bp, Methanobrevibacter gottschalkii
  source 1..420: mol_type = genomic DNA
atgtccactttatggggtttaactgcaagaggaatttgccagttcaatgataaaattttacttttgaaaattagatctaattcggctcatgatgctgagaaatgggaaattcccggtggtaaagttaaaaaatgcgaattttttgatgatgcattaaaaagagaatatcttgaagaaactggtttggaaattgatgttcaggaactttataatgtagttcgaaatgattatactgcctgcaagacaaaagaagatgtcaaatcaattcaattaataatgaaagtatcatgtgataatgatgaagttaaaataagcggagaacatgatgattttggatggtttagctggaatgaaatagatgaaatgattgctggtgaattattaacacctgcagcaatcatggcctttagtaaggattaa

SEQ ID NO: 7110 - DNA, 798 bp, Methanobrevibacter gottschalkii
  source 1..798: mol_type = genomic DNA
atgcaaaaaattataaacgcacattgccatatttatccagaaaaaatagcatcaaaggcagttgttggaattaaagatttttatgatttagatatgtctttaaatggaaaagtaagtggtttaatagaagatggtaacaaagttggtgttactcattatttaatccattcagttgcaacaactccaaaacaagtaaaatccattaatgaatttattgctgaatctgtaaatactcatccagatatatttacaggatttggaactctacacccggatagtgaagatattcaaggtgattttgattatttaattgaacttggccttaaaggagttaaaatacatcctgattttcagcaatttgcgatgaatgaagaacgcgcatttaagattggagacgttgtgaataaaggtaatgtacctctgatggttcattgtggagatttcagatataattattccaatcctgatcaaataaaaccatttttggataaattccctaatataacatttattggtgctcattttgcaggttggagtgtatgggaagaagctactgaaaaattagctggaactccaaatttatatgttgatttaagttccagtttatatgatttaactcctgaaactgcagtaaatctaattcatgcatatggtgcggataaagtgttatggggaactgattatcctatgtgggaatctgtcagtgaaatggagtattttaataaacttgatttaactgaaaaagaaaaatctcaaattttatatgagaatgccgcaaaaatactaggtttgatttaa

SEQ ID NO: 7111 - DNA, 651 bp, Methanobrevibacter gottschalkii
  source 1..651: mol_type = genomic DNA
atgacaaataatgaattaaaactagagactaaatgttacgatgctaatgaatatggttatctatatggattaaacaaaaaaattccagatgaagaatttgaaaaagtaaaacccttttttaaagattttagaagaatggactttgtagaaggcaatgttcaagtaactggaagacctgaaggttatagatgtcttgaaaaagatgtaagtaaagtagaagaaatattgggaattaccaatactctggaaaaaagacaaaataaagtaaaagaagcatttgcagaccccgttaaaaaagcaaatcttattgatcaatcttatgaatggttaaaaatattatttgacaaaggtggaacaagacccgaacaagatttgagccggttagccgttcattcaacaaaaatttatgatccgaaagatagctttaaaagaggttgtgaaaaaggtgaaggagaattattcatttatacacctcatggaatgtggtatattataaacaattgtggtgaattttcagataaatctttaaataatgtacaaactccgcaaggtggtgcagtaggttatagattaatgtattatgatttaattgacagattaattagaatttacagtgaagagaatatatactcaggtaaacaattatattaa

SEQ ID NO: 7112 - DNA, 948 bp, Methanobrevibacter gottschalkii
  source 1..948: mol_type = genomic DNA
atggtaaaggtaagtatttttggatcaactggaacaataggtaaaaatgttgcatttacattagcaagaatggatacagttgatgaaattgttatggtttcaagacctaaaagtcttgataaagttaaaggggagacttatgatatgtatgatgcacttgctgcaagggatattgattgtaagctaatccccacatgcgattttaatgaaattagaggttctgaaattgtactcattgctgctggaattcatcgtcagcccggaatgaataggcttgaattagctattccaaatgcaaaaattgtaagatattattcaaaacaaattgctaaatatgcaccagattcaataatcctggttgctaccaaccctgttgatgttatgacaacaattgcacttgaagcatcaggatttaataaaatgaaagtaattggtgttggaaaccacttagattctcttagattgaaaaattatttctcaagaaaaattaatattaatagttctgaagttcacacaagggttgtaggcgaacatggaaatcatatggttccacttttaagttcaacatccattggaggtattcctttgaaatatttcgaatttgctaaattggatgttgatgctttagttgaacaacttaaaaatgctggaaatacaattatttctaaaaaaggagctactgaatatggtcctgcttttgcaatttcaaacttaatttcaaccatgataactgattctcataaagttctaacggttagtttttacttggaaggtgaagttgaaggtgttcgaaacgtttctttaggtgttccggctattacatctaaaaatggaatagaaatgattgttccaattcatatgaatgatgttgaaaaagaaagtttcatagaagctgctaatgtagttcgtgatacaacttacaaagttaaagagaatcttaatatttaa

SEQ ID NO: 7113 - DNA, 444 bp, Methanobrevibacter gottschalkii
  source 1..444: mol_type = genomic DNA
atgaagttagttgttcaaagagttactcatgccagtgttgaagttaataatgaagttgttggtgaaattggcaatgggttaatggtgttagttggttttggtgtgaatgatactaaaaatgaggctgattatctttctcgtaaacttgtaaaattaagaatttttcaagatgaaaatggtcgtatgaataaatctgtgaaagatattggaggtaaattactattaattcctcaatttactttatatgcttcaaataaaaagaatagaccttcttttcacaaagcattaactccagacattgcaactaaattatttgattattttgcatcaaaatgttctgaagaagttgatgtcgaaactggggaatttggagcatatatgaaagtagatttattgaataatggtcctgtaacaattctacttgaaaaagaagctgatgaataa

SEQ ID NO: 7114 - DNA, 1143 bp, Methanobrevibacter gottschalkii
  source 1..1143: mol_type = genomic DNA
atgacagaattttcattaaatgttgatgaaataaaagaaaatgttgaaacaactttaaaagaagaagaaaagaaattagaagattcaaatattaaaaatcaagctcaagacaatgcagttgcaatttttgacgctgatttaaataatccgcaagcaagggaaaagatattgaaaccattagataattttggtttaaatgagatgtctagatctgcagctcataatgaaatgttagctactagatttgttgatttaacaaaaggaggtaaagaatcggataatattggagaaaatctgatggaattaaatagggaaataaaagatttggatccaagtaaaataaattttgcaaaaaaaggtttactcggaaatttaatgaatcctgttagaaaatactttgctaaatatgaaaaagctgaaaatgctatttctgatattgttcagtcacttgacaaaagtagtaaagtccttcagaatgataatacaactcttttaaatgaagaaaattatttaagggaagttactaataaacttcttgcagatattgaacttgcaaaacaaatggatgcctctattgaagcacaaattcaaactgcagaaattgaagggattgatgaagaaaaaattaaatttgttcgtgaagagattttattccctcttagacaaagaatcatggatatgcaacaaatgattgttgtaaatcaacaaggaattgtatctcttaatgtaattagaagaaataataaggaattgattcgtggtgttaaacgtgcgcaaaatgtaactgtttcagctttaagaacaggtgtaatggttgctagtgctctttacgatcaaaaaattgtcatggataaaattaatatcattaattctacaactgaacacattatagaatctacttcacatatgcttaaagaacaaggaagtgaaatacaaaagcacagtgctgagactatgatttcacctgaagttctaaaagtttcattttccgaagcaattcaagctattgaagatgtaagcacatataaagaacaggcccttcctaaaatgaaagaaacaattgtgatgttcagtgacctagctactgaaggtcaaaaagttgttgaaaagattgaaacaactaatgaaaatttattaaaatag

SEQ ID NO: 7115 - DNA, 459 bp, Methanobrevibacter gottschalkii
  source 1..459: mol_type = genomic DNA
atgagacgaataaaacagcaacttacacaggaagaatgtattgaaatattaactaatgaacctcgtggagtattagcattattaggtgataatgaatatccttacacagttccaattagtcatgtatatgctgatggtaaaatttattttcatggggctcaagaaggacataaaaatgatgctgctaaaaaatatcctaaagtttcttattgtgtgattgataaaggagttaaaaagaaagaaaactggtggtacacatttaaaagtgttatagtttttggaaaaattaaaattttaacaaacaataatgaaaaaagggatagactaacatatcttggagataagtttttcccaacacatgaagaaacaattgatgaaattaataaattattggacaggacagaggtttatgaaatcaccattgagcatatgagtggtaaattagtaagggagaaataa

SEQ ID NO: 7116 - DNA, 660 bp, Methanobrevibacter gottschalkii
  source 1..660: mol_type = genomic DNA
atgattaacaatgattgggatttagctttaaatgatgaatttgaaaaagattactttttgaaaattaaagattttgtcagtgaagaatataactcaaaaacaatttatcctccttatgaggatatatttaattcatttaaattaactccattgagtaatacaaaagttgttattttaggccaggatccttatcatgaggaaggtcaagctcatggacttgcattttcaactccggagggcagaccaattcccagatccttaaaaaatatttttaaagaaattaataatgagtattcttatccaattccagagtcaggctgtttggaaaaatgggcaaagcagggtgtatttttattaaatactgttttaacagttgaaaagggcaatgcaaattctcacagtaattgcggttggcaaacttttacagataatgtaattagaatattgaataaccaaacaagacctattgtatttttgctttggggaaaacaggctgaaaagaaaaaagaattaataacaaatccaaaccatttagttctaattacatctcacccttctccattttcagcaagaagaggttttttaggatctaatcattttaaattagctaataaatttttaaaggaaaataatattgatgaaattaattggaaattgtaa

SEQ ID NO: 7117 - DNA, 567 bp, Methanobrevibacter gottschalkii
  source 1..567: mol_type = genomic DNA
atggaaattactgcagatgaaatgaaaaaaacaatacgaaaaatatatgaccgtctagataaagtatctcccgttgattttgactgtggaaaattgtgtggagaaatatgctgtgtctatgatgcagacgactaccataatgaagatttggccctatatcttctacccggtgaagaattaatgtatgaagatagtgatagttacaagttatattatatcgattcatctgaaattaaatatcctcattcttggaaaggtcaaatttatcttgttaaatgtattaaccctccaaaatgtgatcgcagtatccgaccaatacaatgcagaacatttccattaataccgcacttaaataaaaaaggggaatttcatttaatatttgatgaaagtgaatttccatacaaatgcccaattgtccagaaccatataaaattaaatgatgattttatacaagtgacttatgaaatctggtcaatattaatagctaatccattagtttatgatttagtagatatggattctagaatgagagacaatagaaaaacagattatgaaattataatttaa

SEQ ID NO: 7118 - DNA, 1386 bp, Methanobrevibacter gottschalkii
  source 1..1386: mol_type = genomic DNA
atgaaaattgaatttgaaacatatgtaatatttgtatcatttataacttcattttttgcagtgtttttatcaaatggtataataataggcgttccagcaatagcacaggattttgctatgaataacgttattcaaaattgggtgcctactatatttttccttgttgttgctgtatttacagttccggcagggcaaatttcaggaaaatttggtgttaaaaaatcactacttgcaggaattactgtattcctattaggttcaattggagcttgtcttgcattttcaactgaatcattcttaatatttagaatcattcaaggtgcaggagttgcatttttaaatgtatctgcaatggcaatggtagttcatgcagttaaacctcagaacagaggaaaagctttgggttttacagtgactggtgtttatcttgcaacatcactttcaccggttatttgtgggtttttagtacataacttgggttggagagcaatgttttactttgtaattccatttttagtattatgcataatattattaatattaaaaataccacaagaatggaagacatatcagcatgatacaattgataaagttggatcaataatatatgctattggaattttattattcatttacggattcactactttaattacaacaaatggtaaaatattaaccgttactggaattattttattagtgatatttggagcatatgaattaagacagaaatccccagtattcaatatgaatttatttaaaaataaaaagttcacatcatccaatattgcagcattatgcagttatcttgcaataatggtcgttacaacaattctaaattaccatttacagtatgtaaggggttgggatgcacaaatgtctggaatgatactgattatcacaccaatcattatggcaataatggctccgaacgccggaaaactatcagataaaatacatccgcaaaagctggcagcaactggaatggcaattgccaccattgcacttggaattttaacattcttaaatggggaaacaccaatttatttcgtaattatagctatgattctacaaggtattggtatggggcttttctcatctccaaatatgaatgcaataatgagctccgttccacctaaagatgccccaactgcatcagcttcacaagccacaatgagaacaatcggccaaaccatgagtttaggtcttttaactttagtatttgcttggataatgggtaatttagagttatctccacagtatacaaccatgattatacaagcttcccaaactatttgcggaatctgtacagcagcatgtatactggctattttcgcatcactcattggaatcaaatctagtgacaaatttaatacaggaagatga

SEQ ID NO: 7119 - DNA, 444 bp, Methanobrevibacter gottschalkii
  source 1..444: mol_type = genomic DNA
atggataaaagtccggatgtttttgataatgctccaataattggatggattcataatatatcaaaaaatcagttaaaatacctcaattcacaaatccaggaacttaatttaggtcgtgaagtacgttatataatgctgattcatgataatcctaactgttcacaagatgacttagtcaatatttatggtgaaagtaaagcaaatgttgctaaatcccttaaaaaacttgaaaacaacggatatatcactagaaatatgaatcctgaaaacagacgtaaatatatgttaaaaacaacaaaaaaagctgatgaattaattccaaaaataagaaaaatttcacttgattgggaaattaaggttggaattgatgaaaatgattatgaattaaaagaaaaaattagacagatagcaattaatggtatgaaacttattgacaataactaa

SEQ ID NO: 7120 - DNA, 300 bp, Methanobrevibacter gottschalkii
  source 1..300: mol_type = genomic DNA
atgaataaaattgaaatcgaattaaccgatgaacaattagaaaaagtaaaacaattggaagcacagaacattagtgttggacaagctattgacatgctttttgaagtaaaggagaaggcattatttgaaattgagaaaattgaaaaatcaggtttgatagataaagtttcaaatattaatgttaataataaaactgaaaacctggaagaaaattatggtgattctgaaaaaacttatgaaatggaagttcaagacatcaaacacagaattaaatggggtaaagacttctttaaattctaa

SEQ ID NO: 7121 - DNA, 687 bp, Methanobrevibacter gottschalkii
  source 1..687: mol_type = genomic DNA
ttgaatagaaagacaaaaataataattattgcaatttttttaattatagcaagcatattattcgttggaaatagatttttcataccgcattatgaaactattgcagacactgatataggtactgtagaagtggctacttatggaaatgcaaatgctacaaaatgcattgcattaattactggaattcatccaagggaaacactggctattaatccggaaattgatgcagcaaaacaatttgcaaatgatgatgttaaaataattcattataaagtcactgttacaaaaaatgcacaggactatagtaaaggacgtgcaaatggtgaaagtcttgttcataattatgtaaatccgaatgttactgcttctgatgctgatgctgttattattagtcattcacatattcctgaatatggtgaaggattttatgtagctactccagcaatggacaatgcatctgttaaaataggtgagaatataaatcaatcaagtgattttaattattatccggtcaccggtaatgaaacatacaaatcaacttctgctgtgcttgtttcaaaaccgattgctgaagcaggttatccaacatttgtatatgaagttccagaaaatgtcatggaatttattataactggcaaaacaaaggatttattccagttaattattgaaaatacttatgataattga

SEQ ID NO: 7122 - DNA, 1455 bp, Methanobrevibacter gottschalkii
  source 1..1455: mol_type = genomic DNA
atggattatgatgttatttatatcggaagtggaaatgcggcatggcaaggaggccgttttttaagaaaagcgggtcttaaaatattgattattgaagaaagtttatttggaggagcatgtgcaaacagaggttgtaactccaaagcattgcttgatgcaccatatgaaattaaagcattggcggataattttgaaggagttggaaaatctggtaattttgaagtaaattggccggatttaatgaaattcaaacaacaacgtatttctggaatgtctaaatttttagatggtaaatttaaagaatatgatttggatgttgcacatggaaaaggaatacttgtcgatgaacatacagttaaggtaggtgatgacacattcaccacagataaaattgtaatctgcacaggtttaaaacctgttattccagatattaagggaaaagagtatttgcatgatagtactgattttttggatattgcagaacttccaaagcatactattatcataggggcaggatttgtgggcatggaattcgcatcaataattgcggaagcaggtcttgaagcagatgtaattattcgaggaaatatggctttaaaatattttcaccaaccttatgttcaaaatgttattgaaattctaaaaaagaagaatattcgtttccatttcaaccaaactgtaaaagaaatcattaaagataataatgtcataattgatgatcctgaaagtaaagtttcaaatgttgaaaactcaatgaatagtgatgagctcctgagagatcctcaagcaaaaataaataacaaggcatatgaaaatgcttttactgttaatcttgatagtggatgcagtataactggagattatgttattgcagctatgggaagggaagctaatgtagaggatattggtcttgaaaatgtgggattaacatatactaaaaaaggaatcaaagtaaatggtcacttacagacagccgtttccaatatctatgcttcaggagatgttgcagatgtaggcattgctaaacttgtaactgttgcaatacatcactccaaatatctcgcaaaagagttattgggtaaggcagatgaaattacttatccagttatcccggcagttgcatatactattcctagaattgcaacagttggtgttccggcatatattgcagaggaaagtgatgattatgatgttcacactataagatatggtaattcctattcacttgaacttaaaaatgataggactgctgaggcaaaagtaattgttgataaagatttaaatattgtcggtgctgaaatatatgcggcagatgcagaaaatgtagcaaatatgtttacatttattattaataaaaaaataaccttaaaagatcttgatgagatgatttatgcattcccatcaagcagttccgtatgcttgtataaattacataatattcattataaattatag

SEQ ID NO: 7123 - DNA, 2955 bp, Methanobrevibacter gottschalkii
  source 1..2955: mol_type = genomic DNA
atgaataaaaaaatattaattttacttttaatagctattttaacattttccgtagctaccgttagtgcatcagataatacaactgatgactctgttattgattcatctaatcgagatgttgttagcgtagatgataataatgttgttagtgatgaatatgcggttaataaagtttctaatggggcgctggctgatgttaatggtgaagaaaatgtaaataatgatgttgatatggttatagatcctataaataatgtatctgtacttcaaggcgataatgttgatgtgaacattactgttaagaatataggggaaaataatgcttctaatgttacagttaattttgaattaccggatggattttcattaattgattctaataatgtatcagataatacttggcatataggcgatttgcagtcaagtaaatctactaacatcactgttaaattaaataatagtggaattaataatggtgattatgttattaacttaacactaagagctaatgaagggattgaagaaatttttaaacagaatgtaactgttaatgttataaaaaaacttattcaaacaaacttaactattgattttgataaagagtcatatgtatatggtgatgatgttggaattgatgttaagttacctgatgatgctactggtaatgtgactataaaaatcaatggcacagaaaataatgcaagtattaatgaggtattgattttatctaatttgactcctggcaattatgaagttaatgttacctatagtggggatgataaatataatggaagctctggtaaggctagattcacaatatccaaagccaacacaacagctgcaattgatattgtcagtattaaagttgatgatgagttaaatattactattaattatgattctgaaattaatggtaatgccactatttatgtggataatattaaaaatcaaacaattgaaattattgatggaaatggaaatgttactattaaaggattatccaaaggaatgtatgatattaaagtagcatttgatggaaatgattgttataattcatccgaaactaacaaaactattgaaatatctaaaaacacagtaaacatgttgatcaatgtaggagatattgtttatggtaatgatttggttattaacctcaaattacctgataacttaacttcaaatgtcactgtaagtttgggtgatattaatagaagtattaattgcagcggcaatgtaacatttaaagatatgaatgctggaaattatactgcaattgtaagttatggcggtgatgaaaattactttaatgaaacaaaatatgttgattttaaaatatataaagctagtacacaaactactgtcaatacatcagatattaatataggcggagtgttaaatgtcagtgttgatcctaaaattgatggaacagctactgtttatttaaatggaactaaatattcagatgatattgtaatagttaatggtagtggaaatgttgttatttcaaatttaatcgaaggaacttataatgttcttgctgtatttaatggaaatgataattataattcctcattaaccaataaatccattaaagtatcaagaaatgtttttaacattactgttaatgttactgatgtttgttatggtcaagatgtaataattaatattacattgcctggtgatgttaccaacacagtagatgttgtttttggttataactctcaaaatattaatcttgaaaatggtgttggaactgttaaatttagtgatttggatgtgggaaattataatgcaactgtgatatattatggtgatgctaaatacttaaaaagcactcaaatcattagtttcaatgttactaaagctaaaccaacagttgatgttaatatttcaggcaataagcttggtcaggatttagttataaatattgcattgcctagtgatgtaaaaaataatgttactgttggaatagacaatatctctcaagatgttaaagttacaaatggtgtgggtaaggcaatatttaaagatttaacaattggagagcatgttttgataattgattatagtggtgattctaactacttgaatactactgaaggaatttatttcaatgtatctaaagcaataccggtcattgatattgatgttaaaaacatatatgttaaaggtaaggaagttatagatatagctcttccagatgatgcaacaggttctgtaactatttttattaatggagttgaacaaaaaacagttaatgataacattagcagcattgttttaaccaaatctggtttggctgccggaacttataatgtgatggttagctatactggagattctaaatatgaatctgcaaatacaactgttcaatttaaagtttcaaagtacaaagctaaattgaccgcatcatcaaaaacttataatgttaaagtaaaaaccaaatattactacattactttaaaaaacaacaagaataaagtaatgaaaaagattaaagtctatttgaaagttaatggtgtaacatattccgctacaactaatagctatggtaaagcatctttcaaacttagtaaattaactaaaaaaggaacatatgatgctttaattacatataaaggcactagttactataataaattaactaaaaaagttactattgcggttaaagcaactccaaaattaactgcttattctgcaaaattgaaaaaatctgttaatgccaaaaaatatagtgtaactttgagaacagacaaatataaagcaatgaaatatacaaaagttactttaaaagttaatggtaaaatctatactttaaaaacaaatagtttaggtaaagcaacttttaaaattactaatttgaataaaaaagctaaattccttgcagttattagttattctggtagtaaatactattattctgcaactaaaaaagtgatattgacagtcaggtag

SEQ ID NO: 7124 - DNA, 483 bp, Methanobrevibacter gottschalkii
  source 1..483: mol_type = genomic DNA
atgtctcagttttcaattaggtttgcagaaaaagaagatgtttctttagttttgcaatttataacagaattggcagaatatgaaaaaatgttgaatgaagtaatagctagtgaagaattattgaatgaatggatttttgataaaaaagttgcagaagttatatttgcaatggaggatgataaagaaattggttttgcattatttttccataatttttcaacattcttaggtcgtggaggcatatatcttgaagatttatatgtaaaacctgaatatcgtggaaaaggatatggtaaaaatttaattaaaagattagcagaaattgctgttgataggggttgcggaagattagaatggtggtgtctggattggaatcgaacaagtattgagttttacttatctcttggagctgaaccaatggaagattggactgtatatagaattagcggagatacattagaagaattaggaaaaaaagaataa

SEQ ID NO: 7125 - DNA, 288 bp, Methanobrevibacter gottschalkii
  source 1..288: mol_type = genomic DNA
atgaactcaaataaaattaaaatcgaatttgaaaaagaagataacagcagtatagcatatgatggcaatcggcaaattggccaatgccactttgcaagactaaaacaaaattggataataaccttgactgatgtggaaaaagactaccagggacagggaatcggaaaaaaactcgtagaaaaagttattaacgaagcaagaaaagaaaaagtaaaaatcgttccatcatgctcatatgcaaaaaaattaatgtttgaaaatcctaaagagtgcaaagatgtgctctaa

SEQ ID NO: 7126 - DNA, 237 bp, Methanobrevibacter gottschalkii
  source 1..237: mol_type = genomic DNA
ttgtcaaaacaagaagaactagaacaaaaaggatacaaaacttattcaaatgatgaaattaatgttttttggaatcctaaattgtgtcaacatgcaactgaatgtataaggggaaataacaaagtattcgatgtatcaaggagaccttgggtagatgtttcacaagctcctgcaaaagaaatagctgaaattattgacagatgtccaacaggagcactgttatatgaactcaaataa

SEQ ID NO: 7127 - DNA, 1650 bp, Methanobrevibacter gottschalkii
  source 1..1650: mol_type = genomic DNA
atgaaagttattgctagtactagaaatgatgatctcaaaagattaaatgaaatttataaggttcttaaaaagaatgattttggttatttgattgaagaaaatactttttttaggaaatttccatttttaagaaactataaaatagaaaaagaagataatttttccgatgaatctgtccctttgagaattagaaaagtactggaagaattaggtccagcatatattaaattagggcaaatgttaagtacaaggcctgatttagttggtttggaaattgcagaagaacttcaacagttaagagataatactcctataactccttttgatgaaataaaagaagtcattgaagaagaattaggcaaacctatggaagatatttatagtgatattgaccaaaatcccttaggatctgcatctatcgggcaagtttttaaggcccaacttaaaagaaatggtgaagaagtagcaattaaagttcaaaaacctaattcccgtgaaattatagaatctgatattaaaataatgaaattccttgcaaaaaggattgataaatacatttcaagttctaaaacttttaatctacccacaatagttaatgaatttgaaagatctattcttaaagaaattaattatttagaagaagtaatgaatatgcaaaatctttcaaaaaacttcaaaaatgtgaattatattaaaattccaaatgtatatattgattattgcagtgaaaaaataatcactatggaattaataaaaggaattacagtcactgaattaattgaaggggactatcctcatattaataaaagattaattgctaattatggtcttaaatcctattttaaacaaattatgattgatggttatttccatgctgatccccaccccggaaatttaattgtaacacgggataataaattgtgttatattgacatgggtatgatggggattttaagtgaggattttaaagaaaatttagctgaatttatgttgcttttgataagtggaaatacagacaacattataaaacaattaatttatatgaatataatttccccatcacaaaatacaccggaattacgtgcggatattaatgacttattgaatttgtattatggtgcggaattaaagaatatggatggtgcaatggaagatttacttaatgctatggttaagaataatgttgttcttccaaacgaatttgtaatgattggtcgtggtattgctttgattgaagatacgggtaaaaagctcgatcctaattttaatgctgctactgaattgaagaaattatctagaaagattgtagttaataaatataaacctgaaagattggcaaaagtcagtttgaattatcttttacaattggaacatctagcaaaagacttaccggatacaataaatagcactatttcaaaattggaagaagggaatattgaagtaaaattaaagcatgaaggaatcggtcatttgattaatcaattatccatatctttaattttatcatctttaattattggttcatctcttgctcttatcactgacgttggtccggatttatttgattttccaatacttggattaatcggatttgtttttagcggagttcttggagcctatttagttttaataaatgtaattgaaagatga

SEQ ID NO: 7128 - DNA, 1338 bp, Methanobrevibacter gottschalkii
  source 1..1338: mol_type = genomic DNA
atgttaaatgaatttttcaaattatctgaaaacaacaccgacgttaagactgaagttattgcaggactcactacattccttgctatgtcctatattttaggagtaaaccctggaatgttagctgaaggaggaatgcctgcaactggagtatttttcgctactgctcttgcgtctggtattgcgtgtattatcatggggcttgtttctaaatatcctgttggattagctcctggtatgggtatgaatgcattatttacttatactattattttaggtatgggtaacacttgggaagctgctcttgctgcagtattcatttcaagtatcatatttttattaataactgtttctggacttagggaagctattcttaatgcaatcccgcacaatttaaaactagctattggtgcaggtattggttttttcttagcattcattggtttaaaaggtgctggaattatcgtagctgatccatcaacaatggttactttaggatcattgttctctgctcctgcacttttagcattaatcggtattgcagttactttaattttatatgttagaaaagtgcctgccgcagtatttataggtttagtaattactgctattttaggcattatatttactgctgcaggatttggtgttggagacatagctatgccttcagttccaactgaatttgtatctacaacaattgatacatctgtatttggtgcatttgcatctggatttagccagttattcacaaatatccctaatttaattttaatcttattctcattactttttgttacatttttcgatacaactggaactttaattcctttagcaaatcaatgcggtttcattgatgaagaaggcaatgctgatggaatagacaaagcattccttggtgatgcaattggtggtattattggtgctattttaggtacaagtacattaactgcatatgtagaaagtgcaactggtattggtcttggtggtagaaccggtttaactgctatagtcacaggcattctatttttaatttcaattatctttgccccaacagtattagctttatttacatcttctgtaactgctgctgcattagtgatagtgggtatcttaatgatgattcaattaaaagatgtggattgggatgatttagttgtcgttgcatctgtattcatgaccattatcatgatgcttttaacctactccatctcattaggtattgcattcggttttgtaacttacgcaattaccagtattgctgcaggtaaagcaaaagaactgaattggttagtttggataatggtacttgtatttatcatatacttattcttcggattatag

SEQ ID NO: 7129 - DNA, 2079 bp, Methanobrevibacter gottschalkii
  source 1..2079: mol_type = genomic DNA
atgttgaatatgtattatgatatgatgattaataaatatattaatcaaattgacacatccattgatgctttggagttaaagctaagagtctgggattttattaattctttagataaaactgatttgtctgaagaagaaattaaaaacattgtttctaacattgggaatttaggaactactttagaagaatccaattctcctaaatttgagtggtatttaaatacaatagttgataatgatttatgcgccaaatgtggagcttgtagtattgtatgtccaaatcatatagttgaatttgaagaaaaacctttcattgtaaaagaatgtttacgtaaaggaaatgggatgtgtcaagaagtatgtcctagagtaaatgcagggtcatatgaaattagaacacgtttaaattcttttgaagaatattattatggaaaatcagatataaaaggccaatcaggtggagttgtaactaaatttttagaatatctgttaaacgataaaaaaattgatggtgcagttgtgattggtggtagtcactggaaaccttcaagtatgctagttacaaactctcaagatttattaaatttacataaaattgacattgattcaacacctaaaagcagatactcaatttcttcacttaatgcaataatggaagccggagaaatgggttttgaaaaaattgctgttgtcggacttccatgtcaggtagcgggattgagaaatattcaatatcatcagttcaattcaaaacatgatgctgaacggggatggaatggtcggcctgctaaaattccaaaaattgaatatgttttaggactattttgcactgaaaaatttgaatactcaaaaattttggataaaatcaatactcttggaattaatgttgatgatatagttaaatttgatgttaaaggacctaattttttaatatccacagaaacagaagattatgaaattaaattaaatgagatggaaccatcccctggatgtttaatgtgccgtgattttgatgctgaacttgcagatattagttttggagaaaaaggttcacctaaaggattttcaacagttgttatcagaaccgaaaaaggaaaaatcataaaagactattttgatttcaacaatgatgtggatattgaagaaattgaatttatgaggaacttcaaagaaaaacgtttccaaaaagaaataaaacacagaaaagagagtggcaaagctaattcttattattatctctggagatttggtggtgttggaatgggtcaaaaaggcagagcttatctccgtttcagaactactattggaggatattatgatgctgatttattaatggaaatttcagctattgctaaaaaatatggtggaatcattaaactaacttcccgtgaggaaattgaaattcaaggaataaaattggatgatgttgaagatatagtttatgactgtaaagatttaccgttagttaacggaactgaaggaccattagtcagatctttaatgtcttgtccgggaaaagagagatgtctgcttggattaattaacactagtgaaattgcagaaaaaatagaagaaaaatatgcggaaaaacccgctaattataaatttaaaataggaattactggttgccctaacaaatgtttatctgtttctacaactgactttggtattcatggtgttaaaacacctcttactaatgacaattgtaacggctgtggaagatgtgaagatgtttgtaaaataaatgcaatagaaatcactggaaaaaatgctataacggattatgattcatgcatttcatgtggaaaatgtattcctgcatgccctaataatgctaaagacattaaatataaaggatattgtttatcaatcggtggaaaaggtggacgtgaaactattctaggtcatgaaatgtatgttgacagtgaagatgaaatttataaaaccttggatgcagtatttgaagtttataataaacatgctaaaaacccacaaagagaaagattagccagtacaataaaaagaatcggtcaattaaatttctttaatgaagttgaaaaagtaaaattatccaaataa

SEQ ID NO: 7130 - DNA, 1386 bp, Methanobrevibacter gottschalkii
  source 1..1386: mol_type = genomic DNA
atgatatataaatgtctaatttgcggtcatattcataatgaagaagcaacaggagtattattaaaagatttagataaatgtcccacttgtaaacaggatatatcaaattttgttgaatttgaaaattcagattcagattataaaattcaaaatgaaccaacagatttatcatatccaaaagaattcgctaaaagtgataaggatattcgacacatggatacaatacatcaaatagctatttctggtgaatcaataatatcttcaatgtatacagagttaccaatgcctaattgggatgatattctaattttgggatgtcagctaaatccccaacctattgaatcaaatattgatgttaacacaaccaccgttattggaaaaaatgctaaaatacccttagttattgaaagtccaatttatatcactcacatgtcatttggagcattatcaagagaaagtaaaattgcacttgctaaaggaagtgcaagtgttaaaactgcccaatgcagtggagaaggtggaattctacctgaagaaatggaaaatgcttataaatatatttttgagtatgttccaaataaatattccgtgaatgatgaaaatttaaaaaacagtgatgctattgaaataaaaataggacagtctaccaaaccaggtttaggtggacaattacaaggcgtgaaagtaactcctgaaattgccaaaattagaaataaaccagtaggtcaggatattcattcacctgctacaattccagaagttaactcaaaacatgacctgaaagaattggtttcatacttaagaaaaaaatcccgaggaaggccaattggattgaaatttgcagcggggcgaattgaagaggatttggagtatgcttgttatgctgaaccagattttataactattgatggtagaggaggatctacaggtgcaagtccaaaaatcattcgggattcaacatccgtacctacaatttatgctttgagtagggctagaaaataccttgatgaacatgataaagatatttcattaattatcaccggaggtttacgcgtttcatctgattttgctaaagctttagctatgggtgctgatgcaatagctattggaacaggagcattgattgcctcagcatgccaacagtataaaatttgccaaactggacattgcccagtaggtgttgctacacaagatatggaaaatcgtgaaagatttaaaatagaatctgctgcaaaaagagttgaaaactatttaaaagtttcaaatgaagagttaaaacaattttcaagaattactggacatgataatgtacatgatttaaacatgaatgatttatgcacaataaactccgaaatatctaattacacaaatattaaacatacataa

SEQ ID NO: 7131 - DNA, 3186 bp, Methanobrevibacter gottschalkii
  source 1..3186: mol_type = genomic DNA
atgttgataacattgttatgcttatttactgttagtgctaaagaaatatatgtgtcatctgatggttcagatgatttaaatggtacagatttaaataatccttgtagttttcataaggcaattaatatttctgaagatggtgattctattaaaatgaaggcaggtaattattccatatctgaggaagttgataaatctttaaatattagtgcatatagtgatgatgttgttaatataaagaataaattttcttatgtgtttaaggttaaaaacaacaatagcctagttttaaattctttaaattttaaaaattttaacacagctattgaatcatattcatatccaaatataatgattaaaaattgtttatttgaaaaaagtagctatatgtgtctaaatatgcggggaggcactactattataacagactcaatatttagaaataatactggtagtcaaggtagtgcaataaactttcaaaatacgttatataaaaatagatcttatttacatataaataacactatttttgattcaaaccatggtacaaacttaggaggagttatatacatttctctttcaaatatgtatctttataataatactttcattaacaataaagccggttatactggtggagtaatctttaatgatgtatctaaagtttatgataatcgttctagatatataaataatggtgcactttattctggtggtgctatttatattagaggtgataaagatttaggttcgtattatggagatcatgtggaatttataaataattctgccccatataaaaatggtgattctggaggttatgggacttctggaggagcttttactgcagtagatggtggagaaatagttttaaagaattctgttcttgaaggaaataaagcaatgtcaagagggggtgcaatttggtcagatcaaaaagttagtattataaatactcttatttcaaataattctgcttataatgaaaccggtctaactgtgggtggtggattatattgtcctcttttaaaagtaaatataatcaattctacattttcaaacaatcatgccaaagaatatcctgatatttttaatgatataacatttccttcagtggatattgttgaaaatattaataatactgatggtaaaaaaattagtattaaaaatttaactaaaccagtatcatattgcttgcaacctggaattctaaatattgcttcatctccaataattgaaactggcacaaataaattacttggttctggaggctatttcaatgggaagcctattggtgaattattgaaaatttttatagttcaaaattatcaaagagttcttgataagaaaattagtgaaaatacctttaaaagcatgttgggttttatatcaagtggctgttcatcactaccttctccatttaatgattcttattatttatcacatagattaattaaagaaactttagatgaatatgaaaaaggcgttagatatccagatgtaaatgcaacaggtccaattaattggttaacaaaaaaatatttaacattcgatttttatcaattctcaaatgaagatcatcaagatttgattgtgttcacattcaatgaatcaaacacaactcttaatccaccaattaatgtaactaaaaaatcaaacactacaaatcctgattttaatactgttgtatcttatgttataactgtaaaaaacactaataaaacatcaatggtttttgatgctttagttattgatactttaagtgaaggattagtttataatggtgcttcccataatggagtatataacaatacaactaatacagttacttggattctcaatattcctgctgatagtgaaattaacctttttgttaatgcaacagtggaaaaatttggcaagcttaacaatacagttaatgtttttaataaaactgcaaatgttactgttaatgttccaaatactgatgtaacaaaagctgtgaatgttacaagacctagtttcaatgatacgatttgttatactattacagtttttaatcgtaatcctaatgttgatttaatgaatcttgtagttagggatgttttagatgatggtttagttttcaatggagcttccagtggtggtgtttttgatcctatttctcgcactattatttggactataaacattactaaaggtggtcaagctgttatttatgttaatgtcactgttaataaatatggcatgttagttaacaaagtttttgttgataataaaactgccaattctactgtttatgttccaatagaacctcctgttaacccggatatgactgttgtgaaactttctttgaataggactgtttatgttggtaatcagactgtctttactattgttgtccgtaatactggtgattgtgatttaggtgaggtttttgttgttgaaaaagctccagaaggtcttgcttacagttcatttaaaggcactgactggtcatacagcaatggcaaatttacttatggtaaggttttaaaagtcaatgagtctgctggctttgagattgtattcgatgctgttagtcctggtaattggactaatgttgttgttgcaggttcaaatttaacagataataaaactggtaataatactactaaggtttataagccggatatggctgttgagaagctttctttgaataggactgtttatgttggtaatcagactgtatttactattgttgtccgtaatactggtgattgtgatttaggtgatgtctttgttgttgaaaaagctccaatgggacttgtttacaactcatttaaaggcaccgactggtcatacagcaatggcaaatttacttatggtaaggttttaaaagtcaatgagtctgctagctttgatatagtatttgatacaatcagtcctggtaattggactaatgttgttgttgcaggttccaatgtaaccgataacaaaacaggaaataatactactaaagtctataaacctcctgttaatccccctgttaaacctccagttaaccctccggttaatccacataaaatagaaaaaccagataatgaaaaagacaagattattaaaaaagattcttcaattaatataagaaaaacaggtaattcaatattcttaatgatgttatctgttattatttcaattccgttaataagaagaaatcaaaaataa

SEQ ID NO: 7132 - DNA, 1350 bp, Methanobrevibacter gottschalkii
  source 1..1350: mol_type = genomic DNA
atgaaaacaaaatatgatgtagttgtcattggatttggaaaagctggaaagacacttgcagcaaaacttggaaaaaacggtaaaaatgttgcattgattgaaaaagatgcaaatatgtatggtggaacctgcataaatgtaggttgcattccttcaaaacgactaataactgattctttgaatgctccgaaaggggagttttctttgaaatcagaatattacagaaatgcaattgatgagaaaaggaaattaacagcagcacttcgtaaagctaattatgacaaactagcacagtctggcgtagatattatagatggaattgcatcatttacaaatgaaaatcatatcagtgttcaaacaaatgatggcataaggagtattgaggcagaacagtttgtcatcaatacaggatctgctccagttattcctaaaatagatggattaactgaaagccagaatgtatatgtggcagaaactattatggatctggaagagttgccttcttcacttacagtcgttggtggagggtatattggacttgaatttgcttctatgtatgccaattttggaagcagagtaacaatcattcaacgcggaaacatatttctcccaaaagaagatgaagatatttccgaatccattcgtgaagtattggaagcaaagggagtacaaattataaccggagcaaagacaacaaagattcaggacggatcactttattatgatgcaaatggtgaatcccatgttttgaaaggagatgcaatactattagcaactggacgcatgccaaatacagatggacttggatgtgaaaatgcagggattgctcttacatccagaggtgctgttgtgactgatgagcatttaagaaccaccgcaaatcatatctgggctgcaggtgatgtctgtggaaatctcatgtttacctatatttcacttgatgatagtagaatcatattggatgacatgaatggaaacggtaagaggacaacagaaaataggggtgcattttcttattctgtatttattgacccgccattttcacgtgtagggatgagtgaaaaagaggctgaagatgcacaaattgaatatcatgtaactaaccttccagcaaactcaattccaaaagcaaaagttcttcgagaaactgaaggaatgcttaaggcaataattgcagaggatgggacaattttaggtgcagagctattttgcgcagaatctccagagataatcaatctgattaaattagcaatggatcaccagttaaaagcggagacaattggagatttcatattcacacatccaacaatttcagaaagtttaaatgatctcttttcaaatgcgaaatag

SEQ ID NO: 7133 - DNA, 246 bp, Methanobrevibacter gottschalkii
  source 1..246: mol_type = genomic DNA
atgcaattaattacaaaagacaataattacagaagaattaatgaactacttgaaaaaatattagacaaaacagtaaaacgaaaacatggaatatcccaagaacaaccaatattcatgggggatgacaaaccgataacatggacagaactaaaagaaagtgaaactggtacaacatggagtcaaggaaacattacattaacagcattatttaaatataatcaaggcggttttccaagattcatatga

SEQ ID NO: 7134 - DNA, 576 bp, Methanobrevibacter gottschalkii
  source 1..576: mol_type = genomic DNA
atgaataaaaaggttgtagttgcaattgtggttgttgttattgttgctattctggcaatattgatgttcattggatcctctaatgtgacattaatggcaggagatagttgtataacacttccttcggattatatgttagataataaagggattgcctataaaaatgatattggaatattttttatttcagtatcaggtaatagtccaaaagatcaaaaagaactatttgatgccatcaaatctaatggaaaatcatcaggatataaaaatgtcactaaagacaaagttaatggatttaaactttatgaatacgaagcaaatcctgataaacttaagaatgtatcatcggatagaaaaataagtggtagttatgaaacttggaaaacctatagtccgtatactccttatgaagatgtaagtgatatggatgtgactaaattcagatatatcgcttatgtaaatgaaaatacggatgatataagtgaattgtatatatttacaaataatacaaatgtcgatttatattctggagaaataacaaaaattattgatagtattgcagttgtagaggagtaa

SEQ ID NO: 7135 - DNA, 357 bp, Methanobrevibacter gottschalkii
  source 1..357: mol_type = genomic DNA
atgatgattataacaactatattaggaacacttgtagcattagaatttttttatataatgtatcttgaaacatttgctacaaattctgataggacatcaaaagtttttgatatggataaaagtgaattagaaagagaatcagtcaatactttatttaaaaatcagggagtttataatggtttattggcggttatgattttacttgctctttttgtatttgttagtaaaaccgctttatctgttttaatggcatatattatattagttgctatttatggagggattacaagtaatccgaaaattatttttatgcaaggcggtttggcaatcattacattaatctcttgtatcttttag

SEQ ID NO: 7136 - DNA, 222 bp, Methanobrevibacter gottschalkii
  source 1..222: mol_type = genomic DNA
atgtttaattcgaagtttttaatattaattcttggtgttttaattattggtttagcattatttggttatttcggtttgtcagataatgctcttgagtctgattctagtttaaatgaatcacatgatgatgtagtttatctctggatgttggatgataatgataatctgaagttgattccaacgactgaaacttattctgaagggtctggaagtaattcgtag

SEQ ID NO: 7137 - DNA, 1029 bp, Methanobrevibacter gottschalkii
  source 1..1029: mol_type = genomic DNA
ttgataaataagagattcattttagtttttgtaattatcatgattttacactgcagtgcggttagtgcatatgaaaattatgatgattttgtttttaataatattacaatagatgattcaggtcatgatgatactaagttaattgatgaaaaatcattttattattatgaagaggattctggttatctttctgataatattgttggtggaaagaatattaagaatactacaggagtagtgatggctgatgatgagtatagttgtggtgcagcatcttttgcaacagttttaaacaacttagggaataatattacattatatgaagctaaaatcgcaactaatactactttaaatggaacgacaatgaaaggaataattgatgcaactaaaaaatatgatttaatgggagttggtgttaaattagaaacagttcagcttaaagaaaattatattgtgaatatgaatattttgggtattactcattggtctgtagtgaaagaaattaatgaggagtttattattttagcagattctaatttgggtaattataaatttgatataatggaatttaatcaatattatactaatcaaacaatagttatacttaataaacaacaatataataatcatatttctattgtatcaaataatactaattatatttctaatattgatcaaaaatatatttcgggtaatggatatgcattttatgtatctaaatctatgtcatatattaatgcaaaccctaaaggttatgcatttaaatatacaattatagtaccaaaatggggaggaaaagtagttaaactatctacaaaaaaattaacaaaacatagaataacagtaaaagtgatatataagataaaagtttattctaaatcacattttaaaggaaaagtagagactattcatcagccagctatttttaatttagctcataaagcgggaacaaaattttctgtctcaagacctacatccttcccaatacaatcaataaaatatactgtttcatattctcacttcccataa

SEQ ID NO: 7138 - DNA, 1512 bp, Methanobrevibacter gottschalkii
  source 1..1512: mol_type = genomic DNA
atgattctagcagtagcatttcccgaatcctttagacaaataactaattcaatcagggattttctaggaatacacttcggatggttttatctgatggtggtattcttatgtgtagtaattagtgtcattgttatatttcatccaatgggtaaaatacgactaggggatccaaattcaaagcctgaatattcaacattttcatggatagcaatgttattctcggcaggtatgggaataggacttgtattttatggagcagccgagccattatcacattatgctgtaatggcaccggaaacaacagtatttacacagcaggcaatgcttgatgctttgaaatactcatttttccattatggtatttcagcatgggccgtttatggaatggtagcattggcaatagcctactttaaatacagaaaaaaggaagttcccaatatctcatcaacattaaagccaatattcggcaagtatactgaaggaaatataggatatgttgtggatgcacttacaatatttgcaacagtagtgggtgttgcaacatcactcggattgggtgcagttcaaataaacagtggattaaactatttattcggaataacacagtcaatcaatgtacagattataatcataatcatagcatcaatcctatttctaacatcagcagtatccggaataaataagggtgttagaatactgtcaaatacaaacattcttctggcaatacttcttatgctaatagcatttgtgattggaccatcacttgatatagcaaacttcttcatagaaagtataggcgcatacatgaatgactttatccggatgagttttagaacggcagcatcaggtacagtagctcagcagggatgggtacaaagctggacaatatactactgggcatggtggatttcatggtcaccttttgtaggagtatttattgcaaacatctcaaaaggaagaacaataagagaatttctaacatacattctactggttccatcaatattttcatttgtatggttttcaatatttggaacattggctatgaatgggacaacacctggaagtcccatcatcaagatgccaatatctaatatgctgtttggaatattcaaccaatatccactggcaataatattatccatattggcaattatactgataatcatatactttatcacatcagcagattcagctacagtagtactggcaatattatcggaaaacggaaacgaagagacatccaagaaaataaaagtaatatggggcataatactatcaagtacagcaacaatacttctaataaacggaggacttgacggattacagaacatactgataattactgcatttccattttcaataatactgatgcttatagtagtttcagtatttaaggaactggtatatgaaaaagatgaaatgagactgtttgtaaaggcagaacgacatccgacagtagacagaccattcaaatcatatgaaaatcaaaataaggaagatgaagagtaa

SEQ ID NO: 7139 - DNA, 402 bp, Methanobrevibacter gottschalkii
  source 1..402: mol_type = genomic DNA
atgaaaatatttttagattcttcttttttaattgcattaattaatgataatgattctttacataaaaaagcattagaatatgtaaaattaactgaagacaacgaatgttatattagcaatctaattattaatgaagttataacaattataggaaataaattaggattaactgtggcaatttcaagttatgatttattaacttctgtttttaacattgttaatgaatataaattagctgattttaattctaaggttatgttaatttatgaagtttataacactaaactaagtttcactgattcaagtattatacatataatggagaaagaaaaaataaataatttattatcgtttgataaagaatttaaaagagttgaagatattaatttaatcagtttgtaa

SEQ ID NO: 7140 - DNA, 237 bp, Methanobrevibacter gottschalkii
  source 1..237: mol_type = genomic DNA
atggttaatataggaactactaaaatatataaaaataatcaaataacaatcccctctaaaataagaaaagaattaaatatttctaaggaatctgttattatttggagtttaaatcctgataaaacaatcactttaaaagttgaaaataaaaagccatctgttaaagatttgataggtttaggaagttctaaagaagttactaatgctgttgacttaaaaaggagtttatatttatga

SEQ ID NO: 7141 - DNA, 333 bp, Methanobrevibacter gottschalkii
  source 1..333: mol_type = genomic DNA
atggcagaatacacaagcataagaataagaaaagaccttgcagaacaaatgcaaataataaaaaaacaaaacaactacaaaagcattaatgaattattagaaaaaacactagacaaaacagtaaacgaaaacatggaagtaatccaagaacaagcattattctatattggtgaaacaccaataacatggacagaactaaaacaaagcaccaatggtacaagatggaatcaaggaaatgaaacagtaactatattattcaaagataatcaaggcgctttcatcagatttgaatatgaaaatgaagtggaagtagaatactaccatttcatttaa

SEQ ID NO: 7142 - DNA, 1206 bp, Methanobrevibacter gottschalkii
  source 1..1206: mol_type = genomic DNA
atgatgaatattgaaactagagaatcattattccaaccaggacaaccagtaagtgcggatagattcaaaggaagagaagagattatcgaagaaatattaaaatattttccttcagtaaaatcaggtaaccctcatcatttcttcattactggaaaaagaggaatgggaaaaacatctttagctaatttcatatctgattttgctaataaaaattattctatgattactgcacatataatgaatgatggagtacactctatagatgaattaatagtgcaaataattgaagggatattaaattcaattaaatctgaaaaatggtctgaaaaaatatttggatttttagaagatcacattgaatcagttggtcttggtggaatgaatattaaattcaaaccatcaaatcaagaattaaaaaatattaaagataactttgcattttatttatctgatttagtaaataattttaaagataaagatggattgtttattgtcattgatgatattaatggattatctgaaactcctgattttgcaaattggtataaaagttttgttgatactttagcaacatcggtggataatgctccaatttgtataatgttaacaggataccctgaaaaatttataaaattacatgaacaaaatccttcagtaaatagaatatttcatgttcatgaattaaatagattggatgatgatgaaattaaaaatttttatacagatattttcttaatatatgatattaatgtagagggtatggctttggaagctatgactaaatattcttcgggtatgcctactatgatgcaagaaattggggatgcaactttttggtcagatactgatggattcattgatagggaagatgcatttaaaggcattattgaagcgggaaatcgtattggtttaaaatatttacaaccattattagatcaaaaaattagaagtgaaaattatttatctttatttaaaaaaataggtaatgaattagctgcttctccaaacagcacatttactaaaaaaacattttctgatgtattaaatgataatgaatcaaaagtatttaaagattttattagtagggctaagaaattaggtattattgaattagcaagttctaaaaagcaaggggaatatcaatttactaatcaattatatccaatgtacttcatgatacaaacattcaaagaagaagcattataa

SEQ ID NO: 7143 - DNA, 237 bp, Methanobrevibacter gottschalkii
  source 1..237: mol_type = genomic DNA
atgtctggaaccgatgagttattattaaaaattttttttcgtaattatgatgaggaagaacgtcgtaatggattaattgataacaagaatagtcagatgattgttttaactgggactatgttgactttacaagcaacattattttcagtggggttgttgaatgagtttgtttataataaaattataattaatcccgttaaattttggatttatgctgttttgaataattcaacctaa

SEQ ID NO: 7144 - DNA, 345 bp, Methanobrevibacter gottschalkii
  source 1..345: mol_type = genomic DNA
atggaaaaagtgtattgtactgagtgtggaaatgaattagaagggggctctaaattttgtccaaaatgtggcaataaggtagatgatgaaacttttagcatagaggtttctccatcaaaatcttacaaaagttatattattattggatatattttagctattttaggcattattttacctattttagcaatatttggtgcaatagtgggtttttatttaatttacagaaactatggtgatttacttagtggtaaatttaataaaactaatgtgaatgcattactaatccttattttctcaatctttgcaattgttttcatgtttaatgttggatttatacgttaa

SEQ ID NO: 7145 - DNA, 516 bp, Methanobrevibacter gottschalkii
  source 1..516: mol_type = genomic DNA
atgaaaattggcgattttgaaattggtttaaagacaattattttagtaatagttgctttaatcgttatttttgggataatctccttttttagtggtggtgattcagtaaatgtaactgatgttggcatgactgtaaattataattacaaaactaatgtggcttttacaattataccaactgatacaataactgaagttaataatgttcagctaaagaacattgaagttacttaccataatggtaaaacacaacatttagaagatgttacatttaactccaaaaatacttatgttaaagataatgaatatgggtttaaatttgattatacaatctctgatgattgtattgatggtttagatgaatatgattttggacatgcaacacaccatattaaaggagatattgtaataaacactgtcggtggaaatgaaaaagtggttggacatattgattatgatgtccctgcttcggctacagtatataaatactcttctggaagtggttcagtaatataa

SEQ ID NO: 7146 - DNA, 477 bp, Methanobrevibacter gottschalkii
  source 1..477: mol_type = genomic DNA
ttgagtaaaaagatttttgctatattgatcgttgtaatggcttttgtctctttagctagtgtttttgcagttgaaacaacaactcacgatttcgatggtttgtttaacatgagtgttccctctgatgaggaatttgtaactcttgactctaatatcacaggtgcttctgtatttggatataattttaattatggagacccaattggtgataatataatagtttattactttaatgaatccattgttgatgataatgatactaatataactgaatatgtaattaatattttagatgaaaattctacttttaaacatccttctgttgaagatggtttcactgtattatataatcagatggttcaacatgatggaggttatatgttaattgcatcaaatgataatgaaactgaagtagtaggtattgttggggataatttagatgatttaaaaacatatgctaattctatagaattttaa

SEQ ID NO: 7147 - DNA, 279 bp, Methanobrevibacter gottschalkii
  source 1..279: mol_type = genomic DNA
atgagtgaaaatgaatcagaaccaaatttttggtctttaattggatatataaaagtttctccagcacgtttaaattgcatcacttgtatcggcactgaatataaaatgccaaaagaaattgttgatgcaacaggaatgcgaataacacaaatatcaaatgcattacacgacctaaaagaaaagaaaatagtagtctgtttaaatgaggaaaatatcaaaggcagactataccaaaataccgaattaggattacagctattggaagaattaaaaaaataa

SEQ ID NO: 7148 - DNA, 552 bp, Methanobrevibacter gottschalkii
  source 1..552: mol_type = genomic DNA
atgcagagggaaatggacgaacagaaagagcaatatgaaaaaaagattcgtcatgtggaaagtgtcaattcagctttatcttctcaagtattggatattcaaaatcaattagataatcttgccaatgctaatgacttaaaaagaatacaggagtatatttctggacacgaattagttgaaaaatataatttggcttctactattattggatattataaggaagatgttaaaaaagaagattttactggtgttactgattattatattgaagatttaataacacaggcattcaatacaacatcagcatttcaatctacagcaattagagatgaatattatcgaactgatgataattggaagcgaatttattcagaaattgggctctatgaacatgattatattgaaagtaatgggtatgtattatctaaatcccaaagtaaaaagattactgatgaactggagagttattcaataaaattatgggaagataatgaaaaagtaaaaaaatctaaagtacaatcaataattgataatattgtacttagacattaa

SEQ ID NO: 7149 - DNA, 996 bp, Methanobrevibacter gottschalkii
  source 1..996: mol_type = genomic DNA
atgaaaataataatagatgggtataataaatcaatacataaaaaagataacatgattataatagaggaaaactcacaaactattgatgcaattaaggcaaacatgattaccgatataacaatcactggaaagggatatgtgacgtttgatgccttaaatttaatggcgcagaacaatatcaaattaatggccattaatccgagaggacagctaaactatattttagaatcaccagattggcgaaatgtaaagctaaaaaaacagcagtatatgctaagtgaaaatacactgggtcttgaattatcaaaagagctaattaaaagtaaaatgaaaaaccaaaaagcaacattaacaacactaaataaaaataaacaactaaaaagggtattcaatcacaggttaaaaattgatgaaatgatagctgaacttgaaaaaataaatttaaatggcgataatgaaaaaataaggatgaaaataatgggcttggaaggaaaggcatcaaatgaatactggagggcaataaaatatttcatacctggagaaataggatttgatggaagaaccaaaaaaccaacagaccttttaaattccatgctgaattacggttatgcaatccttgcaagtgaaataacaaaaaacatattgtatgccggtttagatccatattgcggattcctgcattatgacatggataaacgaacaagtttaacgtttgatttaatagagccatttagacaacaaattgttgataaaaccgtgataagtttaatcaataaaaaacaggttacgaataatgatttggataaaaggaacaatacaataaaactagaagcgagaaaactgattgcaaataaaattcttaaaaaactgttttccacaatcacatataatgatgaaactgtgacatattccgatctaattagaaaacagagcgaaaatctagtcagtgcattattgtatggtgaaaaattcattggattttatttaagatggtga

SEQ ID NO: 7150 - DNA, 270 bp, Methanobrevibacter gottschalkii
  source 1..270: mol_type = genomic DNA
atgcttgtaagttttgatataaaatttaaaacaaaccgggaaaagattgaaagagtttttgagtgcctgggtcttaggaaaattcaaaatgaattatatataggagagatggacaataaggaacaaaataatttggtggaaaaaatcaacgcaataatcaaagactatgacagtgttttaataatgccgatatgtcaaaattgctacttgaaaaaagaaacatgcggtcgtgaaataaagttccaaaatgatctatacagggtgtattaa

SEQ ID NO: 7151 - DNA, 1083 bp, Methanobrevibacter gottschalkii
  source 1..1083: mol_type = genomic DNA
atgattgaagttaatgagctaacggactacctagatgaatacttagaagaaaaacaagaggtaaaaaacttaactgaagaaacaatcaagaaacaaacatttaatatatctaaatttattgaatatcttgaaaatgagggaattgatgaattaaataacagtaatgttaaaaaacaattacgacattatcgtagatactgtttaaaacaacgtgggaataaaagaacaactgttaaaacatatatgatgaatatcttggaatttatcaattcagaagatgttcaggaggaaatacaacatgatcctattaaaatgaaggatattattgaagttaaagcagaagatcctgaaaccgctaaaaaaagaattgaaaaaatttccctaacatggccacaatctaattttttcctcgatacaatcaaacaaagtggtaatataagagattatgcaatttgcagaactttcattgattctggaatgaggttaaaagaattagttttgctaaacaaggatgatattcaagttccgatagatgataatggattttacattttaccagaggataccaatgagtttattgatgtttatctaagagcggaaaccactaaaggtgaattaaaagatcgtactacttttataacctatgatactcttgttagtttaaatgatatgatgatgaatcgtataacaaaacttagaaaaaatactcataatgtttatcgtcctgttgttcagagaaataaggctgctgaagaagtaaatcgtgaagaactgttcacaaatattaaaggtaatcgtattggtaaacgtggagttcaagatattattaaaaaacatgcacgtgaatgtgatgagagaattgagagtgaaggaattgattgtcctgtaaattacggcaaaaatgttagtgttcacattttaagacacacagctttatctcattatgctgagattttaacagttgccgaggttcaatcaatagctggacattctaattctcaaacaacagataaatatattcatattgatcgtgaacaaatgaaacaaaaattaaaagtcaattctatgagatttaataattaa

SEQ ID NO: 7152 - DNA, 258 bp, Methanobrevibacter gottschalkii
  source 1..258: mol_type = genomic DNA
atgtctaatattgtatatctatataattatgtattaatatatatttatgtattttataaggaaatacatttccgacatattaaatatttcactaacagaattcatagtaaagataatgattctatgaagttatttttcgataatatgtctaaatatcttattttttcattaatattgctttatttaaatgaattgaacttaataattataatttcatttgttttaactcatataaatgtatatgctttcaaaaattaa

SEQ ID NO: 7153 - DNA, 555 bp, Methanobrevibacter gottschalkii
  source 1..555: mol_type = genomic DNA
atgtcttttaatattatttctatttcattaattgccgttgctcttgcaatggatgcatttagtgtatctatgacaaaaggttttacacaaaaaaatctatcaaagtcacagattttatattacggtttattttttggtggttttcaagctttgatgcccgttttaggatacttctgcggtaatgctattgcatcaattgttgaaaccttagcatcaattattggttttatcttacttttaggcattggattaaatatgattcgtgaaagtttatcatcagatgatgaggagattactgatgtcttttcatttaaagaagtaacattacttgcaattgcaacaagtattgatgcatttgctgtgggaattgcaattgcacttttaaaagatccgattttaatctcatcaataattattggtgcagttgcattcatattcagtgtttctggaatatttattggtaaaaagattggtcattttgttggagataaatttcaaattcttggtggcgtaattctcatactaattggtattaaaattcttttaggattttaa

SEQ ID NO: 7154 - DNA, 342 bp, Methanobrevibacter gottschalkii
  source 1..342: mol_type = genomic DNA
atgaatgcaaaaagtatattttccatatttgttttctttgtgattcttatagcttgtactaatgttgctttcgcatcagaaaacattgatgattcaaaatttagtgaagaatctgatttggatgaagttgattctgatttggatgaagttgattctgatttggatgaagttgattctgatttggatgatttaaatgatgattctgatttggatgatttaaatgatgattctgatttggatgagtttgatgatgattctgatttggatgagtttgatgatgattctgatttggatgagtttgatgatgattctgatttggatgagtttgatgatgattctgat

SEQ ID NO: 7155 - DNA, 360 bp, Methanobrevibacter gottschalkii
  source 1..360: mol_type = genomic DNA
tatactccacatagaaacacaaaatttaaaaaagcatgcaaattattaaatattattttagttcatttacctccatattcaccacaattaaatccaatagaacaagtttggaaatcaataaaaagaatcacatacactacttttgtcgaaacaaaagaagaattaataaaattatttaaaaaagaatattataagataataaataataaatcattctttaataaatgggtatcgaaatacattcttaaaagtaaggtttttaactataaattaagaactatggggttgggactctctgagaaatatttcttggacattataatatctttagcgatgttaaaatgtcttatgaaaccataa

SEQ ID NO: 7156 - DNA, 195 bp, Methanobrevibacter gottschalkii
  source 1..195: mol_type = genomic DNA
atgattacaattaacccggaattaacaaaaatgcaaaaagaattcgagcagaatttaaaaaaaatggatttaaatctctctgacaatcaaattaaagaaaaattggctctgtccgatttggtactgatgtttagttttgttgatttttgcacatcgtttgatccatctgatgtcgttaagttttattctgattag

SEQ ID NO: 7157 - DNA, 180 bp, Methanobrevibacter gottschalkii
  source 1..180: mol_type = genomic DNA
atgaagcaaaaaacaaactctccagtattatttaatgctgaagagatatataaaactttcttttgtaatggcagatgtttgatagatcttgattttccaatgacttttctatattttttaaataatattgctcaagacgatgataaaatcattttaatcaacgttaatcaggaaaaataa

SEQ ID NO: 7158 - DNA, 2664 bp, Methanobrevibacter gottschalkii
  source 1..2664: mol_type = genomic DNA
atggctgttgtgatgccggcatataattccgctaaatatattcaaaaggcattagattcaattattgatcaatcactggatttcagggatattcaaatcattgttgttaatgatgcaagtaatgacagtactaaaagtgttgttgaagaatacatcaaggaatatcctaaaaacatcactttaatcaataatgatgaaaacaggggtccggcatattcaagaaacgttggacttcaaaatgtaaatgctgaatttgtgaacttccttgatagtgatgattgtatttcaagaaatgcatttgaaaaagcatatctgtttttaaaaaataatgaagaaattgacattgcttcaattccaatatattattttggtatcaaaaacaggcctcacaatttgaatttcaaattcagcaaaactcaggttataaacttagatgagcatcctgagtacatccagctttcaggtccttcaagcttttttagatttgaaaagttaaaacattacagattcaatgaaaatttaagggtttcagaagatcctcttttaatcaaccagatgcttattgacaatcctaacattggttttataaatggtgctaagtattactatcgtcaggatactcttcaaaattcattaattgcaacttcaacaagtcacaagtcttatttcacgtcacgtgttgataattatttcatcggtcttattaattatgcaattaataaaaagggatatgttcccagatttattcaacatattttgatgtatgatctgcaatggattgttgaaattcgttttattcatttgttgcttagccaaagcgaaattgatgagctttatgataaaatattctttattttaaagtatattgatagtgatgtgatttatcatcagttgtctcttccaattgaacttaaacatcatttggcattacttaaagatcatggtactgcctatagattaaataaggataattttcaggaagacttcaacttaaatactgtatatattgataattatgaatttttagacaaggataagatttatatttctggtgttttaactaactttttaagaagtactgatgtttatgcgattgcggatggcaaaatttacaatacaaataagcttaatttcacccaaagacgtaatttttctcttgattttgactatggttacaatcatagttttgatgtggttctaccagtaaaacctggaatgaaaatatcatttaaaactaatgcttctaatcttttgattgattataatcaaacttcaagactttctggaacttccagatatagattttctaaggattatttgtcaattgattgtagaaatcatattcaaattattgaaaaaacaatcacaaaaggagttaaattagaattatctgttttaaagcaaattttaaaagagaaaaaacaagggtggcgtacaggtattcttttaagaatattgtatttcatgttttatttttacttcaggaataaacacatatggatatttatggatttgccgaattcttcaggggataatggatatttcttatttaaaaaagcaattaaatcagataaacttaaaaatattaaaaagtattatgttttctcaaagtccaaaaatcttcatgaaacatttgccgaacaagaaaataaatatgttgcaagttcaaaatttatgaaagccagaaccttatctggctttataactccaaatgaagaatttgaaagattgaaaaaaataggtaatgtcctacaatacaaatcaatcaaacataggctgtatttattatttgccgattacattattgcttcccatccagataatggaatcatttatccattttggggaaattaccatcatttgtctggtcttgcacgatccaaaaccatatttctacagcatggtgttacaaaagatgatatctcctattggctcaatcggtatgataaaagaataggtttaattgtcactgtatctgatctggaaaaagaatcatttttaaatcctaaatatggatatgatgaaagttgcatccaggtacttggttttccaagattcgactttttaaaaaagggcgaggataagaaggaaattgttttaatgccttcttggagaagacaacattctcaactcagtgaagacgaatttattcaaacagattactttaaatctataaatgaattgatgaataacgaatatctgattaaattcttaaaatcaaaaggatacaggttaatattcaaacctcacagaaatgttttgaaattcattgattcatttgatatccctgatgaagcggaattgggcattgaaatgtcatacaatgagatatttaaccatgcgtcattgatgattacagattattcttctgttgcattcgattttgcttatcttaaaaagccattaatctattatcatcatgatgatgattatcactttaatctggatgattcttactttaaatacgatacaatgggttttggtcctgttgcaacacaaatcgatgagttaaaagatgaaatcataagactggttgaaaatgactgtcaaatggatgagaaatatattaaaagagttgatgatttctttaaatacactgataaaaataactctaaaagagttattgataagattttggaatttgatgaaatgttttattattag

SEQ ID NO: 7159 - DNA, 519 bp, Methanobrevibacter gottschalkii
  source 1..519: mol_type = genomic DNA
atgacattgatagacatcatgcttaaaagaagaagtacaagaacatttgcagatgagccagtcactaaagaggagcttgataaaatattgcaggcggcacttcttgctccaactagtatgaatagaaaaccgtgtaattttatggttgttgaaagaagtgaaactctaagacagcttgcaaattgcaaagaccatggtgcaaatctccttgaaaatgcagataaggcaattgttgttcttgcagatactatgattgccgacacatggtgtgaagattcatcggttgctttaacttatatgcatttaatggcaacggaattaggtcttggaagctgctgggttcaggttcatttaaggtctaaagacaaaattcctgcagaagaggttgtaagggaaatcctaaatgttgactctcattacaggattgtaggcatgctggctattggacgctctgacaatattccaaagccacactcattagatgaactggataagagcagaattcattttttagtataa

SEQ ID NO: 7160 - DNA, 396 bp, Methanobrevibacter gottschalkii
  source 1..396: mol_type = genomic DNA
atgtcggaaaagagtttaattgtaaatcatgatgctattgatgaggatttaacagagaaattcataaacatgcatgatggtcttccagttttgcttatgaatattttagatgattttgatgatggcatctggattagaagatatgagctatacctgaagtatcctgaattggaaaatctggatggaaaggaaatggaaatcacatccgaacttttaaaggaaggtaagataaaagaagccgaggattttcagataaattatgctcttgattttttagataagcatcctcagttcaaacagatgattgatggagttcatcggcagggcagcaaggatttggaaattcttttgaactcaattaaggaagctttcatcggagattttgactacttttaa

SEQ ID NO: 7161 - DNA, 291 bp, Methanobrevibacter gottschalkii
  source 1..291: mol_type = genomic DNA
atgcatgttaaagatgttttagacgatttggatattagggtcaaattacctcagcactggtattcaaccgatgtaagtaatgaatttgaagatgccgaacttgtcagaaatgacgaaataattaaaatcagggttgaaggtgaaaaaaatactaaagttatcatcattgatgttgatgacgggatgagtgttgtcagtctacttccggataaaaaagtcatcggagttaaatacctaaaaaacaaagatgacttcgaatacattggtaaaccatctgaattgtatttttaa

SEQ ID NO: 7162 - DNA, 549 bp, Methanobrevibacter gottschalkii
  source 1..549: mol_type = genomic DNA
atggttgataaaaaagcacctgcagaaggatggcctccaattagtggagattacattgttggagaccctgaaagtccagtagctgttacaactctcgcttcccatattgaagctgacttatctggagcagcaattgcaggaccatgtaaaactgaaaacttaggtattgaaaaagtcgtagcaaatgttatttcaaatccgaatattagattcttaattttggctggtgctgaagttcaaggtcacattactggtcaaagttttaaggcattgcatgaaaatggggcggatcctgacaaaaagaaaattgttggagcaacaggagctattcctttcgttgaaaatgttcctcttgaaggagttgaaagattccagcaacaattggaaattgttgatttgattgacaccgaggatattggaaatattcaatctaaaatcaacgaatgcattgaaaaggatcctggagctttagaggaagatcctattgttatggaagttgatgaagaaaaccaaaaattggttatcgttaatgatgatgctgaagattaa

SEQ ID NO: 7163 - DNA, 354 bp, Methanobrevibacter gottschalkii
  source 1..354: mol_type = genomic DNA
atgaataattgccaaagcagctccgtcaattggagtgaaaaagtcagaatcctggatgaaaaaattcgtcgtgaaatcggacttgaaggggaaagtgaagcaaaacatattctcatcaaggttcaaaccaaatccgccgaaaccatcgaaccagcgttcatagtaggagaggatgaaacattcctggatctatttgttttgtctccacaggaatccaatattatttccacagccgtcttgaaaaacaacatccaaagtatcggtgttattggaggaatgtctgctgaaaaaacggatgcatcggaaatccctgacaggccagcacttgatgatgcaagcacattgtaccaatag

SEQ ID NO: 7164 - DNA, 609 bp, Methanobrevibacter gottschalkii
  source 1..609: mol_type = genomic DNA
gtgaaacaaaaattaattgcaaaagcgcaagaattaagacaacacggttttacaaccggtgaaatcgctgacgaacttaatgtaagtatggacactgccagatggttgactcttcaaaaagcggaagaaaaaaccgaggtaccagtagactttgctattaattggaagagtattggtggaaattccacacgtttaagctatgtttcaggtgctttaagtgatatggcattatcccatggtgaagtagacactgttgtaggtattgcagtaagtggagtgccgtttgcaacagtgatggctgatttcattgaagacatgactggaattgacacatcaatagctattttccacccgaacaaacacagaaaaaatcaggactccagtgatgatgaaggtgcaataagcactaactttggaaccgttgaaggcaaaaaggttgttattgtagatgatgtcattactagtgggaaaacagtaagggaagtaattcatacagtaaaagacttaggtggggaaccaacttgcgtcaccgtacttattgataaagcagggctttctgaaattgaaggcattcctgtagaatctttaattaaaatcagtagattataa

SEQ ID NO: 7165 - DNA, 954 bp, Methanobrevibacter gottschalkii
  source 1..954: mol_type = genomic DNA
ttgagaactgtaaacgtaggagttattggtgtaggtgcaatgggtgaaaaccacgttcgtgtctatcacaaaatggaagaagcaaatttagtcgctgtaagtgatgtgagtgaaagagcacttaagaaaattgaaaaaaaatatggtgctacaggatatactgaatattctgaattacttgaaaatcccgaaatcgaagcagtaagcatatgtgttccaactacattccaccatgctgcagtaatggaagcaataaaacatggaaaacacatactggttgaaaaaccgattgcatttacattggaagaagcagaagaaatgattgcagctgctaaagaagccggagtgctgcttgcaacagggcatgttgaaagattcaatccagctgttagaaaagctaaggaacttattgatgatggagtaattggagatattgtaaccggatttgcaaaaagagtaggtccgctaccaccaagaattaaggatgttggtgtgtcaatcgatttagctatccatgacctggacattttgaattatttgtttgaagaggaaatcacacaggtttacggcactatgaacagcatattggatgactgtgactttgaagaccatgctgaaattatggttaatttcgataatgaatcaactggaattattgaagtaaactggttaaccccatacaaacgtagagaattggaacttacaggtaccgccggaatcatatctgtagattatatccagcagagtattgaggtttatggcaaatttgcccaggatatcgaaattaaacatgaagagcccttaaaaagtgaattaacttccttcttaaatgcagtagtgacaggaagcgaaccagaaattactggtgaagacggacttaaagctcttaaaatggttattgcagcaaacagatcctctaaagaacacaaaccaattagttttgatgaattataa

SEQ ID NO: 7166 - DNA, 870 bp, Methanobrevibacter gottschalkii
  source 1..870: mol_type = genomic DNA
atgattgttggaacacgcggaagtcagttagctttagctcaaactaaacaggtatgcgcctggttggaaaaaataactggtgaagctattgatttagaaattattaagacaaaaggagataaaattaccacttcacaattatacaatatggattcgaaaggtttgtttactaaagaattggatattgctcttttagaagaagaagtcgattttgctgttcacagttttaaagatttaccgactgaactaaatgaagatttggaaattgctgcagttcctaaacgtgaatctccaaatgaagtgcttatttcttcaaaaacctgggcggaacttggaccgggatccaaacttggaacaagcagccttagaagagaagcattttgcaatcattacgaaaaagaattcgaacttaaacctatcagaggaaatatagaaaccaggattgataaagcacttaatagtgatttggatgcaacaataatggctgaagcaggtcttaaaagattaaatcttacaaaatacattaaagaagtattcccaatagattatattacgccgcctgcaggccagggtgcacttgcaatcataactagaaaagactctgataaaaaagagattattcaaaagttaaatgatcatatttccatgcaagaagtgcttgcagagaagatggttttagaagagcttggtgtaggatgtcaatggcctattggagctattgctcgtgtgaataataaagaatttaaactttattcaatcttattaactaaacaaggagaaatccttaaaaaggaaacccagaaaggttctattaaagatgcggttgaacttggcagacgcattggagaacatttccaaaattatgtttaa

SEQ ID NO: 7167 - DNA, 1419 bp, Methanobrevibacter gottschalkii
  source 1..1419: mol_type = genomic DNA
atgaatcatcttgtcattgatttaacccacggaggagttaaaattgcaattagccttgcaaaaaaaggaaaaaatgtgcttgcatatgatatctacaacacgttaaatgacattgaagctaaaatgcttagtatttacaaaatagatttgatacagttaagtgatcttgcaagttttaagggagatatgaatattatctaccccatccatatgcctataagttttaaagacattgctaaacacaatcccgacctcaactacactttccaaacccaccatgaaattatttgcgaacttttagaggattggggaggtgattttccaaaagttgaagtgactggagttaaaggcaagacatccagcgtttttatgctcaaagagattttaattgatgagaatccgttgattttatcaagtcttggagctatgctttatgaagacagaaaaaaaatcatgctaaaacagaatatctcaatagctccggcaaatattaaagaaacaattgatcttgcatataaaatatccaatcccctctgtaaaatcgccggcggcattgctgaaagtgaaaacccacgcagatataactcggcaatttttgaatcatcattaggagttagcggtattggggatgttggcgtattattgaacattgctgaggattacccgattgcaaaaggtaaaagtagtgcaagtaaagctaaaagacaagtattcagatgcggaactgtagtttgtcaaaaagaagcatatgacacatactacaatgacataaagcatgataaagtcaacacgttttccctaagtgacgaaaattcaaatttatatctggatgatgttaaatacacaccagataagactaaaatggacatcatattcagccatgttgaaacaattaatggcaacataatttctggtgaaattagcatgaccgcttttgcacctggaaaacataacgtgagcaatgttttaggagctgtcttaactgcactaagtttggaaattccaaaagacaaaattataaacggaattgaaaattacaaaggaatccccggaagaacaaataaaaaacaaatcggaaatattactgtaattgaagaaatcaatcccggaatcaatactaaatcaattgaagagtcaataaacatgatatgtaatttaaatgactacctgatcgctgttggtggagactacggaataacttgtgaagaaattgatgaggagaaagtaagtgaacttctagacaatgtctcctgcaatattattttgacaggagatgttggaagttcgattcagaaaaaaatgtctaaaaaatgtcagttaattgaaaattacaatgatgtttacgatattgcattaaaaaacaataaaaatcttctttttatttatcggtcagattaccggaaattaaagcaaagatga

SEQ ID NO: 7168 - DNA, 1872 bp, Methanobrevibacter gottschalkii
  source 1..1872: mol_type = genomic DNA
atggatgcaaaagacaaacagattgcaaccgatttagcatatgaaattatccgtgaagtttcaagagtaattagaccctatgttggaaaacccgaatctggagagaaagtaaaaattggtgctgatggaactccaacatcattgattgacataattgcagaagataaaatgatcaatatcctaaaaaatgcacctgtattgtcatacatcgtcagtgaagaaatcggagaattaaaacttggccgtggcactaaaagaagcattaaacttactgatgaactcagacgtactgatttaaaagaagatgaaataccgaagttcatatttttagtcgatccaattgatgggaccaataatgcaattaaagaaattcctgcttttggaatttcaatagccgtctccagtgtcaatcaaggtcgtcttgcaactttaaatgatgttgaacttggttttataagtaatttcgccaatggtaatttttttgaagctgaaaaaggaaaaggatgttggctgaacaatgaagaagtccatcccagcaacatcataaacattagtgacatgacacttggaggatttacaaaaagcggcacatcacaagcttccaaattagtcgataatgctcgtcgtatgagagttttaggaagtgttgtattggaattgtcttatgttgccagcggaagatatgatgcatttttagaccttagaggaagcagaataattgatattgcagcatccaaattaattcttgaagaagcgggatgcatcattacaaacaaatacgggcagaaactaaacaatatactaagcatttatgaaaaaacaattattgtagctgccaataacataatactccataaacagatgattgatatcctaaatgacaatcagaccgactttattggaaaagtaggaatagtatccagaattgaccagacaagaccgattttatttgctgcaaaaattattgattatttactaacaaatggacgtgaagtaacaattgaagagggattagctcatagattaactgaactaaaagaaaaccccgaaatagataaaataatcaatgaagttaaagaaaaacatccggaaatggcggattcatttgaagatctcaatttaaatataaatttcaaacagttgggagaaaagatttttgactttgattgtgatatggcaataattctcggaggagacggaacactgctaagagcacagggaaaaatgaatcctgaaattccattattcggaataaatatgggaacagttggatttttaactgaaatagaaactccacatacatttgaagcgttgaattccattttaaaaggagattattataaagaaaaaagaagcaggcttgttgtttcacacgaaaacaaccaatacagtgtaatgaatgaagtagttgtaatgacaaacaaacctgcaaaaatgatgcattttgaaatacaagtggatggagaaataattgaagaagtaagagcagacggactgattatttcaacaccaagcggttcaacagcttacgcaatgtctgcaggaggaccgattgttgatcctaaagtagcgggtttcgttataataccaatttgcccatataaacttggagcaagaccattcgtagtatcggacagtagtgaaattacagtcaaattacttaaaaaaggtaaaactgcagtattcgttatcgacggtcaaatcaatgaagaggcggcatatgaagaagaaattaaatttaaaaaatccgacaaagacgcttacttcatccgtacttcaaccaaatacttctatgaaaaagttaaagataaattaagcgaaggtggaatcccaaaaatacaaggtgcaaataatgaatcatcttgtcattga

SEQ ID NO: 7169 - DNA, 462 bp, Methanobrevibacter gottschalkii
  source 1..462: mol_type = genomic DNA
atgaaaatagctattgtatctggaaaagatgaaggtccaagtaaattaaacgcatttgataatgccctaaccgatgctggaataggtgatgtgaacttaattaaagtatccagtatgcttgcaggcaatgcggaaattaataagttacctaaactcaaagcaggatctatggtgaactgtgttttatcagaagtgacatcagacaacccaggagatgaaataactgctgttattgcagtagctattggtgaagaattaggatgtgttgtagaaacaacaggaattaatgaagatccgaatgaacttattgaagaagcagaaatgatggtcaactatatgatggataaacgaggagtcaaaataaaaggggatttgatagttgaatcctccacagcaactgttcgtgaaatcgcatcagttgttgcatcagtcgtttatttaaaggatgaactaatagagtga

SEQ ID NO: 7170 - DNA, 354 bp, Methanobrevibacter gottschalkii
  source 1..354: mol_type = genomic DNA
atgattttaaataaatatttatcaatgattttatcggcatgttttttcatgctacttatgatgattgtatctgctgttacggttgtgttctttaatgggggttccatcccatatgtgggcattgtttttgttgtaattttttattttatggcacgcatgttctataattatttaagaaatgatgaactttacaaaaacaataaaaattacacaagcgatgcaccggatgaggaatatatgattaaaggtccaagagatgctaaaaaaatattcataatcttctgggtaataattgttctgattttggcagccgtctctttatggttatattcatttaatatgggttcggtctaa

SEQ ID NO: 7171 - DNA, 399 bp, Methanobrevibacter gottschalkii
  source 1..399: mol_type = genomic DNA
atgtcaacaaaagttgtagagattaaaacattaaaagttggaaagtacatcgttttaggtggagaagcttgtaagattatcagttacactacctcatctcctggtaaacacggagctgcaaaagcaagaattgaagcagtaggtgttttcgacaaccaaaaaagaagtttagtcaaaccagtggataacaaagtagatattcctatcatcgataaaagattagggcaagttatttctattcagggagctaatgttcaattaatggacatggaaaactatgatactcttgatttaccaatgcctgaagatttaaaagattccatcgttgaaggtattgaagtggagtacattgttgctttaggtaatatgaaaataatgagaataagaggatctaactag

SEQ ID NO: 7172 - DNA, 867 bp, Methanobrevibacter gottschalkii
  source 1..867: mol_type = genomic DNA
atgcttttaaatacatacgaaccatggaaattcgcattttccagtgaaaatgaaaatattaaagaaaattcattcgggataatcggagttccctttgacagcactacttcttatcactccggtgcacgttcgggaccaattgttgtaagggaagcatcatttggttttgaaaaatacaatactatttttaataaagaattaaacactgttttttatgattttggcgatgttaatgtagttcccggaaattgcagtaaaacttgccggataattgaagatacagtaaatgaattatcagacttgaaaattaaacctataataatcggcggagaacattcagcatcaatcggagctattaaggcactatctgaaaaatatgaaagattaacagtaatacacatggatgctcacagagaccttgcttttgatttcattggtgagaaatgttcacatgcaacagttatgagaagagctcatgaactgggagtcaatttagttcaaatcggaatcagatcatcttctaaagatgaagaggactttgtaaaatcaacctataatattcagacatttaaaaacaaggatgttcacaagcacatggatgcaattgaatattacttgacaaacattgatggacctatttatatttcagtagacatggatgtaattgatccggccatcgctcccagtgttggaaatccaactcccggaggattatttgtctctgaaatggaaacattacttaaaacattatcacataaaaatgtggtgggctttgatgtcgttgaaactgcaagtgataggctgggggataatactgcggtggttgcagctaaactgatttatgattttctaacattaatggattaa

SEQ ID NO: 7173 - DNA, 1221 bp, Methanobrevibacter gottschalkii
  source 1..1221: mol_type = genomic DNA
atgaataaaagaactattgagctttcaggccatattatcgattcattgactttaactaaaacaatgggcataatcatggacaaaggtggagaatttgacattcttgaaatagatgttggacgtaaaaaatcagatataagtcatgcaaaaattgaagtttcagcagattctcccgaattattggagtctattttagatgaattatctgtacttggtgctgcaattgatgaaattaaggaagtcaatctcgttgcatctgttaaagataaagttgctcctgaaggtttttattcatcatctaatcattcaactcatattttctatgatggggattggattcctgttgaagaaattgaaatggactgtttagtagttgttgatgaagatgaaaaacgtgcttttgtaaaaccaattgccgatgttaaggttggcgataaaatagtagttggtcttgatggggttaaagtaacaccacctcacagatcaagggacgaacaacaggtattcgagttcatgaacagtgaagtatcttctgaaaagcctttaatgaatttaattaagggtattgcaagtgaaatgaaagaaatcaaggctaaaggcggaaaaataggtattgtgggtggacctgctatcgtacacactggttccggcaaatatttggctgcacttgtaaaagaaggatacattgatgttataatggctggcaatgcacttgcaactcatgatattgagtcaaacttatttggtacttctttaggcattgaagttgaaacaggcaaaattgtggctcatggccatactcaccatatgagggcaattaacagaatcaatcgttccggttcgattaaaaatgcggttgaagatggaactttaactggaggaattatgtatgaatgcattaagaatgatgttccatatgttcttgcaggttccatccgtgatgacggaccgcttcctgatgtcataactgatactgcagaatcacaaaagctgatgaggcattatgcccaggaagttgacatggtgatcatgattgcaacaatgcttcactcaattgcaaccggcaacttactcccttcaagggtaaaaagtatttgtgtggatattaatccatccactgttactaagttatccgataggggaagtgcacaggttgttggtattgtaactgatattggaacattcctaccacttctctataacgctttgcatgaggaatag

SEQ ID NO: 7174 - DNA, 1716 bp, Methanobrevibacter gottschalkii
  source 1..1716: mol_type = genomic DNA
atggaatttacagcatacattcttgatgtattgactgattcggcatatcccgcaagaattaaaattgaagatggtatttttaaagagattactccaatttctgccgactgtgaaattgaattggatgtggaaggtttattgcttccgggttttattgattcacatattcatattgaaagttcaatgcttactccggcacaatttgctaaaattgcagtaatgcacggcactacatctgttgtatgtgatcctcatgaaatagctaatgtttgtggaattgagggtattgaattcatgattgaaaatgcaagtcaggttccatttaatttttatttttcagcaccgtcctgtgttcctgccacttcatttgaaacatctggtgctgttctggattctgaggatattgaatttctactgaaaaaagatgaagttgtcgcattaggggaaatgatgaatttccctggtgttattgatggtgatgtggaagttatagaaaaacttgaattggctagaaaatataaaaaaccgattgacggtcatgcaccactgctttcaggtaaagaattggataaataccttgagcaatatataattactgaccatgaatgcagcaatttctctgaagctattgaaaaaaagcagaaaggtatgaaaataatggttcgtgatggatcttctgctaaaaatatggaggctctatttgatttttcacaacgtattgaatacttgagaaatcaggatagctttggcataattccgtctgaagttctggagagaagaattcactcacctatttttgattttattgtaagtgatgacaaacaccctaatgatctgattaaaggtcatctgaataaatctgttaaaaaagcagcagagttgggtgtggacattatcaaagctattgaaatggtcacaataaatcccgcagcgcattatggtttggaagcaggttctattgtaaccggtgcaaaagcagattttgtcgtaatagataatttaatcgattttaacattctaaaaacatacgttgcaggcagatgtgtctttgatggtgaaaaggttttattcgatgctcctgaagttgatgcacgaaattcaatcaaaacaactaaaaagactgaagaggactttgaagtctattttgatggtgatgaatgtgaagttaatgttatagaatgttataatggtgaattattaacatccaaatctggtgcaaatttaaaagttataaatggagtagttaagcctgatatctatgatgatattctgaaaatatctgtagttgagagatatggcaaaaacaacatgaccaatgcttttattaaaggctttggtcttaaaaaaggagctattgcatcatcagttgctcatgactcccataatattattgttgttggatatgactcagcaatgatggctgaagctgtaaatacaatcattgaaaacaaagggggatttgcaatagcaagtgaagacttcagtgaatcactctctcttccgattgcaggacttatgagtaatgaagatgcattcgttgttgcaaataaattggaagtcttacataaaatgtctcaggcattaggatgtaaacttgactccccattcatgacaatggcattcatggcattacttgttattccatctcttaaaatatctgatttgggattatttgatggagattcgtttgaatttattgatgttattaaaaattag

SEQ ID NO: 7175 - DNA, 627 bp, Methanobrevibacter gottschalkii
  source 1..627: mol_type = genomic DNA
atgaaaacagatttggcgttaattggaatggaaaaaggaagacaatacgaaacaattattacaacaaaaaattgtgagaatatcaagaatgccgcaccaattggtgtaatttgtgcaggcagagataaaattttgaaccgtatttttaaaggaagtcaaactttagaaaatattatctctcaaagagagtttattgtaaatattactcataatccggagttatttactgtatcaaccattggaaaattacctcaagattatttcagcgaagacaattccctaaaatgtgcggatgcatattttaaatgtgaagtaattagcctaacagatgccataaaacaaagcgatcctattaaaaagaatggtgcagctgttgtcattaaatcaaaagtcacacaattgatgataaacaaacctactcaagccatgaacagaggatttggttatgtaattgaatcactggctgatttaagccgttttgatatggctggagaagataaaaaagaggaatatcttaaaaaattcagagaagcaaaccgtgtagtgacaaaagtggggtatagggaggatataaaagcaatgggtgaaataaaaaaagaattaataagaaaaggttataaaccctaa

SEQ ID NO: 7176 - DNA, 1011 bp, Methanobrevibacter gottschalkii
  source 1..1011: mol_type = genomic DNA
atgaactataaaatgtatgatgaaatgatggaacaaccagaatcgctcagtaaaacttttaaatctgagttatctaaaatggaagatgtttccaaattagtttctgatgctgataaagtatatttaattggttgtggtagttcaatttcaacttgttatagtgtacgtgatgcaattcgtatgtctagtactaatattaatattgaggtatttactggttatgaattttattacaataagaaattagttgaaaatgagaattctgttgcgatatttacctctcaatccggtgaaacagccgatacattggcatctcttagaagatgtaatgatttgggtattcatacagtatcaatttcaaacgaatctgaaagttccatgaccaaagaagctattacttcaattataactagatgtgaaactgaaactgcaattttaggtactaaaacttacattactcaattggcttgtctttatcagatattatttgccgttagtgattatgaaaataaaactgaattgttagcagagttacgtgacttgcctaaaactttagaaaaattattggaatcaactgaatatgaaaataaagctttagctcaggaatttaaagatgaggatatattatattgtttaggtagtggccctaactttggtcttgcatataaactggcaatgactatgcttatggaaggagcaattaaacatgcctgcccattgtatgctgctgaatttagacatggactaattgaacgtgctgaaaaggatgttccagctatatttttaaaatcaggtattgaatctgatgaagtaacagataaagctattgaattttctaaaaatttagaattaaaatatcttgtatatgatctggatagttatgcgggattggatagattactgtctccatttgtattggtaattccattagaatggtttgtatattatttggcacactttaatggtgaagaccctggtgcaacaaggcacatcggcaaagtcagatactaa

SEQ ID NO: 7177 - DNA, 582 bp, Methanobrevibacter gottschalkii
  source 1..582: mol_type = genomic DNA
atggtaaaatctgaaacaattgatgctgaattcagtgaaaaaaaagaaaaatttgatgaaaagaaagaagaaacaaaggaaagaatcaatgaaacaaaagaaaaatttgatgaaaaaaaagaaaaaggaaaaaacattgcagataatgtaatcaatgatttctacaaaagtattgatgaattcaaagacagtattaaaaacatgcaaaaaactgccgaccaaagatattcagaatacaaaaagtcaaccgttcagactattgacattgaccttgtagaaaccaaagagatgtatttcatcaaagcggcagttccaggggttacaaaagaagatgtttcaatagaagctggtgacaatgacctcactattgaaactacattcaaaccatacatcgaagagtttgatgaagaagaaggtgctgaagtaattgtttccgccatcaaatccggcagatgtgttaaaactgtaagattctccaacagtattgacattgaaaagattactgcaaaattcacaaacggaattgttaaaataaccattcctaaattaattataccaaaacataaagtaaatgtagaataa

SEQ ID NO: 7178 - DNA, 1164 bp, Methanobrevibacter gottschalkii
  source 1..1164: mol_type = genomic DNA
atgaaacataatccttttagaaaacggaccggaatattaccctcttatttcacaggtcgtgaaaacgaattaaatgaacttaatgaaatatactgctcaacaaaaagaggaattcccggccatttaatattatacggaccgaaaggcattggaaaaacatcattgttattgaaatttcaagatgaaatatccaattttgatgatgtatattccgttagaatacctttaatggaaggaaattttgatgatatctacacattaataatagaaaaatgttccgatgctttaaacattaacattggtcatttctgggaaaaaataaattcattaggcattaacataccgctgattggaggcatatcattttcacgtgaaattccaaaaaccagccctgctgttgcctttgaaaaaattttaaatgtaatttatgatgaactagattcagacaatcctgtgttaattctattgcttgatgatcttcaaagaattataggcgatgacgaaacaatgaaaatattgagcatattgcagaatgcacttgtagaattaaatttacaaggaaaaaatataatgtttgtagctacaggttctgaagacattttctacaaaatacaagacaaacttgactcagcagtacggatattcgaaccttatttaatcggacccctatcctatgatgaattatgtgaagcaattaatgttccaaacaaaaaacagaatgtaagttttgaagaagatgttttaaaggaaatatactacttatccaatggaatcccatattacatgcaaattttagcttacagttgctttgaagaaataaatgcagacaataaagtaaccatgactgaatttaaaaaagcatctgtacattccttaaatattctagctcaacgcgaatttaaagtattgtttagcaaatccactacagaagagcgaaaaatactatgtttgatggctgaaagtgacaaaacagttttatcatattcatatatcaaagataatgctaatctaaattcagaaccatcagcattattaaagaatttgatcaataaaaacatgataattaaaccatcaagaggaaaatacaaattaaaaaacaatcttttcaaattatacttgcaaaatctgaggataaatcaggatactggtttaatcaatgaataa

SEQ ID NO: 7179 - DNA, 1029 bp, Methanobrevibacter gottschalkii
  source 1..1029: mol_type = genomic DNA
atgatgattccaacaatacctacaccacaagaattacttgataaaggattcagcagaggtaaaaaacaagcagacttattaagaggtcaaaaaatacctaaacatctgaaaggtaaaagaattgaggaaagaagagtggtaacctcttgtcaagttattaaagataaattaaaatcaattttagatgcagttcctgaaattgaaagtttacatcccttttatcaggattatattgatattacagttggtgtggacgatatgaaacaggcattaggtgctcttaactgggcatatggtataataacccaacttgaaaaggaatatggttcaaaaattaggaaaaatccttctgaaagagcaactgctattcaaaaacaagcttatggaagaattgcatctgttgtaaacaaaatcaaaaaagacttagatttcctagactttgcaaaacagaatttaagaaatatgccaacaattgattttgatgccactacaattgttattgccggttttcctaatgtaggtaagtcaacattgctcagacagattacaggagcagatccccaagttgcaaattatccatttacaacaaaaggtatccagattgggcatactgaaagacactggaaaaatatccaaattattgatacaccgggacttcttgacaggcctgttttagaaatgaatgatattgaaatgaatgctattgttgcactagaacatttagctgatgcaatattatttatctttgatggatctgagacttgcggattccacctggacaatcaatacaatcttttaaaacagatagaaaaaatattttcagaaattccagtaatatatttatttaacaaaatggacttggttgaagatgcagaataccttaaagaatacattgatgatgaagaaaattcaatatttatatcagcaatcgaaggagaaggtatagataaaattaatgcgaaaattgatagaattaagaaaatagatcgcacccctgctgaagaagaagatgaagaaggatattactaa

SEQ ID NO: 7180 - DNA, 3516 bp, Methanobrevibacter gottschalkii
  source 1..3516: mol_type = genomic DNA
atgttaaaattagaatcaatagaatcaagcatatttgaggagctatcgaactcaataatttattttcaatatggtattaatataatttcgactggactaaatcgggaaggaaaacctataaaatgtcctatagatgcaattggaactataaaaaatgatgataaaactgagtttgtatttattgaagcaactacaacacaagttaatagtttaaaagataaatggttaagtaaatctgatgataaacctggtgacataattaaaacatataaaaaggcaaaagaattttttaatctaaataaaaattcttcttttaaactatttttaatgacaaatagagatttatctggggataaaggtttagatttaataacagaggttgaaaatgaaaattttgatattcctttaaaaattgaaattatggaacaagggtcaataaaacaattcttagattatgatagtgatggacaatatttgagaaaaaaatttctacaaattgatgttgaaaggttatctaaaccgttgttgcataaaatttgtgatgaaaacctgcaagcatatgaaaatttcattaacacaacgggatttaataatttaattgaaagagaggagctaccttcaattgaaaaacatatcagtaataataatttgtcttttttaattggagaatctggatatggcaaaagtgtaatttcttttcaaatactcaaaagacatattaataatggaggatatggtttgtggatatctgaagaatttttaaaaaattcttctaatttaaattatacattagatgaacttttacatcaatattgtccaaaattagaaaaaaatagtggatttaaagcattaaactttaattccaatgataattttttattgatttttgatgatttgaataggagtgaaaatcctaaaaaattaattgataaaatcattaattggtcgaaaaatattaaatcgggtaaagaaaatactgatgaaaattatcatgataaaatccggcttatttgtccaatttggcaaaaaaatatgaaaaattatggtagtaatctagataacgattcaaatataatcatagaaaaactaaaagatgaagatgggataaaaattttaaaaaacacagccaaagacaaaggcattgtcttgtctgatttagaagtaaaaaattatctaaaaaaattagataatgatccattttatattggtctttttatctcagaattaaataaattcaaaaattgggatgatttaatcaataatgcatttcaaattttcttaaatcgaaaatttgaagaattagatgaagaagaatttttacctcaagattatgaaagaattctattaaaattatctcaaaatatgttggaaaattatatattaaccccaaatctacttgaaattgattcatggtttgtcagtgacagagataaaaaaattttaagaatattaattaaagatagaaaaatatgttatttaaataataatcaaaacttatattttatacatgataggataaaattttattatttgattagcgcatgtacaaaaataattaatgataatcctcaatctgaaatattcaaggaacctttctatgcagagataattggtgcttcattgtataatattggtaaaaataaaaaatttatagaatttctagcaaacaataaccttttagctctttttgcatccataaaatatattgatgatgcaaatgaaaactatgaacaaattttaggaatattgactgaatggtcaaatgaaaaacatgaatcatatccaagctttcaagaagaagttgtcaaaactttatatacttatgattctgaattggttgtaactctattgggcaatattaattctctttttaccagtattccttgttttagaaatggatcaacaatacatggtataaaaaaagcactaaatatatttggatacaattatccattatttaagcagacaatagaacatgttaaaattcattataaatctaaaataattgaagatataaaaagaatattgtcgtctgataaactagatgatgatttattatgcggtacctttttattagcaggatatttaggatttgaagaattagaagaaatcataaaatcttcagttaagttatttgaaattaaagaagataatttatatattatcctttttgcagcatttaggtgcataaataatgatatggattttattaagaatcttttagaaaaatgggacatgtttggaaaaaaagatgatgaaattcgatttccatttattgaagaactaagattaacttttagagattaccctgtaactgataatgttttaaattacttaggctttaactttcaggaattttctaatataaaacattcaatatggtatatttgcagtgaattaaataaaccactatcatttaaaatgactttagattatctttccgataatgagtatttatttgatatacttccattttttagaagaattcagatatcttcagaatctagaatttttttagaaaactattataaaaaagaagatataaaaggtcattctaaaaaatatgcgtttagattatgggcaatgaattgtaatgaaaatgatcttccaaaattacaaaaaattgacaaagataacattcttttttctgagtctctaatcactagaattagattaggtgacttaacggcgttaaattcatttattaaaaatttcgatgaaaatgtggttttgaatgaaatccataatgtttggaatgatgaggcaaaattatttgttgaaaaatgttttaaagatatggaacttaatgaaaataaagaaattcaggatggatatgactatgtgcatttaatgcaatgtcttgcaaaaataccgttagaagatgcagaatattacataaaacaatattgggataaaattaaatattacagaatattcatacaattaaacttttatttatgcacaaatttaagcattggattaaataatgagttatttgttgaaattaaaccagatgaaacattgtttgaacattttacaataaatttcttatatatggaaggatatgataaattttcaacagagtctcattttaatgaaataatacaatatttggtttattttaaaaattctgatcttgatttaatatttagaaaagctgaagaattagggtattgtcgatggataagaaaagcatgtcgaaatttagataaaaatcaattttctaaatactgtaaaacagataaaaacatagtttctgatatggaattgtatgataattatagtttttggcaaataaattttgaaaataactgcttaaataaaaataggataaataatatattaagactatatttaaataataatcaaaatattgaatcatttattaatgttgcaaaatttattaaagaaaatggaaatcgtgatgatttaaaaatattatttgagtctaatattaaagaagataatatgctgtatgatgttgagtttagtgttaaatgcagaactttagattga

SEQ ID NO: 7181 - DNA, 1311 bp, Methanobrevibacter gottschalkii
  source 1..1311: mol_type = genomic DNA
atgattattatgggaattactgattatattaaaactagattattgaataatcgtgtggagcagtataacactaagcgcagctattgtggtgaagatgaaagacaacctagaactgatggaatcaacactggccttgacttgcctgatgcacttccgccagttattaataagacaataactaatgctcgttatgctgttaaacttgacggttacacttcaggtatcttgaaaaatagaattgataaagcaaatgttaatatggtgcttgttgataaggaaaataaattatctcaagagcagaagttgactttaattttgtgggcgagaaaaattgacatttctcaagtagctaaaaatattctgcaaggtggaatggttgatggggaaggtttaattaaacctgtacaacgttgggataaaagcattggcaaatacattaaaccggtatttttagaaataggcgcacacggttatggattgaaaaaagaatttaatgatgataatgaagtgcagctatatcttcatgaaatgcctaaggatattgttaatggatctccggaagagtttgataattatgttagtgtcgaagagggaacattaacggtcaagtacgaacctgaagaagttattaacttcatgtataatgagatatactgtgaagctcaaagcattatcctaaattgccttgatgatatataccacaagtgcaatttggaacgaaatcaagtggaacgtatcaacaaggataatattattgaagtaaagcctgcgatggatgcaaacggccaaccttacatcaccgaactttcaagcaccgctaaggaaaatctttatgctgattatggaactactgccggaagtaatgtagctattgtgcctccaggaattgaaagtaaaatccttggtggtaacaactaccagtctgactatacaagacaaacagaaatctttaggaataatatcttaaggacttttgtaactcctcagtctcaagcaggtaatgagaagtctaatcagaacgttgctgagtacattaacgattcagctattacaggattcattgttaatgtggccaacgaccagaaatgggtgttaaagtattgcaatcagctattgaacttgcagttggagttaatgggcatcagtgaaactttagatatatatttcagctattcaagagatgatgttttaagatacattatggaactttcttccgaaggtgatgaaatctataagaattatctcagtaactttgaagaagagcagcctgtcggtgaaaggattttaagtgaaaatggtgtggaggtataa

SEQ ID NO: 7182 - DNA, 1899 bp, Methanobrevibacter gottschalkii
  source 1..1899: mol_type = genomic DNA
atgaaagaaaaaatgggaatatatcaaagatataatttaggtcctcaacattatcacagttattttgagttcgatttcaagaataaaaaggcacaactcatatctcaagacattacagaagatttcagaaaagataatgctttaatttatactgatgattctaatttaaaaattgcaaattcccttttaattgcagaagaaaataaaatttttgatttgaatgaagatgattgtcaaaaactttattctgaatttgataaaattaaatattctcatgatgaagaaattcctggaatctggcaattgagtaacattacatttagtgaaaaaaatttttatgatgatgcacctgaaatatttaaaattcatgaaagcaattatcaatatgtcaataattatccaaaaaattggattccattaggcaatttaattattgatttattgggctttgatttgttaaatattaatttaaataatttaatcactccattatattataatataacttcagaaggggtttatgaaaaacaaacaaataataaactgaatttaaaaaaattaaattttaatattgtttcttttgaagaaccattcaatccttttaatttttctatcgattcagaagatagtgattttgaaaagattattgaactattggaagattatggcgtttataaatggtatgataaagattacgctgaaaatataattgaaagcgatgatttcaatgattttaaaggaaattcatggttcatcgaattaatatttgaaaatggtagagttttgaatttaagaggagataatgcttatccagacacttatattcatttgggaaacgaaattttaaactttaaagaggatttgttaagaattaatgaaatagataaagaacagcaaaatttcattaaatcctttggtgaaaataaattagctaaaaaaaggaatataatcaaaaaaattgaaatttctcaaactattcttttagatgatagaaaacattatgagttcactttagattgtgaaaattctgttattataccttatgataattatgatctttatgaacctcgtgaacacatttctagagacttatctaaaaagaattattctgtttcaaaattattctatgaaaatattgtcaaagaagaaatcaaattagatgaacaaaaattagataatttcttaaatgaaattaatgaattaaaattcattgatgagaagccacacatgtggttttatgataaaaattattatcagaatcttatcactattcacactcccatgggtgagaaatcatataatttaactaacaactatgagctttggaaaaaattaggtagtttatttgaagaattgctaggctttgatgtattaaatattaaaaactttaaaaatataataaatccatttgattatgatatttgtaatgatggtgtttatgataaagaaacgggggataaattatcattagaatatattgaatatgggcatgaggcagttttacattttggtataggttataatatctatgttgatttattaaaaggaaccacctccggtttaattgaaaaagatgatttaagtaatgatgaaattgaaaaaatagtatctcttcttgaaaagaaccgtgtgtatgaatgggtttttgatgaattttggaataaagccatatatcataaatggtgtggttttgatggatataattggtatttaagtttagtttttgaaggaaataaagttttaaatattggtgatgggaatgattatcccgatacttttgtcaacttggcagaagaggttatagagttcagtggtaaagatatacttaaattaaaaacagtatatgaagatgatattaaaatctataaaaaatatgctgaattacatttaaacggttaa

SEQ ID NO: 7183 - DNA, 954 bp, Methanobrevibacter gottschalkii
  source 1..954: mol_type = genomic DNA
atgcaatgttataattgtaacggtatttataatgattatttaagctattgtccatattgcggtattgagaaagtagaatttaatgtatgtagcaattgtgaagaaaaacttactaaagatattttagtttgtccaaaatgtggtggaaaaccaattgaagaaacaaacgaaatgaaatctgataggttgaatagagaaggtttgatgcatggtatgacaagtagtcccagtgattattttaatgaagctataaagtttaataaatataatattgatgcttgggtgaataaatcagaatttttgaatgatcgcacaatgcataaagctaaaaaatgttgtgatgcaggtttaaaaattaataaagataatatgaagttattattatctaaatcaaaagctcttaaaaaagatgaacgtaggagcgatgagaataatgcggagattatcttaaataatcttttaaaaagatgtaatcaagaacttcaagaaaatgaattaaatgaagagatttggattttgaaaggcgaagtattaaatgaacttgataaaaaagaagatgcaatcgaatgttattctaaagctcttgaaataaatcctaaaaatgaagaattatggatacgaaaagcattcttatgttatttaaataatgattattattgtgaaatagagtcttacaaaaaagctattgaattgaatccaacaaatgagaaatactatgaaaaaattggagatgtttatcatctttatattcatgataatgaaaaggcaattgaatattataataaatctttagaactaaatcctgataataaacagctatgggatacaaaagggcgtttagaaaaagaaattggaaaatatgaagaagcactaaaaagttttactgtagatgctgaattaaatcctatcatgatggagcattattatctaaagcagaagtattttgtgaattaa

SEQ ID NO: 7184 - DNA, 237 bp, Methanobrevibacter gottschalkii
  source 1..237: mol_type = genomic DNA
atgatgaggcatgaactttttgaagttggatcctatgattattctgacttggatgatagacttgacaaaccggtaatatggagcgaagatgatctaaagctaatagctgaaaactataggggaggaattccgttaacttcagagcatgacaatatctacgtaggcatcggaaacaatattgaatatgagaaaggaaagctattcattgaagttccggacgaactggatatggaatga

SEQ ID NO: 7185 - DNA, 663 bp, Methanobrevibacter gottschalkii
  source 1..663: mol_type = genomic DNA
atgagcttaatagatgtcggtgtaactaaaaaccctagaaaaattaccttattgaattctgaaataaccggaaatactggtgcaacaggaaatccaaatcccgcaccacaaggacaacctcagcctgcacctagcaaagatgctaatgtcgcaaccagcttgcttttagaaaagcttcaaggcaaggatgtagagattggaaagcttcaggatgaaataaataatctaaaagaagaatctaaaaaatatgatgaaattaaaaaagctattgaagaaaataaggaatttatagattctaaagatgatattctaaaagaattatctgaactgcgaaaagctgaaaatgaaaggaaaataaaagaatacgaagctaaatataacttcaactataatgaaaacgcccaagataaagagataattgataagctattatctggtgatgttgatatggaattaatggaaaagctggctgaaagaagaattaaaattgaagctagtaatgatggttcaacacctggtggtcgcaacccttcaaactccggtgatgtaggtgaaaccggtgaaaccggcagcactggaaatgaagatgcaccatcttttacaactcgtgaagaatataataagatattgaaagatatgggttttaatcgtaccagaatttag

SEQ ID NO: 7186 - DNA, 1959 bp, Methanobrevibacter gottschalkii
  source 1..1959: mol_type = genomic DNA
gtggtttcaaataatatttttatctcaccaattgagtttaaagattgggaaaattggaaaaacaaaataaataattcaaatgataatgaagagctatgccatattgcagaaacagatcgtgaatggtatattcgtgctttagctgttaataaaataaatgatgaatcaatattggcagatattgcaattaataattctaattcgtatatatgtaggttagcagttagtaaagttcaaaatgatgaattattaaaagagattgtagataaatctccaatatatgaagtttgggaggatgcattatctcagattgatgatgaatatatattaatggattttgcagaaaatggaagagatttccatattaaatggcatgcaattaaaaaaattaaaaatgaaaatttgctagttaattttgttaaaaaaagattaaaacatacacgaaaagattttatagacaaatccaaatcatttgatgaatcacgtgaatattcattatgtacgattgctgtagaaaacattcatgatgagtcattattaaaagaaattgtaataaatgattataatcaagctatgggcattgaagctctaaaaaatatacataatcaagaatttttaattgatgtggctttaaataattatgatgtgcattataagttatctgcgataagaaatattacaaatgatgatgttttaatagatattgcaaaaaatcaccctcaacgatttgttcgagaaaaagctatagaaaaaatatctaatcaagctattgcaacagatataatcgcaaatgatcatgaaattgaagtagataaattagatattcaacatattgatgatagtttattatttaatcttgttaaaaaagataataattggcttcgcaggacatattttgttaaagctattcaaaatacagattatttaaaagaagtagtatgtaatgatgtggatagtcatgtttgtaaagctgccgttgaaaaaattcatgatgagtcatttttaaaagatttagttaatcgtgattttagttcagaagcatttgcttgggatgtaataccggctgctttaaaaaatattcatgatgattcatttttaaaagatattgttaacaatactaaatacggccgttatgctttaaaaaatatcactgatgaatcttttttaatccaaattgcactaaattgtcgtgactctcattgtagaagtgaagcgttggaaaatatctatgatgaatcaattttaactcaaattgctttaactgatcctcagatgcatgttagaagaaaagcagtaagtaaaatctctaatgattttgcattaattaatatttccattatggatcctggttttcaagaatatgatagaccatattgtgtaatttatttggttcgccaagaggcagagtccagattaaaagtattacttgaaaatcctgatataaaaactaatactgaatatgttgatgttattcaaagaattagatatgaacttgatgagaaaagaaaaacatcaactcaaaaaggaattatacatataccttataatgaaatgaaagattttactcaaaataaaacaataataaaagagaaaaataaaaaaagaaagattacaaaaaacaaaagggatgaaaaatctaatctggaagtcgaaattaataaattacttgaaaattataaaaatgatgtattaattactattatatcatttaataataaaagtttatttaaaaagggttctatttttaatattgtaaaagaaccagataatccatatgatatggaggccattgctgttaaatctgataatataacaatagcatatgttgcaaatagtgttcgtactgttgtaaaaggtactatgagtgcaggtagaatttatgataaatttggtgaagattgtgaaattgaagttatttttgttagagatcaaattatagcaaaattaatctttgattag

SEQ ID NO: 7187 - DNA, 273 bp, Methanobrevibacter gottschalkii
  source 1..273: mol_type = genomic DNA
ttgattatccattttactagacaaaaccattatgttataaagataataggtaaattaagttattatattaatgattcacaggatgaaaaaggcattaaaattgaaaaattaaaaaataaaatgaggaattatggattgaatgatttagaatttgatgcattaatcaacaaattaattgatattggttatctcaataaatctaatgaatgcaatattagtttatgtgaggataattactattcattatatgatgttttaaccttgcacaaataa

SEQ ID NO: 7188 - DNA, 1017 bp, Methanobrevibacter gottschalkii
  source 1..1017: mol_type = genomic DNA
atgttaaacattattaacaaaaatcaggaaattaaagaggaatttttttatttggaaaggaaagctctgagattttataaaagaaaaaaatataaacaatcttttgaatattataaaaaggttttaaaagccagtaacgaatttaaaaataattccaatgaatcacatttcaaatggtatgatgaaatactatcaaactgtttgaaaaaatactctgacaattacgatgaattttttaaatgcatttattcaatgaatatagaaaattatgatgcatggtttgataaagcaaaattatatggcaataataataagcgcaatgaagcaatcatatactgttataaattattaaagattagaccagatgatttggatcttttagagttcacaggccataacttatgtttttcacatagatatgatgaatctttgaaaatttatgatattgcattaagtatagataaaaataacaaagatcttattcaagacaaatggtatgtatattatacttcagacagaatatacgatacattagaattctgtaaaaatttagaaaatactgatgatattacttccacagattatcaggcattaggttttagatttgaggaaaaagaagaatatgaaactgctttatggtgttataaaaaaggatttgaaattgaagaaactgatcataaagagttcgatactgactctgttgatgctattaaacgcatgctacttaaattatctattgatgactattcatacattaatgaattttatcttgaatggatttcaaaaatagaacataaatttgaaactacaaactgttcaaaatgtggtggaaaattaactccgataatttatgggctcgttgtaggtgatgaagtatttgaagaacaagaaaagggcaatattattgttggtggatgttccgttgatgaatctagtcctacacattattgtaaaaaatgcgatgaagaatttaactttagattcaatggattaaaaattgattatccattttactag

SEQ ID NO: 7189 - DNA, 1668 bp, Methanobrevibacter gottschalkii
  source 1..1668: mol_type = genomic DNA
atgacattgcagaaaaaattacaaatcaatattgtcatgagcaattacaaccagaggagcagtagctattcatccggccatgattatatcttcctggataatttagccagcagttcttactccaattatttcagaagtgatttgaaaaacctgaagatcaaaacttccaatggtactgaatgtcaggtagtatacattccatcttatggatcacaaggcgcagcaatacttgcaagggtttctgttggtcagatttcacaaaacacaaagctactcttggacgttcatgatacaggaacagcattcgcaagcactttatcaactggtaatgaagttttaatgtttgatgcaaataatgatacatactcacaatttttcatgaactactccggtttatcatcaaacaatgactcaacagatgggggccaatttttaagagctagatttgttcctaacctcgaaggaacttctccaactgatttgtttaccacatttgcttcaggccaaccattagccaacaatcgtgttgttgtagccagattcaaatatattaacggtaatgtttttgttaatgataatgcaacatatcacggttcaaccattggaggcatcatgatgcaaattgatggaactctctcacctgatgagtctaatgtaaaggctactgtcaactattggggtggggaaaaagattattgcatgttcactggtgctaagactttagtattggccagttcatttgatgcttacaatcagggaagtgatgaagagggaaactggaaacaatatcattttcataatcgtgttggaacaggaacatcgaatacatcagattatattgaagggttcagcagaaataatccaactaaaatttatcttgggtgttttaaaatgattattgattatgatgtaaattcaacaatcggacatggccgtggatatccaacaggccttgaacatacagagaaaatggatgtaatagcttgtcttttagatgagggcgaaagaacatatgttaatgatgaacatactgcttggatttgttccaatcaatgtgcagtcggcgatatggtaactttagatatgtcttcaacaatggaacatacaattgttagaaaagctcaagcaggagaattggctttcggttatcttttaggtaaagtccaggttaagacttcaggattaacattagttgctgtggccgtgttaggtgatgtctttagattaaaactcaaaaggccagtggctgaagacatattgccgaatacaagaatctatattgacagtgccggtgaatgcaatccggttgaaggccatgacttaaggctgttgtcaatcgttaatcttcaaaataatgaggatactgattacattagagtttatcgtcagatgtctgaggttgaaatgtatcgggaatctcagaactgtattgatcttggagattgcagttttgaacaggatgagataactcacgttgttaatatgatcgtgccttcagagtcaaacatcatggcccaggcaaattatgtaaaggatgcagacggtgtcacctattgtgagcttcctgatgtagctattgtcaataacgtccgtttcgtatgggaagacaacaaactctacatggaatgggaaggatgtgatgatggccaaaatgtatattttatataa

SEQ ID NO: 7190 - DNA, 192 bp, Methanobrevibacter gottschalkii
  source 1..192: mol_type = genomic DNA
atgaccataaggaaactggtaggaactctagaaaacaaaggcccgtacattgaccaatcaacaggccactggttttactggaacggcactagatatgttgatagtggctatccttacgctgtaaaactcattattgaatttaaaatcgaaaatggaatattatattactcaattacttgggaggcacaatga

SEQ ID NO: 7191 - DNA, 150 bp, Methanobrevibacter gottschalkii
  source 1..150: mol_type = genomic DNA
atgaaatacataaaatactttgaaacaatcgaagagtacgaatcctggatgaaagtagaagaaaatgctgaagaggtatatcaaagtgaagagaagattcttgttgatggagtaatcatcagccacacatacaaagaggaggaaatttaa

SEQ ID NO: 7192 - DNA, 252 bp, Methanobrevibacter gottschalkii
  source 1..252: mol_type = genomic DNA
atgatttacgaattcctggaagcaaacagaaaggacattgacattttaacttcatttcttgttacagctattccaattgtcatgctctattcagaagcattaggaattactgaaaatacaattccttactgcattctcatgataatcttaggaatagccagtcattacgcaagcaggataagaggcgaaggagatgttgaagacgccaaacaaaaagctaaaagagtattgggattccctgaagaaaaataa

SEQ ID NO: 7193 - DNA, 270 bp, Methanobrevibacter gottschalkii
  source 1..270: mol_type = genomic DNA
atgaacaaaataaaaaagaagatattcatatgcaactttaccaaaacaatttcaagtgccgttttaacagctgtagccatcaacatcataatgaccaatgcaacaaagtatgctttaattgaaggattattgccgtttacattagctattgttattgttggcctaatcgatttgtatgagtatagatgtgagcgtgaagacaagattaatttggatgaactggaagagcgaatagaaaaactggaaggtaatgtggatggagaaaggtaa

SEQ ID NO: 7194 - DNA, 357 bp, Methanobrevibacter gottschalkii
  source 1..357: mol_type = genomic DNA
atgtggatggagaaaggtaagattctaattgcagttccgacatttgaaaatataaaaccgcaatgcttcaaaagcatctatgggctgacaaatcctaaggattttaatctttatttcgattatgtgaaaggttatgattgtgcacgtgcaagaaacgaaatagcaaaacttgcaatcaaacatgactttgactatgtgctgatggtagattcagatgttagtgttcaaaaggatgctcttgttaagctattggaatgtgaaaccgacattgctttaggatggtatttcaagaagagaacaagaacagatgagtctgttatctttgattttggaaaagactatagtaatcaacgctga

SEQ ID NO: 7195 - DNA, 603 bp, Methanobrevibacter gottschalkii
  source 1..603: mol_type = genomic DNA
atgatgaaatttatgatcaccatcaccatcaataatatcgaaaacaaagaattaaaatcaaaattaaaaaaaataatcaataatgatgaattactcctagaaaacatattaaatacaataaataaagaaaagaactataataaattattattaacatttaaaaacttgtctgaaaaaaataatacaattaaaaaattatacgaaagacttgaaaaaaatccgctcagttttaaaacaaaaagtaaatcagttctcgaaaatcttcaaaaaggaatgttattagcatttttctcagataatgaactaaaacatgaattaatcctagaaaaaccaatagcagttattttagacaattacagcgtccaccatgcaatatttttcacagaattatgcaaaattttaaatatggatttaattcatttacctccatattccccaaaatacaatccaatagaacaagtatggagaacaatcaaagctaaaatttctagaaaatacatttcaagcattgcacaattaaaatacctatttaagaccgaatttaaaaaagtagttgataattcaagtttttggaaaaactgggaggaaaacttcctgcaatag

SEQ ID NO: 7196 - DNA, 489 bp, Methanobrevibacter gottschalkii
  source 1..489: mol_type = genomic DNA
atgtctaatcaaaaattaattaaggagtatttaggaattatttctgagatacaagctgaaataaagaagttagaaaatgatactagggttttaaataaattatatgttattctagacgttttacatgatgaaccaataccatatattgtggaaaagcatggaatcagtcaaggaacagtatataattggataagggaatggaatgaaggtggaatggaaggattaaaaagaaaaaaaggctccaaaggtcaatcaaaactaactgatgaacaattgatattattagatgaaataatacaagaagaaaatttgcaaactgcaagagaagtaaaagataaaattgaaaaagaatttgaagtaaaatacagtattagaagtatagaacggataatgaaaaaattaggatattcttacaccaaaccatataaaatttatgccaaaatgcccgctgatgccgaagaacagttaaaaaaaacactcgacatctag

SEQ ID NO: 7197 - DNA, 384 bp, Methanobrevibacter gottschalkii
  source 1..384: mol_type = genomic DNA
ttgtttaaaacaacatatgtatctaattttggtgaaatcaaccatatattgaattactgttatgaagaattagaatggggagagttaatcaaattatcaaatgagttattggatattgaaaaaaatcatcaaaataatcggagaagtgataatatacaatattcagtaatattaattgcaatagttactctttgttcccaattattgatttattattccaattttaaagatgtaatacttttcattggaggaattgcttttttatttttcttaagcttaattttcaaagaaaaaatttattatgtctggcaaatattaaagttagtgcctaaatttatttacaatttaatagttttattattaaaaagaataaaagatttataa

SEQ ID NO: 7198 - DNA, 993 bp, Methanobrevibacter gottschalkii
  source 1..993: mol_type = genomic DNA
atgattgaagggcattatactcaaaaattaacaaatggagaatgtccatatgagcttgtttattttgaagtagatttattaagaaatattattgataacccaaggtatgttatcagcaataattcttttaaatataatataagcatcacagaaaaatatgataatgatgaaacacttgatgagaaatttaaatttattttggataatgtgggtcttggatttgatgaaaacaatgaaagaatttttgcagtacttttaaaagaactgtctgaattacaccctgaaatgcaaaaaagattcagtgtttatgaagttaaaaagaaaagttatgttgatccatcatacataaaatctatgaatgatggagaatggcccgatccctctgtttttagtgcaatattatatcaaatagaacaacttaacaatttatgttcagataatgaaattaaattatttaaatccaattataagaaaaaacccccaattgaatttaatatattagtattatctactaaaaaagaatatgataattttattaaaatatttgacataatgctttcagataacatcaacaaaaaattctttgaagggaaattagatttaattgaatttactaataaagacggtacaaaaaagaaagataaaggaaccataactttatttaaagaatggttgggtgaaattggagtatctccagccaccatcaaaaaaacaataaagattattaataaagtaagaagtgaaagatctaaaccttcacataacattagagataatgaatttgatataaaatatcttcaaaagcaaaataaaattgtattagaagtttataatacatttagattactaattgatgaattatctagaataaatcaaattaaagtcaaacattcaaaatggtatgttgaaaatagaatagccatacaatcattagatgagattaaaaatgaagataatgagaattatcaattaaagatttgtcaatccaaatga

SEQ ID NO: 7199 - DNA, 570 bp, Methanobrevibacter gottschalkii
  source 1..570: mol_type = genomic DNA
atggatttaaattttatttcaattattttagatataattctaacaatcgttacgggattcatggcattcgcaacatataaaatggcacgttcaacaaatgaatctgttgaagaaatgaaaaaaacacgtgttgaggctaattctgctgaggtaataatgtattttaaagtagaaaataatagaatgtatttaattgttgaaaatataggaaatacagttgctaaagatatatctattgaagttgaacctgaattaaaagattcacataataaagattatgaacatttaaaggaaatttcattcttacctccaaattatcaaattaaagctttctttgatatgggatttaattacttaaaaaatgaagataatccagttaaatataaattcattataacatttacaaatatctataatactaaaataacaagagaatatatcagtgatttgagctatatcaaaagtgtttcttatttaacatcagaatccgattccatagaaatgtctttaactaaaattaaagatgaactaaaaaatacaaatgattacttaaaaaaacttaataactga

SEQ ID NO: 7200 - DNA, 165 bp, Methanobrevibacter gottschalkii
  source 1..165: mol_type = genomic DNA
atgaaaattaatgaagaaacaaaagttagaaaccaaggtgagatttcactcataacaacaatccctaaaacatatgttaaagctttgaatattaaatccggggacatattagaatggattctagatactgaaaaagaaacattagaattaaaaataattaaataa

SEQ ID NO: 7201 - DNA, 1002 bp, Methanobrevibacter gottschalkii
  source 1..1002: mol_type = genomic DNA
atgataaaagttatagaattatgtgccggtgcaggcgggttagcacttggatttgaaaaagcaggtttagaacatgaggtgcttgttgaaattgataaagattgtgtggcaacacttaataaaaatagacctgattggaatgtacttcatgcagatataaaagaagttgatttcacacagtaccatccagatatagttgtagcaggactgccttgtcaaccattttcttacgctggtaaaaaattaggatttgatgatacaagaggaacattattctttgattatgcaagatgcattaaagaaactaatccaaaaatgtgcataatagaaaatgtagaaggtttagtaaggcatgataaagggcgaacaatggaaacaatagtgaatgtattggaaaatgaattaggttatgatgttcaatataaagtcctaaatgcagttgactatggtgtagcacaaaaaagaaaaagaatgtttcttgtaggaactaaaaaaggaataatattcaattatcctaaaaaagttaaaggtaatcctgtgcttcgtgatgcccttaaagatgttccggaatcagaaggaactgaatactctgataagaaaaaagaagtacttgagttagttccacctggaggatgttgggttgatcttccagaagatgttcaaaaagaatatatgggtaaaagcttctattctggtggtggaaaacgaggtatggcaagaagaatctcatgggatgaaccatgtttaacattaaccacttcaccatgtcaaaaacaaacagaaagatgccatccagaagaagtaagaccattcacagtaagagagtatgcaagaatacaatcattccccgatgactgggaatttgaaggcggaataacttctaaatacaaacaaattggaaatgcagtaccagttaaagttgctgaagcagtaggaaaagaagttatcaaagcattaaatggcgaaaataaaagaaaagaaggtcaaacaactttattttag

SEQ ID NO: 7202 - DNA, 729 bp, Methanobrevibacter gottschalkii
  source 1..729: mol_type = genomic DNA
atgaataaatatgtaacttttgtttcagatgaaatatttctagaagaagtaaaaaaagttgtagatgcctatgcaacggatgaagatttatcaaaaacaccttgggaagttttaagcaatagtagagaaactattgaccaatttaaaacattatttgatatttattcaaatagattcagcttaagtgaatggattaattttgaaattccaagacaacatgataaaactgcaagtaatcgtgttggtgatttccaccagaatcttttaggtcgtgttgatggttgggtaaatcttggaagaggtcatccatccggaatggacttgaaaaaagaagatgatacaatatggattgaattaaaaaataaatacaatacaatgaattcaagttctttaagagatactcgattcaaatgtgaagaattagctgaaaaatatccaaatgctaaaatatattgggcgtatatagtttcacaaaattatgaatcatttgataaaacttgggtgtatagagacaataaagaaaatgttgtacatgaaataaatgataatattagaaatattgctggaaaagatgtttatacattagtcactggagatgaaactgcttttgaacaattatttgatgcacttccaaatgcaataaatgatattaaaaagagtaaacatattttaactccaaaagaccaagtagtatttgaaaagtacaaacaactaatatttaaagactaa

SEQ ID NO: 7203 - DNA, 495 bp, Methanobrevibacter gottschalkii
  source 1..495: mol_type = genomic DNA
atggcagattctataattttacttgaagagagaaaagaagtcacaaccttccttctggatgaaggtacaatcaccgcaactacagttacaactcctacaggtgaaactccaggttacgaatacgcaggaacaaaaataaaagtcgatgatgtagttacattatcagtcaattcagacatcggaaaaccaacagtcaagaaattcactggtgcggaaggagaaatcatcttaggcattgcagtaaacgatccggttacaatgaccggaggtaaaagaaaaacagctattctcgtattgggtcatttattcagattaaaattagcatctggaatttcaaacattgctgttaataacagaatagctttaaccagtacaggtgctatcaaatcagatgagggagaatatattgcaatgcatcctgtaactagctcagatgattacaaatacatcgaagtgttcagaccatatgacatcggaactacaggttcaacttaa

SEQ ID NO: 7204 - DNA, 939 bp, Methanobrevibacter gottschalkii
  source 1..939: mol_type = genomic DNA
atgattacaaaaggaaatgatacaaaagttcaaaatgaggtaatagctcaaaccattactgatgaaactgcaaaaagattgaagttagctagattgtttcctaaacaagaaatcaaagagaactcagattactacacatacttcagacagaacatcaatctcgatgaagctatcaaaaaaggtttgcttggagaagcaaaagacattgctcccggtgcatcattgcaagaattgaacatcagaaaacctgtaaccgacacaatcagtattgatactgttggtggagtcttgaatgtcaataaggatgttttcgactcagatatcgtttcatttgaggatttattaggcgatgtggctaccgttattgctaaccgtattgaatacaacatttacgatacattaataagctcaccgaacgttccacaatataacacaactcaaacagatgatacaatggatgctttcggtaactttgtcatcaaagcacaggaagcattcaaaggcaatgctggagctggagcagatttaacaataatggcagagtcttacaaaacattatcatacgttaaacagttggcttactcctcaaacaaattggttcagcctgtagaagacattaaggaatactatggtattgataacattgatcttttaggaactacacaggctgacggcggatctctaataggtgaaaaacagtacattggtttcgatttaagaaatgcaccattaactgtattgtattccaaatcttcaggaactacagttgcacctattacaagtgatgagaacattgcagatttctatcccatcattgaaatcatgcgtaaagacatttacgatgagttacctcaatatacaaaattattcatacaaagtaaagtcggaatattgctgaataaaccaggacttgccctgaaaggtacttgcaggccataa

SEQ ID NO: 7205 - DNA, 927 bp, Methanobrevibacter gottschalkii
  source 1..927: mol_type = genomic DNA
atgttaaccaaaggaaatgatgcaaaagtacaaaatgaagtgatggcacagattgtggccgatacttctgcaaagtggatgaaattcacaagattattgccaaagcaggaaattgaagagaactcacagtattacacttacatgtctcaaagagtcaatattgaggaagctattcagtcaggcgttcttggtgaagccaaagacattgctcctggcgctactttacaggaactgaacgtcagaaaaccaatcagtgaaactatcagtatcgacactatcggtggagttttaaacgtttccgctcaaatgcttgattccaatttaatctccgttaatgacatgctgcaggatgtgggaatccttataggcagaagcattgaaaaggcagccattgacatgattatgaattcatctaaagtagctacctacaacttcgaaagtggcgatgacactggtatgaccatcctcaaagctcaggagaaattcaaggaatcagcaggtagctatgccaacttaaacagcatggccgtaagctacaaatctttgacaaccctgaaatcagacatattctcaagcaacagacaggtcgaaccggtagaacttatcaaaagctattacggtgttgacaacatcgatatcttaggaacagcagtatgcgatggcggttccgagatgggtgacaagacctatatcggtatggactacatcaacccaggaatgaaattattatactccagaactaccggaactaccgttgctccgttaggacctgacggtgagatgtatgatttctatccattgattgaattcatgagaaaggacatcagggatgagctgccgatgtacaccaaactcttcatcctgtcaagcgttggagtattaatgaatgcacctaacagaatcatcaaaggtaatttcagagcatag

SEQ ID NO: 7206 - DNA, 417 bp, Methanobrevibacter gottschalkii
  source 1..417: mol_type = genomic DNA
atgaaactgatattagatactgaaaattcacatccaacaacaataacagtcaagggaaaagaaataacattgctgttgattgaatccagtatactgattgattcatcccagatagccaagatttttgacaaaaaggaaaagacagtagttactaaagtcctaaaatccaaactggagaaatacgaaacagaaaacgttaagctactcaagaattacgggttgatgcatcctgatgcagtcaagccaagaccattctatgacttaaggcagatgctggaaggaccagcttattactacttcaaaaaagaagatgaagttgatataatcaaagtaatcatcagggtagctatcggcaaacatcgtgagtggattcataatcggtgcattgataaatttagggttgggtgtgtccgataa

SEQ ID NO: 7207 - DNA, 1638 bp, Methanobrevibacter gottschalkii
  source 1..1638: mol_type = genomic DNA
atgttgggtataaaagaatttttaaagccttcagttttaggatactataaacgttgtgaagttactcaaatttctttttacaaagataatcatgaagaggaatctaatttattaactttatttatttttgatgaagaaaattttcaaggtaggaatgaaatttttttgactggcaagaagaataaaataaattctaagtataaattatgtattaaaagattttatttatctattgaagaaagtattgaacttttcaattgtttaaatcagggtgtttcaaaaacaagttcattaaagaaatatatttttaatgataatcctttaaaattattgcctcagcaattcatcacaacaaatgaagacattagatttaataagatacttaaaaataatttccatagtggttcttatatatttgagttttttgatgaagaaaaagattttgaattattatttggtttaaataaatcgggaaggttaaaaaagatttcaaagatgattggggaagttgttccaattgatttgttgtcttgtactgattgtttgggaaattatatttttcaattaccaataactattttaaatgttcacacaaataagaataagaatatacttggtattgatttttattggcataataatttaattaatgaagttaaacctaattgtttgattaatatatattcaaaagttgataataattatctatttgatatttttgaggaatataataaagaaaatcatcaaaaaattaacatattgccttctggaaaaaattatgttttaaaaatatggaataatgatttaaaaatattgctatatgaaatgaatagtaaatattttgaaaaattcagagtttcattgagtatgagtgagtgtgaaagaaaatttattgaggataatggagaatctgaagtaactatcatgtcaaaccctaaattaagtgatgatattagttatttaaattatagaaatgatgcaatgtataaaaagaatttaaaagaactggaagataatcttaaatttaacacatatatgcaaaatgagaacgcattagaagatataaaaacattaattaatgaatatggtaaaaatggtgtgaatataattgatccttatttggaaccgaatgatttaataagaacagtagtccatttgaaattctatgatgcgccaataaaagcaattacttctttaaaaaattcatttaatgaattattgataatgaaagaaatgttagagcaacttccaaatcaaaatatagttcaaaattttaaaaatgttttaaatgaaaaaatagaaaaagaaaaaaaatctaatcttgaatgtattgaagattataaaaaggagttggatgagaaaattattaattcatgtggattaaatttagtatttagggctcaatttgatagatatggtcaaccatttcatgatagatttttaatttttcctggagatgatgaaaaattacttgaacccatagtattttcattaggaacttcattaaatgcttttggtaaacatttccatatattgcaagaggtttcacatccgcaacatgtggctgatgtttttgataagttatgggggatattagaacaaaaagaggagtgtctgatttggaattcaaaggaataa

SEQ ID NO: 7208 - DNA, 1521 bp, Methanobrevibacter gottschalkii
  source 1..1521: mol_type = genomic DNA
atgggggatattagaacaaaaagaggagtgtctgatttggaattcaaaggaataattgataattttgatgaatttaatatgattttggttaatgaagaattaatattattatttgaaagtttgcatgacttttcctttgatgaattaatgtattttgaagacccattacattatgaaaatattggtgttcaaaaaatcatgtctcaaattgatgagattatatctgttttattttataatattgatattaaaacaactgatgatgtcataagtattgtaaaaagtgatattttattatttaaaagagctatggatcaaattgatttgaaatattttatttttttctcgtatctaaattcttatttgaatgttgatgttgattatttgataaatcattttaactatgaactaaatatgattaagatggaagaaaaaattaatgagttatttaatcaaattcaagtttttcctaaacctaatgataataacttatcaccacttttaaaaaatgttttatttaagtccttgaaaaaagatgacattatgcattcatcattaaagttattaaatattagtaaagatccattcattttttataattttaaaatttattgtccaaaattattaactagtatgctgatacttattaaaaaaataaattatgatttctttttaagaaatatgtttgatgtaaataatttaatcatggcagtacttttttgtaaagaattagatatatctgaaatattagagtgttattatgaaaacgatatttctaatattgatttattattcacatttttgaaaaaaagtatagattctaatgaattaatagatgataatattgtgtttattaaggatattctacttgatattttggagttaaatgaaaatttatttagaaaaattatcagattattcaaacataaaaagttatttaatagatcaattggtttattattgtctggaattaataaatgggaagttgaattaattgttaatgaatttgacttaaattttggagcaaataatcatctaattaatcttagggaaaatattttaataaacctcgataaaaaatcggataattttaaattagttttaaaattagtttataaaaattgggatttgaatttaaattctttgattgatgatgatgagaatggatgggatttattatgcagtgattttaattcatttattttagaatattataatcaattttatgatgatgatatgttggttgaagaaatgaaattgaattttaattttcttgaaaaaattaattcaacatggtcatctaattttacaaattataaaaataggatacatgtttattatacgaaattatatttgttaagttcaatttataaaaaaaggaatattaataatatagagatattgggatgctatgagaatttctttaaaaataagtatttaattgaagttttgttaagagataaagcgaaaaaatcgattattgattttaaaaaagattataatatgatgaaaattcagtaa

SEQ ID NO: 7209 - DNA, 1488 bp, Methanobrevibacter gottschalkii
  source 1..1488: mol_type = genomic DNA
atgtttaaagagggcattaatacaattataattgaaagttatgatgaactggcatgtattataaaaggaaaacatgaaaagaataaaatggaccttcgtgaagattttatattttggggattatcaaacatcgaatatgaattaattccttctgctttaagaagaaataagttaaatcaacttgaaattaatgaattaattgaatctgatcacatatttaaagtttcaattgatgaaaatgatgccaaaatgtttaatttagaatattctgaatcaataaatgatggtgaagttataattggagtagataaatatgggaatctgattcatgatgtgaaatctgattataaagttttagaatgtgatttgcaaagagaaagagaaaattatcttctattaaaattttttaattgtgcagataaatctggtttgaaagttaaatcagaaggatttttaagagagttgattcataattattcttcaaaacgattagaagagtattggttggattttgatattttagaaactatatccttggctcaacattatggtttgccgactaaagctctagattggtcttatgattataaagtttcattatattttgctgtaaaagatgtaattgaatctaatttgtcttctgatggagtattgtgggccttaaattataaattaattgaaaaccataattttaatgaggaatattatgttaatttacatattcataggccggaatataatacaaatcctaatttaaatgctcaaaaaggattatttacttttttagaaagatatgttggagattatgacaaaccattaaacaaaataatttctgatgaattaaataaaactcttgaccaaatgccgtgggataatctttatgaatctaaaattaggacaattccggatgatatatctaaaaatgatacgattttctataaatttattattcctaaagaaattaaacaaaatattttaaatgaattatatttggagggttattctgaagaatatttatttcccggatataaaggagtttgtgaatcagtaattaatagagtaaagttaaatgagatattaaaaaataatgatgaacatattaaaaagagcatattattgtccgtggactggaatttaaatgaaattataaataaaaatcaactttatgtatttgtaaacttggattttaaagaagaaattgataaaatctttatttaccataataatgatgttgtaggttattttagaggaaatgaaataattaaagattcactaaatgtgttatgggaacagtttggggaacattcaggtttatctgaagataaatttgatgagtgttttaaaggtaatgatgaatcatttgcaattagaattaatgatttaaatatttttaagcattcaattaaattgtgtgactttgaattggagaatgatttttgttttgttgaggataatgaagatttaaaatttttattgaattttaattaa

SEQ ID NO: 7210 - DNA, 819 bp, Methanobrevibacter gottschalkii
  source 1..819: mol_type = genomic DNA
atgtcagataataaaaataataatattagttggacaagtttttgccaagctatgaattccatagcatactggctactccaaaataaaaagaagtataagaaacgtgaccattaccaaatattaacgttaaaaggtagttgtagcgatatagaaaagaaagcgaagaaattaggaaacgataaactagtatcaatgtatacaatggctttaatcaaagataatacatctttagatttccttccaaactatgtaacattaaagaacggagaacaaattgataaagccgaatatgtagatatggccataaggacagaagcatatatcagagcaaataaaagacttccggctattgtatatagaatgtcaacacttccagattacaaagattccacaatgaagctatttatcaatgtattcaacttcaaaggaaatacaatcgatgaagcattagctattatatcaaagatgaaattatatagtaaatacttcgattcacaaaaaacagacaagaaaacaatcaatgatgctagtctgggtaaaggttcaaattgtgtagactggggacaagtatattatcgtatagcgaaatcattaggatatgatgtacaatttgtccatgtcaaatgccgtgtaagtggaactggccatataaaattaagattaaaacataaaaaacatactggaggaaactggattaaccgtgatcctgctgcagttgcggataccacttcaggaaatgttaaatcaatctggtgtgaagatggttacctcatagcatatgatccttcctggatattcacagatttatatagcagttaa

SEQ ID NO: 7211 - DNA, 789 bp, Methanobrevibacter gottschalkii
  source 1..789: mol_type = genomic DNA
atgggagcatttgaagattatagaaaacgaataagaaaagagattcctgactctacagaatatttcaattatttttttaataatgattatgacaatgctattaaagttgttaaaagagatatggacaaatacaatcaaaaatatggcatcgtcccattggaattagaaagaagattggaagacgcaaaaatgatgaaatatagtaatatttattataaaaataacgaaaaagctgaagaattagaaaaagaaggaaaaattgatgaagcaattgaagttttagaatcaaatattcttattcatacggacacaccattcacatattaccatctatcctcaatatatcaagatagaaatgaaattgacaatagtatcagagtattgaagcatggaattaaaaactgtaggaagatacctaataaatctcatgttaatagtcttaaacgagatttagaaaaagcaaaaaaaattaaaaaggaaacaaaatctcaaagattgccttctgcaaatgaagaacataaacaacgtgataaagaagcggatgacttattaaaacaaggaaaacaagatgaagctattaaattatatgaaataaatctaaatgaaaggacaattagtaataattcctattctaaactgtttaaaatatactttgattcagagaaatatgatgatgcccaacgagtttgtgaacaagctattgaaatttataaaccaataaatgcggcaaaagtaagtcaatatcgacaatacctatcaaaagtttacaataaaaaagaagatttgtaa

SEQ ID NO: 7212 - DNA, 198 bp, Methanobrevibacter gottschalkii
  source 1..198: mol_type = genomic DNA
atggccaatataaataatacatcatcctacatggatgaagacaaaaagcaaattatcaaagagtccaactatacctttagagatgctcttgaagtttcatcttatctcattgaagtaggcaagttcgaaagattctataaagaaatgcaaatccacgatcttcaaaaggaacttgacgaaatggatgacggagaataa

SEQ ID NO: 7213 - DNA, 249 bp, Methanobrevibacter gottschalkii
  source 1..249: mol_type = genomic DNA
atgttacttgaaaaaaccaacatcagcgcaagagtggatattacactcaaaaagattgtcgaagattcaaccttcacccacaaggacgcatatgaactgggagcaaaactgatagctatgggaaatgctgaagagacaattgtactaataaacaccaatcctgattttgaaagaatcatgaaacaaactgaatacagtttaatcgaagcaaggaaactggaacttgaaagagagttaagagttttatag

SEQ ID NO: 7214 - DNA, 813 bp, Methanobrevibacter gottschalkii
  source 1..813: mol_type = genomic DNA
atgggtcgaggaaattcagatatcatatattttttagaacagcatgaacaggaaataataaactgctgcaagaagggaatgagcaacaatgaagtcattgaactattaaaaacaaaatatggtcgtgatgtagcagatattacttatagaaaattcaaggcgggtttaaatctaacaaagagtgatttcctggaaacattgttggatgagataatggtcatgaagacatctggtgcaacagatgcaaatgtcaggcgatggctggaagaggaacatgaaatcgaagtgagcagatccacattctcaagattcaaaaagaaatatcacataacagataaagaaaaagacccaagggcaagagataaagattcattaacaaatagggcaatcactcaaggccaaattatagacaatgaagttcacacagacaatatcgacttagctattgatacaatacttcagcaacaggttactgatatcaaaacgggtcttgacaatcttgacaagattaccaaaaatgctgtgggtattgaaattgactttgcaaagctcgaccaggaagtaagatacaatgccaacgaaaaaagtctggcaagatacctgattgatttaacagaattaaaaataagatacttggaattatcagttaaagcatttgaagctaaaaacaggctgttcaaggatgaaatggataggctatttaaaaatagagttcttgaactggaagacaaaaagattgaaatctcacaaaaagacatcatgaatgaaatagaaatccttgcaaaacaaattgatgataacaatgtacaatga

SEQ ID NO: 7215 - DNA, 1419 bp, Methanobrevibacter gottschalkii
  source 1..1419: mol_type = genomic DNA
atgataacaatgtacaatgagaacaacgaattctatttggatgctagggataaagttattcttcagaaatgtgtgtatgagaatccatatattccattctctccatttccaaagcaggccgaaatgattttagctagagaaaaggaagtcctgattggtggtgctgcaggagattccaaatcaacaagtcttttgatgagggcattgttctatgttcaggatgacatgaatgaataccatgccctcatcctgagacgtacattatctgacttgaagcgtaaaggagctttaattcacaaggcaagtcaatggttaaatcgaaaggaaattcaaaataatgcaagtatcaaaccgaagtgggatggaaccgaacactcatggacatttcccaatggaaattcattaactttcggatatttacgtaacattaatgaccttgatacatatcagggttccgaataccagttcataggaattgatgagctgacacagttggagaggtttaaatatatctatatgaggtcaagagttcgtaagaccaaagacaataagcttccaacacaactgatggcatcaagcaatccgggtaagcgtggaaacaaatgggtgcgtgaaagattcatagaaaaaatagacactgacattcaggataaatcacaaataagattcatttcatccagctacttggacaacatctatctagacagaaacgactatgaagaatatcttatgggattagatagagtaacaagagagcaattaatgaacggtaactggtatgcctcagtcaaaggccagttatttgatgaatcagacttccacataatctctcaagatgaatgcctgaaaataccaatcgttagagtcatcagatactgggatcttgcaactacagaagtattgaacgatgacaaattgagaggaagtgatccggattatactgctggtgttttattagctaaagatctaaacggtaatatctacatttgggattcatatgaatttcagcttgagtcaagaaacttgatcaatgaaatactgaacactgcagcacgtgacaagtcagatgtacagtatattgaactcgatggaagcacaggtaaaaacttcggattattaatcatagatgagcttaacagaagaggattcactacaggtactggtaactcaagagaaaataaagttgaccgtgcaagaagagtttcagcagatattcagaagaacggaatatttctggttgggaaggatagaacagggtttacgaaaaaatgggccatggaatttctggaaaaaattactgcttatccaaatgaagccattcatgatgactgtgtggtggcatttactggaggatatgaaaaaatagttgcagaaaaacaatcacaaagagttaatgtggataaatggtattccacatga

SEQ ID NO: 7216 - DNA, 267 bp, Methanobrevibacter gottschalkii
  source 1..267: mol_type = genomic DNA
atgactgataggagcgcagaaatcagcaaaatcaacgatgaaaaccaagaagaagatgaggaactcttcaattcactggatgaaataatttcccaaaacatagatgaaatagatggtgttgtgatttcctttccagagaaaattaactcaaaaaatggcatcgcccatactgcaagagccttcatgtggatttgtgatttggccttaaaatctatccttgatgagaaatactcccaacctgtttggattttaatgaacaacttatga

SEQ ID NO: 7217 - DNA, 1779 bp, Methanobrevibacter gottschalkii
  source 1..1779: mol_type = genomic DNA
atgaaaaatgctcctaaaaattggtctcttgctgagcctagtgaagattatggtaatgattatttcgtgaaagtttttgataaagatactgatgaagccacaaaaatctcatttataatccaactaaaaggtactgaagattataaaaaagatgaaaaacatgtgaaattctcaattcgcacggattatttgaaatattactacagtaaagttgacatgcccgtgtttttagttgttgtagatacaattaatgaagaatattgttggttatttgttcagaaatacattaatgaagagttaaatgttgaaaaaccaaattggcattcgcaagaaactgttacattatatattccaattgaaaatgatttttcaaatcccaaaattatagaacaaacagcagagaaaggttctcaatattgtaacattctagtaaatggaacacccacacaggaacttatatggaaagtgaaaaatattattgacaatcctttagagaaatctaaggatttaaaaaagcaatattcagagatatttaatgctgagacaaaagttggatttgaatttattcataaccaaaataatcctcaaaatgcaaaaaaacacttccgatcagtttatgataaaacaaaagatgataatgattatgtattagcccatttaaactcaattattggattaacaccgtttcttgattgtcaaaataaaattgaagcagaaaaattatttgaatacattaaagaaggagaaacattatctaaaaaaaataacattaaatatctagaacattatttttatggtctcagattagagaaactttgttttattttacaaagtcaacttcgagatttgttagtaacccaaaaaatatctaatctaggaaaaacaatattatcctttgttgttgaccccgaaactactgaaggtataaaagaaatttttgaaatactccataaattatatgcagatttttgtaaaaatttgattgaaacactggatgataaagacttgtttatatttttagagttattgagaatgctgattggaatgcaactacatcatatagaagctgtttttacatcaactgatgataatacaaaaaaagcattatttaaccaaatggatcaattactttctatttttagagatttaattaattttacatccgaatttgatatttttaggtatgatttattatcatttgaaaccacatacttgtatttgattggagataaacagtataatgaaactgttgatgaatatattaattttgcaaaagaaaataagtcacaatatcacctcaaaagagcagaatcattaaaagaaaaattatccaaaccattgaataggcaaaaagacattagtgaaatgtcggatgaagaaattcatgatttatttaaaacattgatattaattattgaaaaaatcgatattgatgttgatgagactgatgaagcaatggttttaagatgtgcagttagagatcttaatccaaaaagagtactggacaattgcaaacaccttgagctacattatggtcatggtggacaatatgctaaatttttcggattggcttctgatggactcaaaacaatttattgtgaacatggaggaattattacaaataggaatttagataatacttatgaagaattttataataaatattgtaaagaatgtgaacataaaattaaacaggactttaaatggaatcctgacaaattatcttatgtaaaatcaaagaaatttaaagaaatattagataaaaatccattcatttaa

SEQ ID NO: 7218 - DNA, 348 bp, Methanobrevibacter gottschalkii
  source 1..348: mol_type = genomic DNA
atgacaaatattgaaattaatgcagaaaccaaaaataaactagaagcaatcgggaaaatattatctccatacctagatatcggttatgatgattttgatgaaattattggtattttaataaataatttcaataatcataaattaaaagcagagtatgatgagaaagaaaatataattaaaattggatatgaaaattcaaaaatatattcaatccctattttgatattcgagcttaaaaaaggttgctatgaaaaaattggtatttggatgcaaaaaaataactttattccagaaatcaacaccgatgttacggaatatatcaaaaaatgtgaggatacatttttataa

SEQ ID NO: 7219 - DNA, 657 bp, Methanobrevibacter gottschalkii
  source 1..657: mol_type = genomic DNA
atgaaaggatatgttggacctgaatttaaaaaagacgcatttaattgcccatactgcgaagtttatgctcatcaaaagtggagatatcgtttaatgatatttaattctaacggtgagcatcctgcagatcccatatatgaccaattaggagtcaggggttggtccacatcaaaatgcgaccattgcggcgaaatctcattttggcatgatgaacaattaatttatccaaaatcatcaatcgcaccattacctaatgatgatatgcctaatgatgttaaagaagattatattgaagcaagaaatattgtcaatgattcaccaagaggggcttgtgcacttttaagattagcattacagaaattaatgcctcacttaggagagtcgggaaaaaatttaaatgaagatattggaaatttagttaaaaaaggaatttccagtgaagttcaaaaagcattcgattcagttagagtcattggaaacaatgctgttcatcctggagaattagacttgaaagatgatgttcaaacagcaatttcattatttcgtttaatcaattacattgttgacaatcaaattagctcaaaaaaagaaattgatggaatatttgaaggtcttcctcaaataaatattgaagcaattaaaagaagagataaataa

SEQ ID NO: 7220 - DNA, 987 bp, Methanobrevibacter gottschalkii
  source 1..987: mol_type = genomic DNA
atggaatataaattaaaaaaatattttatacatgatgttttaactccttggatgcatttagaagatatctatcttaacgaaaatcatcctgctcatgaagatttaaaatatgatttagatgctataaaagaacaagaagttctaacatattacaaaaaacatgaagaacgaataaattttttgaatcggaaaataaaaaacaaaataatctattcaaaaatattactatttggagaattgcttgctaactcaatatttgaagatagattagaggcattgttaaaaaatgagccctatgatagaaaagagtttgaaaacttttatgataaagaaaatttaattaaagtggataaattttcaaaagtttatgattcgataattattaacggaaatagatatggattatgtttacctattaatgcttttaattcatcttattggatttcacaagaactgaataaacttaatttagatgatgttgatttaaaaattcgtgtcgatccctttttaaaaaatttttcattaatttgtcaaaaaagtactgtattttcaaagccattgaactggaataaaattcgagatttaaaaactgttgataaaggccaatttagaaattataaaactggggaattaactgaatatatgtggaaacctagaaaaaataatagagtagtatttacttgtgaagaattaccttcagaagatttaataaatttaagagggagtcgatatttccatgcaatttttgaaaaagatagtgggagatttatacattgcgatggatcaataaaaatttataataaaaattcatttaaaaaaagatgcaaatacacaattaataacaacgaaataaatgatattggaaaagaagtgaaaatctttcgtgtagataaaaatataccaaaagaaatgttcatgtcactaataaacagttatttttattggaattatgatttaatagattattttctgaaaaaaactatttaa

SEQ ID NO: 7221 - DNA, 417 bp, Methanobrevibacter gottschalkii
  source 1..417: mol_type = genomic DNA
atgtttagatgtggctgttatccaaatcatgaaatctgcaaaaacaaaaacacatgcgaattttggataccattaaatcaaaaactcaaacaattaaatcaacagatatcttatgagttgaaaatattagaaagtctaaatcaaagaaaaagagactacttcagaattctatctgaaattcaacagggaagatatactgaaatagtagctattgacggaagattaaaaagagtaccaaaaaagaatgcaagaggcgaatctatattaaaaccagatgatgtacaggtcggattgaattttaatgttatatctaaagagataactgacacagaaacaataattcatgaattaagaattagagaaaagaatatattaaaaatattaaaaaaacaatattggacaatagcttgtaaataa

SEQ ID NO: 7222 - DNA, 639 bp, Methanobrevibacter gottschalkii
  source 1..639: mol_type = genomic DNA
atggactctcccaaagattgtctgtttcatcatttgaagtatcttgcggactttgtggtgaatgaaattaacgaggatatagaattgttgagactgccttggcaggaactaagcaatcaactgattaaaagagcatatgcccaatgtgaacgtgaatgtcctgattggctgttgacatttgccgaatcagtaacccctgaagatctggacgatgaagaaatagaatatctgagaatgtttttcattgacgagattaacaagcacaacaaaagcattaaggtctattcggcagaagacggatatccgataaaatatcacgactatttcacagattctgttaaagactcaaatgacttctatgaacgtgtctttaacattatcaatgagcgcctagttccttatatggtgctgcatcatggccgtgatggtcttgactatgtctgctttacaagcggacttaaaaaggcattgaagaatgctaatgaagtgtgctatgatgtgaagggaattgctgaattgttaggttgggaatacaaatccgttaaaatacctaaatctacaaaagttatggttgttaggtttgataagtttttaacattcctatatcccaacttaagtgaaaaggaggtcaataaataa

SEQ ID NO: 7223 - DNA, 681 bp, Methanobrevibacter gottschalkii
  source 1..681: mol_type = genomic DNA
atgagtgaaggaagttcagccatacaaatcaaaaaagctatcggtaatgtctataaaccagattatgagtttacatactttaaaaacataatcagtgctttctatttgcagggtaccgacccagaagttgtagaaaaaattcttactgaattatacaaccaacttccttctcatgagaaaacattagatgaaatcatcaaactcttcgaagacatttatttgggtgatgaaaatccaaacagtgggataaaaggcattgaaagattcatttcagataaatatgataaaaagaccagcattttggtagggcgtgaattgaatagggcaatcataccatatgataccaataagatttacaaactccaaactggctccaacaaatatatcgttatggactacaggaacaatgaagtcactacacagacaatcgaatggaaaaaaggaaatgaagtggccgattacaccagagtactgttctgctatcccatgcggattacaatacatgacaatccgataagtgaagccggaataaccttcagcatcgaatggagaacaacagatggagggcatttccataccaaagatatgaacatcgttgaaattgaacattatctcattgaacacggttatgtcctatcacgttaccaatccaaagatgttgttcccggcttgattcaatag

SEQ ID NO: 7224 - DNA, 501 bp, Methanobrevibacter gottschalkii
  source 1..501: mol_type = genomic DNA
atgagctttgaaaacagcaaacaaacaatatttacaggtacacaattggattatgaagaaattgtagaaattccggaaggatatgaaaaagcagaattaaaagactttgaagatggaaccctaataagaggcagaccagaaatggcttcagtttcatcatttacctttgacgatgatggcgaagaaaaaacagtgaacagattcaaattatacatctttcaggatgcagacaaaatatatgttgaaatcaatgttaatcttaaaaatgatggagatatccacaaaaacgtcaggaaaggaagcgtattatttgattttttaaccagtattcttgaattggaaaatgcaggttcagttggcaaatccaatattctaagaaatgttgatctttccgaatatcgtgaattcgtaaacagattaagtgaaatgacaattcaagtcaaagaaagatcaggaacatacacattctacagtttcattgtgagggacgttcaggtatag

SEQ ID NO: 7225 - DNA, 549 bp, Methanobrevibacter gottschalkii
  source 1..549: mol_type = genomic DNA
atggtaaaagccgaattaatagaaaatccacaggaaacagaaatagtcaaagtcgataccgtccctgatgttgatgttgcaattgagcaatgggacgcatatcagagactatgcaaaggattattgaatgacaatgactatcaggaaataattgttaaggaaaaagatgaaaacggaaactacgttaaagtgaaaagacacttcaagaaaaagtcagcatggcagaaactctcccgtgcattcaatgtcgataccgaaatagtggaccgtgacattgaaagaacaaaaatgggaagagtcagagaagcatattactgcgttagagcatcacttccaaatggccgcagcgttgaatcagatgcattatgctcaaggtccgagaaaggaaaggacaaagtttcagaccataccataatgtcaactgcaaagacacgtgctacaaaccgtgcaatagctgaactcattggagcaggagaagtgtcagcagaagaaatgtcagctgaaaagattgcaggacaatcaaaatttctaaaagaggacaatagctag

SEQ ID NO: 7226 - DNA, 300 bp, Methanobrevibacter gottschalkii
  source 1..300: mol_type = genomic DNA
atggacagctatttgccagattgcggaatcgaacataatcagttcgaagacaactaccacggcatccttacccacagcggtgagatcaaagttgccaaaggtgatgttgaacaggaaatcctctacattgacgatgacggtatcgtattggtggacggcggcaaaaaggcataccagacactaatccataccaagctattggcactgattcaatatgcaaaagcgggagatatcggactcatcaagttcataagaggagaggctttcattgtcggattcaggaaaaaaaggagtgactga

SEQ ID NO: 7227 - DNA, 105 bp, Methanobrevibacter gottschalkii
  source 1..105: mol_type = genomic DNA
atgttagaacaagaagtaaacgggaaaacacatgtcttagtcccaaaagatatatgggacgatataatggcaatgttcaatgaacatttgaataaaggtgaatag

SEQ ID NO: 7228 - DNA, 159 bp, Methanobrevibacter gottschalkii
  source 1..159: mol_type = genomic DNA
atgtgtgaagtaataaaacctaggatgaatgaaataataattttcaataacttcagggcacttgaagaagtcattgcagaaattcaggaaactgaaaacatacgcaatgaaagggaattcttccagtcatacaaaatcaagataatgaaacttgattaa

SEQ ID NO: 7229 - DNA, 1038 bp, Methanobrevibacter gottschalkii
  source 1..1038: mol_type = genomic DNA
atgaagaagtattgtgaattcaatggtatgagccttcaggaactgcttgatgaagcggaaaaagaagaagcagacaatgtcaaatggaaacaccgccgtgttaaaacaaaattgcttaaatacagacaattccttttagacaactattctataaacacagtcagaatacatatgtctgccgtctcaaaattttacagattttatgacatcgaaatcaatcctctaccaagattgaacatgaaagctgtgaaaaaaccaacatcaatctattataaagatttgcctgataaggaaattataagggaagctttagcaatttccccacccgttatgaaagctataatattgttttcttgctcaagcggttgtgccagagctgaaacattgagtctgacaattcaggactatatcgatgccttatcagaatatctgccgaacaaaagaatggacatctatcagataatcgattatttgaatgacaatgacaatgtgatacctacctttaacctcaggagaattaaaacaaacaagtattacactacttactgcagtcctgaagctgttaaagccatcaatgcatatattctgacaaggactgacaatgtaactcccgaaagtcaattattcaaaatgtatgaatcttatttcattggatatttccaaagaatcaatgatgaacttggccttggtagagtaggacattacagcagattcagaagccatatgcttaggaaattccatgcttcagcattgtacaatgacggcatgagtttggataacgtgaatgatttgcagggaaaggccaaaaacaagaccgaccaggcttacttcatgatcaatcctgacgatttgaaatatgaatatatcaagcatctgcctgccattacaataaatactgatgttgaaaaactgtccatcaaatctccggaatatatgcagatggaaaaggaaaataatgaatataaacaaaaagttgaaagaatggaagctaatatagctaacatcatggaacgtctgggccaggaggaagcaaaatag

SEQ ID NO: 7230 - DNA, 558 bp, Methanobrevibacter gottschalkii
  source 1..558: mol_type = genomic DNA
atgattagtgataaagcaggacaatacttagttaaattagctggaaatgcgatcagacaatatttagaaactggtgaaaaaattaaaaaaagtgaagactacccaattgaattggatgaaaaattaggtgtctttgtaacattgaacaaaaacagtaatctgagaggttgtatcggatatgccgaaccaattatgagtgcaattgaagctacaatagatgtggctattgcagctgcagttaacgatccacgatttccccaagttagtttagatgaattagaaacacttgatttggaagtaaccgtgcttacaaaacctgaattaattccagtagcacattataaccagtactttgatgaaattgaaattggcagagatggtttaatcattcagaaaggttattcaagaggtttattgttacctcaagtagcaactgaaaatcgatttagtgtagaagactttttagaacacacctgcatgaaagcaggaattagtactgatagctggatggatgaaagctgtgatgtctataaattccagggacaaatatttaaatag

SEQ ID NO: 7231 - DNA, 1395 bp, Methanobrevibacter gottschalkii
  source 1..1395: mol_type = genomic DNA
atgattaatcttttgagtgataaaatggaagaatatattgatttattcgaaaaagttattgcaaaaacaagctcacaaattgactacattgacatcagagcaggaattggagacaacacttcaatattaatgaaagatggaaatgtagatgaaattaacaccggaatgagcttagcagcaagagtaagagtgttaaacaatggagcatggggttttgcatacacaacagatttatctaaaataaatgaaataacagatacagctatcagattttcaaactcattaaaaggagacgtcgaactaagtgaaacagacattattaaagataaaatatcagttgacgttaaaattccatttagtgatatttctattgaagaaaaaaaagacattatgaagcaagcaaatgacgctgcaattatcgataaagtcaacagcaccactgtaagttatggagacagtgaagtcaatgaattgttcatgagcagtgaaggtagtgaaatccaagtaaaaacaagtagagtaagaatggctttaaatgcatctgcaacaaatggtgaaataatccaatttggacatggtagtctcggaggagttaaaggatttgaagcaatatctgataaagacctggaagaatttggaagaactattggtcagaaagctgttagattactcgatgcaaaacctgcaccttctggaaactttccagtaatagcagatcctgaattaactggtgttttagtccatgaagcattaggacatgcagttgaaggggatttaatcttacaaaatgattctatccttaaagataaaatgggttgtcaaattgcatcagacattgtcaatatttttgatgatgcaagtctgaaagaaggatttggatattatccatatgatgttgaaggagtgaagacttcaccaaatcaattagttaaagatggaaaattggtttcacttttaaattcaagagaaacatcatctaaattaaatatgaaatcttcaggaaatgcaagatcattaattgcagaccagccaattgtaagaatgagcaatacatatctacagcctagagacaatagctttgaagaattgctggaagacattcaagacggaatttatcttaaaggttcaagaggaggtcaagtggataccggtaaaggcatcttccaatttaatgctgctgaaggttatttaattaaagatggtgaaattacaacacctttaagagatgtttcactatccggcaacatattagaaacattgaaaaacatagatgctgtcggaaatgactttaaattaagtgttggattctgtggaaaagatggtcagactgcacctgtaggtgatggtggaccccatacaagaattttaaatgcacttgttggaggaatgggataa

SEQ ID NO: 7232 - DNA, 1206 bp, Methanobrevibacter gottschalkii
  source 1..1206: mol_type = genomic DNA
atgattgttattgtaggaactggtgctggtggaggaatattggcccgtgaaattgcaaaagaaggtattgatgtaacaattttggaaaaaggaccatacatacattcaaaagatgcatttaattattatgatacgtattctggtgatgttgatttactcacaactacttgcattggcggttcaacaattgtatccatgtcgaacatggtaagggcacttgatgatgaattattggattatgatattgatttatctgatgcctatgaatatgttgaagatttgattaatgtacatcctattgatgattctcatattggaaaaggcactaaggcatttttagatgcaggtaatgaacttggccttcaaacaatgaaaatgccaaaagcaattagggaagaagaatgtattcaatgtggaaaatgcgcattcggttgtcctgttgatgctaaattttctggaaaagatttcatcgatgaagcagttgaatatggtgcagcactgatttgtgaagctgatgttcgtgaagtaacaagtaatgatggtgttgtatatggtgtaaaatatattaaagatggtaaagaagaaatcataaaggctgataaggttgtattgtctgctggtgcaattggttcaactttaattttaagaaaatccggaatttccaaagcgggccgtgaaatattctttgatccatttgtaagtgttggaggatacttaaaagatgttaacttcaatagtgaagtacaaatggcaggtcttataataggtaaaaattttgttctggcacctcattattcctcatttattccgggaaacattgatgatgattcagtaactgaaaatgatatccttagtataatggtaaaaacctctgatgaatgtaaaggctatgtaaccgacgatggtgatgttgttaaaatcaataccattcaggatataagatatctggctgaaggaactgcaactgcaggttttgttctagaacgtgctggtgttgatccaaacactattggttcaacggtgtataggggagcacatcctgggggaactgcaaaaattggtgaaatagtaaacagtaatttggaaacagaaattgacaatttatttgtctgtgatgcaagtgtattgccaatatctcccggtaaacctccaatattaacaatacttgcattatctaaaagattagcggactatttaaagaattag

SEQ ID NO: 7233 - DNA, 477 bp, Methanobrevibacter gottschalkii
  source 1..477: mol_type = genomic DNA
atggctaacaacaaatccgaattaaaaatcaaagctattgagaatggtactgttatcgaccatattacagccaataaaacattgcacatccttaaaatattaggtcttccggacaatgaaacaaaaaatatcactgtagctatgaatgtgtcttccaaagaacttggtagaaaagacattctaaaaattgaaaatagggaattgggccatgaagaacttaatcaagttgctttaattgccccggaagctacaattaatattattagggattttaaacctattaaaaaaaataagattgtactgcccaaaaagattacatcaatcattaagtgtacaaatccaaaatgcattactaactatgaaaatgaaccaataaccacaatttttaatgttgttactgaaaatcctcctgtagtcagatgtcactattgtgaaaaattaataaaaacagaagatatttataaacaatttgaataa

SEQ ID NO: 7234 - DNA, 495 bp, Methanobrevibacter gottschalkii
  source 1..495: mol_type = genomic DNA
atggctacactaataatttattattcgcaaagtgggaaaactgaattagtagctcatactttagcaaaaaatctaagagcaaatgtattaagaattcaagatttgaaaaatcgaaatggatttaaaaataaattcattgcatcaattagtgcatttagggaaagtaaaacagatattactcctgcaagagttgatttaaccgattatgatacaatcatctttggaacacctacatgggcaggaaatccaactcctgcaattttaacaataatagacaggtgtaatttaactggaaaagatgttattttatttgctactatggacggcagtcgtggagatacaaatatcgaaagacttgaagaaaaagtaaaaatgcgtggagcaagagtaattgaaagtttcaccattgcaactaaagataaagattctgaaaaattaattacagacactgaagcagttattgaaatgaaagatttaaaaatgtatacaaggtag

SEQ ID NO: 7235 - DNA, 1023 bp, Methanobrevibacter gottschalkii
  source 1..1023: mol_type = genomic DNA
atgaaaaatgtagcaatcgtaggagcaagcggatataccggaggagagcttttaagaatgcttagtgtgcatccggaagttgaagtgactgagattacatcaagaaaattggacggacagccggttcataaaacccatccccatatcagagatacaggattagtatttaaagacaagaaaccatctgatatagatgctgatgtaatctttactgcaactccccatggcgcatcaatgaaaattgttccagaacttttagaaactggcgctaaagtagttgatttaagtggagattacagatatcgcaatactgaagtttatgaaaaatggtacggaatgaaacatactgataaaaaaaataaaggtgcttttggacttcctgaattatacagagatgaaattgaaaaagctaatttggtatcaaatccaggatgcttcccaaccggtgcaattttatcatcatatcctcttgttaaaaatgatttggttgaaaaaattgtcattgattcaaaatctggagttagtggagctggtgtaaccccttccggaactacacattatccgaatattgcagacaatgtaaatccatataaaatttctgcacataggcacacatcagagattcagcaagaattacatggatttgatgatgttaaagtttcatttacccctcatttagtaccagtcaatagaggaattcaaactacaagtcacagtttcttaaaagaagaacatctggacattactcctgatgaaatcagatcattatatgaagaagaatacggagacgagtactttattaaacttatggatgaaggtgaaattccgcatttaagttcagttagaggatctaactttgtacatatcggagggtttgagattgatgaaactggtagaatcgtaatgttatcctgtattgataaccttgtgaaaggcgcatcaggtcaagctattcaaaatatgaatattgttcttggccttaaagaacaattagggttacaacatttaggtatttatccttga

SEQ ID NO: 7236 - DNA, 453 bp, Methanobrevibacter gottschalkii
  source 1..453: mol_type = genomic DNA
atgaaagtaatggcgaccggaacattcgatatactccatccaggacatgtattattcctcaaaaaggctaaggaattaggtggagaagatgctgttcttgcagttgtaatagctagagattcaactgttgaaaaaagaaaaagaacaccaataataccccaagaacaaagacttgagatgattaaaagtcttaaacctgttgatgaagcctatcttggacatgctggagacatgtttaaaatcgttgaagaaattaaacctgacattatcgcaataggttccgatcaagaccacaatgttgataaattacaagaatccctagacaaaagaggaattaatgctaaagctatgcgtgttgaggattatatgtttggagaacttgacagcacttgtaaaattattaaaagaatcaaacacacagattttaaagataaaactggagaattatactaa

SEQ ID NO: 7237 - DNA, 738 bp, Methanobrevibacter gottschalkii
  source 1..738: mol_type = genomic DNA
atgtcatttaaaaaagatgaaatgttaatcatgcctgcagttgacattaaaaatggaaaatgtgtacaacttgttcaaggcgaacctggaagtgaaatggtagaattagaaaatcctgaacttgttgcaaaacattgggaagatttaggagcccgtaatattcatgttattgacttagatggaacaattaatggtattgctagtttggacactattgaaaaaatcctaaatgaaatcagcattccaattcagcttggtggtggaattagaagcttggactatgctcgtcagttattaaaccttgatattgaaagattaataattggaacaatgggcattcaacacccagaaactattactgaattatctgatgagtatggatcagatagaataatgatttcacttgacagtaaagacaataaggtagttattaaaggatggcgggaaaaaattgataaaagtccggttgaactttcatctgaatttaaagaatatggagctggaagtatcttatttacaaatgttgatgttgaaggacttttaggcggattttacacagatcctgtagttgagcttaaagaatctgttgatattcctattgtttattcaggaggaattacaacaatagatgatattaaaaaattaaatgaaagcggtgtggacggcatagtaattggttctgcactttataaagataaaattgatttaactgaagctttaaaatatcaaaagaggtaa

SEQ ID NO: 7238 - DNA, 951 bp, Methanobrevibacter gottschalkii
  source 1..951: mol_type = genomic DNA
atgaatgagaaactctatgaattatttgatgttgtgttaaaatctgaattttcaataaaagagtatgatgataaaacgattattgagttgggtgaaaactcaaaatatggaaaaatggaaacttattcgttatttccgggtattattcttgcttatattgatgtgaatattgaaaacgtggaagatgttttcattgaagaaaaaatggagtctagattgcttgaaattaatcattgtgctaggggcagatatgcatatgctgtcggtgatgataaaataatttactttggacgtggagatttatgtgttagcatttatgatttaacgaaatcattatcggagtttccattaggttattatgaaggattggagattttcattgatgtggatatggctgatgaatacattaaagattatgttcctgattttgatttgattgaattttatgaaacattggagaaaaataatgggtttgtattgctgagagctaatgaaaaaattgatcatgtaattggtgagctgtatgatgttgatgagagaattaaacaatcttattataagttaaaatgtttggaattgttattatttttttcaattactaattttactaaaacagaatcgttttctctttctaaaaaacaggttaaaattattgaaagtgtgaaaaacgatttgactgagaatctggaaactaaaataaccattgatcagcttgcaaataaatatggcatgagtaaaaccactttaaaaaattgttttaaggaaatttatggaaaacctatatttaaatggagaaaggagtatagattggattatgcttgtcatctgattgaggaaggccattattctattagtgaaatttcaaaaattgttggttattcttctcattctaaatttagtcaggcttttagggagtatgttggctgtgcaccttcaaaatataaaaattaa

SEQ ID NO: 7239 - DNA, 1791 bp, Methanobrevibacter gottschalkii
  source 1..1791: mol_type = genomic DNA
atgtcaaataatcaaaataagaataaattcatacgattgcttaattattcgggaaattataaatatttaactattttaggtatgattttttcaggtttaagtgcaatttctcttttagtcccattcatatacatatggaatgtggtaaatgcacttttagttgtagctccagactttgctaaagcacagaatttggaaagttatgcggttggtgcgtttttctatgcatttttagggattgccttaaacttttgcggtttaatgtgcactcacttatctgcatttaaaaatgagaaaaacatgaaagatgctactatcaatcatctgttaaatttgcctttaggttatttctcaaaccacactagtggcggcttaagaaaagtaattgattttagtactgcaaaaactgaaggatttttagctcataatttatttgatctggtaggagcaatagtcacaccaattgtatttttaatattgttattcagttttgatttgttgcttggattaatatgtattattccaattatactatgtttcttattcatgtatccaatgttttctaaagattcacaaaacattatggcccagtatcaaagttacttggaaaaaatgaattctgaagcggttgaatatgtaaggggaattccagttacaaaagcattccaacaaactgtatattcatttagaaacttcattgatgcaattaaaaattacggaaaattcgctgcagattattctctatcaacacaacttccaatgactgcatttacagtatccatcaatggattttttgctttattaattcctgcaggcatattaattgcaggaactcttgttgatgttaaatttttagctaattttattttctatgtgattttcacaccgatatgtgctgtgatgatgaataagataatgacaatttcacaagattggatgcttgcaagttatgcattggatggtattgaagctattttaaatgaaaaaccattagcagaaccggcaaacccgcagaaacctaaaaatcattcaattaaatttgaaggagtatttttcgactatgaagaatcaaactctgaagaacatatattaaatgatattaatcttaaaataaacgaaaatgattctgttgcgttagttgggccatcaggtggaggaaaaacaactattgcatcattaattccaagattttgggatgtggatgaaggttcaattaaaattggtgaagttgatgtgagagatatatcaacaaaagacttaatggagaatatttcttttgtatttcagaatactaggttatttaaagattcaatttataataatgtagctattggcaaaaaaggcgcttcaagagaagaaattctaaatgcattaagtcttgctcaatgtgatgatattattgatgagttgccggatggaattgatacagtaattggaacagagggaacttatctttcaggaggtcaacaacaaagaatcgctcttgcaagggcaattttaaaagatgctccaattattattttagatgaagcaactgcattggcggatcccgaaaatgaatacatgattcaaaaagctatttcggaaattaccaaagataaaacggttataatgattgctcataggttatctacagttaaaaatgtggataagatttatgtggttgaaaacggaagagttgtggaagaaggtaatcacagtactttagttgaaaatgaaggtctttattctaaaatgtgggatgaattcaacagatctattcaatggaaagttaaaagtgaggtgatataa

SEQ ID NO: 7240 - DNA, 1746 bp, Methanobrevibacter gottschalkii
  source 1..1746: mol_type = genomic DNA
atgttatctgaattgtttattgaaagatttggattaacaaaagagggttctgataatttaattaaaggaattatttacactgcacttcaaaatatttcattcatgtttccagttggattatatgctgcactgttatatatctggattaatcctttaatgggtggggaaataatcagtcctgatttaggaatatttattttaggcattttgattatacttggaattatatttgcattttcatggaaacagtatcattttgtatataatacaacttatgttgaaagtacaaacagacgaataaatttaggtgaaaatttaagaaaattgcctctttcattttttgaaagaagggatttagctgatttaactgcaacaattatgaacgattgcactgatttggaacatgtgttctcacatgcaattcctcaattgcttggttcaatattatcattaattttagtgtccattggtcttctgatctttgactggagattagccgtagcacttttatgggtagttccagtatcatttataatactgtatatttcaaaaagaatgatttacagaggtagtaaaattgtaacaaatgatttgcttgaatgcggagattcaatgcaggaatgtatagattcaattcgtgatttaaaatcatataattatgaaaatgagtatttatctaaattaaatgatattaccagcaaaatagaaaaatcaagaattaaatcagaattaatgctttcaagtggagttattactggaaaagtaattttaaatcttggaatagtttctgtcatattattaggttcaaatctaatcatgaatggtcaggtaacaatttatacttttttaatattcctgatagcttctgcaactatttatgctccagttgaaaatggattaatgtttttgtctgaaatattgatgatggatattaaaattgaaagagcaaaggaaatagaaatgcttgttacagaagagggtcttaaagattattctcttgatggttatgatttggaatttagaaatgttaaatttaactatgataatttaaaagatgttttatctgatattgattttattgcaaaacaaggtgaagtgactgcacttgtcggaccttcaggaggaggtaaatcaacggtttcaaaactcgcagcaagattttgggatccggtttctggtgaagtttcaattggagggcaaaatctggcagaattggattcagaaaaactccttgaaaacttttcgattgtatttcaggatgtaattttatttaataatacaatcatggagaatattcgtgttggaaaaaaagatgcaagtgatgatgaagtgattaatgcagcaaaacttgcagaatgtgaggaattcgttcaaaaacttccgaatggatataatactattatcggtgaaaatggtgagttattatccggaggtcagagacaaagaatttctattgcaagagctttacttaaaaatgccaatattgtccttttagatgaagcaacttcatttttggatgttgaaaatgaatctaaaattcaaaaggctatttcaacattaattaaaaataaaacggtcattatcattgcacataggatgcgtacaatcgcaaatgcagataaaatcgttgtcttggatgatggtaggattgttgagcaaggttcaccagatgaattgcttgctcaaaatggattatttaaacatatggttgaattacaaaaattaagcggtaaatgggagatataa

SEQ ID NO: 7241 - DNA, 582 bp, Methanobrevibacter gottschalkii
  source 1..582: mol_type = genomic DNA
atgagtgaaatattaaatgtgaaagatttgattactgttggtattttttcagtgattatggtggtattgatattcctgtttggaatgttgggatatattccaatattgatgttggctcttccgattattgctgcattaatatgtggagttccatatatgctgtttttaacaagagtaacaaaatttggaatggtgacattgctgggtttagttttaggaattgtaatgtttttaagtggtcacacatgggtgcctattgtaatatttacgttatttgcatttgttgcagattgcatattaaaaatgggcgattattcatctgttaaaaattcaattattagttatagttgttttatagtaggtattatgggtaatatgctaccattttttgttttaagggattatttcattggatctatacgtaattcaatgggtaatgattatgtgaatgtgattgcaccatttttaaattatgaagtttttataattctagttattttaacatttatttttggtttaataagtgcatatcttggtaaaatagtattgaaaaaacactttgaaagagcgggaatagcttag

SEQ ID NO: 7242 - DNA, 723 bp, Methanobrevibacter gottschalkii
  source 1..723: mol_type = genomic DNA
gtggaattaaaactaaataataatcctggtttaaatgtggatcctagaacaaaaatcattcttctgattattataagtttcatggtttttaatgaggcaccgttatatgttagcggtattctagttttaattccatttttctgtttatttttttcagattataaaaaagtagccttaatttatattgcagtatattcaatggccatttatgttcaaatttatttgattccgacatctacaggtatcttatctataatcttgataacttttagttatacctcatctaggatgttgcctattttcatgatggggtattatacaatatcttcaacaaaagttagtgaatttataacttcaatggagaatattaatgttccaaaagagattattattcctctttctgtagttttcagatatgtgccatcagtttatgatgaaatcaaatcaataactaatgcaatgaaaatgagaggttttggtttaacagttaaatctttaaaatctcctttgaaaatgattgaattttatatgattcctattttaataagtgctgttaaaacaagtgatgaattatcagcagcgtctcttacaagagggcttagtaatcctagaaaaagaacgcatttacttgaagttaaattttctaaaatagattattttttaattatgattgcggttatcgggtttataatttttgcatattattttataggaggtcattaa

SEQ ID NO: 7243 - DNA, 1434 bp, Methanobrevibacter gottschalkii
  source 1..1434: mol_type = genomic DNA
ttgataaatattaataatgtttcattttcatataatgatgatattaatttggaaaatattaatttaaacattaaaaaaggtgaagttattttactttgtggcgaatctggctgcggaaaaacaacactgactcgttttttaaatggacttattccaaatttttttgatggaaatagaaagggttcagtatatatgaatggcaatctgattgatgagatgaagatatatgaaatatcggaatatataggatcggttttccaaaatcctaaaacacaatttttcaatgtggatacaacttctgaactggtttttggatgtgaaaatttagctattgataaagatgaaattgaaagaagattggaaatggttgtcaatgattttgatttggaacatttattaaataagaatattttcgaattgtccggtggtgaaaaacaaaaaatagcatgtgcatctgtttctgcggtttttccggatatattggttttggatgaaccatcttccaatttggattctcaatcaacttggtatctgggagaaataattaaaaaatggaaatcacaaggaaagacggttattatcgctgaacataaattattctttttagaaaatgttgttgataaagtaattttcataaaaaacggtagaattactaatatttggccaatttcagaatttaaaaatatttctcataaagattggggtttacggcaattgaatttagggaatttaactgcaaaatgtggtgaatattattccaatgctcaagaatttttagaatttaaaaattttaaatttaaatataaaaaaatccctgtgttggatatgggtaattttaaagtacctaaaaatgagataattgctattattggaaagaatggtgctggaaaatctacctttgcgaattgtttgtgcggtcttaaaagatcattcaacggtgaacttatttttaataataattctctaaaaagaaaagatagattgaaaaagagttatatggttatgcaggatgttaatcatcaattattcactgaaagtgttcttgatgaagtattgttgagtatggatgaagaagatattgattttgctgaatctattttgactaatttgaatttaattcatctaaaggatgctcatccaatggttttatctggcggtgagaaacaaagagttgctattgcttctgctattgcttctaaaaaggaaatattgattttcgatgaaccgacaagtggacttgacttaaataatatgatgaaagtaagtgaaaatttaaaatatcttcaaagcttagggatgacttcttttattataacccatgattttgagctaataatggaagcatgttcccatatcattcatctggaggatggaaaattaattggaaattataagattaacggagaaaaattaagtgagttttttttaaattaa

SEQ ID NO: 7244 - DNA, 705 bp, Methanobrevibacter gottschalkii
  source 1..705: mol_type = genomic DNA
atgagtacaattattgaatttaaaaatgtgtgtaaagaatataaatctggagatcacattttaaaagctatggataatgttaattttacaattggtgaaggggagtttgttgtaattcttgggccgtcaggtgcaggtaaatccacactattaaaccttttaggaggtcttgatagtgttacttcaggtcagattattgttaatgataatcatgttgaatcattcactgacaatcaattaactgaatacagggctaaaaatgttggttttatctttcaattttataatttgattccaaatttgactgctttggaaaatgtggaattaatgaaagatattgtggatgtaaaaatcaatggattggatgttttaaattcagttggcctagaagatcatgctaatcagtttcctgcacaattatccggtggggaacagcagagagtatctattgcaagagctgttgctaaacagcctacaatgcttttatgtgatgagcctactggtgcacttgactcaaaaactggtgttttgatcttaaatttacttcaggacatgagcaataacaagaatactactgtggttattgtaactcacaatgctattttggcggatgctgctgataaagtaattaggattaaaaacggtcaaatagaaagtattgctataaatgaaaatccgaataaggttactgatttggaatggtga

SEQ ID NO: 7245 - DNA, 2271 bp, Methanobrevibacter gottschalkii
  source 1..2271: mol_type = genomic DNA
atgcttgcaaagaagatgttaagagacatcaaaaagcataaaactcaatttttatctatttttttaatggcatttttaggagtatttgtgtttgctggtgttggcggggaatcagtcgggcttgaagtaaatgtaaataattactataatgatactaatttagctgatggttggatttattcacctaatttggatatgaattttattgatgatgtgaataatttaactccaacgactcaaagtgagagacaactggttttagattcgattgcggatttttcaaataatcctgagattaaactgcattttatcgagaacaatactatatctaaattttatttgatggatggtgaaccattgaatatcagtgatgaagatggggtgtggcttgataaaagttttgcagatgctaaaaatttgaaagtgggcgacaatattacttttgagtttaacggatttaaaatcaaaaaagaaattaagggaatcggatattcgccggaatatgtatatcatgcatcaacttcatcagtaatacctgattttaacaaaattggttttgcttacatgtcttataaagcatttcctacagataatattccatataacgttttaaatgtaaaatttaccggatctcctgaggaatataataatttattgtctgataaacttgatggggagtataattcatttgttgaacagtctgaacattcaagtgtttctcaattttcagaagaaattaatcagcataaaatgatgggggatatttttcctgttgtatttatattgattgcaatgctaatccttttaacaacaatgactagaattattgcacatcaacgaactcaaattggtattttaaaagcaagtggatttacaaataaatcaatcatgattcattatgtttcttacggtttctggttagttttgattggttctattttaggtttaattattgggcctgtgacattgcctcagctattttatccatcaatgagttcaacttacaaattaccttcatggaatcccgcatggagtatggattttgtttatgttgctgttgttatgattataatgtctcttttagtatcttattttgcagttagaagcatttcaaaggaaaatcctgcagatacaattaagccaaaaattcctaaaatttcatcatcaggtttagttgaaaaaataggattctggaaacatttatcttttaattctcgttggaattatcgtgatgctaaaagaaataaattcagggcattaatgacaataattggagtcattggttgtactgcacttctagtatcagcattcgggatgtatgatggaatgaatgatttaaaggaatgggaatttaatcagataaatcattatgattcaaaattagtcattgataatgacgcatccttatccgaaattgatgatgttgcccgtgatgttgatggggataaaataatggaatcagctattgaaattgaatcggattcggctaaaaagtcagggtctctgatagctttaaaccacacggatttgataacaccaacagattatgattggaataaaatggaaataggagatgatgaagtttctatttcacaaaaaatggctgacatgttggatatcagtgttggggatactgtaaaatggcatattattggttcggataaatggattaagacaaaaattgataagattcatgcagatccgacatcacagggaattgtaatgtcttctgataaactagaaaatcttgatttaaattacactcccacaagcattgttactgaacagcatgttgataagaattattctattattaaaacagttaactcaatgaaggatataacttctagctgggatgaattaacagaatcaatgtggctattaatttatatattgatattttttgcatcccttctggctattgttgtactttataatttaggtttgttatcgtttacagaaatcgaacgtgaaatagcaactcttaaggttttaggattcaaaacaggttcattaaggaaacttctgttaacacaaaacttatggtttacttttgcaggatttatattggggcttcctgttggttattatgtattaaagatgatgtgggattcttcaggagattcattttacatattgccttcaatatctcctatgaattttattctaactgcgacaataacatttactttatcgatactggtaaatctaatgttttcacgtaaaattaagaagttaaatatggttgaatccttaaaaagtggggaatag

SEQ ID NO: 7246 - DNA, 222 bp, Methanobrevibacter gottschalkii
  source 1..222: mol_type = genomic DNA
atggctaaaattactgcagactcaaaatatatggaacttttaaataaatatcctttacttaaaagagatttatctcaaaaaaactggaaattcgaatttctagtaactccaatgggaaaaatctcattatgggaagctaatcttgaagaagtaagtaaacatgctgaattgagtgttgatgagacagttactttatttcaagacttagttgattcatactaa

SEQ ID NO: 7247 - DNA, 2259 bp, Methanobrevibacter gottschalkii
  source 1..2259: mol_type = genomic DNA
atgtcgttatctaaaaagatgttaagggatataagaatcaatagaacccaatttattgcaatatttctcatggcatttttaggtatttttgcatattgcggaatctgtagtgaatattatggattggaacagacaagtgcggatttttataatgaaactaatctggctgatggttggatttataaaaccagttttgataatgcagatttggataaaataaataatctggcaatgcaaacagaaagacaacatgtaatttcatctgttggggaatttgataatgatcctgacattacactgcattttgttgaaaacaatacaatttctaaatttcatgttttccaaggaaaagattttgatattaatgatgagtccggtgtctggttggataagcgttttgctgattcaaaagagttaaatgtcggagacaatattacttttaaatttgatgggaaaactattgaaaaagagattaaaggtattggatattctcccgagtatgtttacgagtcatcggctacttcaattactccaaattttgaggatgttggtttcgcatatttgtcatataagtcatatccagataatgttgaatttaatcgtttactggttaaatataatcagtcagatgattcttttaaagaaaagcttgatgattcaattagctatttgtcatttacaaaacaggaagaccatgttagtgtggcacaatttagtgaggaaatggcgcaacataaaatgatgggggatgtttttccaattctttttattctgattacatttttaacacttttaacaacaatgacaagggttgtaacatatcaaaggactcaaattggaatcttaaaagcagttggttttaaagataggacaataattttacatttcatctcttatggatttttcccagttctgataggttctattttgggacttattgcaggaccgatggttattccaaagatgttttatccatcaatgactactcgttatactttaccttcatggaatcccggttttgatatgagttttgtttatgttgcagcagcacttgtgatctcttcagttattgttacgtatttgacttgcagacgtatttcaaaagaaaatcctgcaaataccatgaggccaaaggctccaaatgtatcctcaaatagcttttttgaaaaatctaaattatggaatcatttaagtttcaatttccgttggaactggagagatgcaagaagaaataaattcagggcattaatggcaattattggtgttatgggttgtgtttcattattaatcgcagcttttggtatgaatgacagtatggatgatttgaaaacttgggaatatgatgacattaatcattttgagtcaaaattagtgatttctaataatgcatctcaggaagaattgtattatgtaattaatggaactaatggcagttttataatgcagatgcctattgaaattaaatcgaacaatcatgaaaacacgggtgtacttttagtttcaaacaataccgacttgatatcttacacggatagtaataaaaatccaattgaaattaaggaaggggatatttcaatttcaacaaaattggctcaggattttaatttaagtattggtgataaaattaaatggcatattgttggaaatgatgactgggttaaatcagaaattggtcaaattcatgcagaacctatttcacaaggtttaataatgtctcccgatactttagaagatgaaggtttaaattttacaccaaccagtattctaacttcagaaaaattcggtgaaaatatcaattcaattaaatctgtatctactcttgaagacatggaggaaagttggagtgagatgacttcttctgttatgatgatggtttatgttataactgttgttgcatgtcttttagctattttagtcctttataatcttggaattttatcatttactgaaatggaaagggaagttgcaactttaaaggttcttggttttaaaacaaatttcttaagaagattgttgttgactcagaatctgatttttacagctattggttttattttaggaatccctctcggattctatttcatgacattgatgatggatgctgcaggggaatctttgtattatgttcctatgttgacttggggaaatataatgctgtctgctgtgataacattttcaatatcaattgcagttaatttaatgttttcagataaaattagagatttgaatatggttgaagctttaaaagatgtagaataa

SEQ ID NO: 7248 - DNA, 717 bp, Methanobrevibacter gottschalkii
  source 1..717: mol_type = genomic DNA
atgaaaagaagcaaaaaactaattattgccatccttcttgtaatccttttaggattggtagcgtttattgtaggtacattatttatgacacctgacttatctcatgaaactaagaatatattagtattagcatctgataaagaagaacagccaaacggtggagtagatatggcattcatgatccgtttagaaaacggttcacttaaaaactatacaccaatatatcctggtggaatgacacaccctacaaaatcagcacctggaggccttcaaggaccaatgatgcttcacgactgtctatggaatggactgggtgaaggtatgcaaaatgcaaaggaaattgtagaagttcgtacaggaatgcatgctgatgcagtagttgttgtttatgataaaggtattgacagcattattgattcaatcagaccacttaaaataaatggtactgaaacaaaccttagtgcaacagacatcattcgtcaaaacgatgcatataatggatatccaggaaatgaacatgttcaaggaacaatgtctagatccgatgcggtaatggtattggctaaagcacttgctaatacagctaaagatcctgttaaaaaaagtacaatggttcaaacagcactaaaagaatattccaatggaaatatcataatggaaccacaaggatcatttacaaaattacttgcaactaaaggatttgaaagcataacttaa

SEQ ID NO: 7249 - DNA, 378 bp, Methanobrevibacter gottschalkii
  source 1..378: mol_type = genomic DNA
atgactatggaaaataataatcttggaaataaggatgatttgtgtgaagtttttgattctcatgaagatgttgtaaatcgtgtaaaagaacgtatacctgatgaaagtgattttactgaactatctgaattctttaaaatatttggaaacccaacaagattaaaaattatttccctgcttagtattgaagatttatgtgtatgcgatatctgcgaagcgcttgatttaaatcaaaccacggtttcaaatcaattaagaatactgcgtgcgaataatattgtcaaataccaaaaagaaggtaaaatggcaagatattctctcacagaccttcacattgaaatgatttacaaagtaggtttggaacatatattagaataa

SEQ ID NO: 7250 - DNA, 2355 bp, Methanobrevibacter gottschalkii
  source 1..2355: mol_type = genomic DNA
atggtaaaaaatagatgttatgatgctgattgtgataaagataactgtcacaatccagaacattacaattatatctgttttgatccaaattgtgatgaaattaaatgtaatgattctgatcattatgataaacaattattaagagattatcaaaaaaatacagatttaagtgtttatgatcatggagaagagatagattatgatgaagatgttgatataagtctttgtggttgtcctgattgtgcagacgaccatgatcacgatcatgatcatcaccacgatcattctcatgaccatcatgaacatgatgaggatgattcatgttctgatgaaagttgtagttgccatgaccatgatgagcatgaccatcatgaccatgatgatgttgatataagtctttgtggttgtcctgattgtgcagatgatggccatgaacatggtcatggagatgaagaattgttggctgaaggaaaaccattaattgctaataggccaatacaaatcattgtttcaagcggcatattgtttgttttaggtcatgtttttgaatggttgtcatttagccctgcagttgttacaataatttatatgttaggtgctttaattgcaggttatgaaatagctgttttagcatacaactcattagttaaaagacatactgttggtccggcaatgcttatgtgtgttgcatgtgtagcttcatttattattgggcatcctgaagaaggtgctgcagtaacatttttatattacatagcggaatttttagaagattatgcggaacatcgtgctaaacgttctattaagtctttagttgaaattgctcctgaaactgcaagggtaaaattaaatgattctgaggagttaagaaatgttgatgatgttgatatcggtgagatcgttattgtaaaacctggagataaagttcctttggatggtgaagttgttttaggatcttcatcaattaaccaatcttccattactggtgaaagtgttccagttctaaaggaaactggtgatgaagtattttctggaactgttaatgaagatggttacttggaaattgcggtaactaaaaaggctaaggattctgttatttcaaaaattgtcactttggttaaaagatctcaactcaacaggtctgaaaccgaatcattagttgaaaaagttgctaaatattatactccaatcatgatggttgcagctatttgtgttgcattaattccatcgtttgtatttggtcaaaacttagttgattgggtttataaagcgctttcacttttagtaatttcatgtccatgtgcatttttaatctcaacaccggtaggtatggtatctgctattacctcagctactaaaaatggtgttttgattaaaggcagtacatatgttgaagagatgcgtgatgtaaaagcagtcatctttgataaaactggtactttaacagagggaaaattaattttaagtgatgttgaagttctggatgaaaacttctcaaaagaagatattatcaggattgcagcatctctggaaaatcaatcttcccacccaattgcacaggctattgtaaattatgcaacagtaaatggtattaaatttagtgaaattaatgactttaagaatgttccgggaaagggcattgtagctaatattggggaagaacaatactatgcggctaatgaatcattaatagaggatgggtcatttgaagtttcaagagatgaaattaatagatattcagctgaaggtaaaacaattgtatttattggaaactcaaagaatgttttagccattattacagtatctgataaaattagaccaaatgctcatgaggtaatttctgatttaaaagaacaaggtgtacagacaatcatgctcaccggtgataataaacttgccgcaaaaagtgtggcatctgaaatcggaatggattatgtgtattctaatctaatgcctgaagataaactaaacattctggatacaattagaaacaagtttggtgatgtggctatggttggggatggcattaatgatgctccggctctagcacgtgcaaatattggtattgcaatgggtgctgcaggttctgatgtggctattgaaacagcggatgttgcattaatgcaggatgatatttcaaaactcccatacctgttcactttaagccgtaaaacaatgggtattattaaacagaatattactgtggctattgcagttaaattgttatgcgtaatacttgcaatcttaggcatcattacattgatgatgtctgtaggttttggggatttaggactgacaatgcttgttatcttaaattcctttagaattggaatggtgaaagatccactattctaa

SEQ ID NO: 7251 - DNA, 1371 bp, Methanobrevibacter gottschalkii
  source 1..1371: mol_type = genomic DNA
atgttaagtaatgatttggtaaatggtgttgaactgatgcttcaaaaccctaaaaaagcattaattgaaatgtccataccattgattatttcattactcattactagtttttacaacttgattgatgctgcttgggtttctggtcttggtgctgatgcacttgcaggtgttggattttttacaccaattttcatgattttagttggctttggaaatggattaggttctggagctgcttttgcattatccaaatatctgggtggaaataataaacaaaaagcggataatgcagcgattcattcaataatcattgatctaattgcatcattgattataactcttgcattattagttctattaaatccgatattaaatgcgatgggtgcgggtcaaactattggttatgctactgattatggcatgattatcattttaggctctgcatttattatactttcaaatgcattgtatggcatttcaagaggagaaggggatactacccgtccaatgtatgctataattgcatcagctattttaaatatgattttggatccgatttttatttataatttaaatttaggtgttaagggagccgctattgcaacgattgtttcatcagtttttgtaattttaattttattatactggttttatattaagggagatacatatttaaaacctaatttaagtaattttgattttaaaaaagatatttcaatagatataattaaagttggagttcctgcaagcattcagcttttgaataatgctttttttgctgcagttttctcagcactcttaacatttgtcggttcaactgattcggttgcagtctattcgacaggttggaggatagttactattggaacaacaccgttaatagctattggaacggccttgattagtgtaattgcagcaaattatggtgcaaaaaactataaaaacattcaaattgttcataggtatgcaatgaaagtatcaattgcactggctattattgtggctattttaacaaatgtatttgcaggagatatttcctcagtatttgcttcttccggaagtagtgtaagaatagctgcagagcttacaggtttcctttcatggattgtaatttactatccaacaatggctgttggtgttgcttcaacttatgttttccagggtattggtaaagggattactgcaatgtttcagacaattataagggaaacaggtttcacaataacttttgcagtattgtttgctgtagttttaaattatggtgtatggggagcatggatgggtattgttttaggtgaaattgtctcaaataatcttactatgctttgggcggattatcttgttaaaaaattaatagatattagtggttaa

SEQ ID NO: 7252 - DNA, 615 bp, Methanobrevibacter gottschalkii
  source 1..615: mol_type = genomic DNA
atggaacttaaaggaagcaatatttcatttaaatatccttcaactaaaaaatacatattgaaagatatagacatatgcatcgacaacaccaaaatcaccgcattagtcggagacagcggaagcggaaaatcaacactatgcaaaatcctctcaggatacacaaataattttgagggtgcagtcacattagacggtaaagaactacctaaaaaagaattttgccctgtgcaattaattttccaacatccggaaaaagtaatgaaccctaaatggaaaatgaaccacattctagaagaatcatggatgccggacgataacctcttaaaagaatttggaattcaaaagacatggctgacaagatttccacaagaactgtctggaggagaactgcaaagattctccgtgttaagggcattaaacccaaaaacacaattcataatagccgatgaaatgaccacaatgctagacgcgataacacaagtacaaatcctaacatcagtcattgaaatcgttaaaaaaagaaacatgggaatgctaattgtaagtcacgacatgccattagtagaaacaatatgcgacgaaataatttacttaaaagatattaatggaatttaa

SEQ ID NO: 7253 - DNA, 960 bp, Methanobrevibacter gottschalkii
  source 1..960: mol_type = genomic DNA
atggagaaattattagatgtagaaaatgtatcaatttcatttattcaatatacgcaaggtttgaatcaaagagatctgaaagttattacagacctaactttagatgtatttgaaggagaaatactagccattctaggttcaagcggatctggaaaaagtttgctcgcacatgcgatattcggaattttaccagaaaatgcaaatttaaatgggacaataaaatacaaaggaaaagaattatcacaaaaagataaagaagaaatccgtggaaaagaaatagcacttattccacaatcagtaaacttcctagaccctttgatgaagatttcagatcaagcaattggtgaaactaaagatgatgctgagaaaaaggaaaagaaacagaaacaaagagaaatttttgaacattacaatctaggtcctgaagtagatgacatgtacccctttcaactttccggaggaatggcaagaagagtacttgtatcaacagcactactatccaatccaaaactagtagtagcagacgaaccaacaccaggattagatcaaaaaacagtcaaagaaacattaaatcatttcaagcatatgaaagaagatggagtaggagtattgctaattacacatgacattcatgcagcattagaagtagctgatagaatcggaatattctattcaggatacgtaatagaaattgcagaaaacaaagacttctcaggaaacggagaaaacctcctacacccctacacaaaagcactatacaaagcattacctgcaaacgggtttgaactgacagaaggacaccaaccattgcatggggaaatccctaaaggatgtccatattatgacagatgcgaaatgcgtatgggaatatgcaaagaagaaagaccggaactgacagaccttggaaacaaaaaagtcagatgttttaaatatgaaggaggtctaaaaaatggaacttaa

SEQ ID NO: 7254 - DNA, 855 bp, Methanobrevibacter gottschalkii
  source 1..855: mol_type = genomic DNA
atgaataattcaaataaaagcatttatagtccaatttcaaaaatgaatttaagaacaaagacattgttaacaattggtcttactgtatctttattaataattgttatgataacaagtttattaattaattctacagacataacaactaattttagtgcaatgaatttacctccttcatttgaacatttatttggtactgattggttaggtagagatatgtttatacgtactttgaaaggattaggattaagtgttcagattggtgccggagcatcaatattaagtagtttaattgcaattattttatcctttgtatgcagcattaataaaaaatttgattcatttgtcgcatggatagtggatttatttttatcaataccacatattttacttatcattttaatatcaatctcattaggtggtggagcatttggtgtaactgttggagtagcacttactcactggaccacactcacaagagtattaagagcagaaattaaacaaataaaaacatcagattatgttaaactatctgaacaattcggaaaatctaaattttggattgcaagaaagcatatattgcctttagtaattactcaaatcatagttggaaccatattaatatttccacatgcaattatgcacgaagctagtgtaacattcctcggtttcggattagcacctcatgaacctgcaattggtattatcctatctgaatcaatgaaatatcttgcaacaggtaactggtggttagcattattcccaggactcgctttattaatcttagtattattattcgatatcgctggagaaaacattaaaaagatacttgatcctacaagtgcaaatgaataa

SEQ ID NO: 7255 - DNA, 996 bp, Methanobrevibacter gottschalkii
  source 1..996: mol_type = genomic DNA
atgttaaaaaatgaaaagattttaaaatttttaggtaagaaaattattagatttataatattactcatatttgttataatattaagttttatactaattgacatgtcccctataaatcccgtaaaaacatatattagtgctcttggatcagtttcttctgaaaaaatagctattttagaggcatattggggggtgaatgaacccataacaacaaaagtaattagttggttaggaaaaatagtgcaaggcgattttggaacatcattaattttcagaatgcctgttattgatgttattaaagaaagatttattgcatctttagtattaatgttaacttcatggctattttcaggacttttaggattcatattaggaacaatagcaggatttaaaaaagataccattattgataaagcaataaaagtatattgttatattttacaatctgcaccaactttttggattgcattacttttcctcatgatatttagcgtatatcttggttggttcccaaccggattaggagtacccatcggaacattaagtgaaaatgtatctatttgggaatggttacacagattaattctccctatgattacattaagtgtcgttggaatagcctcaattactttatatacccgtgataaattaattgaagtgatgaatagtgattatttcttgtttgcaaaagcaagaggagaaagtggttggaatttaattaaaagacatggaataagaaatattctactcccagcaataacaatccaatttttaggattttcagaattatttggaggtgctgtacttgtagaacaaatatttacatatcctggaattggacaagcagcagtatccgctggattaaaaagtgatgtgcctcttcttttaggaattgtaatttttagtgcaatattcgtttattgtggaaatttaatagcagatatcctctataacttcgtagatccaagaattagagaaggtgaagaagatgaataa

SEQ ID NO: 7256 - DNA, 1629 bp, Methanobrevibacter gottschalkii
  source 1..1629: mol_type = genomic DNA
atggaacaaaaatacattataggaataatagtattaattttaattgcaattattggtggaactctttttatgagtggaggaaataccagtacaagagcagataatgaattagtagtttctgcttttgtacatggcagtgaaccagaaacaggttacgacccgatgtatggttggggagaccgtggagaaccattaattcaatcaactttgatgaaaatgaatagaaatatgacctatgacaatgatttagctacaagttggtcttctaataataactttactgaatatactgtaaatatcagagatggagttaaatttactgacaacacaacattagatgctgaagatgtagcattttcatataatcaagcaaaaagtactggaaatacaattgatttaagtagtttagataatgtaagtgcaattaataaaaccactattaaattcaagttaaataaaccagattcaacatttacagacaaactgttacatgtaggtatcgtaccttcagattcatatgacaataatacttatggaagtaacccaataggatctggaccattcaaacttgcacaatgggataaaggtcaacaagtaatctttgagaaaaatccaaactattatggaaaacaaccaaaatttgataaattgacaatatcattccaaaaaaatgaagcttcatttaatgcagctaaaaatcatgaattagatattgcagcagtaccattatcttacgcaaatgaaacaatagatggttaccactcatttttatccgaatcaaatgatgtgagaggcatttcattaccaatgaaaaacaatactggtgaaactaatgaagatggcatagcattaggaaataatgtgactgcagataaatcaatcaggttagcattaaactatggtattaacagagaagacatatgtaaaggtgcattaaacggtgccggcgtacctaactacgatggtatcgctcatttcttaccatggtacaataatgattccactatcaaagatgcagatattgacaaagctaaagatttcttgaagaaaggtggatggaaagatacagatggtgatggaatagtagaaaaagatggtaagaaagcatcatttaacctatactactcatcagatgcaccggaaagacaagcaattgcagtagcagtttcagaacaagcaaaagaatttggtattgaaataaatgcaacaggttctaattgggatgaaatagataaaatcaaatttagtgaaccagttgtatggggattcggttctactgatccttatgtaatgtacggagaatactatagtaatcaagcaggtattggatacaacaacccatcacttgtaaataacagtgctgtagattcacatattgataaagcaatgtctgaaccacgtgaacaatcatatgctgactggtctgcagtttcatgggatggtcaaacaggcatttcaccaaaaggtgatgcagcatggttatggataagcgaaatcaaatacacatactttgtagatgatagtttagatatttccaaagatacattcaaattacaacctcatggtggagacttattcggaaacatctacgattggactcgtatatctccaattaatgctacaaattaa

SEQ ID NO: 7257 - DNA, 1620 bp, Methanobrevibacter gottschalkii
  source 1..1620: mol_type = genomic DNA
atggaacaaaaatacattataggaataatcgcagttattttaattgcaattgttggtggagctatcctaatcggaggcccatctactgaacgagcagacaatgagcttatagtggcggcttacagtcatggtggagaaccagaagctggttttgatccaatacttggatggaactactactcagaacccttaatccagtccactttgttaaaaatgacaagaggaatggaatatgaaaatgatttagctaaaagctgggaagcaaatagtgattttacagaatatacagtaaaaatcagggacgatgttaaattcacagacaacactactttagatgcagaagatgtagcattcacatacaacgaagctaaaaaaagtggagcaagcttagatttaagtagtatggaaaatgcaactgcagtagacaaacaaactattaaatttgaattaaacagaccagattccactttcgtagataaatttgcatacattggtattgtgccatctgattcatacaacaatgaaacctatggtgcaaatccaataggatccggaccatttaaattcgtacaatgggacaaaggccaacaagtaatcttagagaaaaacccagattactatggaaaagagataaaattcgataaattaacaattttattcgaacaaaatgaagctgcattcaatgctgctaaaaataaagaagtagatatagctgcagtaccattgtcttatgcaaatgaaactgtagatggatacaatatgcacctcatggataccattgatgtaagaggactttcattaccagtacagaacaataccggtaaattaagcgaagatggaaatccaataggcaacaacattactgcagacaaatcaataagagaagctttaaattatggtgttaatagaaccgcaatatgtaaaggagcattaaatggtataggagtgccaaactacgatggtatcgctcatttattgccatgggcaaataatgaatctgcaattgatgatggtgatgttgataaagctaaagacatcttgaaaaaaggtggatggaaagatactgatggcgatggaatagtggaaaaagatggtaagaaagcatcaataaatgtatattactcatcaaatgcacctgaaagacaagctattgcagttactattgctgaagaagccaaagaatttggtattgaagttaatgcaactggttcaaactgggatgaaatggataaaattaaaaatactgacccagtcgtatggggattcggttcaactgacccgtcaacaatgtggtccgaatactacagtgaccaagcaactgtcggatataataatccagcacttattaacaatagtgctgtagataagcatattgataatgctatgaaatctgatcgtgaatcatcatatgcagaatggtctgctgtatcatgggatggtcaaactggtatttcacctaaaggtgatgcagcatggttatgggttggagaaattaaatacggatatttcgtagatgaaagtttagacatatccaacaataccgaacttatacaacctcacggaggagatatcttcggaaacatatatgattggtcacgcgtatcttcaattgaaaaataa

SEQ ID NO: 7258 - DNA, 615 bp, Methanobrevibacter gottschalkii
  source 1..615: mol_type = genomic DNA
atggaacttaaaggaaacaacgtttcatttaaatatccttcaactaaaaaatacatattaaaagatatagacatatgcatcgacaacaccaaaatcaccgcattagtcggagacagcggaagcggaaaatcaacactatgcaaaatattagcaggatatgtgcaaaacttcgaaggcgaagttacattaaataataacaagttgccgaaaaaagaattttgccctgtgcaattaattttccaacatcctgaaaaagtaatgaaccctaaatggaaaatgaaccgcattctagaagaatcatggatgccggacgataacctcttaaaagaatttggaattcaaaaaacatggctaacaagatttccacaagaactgtctggaggagaactgcaaagattctccgtgttaagggcattaaacccaaaaacacaattcataatagccgatgaaatgaccacaatgctagacgcgataacacaagtacaaatcctaacatcagtcattgaaatcgttaaaaaaagaaacatgggaatgctaattgtaagtcacgacatgccattagtagaaacaatatgcgacgaaataatttacttaaaagatattaatggaatttaa

SEQ ID NO: 7259 - DNA, 960 bp, Methanobrevibacter gottschalkii
  source 1..960: mol_type = genomic DNA
atggaaaaattattggacgtggagaatgtttcaatttcatttattcaatatacgcaaggtttgaatcaaagagatctgaaagttattacagacctaactttagatgtatttgaaggagaaatactagccattctaggttcaagcggatctggaaaaagtttgctcgcacatgcgatattcggaattttaccagaaaatgcaaatttgaatgggacaataaaatacaaaggaaaagaattatcacaaaaagataaagaagaaatccgtggaaaagaaatagcacttattccacaatcagtaaacttcctagatcccttaatgaaaatatcagatcaatccataggacagacagaaaatgaagaagaaaaaaaggaaaagaaacagaaacaaagagaaatttttgaacaatacaatctaggtcccgaagtagatgacatgtacccctttcaactttccggaggaatggcaagaagagtacttgtatcaacagcactactatccaatccaaaactagtagtagcagacgaaccaacaccaggattagatcaaaaaacagtaatggaaactcttaaccacttcaagcatatgaaagaagacggagtaggagtattgctaattacacatgacattcatgcagcattagaagtagctgatagaatcggaatattctattcaggatacgtaatagaaattgcagaaaacaaagacttctcaggaaacggagaaaacctcctacacccctacacaaaagcactatacaaagcattacctgcaaacgggtttgaactgacagaaggacaccaaccattgcatggggaaatccctaaaggatgtccatattatgacagatgcgaaatgcgtatgggaatatgcaaagaagaaagaccggaactgacagaccttggaaacaaaaaagtcagatgttttaaatatgaaggaggtctaaaaaatggaacttaa

SEQ ID NO: 7260 - DNA, 561 bp, Methanobrevibacter gottschalkii
  source 1..561: mol_type = genomic DNA
atggatgttataattaaagaattaggtaaaaattcaaaagaaattgctgaagttcaggaatttttatttaaaatgattaaattggaatttggttatgattatgttcctcaatggcatcaggatattattaatcttgaaaaatattatattgatccaaaaagaaataatttttttattgcgtatactaaaactggtgaaattatagctacaattggtattagggcatatgataaagattttccagaatttaggcatttgtactctatagataatacttcaagtatttggcgattatttgtcgatagaagatatagacgttgtggtttagcttctaaaatgtttggtatagtggaaaattttgctaatacattaggttatgataatatttatttacatactcataaaacattggatggtgcaattgaattctggacaaaaatgggttttgttgttgcattagattctaatgatgagttagaaacagttcatatggataaaaagattcaaggagtaaacattagtgataatattgttgattataaatatgcagtaaaattatga

SEQ ID NO: 7261 - DNA, 693 bp, Methanobrevibacter gottschalkii
  source 1..693: mol_type = genomic DNA
atgagcctatctcttaaattaaagcaatatctaacagaccaaggtgctgatgaagtaggttttgcagacataaccaattttactcccaaaaaaaatttaaataaaggagtggttttttacatcacatatcaaaaagaaaccctaaggcaaatgcaaaatgcacccaccaaagaatatcttaatgaactgataaatttaaatctcaaattagatgaattaggtatgaaatgtgaagagtttttaattgaaagaggatataatgcatatgcgcaaacaaaaaaacgccttggatatgattttggtgaatttaattcatttgaattacctcataaaactattgcaacacgtgcaggaattggatggattggaaaatcagcactattaattacagaaaaacatggttgtgctctaagattaagttctgttttaactgacgccccattaaatccgggaaaacccatacttaaatcaaaatgtggaaaatgtatggaatgtaaaactgcatgttttggaggagcaataagcggaaaaaaatggaactataaaattaatcgtacagatttttatgatgataaaaaatgtgaaaaatatgcattgaaaatatcaaaagagaatttaggaaaatccgatacagtatgtggaaaatgcatatatgcttgcccatacactcaaaaatatattaaaaaatcataa

SEQ ID NO: 7262 - DNA, 1617 bp, Methanobrevibacter gottschalkii
  source 1..1617: mol_type = genomic DNA
atggataaaaagataataattggcgcgattgtagtggtgttggttgttattattggtgcttttgcatttatgggcgggtctcatgacagtgatccaactcatttaactgtagctgcacacagtaatattaaagaacctgaggcggggtttaatccgcttactggttggggatgtggacaccaaaactataatccattagttcaaagttgtttatttaaaacggataaaaatggaagtattgttccagatcttgctactggttattcagtaagtggggatggtaaaacttggactgttaatgttagggatgatgttaaattttcagataactctacttttgatgcagaagatgtggcatttacatttaatacagcaaaacaaactgaatctgagttggatttaacaaatattgcaaatgttactgcagtaaataacacatgtgttaaatttaatttagttgaagctagatcaacctttatttatgatttgagatatcttggaattgtgccttctgattcatatgataattctacttatggagagaatcctattggtactggaccttatgtattggatcattgggataaaggtcaacaagctatatttaaaatcaatgataattattatggtgataaaccgtactttactcaaattaccttattattccctgaagaagctacatggttagaattagctaaatctggtgaaatagatgtagttcctgttgcaacttctgcattgaatcaaacagtagatggatatcaatttattgagaaatcagcaggcagagcacagggtgtatctttaccatatcttaatgatactggaattatgtataatggtactatgaaagttggtaacaatgtgactgcggataaatcaattagagaagctttaaatgttggtattaatcgtcaaactatgtgtgatgaaatttttgcaggacatgcttctcctgaatttactggtgttgatacaagaacttatgcaaatcctgatgctaaagtagctgatggggatgtatcaaaagcaaaacaaatcttgaaagatggtggctggactgatactgatggcgatggaattgtcgagaaaaatggtttgaaagcatcatttgacttatattatcctccagattatttggatagacaatcaatgtctactgtttttgccgaacaagcaaaagaattaggtattgaagttaaacttgtaggtgctgattgggatacaatttataaaaatctatatagttcagcagctttaatgcaacaaacttctccagatccatacaaatcaatttatcagcaatatcacagcaaagaaatggatggattctatatgaatcctaacttatataataattccgcttctgatagattaatggatgaagctatgcatactagtgatcttaaccaggctgattcattatggtctcaatctgcccttgttaatggtggaggttggggtcctgctggagacgctccatgggtatggattgctaattatgattataattacttcattaaagacggtattgatattggtaaacaaccagatggtttaggaaatgatgttttgattaatatatgtgattggtcaagaaccaattccacagcttaa

SEQ ID NO: 7263 - DNA, 990 bp, Methanobrevibacter gottschalkii
  source 1..990: mol_type = genomic DNA
ttgaataaaaatcaattattaaaattttttggttacaagttaatacgttttctaatattgatgattgcagtttcaatattcagttttgtattattagatttatcccctatagatcctgtaaatgcgtatttaaaacaagctgcagtatcagaagctcaaagacaaatacttcaggagtattttggtacaaatgtcccattaacaactaaaatatttcattggttaattgatttatttcaaggtaatttaggcacttctttaatatatcgtgctccagttgtcgacattattttagaaaaagcttctgcttctatcgtgctgatggcgatttcatggttattaagtggaatcatcggatttttgttaggggttgttgcaggtaaaaataagggatcctggattgataaagcagtaaaagtttattgttatgcaattcagtctgccccatccttttgggttggtatgcttattttaatggtatttgcagtttatttgggatggtttccaattggatttggtgttccaattggtgttagaagtacagatgtaacatttgcagagtgggcaacaagattggtacttcctactttgacattgagtttagttggtttagcaccaattgcaatgtatacacgtaatgaattaattcaagttttatcttctgattttgtattatttgctaaatctaggggagaaaaaggttggaatttagtaaaaaatcatggcataagaaatatattattgcctgcaataacattacaatttttatcatttagtgaattatttggtggtgccgttttagttgagcaagtattctcttatccgggtattggtcaaacagctgttgcagcaggtcttcaaaatgatgtgccattatttttgggtattgtactattcagtgctatatttgtattcgtaggcaatctactcgccgatctttcatactatttgattgatccaagaattaaggagaaggagttcaatgattaa

SEQ ID NO: 7264 - DNA, 852 bp, Methanobrevibacter gottschalkii
  source 1..852: mol_type = genomic DNA
atgattaaaaaagctgacgataaaaagcaatggtttttatatcctgcaaatcttagaacaaaaactattgtaattattattctttcggcattggttattctaagcatttttatttctggttattttataagagatattccaacaagttttattaatgcaaatcaaatgccttccttagaacatctctttggtaccgattggatgggtagggacatgtttcaaagaactattgcaggtctcggattaagtctgatggttggttttattgcatctattgttagtactgttatttctattattttaggattattttcaagttttaataaattcaccgatgaatttgttgccggaattattgatctgtttggttcaatacctcatattcttttaattattcttatttctatgatgtttggtggaggagtaattggagtagtgatgggtgtaggtttaactcactggacgccgcttgcaagagttttaagatctgaagttaaagaaatcaggacaaaagaatacatttccttagcagagaatttaggaaaatcaaaaatgtggatagcaataaaacatattttaccattagttatatctcagattattgttggtgttattctaatgtttcctcatgcaatcatgcatgaagctgcaattacattccttggttttggtttgcctccacatgagccagctattggtgtaattttatctgaatcaatgaattatttatcctctggatattggtggttagcattttatccgggtatgtcattattgattgttgtattactgtttgattttatcggagaaaatgttgaaaaattattaaatcctgaaactgctcaggaataa

SEQ ID NO: 7265 - DNA, 693 bp, Methanobrevibacter gottschalkii
  source 1..693: mol_type = genomic DNA
atggatttaactcaaaaattaaggaaatatttaattaaaaatggagctactgaagttggttttgcagatattattaattttactccaataacaggtttaaacaacggaatcgttttttacataacttatccaaaagaaactattagaaatatgaaaaatgcaccaactaaagaatataatgaagaatatgataaaattaattacaaattagatgaattaggcatgaaatgtgaagaattcctaattaaatatggttataatgcatatgcacaaacaagacaaagacttgggaatgactttggagaacacaattcatttaaattacctcataaaactattgcaacacgtgcaggaataggatggattggaaaatcagcacttttaattacaaaaaaatatggcagtgctttaagattatcttctgttttaactgacgccccaataaaaacaggactcccaacaattaaatctgaatgtggaaaatgtatggaatgtaaaaatgcatgttctggaggagcaataagtggaacagaatggaattataaactcaaccggaatgatttttatgatgataaaaaatgtgaaaaatatgcattaaaagtatcaaaagaaaatttaggagacgaaaagacaatatgtggaaaatgtatttatgcttgcacatttacccaaaaatatattaagaaagcatag

SEQ ID NO: 7266 - DNA, 867 bp, Methanobrevibacter gottschalkii
  source 1..867: mol_type = genomic DNA
atgaaaagaacagcactaaaaattggatatattggaactaattttcatggttttcaacgtcaacctgacctgcgaacagttgaagaagaattaatatatcatctacgtaaacttaattatattgatgatttgaaaaagtctagatttagaatagccggtagaactgatgctggtgttcatagtttaggtaatgtgattagttttcagtctgaaaaagatgttaggataaatgagattaataattctctacctgatgatattcaaatccttgctagtgcacctgtacgttatgcatttaagcctagatatgcacaaatgagacaatatagatatatgttatttcaagatttggatattgataaattaaaagaatgtgctgatatttttaaaggaactcatgactttactaattttacaaaaagattccaaaaaacaactacaagaactattgatgatattaaaatcaaaaaatttgatttggaagattatcacaaaaaaggattcccaaaccttcatgatacactatccccaatttttgttgatatttatggcgagtcattcttatggaatatggtaaggaaaatgatgagggtttttgtggatgtggctattggtaaaatggatttggatgaggttgaaagactactaaatcctgaagaaaatgaatcaagagctaatattaaggttatggaagcagaatatttaattttaatgaatattcaatatgatggaatcaaattcagatatgatgactatgcttgtgagagatttaaacgtgatttagttgattctttatcggatttacaaaaaagatatgcaatcagggagtctatgataaaaagtctacaggatttgcatgaatggtaa

SEQ ID NO: 7267 - DNA, 1323 bp, Methanobrevibacter gottschalkii
  source 1..1323: mol_type = genomic DNA
atgaaaatagctactattttgggaactcggcctgagattattaagatggctcctattattgatgagatttctaaaaggaatattgatcaaatcgttttgcatacaggccagcattatgatgaggagatgtctgatactttttttagggatttggatattaggactccggattataatattcaggtgggttccggaacacatgggaaacagacaggtttaatgatgaaaggtattgagaaggttcttcttgatgaaaagccggacatcgtcttggttcaaggggatacaaatgcggttttagcaggtgctcttgtcgcatctaaattgcatattgcaataggccatgttgaagccggactcagatcttttgatatgacaatgcctgaagaaataaaccgtagggctgctgatgtatgctcaacaatgtattttataccaacagccgaatccgctattaatcttttagctgaggggtattcgagaaaaaatttattcataactggaaatactgtggttgatgcttgttttagacatctgaaaattgctaaaaaaagaggaattaaagaaaaatctcttaaagaattaaatattgataaaatggacaatattttaactttaacaatgcatagggcagaaaatgtggatgttaaggaaagggttgtcggtatcattgaagcattaaaagaattagatgatgcggatattatttttccaattcatccaaggacaaaaaatacacttgaaaaatttggattatttgatgaattaaataatttggagcatgttcatatcataaaaccattgggttatcttgatttcttacttttaacttctgcttcaactttaattttaaccgattcaggcggtcttcaagaggaggcaataacattaagtgttccttctttaacattgagatataatactgaaagaccggaaacggtaactgcaggaggaaatattcttgtagggtcagatagggaagctattgtatctaatgcccgtaaaattcttgataataaaaattttgcagataaaatgaaaaatgctataaacccatatggtcaaggggattctgcaaaattaactgtagatgcaattgaagattatcatgctcgcggattattggatattgttgcacctgaggatataatgaattcatttaaaagaaaaatgaaaaacattcgtgaagatatttctgttaaagattttgaaagaaaagagaatgcacttgttcacatggtttttgatgggaaaaatatgcaatttcccactgatgagttgaatttaaatggtatggtgattaattatgacaaaagagaatga

SEQ ID NO: 7268 - DNA, 1089 bp, Methanobrevibacter gottschalkii
  source 1..1089: mol_type = genomic DNA
atgacaaaagagaatgaatctatattggtatttgaatacttcactgcttctggtgaaaaggataaatgcattatttctgaagctgaagcgttattattttcacttttagatgatttaaaagaattcaacgttgatttgattattaatgaatcttatggcagtgttgtaaaaaattatggtaatgtaaatccaatcttaattaatcaggatgtagtttcatggcttgaagagaatgcagatcaatttaataaagctatttttatctcagcagaaaacaataataatctctacaacattactaagattttagaagaaaatgatgtgaagatatacaattcttcagctgaagcttgcttaaagtcatctgataaatatgaaacttatgaagcattaccgaatacaattcctcaaccaagatcatttagatttaaaattgattctaaaggctattggaaaagagcaattgaaaatttacatgaaagatggcaagctgaagatccattaactcctcttaaattaataataaaaccattaatgggtgtggactgtgaggatattgtaatcatagagaaaatcgaagatttaactttggacttggataaaatttttacaccaggctctcgtgttcttgttcaggaatatattgaaggaagcgatattagtgttagcttaatctcagatggtaaaaatgcccttccaataagtttgaatgaacagtatgttgaattgaaagagaataaaggaatttatatgggtggaagattgccttttgagtctaaatttaaagatgaagcatttgatattgcaaccaaggcgattgaatctatagaggggatgaaaggttttgtcggtgttgacttaagaattaattcggatgaaaaggatatttattccctttatttacttgaaattaattcaagatttacaacgccttatgttggattaagcaaaatagctaattttaacataagtaaaacaataattgatctgattgatggaaatatcaatattggtgatttggacatttcgttagatggtgaaatcgaatttaaaaagtcaggaaattcattagaaattaggagaatataa

SEQ ID NO: 7269 - DNA, 1023 bp, Methanobrevibacter gottschalkii
  source 1..1023: mol_type = genomic DNA
atgaaggtggcaggatttgatattggtggtgcgaacactgatttagcagtcatcgactttgatggtgaggaaattaaaaatattgaagttgattttgcatatcttccaatgtggagtaataatgatgatttatcacgagttttaactgaattaatcgaaaatatttgtccagtttctgaaattgatgctgtaggcatttcaatgacggcagaacttgttgatgcatatgatactaaaaaagatggagttttggatgtagttaaaaaatgtgaaaaaacatttgattgtccgatagcatatgtggggattgatgggatgttgtcaaaagaagaaatcattaaaactccactaaaagcagcagctgctaattggattgcaactgctcaaattgcaacattgatttctgataactgtatttttattgacaccggcagtacaacaactgatattataccgattaaagatggagttgaatgtgcaattggaaaatccgactttgataggtctgctactggagaattagtatacacaggtaccttaagaactaatttaacaagttttttagataaaattgaattaaatggaaaagaatatcgtgtagctagtgaattatttgcacaaactgctgatgtgtatactgttttggacttgattactgaagaggattatgtttgtgatacttttgatggggaaggcaaatcaaaaattgaatgtgcaaaaagaatagctcgtgtagtatgtgctgatctggaaatgatgactatggatgagattgttggcatgtctaaattcattcaccaaaaacaagttgaacaaatcgctgatggtttgaaacaagtagttgaaactcaaaacttggatttgattgttacaaccggtcttggaaaagatattctggataaaaaagcggcagaactgttgggtttggaagtcaaatctatgggggatatattgactgatgaagagtgtgttgttgcaccagctattggaacttctgtaatgatgaataaatatttaaattaa

SEQ ID NO: 7270 - DNA, 567 bp, Methanobrevibacter gottschalkii
  source 1..567: mol_type = genomic DNA
atgactattaatattcaaatattacttattgcatgtgttacaacgctatatttcatacttccggcatacttttcaaacggtgcgggattattatttggtggaggaatgcctgttgattttgcaaaatctgataggtacggtattcgatggattggagatggagtaacctggagaggattattcgcaggaaccattattgggattataaccggtatcgtgcaaggatttattgctccgcatatacttccagcttatggacaatacataataactccaatagtaacaaacattaacagtgggatattaataggatttttacttggttttggagccctattaggtgatgcaatgggcagttttttaaaaagaagattaggtattggtcgtggaaaacctgctccattattggatcaattagatttcttaataattgcattaattctagtttcattagttgtaaaaatagatttattatttattgcaatatcaatcatattaacattagttatacatttaatagcaaatacctgtgcatatctacttggtataaaagacgtttggtactaa

SEQ ID NO: 7271 - DNA, 1509 bp, Methanobrevibacter gottschalkii
  source 1..1509: mol_type = genomic DNA
ttgaaaattaaaagtacaaaaagtttatgccctgagtgtggtaaaccaattgatgcagaagtttatgatgaagatggtaaagttttcattaaaaaaacttgtgatgagcatggtgagtttattaacacttattggggtgatgatgaattgtataatagggctaataactatcttccatcaataacttctattgaaaatccatgcattgaggatactgctagttgccctagtaattgtggtttatgttcaaaacacgaaacatcaactgttttaggtttaatcgatgtaacaaatagatgtaatttaagatgccctgtttgttttgctaatgcggctgctgcaggatatgtatatgagcctacacaagatgaaattaggcaaatgcttaagaacctaaggaatctaaaaccaaatccaactcctgctatacaatatgccggtggagaaccaacggttagaaaagacattgttgaacttattgcaatggccaaagaagaaggttttactcatgttcaaatagctactaatggaataaggctggctaaaagggaaaacttggctaaagatttaaaagcggctgggttaaacacagtttacttggcatttgatggggtaactccagaaccttatattaataatcggggtaaagatttacttccatttaaattagaggcaattgaaaattgtagaaaagcaggtttaggtgttgtactggttcctacattaattaaaggaattaatgatcatcaaattggtgaaataattaaatttgcatttgataataatgatattatttatggagttaatttccagcctgtttcattctctggaagaactcctgctgatcaagttgaagctcaaagaattacaattcccgactttgttaaaatcattgaagaacagactgaaggtcaagttaaaaccactgatttctatccgccatctgctgttgaaccagttgcaagattcatctctgcacttgatggtgaagaaagaccaccagttacattaaactgccaccagcactgtggtgtaggtacttatgtgtttagagaaaagactgaagggtctggaagagataaattaattccaattacaaattttattgatgttgaaggattatttgaaaaattagatgaatatgcagataaacttattgaaggtaagtttggtgctcgcaagaaagttatagctagtgttactaaaaaccttccaaaattaatacatcctagtaaaactccggattacttagatattaagaagattttatttgatgtatttgctaaaaggtcttacagtgcattaggggatttttctaaagacgcaatgcttatttcatgtatgcatttcatggatccatttaactttgatgaagacagggttaaaaaatgtgttatccattatgcaactccggatggtagaattattccattctgtaccatgaattcaatatatcgtcaaagtgttgagcaaaattttgcaaaacctttaaaacaaaaaaaagaataa

SEQ ID NO: 7272 - DNA, 486 bp, Methanobrevibacter gottschalkii
  source 1..486: mol_type = genomic DNA
atggatattattaaaggaaaaacatggacttttggggagaatattgatactgatgttattatccccggaagatatttaagaacattcaatccacaagatttagctgatcatgtcctagaaggtgaaaggccggattttacacagaatgtccaaaaaggagatattattgttgctgatgaaaactttggctgtggttcatcaagagaacaagcaccagtagctattaaaacagcaggtgttagtgcaatcgttgcaaaatcatttgcaagaattttttatagaaatgcaattaatattgggctgccagttattgttagtgatattgaagctgaagatggggatgtaataagtattgatctgtctgaaggcaaattggttaatgaaactactggtgatagcaaaaattttgaaccgttcaaagagttcatgttaaatatattggaagatggtggtttagttaatcattatcttaatgaatctgattaa

SEQ ID NO: 7273 - DNA, 630 bp, Methanobrevibacter gottschalkii
  source 1..630: mol_type = genomic DNA
atggaatgtccaatttgtggttctgataatgttgaaattttaaacgcaaaacaaaaatcatctaaaaaaaagcttatggaggaatatttattaaaatgtgaagactgtggtcatgtttttaaagatattttctctgcaaaaaaacctaaaccttataggttaattatttctgcacatgataagtctcataaaaccactattgatttatcaccaagcgatgaacttaaaagtggtgatgtcctactttctgatttaggtcaagttgaagtgaccagtattgaagttggggataaaagagtaaataaagcaaaaattgaagatattaatactatatgggcagcatctactgaaattccggcacgtataggtttttcagtagatttgcacggcgaagttgattcttacaaattagatttggaaagggattttgaaatagcccctggtgatattgttaaaatagacaaacacattgtaaaagttcatgttattaaaactaaagatagaaaattaacttctggatttgcaaaagcggaagttataaaaagagtttattcaaaaccagttaaatttaataattttgattatgatttgactaaggacatatttaagaaaactaaaaaatcttcctag

SEQ ID NO: 7274 - DNA, 1278 bp, Methanobrevibacter gottschalkii
  source 1..1278: mol_type = genomic DNA
atgaaagtatatattgaatcttacggttgcacatttaataaagctgatggacagattatagcaggtaatctacaagaaaatgatattgatattgtagggtctatggaagaagcagatgttattattgtaaatacatgttatgttaagttacctactgaaaataaagttacttatagaattcaaaagcttcaaaacgattttccagataaaaaaatcatcgttggtggatgcatggtcgaaatcgaccctgaaaaattggataaagttgctcctaatgcttcatggattggacctcatcagttaaataaatctgcagaggttgttaaatccacatattgtggtgaagtcgttcgtgagtccggattttcaaaggagtctaaagttgatgttcctaaagtcatggatgatagtctgattcatattatccaaatatgtgaaggttgtttgggtgcatgcacattctgttgcacacgttttgctcgtggaccattgaatagctatcctattgaagatattaaggaagaagcaagaaaagctattgaacagggtgcctgtgaaattcagcttaccgcacaagatactgcagcgttcggtaaagatagtggtgaaaaactatctgatttaatcaaagaagtggctaatttagatggggattttcgtattcgtgttggaatgatgcatcctaaaaatattttaaatgatgttgatgaaatcatcgatgcgatgaaacatccgaaggtatataatttcatccatttgcctattcaaagtggaagtgataaagttttatcagacatgaggagagggcatagtgttaatcaatatcttgatattgtctcaaaatttaaaagtgaaattcctagtttaactttggctgttgatattattgtgggttatccaactgaaagtgaggaggattttaatttaactgttgaattacttgaaaaaataaaaccaagtttaattcatttatcaaaatatcaacacagaaaaggtgcagtttcttcttcacttcctgaaattcctcatgaaactatgaagagaagatcaaaatttttatctgagattaaatcaaaaataactgaagaagaaaataaagaattagttaattccaatcagaaagtcttagtcattgaaaaaggttctaaaggaggatttattgcaaaaactaattcttatattcctgtaattgttgataatgttagcttaggaacttttgttgacgtaaaaataactgatgcaactgctacttatcttaaaagtgaattattgggataa

SEQ ID NO: 7275 - DNA, 201 bp, Methanobrevibacter gottschalkii
  source 1..201: mol_type = genomic DNA
atgagtgaattaccaatcgcaccagtcggtcgtatcttaaaaaatgctggcgcacaaagaattagtgatgatgcaaaaattgcattagctgaagcattagaagaaaaaggtgacgaaatcgcacaaaaagctgttaatttcgcacgccacgctggtagaaaaactgtaaaagctgaagatatcaaattagcaatcaaatag

SEQ ID NO: 7276 - DNA, 723 bp, Methanobrevibacter gottschalkii
  source 1..723: mol_type = genomic DNA
atgacatacaatataaaaaattcaaaagagttagcaggtttaattaattacactaatttaaataatataattactgaaagtgaaatggttgaattcctcgaaaaagcaaaagaaactaactttaattcagttgttgtttctcctacttatgtcaaattagcaaaagaaacattaaaagacactaatataaaagttggaagtgttattggatttccattaggtttcgaagatactgaaagtaaagtagaggctgccaaatcattacttgacaaaggtgttgatgaatttgaagtagttcttaatttaagttacctaaaagatgaaaaatacgaattacttgaaaatgaaatcaaacaaataaaagaagcaattggagataaagttttaaaagtaattattgaaacaaaagcgttagaagactatcaaaaagctaatgctgcgaaattggctgaaaaaagtggtgcagattatgtaaaaacttccacaggttttgtatcaccaagccatatttttgaaaatgttaatgacattaatattatccaaaaacatgcaccgacaattaaaattgaaatttatggtggaattaacaattataaattcgctaaccagatattaactggaggagcagatgtaattggtagtgaccaaggttatgaaattgttaaaagatataaagatttacgagaaaacacacaagtaaaaccaaaacctatcacattatag

SEQ ID NO: 7277 - DNA, 1674 bp, Methanobrevibacter gottschalkii
  source 1..1674: mol_type = genomic DNA
atggaaaaagcatgtcgaattataattaacgatattcttaacggtgaaatatctacacgacgtgatcttgaagttgcaaaaagacaactttgccgtgacttaaatttatctagatttatgagtaacgcagacatattagaatttgccaaaccggaagaaaaagaacttgtttctggaatattaaagaaaaaaccaactagaaccatgtccggtgttgcagttgttgctgtaatgtgccatccacacaaatgtcctcatggaagatgtttttattgtccggaaagtgacatagcgcctccaagttatactggtgaagaaccagcggcacttagagggagaatgtatgaattccacccatacatacaatgttttaatagattaaaacaacttaaaaaaattggacatcctattgataaagttgaactaatcattatgggcgggacatttccttcaagagacttatgttatcaagaatggtttgtatcacagtgcttgaaagcaatgaccgattttggtttaatacttgaaaataaaccaacaaattatgaatataatttagatttcaatgaaataagatcttttgaaaaaggtattttaaagacatatcctccgaatgattatgttttaataagtgatgttcaaaaagctaatgaaaactcaaaagtaagatgtgtgggaatgacattcgaaacacgtccagactattgtaaaaaagatcatattaatagaatgcttgatttcggagtaacaagagttgaacttggtgttcaaacattatctgatgacatatactccaaaataaaaagagggcataaaatagctgatgttattgaatcaaatcagcttttaagagattcggcaattaaagttgcaatgcatatgatgcccggtttattttcagatgaaaaacaagatttaaaaatgtttaaacaattattccatgatgataattttaaacctgacatgttaaagatttatccctgtcttgttaccaaaggaagtgaattatatgacttgtgggcggaaggcaaatatgcaccatataccgatgaggaagctgttgaattaattgtcaaaattaaaaaaattcttcccaaatgggttagaacaatgagaatacaacgtgatattccatcaacattaattgaagctggagttaaaaaatcaaatttaggagagcttgtttataatagattagatgaagagcacatcaactgtcaatgcatacgttgccgtgaaattggccataaaaaaacatcaaaacaatatagtttagacgaatttgagttatttaatgaaagttacaaggcatgtggaggagttgaaaacttcttatccatagaagatattaatgaagaaagtgttgccggatttttaagattgcgtttcccatcaaaagatcatttcagagatgaaattagtgataaaaccgcacttgtaagagaattacatgtttatggaaatatgattaaaataggaaacagaaacccccatataggccaacatacgggatttggagaacggcttctaaaagaagctgaaaatttagctattgataatggtaaagaagaagttgctataataagcggaattggaaccagaaattattatcgtaaattcggttatgaaaaagttggaccatacatggtaaaaaaattatataaaaacatttaa

SEQ ID NO: 7278 - DNA, 276 bp, Methanobrevibacter gottschalkii
  source 1..276: mol_type = genomic DNA
atgcaaattaaagaatttttaggatctgttgttttggataaaaatgcatatgaagtaggtaaagtaagtaatgttgaatttgatgcagcaactggaaaaattaatgagattactttaactttacaaaaaaatatcttttctaaagacgaacttgtaattagttttgacgatattgctactattggtgcttatgttatcctaaacaaagaaattccgaaagatgctgaatttgaagaagctgaagctgttgaagttgaaatcgaagaagataagtaa

SEQ ID NO: 7279 - DNA, 297 bp, Methanobrevibacter gottschalkii
  source 1..297: mol_type = genomic DNA
atggtttttgatgcaagagatattgaaattcctttaaattctcatgtcagatatgttgatactggtactatgggtgaagttgttgatgaaagaataactgatggtattggatgggttaaattaggtaaaactggtttatggtataaatcaagtcatgttgaattgttagcggaaaaggatatcaaaaaaagttcttggggtgctggtaaggatcttgatgttgaagatttaaaagagaaagctattagctttgaagaacttgaattatctagtgatgctggtaatggtggaggttaa

SEQ ID NO: 7280 - DNA, 2070 bp, Methanobrevibacter gottschalkii
  source 1..2070: mol_type = genomic DNA
atggaaaacctagatactgatattaaaaaaataatcaatagcgcatatccctacattaaagattttaatcctgctcaaaaagcagtgattgagtccggatatttagaagataactccaattacataatttcaatacctactgcaagtggaaaaactgttttaggagttttacctgctttaaaaaccatattgaatggtggaaaagccgtttatgcagcaccgctcctttcaattcaaaacgaaaaagttaaagaattcaaagcatttgaggaatatggcatcaatgtaggaaaacatccatcaagcgcagatttatcagttatggtttttgagtcatttgacgcacttacaagattttcctggaatgtattgagagaagtagatacattaattattgacgagttccatatgattggagagtattcaagaggcccaacacttgaagctgcaattacaagagctaagattataaacccaaatattaaaattatcgctctttcagctactttacgaaatattgaagaaatagaaggttggcttgacggaacgtgtgtggagcatgattatagaccagtgccattacataaagaagtattagatgcggaaatgtttaatacaaagaataaaaatgatgtgattgttaaaattgttgaaaaagcaatgaaagatagctcccaagcattagcttttgtttctacaagaagatttacagaaagtttagcgacatatgttgctaaaaaaattaataaaaaaatcgataaaaagcaacgagaaaaatttaaagaagttgctgagaaactattggacgttccaaagaaaaaaggatcgcttccaacaagcacttgtttaaaattagctgaatctgtagaattaggtgttgcatttcaccatgcaggtcttttcaatgaacaaaaagagatcattgaagatgaatttagaaatggaaatatcttaatgattacagcaacaccaagtttaatgtatggagttaatttgccatcaaaaactgttgtaattagagaccatacacgttggacaagtaatggaccgcaaccaatacctgtttttgattatgaacaaatgtccggaagagcaggtagaccacaatacgatgatgtaggttattcttaccttattgcaaaaacaatggatgaagctcaaaatttagaagagtattatgttgaaggagaaattgaaaaaacaaactcaaaattagtggataataaagatgcaatttataaacagattattgcccaaattgcttcttcactttcaaaaaatttagatgaacttgtagatttctttggaaaaacactttatggttatcaaatgaataataatccatcaatgtcttcttttgcagaatacactataaaatatgaacttgaaactgcattagaattcttacttcaaaatggaattattagagccacacctgaagggcttaaaactactgattttggttatttaattgctaaatccaattatgcagtagaaacagccgttaaaattaaagaatatatatcaaacatgaatgaaattaatgttgaagaatttatctatgcattatctgaaacaccagatttgccattaatttcatttaaaggaagaaaatcaaaagatcctgttagagacagattatctgaatgcggattatttgcaatggatattggtgtttctgaagcaacaacagtttcattaattgaatggattgatgaaagaaatgaatatgaaatagaaaataaatataatgtttattcggcatcaaccaggagatctgcttatgaagcatcccgtcttgtgaaatttgcaaaagatacttctgaaatcttaggagactattctaatttaaaagaatatgatatcctatctgctagattatactatggagttaaaacagacattattccattagtcattggagttaaaagacttggaagaaaaagagctagaaatcttgtaaaattgtttggaaacaatttaagtaacatttctgaaaatgaattacaaaaagttgaaggaattggtcctaaactagctgaaaaaataagattatttgtaaaaaattaa

SEQ ID NO: 7281 - DNA, 264 bp, Methanobrevibacter gottschalkii
  source 1..264: mol_type = genomic DNA
atggcaattaaagtagaagtattttcaactagtacatgtccccactgtcctgcagcaattgatgctgctatgaaagcaaaagataaattaggtaatgcaattgatgtagaatctgttaaaattgatggaaatatggataacagacaaagagctatggattatcaaataatggctgtacctactattgtaatcgacggtgaagttgctttcgtcggcgcacctgctgaatctgaacttattgaaaaattagaatctatgttatag

SEQ ID NO: 7282 - DNA, 1077 bp, Methanobrevibacter gottschalkii
  source 1..1077: mol_type = genomic DNA
atgacaaatgataattatacttgtgtaacaactggtacagtagcaactgcatgttctcttgcagcattagatgcgattttaaatactcctgatattgcttgtgtcaaagttgaaactcccaaaaaagtattgaatattatcattgatgaatgcaaatgcatttctaataataaagcttatgcgattgctcataaaaatccatataatgatcctgatgttacagtaaatttggatattatttctacagttgaattattggataaaaatgatgaagaatctaatgttattattactggaggggaaggtgttggagtaattacaaaaccgggtcttcagattcctgttggagagtatgccataaatccagttccccgtcgtatgattattaaaaatttgtctagtaaaatccctaaggggaaagtagctaaagtaactatttcaattcctgaaggtagaaaaatagcgaaaaaaactatgaatccaaaattaggtattgttaatggaatttcagttcttggaactactgggattgcaagatcaatgtcgagtgaagcttataaaaattcaattgttacacaaattgatgttgcaattgcttctgatattgatgatttaatttttgttccgggcaatattggtgaaaaattggcattgaaacaattagatgttaaaaaagaacagattattcaaactggtaattttgttggtttcatgtttgatgaagcggctaaaagaggaattgctaagtttactttctttggtcatattggtaaattaattaaagtcgctgggggcatttttgatactaaacatgctattgctgatggcaggcgtgaaataatggttactcatgctgcattatgtggtgtcgataaaattaatcttcaaaaattatttgattcaaaaacaactgatgaaatgatgtctattctggatggacttggagtttcagttgaagtttcaaatagtattgcatctgcaattcatgacaggtgtatgcaacgtttcgatttagatttaaatgttatattagttgacatggaaggtaattatttaaacaacaatttcattatataa

SEQ ID NO: 7283 - DNA, 1083 bp, Methanobrevibacter gottschalkii
  source 1..1083: mol_type = genomic DNA
atgaaaatagctatggtaggccagtttccgcctcatgttggaggcgttggtgttcatattcatactttatcaaaaaaattagttgatgaaggtcatgaagtttatgtgattacttatcctcacagaaatattgaagatattgatggaattcatgtcattggaactaaaggacttaatcttccgggtgttagaggtttaatgtttaaaatgaatgctaaaaaagctttagaagatcttttagaaaaagaagatattgatattattcatggacattatttattccctgcaggagcagcggctgttgaagttggaagagaacataatattaaaacatatgtaactgcacatggttctgacatgtttgaattatacaaaaaacagccatttatgagatctccgattaaaaaagttttaagagatgctgatggtgtttttgcagtaagtaatgctttaagacatgaaataatcgcaacaggtgttactggaattgctaataaaacaaaattatcttggaattctgttgatattaataaattttcatcaaagacaaatgatttatttaaaaaagaaaataaacttgaagataagccaatagttctttttgttggaaatttaattaaaagaaaaaatgttgattcactattggatgctaaaaaagtatctcaaagtgaatattatttggtaattgttggtgacggacctcaatttaaaaaattaaacaagaaagttgaagaagaaaatattcatgatgtgattttcaccggttctagaaatgatgttgaaaatattattccaagttgtgatgtactaattttaccgtcattttctgaaagttttggtttagttttaattgaagctttagcatgtggaaaacctgttattggaagtgatgttggaggcataactgaaattatcaatgatgatgtcggattgcttgtaaatccaaataaaatttcatctatagccaaagcaattgatacgattattcaagatgatgatttaagattggtgttttctcttaatgcacgtaatcgtgcatttgatttttcggaagttaccatcccctatgatgaggttaattga

SEQ ID NO: 7284 - DNA, 867 bp, Methanobrevibacter gottschalkii
  source 1..867: mol_type = genomic DNA
atgaagactattgttagatctccgggttcagcaacaataattaatgctattgcaacaggatttggttctgcatttggtattgatctggatataaaatgtattgctaaaacaacggataaaggaataacttgtctcaatgatgttggtgcagatattgggtttatggaactttgtgttcagagagtgtttaaccattataatattgatacttcagaatttggtattgatttaaaaacagaatctaatttaccaatggcatcaggattatcgagtagcagtgcttcatctaatgctattgttaaagctgtttcttcagttatttctgaggagtttaatttaaaacctcttgatgatttggaattaattaatatggcaattgacgcatcacttgaagcaggagttactataacaggttcctttgatgatgctactgcatcttattttggtggtgttgtagtaactaataataagaatagggagtttattattagggaaaaaatggaagagtatccggttttggtctatatgccgaattattattcaaaatctggagattcaaattcggacaggatgaaattattagcaccattagtggaaactgcttttgagtttgcatgtaataaagattattttaaagcactgaatctaaatggattgttatattctgcagctttaggatttaattcatcaatagctattgatgcattggaatcaggagcaatagcttcgggtttatctggaacaggatcatcttttgtagcagtttcaaatgaagatacaatcgatgatattatatactcttgggagaaatatgaaggtacggtaatagaaacaaaaattgataacgtaggttgtaagatattatga

SEQ ID NO: 7285 - DNA, 1272 bp, Methanobrevibacter gottschalkii
  source 1..1272: mol_type = genomic DNA
atgaaaaaaatatattcgatgcttttactgattgttatgctgtgcagcttatcaatagtttcagcctctgagaatctatctacttcagataatcctgttgtagtggataatgtggatatgtcatctaaaaatattggaagtattcctgatgttacatctgcatcaaatgatgttgtagtttcagaaaattcttcggttgaatggaaatcttatgaaaatgagaaggatgataatgtatcagataatcaatctaattcatcaagtaactcaacttcaaatggtagttataaagaggagtctgttgtaagtaatgttgtaacaaagaatgtttcatccagttatgggactgttgtgaactataatattaaagttcttgatcagtttaaaaaaccaatggttggtaagaccgtttcagttaccattggtaaaaagactgttgagaaaataactgatagcgatggaatggttacattcacactcaattgtcaagcgggtaaatatgtaatcaaatataaagttgataatataaacggttctaattcatatattgttaagaataagatttcattaactgtcttaaattggaatcttaaaggtgatgtttctaaaattaatttaattaaaaagaacatgcctaataatacttgggttaaaaaagctgttgcagcaactaaaaaaggtattcctttattaaaatttaagggtggaaaaggaaagattgttttcatgactgctggtgttcatgggaatgaattatcctcccaagttgcagcaatgaaaatgattaaatatttgtctgataatccaattagtggaactgtttatataatgccgtttgtgaatgttaaagcaattgctaaaaaagtcagatatacagataaagattataatcgtatagcttctagttctggaactataccaaataaaattgttaaattggttgtaaaatataaatgtaattcttatggggatttccacactacaaaacctggtggagctcctgggaaagatattgtaatgggatctaagagtttaaaatcaaaaagtgcagaccttactaactatattgctaaaaaatgtaaagttaataagagaatatatagtcatattggccaagaatatcctggagcattgtttgaaaatgttaataagaaagggattacttcagttatctgtgaagttgcacttccacataatactgtaacaacaaaaacagtcaaaacatcttttaacatgatgaaatatctattaaaatataattcagttatatga

SEQ ID NO: 7286 - DNA, 351 bp, Methanobrevibacter gottschalkii
  source 1..351: mol_type = genomic DNA
gtgatttttttgaatagaagttatgagataaaatcttttaaaaataaaaaagaagctgaagaacttctaaagaaatcaagaaaatctattgatgaaattgataatcaattatttgatttaatttctcagagaaccgctcttgccaaggatatagctagttctaaagaatatctggaaataccaatttttgataaatctagagaaaaagttattcatgataaaattaggcgattgtctgaagaaaaaggtcttgatgttgatattattaatcaaatagtggatatgttgactattttaaataaaaatgcacaaaaagaaattttaaggaggaatgttgatgggaaatattag

SEQ ID NO: 7287 - DNA, 198 bp, Methanobrevibacter gottschalkii
  source 1..198: mol_type = genomic DNA
atgggaaatattagaacttcatttgttaaacgtttagcaaaggaacttattgaaactcataaaggtgttttcactactgattttgaacaaaacaaaaaattagtacaagaatactccactgtaagtactaaacatttaagaaataaaattgcaggatatgtaactaggcttataaggttagaacaaactagagaataa

SEQ ID NO: 7288 - DNA, 1221 bp, Methanobrevibacter gottschalkii
  source 1..1221: mol_type = genomic DNA
atggatttgatagtagtaaaattcggaggaacttctgtgggtgatggttccaggattaaaaaagcggcgcagtccgtagtaaatgagtatatgaaaggcagtcaggtagtagttgtagtttcagctgtcaacaagactactgatgaactcattggattatctaatgatgctattggcactggtttaactgacaagcaaaaggcggaaattatggctatgggtgaattgactagtgctagattattctcagcaactattgaatctttaggtgtaaaatctgagtttattgatccttataataaattatggccaattataacagattctaattctttagaagctaaaatagatttaaatacttctaataagaaaactgaagggattaaacaacttgttaatcaaggggttattcctgttatctgcggatttttgggaaaagggcccagtggtgaaatcacaactttgggaaggggtggaagtgatataaccgcatttttaatggggcattgtttggatgcaaatgaagttgttattgttactgatgtagatggtgtaatgtcaactgatcctaataaaattgaagatgcagaattgttggatacaatttctgttgaagaattgagggatttagctactcatggtgcgcaagttttacatccgcatgcattaaaatacaaagatccattaataagtgcaaaaattattaatttcgctaatgaggatttaagttctaagggtactcgtattgtagggccttttgaaggcgaaatgttaaaatgtgttacactttataaagatcctatttcactcatagctattgttggagaagccatgcttaaaaaagttggtttaatggctaaattaactacagctcttgctgatgatggtattaatatttttggtatgtctgcaggtcaaaattcaattacagtatttgtaaacaaagttgattcaaataaagcatatcttttgttacatcaattagtaatcgatactgatgttttaagttctttatctcttggaagagatactgcaatgataacttttgttagtccggatattattgaaactccaggtattatatcagatattacagaaccacttagaaaaaataacattaatattttagaaattacttcctcacaaactgctgtcgtactgtttgttgattgggaagatggtgaaaaagcacataaattaattacagaggttttagaatga

SEQ ID NO: 7289 - DNA, 894 bp, Methanobrevibacter gottschalkii
  source 1..894: mol_type = genomic DNA
atgaattttgaaggaacatatgttgctatggtcactccatttacaaaagatggaacttttgatgaagaaggtttcaggtcaaatataaattatttaattgatcaaggtgtaaatggtttagttggtgcaggaactactggtgaatcagctactatgactcatgaagaacatcataaagtcattgaagttttagtagatgaagttgatggtaaggttgatacaatagccggaactggcagtaactctacatcagaggcattgtctctcactaaatttgcttgtgatgctggtgttgatgcagctttattaatcactccatactacaataaaccacaacagcatgctttagtaaaacattatggcactattgcagaagcttgtgatcttccaattattgcttataatgtgccatcacgtactggatgtgatattgaagtcgagactgctgttgaattggctaaaattgatggtgtggatgctattaaagaagctagtggtagtgttgacaaagtgtctgatatttatagggcacttgctaatgaagatttggaatctgagtttaatattctctccggtgaagattccttaactttgcctattatgtctgttggaggcactggagtaattagtgcatctgcaaatattgatgcaaaaagaatggttttgatggttgatagtattttgaatgatgattatacaagagcattggaacttcattatgaaatgttggaattaataagggctatttttgttgaaagtaatcctgtacctgttaaaactgcaatgaatttaatgggacttccttcaggtcctttaagagaaccattatgtgaaatgaaagatgaaaacttagaaattcttaaaatagcattaaaaaattctaatttaatttaa

SEQ ID NO: 7290 - DNA, 822 bp, Methanobrevibacter gottschalkii
  source 1..822: mol_type = genomic DNA
atgattaaagtagcagtaactggagctgctggaagaatgggctccggtattattaaaaagattacggaacaagatgatatggaagtagttgcagctattgaaatgccaaatactcctcttgcaggtaaagatgcaggtcttcaagcaggtattggggaaattggtgttggaattgttggttctgaaagactagaagaaacattaaaatcatctggtgcggaagtattagttgattttactattgctcctgcagctgtggaaactattaaaacagctacttcatgtggagttaatgtagttgttggcactactggttttacagatgatcaaatggctttgaatattaaaaatgttgaagataacaaagttggggctgttatttcatcaaatatggctattggtgttaatgtatttttcaacacattaaaaaaattagctccacttttatatgattttgacattgaaattattgaagctcatcacaatcagaaaaaagatgcaccatctggaactgctatgactgcatttgaagtaataactgatgcattaaatagaaatcctgaagaagttggagtatttggaagaaaaggtttagttggaaaaagaactcctgaagaaattggtgttcatgccatccgtggtggggatattgttggagaccacactgtaatgtttgttggtgaaggtgaaagatttgaagttaaacatcaggctcatactagggaagtatttattgcgggtgtaatcagagctgtaagatatgtgcctactgcacaaaaaggtgttgtaagtagtatgaatgatgttttaggtttagaatag

SEQ ID NO: 7291 - DNA, 1050 bp, Methanobrevibacter gottschalkii
  source 1..1050: mol_type = genomic DNA
atggtaaaagtaggggtacttggtgcaactggaatggttggtcaaagatttatccaattacttgaaaatcacccagattttgaggtcactgcattagcagcatcttcccgttcggcaggtaaaagatatgaggatgctactacttggtatttggatagtgaaatgccaaattctgtaaaagatattattgtctgtgaaactaatcttgaagatatggataatgatatagatattatattttcatctcttcctactgaatttgcatcaaaagttgaaaaaaaattcgctaaagattatgttgttgcaagcaatgctagtgcacatagaatgaaaaaaaatattccattagtaattccggaggttaatcctgaatatttggacatgattgatgctcagcaaaaggaaaataattgggatggttttattgtaactaatccgaattgttctactattgcattaactttaacattaaaacctattgtggataattttaatgtaaattctattagggtatcaaccatgcaagcagtatctggtgcaggttataatggagttccgtcaatggctattgttgataatcttgttccttacattggtaatgaagaagaaaaaatggaaagtgaaactctacatctgttaggttcttatgatggaaatgttgtaactaatgcggatttcaggttgagtgcatcttgtcatagagtgcctgttattgatggtcatactgaagcagtatttgttgagttggatgatgagtttgatattggtgatgttaaaaataaaatggcaaactttaaagcattgccgcaaaaattaaatctgttctcagctcctgaaaatcctgtcattgtcaaagaagaaaatgacagaccacaacctcgcatggatagaaatgcaggtaatggtatggctgttactgtgggtaggatgagaaaagataaaatattcgaaaatagctttaaatatgttcttgttgggcataatactattcgtggtgctgctggagcatctattttaaatgctgaattgattaatgataaaatactataa

SEQ ID NO: 7292 - DNA, 1158 bp, Methanobrevibacter gottschalkii
  source 1..1158: mol_type = genomic DNA
atggaattaggaatggatgttgaaaaagatactttacaatctttaattcgatcttgcttattagagcttaataaattaaaatatgatttaactgagcttgaagtggaaagggctaatgataacactccacaaaggattaaggagctagagaaagatattgttgataaagaaaaagaagtatctgtcattaaatttaaagcagaagatgaaattaatcttttgaaaaaacagctcggtgaaaaagatattttaattaaaaatcaagaagatagaatttatgaattggattatgtcaacaattctcttgatgaaattaaagaatattttgctgaacagttaagggactacaagaaaaaagaattggctgatgtaaatgaaagattaactgattcttttaaaagtattgctgagaaggaagctactattaacactctttcaagaactattgatgattataagattaaggttattaagcttgaaaataatgttgaatctcaggctcaaattttagaacttgaaaaacaattagaacttaaagagaatgaaattcgtataaaagatagtgaaattaataaaatggatggtgagttggataatttaaaacaacagaccattcctaaagatgaatatgttaatcttcaatctaaattcaaatctgaaattactgcaatggatgctgaaataactaatttaaaacaagaaactatccctaaaaaagattatgagcatcttcaatctaaatttgattcagaaattaaaaatttagataatcagattaatagcttaaaagaaaacactattcctaaagatgaatatgtttctcttcaaacaagatttgaaaatgaattatctgctcgtaatagtgaattagaatacttaaaagaaagatctattcctaaagaagattatttaactcttaaaactcaattacaaaatgaaataagttctagggagaatgagcttagatttttaaaagagcagactgtccctcgtgaagattatctcaagcttcaaaatgagttaacaaaaaaagatggtaaaattaaaagattggaagaaattaatgcattcttcaacgaacttcaagaagagcaagaggcttatgaaactcaagaaacaactcctcctttcagattagagaagaaacaaggtagataa

SEQ ID NO: 7293 - DNA, 1611 bp, Methanobrevibacter gottschalkii
  source 1..1611: mol_type = genomic DNA
atggcacaaggacaaccaatctttattttacctgaaggtactaataggtctgtcggcagagatgcacaaagaaataatattttagctggtaaagtattagctgaaaccgtaagaactacattaggtccaaaaggaatggacaaaatgttagttgacggacttggtgatattgttgtaaccaatgatggtgttacaatattaaaagaaatggatattgaacatcctgcagcaaaaatgctcgttgaagtagcaaaaactcaagaagatgaagttggagatggaactacaacagcagtaatcattgctggcgaattattaaaaaaatctgaaaatttactcgattctgacattcacccaactatcattgctatgggatacagaaaagctgcagaaaaagcacaagaagttttagatgaaattgcaattgatgatgttgattctgaaactttagttaaagtggctatgaccgcaatgactggtaaaggaaccgaagcagcacgtgaaccattagcaaaattaatcgttgatgctgtagaagctgttgctgaagatggtgaagttgatattgataacatcaaaatcgagaaaaaagatggtgctgttgttgaagaatctactttagttgaaggggtaattgtagacaaagaaagagtacatcctggtatgccttctgaaattaaagatgctaaaatcgcattagttaatgctcctttggaagtaaaagaaacagaagttgatgctgaaatcagaattactgatcctgctcaaatgcaagctttcattgaacaagaagaaaaaatggttaaagacatggttgatcaaattgttgctgctggtgcaaatgtattattcgcacaaaaaggtattgatgatttagcacaacattatttatctaaagctggtgttttagctgtaagaagggttaaaaaatctgacattcaaaaattatctagggcaactggtgctaatgtcattactaatttagatgatttaactgcagaagatttaggtcaagcaggcattgttgaagaaagaaaagtatctggtgaagaaatgatctttgtagaagaatgtagcggagctaaatctgtaactttattcgtaagaggaagtactaaacacattgttgatgaaattgtaagagcaattgaagacgcaattggtgtagtggctgctactgtagaagatgataaagttgttgctggtggaggagctccggaaattgcaatggctaaaaaactcaaagattatgcagaatctatctctggaagagaacaattagctgttaatgcatttgcagaagctttagaagtagtaccaaaaaccttggctgaaaatgcaggtttggacagtattgattctttagtagatttaagagcagctcaagaaacttcccactacatgggattggatgttttcactggtgaagtagcagatatgaaagaagctggtgtaattgaacctaaacgtgtcaaaaaacaagctattcaatctgcatccgaagcagctgaaatgattttaagaatcgatgatgtaattgcatctactaaaggtccagaagatgcaggtatggatccttccgcaatgggcggaatgcctccaatgatgtaa

SEQ ID NO: 7294 - DNA, 219 bp, Methanobrevibacter gottschalkii
  source 1..219: mol_type = genomic DNA
atggaaaatttaagttttgaagaaagtttagaaaaattggagagaattgttaacaatttagaaaatgggaatgtgccattagataatgcaattgatgaattcaacaatgcaatgaaattagttaaaatttgtaatgaaaaattaaatgcagccgaagaatcaattgctaaaattgttaaagaaaatggagaacttgtagaatttaatcccaccgaataa

SEQ ID NO: 7295 - DNA, 1257 bp, Methanobrevibacter gottschalkii
  source 1..1257: mol_type = genomic DNA
atggaaaaagaaactataacagtatctcaaattaattcatatatcaatagaaaattgaaaactgatcctaatttgaaaaatattcttattaaaggtgaaatttctaattataaatcttcttttagcggacatagttattttacattaaaagatgaaaaatctcaaatagatgcagttatgtttaaaggcaataaagatagatttcttaaatttgaaccagaaaatggtatgaaagtaattgtaaagggtaaaattgaagtttatgaaaaaacaggaaaatatcagttatatgctacaaaaattactgaagatggaataggaaatctacatcttgcttatgagcaattaaaaaagaagcttgataaagaaggattatttgataatgcacataaaaaagaaataccaaaatatcctaaaattatcggtgttgtcacagcacaaagtggtgcggcaatcagagatatcattacaacaataaaaaaaagatatccagtttctaacattttagtattttcaactttagttcaaggagaccaagcagcacaacaaattgtaaaacaaattaaatatgcacaagagtttaatatagatacattaattgttggtagaggtggaggtagtattgaagatttatggccatttaatgaagagattgttgcacatgctatttataattgtaaaattccaataatcagtgcagtaggccatgaaattgattatacaatatctgattttgtagcagataaaagagcacctacaccaactggagctgcagtacttgcagtaccagatataaatgaagttaaaaataacttaaataatctctcaaacagagcgaataaaaatattacaaatagaattaaacaaaataaaactaaattaacacatatttctgaaaaacagattttaaaaaatccagaatccatctatgaaatcaaaggaatgggtttagataatattgtcaataaactacattttatatcaaaaaacataattaacagcaacaaaacaaaactattcaaactagaaaattctattgttttaaaaaatccaattgaaataacaaaatctaaaagagatgcatgcttaagaaatattgaaaaattagaaattctaaatcctcttttaacattgaaaagaggttataccctagcaaaaactaatgataaagtggtttcatctgcaaaagatgttaaaaccggagaccaacttgatattgaatttgatgatggaattgtaaatacaaaggtgatataa

SEQ ID NO: 7296 - DNA, 231 bp, Methanobrevibacter gottschalkii
  source 1..231: mol_type = genomic DNA
atgagaattaaagaggaattatttggcaaagaagttctcgatgcagaaatccaaattgttggaaaagttaatgatgtgatttttgataaagatacttttgaaatcacagatttagtaattaaaaaaacaggattatcagaacaaattaaagctagtgaaaatattgtcccaatagaattagtaaaagttattggtgataagattttacttaaaggtgaagatgatatttaa

SEQ ID NO: 7297 - DNA, 528 bp, Methanobrevibacter gottschalkii
  source 1..528: mol_type = genomic DNA
atggtttctagggaatatttaattaatttattaaaagacaataatgtatttcttgaaggtgattttacattatcttctggacagaaaagtaattattatattaatatgaaaaaagctattacggagcctgaaattctttcaactatttcaaaattaattacttctaaaattgatttggatgatattgataaagttgcaggtcctgcattaggtgcagttccaatagctactgctgtttcattggaatcaaaaattccgttattaatgattcgtaaagaaaagaaaggttatggtacttctaaattaattgaaggtgaattaaacgaaggtgataatgttattgttgttgaagatgtttcaactactggaggatcacttttaaaagctattaaagctattaatgataatggtggtaatgtaataagggcatttgttgtagttgaccgccaagaaggtgctattgaaaaatttgaaaaagagggtattaaattagaacctttaataaatgttaatgaattttttgattaa

SEQ ID NO: 7298 - DNA, 507 bp, Methanobrevibacter gottschalkii
  source 1..507: mol_type = genomic DNA
atgaaaagtaaaacaacaattgaacatcaaaaaatgtcatccaatgacattacttgtggtgtaatcactctaagtgatagtaggaaatcaaaaaaagtagatttatctggccaatatatggcagaagaaattgaagctagatacactttaaaatctagaagtttaattccagatgagaaagaagatttgattaatactattgaaaccatgattgatgatgatattgatgttattttaacaactggtggaacaggtcttgattctcgtgatatcacagttgaaacagtggaatcacttttcgagaaaaaacttgatggttttggagaaatgtttagagcaaaatcttatgatgaaattggtgctgcagcattactttcaagagcaacagcaggaatttacaaaaaaacagttatattttccatgccaggctctcctaatgcagttaagactgcatttaacataatcattgatgaaattcctcattttgtccatcatgttaaaaaatga

SEQ ID NO: 7299 - DNA, 339 bp, Methanobrevibacter gottschalkii
  source 1..339: mol_type = genomic DNA
atgttcaataccgagttaatttcaaaaatgggtaaaatcaaagataaaaaactttcgaatttattaattggaagaaaaggtggtgcaactacaattaaaataaccgatcaaatattgcaccaacctagcaatgcaaatcaattatcgaaaagactgcacttagattataaaacaataacatatcacttaaacatcatgattgaccacaaatatgtggaaaaagaaaaaattactaatagctacatatattaccctagcaaaaaattatataattgcatagaagaatatagtctaataaggaattttcttaaaattgaatatgaaaggtataaaaaatga

SEQ ID NO: 7300 - DNA, 801 bp, Methanobrevibacter gottschalkii
  source 1..801: mol_type = genomic DNA
atgaccaatattcaaaccaagaaagaattaaatgaagaatataaaaatgtaaaatacattttaacctcaagtatgagaactaaattactcttagcgctttatgaacattcaaagaaattagaagaaataagaaaagatctgaaaaaaccttcagcaacaatattgcatgggcttaaagagttggaaaataagaatttaattcggaaaattcaaaaacactatgaattaacttcaaatggatatattctaacaacaaatatgataaagttaattgaaaattggtattctataaataaaagcaaacaattttggaataagcatgatttatcagacatcccaaaagaaatgttaaaagacatttatttattaaaaaatgttgaatatgagacctcaacaacaagcgacctatcaaatgcattcaataaatatatcaaattacttttaaaatcaacagaattaaaaataattctaccaatatactctgaaaatcattttaagcacatgatagattttttaaataaacatgaacaagcaaaattggagttaatagtcaatgaaaagattctaaattcaatcaaacaaaacaagaacttagaaagaaaattattagagaatgaaaaggtgatagttaaatgcatcgaacaagatttaaagttatttttaacctgttcagataatttcatgtcattaacattgttcttaaacgatggccattatgatgattctcaaattttaatcgggaaagacaaaaatgcaataaaatgggctttaaatttaattcaatgcttttcacataactaa

SEQ ID NO: 7301 - DNA, 792 bp, Methanobrevibacter gottschalkii
  source 1..792: mol_type = genomic DNA
atggatattcacaatgaaattaacaacaatatcaaatttcttgcaaaatcagaaattcgactgaaaattttaagtgagttgcaaaatagccctaatagtgtccatggactcgttaaaaaaactaaaataacatatagttctgtatcaagcaacatcaacaaattagagcagaataactacattaaaaaaataaagtcaaaatattatctaaacccgatgacaaaaatatattttcaaacattaatggattttaaaaacagtgtagaaataataactagttatagtgaattttgggacaaacacaatttaaatcaaataaatattgactcattaaaaaatattacagatttgaaagattcaaaattaattgaaacaacaccacttgatatttataaacctcacaacaccataaaaagtcaaataagtaactcaaaatcacttaaagcaatatttccatacttacatccagaatatcctcaattaattgaaaatatattaaaagataatggacaagttgaactaataatcccaaaaagtatttccaatgcaattacatcaaagattgatttaaaaaccagaaaaactgcaatcaaagagaaaaaattaacaatttatccaattgaaaataatttaaaaatatatttaaccatttgcgataaatcaatgagttttggactatttaaaaatgatgaaagtttcgatcagaacagaatattaatttcggatagtgaaaaatcacaagcgtgggcagacaatttatttaaaaatatcaagtatgatgtgataaaatga

SEQ ID NO: 7302 - DNA, 507 bp, Methanobrevibacter gottschalkii
  source 1..507: mol_type = genomic DNA
atggaaatttgttatatattagatgcctccgcttttattaatggatttaaattagattctaacaataatttcacggttcccgaaatcactgctgaaattaaagattttgaatctagattaatgtttgacatggctattgatgagtgtaaattaactatacaagatgtgccaaataaatatacaaattgtgtcaataagattatatctgaatcaggtgatattttaaggttgtcatttcctgacaaaaaattaatagcattggcgtatatgttttcaaaggaaggtaggaatgtaaaagtcattagtgatgattatactattcaaaatactttaaaaattatgggtattccttattcgggaattataactgagggaatcaaaggaatttacaattggaaaaaagtttgtgaaggatgtaaaaaggaatatgatgatgattatccttttgatgattgtgaaatttgtggatcgaaaatatataaaaaaaggattaaggtgagcaaatga

SEQ ID NO: 7303 - DNA, 1116 bp, Methanobrevibacter gottschalkii
  source 1..1116: mol_type = genomic DNA
atgagaattggtattgttgttcatggtccaaatattattgattcaggttatgctttaaaacttattgatctacttaaaaattatggtaatatttcagtaagacttgggggaacaatgggtcgcacagcggttattgatgctagtttggaaaatataattgatataactcgtaaattagtgcccagtgattctttaaagattttctctgatgagggtgttgatttgatttttttacttaactatggtaaatccaatgttactggacaagttttcggatataaggtgtataaccattatgctgataaagtaactgaaaataatgttccagttattcaaattgaacgacctggtgaagaagatggtagcattattccatggaataatgatttggatattgttcatgatttatctaaaaaattaaacttggctattgtatatccaaatgaagtctatgaaaatcatattaaacaggataatgctaatgttaatcaaagaattgttcatggtgtaagtcctgatgaaaatatcatggttaatagtgttgtcattggtaaaactaactcggataaacttacattaatagctcgtgataatcatatcgttgatattattggaggggagttaaaacagcatggtcttgaaaaattaggtgaagtggatttggattctgcaattgtaaaaaccggtcttttaagacatgcaaaagttacaccaagagttatttcaactaataaatctaatgattataagattacttttttagatcatgctggtgaggatgtatataaatttagagattcttctttggtaattactgttggggatgatacaactttaatttcttcggatattctgtataggtttgatatacctgtaatcggaataactgatggagatttagataaagttgtggaagatggatttaaggttaaaaattccattatcttcgaagttgaaaggggttttgatgatgttgtgggaagagatattaaaaggataatgtttgatggcgcacaggaatcatttaattatttaaacattgaggaagttcgagataaaatcattgaaattataaataatattaattgtaaatacaaaataagttatattgaataa

SEQ ID NO: 7304 - DNA, 975 bp, Methanobrevibacter gottschalkii
  source 1..975: mol_type = genomic DNA
ttgaattttaaaaatcttgttaaagaaattcaagagtttaaaggagtgtctcgtaaaagttctattaataatgtaatttctcttttagaggagtcatataatgtttcaggtgatgttgtaattgaaattggtgatgatgcttcagctattgacattggaaataatcaagtaatgcttattgctgctgacggtatttggggagatattatgaatgtaaatccctattgggctggatattgttctgttttagtaaatgtaaatgatattgcagcaatgggtggaaaaccgttggctatggttaatataatgtctataagcaatgatgaaatttatgaagatttattgaaaggaatcaaagacggttgtttgaaatttggtgttccaatggttggtggtcatttgcatcctgatggtgaagttgactctttgggagtagctattgtaggaatagctcaaaaagataagattataacaagttttggagcagaagttggggataaagtaattgtagcaattgatcttgatggaaaacctcatgaaatgtttaatttaaattgggatacaacttatgataaggactcacaacttgtaagggatcagattactgctgttcaatacttagccgaacatgattatattaaatctggaaaagatatttccaatcctggaattttgggaacattggaaatgctattggaaacatctaaaaaaggagctattgtcaatttagaagatattccgagaaatgaaactcttggttgggcagattggctcagatcatatccaggttccggatttgtttttacagcagatgaggataaatgcgaatatattagagagtatcttgcaaaatattcgattgaagcagctgttgttggtgaaataaccgattctaatagtctttatttgaattatgcagatgaacaagctgaaattttcaatcaagataaaaatccagtttttatttttagataa

SEQ ID NO: 7305 - DNA, 741 bp, Methanobrevibacter gottschalkii
  source 1..741: mol_type = genomic DNA
atggcaattactaaaaaacatgttttttcattactaataattttaataattgcacttggaactatttctatatctagtgcttatgtgggaaccggtttttcacatgatattcccacatcaaaatatcatgatttatcagcttcagatattctgaataaatataacacgacaaattgtcatgtagaagaaaatggtgtctgcacaaaagttgttgatggagacaccatctatttagataacggtaagaaaatacgttttgttggagtaaacacccctgaaagaggagttgaaggttacattacttcaaaaaattttgttcaaaaattatgcttaaataaaaaagtaggtcttgatatcgatgattcaaaatttactgacagatatggaagaacattagcagttgttattgttgatggaaaaaatgttaatgaaatgctattaaaggaaggtcttgcagaaataatgtacatgcctcctagtgaattcaatccatttgagtggggaaccaccaatacacatgtagatacaacacacagttcatcttcaacaacacatacaagtacagaatccacaagctcttcagattctgcaaaatatattggcaatgcaaacactggaaaattccacactgctggttgtagtagtgttaatcatatgtccgagcacaataaagtatttttttcaagcagaactgatgcaataaatcaaggatatacaccatgtgaaatatgtaatccttaa

SEQ ID NO: 7306 - DNA, 1548 bp, Methanobrevibacter gottschalkii
  source 1..1548: mol_type = genomic DNA
atgttaattaaaattaatggagaagaaatggatgtggcagaagcttccacaattcaggatgtaattgaggaaactaatgctccatatactcctggtagtattgtttgtttaattaagggtaaaaaagaacttgaaaaaaatattagtaaatataaaattagaactaataaaggctctattgttatccaattagacgaatctgatgaagccaaaccacttgtggatatttggaaaaatcagtatgatgaatttgttgatttaaacatcagatggtctactacaactgaggtggctattggtccaattgtaactgatttggaaccaacttcagaagaatacaaatattacgaaggagatgttgttttaagtttatctagttttagtaatgagtctactcatttaatattgcttaaagataataccactaatgtctatagtgtacctccatttaataagggtatttttgctcgcgttattggtggtaagaaaactttagataacttaactgatgacgattcagtaagtagtattgaaccaattattgagagaagcacaacaaaggatattgtatcagtatctgatttaactactgttttagaagaaggcaatgaattgtatacttacatgtcttttgatattgatgaagaatccccagtttgtgtggaacatttatttgcacttataaaagatggcaaaatgaaggtttcatatgaaagtgaatcatttttaggtttttatgaactagccagtcttgaaaagcctaaagagcatgttacaaaaagaaatagaggaacaatcactgttagaagtgatggtgtaggtgttggaaaacttttcatctatcgtgaaaatagagtgttatctccaaatcacactactgttggaaatgtagtgaagggtatggaacttattgatgctgcaaaagaaaatgaatttattacagttaaagctgaacaaggtaggttaatgttgttaaataaaactcaagctgaggctactgaaatgctttctgctgcaggtgttgaacatatgatagatggacttgttgatgataatgctattattgttgagcaaactcctcaacatacaattgatatcctaaaagagggtaaagttattactaaagctattaataaagatgatttatgcacaattaagtttaccgataatgctccaagatctgtaaggtactttaaattactgtctggtcttttggaaaatcctgtaggtcaaattaaaattcactttgcagtaccgggaatgcatattgtcatttttgaaggggataaaaaagcagctaaaggtttagtccctgaaaataatcctgttgataaagttataaggggtcaaataggaattactaatatggcttcaaaaagtgctggtttgattggtattagatttgaagataattctgattttggaccgactgctgaaacttttgatgcgacaaatataattggagatattacttctgattatgattatcttgaaaatttaaaagaaggagttgtggtgtatgttgccgaatctaacaatgagtcctaa

SEQ ID NO: 7307 - DNA, 474 bp, Methanobrevibacter gottschalkii
  source 1..474: mol_type = genomic DNA
atgttgccgaatctaacaatgagtcctaatttgggtacagaagattgggatcctgatgtaattactcgtatgatttttattggacctggagcacatgtaagtgaacagcaagttgttaatgagtttcatatgcttggtttgccacttactattaaaaatacttgttatggatctatgattagtggaaaaagtgaagatgtttataaagctattaaagagattagaaaacttgaccctagccacatttttacaaaagaaagaggatttgcaccaggtgatcctagaaggtgtagaggtcatagatttggtccaagagaaggtttccaccagatggaaaaagagtataagatacttggttttgtttcagaggctctggaaaaccctaaagaagttgaaattgaagagaaaaaaccaattgatgttgacgaatttaaaaaaatcatgaacaaatgtttagataaaaagaataggtga

SEQ ID NO: 7308 - DNA, 456 bp, Methanobrevibacter gottschalkii
  source 1..456: mol_type = genomic DNA
atggttaaaatcgctttatatcctccaaattcattaattttagcagatttattagaaaggaaaggtcatgttcctttagttcttcaaaaacaaattagacaaaaaattaaggatccggagattgattctccaccaatgaatattactgaagaagatcctctcaacggacttaaatatgctgcaatcgaagttccttcaggagtacgtggaagaatgtctcttattggtcctcttatagatgaagcagaagcggctattatagttgatggtgctccatatggttttggttgtattggatgtgcaagaacaaatgaattatcaatatttttacttaggaacaaaggtattccagttttagaattaaaatatcctgataatcaagatgaaacttatgttatggtgaatgcaattaatgaatttgtagattcacttgaagaaactattggggaggaataa

SEQ ID NO: 7309 - DNA, 1242 bp, Methanobrevibacter gottschalkii
  source 1..1242: mol_type = genomic DNA
atggtaaaaattgctttagtttcatgtgggacagaatatagtgggattcaaaaagaaattgaaaaggcagcaaataaatttggtgctgaaattattcttcctgaaattgatttagattacattgatgaatcttatgtaaaattcggattttcagctcaaagctcaagtttaaaattgatgattgcaagagcaatggctattgtggaaggtagatgcaggcctgatgccgtatttattgcaacttgttttagatgtgcagaagcagcactagtaagaaatgaagtaagaagattcatacaaaataatacacgtattccagttgttacttattcatttactgaaagaacaaaggcagatgaattatttattcgtatggaagcattggctactactgtaactcgtagaaatattcttgctcgtgaaaaacaagaaggtcttactcttggtttagactcaggttcaacaacaacaaaagcagttctcatggaaaacaataatgttattgggactggttggacatctactaaagatatcattgaatctgcaaatattgcagctgctgaggcatttgaaggtactggttatacctgggatgatattgatggtattggaactaccggttatggtagatttacaatgggtgaaaaatttggtgctgaacttgtccaagaagaattgtctgttaatgcaaaaggtgcagtatatttagcagattgtcaaaaaggagaggctacagtattagatattggtggtatggataacaaagtaatcactgtaaacaatggtattcctgataactttactatgggaggcatttgtgcaggtgcatctggaagatttttagatatgacttcccgtagattagatgtagatattactgagttaggtcctcttgctgtacaaggtgattggagaaatgctatgttaaattcatattgtattgtatttggtattcaggatcttgttactacattagctgctggtggttctaaagctgatgtggcggcagcagcatgtcattccgtatccgaacaggtttatgaacaacaactccaggaaattgatattcgcgaacctttgatacaagttggtggaacaagtttaatttctggtcttgttgaagcagtaagtgaaactttaggtggaatcgatgttattgtacctgaatattctcaacatattggtgctgtaggctgtgcacttttagtatccggtatgggacacagacaagatgataaataa

SEQ ID NO: 7310 - DNA, 561 bp, Methanobrevibacter gottschalkii
  source 1..561: mol_type = genomic DNA
atgctagttgaatgttatgatgagagaggtgcagaggtttatgaaatcatcattaaacagatttttcaagatctggttctaggttcttctgttgatgatttgaaagcttatgtgaatccagatgaccctgtatttgttttggctattaaaatgagaaaaacttctaatgttattaagtttgaagatgttgctaatttaatgtataataaacaaaacgatgttacaacaattttgattgataatgagaattatcttcccaatattcttaaagaattatggaaaagattttcaagagatgaaatctatcaaccaaatagatatcagcttgaaattaaaggggatttcactgagttaggatctattgttgtagatgatcctcattctaatttacgaagacgtatttatgatgcagtattccggatattgcctgaaggatttaaaatcattaaagatttgtctactgaagatattgtgactgttgtagctactgatgagttaattaaagatgcatggattgaaaaagctctggaatttattgatgagttgaacaaaggtatttag

SEQ ID NO: 7311 - DNA, 867 bp, Methanobrevibacter gottschalkii
  source 1..867: mol_type = genomic DNA
atgaatgaacacaaaggttcaagatttgcacatattacaagagcacatccatgttttaatgaaaaaatgcatgataaagtcggaagagcacatgtgccagttgcaccaaaatgcaatatcttttgtaatttctgtacaagagatattaacaacgaagaagacagacctggtgtaacaagttgtattatgcagcctgatgatgcaatcaatcatattaatgatgttactgcagatggtccaatttcagttgtaggggtagcggggcctggagattcactagctaatgatgaaacatttgaattctttgaaaaattagctactgaacaacctgatttaattaaatgtatgagtacaaatgggcttttacttccaaaatatgcagatagacttgcagaacttggagtgaattccgtcactgttacaataaatgcgattgatccggatattgctgtagacatttattcatttattaaatacgaaggaaaagtctacaaaggttatgaagcagtggaaattttaattaaaaatcaattagaaggtgttgaaaaagcagcagctaatggtttagtagttaaagttaattctgttttaattcccggagtaaatgatgaacatattgttgaaattgctcgtgaagttgaaaaacgtggtgcagctttaatgaatattttgcctttgattccgttaggaaaaatgaaacatttgcaaaggcctgactgttctatgatggaaaaagtcagagaagaagttgaagaaattatacctgtgtttagagcatgtactcaatgtagagcggatgcttatggaattccaggtaaaaaaagcgaagaccatcatttaggaatgactccacaaagtcattactaa

SEQ ID NO: 7312 - DNA, 921 bp, Methanobrevibacter gottschalkii
  source 1..921: mol_type = genomic DNA
atggttaaaacttatgtttttggacataaaagtccggatagtgattcaatcacttcaagtttagtaatgactaacttagaaaaggaattaggtaatacagaagttcaagcttataggttaggaaatatcaataaagaaacagaatttattttaaattatttagatattgatgcacctgagcttttagaaaatattgaagatgatgctaatgttattttagtagatcataattctccttccgaatctgttgagaatttagaaaatgcaaacattttaaaagttgttgaccaccataaattagctttaaaaacttcatatcctttgttcttaagatttgaaccagttggatgtactgaaactattttatgtaaattgtatgaagagaacaatgttgaaattacaaaggaaatggctacattaatgctttcggctattatttctgatactttacttttaaaatctccaaccactactgaagatgataaaaaagctgttacaaaactttctaaaattgctgaaattgatgtagaagaatatggtttaaaaatgcttaaagccggaactgatttgagcagtttttcaattgaggagattttagcattagatgcaaaacaaattgattttaaaaatgtaaagtctattgttaatcaagtaaatactgctagtattcctgatgttttagaaatgaaggatgaattagaagaaggtatgaataaaattattgaaaaagaaaacttagatttgttcatgcttttaataactgacattgtaaatagtaattcacaagttattgcacttggaaaaaatgctgatcttgttgaaaaatcatatgacattaaacttgaagacaacatggttttacttgaaggtgttgtttcacgtaaaaaacaagttgttccaataatgactgaaaacgcataa

SEQ ID NO: 7313 - DNA, 930 bp, Methanobrevibacter gottschalkii
  source 1..930: mol_type = genomic DNA
atgaaaacacttgaatgggaagataataaactaaaacttattgatcaaacaaagcttcctgatgaattaacttatgtttattgcgaaaattatcaggatgttattatagcaattaaagacatgatcgttcgtggagctccagctattggggtttcagctgcttttggaatggcacttgcagatattgaaggtgttgacttaaataaagctgctttagaaattaaaactgcaagaccaactgctgtaaacctattttgggctgtggatagagttttaaatagtgatgatgcattaaccgaagcattaagaatgtatgaagaagacatggcaacaaatagggctattggaaaatttggttctgagattattgatgatggggatactgttttaactcattgtaatgctggtgctcttgcatgtgttgattatggaacagcacttggagtatttagagcggcacatgagcagggaaaaaacattaatgtaatctgtgatgaaactcgtcctcgtggacaaggtgcaagcttaagtgtatgggaaatgcaacaagagaatattcctgttaaattaattccggatgttgcttcaggatttttaatgtcacagggaaaaatagataaagtggtcattggtgcagataggattgctcgcggaggtgttgtaaataaagttggatcatttatggttgctcttgctgctaaacaccatgatattccattttatgtagctgctccatattctacttttgataatgatatttctatctttgatactgttattgaggaaagggatggtgatgaggttagatattatggtggtgcaagaatttgtccaaaaaatactgaagtaattaatcccgcatttgatattactccaaaagaattaatcacgggcattatcactgaaaaaggaattattgatccgatttaa

SEQ ID NO: 7314 - DNA, 447 bp, Methanobrevibacter gottschalkii
  source 1..447: mol_type = genomic DNA
atgaataaaaaaattgtaatattggttattgttgtaattattgctgttttactattatttttagtttatgctaataatgattcttcaagtaattcaaataggactattttaaatgtgtcttctgaaggtccaattgagctttctaaaataactgatgatattaaaaacaattcctattatgagggatatgatgttgaaactttaagatggatggaatcattaggggataagtatgttttcaaatcaaatgatgaaattgtaattatggataagtgggatgcagacaaaattccttccgcttatgtttgtgatgcttatttccgggagatattttcatgcaatgttttggagaatcgtacattaggtgatggaaatcattttaaggatgttctatttattaagaatgttgaattcattgatgaggaagtgcattatattcaaatttaa

SEQ ID NO: 7315 - DNA, 999 bp, Methanobrevibacter gottschalkii
  source 1..999: mol_type = genomic DNA
atgaaatgtgtaaaagttccattaagacaattaaatgatactcgtataaaattaatggaaaatggtttaatgaatatggaatataaaataaaaactgatgataaatggggatatattccagtaaatgaatatgttaacgattatgaaattgttgatgttgaactagaagcaatgaaaaaatttccacataattttgctgaattactcaaagatgagttaagctctgaagaaattgaaaatttaaggacatcatttgacacaattggagatattgtaattctagaaatccctgaaaacttacaagataaaaaacagataattggagatgccgcacttgagtttacaaaaagaagatcaatttacatgaaaaaaagtgcagttaaaggaacaacacgtgttcgtgacttagaatttttatcaggagtggatgatacagttacaattcacaaagaacatagtgctagattaaaattagatgttcgtgaagtttatttctcaccaagacttgcaacggagagaaaacgagtgatggaaagtgttgaagatggtgagaaaatcctagatatgttttgtggaattggaccatttccaatagtaatagcacacaataaaaatgttgatattgttgctgttgacattaataaatctgcaatcaaatatttggatgagaacattaagttaaataaattgaaaggtaatgtaaaaacttattgtggtgatataagacaagttagtgatgattttaacttaaaatttgatagaataattatgaacttgcctggccttgcttatactttccttgatgttgcagttgatttaattgaagatggtggaataattaattattatgagttttccgattcatatgaccggggcgtgaaacgtttaactgatgcctgcagtgcagttggaaaaaaagttgatataattaattgccgtaaagttaaatccacatcccctggagaatggcacatatctattgatggaaaaattaactaa

SEQ ID NO: 7316 - DNA, 792 bp, Methanobrevibacter gottschalkii
  source 1..792: mol_type = genomic DNA
atgttttatttagtgggtttaggattattcgatgaaaaggatatttctttaaaaggattggaatgtttgagaaatgttgataaaatttatgctgaatttttcacttcaagactgtttggttcaaattttaacgctattgaagagttagttggtcaaaaaattgaaattttagttaggggagaagttgaagaggaaagtaaattcattgaagaggctaaaacacaagatgttgctttgattatgggtggcgatcctttaattgcaactactcacagtgattttttagttcaatgctctaaaaaaggtattgattatgaggttattcacggttcatctattttatcttctgcaccagccatatcaggtcttcaaggatataaatttggtaaagtaacaacaattccttttccagattataatttttatccaaaatctccttatgaagctattgaggaaaatttaaaaatggacttgcatactttggttttacttgacattcaagctcataaagaccgttatatgactgttaatcaaggtttggaatatttgatgaatattcatgatacgttggatagggatggtttgattaatgaaaatactttagctgttggtattgcacgtgtcggctcaaaagatgtttgtgttaaagcaggaaccataaatgaattaattgatttcgactttgggggtcctcttcattgtattgtaattccttcaaaacttcacattgtcgaagcagaatatcttgttgaaattgcaggagcaaattctaaacttttagatattgtttaa

SEQ ID NO: 7317 - DNA, 516 bp, Methanobrevibacter gottschalkii
  source 1..516: mol_type = genomic DNA
atgtgcagtatttacaatatttataattgtttatataaactatatttgatgaaatttgaaaaaacaatgggcttttatgattcaaataggatgggagatattctatttatattccacaaaaatcataaaaaatatctgaatgatgagctttctaaatataatatgagtttgatacatgctctttgcattataatgattcatgaaagtgatgaactaaatcaaaaagatttatctgatggtttgcatttaacaaaaagtgcaattacaaaagcggttaaaaaattagaggatgagggttggattttacgtgaaagatctattgaagataaacgtcattttattttaaaattaacggacaaaggcaacgattttattccaattatgaatgatataaataaaaaatgggagtctgaaatggggttatatgagttagatccaaattttatgcaaatatttaatgaattaactcatcgggctattaatttaaatttaaaaaaagaaatgaaaaaggattaa

SEQ ID NO: 7318 - DNA, 936 bp, Methanobrevibacter gottschalkii
  source 1..936: mol_type = genomic DNA
atgagtataaaaaaagtcgttgtcgcaggcggaggagtactcggtagtcaaattgcacttcaaacagcatattgcggatttgatgtgacaatttggcttagaagtgaaggatcaattgaaagagctcaaccaaaacttgaaagatttaaaaacatctatgttgacactcttgagaaaatgaaaacagatgcaagtgcatactgcagaggtttatctaaaaaagcagatttaagttctgaagaattagatgctttaaaagaacaagcgcaaaatgcatatgatagtttaaaattaacaacaagttatgaagaagcagcaaaagatgcggatttaattattgaagctatctctgaaaatccagaacaaaaaattgcattttaccaagaattagcaaaacatatggaagataaaacaatacttgtaacaaattcttcaacattgctcccatcaatgtttgctgaatatactggaagacctgaaaaatatctttcattgcactttgcaaacacaatttgggcaaataatactgctgaagtaatgggacatcctggaaccgagcaaaaatactatgatgaagttgttaaatttgctgaagatattaacatgattcctttaaaacttaaaaaagaacaaccaggttatatcttaaactcacttttagttccattcctaaacgcaggacaagcattacttgcaaatgatgtagcagatcatgagacaattgataaaacttggattctagcaacaggttctcctgcaggaccattccacattttagatattgtaggacttgaaacagcatataatattgttattatgaatcctgaatcaaaagatcctgaaactacccctggaaaaattgctaaaatgcttaaagaaaaaattgatgcaggtgaaactggtattaatgctggaaaaggattttatgaatattaa

SEQ ID NO: 7319 - DNA, 525 bp, Methanobrevibacter gottschalkii
  source 1..525: mol_type = genomic DNA
atggtaaggcctagaagaatgagaagagttgttgaatgtcataagtataatttaaatgaaaatcgaaaaccaattgagttgtctgtagatgaattcgaagctattaggtttaaagattatcgcaacattaaacaaattgatgctgctgaatttatgggcatttcacaatccacttttcataggattttaaattctgcaaggcataaattagctatctcattgatcgaaggtaggagaattgttgtagttagaggtgatactatgattgatcaaaataaatatttgtgtaatgactgtggatttcaatggtcaaatcctgaaaagacttatgaaaaatgtccagattgtggttcaaagaatatccaaagattgaatagagataagttaaggggcagttcaccagataaatgtagatgtcctgaatgtggttatgaagaaccaaaagttaaaggtgttccgtgtagaactaaaatatgtcctgaatgtggttcttcattacagggaagaggaatgtgtagaatataa

SEQ ID NO: 7320 - DNA, 285 bp, Methanobrevibacter gottschalkii
  source 1..285: mol_type = genomic DNA
atgaatgataatttaaaatacaactgtaatgaatgtggatttacatggattaccttaaatggtcaacattccatatgtcctaaatgtcacagtgaaaaaattgaatatttgggtgaagttgaagatttagatataaattctattttagaacacaacaaaagaagagggggatgttgtgggtccgctcgtggaaaaggaccactaacatgtggaaaaccttaccctgatcatcatgatccaaatattccacatgatccatctagatgttgcggtcataatgaataa

SEQ ID NO: 7321 - DNA, 231 bp, Methanobrevibacter gottschalkii
  source 1..231: mol_type = genomic DNA
atgaatcatgtaaaaactgtaaagaacgaaacaaatgttgctcagcctcacaaacacacagaaccatcacagaatacggatcataaaatgcaaaaagcaatgaaccaaaaaatggaaaaaaacaggaatataaaagacgaatatactaaaagatcaagcgttgaagaacccattttggaaaatattaaaagaacaattccaaatagaaaaagaagtagtcatcggaaatga

SEQ ID NO: 7322 - DNA, 918 bp, Methanobrevibacter gottschalkii
  source 1..918: mol_type = genomic DNA
atggataatgaggaattaagaactgttagagtttatactaaaaaatatactagtaaagataaagagggaaatattgttgaaaaagaatctcaacaaaaacaagtaagtcttaaaaaagaagatccttttgaagataatgatttggtaaaagtattggcaaaaagggaatatgaatcattacttgataatcaattttctgattcaaaacttgatgaattttataataggcttgaagcaaaagatgctgaaattgaaaaattaaacagtcagattcaaactcttaaaggatcattttttgatgatgttaattctcttaaagaacagctcacttataaagatgaacttttaaacgcaaaagatgaaattcataaattaaataagaaaattactaaaattgatgatgaaagagtagctatttttaaagaattggattataaaaataaaatgattttagcttataatgtcgagttaaataaatctattttaaatgctataaatgttgttattgatgaggcaagagataacattaacagaagaaacgctcaacttgttgaagacttggaaaaatctattgaaaaatccaaacatgatgtaaatgaaaagaataaagctatagcatatgaaataaaaagcactgttgaggatatgaatgaacaaattagaaataccagcacccttaaaatgatattgaacaaaaaaagaattaatttaagagtgcctaccgatgatttgcttaaaccatttgactttgactttgatgtggaacaattgctttccggacaagctttagaacttgacgctgctgaaattttaaaagaagtaatgccgaagctcccagaaccattttctaaatatattgatactattgaagaagaacctgaaactattgaagtttcatcaacaaaacaaggggaataa

SEQ ID NO: 7323 - DNA, 417 bp, Methanobrevibacter gottschalkii
  source 1..417: mol_type = genomic DNA
atgagaacatttaatgctggaaaaattacttttgaatatcctgataattgggaggttgaaaaagccgatatcttatctaatccagattgtattgcaacattgtctaaagggcaggataatttattcaatgcagtttcatttccaactgctacaaatcttgatgattataaaattttcatggaagatgtaatttctgatgatggaggggttattttatcttctgattttgttcagatcgcagataaaaatgctattaaagttcatgccaatatggacactcctgaaatcaactttgacattcatacttatgtttttatagaaaatagggaaatttatatttttgaactaaggacattagatgtttcaggcgaatcagagcgcgaattcaagaatatgatttcatcattaaggttttag

SEQ ID NO: 7324 - DNA, 744 bp, Methanobrevibacter gottschalkii
  source 1..744: mol_type = genomic DNA
atgataaaaaaattcgaaattaaatcacatgatggacctggaagaattggaaaagttgatggtgaacttacacccagaatattttttaaagaggaattaaaaatagctccaaaccaaggttctgcacacaatatcgatcgtgaaattgccgaatttaatgtaaaagaaacattaaaactcgctaaagaaaatgctgaaacctgtaacattgccgtgattcaaggttcaaaatacattgatttaagaattgaatgcctaaaaaaattagaagaaatcggatacaatggatttataatagctaatggtgatgcattactaactaattcaagagaacttgttgatattattatatcccttaaaaaagaagctaaaaaaacaagttatttcatatttccattcgcagaattatctttcatgccacttttaacatatatggggattgatggatttttagccgattctgcaaattattacagctacatgaatgttctgcaaactccaactaaatcatatgacttaaataattatcctatttatgaaaatatttcacaaaaagacttagaaaaaaagaatcttgaaaacatgaaatttgtaataaaagaaattcatgtacacatgaaaaacaaatctttaagaaatcttgtagaagaacgctcaggcaccactccacaaaatatctcaactttaaaaatacttgataaaaatcatatgaattatttgctagagtatacgcaaatattctaa

SEQ ID NO: 7325 - DNA, 951 bp, Methanobrevibacter gottschalkii
  source 1..951: mol_type = genomic DNA
atgattgtccgaggtgtgtttttaatgtctataataaatcgtcttaaatccttatttaaaggagacatagataaagaagaaactgacatcaataatgatgtatcaaacacatctgatgatgtcgaagttacatcttcaaaaatggaagaatctatcagtcctgaaatggaagatagtaaaaaagatttaactttcaaaaaagacatcgaaatcgtagaagattcatctgaaattgcggaagaagttgaagctttcgaaaaaacaattcctgaagaacaagaaattgttgctgaagaagctaaaactattgaagatgaagaaaaaacaactgatgaagatgttgttgaggaagttgaagaaaattcaaatgataaagataaaaagagagatactatgactttattaactgataaagaattattaaacgatactaatcgtgatccagattttactgctgagttcattgatgctggaattgaaactgtaaaacactgtttccaatgtggtacctgtagtggtagttgcccatctggaagaagaactccttataaagtaagacaaattgtcagaaaatgtttattaggtttaaaagaagaagttattgctgatgatgctttatggatgtgtactacttgttacacttgtcaagaaagatgtctcagaagtgttaaaattgttgaaatcatcaaaaaagcacgtaacatcgctgctcatgcaggatacatggctaaatctcacaaaatgactggtgtatatgtattaaatactggtcatgcagtacctattaatgataaaataaaagctttaagagttaaaattggtcttccagaagtaccaccaacaactcacacttatcctgaagcattagaagaagtaaagaaattatgtaaaattaccgcctttgatgaattaattggttatgatgaagcaaccggcggattaaaagaatag

SEQ ID NO: 7326 - DNA, 888 bp, Methanobrevibacter gottschalkii
  source 1..888: mol_type = genomic DNA
atggaaattgcatacttcttaggttgtattatgaacaaccgttatcctggtgttgaaaaagctaccagaaaattatttgaagcattagatattgaattaaaagatatggaaggagcttcttgttgtcctgctcctggtgtattcggttcttttgatgaagaaacttgggctactgtcgcagcacgtaacttaactcttgctgaagatatgggtgtagacatagtgacagaatgtaatggatgttttggttcattatttgaatgtaatcatattttaaaagaagatgaagataaaaaagctaaaattaatgctaacttagctgaaattggaagagaatacaaaggaactactaatgtaaaacacatcgctcaagttttaagagatgatgttggttttgaaaaattagcttcccttattgaaaaacctttagacttaaatgttgctgttcactatggatgccacttcttaaaacctactgaaactattggtattgaagatcaagctgaaaacccatctattttagatgatcttgtagaaattactggtgctaaatctgttgactacaaagataaaatgatgtgctgtggtgcaggtgggggtttaagatccagagatttagatgttactgctagttacactaaagaaaaacttgaacacatgtctgaagctggtgtagatgcaattgttaatgtatgtccattctgtcacatgcaatttgaccaaggtcaagttgaagttaatgaaagatacggaactgattttgcaattcctgtattccacttagctcaattatatggattagctattggattaccagttgaagatttaacatttgatgctcaaaaaattgatgcaacttctgctgtcaaaaaagcattaggtgaatag

SEQ ID NO: 7327 - DNA, 267 bp, Methanobrevibacter gottschalkii
  source 1..267: mol_type = genomic DNA
atgtttgtagcaacattagatggaatattcaaatattctgaccttccagaagaatacgaaccttatgttcaatttaaagcaactatagataaaagagaacttaaacctactgatgaaatggctattttaaacattgcaggtacttctactcatcatgttttattcttagatgcttattcaagtattgcagaaatcgaagctgaattaaaagaagcagatgcaaaaattaatcacactactttaaaaattataggtggccatttatga

SEQ ID NO: 7328 - DNA, 528 bp, Methanobrevibacter gottschalkii
  source 1..528: mol_type = genomic DNA
atgagtttaccatctgagcaaaactggttagttcttcaaaatctcataatagatttgacaaaaaaggggtatgaaatacctaatggaattaaccctgagatgggattaatcaggtcttcaattagttcatataaaagagatccttcccatcctgaattgatcaatggtttagctaaagcagaaatggctttgaataatatccaaggaactcttttaactattgctgaagaagaaggtgaaaattatgttgattattggcttgatttattaaaacaagtcatgaaaggtgaagaattgtttgaatttgccaaatctaggtcaaaattcttagttaatactccaccgggtttaactactggcaaaattaacttaaaagttcctttagctgaagaaagagttcaagaaattgcagaatggaatggtttaatcatcgaatttgaggatgatatgactgttcaattacatggtgaccaggaagacctcaaaactggtttaaaagagatgggatctttctttttagatgattag

SEQ ID NO: 7329 - DNA, 690 bp, Methanobrevibacter gottschalkii
  source 1..690: mol_type = genomic DNA
atgacaaaaattttagcaataagtgacattcatggtgaagaaaatgaaaatttatacacttatttaggcaataatgatattgatttagttttaattcttggggatattactgacttcgggcctttggattttgtagagacatttattaataaactttatgaatatgatgttgatgtaattgctattccaggtaattgtgatccacaggggatatgcaatgctattaatgatgtagcattctgtcttcacaataatattgttgcttatggggatgcaattttatttggttacggcggttctaatccaactccatttaacactcctggcgaaacagatgatgatcatatttataaatcagtttatgatttattggcaaattatgattatgtatacaataccgaagttcctaaagtaaaaattttagccactcatgctccaccattcaatactgatgctgacagagtttccaatggcgaacatgtaggcagttctggaattcaaaaatctattcatgaatttgaacctgaaattaatgtttgtgggcatatacatgaagctaaatctcttagtaaaattggaacaactactgatgtagcaaatcctggtatgcttaaagataatggtgctgtcttaattgatattaaagatggttcaaactatgacataagcattgtttctttagatgaataa

SEQ ID NO: 7330 - DNA, 903 bp, Methanobrevibacter gottschalkii
  source 1..903: mol_type = genomic DNA
atgatttgggttactagtaatgttgatggtgaagaatacaaagaaccattttccaagggaattatgtctcgttcactcaatatttcttatattggatctaaaagagcatatgaattagctagtgaaattgaagaggaattgattaaaaaggatatgtctgttatttctcgtgatgaattagcagatattgtattaaatcatctgattacggtagatccaaaaattgcagaaaaatataaaagtctaagattacttaggaactctaaaaaaccattgattattcttattggaggttcctctggtgtaggtacttcttcaatggcatttgaattggctaatagattaaggttaaaaaatattataagtacagacatgattcgtgaagtaatgcgtaaaattgtttcaaaagatttgagtcccgtaattcataagtctagttatgatgcttatgaaagtataagaacaccatctcttaaaatggataagattgttgaaggttttattactcatgctgatgttgttaatgtgggaattgaagcaatcatcgaaaggtctattaaagaaggcattagtattattattgaaggagtccatgtcgttccaggtttcatcagtaaagatttaatggaaaataataatattatcatgtttacattaatgattgatgatgaagagttacataagcaacgtttttatttaagatgtagtcaaccttgggtaaaaagatctcttgagaattatatggaaaactttgaatcaattagaaagactcaagatttttttgttgaacaagcaaagatttatgattctcacataatcaataatattgagattaatgaaacaattaatcaaatggtaagtgctatcttggaaaaatttgtaggtgttaatgatgttagataa

SEQ ID NO: 7331 - DNA, 387 bp, Methanobrevibacter gottschalkii
  source 1..387: mol_type = genomic DNA
atgttagataagaaagttaaggaaataatgacatctgatgtactaactactacttcagatgttgatgttgtatttgcatttgaaaaattaatggaaaataaaattagttctcttccagttgttgaagatgatgaattaattggaattattactgcaactgatgttggtcataatttaattttagataaatatgaattaggtactagtgttaaagaaataatgataactcctgttgttactgtttctccagatagtactatcgaagaagctgtttgcataatgaaagataatgtttcttcaggtatattaaatcaacttccagttgttgaaaatggaaaattagtaggtattatttctgatggagatattatccaagaaatattctaa

SEQ ID NO: 7332 - DNA, 909 bp, Methanobrevibacter gottschalkii
  source 1..909: mol_type = genomic DNA
atggatgaattaagaaataaaggtggtaaaaaagctgtaactgttgcaataattgcaaatacatttttaaccgtttttaacattattgtaggaatgctgtctggaagttatgcattaatctcagaaggagggcatactttatcagatattacaacaacaataattgcatatattggatttaaaattggtcagaagccagcagataaagaacatccactaggacatggacgtgctgaggcaataagtggattaataatcatgttatttttaacaatggtcgcttatgaaattatgagtggagctattgaaaaattatttaatccatcaacaatcaccacaccagacatttatgctgcagtaatggctattttcggaatatttatcaattacataataagtgagtatattattagattaggtaaacagattaatagcccagcaatcgtggctgatggaaaacatcaaaaaacagatattttttcatcaattgcaatattaattggagtacttgtatcaaacataggttatcctatattagatccaattattggtttgattattggatttttaattttaaaaacagcatatggcattggtaaagagaatcttgacaatattatgggtaaaattccatctgaaaaatttgttaatgaaataagaaaaatagcaaatgaaagtagcgattatgcaaacaatgcacataatataaaagtagattatttaggttcatatgctgcagtaacattacatattgaaatcgatggaaatatgacattaaatgagtcacataaaattgtacatattgtccagaataatattattgaaagaatacctgatgtaaaatatgtgaatgtccatgcatgtccaaaaggattggattataatcataatcaagaaatagataaataa

SEQ ID NO: 7333 - DNA, 1122 bp, Methanobrevibacter gottschalkii
  source 1..1122: mol_type = genomic DNA
atgataaatcctgcaagtagaacaaaatcaattgaattgtcattaataagaaaaatgtttgaagtgacaaacccaaatgcaataaatttaggaatcggcgaacctgattttgatgttcctgaaaacatcaaaaatgctatgaaaagatcaattgatgaaaatgatactcattatactcccaataaaggatatattgaactaagagaagaaatttctaaaaaatttaaaaaagaaaatgacataaacacaaatcctgatgatattattgttactgtaggagctagtgaaggattatatatgtgtacacaggcattcgttgaaaaaggagatgaagtattgcttccaaatccaagttttctttcttatgaatcatgcataaagctagctgatgggaatatagtgccagttgattgtaaaatggaaaatgagtttaaattaaaagcagaagatgttcaagaaaaaataagcaataaaacaaaagcaataattttaaattcaccatctaatccaacaggtgctgtgatggagaaagaagatataaaagctattgcagatttatccatagatgaaaattttttaataatttctgatgagatatatgagaaaattatttatggaaaaaaaaattattcccctgcaaaatacagtgataatgtaattactttaaatggattttcaaaaacatatgcaatgacaggacttagaatcggttatttagctactactaacgaaaattacacagaacaattacttaaaatacaccaatataacattgcttgtgccaatacaactgcacaaagaggagcatatgaagcattgaccggaccacaagatgaagttgaaaaaatggtttttgaattccaaaaaagacgtgatttaattatccgtcgtttaaatgaaatggaatatgaaacagtaaatgcagaaggtgcattttatgtatttccaaaaattgaagatgaagacttcgtaatgaaagctgctgatgccggagtaattacagttccaggaattgcgttcggaacaaatggcaaaaatcatgtacgtatgtcttatgcaaattcatatgaaaatattgaaaaagcaatgaatattttagaagagcgtgtagttaatggatga

SEQ ID NO: 7334 - DNA, 1551 bp, Methanobrevibacter gottschalkii
  source 1..1551: mol_type = genomic DNA
atgttatatgaaaaaaatatatttcaaaaaaatatcaaaaatatgaatattcacatgggattggcctatccaaatatttataggactgcaatgtcttcattaggatataatattttatacaataagattaatgaacgtgaaaatacttggtgtgagagaataatctttcccaatactaattcaatagaatcaaacacacccagcaaatattttaatattataagctttactgtccaatttgaagaagattattttaatgtattaaaaatgctcaaagatgcagaaatacctctaaaaagagaagatagaagtgaaagtgatcctttgattattgcaggaggtccatgtgtaactgcaaaccctatgccattatacgattatattgatatttttgtaattggagaaggtgaatttgttattgatgaaattttaaatacatataaaaaacatggaaaaaatttagaaaaatatcttgggttgcttggagtttacattccaaagtacaacaacagaacaaaaataaacatcataccaaacatggataacacttaccacattacagaacatattgtgagtaaaagtgatgatgaaaattatcagaccattttcaataataccataatgttaaatgtttcaagaggatgcacaagaggttgcagattttgcatgtcaggatatttatacagacccatgagagaaaccaaatataaaaagctaattgacattgcaattaaaaatcgtgaaaatactggattaaataaaattacattaataggggctgcagtttcagattatagtgatttaaaaaatttaattgatggtttagaaaaagagggctttcagatttcaacaccttccctaagaattgaatcaataacaaaagaaactttagaatcattaaagagaagtggattaaaaactattacgcttgcactggaatcaactgaaaaattgcgaaaagtaattaataaggaaatactggaagaaaagatttttacagtaataaaaaatgctattgaacttgattttaaaattaaactatattttttaattggaatacctggtgaaactatggaagacattgaagaactttgccaatatatgaaaaaaattgcaaatatgcacaaaagtatcaaaaatgtaaaatttagtgtaaatccacttattccaaaaccacacacaccattacaatgggaaccttatgatttcaaggatattaaaaagaaaactagatatattaataaagaaatgagaaaatataatgtaaagtgtgaaagtcctaaaaaaggattaatccaatatatactgtcttgtggaaatagaagcattggtgcaattattgaaaaaactttaacaaaaaatcctacattaaaagaatggaaagaattactaccaaaatatgatattgatgatgtattgccttgggacaatattgatgtaggtgtaaataagagatttttaaaaatagagaacaaaagattgagaagtctaaaacaaaccccctggtgtgaaacaaacccctgctataattgcggatcttgtgaaaaataa

SEQ ID NO: 7335 - DNA, 2877 bp, Methanobrevibacter gottschalkii
  source 1..2877: mol_type = genomic DNA
atgttcttcttagttttgggggtagttggtgcaacagaatttaataatgcttcaaatacagaagattcaaatttaatgactgataatgttgattcattgtctgttgaaaataaattagaagtttctaacgaggattctatctcagaggctaatttagttaattctcatgatgataatttgaacaattattctgatagtgatgttttaagtaactatgaggatgattatggaaatgttcaagcttctaattatgctgaaataggtaatactaattctgttcgtagtgatgttttatctgtttctaatgatgataatttagctgctagttctaaagtatctgcaaaggttgatgtagttgatacacattattccaaatccgctacatatttcaaagttactttgaaagatactaaaggtaattctatcagcaatcaaaaaatttcttttaaagttaatggagtgacttacactgctactactgataaaaatggtattgcatcagttaaaactgcagctttgtctgtaggaacatatactgttgcaattaaatacgctggtagttccaaatatgcagctgtagctctttcaaagaaagttaaagtattgtcatctgttagtggaagtgatattactaaatattatggacctgttgtccagtattcagtaaaattctggaaaaattataatgcattagcaaatactaaagtatcatttaaagttaatgggataacttatactaaaaccactgataaaaatggagtcgctaaattaccagttaatttggctcctggaaaatatgttattactacaattaatccatattctggtgaaaaattgtctaataaatgtatttcattaagagatggtacaactttaacccatggttcaactaatacatatattactcctaataaaaaacattcatttactgtaactttaaaatctaaacacggtattttaattaaaaacaaaaatgtagtatttaaatataataataaaaaagtaactgttaagactaattcgaatgggaaagctactttgtctattcctgctctttctaaaggtacttattatattagttattcatattcaggagacaaatattattcaggttcatctggatctggaaaattgtatgtaaaaaatccaactactaaaattacatcttcaaaattgaagatgcaatataaggatggatctaaatttgcggttaagttaacaaaaaatggtaaagttttagctaataaaaaagtgaaattaacatttaatggaaaaacttatactgaaaaaactaattcaaagggtattgcttatttaactgtccctacagtaaaaccagctacttacaatattaaatatcagtatttaactccaagttattttaattattgttatggctcaaataaaattgttgtttctaaacaaactgctaaagtatcagcaggggatttagtgatgaactataaagatggttctgtttataaagttgttgtaaaaaataaatttggaaaccctcttaaaaatattaaagtcaaatttacaattaacggaaaaacttatactaaaactactgattcaaatggagtggctaagcagtctattggtttaaatattggttattattctgttaaaacagtactttctaataattattatgcacatggcgctatatataaacatatttcagttaaaggaactaaatttgtaggcggaaatattcatgtagcagtaggtaaaactgcatattattcagtaaaattattggattataagaataatccgattaaaagtacagaagttacttttattttggatggtaaaaaatacacagctacaactagttcaaaaggtgttgctaaagtaaatttaggtgttttatctgcaggtactcataatgttaaatattcacaaggagagtattcaggttcatctaacatatatgttgctgataaagtgactattaagcaaattattgctgcatctggaaatgtgcaaaagtatattcaaaaaaatcatagattaccttccacagttaatattgggggtgttacttattcaactaatcaatatttatatttagtttcaaaagctattgtaaatttaaaatctaatgttaaatctgcaatttatgttaaaaatgtcgatggtccaagtaatccttcatcaacatatgctgcaggtaatttatatgattatctttcagttgcaaatagtgttgtgaaaaattctgattcaaaaggtagtgtacctaatactgttagttctaaagttggaactattggttataaaagtttagtttatgcgtttgctcgtgttgttgcattttatggtgatgatgatagattgccatcatttgttgaaataaaatcactaagtggtactagttcagatagtaatattaactctaaaaatactatttcaaacttaaaagcatatttggcagcatcaactaattgccaggttaataatgctaaaattaaacaattagttggcaaattaactaatgggttgaagagtgaaaaatctaaagcaactgcaatttataattatgtgagagatacaatttcatatagtttctattatgatactaaacacggtgctgttggaacattgaatgctaaatctggaaattgtgttgatcattcccatttgcttgctgctatgtttagaactgcaggtcttgcaactagatatgtgcatgggtcatgtacattttctagtggaagtacatatgggcatgtttggactcaagtattgattgataatacttggactgttgctgatgcaacaagttctagaaactcgttaggaaaaatagctaattggaatactaagtcttataggcttaatggatactattccagtcttccattctaa

SEQ ID NO: 7336 - DNA, 459 bp, Methanobrevibacter gottschalkii
  source 1..459: mol_type = genomic DNA
atgaattctaagaaatatagtaaagtggctgttggtggaactttcgataaatttcatgatgggcacaaaaaattattaacaactgcttttgaattgggtaaccaaattgaaattggtgttacctctgatgcttttggagggttaaaaggagatattgacccttgtaaagagagaatgagcaatcttaaggcttttttttcagataaatcagattttgttgtaattcctttaaatgatccgtatggaactacaatatatgatgaggattttgatgctatagttgttagtgaagagactgagcctactgcagttgaaattaatgagattagaatttctaaaggtatgaaacctcttgatattgtcgtagtaagttttgtgctagcttatgatggaaatcccatatcttcaacacgaattagacgtggtgagattaatcaaaagggaaatgttgttgaataa

SEQ ID NO: 7337 - DNA, 192 bp, Methanobrevibacter gottschalkii
  source 1..192: mol_type = genomic DNA
atggcagtaaaaattgattctgatttatgtggacatattaaagattgtccagtacaaggattatgtattaaactttgtgagcaaggtgcaatcatagaaaaagatggtgatgtatctattatacctgaaaattgtgatgattgtgatctttgtattcaaaactgtccaaatcaagctatatctaaagtatga

SEQ ID NO: 7338 - DNA, 1011 bp, Methanobrevibacter gottschalkii
  source 1..1011: mol_type = genomic DNA
atgtttaatatagaaagaaatggtgaagagcaccgtaatttatcatataatgatataaattgtgttggttgtggtatttgtacggatatttgtccgacttcttctttaagattaggacccatagttccagtagctcgtggattaattgaaatggatttagtttctattaaagaagattcatgtgtgttctgtggattatgttctattgcttgtccgtttgatgctttatccatgtctgttgatggggaatatattaaaaacattgagtcttatcctatttggaataaagaatctgttgttgatgatggagaatgtatgtattgtagtaaatgttataatatatgtcctagtgatgcaataatttttgagaggaatcttccaaatcctgctgatttagttaggggggaaattgaaataaatgaggaagattgcatatattgctctttttgtgcagatatgtgtcctgctgaagcaattacaattaaaaatattcccatatcttctgttgataaattaaataattttattgatgttgattcttctaaatgtattttctgtggtgtttgtaaaaaggtttgtcctgaaaatgctattaagcaaatctgttctacatgcatgttaaatgaagaaattgaagttccggaaattactggaaatgtaatgattttagaagatttatgtgtatattgctcatggtgttctgaagtttgtcctgttgatgcaattgatataactaaaccatttgatggtactttggaattagttgaaagtgaagaaaaaatctgtaagggtgattcttgtcatgcttgtcaagatgtttgcccatgcaatgcagtttcaattgttgatggaaaatctgtaactgatttatctttctgtaatttatgtggtgcttgtgtgaaagcatgtccacaagatattagaattttaacaagaactgatttgaatttagaaaatatcaattctgaatcttggaatgatattttaacttcaattctagttggaaaatag

SEQ ID NO: 7339 - DNA, 183 bp, Methanobrevibacter gottschalkii
  source 1..183: mol_type = genomic DNA
atgtttagaaaaagaattgacagcaaaggccaagggagtgctgagttaattttaatcattggtggtttaattgttgttgtactcctaatagcaagttatatatcaaatataactgaaaaaacacagacaaatattcaaaatttgttaaaaacagaaagagatttcttaataaataaaatataa

SEQ ID NO: 7340 - DNA, 207 bp, Methanobrevibacter gottschalkii
  source 1..207: mol_type = genomic DNA
atgaaaaatatgaaaaaactcatcaaagaaaattctggacaaggtgctgccgaatatatattgctctttggaggtgtgcttgtaatcgcactacttgcattaacaatatacagatcatatatggaaacaagtgatgtcagtttaaaagctaaagatgacataattgatgtaagaaataccatacttgacaacagaacccatgtttag

SEQ ID NO: 7341 - DNA, 1149 bp, Methanobrevibacter gottschalkii
  source 1..1149: mol_type = genomic DNA
gtgggaaatacaataaaattagtttcaggttttattttatttgtaattggtgttctcatagcttatgaggcaagtgtgtataatttattagatatcttattaataattggtttaatcattgcaattgtaggaataattatgatgattagtcattttgtggaatctaatgcggataggacaacaaataaaattaaagagtttttagagtctaaagaaagtaattcaagttttgaaagaaaaaattttactggtgaagaacctttaaaaatccgtcatgattataatgattttgacgatgcagaatatgatgacttaggcattgaagattataatgattcaactcctagtgagtattatggagattcttttgaagataatcctaatagagtattaagaactgttccaaggcaagaaaaagaattaaatttagataaccagctagttttcactcctaattatggaaggcctttgaaagttactagaactcctaaaaaacgtcaatcagattattttgaaaaagaaatgcctccgtttgttgtggaaactgataaatctgatgaaattaaacgtgctttagaagaaccaactcctgttgaaaaagctgttaataatcatacattggctcctgaagtgaaacagcctagagatattaaaattgatattaatgaccctgagagtttacctgttccaaaatcactcagtagccatatactttgtaatgattctgttattacttcacaagaagcttttgaccaattagcaatttatgttaataaagaaatcatgttggaaattccttctttaaatgaattatcagatagattcttatctcatgttcctacaagttattcaagagtaattattgatgaatttgatacatcagacatgtcttatatgtttttaatttcatctcttttaaaacaaggtgttcatattaagactgtccctaaagttcatacagttaatttaatcactgatgattctcatgcaatgattatatctgaaggtcagaatgatatggaatatggtgcgatatatgatgacaggaagtctatttcaaacattcgtgctagtttcgaaaaaacttggaatattgcatctaacttagatgagaatattattatgggttctgttgggggatctgcttaa

SEQ ID NO: 7342 - DNA, 720 bp, Methanobrevibacter gottschalkii
  source 1..720: mol_type = genomic DNA
atggaaataagatggttgggtcattcggcatttgaaataatcagtgatgataatgttagaatattaatagatccgtttattagtaataatcctacttgccaagtccctgtagaggaattaaatccagatattattttgcttactcatggacattctgatcattttggtgatgctttagaaatatccaatagtactaatgctcctattgcatgtattcacgaaatttcactctttttagctaaacaaggaattaggaatattagtgttaatattggtggttcttttgtatataggaacattaaatttacaatgctcgaagctaaacattcttctgatattgacatggttgaagaaatcgctcctggtggaactgctgcaagctttttaataacctttgaagatggaactaaaatatatcattgtggtgatacaggactatttggtgatatgaagaatattattggtgcaatatataaacctgatgtggtaatgataccaataggggataaatttactatgggtccttttgaagctgctttagcttccatgtggatgaatccgaaagttgttattccaatgcattataatacatttccaccaatagaacaagaccctgcaatttttgctaattttgtaagtcagtttaacccgaatattgatattgtggttatgaatcctgatgaatattttgaatataatcctgaagattatcaggattaa

SEQ ID NO: 7343 - DNA, 2007 bp, Methanobrevibacter gottschalkii
  source 1..2007: mol_type = genomic DNA
atgaaatccatgtccaatgtagacatttatacaataagtgatgaactaaataatttattaagtggtgccagagtagataaatcattccaacctgcaaatgatattgtagtaatcagattccatgttcctggaactggcagaattgatttagtaatgcaatgtggttctagaatacacaccagccaatatcctcttgaaaatcccaccattcccccatcatttcccatgcttttaagaaaaagaattaaaggagctcatgttgaaagtattaaacagcatgaatttgatcgtgtaattgaaattaaagttaaaaaagataaatattacacaataattgttgaattatttgataaaggaaatataatccttttagatgatgaaaacaatattattcaacctttaaaaagaaaacagttaagtgcaagagacattagttctaaaagagaatacaaatttcctgaaaaacgaggaataaaccctatcacaattactgaagaagaattaaaaaaattattcaaaaatgcagaaagtgatgttgtaagaactcttgcaatgaatgggcttggaagcttatatgctgaagaaattattcaaagagccaatggaatcattgaaattgataaaaacacacttacatcacaattaacagatactcaaactgcagaaatctataaatgccttaaagagttatttgataatcttaaaaaaggagcaattaaaccacaaattgtaaaaaaagattcaaaagaagatgttattccattagatcttgttaaatatgctgattttgaaaaaactttttataaagattttaatgaggcctgtgatgaattttattctaaaaaagtaaacagcaccataaaaaatgtaaaagaagcagcatggaataaaaaagtaaataagtttgaaaaaagattaaaattacaacaagaaacccttgataattttacaagaactatagaagaaagtcaacataaaggagaggttatttattctaattattccaccattgaaaatataataaatgttataaacactgcttggagtaatgactattcttttaaagaaattggcaaaatactaaaaaaagctaagaaggagggaatgcctgaagctcagatttatgaatccattgataaaatgggtattttaacactgaatattgatgatactgcattgaatataaatcctaaatcaacaatacctgaaaatgctgaaatatattatgaaaaagctaaaaaagcaaaaagaaaaacaaaaggtgcaataatagctattgaaaatactaaaaaacaacttgatgacattaaatccaaaaaggacatagcgatggaacaggtagaattacctaaaaaaagaattaaaaaagatttaaaatggtatgaaaagttaagatggttcattagctcagataacatattagttatcggtggacgtgatgctaacagcaatgaaatggttgttaagaagtatctagaaccaaatgatatttatttacatgcagatatacatggtgcaagttcaactgcaataaagttaaacggtaatgaattaaatgacaatatcatcaaagaatcaggggaatttgccgcagcattttcatctgcttggtcaatgggattcacaacccaagatgtattctgggttcatccagatcaagttacaaaaacacctgaagcaggtgaatttttatctaaaggatcttttgtaatacggggacatcgtaattatataagaagtgcaagggtaaaattagctattggaattgttgattatgaaggtaaaagaataatggcgggaccagttgaagcacttgaagcccattgtgataattatgttgtattaaaaccgggatttgcaaaaaaagaagcgatcgctaaaaaaataataaataagattaatgaagatgatttattaacacttgatgatattataagagtattaccatcaggaaaatgcgatatcgatgaagagtatcatctaagaaaaaaatatgaaaaaaattaa

SEQ ID NO: 7344 - DNA, 273 bp, Methanobrevibacter gottschalkii
  source 1..273: mol_type = genomic DNA
atggacataactgttaaagtcacaagtattcatattgttgcaggtataattgctgctctcatttccactggtttaacattaggctggtttggatttaaaaatgatatttttgcattttttattgctgtaattatattgtatttcgttggtcaagcttgtcaaaaaatagctggtgatgaaatttccggattttcccaatggttatgggatggaattgcaccattctattttacatgggttatagcatacactattttcgccatctacctataa

SEQ ID NO: 7345 - DNA, 1821 bp, Methanobrevibacter gottschalkii
  source 1..1821: mol_type = genomic DNA
atgtcaagtatgagtagtgttgcaggattatcaaaatatattaaaaccttgccaaaaaccaaattctcaataataggaatgctaattattagttttttaattggaagcatctattatttaatagatttgaatccgactatgggcattttagaagattttattgcaggagggttgtttggtttaatcgtatttggaatttcttccataatgagtggtgcattgaatcagcagacaattagtgttgttcatggaatcaatttaaaaattaaacactcaatgtttttatctgttctttcaatgacaatacttggaataatcataattatcggatgtataatttcccaaatactaaaaatagatttatttttaaactcaatgctattcggttgtgttttaatttatggattcggcacattagttttctgggccacatcaaaagttagatttgtaactgctgcaattactggtttaattcagccattactcatattagcaatgtatacattaattacatttttattcattgacacaagttttattggacctgcaattttacaaataactttaaaagcaatagttgctgcaataatatttgttatggcaatatatgcattcattaaagttattgcatccccatttaagaagaacttaggtattggtgttttggatttattaagtttatttattgcccatatgaatgaaggatcaaattcccttgaaggattatttgaaaatatgagtgaagctattgatacaatcgtcacatttgttagttttaaaactgaaaatggaataaaagcattatttatatctccttctgttcaccctgggcctttaggggatcttgggggatcaaatatgccaacgttattggctaataaatttgaccatttcactatggttgctcatggaccatcaacacatgattttaacccaattgcagtatcagagattgataaaattgaagagtctgtaagaaacggattgaaaactgtagaatattcatcaaatgcaagtagatttataaggtataatgttgaaaaagcaaatatcggtgttcaattatttaataagggtatggttattttatcaacttttgctccggatgcagttgatgatattgaatttggtgttggattgactatgatggctcaaagcagaagccgttgcaatgttgaagattcaataattgtagattgccataactccttcactcctgaaagtggagaaatcttgcctggaaattcagaagtattccagttaattgatgttattgacacaattaatcctaaacagggaagatatgatgtaaaagtaggctgctatgaagataaccttgaatccttagataaacatgatggtgtcggagacagtggtataaaaacaatgattgttgaagtcggcaatcaaagaaccgcatatgtacttttcgatgcaaacaatatggaaattggatttagacaagaaattattgatgcagtaagtgatttggaaatagatgaaattgaagtaatgacaactgacacacatactgttaatacactttctagaggatacaatcctattggaattgcaaaaagacctgaaattatagaatatgtcagaattagtatcgaagaggcaataaaagatttagaaaaagtagaagttggaactggaactgaaaaaatagaaaatcttaacactttcggcccaaaaaattcaactgaattaatttcaacaattagttcagtagttgcagtgagtaaaattatagctccagttttattgattacagcattactaattgcatttatatggatattctttggtggtttatag

SEQ ID NO: 7346 - DNA, 522 bp, Methanobrevibacter gottschalkii
  source 1..522: mol_type = genomic DNA
atggaaagaaaattaaatgtaccaattaaagatgaaaatttaaatgaattgaaagctggagatgtagtttatttaacaggtaacattttaactgcaagagatcaagctcacaaaagaattattgaacaaggtgctccatttgatatttcaggtgcagcattgttccatgcaggacctattgtcacaaaagaagatgaaaactataaaatggtcgctattggtccaactacttctatgagaatgaatccatatcaaagtgatgttttagatatgggggctaaaattataattggtaaaggtggaatggatgatactgtaagagaagcattagttagaaataatgcaatttatgtagtggcaactggaggttgtgctgcattatatgtagatgcagtggaaaaaattgaaggtgttgactggttggacttaggaatgcctgaagctatttggaatttaaaagttaaaaatttcggtcctcttatagtggctatggatagtgaaggtaacagtttatatgattaa

SEQ ID NO: 7347 - DNA, 330 bp, Methanobrevibacter gottschalkii
  source 1..330: mol_type = genomic DNA
atggctgatattaatgaactcgcagaaaaaaaattgaaatcaagaatgacaaaaattagaaagtgtaacagagaacccgaagaaaaagcaaaattttcagaaaaattaggtgtttcttttgatgtagaattccataataaaaatcctgataaacttgcagatggtataactttcattacaacacctgaaggtaggattttattagcagaatattactatgaaattcctgaaactcaggagtatacttctttacctattgatgagaaaaaattaaaatcaatattggaattctttgatgaatataaattagaatttgatgactctgattag

SEQ ID NO: 7348 - DNA, 1155 bp, Methanobrevibacter gottschalkii
  source 1..1155: mol_type = genomic DNA
atgatagttaataactctttagatgaagttaaaaaaagagataatgctcttacaatcatcaaaaatcttgttgaaactaaaggcaggtcttctttatttgatttaacaggtctggcaggtggatttatcgcatcttcttctgaaattagtcttttagaaacatatgttggtccggctatttttgaagatgctattcaagaagttggaaaggaacatatgggtggtgaaaaagtccttgcagtaaataggacttcttcaggcatacttgctacaatattatctcttgttagtaaagattctaatgtagtgcattatcttgctgaattacctgctcatccatctattccaagaagctgtaacttggttggtgctaattactttgaaactgatgtttttgaagagttttcaataccgaataatacttcattagttgtcatcaccggttccactatggatcataaggtaattgatgaagaggagtttaaacaaattattgaaatggcacatgcaaaagatattcctgtcatggttgatgatgcatctggtgcaagacttagaacagttgtatttaatcaagctaaagcttgtgatttgggtgcggatattgcaatcacaagcactgataaattgatgcctggtccaagaggaggattgatgtccggtcgtgcagaattaattgatgaaattaaaattaaagttaatcaattcggtcttgaagctcaaccacctgcagttcttgcaatggtgaatggtattaaaaatttcaaagaagaaaatttaattaaaagtttcaaaagaaaagatgaattatataaattattatctttaaaatttagcaattttaaaaaatcacctacaggggtcatgatttatcctgaaggattaagtagtgaaattaatgttccacataagttatctgatgatgatttggcatatgtattctcgtttattctattaagagattatggaataatcacaattccaccagtttcaatgcccggcgcatcagccacaataagatttgaattatcatcaagtgatgcagttaatttagatttaaacagtctaggtaaaaaaatagtatctgcatttgaaaaattacaagatataattacaaatgaagaaaaatgtagggagattgtatttaattcttga

SEQ ID NO: 7349 - DNA, 918 bp, Methanobrevibacter gottschalkii
  source 1..918: mol_type = genomic DNA
atgaaagaagaaataatgaacttattaaaaaaagagggtaaactttctactgaaactattgatgaaataaaacaagttgacatcaatgacttcaaaaatctagttgaagaaattggaaaacaaaaaacagaacatattattgctgatgaaatttcaaaaaatctgaatacaaaatacattggaaaaaatttatatgtattcaacgaagttaaatcaacaaatactatagccaaattcctgtcaaccaataatattgcagacggtagtgttatcatctctgaaaaacaaacagctgcaagaggcagatctggaaaatcatggaaatcaccattaggtggagtatggttatccattgttttaaatcctcatgtagatcactctaaacttcctttaataacattggctacaggtgttgcagttgcaaaaactcttgaaaaagttggaattaaaaatcctgagatcaaatggccaaatgacatcctgattaatggtaaaaaaatttgcggcatattaaccgaagctgtggcaaaattcaacacaattgaaaatgtaattatcggagtgggtattgatgcaaatgtggatattgaaaaattcccagaagaattaaaaaatggcagcaccacccttgaaatagaacttggaagaaaagaaaatgaaaatcttttaattaaacttttcttagaagaattcgaaaaaattagtgaactttttgatcatgaaggatatgaagaaatcttaaaagaatggagaaaacgttcatactcaattggaaaaattgtagaagtcagagaaccattcaataaatattatgatggctatgtgttaggcattagtagagaaggggcgcttgttgttgaaaaaattgatgggacattagaaaaagtaatttctggagaatgtataatcaagaattaa

SEQ ID NO: 7350 - DNA, 1494 bp, Methanobrevibacter gottschalkii
  source 1..1494: mol_type = genomic DNA
atgtttgaaaaagtattaattgcaaatagaggagaaattgcaataagagttatgcgtgcttgtcgtgaacttgatattaaaagtgtatccatatactccgatgccgataaaacttctctttatacaaattatgcagatgaaagctacccattaggaaatccttcacctgcgaaatcttacttaaatattgaaaaaattattaatattgcacttgaatccggtgcagatgcaattcacccaggatacggatttttagctgaaaattcaaaattcggtgaagaatgtaaaaagaatggaattaaactcatcggaccaagtggagatgtaattaataaaatgggagataaaattacttccaaagcacttatgaaaaaagcaggcgttcctgtaattgaaggtacaccagaaggtattacagatattgaagaagctaaagatatagctcgtcaaattggatatcctgtaattgtaaaagcttctgcaggtggtggaggtattggtatgcgtgcagtttatgaggaagatgaacttgtacgtgcaattgaatctacacaatctgttgcatcaactaacttcggtgattcaacagtatttattgaaaaatatcttgaaaagccacgccacattgaattccaactcttggcagatgaacatggaaatgtaatccacgttggcgatcgtgaatgttctattcaaagaagacatcagaaacttttagaagaagctccatcccctattatgactgaagaattaagagatgaaatgggcggaagtgcagttaaagctgccgaatatataggttatactagtgcaggtacagttgaatttttatatgataatggacaatattacttccttgaaatgaatacacgtattcaagtagaacaccctattactgaacttgttactaacactgatttaataaagcaacaaattttaatagccaatggtgatgaattaagctatgaacaaaaagatattaaaataacaggacatgcaattgaatgtcgtattaatgctgaagatcctcttaatgactttgcaccaaatcccggtaaaattacaggttacagatctcccggaggaccaggtgtacgtttagacagtggagtatacatgaattatacaattccaacattttatgattcaatgatttcaaaattaattgcctatggaagagacaggaatgatgcaattaatagaatgaaaagagcattaagtgaatatatcattttaggcgttaaaactacaatcccattccataaagctattttaagaaatcctaactttatttcaggtgacctgaatactcactttattgatacttataaaaaaggtattgaaaaagaaatggaaaatgttattgcagaagatcatgaatatgttaacagattaaaatcaacatttatgcctggaaaaaaaatagccgcaatatctgcagctgtaggatcttatcagaatatggcaagaagccacaatatgcaaaaaaaataa

SEQ ID NO: 7351 - DNA, 828 bp, Methanobrevibacter gottschalkii
  source 1..828: mol_type = genomic DNA
atgtataaagatgagctatctatatttattccgaactcatttctttcggagtctaaagatcttaaaatccgtacttataaggtaggtattttgggcagagctttagctatttttcaagcggataatgttattatttataatgatgataatgttaaaaatgaagatggagaaatggatggagaatttattgctgaaattttgaattatatgaatactcctcaatatttgaggaaaaaagcatttcctataagatctgaattaaagcatgttggtattctcccacctctcagaactcctcatcatcctattaatagtcaaccagacgtgggtgattatagacaaggttttactgttaagagaaataagaaaggaacttatgtggatataggtatggataaacttgcattctgtaaagagcaactttctgttaaaagaatttttgactttaagattactaaaattgctaagaaagaagtaatagtcacacctgataaaccagatgacgtttactggggatataatgttatatcttctactaagagtcttaaaaatagcttaaaattaattaaacctgatcttgttgttgaaactacaagatatggggattatattaattctatttttgatgaattaaaatcaaaactcaatgaatctaaaagtattgctattttatttggtggcccatattcttcaattcaagaggatgtttctaatccaaattgggatttgtttaaattaaatactattcctggacaaggaactgaaactgttagaagtgaagaggctgttgtcgctacactttctttattcaattgtatgagattttaa

SEQ ID NO: 7352 - DNA, 1011 bp, Methanobrevibacter gottschalkii
  source 1..1011: mol_type = genomic DNA
atggtaagacatcaccagccaagaaaagggtctgttgcttttagtccaaggaaaagagcagctaaagaaacccctagagtaaaatcttggcctcaaattgatgaaccaaaattactcggcctcgcaggttataaagtcggtatgactcatgttttaatgactgattccgataaaaactctccaactaatggtatggaagttttcactccagtaactgtattggaagtacctccggtcgtagtaatgggaattagagcttatgaaaaaacttctcgtggattgaaagtaatcaccgaagttcttgcagacaatttagataaagaactttcaaggaaaatctctcttcctaaagaatacaataaatctgaagctattgcaaaaatacaaggtgcattagaaaacacagaagaaattagggtattagtacatacaaatccaaaagtaactagcgtacctaagaaaaaaccagatatatttgaatgtggtattggaggatccaatcctgaagaaaaattgaatactgcattagaattattaggtaatgaagtaaaagctagtgaaatcttcaatgaaggagaatttgttgatgctatcgcaactactaaaggaaaaggattccaaggtgtagttaaaagatggggaattagaattcaatatggtaaagctgtaagagcaggtaaaggtagacacgtaggttctatcgggccttggactcctagaagaaccatgtggactgtagctcaagcaggtcaaatgggataccataaaagaactgaattcaacaaaaggattttaaaaattgcatcagcagatgaagttgatcaaatcaatcctgatgggggatttataaaatatggacttgttaaaaatgattatgttttagttaaaggatcccttccaggaccttctaaaagattagtaattttaagacaacctattagacctaataataaagctgaggatatccctcaaattaattatattagtactaaatctaaacaaggggcataa

SEQ ID NO: 7353 - DNA, 765 bp, Methanobrevibacter gottschalkii
  source 1..765: mol_type = genomic DNA
atgaaagttaatgtttattctattaatggggaagttaaagaagaaattgaacttccagctatttttgatgaagtatacagaccagatttaatcaaaagagctgtactttctgcacaatctgcaagagtacaaccatggggtaacgatccaatggcaggtaaaagaacttctgctaaaggttggggttcaggtagaggaaccgctagagtgcctaggattaaaaatggttctaaagcagcatttgtaccaatggcagttggtggtagaaaagcacaccctactagagctgagaaaaatcatcatgaaaaaatcaacataaaagaaagaagatttgcaataagatctgctgttgcagcaactactaataaagaaattgttgaaaacagaggtcacaaagttgcagatttagaacaagttcctatcattgttgaagatgaaattgaagctgttaaaactgctaaacaaactcgtgaaattttccaaaacttaggtgtttacgacgatatactacgtgctaaagaaggaaaaagaatcagagcaggtagaggtaaaaccagaggaagaaaatacaaaaaagtaaaaggacctcttgtagttgttggtgaaaataaaggtatccatttaggtgcaagaaaccatgcaggtgtagatgttgtggttgctgaaaacttaaatgctgaattattagcaccaggtacccatgcaggaagacttactatttacactaaatcagcagttgaaaaattgggaggtttattccaataa

SEQ ID NO: 7354 - DNA, 261 bp, Methanobrevibacter gottschalkii
  source 1..261: mol_type = genomic DNA
atgaatgcatactcaattattattaaacctcatgttactgaaaaaaccatgaacttaattgatcaaaataatgtgattacttttgtggtaaatcgtgaatctaataaaagtcaaatcaaaagagcttttgaagaattatacgaagaaaaagtagctaaagttaatactcatattactactaaaggtgtaaaagtagcatacatcaaacttgttgaagaagaaatggcagaagaactcgctgtcagaataggtgtattctaa

SEQ ID NO: 7355 - DNA, 726 bp, Methanobrevibacter gottschalkii
  source 1..726: mol_type = genomic DNA
atgggaaaacgattaatacatcaaagaagaggaagaggaactcctgctcaccgtgttgcttctcatcgtttcaaagataaaattagatacagatcttacgatgcattagaaaaagaaggcagtatcaaaggtaaagttattgatatattacatgatcctgcaagaaccgctcctattgctgaagtaaaattcgaaaatggtgaaaagaaatatatcctagcacctgaaagcatccaaattaatgatgaaattgaatgcggtatttccgctcctattaaatttggtaacacattaccacttgctgaaattcctgaaggtactccaatttatgatattgaaaacacacctggtgatggcggacgttttgtaagatcttctggaacttatgcttctgtagttactcatgatgcaaatcaagctgttgttgaattaccatctggagaattaaaatacttaaatcctaattgccgtgcaagtattggtgtagttgctggtggaggtagaaaagataaaccattccttaaagctggtaaaagatggcatgcttataaagctaaaggtaagaaattcatgactgttagaggagtagcaatgaatgctgtagatcaccctcatgggggaggtaacagacaacatcctggtcgtccaactactgtttcaagacatgcaccgccaggaagaaaagttggttcaattgcagctaagagaacaggtttaaaaagatag

SEQ ID NO: 7356 - DNA, 411 bp, Methanobrevibacter gottschalkii
  source 1..411: mol_type = genomic DNA
ttggcaagaaaaatatttaaatataaaggttatactcttgaagaacttcaacaaatgtctttagaggaagtaatggaattattccctgcaagacaaagaagatctttaaaaagaggattcttaccaagacaacaaattgttttggataaaatgagaaaattaaataaagaaggaactaaagatggtcgtcctgttgttattaggacccactgtagagacatgattgttatacctgagatggttggaaccacttttggtatttatgatggtcaaaattttgttgaagttactattgcgccagaaatgattggtcattactttggtgaatacgcaccaacaagaaaaagagttcaacacggagacccaggtatgggtgctactagatcatccatgtttgtaccacttaaataa

SEQ ID NO: 7357 - DNA, 465 bp, Methanobrevibacter gottschalkii
  source 1..465: mol_type = genomic DNA
atggctaacaaatatgcttataatgaagaagttgatgaagcaaaaactgcacgtgctatggcaaaatctcttaagatttctccaaaacacagtgttgagatttgcagtgcaatcagaggaatggatgtaggtaaagctaaagattacttagaagatgttattgaaatgaaaaaagcagttcctttcaaaagacacaacaaaaaagttggtcacagaaaaggactcaaaggatgggcttctggtagataccctgtaaaagctgctgaacaaatattgaaagttttagaaaatgcagaagctaatgcagagtacaaaggtatggatactgaaaaattattcattgaacatatctcaagtcataaaggtgttgtaattccaggatatatcccaagagcattcggtagaatgactccattcaatacacctactactcatattcaaattgtattacaggaggctaactaa

SEQ ID NO: 7358 - DNA, 756 bp, Methanobrevibacter gottschalkii
  source 1..756: mol_type = genomic DNA
atgatagaaaaagattttgtcacagagggccttaaaagaactagaattgatgaatacttagaaaaagaactagaaagagctggatacggtggtatggatgttcaaattactcctttaggaaccatggttgttgtttatgcagaaagacctggtatggttattggtagagggggtaaaaatgtaagagctattaccaacactcttaaaactgattttggtttagataatcctcaaattgaagttaaagaagttgaagttcctgaacttaatcctaaaatcatggcttacaaaatatctaatatgttacaaaggggaatgcacttcagaagagttgcttactcaaccattcgtagaattatgggtgcaggagctcaaggtgttgaagtaaccatttctggtaaaattagaggttcaagatctgctgtagctaaattcgttgaaggatacattaaaaaatgtggtgaaccttcaatcagattagttgaagaaggttttgctactgctcaattaaaacctggtgttttaggtatttatgtaagaattatgcctccagaaactgtattacctgattctgttgaaattcttcctcctaaaataatcatcgaagaagatggtgaagttactgaagaagaaattgatattgaaactgaagaagtcatcgaagaagatatcattgaagaagtcgaagacctcgatgaattagaagaagttgttgaagaagaatctactgaagaagtagaggaagacgatagttaa

SEQ ID NO: 7359 - DNA, 207 bp, Methanobrevibacter gottschalkii
  source 1..207: mol_type = genomic DNA
atggcgattttaagaagtaaagaaatttgggacatggaagttgatgagattcaagataaattagttgaactcagagctgaattatccaaaaacatttctaaaagtgcagctgccgggattaatgaaaatcctgggaaaattagagaattaaaaagaactattgctcgtgttcttacaataatgaacgaaaaacaaaaggagaattaa

SEQ ID NO: 7360 - DNA, 339 bp, Methanobrevibacter gottschalkii
  source 1..339: mol_type = genomic DNA
atgtcaaaaatttgtgatgtatgtgggcttcctgaagaactttgtgtttgtgaagaaattgcacgtgaagttcaatctttgaaagtttttactgtaaggagaagatttggaaaactcatgactattatcgaaggtatagatgaacacgatatcgacataagagaactcacaaaaacccttaaagcaaaatgtgcttgtgggggaactgctaaaaatggtcaaatagaactccaaggagatcataaagttaaggtcaaaaaagttttatctgacatgggtttctcatctgatactattgagattcgtgaatctaagaaaaataataagaaaaggagataa

SEQ ID NO: 7361 - DNA, 279 bp, Methanobrevibacter gottschalkii
  source 1..279: mol_type = genomic DNA
atgattacttcaaataatttggttcatcatgaattcattggattaagaattcatgccatgaatccgaagaatccttctcttaatttaaaaggaacagttattgatgagacaaaaaataccataattattgaagaagaagataacaatgaaaaaatgattcctaaaaatggaacttttttcgtgtttgaacttccgaatggggaaaaaattaaaattgatggtaatattttgtctattcgtcctgaagatagaataaaaaaaagatttaaaaaaatataa

SEQ ID NO: 7362 - DNA, 318 bp, Methanobrevibacter gottschalkii
  source 1..318: mol_type = genomic DNA
atggttgggcttaacgttcaagaaccagaaactacatgtaatgaccctaactgccctttccatggaactttatctgtaagaggtcaagttcttgaaggaattgttgtaagtaacaaagcagaaagaactattactgttgaacgtagttactataaattcattaaaaaatacgaaagatatgaaaaaaggaaatctaaaatcaatgttcacaaaccagattgcttgaatgtgaatgttggtgattctgtaaaaattgcagaatgtagaccattaagtaaaactaaacattttgttttagttgaagttaaaggagagtaa

SEQ ID NO: 7363 - DNA, 399 bp, Methanobrevibacter gottschalkii
  source 1..399: mol_type = genomic DNA
atgaaaccattaacctcaagtgtaactaaagcattaccaattggagcaaccctccagtgtgttgataatactggtgctcgtgaaatcgaaattatttctgtaaaaggatttaaaggagtaagaagaagactcgatgttgctggtgttggagacttagttgttgcttctgttaaaaaaggaactgctgatatgagaagagaagttgtcaatgcagttgtagttagacaaaaaaaggaatataggcgtgctgatggtcttcgtgttaaatttgaagataatgctgctgttattattactccagagggtattttaaaaggatctgaaattagaggtcctgttgcaaaagaagcagctgacagatggcctagtgtaggtagtgctgctaatattttagtatag

SEQ ID NO: 7364 - DNA, 351 bp, Methanobrevibacter gottschalkii
  source 1..351: mol_type = genomic DNA
atgtcaattcaaccaagaaaacaaagaaaagctcgttatactgctcctgctcatgcacgtggtaaatatttaagtgcttctgtaagtaaagatttaagggaaaaagttggtaaaagatctttaccggttataacaggagacaaagttagagttgtccgtggagactttaaaggacatgaaggagaagttctcactgtagattatacttcttataaagttactatcgaagaagttactttatctaaacctgatggaactgtcactttccttccagtcgatccatctaacttagtaattattgatgcaaatttaaaagacgatagaagaattaaaaataaaggagataattaa

SEQ ID NO: 7365 - DNA, 729 bp, Methanobrevibacter gottschalkii
  source 1..729: mol_type = genomic DNA
atggctaaaatgggatctagaaaacatcttaaaagatacaaagcaccaaaatcttggcctattcatcctaaagaagatacttggactgtaaaaccttccgcaggttctcattccattaatgattctattccattaactttagttattagagatgttttaaaattagctgataatgcaagagaagcaaaaagaattatcaactccggtaacatttttataaatggaatcattgttaaagattataaattcccagtaggatttatggatgttcttgacattccaaaaactgaagaatcttatagagttcttttagatagaaaaggaagattacaattaaaattaattgaagatgcaagtgctaaattatctaaaattgttaacaaaaccactattaaaggtggaaaaactcaattaaaccttcatgatggtaaaaatgttatcattgatgaagatgcttactctgttggggatgttatttgtttaaaagtacctgaacaagaaattgttgaagcatatcctttacaagaaggagctactatccttgttactggtggtaaacacaccggtgaattaggtactgtatctgaaattattgaaaacaaatccactaatccaaatactattatcattgaaaatagtgctaaagatgaattcttaactttaaaagaatatgcatttgtagttggtaatgatgcaccagtaattgatttattggaggttaataaatga

SEQ ID NO: 7366 - DNA, 513 bp, Methanobrevibacter gottschalkii
  source 1..513: mol_type = genomic DNA
atgaacccaatgaatgaagtacgtattgaaaaagctactgtaagtatcggtgttggtgaagcaggtgaaaaattatctcgtgctattactcttttagaaaatatgttcgatcaaactcctgttaaaactttttccaaagttactaacccagaatggggaattaggaaaaaacaacctatcgcatgtaaattaactttacgtggagaaaaagcagataaagctattgatatggtattggaaggtattagtagaaatattaaacctactcaatttgatgcacaaggaaacctttcttttggtattaaagaacatattgatattccaggtatgagatataatccagatattggtattttcggtatgaatgtttctgttacttttgaaaaaccaggttacagaatttctagaagaaaaatccaacaaaagaaagttcctcaaaaacataggatttctaaagaagaaactatgaaatttatggaagaaaactttaaagttaattacgtaactgaataa

SEQ ID NO: 7367 - DNA, 144 bp, Methanobrevibacter gottschalkii
  source 1..144: mol_type = genomic DNA
ttgccaagaaaatacggaaaagctgctaaaaaatgtagtcgttgtggagaccactctgctatgattagtagatatggattaaacttatgcagacaatgttttagggaaattgctcctaaaattggatttaaaaaatataattag

SEQ ID NO: 7368 - DNA, 393 bp, Methanobrevibacter gottschalkii
  source 1..393: mol_type = genomic DNA
atgagtcttatggatcctcttgctgatgctttaactaatattagaaataacgaattacaagtaaatggttcttgtgttatttctccagcttcaaaattaattggacaagttttaagcacaatgcaaaaagagaattatattggtaattttgaatatgttgatgacaatagggcaggtaaattcactgttgaattaataggtaacattaacaaatgtggtgttatcaaacctcgtcatgctgttaagaaagatgaatttgaaaaatttgaaaaaagatatttgccagcaaaaaactttggtattttaatcgtcactactcctcaaggaattatgactcacaatgaggctaaagaaagaggaattggtggacgtttgttggcttacatgtattag

SEQ ID NO: 7369 - DNA, 537 bp, Methanobrevibacter gottschalkii
  source 1..537: mol_type = genomic DNA
atggtagtagctgcagctataagggaagaaattgcaatccctgaaggcgttgaagttataattgaaaacaatgaggtttctgtaaaaggacctaatggagaagactccagaaaatttacttatcctaatgtaaatattaaagaagaagaaaatgttgttattttagaaactgtatttcctaaaaagaaagataaagcaatgattggaaccacaagggcacacattaacaatatgattgtcggagtaactgatggttttacttaccacatgaaaatcgtatttgctcactttccaatgactgtaaaagttcaaaaagatactgtagtaattgacaacttcctcggggaaagacacccaagaactgctaaaattgttggttctgctaaagtagcagttaaaggtgatgaggtaacaattaccggtattaataaggaacatgttggtcaaactatggctaatttagaacaagcaactaaaattaaaggaagagatcctagagtattccaagacggaatatatttaattagcagggaataa

SEQ ID NO: 7370 - DNA, 330 bp, Methanobrevibacter gottschalkii
  source 1..330: mol_type = genomic DNA
atggctaataaaagatttaaaagacaagaatatgctcgttataaaaaacttggaatcaaatggagacgccctagaggtaaaaccagtaaaatgagaagatatgaagctggtaaacctgacatgccggcaattggttacagaacccctagagctattagggatttacacccttcaggattcaaagatgttcttgttcataatatgcaagaattagaagacttagatccagctactgaagctgctagaataagtgcttctatcgggaaaagaaaaaaagatttaatgcttgcaaaagcattagaacttggtattaaagttttaaataaataa

SEQ ID NO: 7371 - DNA, 456 bp, Methanobrevibacter gottschalkii
  source 1..456: mol_type = genomic DNA
atgaatcttacaactcaaaaaagattagctgctagtatcctcaaagtaggacttaatcgtgtttggattgatccagaaagattagaagaagtatctatggcgattactagagaaggagtaaagcagttaattaatgatggagctattaaagcaaaacctcaaaaaggtattagtagctacagatctaagaaaattaaagaacaaaaagcaaaaggaaaaagaaaaggtagaggtagtattaaaggagctaaaaaagcacgtactcctaagaaaaaagcttggatgactactatcagagctttaagaaaagatcttaaagaaatgcgtgaagatgaagtaattgatgttactacctaccgtaaattatataaaatggctaagggtggcgcattcagaagtaaatcttacatgagaaactatgcccgtgaccatgatttaattaaaggagatgagtaa

SEQ ID NO: 7372 - DNA, 582 bp, Methanobrevibacter gottschalkii
  source 1..582: mol_type = genomic DNA
atggcacatggaactaattataaagtagctttcagaagaagaagagaaggtaaaactgattatgcagcaagaatgaaattagtcagttatgacaaacctcgtttagttgttagagtttctaactctcatgctactgttcaggttattaattatgctcctgaaggagatttaactgtagcttcagctgtaagtaaacaattagcaaaatatggttatttaggacatactggtaaccttacttcattttacttaactgcttatctttgtgctaaaagagcattagctaaaggtgttgaaagtgcaattttagatattggtttaaaatctccaattaaaggatctaaagtctttgcagctcttaaaggtgctgttgatgcaggtttagaaattcctcacggtgatttcattttcccagaagatgatcgtattaatggaggacatattgctgcatatgctgaatctttagatgctgaagaagttgctaaaaaattctcaaagtattttgaaagaggtctcaatcctaaagatttacctgcaaactttgaagaaactattaaaaatattgatgaggcaggggaataa

SEQ ID NO: 7373 - DNA, 642 bp, Methanobrevibacter gottschalkii
  source 1..642: mol_type = genomic DNA
atgagttttaatattgatgaatgggaacctaaaactaaattgggtagattagttaaagatggaaccattactgatatcgatgaaatctttgaaaaaggtcttccgattatggaattagaaatagttgatgctttaattccagatttagaagaagaagtaatggatgttaacttagttcaaaggatgcataaatctggtagaaaagttaatttcagagtaattgttgctgtaggtaataaaaatggttatgtgggattaggccaaggcaaagctaaagaggttggtcctgctattagaaaagctgtagacaatgctaaatacaatcttattaaagtaagaagaggttgtggagattggggttgtgtatgtggaagagaacatactgtaccatttaaagtacaaggtaaaaccagtagtgtaagtgtaaacttaatccctgcacctgcaggagtaggtttagtaattggtgatgttggtaaaactattttaaaactcgccggtattcatgatgtatggtcccaatcatttggacaaactcaaactactgtaaacttcgctaatgcagtgtttgctgctttaaaagaattaagtaatgtaaaagcaagtcaagaagacctcaaaaaaatgggcgttaactactaa

SEQ ID NO: 7374 - DNA, 459 bp, Methanobrevibacter gottschalkii
  source 1..459: mol_type = genomic DNA
atgtttttagttattagagttagaggaactactggtgttattaaaaatattgcaaacaccttagacatgttaagacttaacagaatcagccatgcagtactcgttgaagaaaatcctagttttgaaggtatgcttcaaaaagctaaggattacatcacttggggtgaaattgatgcagaaactttatctgcactcattgctaaaagaggaagactcccaggtaatgtaaaagtcactgacgaatacgttgcagaaaatactgattacaaagatattgctgatttagctcaagctttaattgagtctaaagttaaattagctgatgttggaattaaacctgtattccgtttacaccctcctagaaaaggatataaagatattcgtttatctgtacaagaaggtggatccttaggttacaggggagaaaacattaaggaactagcaaagaaaatgctttaa

SEQ ID NO: 7375 - DNA, 438 bp, Methanobrevibacter gottschalkii
  source 1..438: mol_type = genomic DNA
atgattagaacaaaacgtaaaattaacaaacaaagaggttctagatccaacggtggaggctgtactaaaaaacgtagaggtgcaggtaacaaaggtggaaaaggaaaagcaggtatgggcaaacaacattggacctggactgtaatccatgatcctaaccactttggtaaacatggttttaaaagacctcaaaaaatgattaataaagtcaatgctgttaatttaaattatttggaagaacaagctgataaattacttgcaaatggtaaagcatctcaagatggtgacgctattgtaattgatgtaacagaattaggttacgacaaagttttaggtaaaggtaaaattactaaaactttcaaaatttcagctcctcaattttcagcatctgctgttgaaaaaattgaagaattaggaggagaagctatagaattatag

SEQ ID NO: 7376 - DNA, 1362 bp, Methanobrevibacter gottschalkii
  source 1..1362: mol_type = genomic DNA
atgtcatcactagaatttttagagccagtctttaaaattgttccagaagtaaaatctcctgttcatagagaagattttaatgaaaaacttaaatggactgctcttgttttagttttatattttatattaactcaaattccattatatgggttagctcctggagctattgattcatttgctcagttaagagcagttatggcaggaagtttcggttccatccttacattaggtattggtccgattgttactgcatctattgttttacaattattagttggttcaaatcttttggatttggatttatcttctcataaggataaatctcatttccaagctactcaaaaaattctttctatagtttttacattttttgaagcaagtgttttagtattaactggtaatttagtaccaattgatggttcttacactttaatattgatcatccaacttgttgtcggggcattagtaattatttatctggatgaagtggtttcaaaatggggattcggtagtggtattggtttattcattgctgctggtgtatgtcaagccattattgtaggtactttcagtatcttgaatggttcagatggattattagcaggtattattcctaaatttatccaacttgctaccggcggtacttttgacttctcaattttagttccattaatagcaactattattgtatttgtagttgttttatacggtgaggctatgaaagtagaaattcctatatctcatggtcaagttaaaggtcatggtagaattaggggatctgttggtaaatatccattaaaatttgtttactcaagtaatatgccagtaattttaactagtgcattgcttgtaaacgttactttatttgcaaatgttttccaaaaaattggtgttccaattctaggacatcttcaaaatggtaaagctgttgatggtattgcctggttattgtccacacctaacttaaccatgtttattacagaaccgattcatgttcttgtatatgcattatttttcattgcttgttgtatattattctcatatttatgggttgaaatcagtggattaaatgctaaaaagatttctgagcagcttcataaatccggtattcaaataccagggtttagaagtagtaaacgtcaattatataaaattttgaaaaaatatattcctgcacttaccattataagtggtgtttatgtaggtctcattgctttccttgcagatttaactggtgctttaggtggaggtactggtgtattgcttactgtaggtattcttcataaactttatgaagaaatggctcaagaacagcttatgtctgcaaatcctgttcttaggaaagttttaggaggagattaa

SEQ ID NO: 7377 - DNA, 576 bp, Methanobrevibacter gottschalkii
  source 1..576: mol_type = genomic DNA
atgcgggggattaaattgaaattagtagtattaactggtattccaggttctggaagtacaactttacttaataaagctttagaacaagttgattatgttcatttaaattatggggacataatgactgaaattgcaattaatgaaaatattgctgataatagagattctttaagaaaattaccagctgaaacacaaaaaaaaattcaagctaaagcagcaaaagagattaaacaaagatctgaaaatgataacgttattgtagatactcattgtactattaacacacctgccggatttttaccggggcttccaaattgggttttagaacaattacaaccggatctttttattttaattgaagctaatgctgatgaaatcatttacagaagattaaatgatgatactcgtcaaagagatgttcaaaaagctaaagaaattcagttacatcaagaaatgaacagagcaacttctatggcttatgcaactttaacaggtgctactgttaaaatcgtcgaaaaccatgataatcatttagattcttctgtttcaaaattagtggatgttttaaatttataa

SEQ ID NO: 7378 - DNA, 579 bp, Methanobrevibacter gottschalkii
  source 1..579: mol_type = genomic DNA
atgtttgatattatgggaatgatctatggtgttttgaatactattttcgatccgattcttgctatggatccgaatccaagtaatccggcattaactgtattgattattgcatttattgtatctttaattacaactattgctaataaatatttggttgatcaagatgcattaaatgaaaaacaagcaaaaatgaaagagttcaataaagaacttagggatgctcagaaaagaggtgatggtaaaaaaattgctgaacttcaagctagacaaactgaaatgatgaaagaaaatactgcgatgatgtcagaacaatttaaaccaatgattgttacttttgttccgattattttaatatttttctggatgagagcatctgcaattcatgatttggtaattatattgcctactactgtatattgggttactttaactcctctttggcatgtaattggcagtatgttctatggtggtcaagctactattccatatgggattggttggttattatggtatatgatttgcactttcggtatgagtcaaattttaagaaaattcctaggattcaaacaagggttctaa

SEQ ID NO: 7379 - DNA, 267 bp, Methanobrevibacter gottschalkii
  source 1..267: mol_type = genomic DNA
atgcctgctaataggtttagatcaagatcatataaaagagttcataaaaaaactcctggtggagtaaatgttttaagatataaaaagaaaaaaccatctaagcatgtttgtgctgaatgtggtgcagtattacatggtgttcctcgtggacgcccatatgaaattagaaaattatcaaaaacagctagaagacctagtcgtccatatggtgggtacttatgctcagcttgtacccgtaaacatttcaaaaaagaggctagaaaataa

SEQ ID NO: 7380 - DNA, 522 bp, Methanobrevibacter gottschalkii
  source 1..522: mol_type = genomic DNA
atgattattacaatcggcggattagctggaactggaactactacacttgctgaagttttaagtgaaaaattaaatgttccttatatttctgcaggttttatctttagggaaatggctgctgaaagagggatgagtgttttagaattcagtgaatttgctgaaggtaatgctgaaattgataaggaaattgacaagcgtcaagctgaaaaagctaaatcttcagataatttaatacttgaaggaagattatctgcattttttgttgaaaatgctgatttgaagatttgtttaatgactccatttgaggttagatctaaaagaatagctcaaagggaaggtaaatctgtagatgtggctaaaaacgaaattatcattcgtgaagaaagtgaatctttaagatacaaagaaattcataatattgatattcgtaatatggaaatttatgatttaattataaatactgatagctttaatccagaaagcatatcagaaatcattacaacaacattaaaggtgatataa

SEQ ID NO: 7381 - DNA, 222 bp, Methanobrevibacter gottschalkii
  source 1..222: mol_type = genomic DNA
atggcatcaattgaagtaggtagagtatgtgttaaaactgctggtagagaagcaggcaaaaaatgtgcgattgttgaaattattgatgaaaattttgtagaagtaattggtgaagctgtaaaaaacagaagatgtaatgtagctcacttagaaccaactgcagattctatcgatgtttctggtgatgcagaatctatcaaggcagccttagctgacttataa

SEQ ID NO: 7382 - DNA, 966 bp, Methanobrevibacter gottschalkii
  source 1..966: mol_type = genomic DNA
atgaagttcaatagaatggtcaaatctaaaagtttcacttctccggatttcgggtgtaaaccagaggaaagagagatttccgaatatatttctaaaggtgtaatcaatttagataagccatccggtccaacttcgcatgaaattgattcttgggttaaaagaattttatctttagaaaaatcaggtcatggtggaacattagatcctaaggtgactggaattttaccagttgggttaaatgatgcgacaagagcaatacaattgttattgactgctccaaaggaatatgtttgtttgttaacattgcatcaagatgttcccgaagaaagaatccgtgaagtttttgctgaattcacaggtaaaatttatcaacttcctccggttaaatccgctgttaaacgtgaattaagaacacgtaatatttactatgcaactatctatgaaatagatgggcgtgatgttttattcagaataggttgtgaggcaggaacttatgttagaacttactgccataatatcggtgaagcgttaggtgttggagcacacatggcggaacttagaagaacccaagtcggttcatttaatgaaaaaaacaatttggtaaccttgcaagatgtaactgatgcatatcatttttatattgaagatggtgatgaatcgtttttacgtcaagcaatcatgccgatggagatggctgctgattatttgccgaaagtcattgttaaagattctgctgttgatgcaatttgccatggtgcagatttagcttgtggtggtattgcagaacttacagataatatccaaaagaatgatattgtagcaattttaacacttaaaggtgagttagttggtgctggttcttcattattaacttcaggtgaaattttagaatctgattcaggttttgctgttaatgtttctaaagtattaatgaaacccggtacttatccgagattctggaaataa

SEQ ID NO: 7383 - DNA, 1767 bp, Methanobrevibacter gottschalkii
  source 1..1767: mol_type = genomic DNA
atgaatgttaaaaacacatttgttataatcttactttttttaatattattttcaacagttacatttgtatctgcagatgatgatagaagctattcaatagatcaagtgataacagatttaacagttaaaaataatggactactacatgtagaagaacagtatgattattcatttgatggagcttttaatggagtttatagggacatacctctaaaatccggagaaagcattgagaatattaaaattcatgttgatggtgcatatgccacatatgaagaaagtgatgatgatggatataaacatgtaaaaatttatttatattccgatgcagcccatactaaaggtataaaagattgtaatgtaaaagtctacattagctacgatttgattggtgcagtaactatttttaatgatgttagtggacttcaatacaaactttggggtgaagaatgggatgttggagctaacaatttaaaagcaacagtacatttacctggaaataatggaaatgaatattatttaaccccctccgagtacaatgatacttcatccttaaaaggaaacacaataactgcagaaagttcatacattccgaaaggcgaatattatgagttacttgttttaatgccagttgatgattttaataaatccccaaatgcaaaacatgtaaatcaaaatggtcatgacatgattatgaaaaacttaaaaaacaccattaacgaacgtgacttttggaatacaacttatttagttttaggattattaactcttataagccccataagtgctataatagtatacttgaaatatggtagagaaccagaagttaattatgatggaatttacgaaagagatttgcccacaaatgatcctccggaaatagttaatgcactgattgaaaataaaataagcattggacatccgaatattaaaggatttgaagcttcaataatgaatcttattgatagaaaattcattacattatcctcacaagaaaatattgaaagcaataccaaagacttaatgttaacattgaataacaaggcaggattgagtgcaagtgaacaaattgtatttgacactcttaaccacttttcaacaaataatattttaaatctttcaacacttaatggacaattatcttcagaaacaaatggtaaatggtttatggaaaaaattagagaatgggaatcatcagttgaaaatgatatggatgtatcaagattttttgatgacagaggttcttcaataatgaatgtaatcggattattaggaatacctttcgctatagcattaattgttcttggatttataacaaatctaaataacggattatatagtatagctggaggaatatttttaataatattttcaatagtaatcaccatgtcagatgatgatatctttggaagatggacagaagaaggtagagtatactatctcaaatggaaaaatttgaagaattttttagaagacaacagtttaattaaagaacatcctccagaatcaataattatttggaagaagtacctaatttatggtgctgctctcggagtagcagacaaagtttacgaatcaatgaaactgcaagtgccaaacatttcagattatgataatgatggattattcatgtatcattattacgggggatatggaatgatgaatatggcattttcaactggtgaaatttcagcaaacccatctgactctagtggattcggtggatctggaggaggatctggaggaggaggtggaggagcgttttag

SEQ ID NO: 7384 - DNA, 558 bp, Methanobrevibacter gottschalkii
  source 1..558: mol_type = genomic DNA
atggattttatactaactatagtaattataatagtagtcttatttattatagttacattaatacatatgtacaataatcttgttggacttagaaatcgtgttaagaacagttatgcacaaattgatgttcagcttaaaagaagaaatgatttaataccgaatcttgttgaaacagtaaaaggttatgcttctcatgagaaaggagttcttgaagaagtaacaaaagccagaaatagtgttatgaatgcttcatccattaaagaaacaagtgttgcagataaccaattgactggtgcattaaaatcacttttcgctgttgctgaaaattaccctgacttaaaagctaatagtaatttccaacaattacaaaacgagttaagtgaaactgaagataaaattgcttattcaagacagttctataatgatgttgttttaaaatataataatgcatgccaacagtttccaagcagcatacttgcaagaatatttggttataaaatagaagactattttgaagctccggaagcagaaaggacagttcctaaagtagaattttaa

SEQ ID NO: 7385 - DNA, 450 bp, Methanobrevibacter gottschalkii
  source 1..450: mol_type = genomic DNA
atggaagacgattttaagcatttagtgcgtatttcaagaaaggacgtaaatggtaataaaaccattgaacaagctttaactgaaattaaaggtgtaggaatctctttatctaaaactatgtgccgtactttggacttagatttagatgctaaaattggatacatcgctgatgaagatgttttaagaattgaagaaattttagaaaaccctcaaaaatttgacattcctagatggatgttgaaccgtagggaagactatgaaactggtgatgacattcacttaattgaatctgatcttgatatgactttaagagatgatttaaatagaatgaaaaagaccagaagttacaaaggtagaagacatgaagttggtttacctgttagaggtcaaagaaccaagtctactttcagaaaaagttcttcagttggtgtaaaacgttcacgtggatag

SEQ ID NO: 7386 - DNA, 540 bp, Methanobrevibacter gottschalkii
  source 1..540: mol_type = genomic DNA
atgggacaacctagaaaatcaaggaaaaagtataatacaccaccacatccttggaatgcggaaagaattaaaaatgaaaataaattaatgactaaatacggcttaaaaaataaaaaagaaatttggaaagccgatactttagtcagaagatacagtagggaagcaagatatttgcttggtttttccactgatcagatgcaagaagaaaaattagaattattaggacacttagctagaactggtattttgcctgaaggtgctgctcttgaagaaatcttagatttaaatgtagaagatatcttaagaagaagattacaaactattgtatacaataaaggtttagctcgtactcctaaagaagcaagaatgtttgttgtacatggacacatagctttaaatggtaaaaaaatcaactcaccaagttatgttgttttaaaaggtcaagaagatgatattggattctaccgttcttcacctgtagctaaacaaattgaagagtacaacaatagtaaatctgataaagttaatactgaggaatag

SEQ ID NO: 7387 - DNA, 393 bp, Methanobrevibacter gottschalkii
  source 1..393: mol_type = genomic DNA
atggcaaaagatgaaaaatggggtatagctaatatttactcatcattcaataacactattattactgtaacagacattactggtgctgaaactatttcccaatggtctggtggaaaagttgtacgtgcagacagacaacaagcttcaccttttgcggctatggctgctgcaactagaattgcggatgatgcaaaagaaaaaggattcgttggtttacatattaaagtaagagctcctggtggaaatggacctagaagtccaggtcctggtgcacaagctactattcgtgctttagcaagagccggaattaaaataggaaaaatagaagatattactccaattcctcacgatggtactggaagacctggtggtaaaagaggaagaagagtttag

SEQ ID NO: 7388 - DNA, 819 bp, Methanobrevibacter gottschalkii
  source 1..819: mol_type = genomic DNA
atggaagggtttaatatggagatagaagttaaaagtcaaaaggatgatgaaatagtattcattgttcgtgatgcagaagtaccttttgttaatgcaattagaagatgtgctatggttaatgtaccaaaaatagctatcgaagatgtaaatattattagaaatgattctgctatgtttaatgaggtgcttgctcatagacttggtttaactcctttagtttctgatcttgatgctcttgaagggttatctttaccggaagatgatgattgggaagagtatactaatggaatcatgttcactttaaaggaagaaggacctaaagtagtttattcaaaggatttaatatcttcagactcaaaaattaaaccagtatacgataccattcctttagtaaaacttaaagacaatgaaaaactcaatatagaatctgttgcaaaagttggatatggaaaggatcatgcaaaatggatgccaaccactgtctgtgcttataaacaatatcctgaaatcacttttaatgatgatttagaaattgattatgattgtgcatctgcatgtcctagaggtgttttaaaatctgataagagatctaaaaagattaaaattttagacattgaaaactgttctatgtgtaaaagttgtgtaagagcttcaactaatggctacattaatgtagggtatcgtgaaaatgatttcatatttagaatagaaactgatggatcaatgcctcctaaagaagttttattaaaagcttgtgaagtattaggtgaaaaagcagataagtttatcagatttagtgaagaaggaggaagtaaataa

SEQ ID NO: 7389 - DNA, 366 bp, Methanobrevibacter gottschalkii
  source 1..366: mol_type = genomic DNA
atggctaaaaagattataaaaactaatcctaaccttattgaacttattaataaactttatgaacaatcaagaaatgaaaatgcagctatttggaaagatgttgcaaaaagacttgaaaggtctaatagaagaaccgctgaagtaaatttgtctgatattgcaagacatgctgaagctggtgaaactattttagtaccgggtaaagttttatcaaatggtaatttaacagaaaaagtagatgttgtagcattaaaattctcagctaaagcgcaagaaaaaattgaaagtgctggtggagaatgcattgcaattgatgaaataatcgaatctaatcctaaaggatcaaacattaggattatggaatag

SEQ ID NO: 7390 - DNA, 423 bp, Methanobrevibacter gottschalkii
  source 1..423: mol_type = genomic DNA
atgattattgacggagaaggatgcgttttaggaagattagctagtgtaactagtaaaaatcttttagaaggcgaagaagtaattattattaatgctgaaaaaattatgttaactggtaataaggattgggcttatgctaaatacaaacaaagagttgacagggcaagtatttctaaccctcgtgatttaggtcctaaatatcctagaagaccggacgatatatttagaagaactgtaagaggtatgttgcctttcaaaaaatctaaaggtaaaactgcattcaaaggattaaaagcgtttgttggcgtacctgctgaatatgctgatgtagaactcactgcagttcctgaagcagaatataaaaatattaaaaaaggtatcgaattaggagaaatctccaaacttttaggagctaccttttag

SEQ ID NO: 7391 - DNA, 402 bp, Methanobrevibacter gottschalkii
  source 1..402: mol_type = genomic DNA
atggttaaagttattcatactagcggaaaacgtaaaacagctatcgcaagaggtactgttcgtgaaggaactggtaaagttagaattaatagaattcctttagaactttattctccagagcttgctaacttaaaattacaagaaccattaaccttagctggtgatttagctaatgaagtggatattaatatccatgttattggtggaggagtaatgggtcaagctgaagctgcacgtatggttattgcaaaagggcttgttcaatggtcacaagatatggatttaaaagaaaaattcactcaatatgacaggactatgttagttggtgacccaagacgttctgaacctaaaaaatatggtggtcctggtgcaagagctcgtaaacaaaaaagttacagataa

SEQ ID NO: 7392 - DNA, 171 bp, Methanobrevibacter gottschalkii
  source 1..171: mol_type = genomic DNA
atgattcctattagatgtttaagttgtggaaaaccagtatcagcagtttttgatgaatataataaaagagttgctgctggagaaaaatctaaagatgttttagatgacttaggtttaactagatattgttgtagaagaatgctaatttctcatgtgcaaacatgggaataa

SEQ ID NO: 7393 - DNA, 183 bp, Methanobrevibacter gottschalkii
  source 1..183: mol_type = genomic DNA
atggatgttgaaaaaaaattaacaaggtttgaaagagctagacttctcggagctagagcaattcaaatatcaatgggtgctaaacctttagttgaaattaaagattctttggatcctattgatatagcttacgaagaacttaaagctggagttttaccattagatgttattagatatgaataa

SEQ ID NO: 7394 - DNA, 1245 bp, Methanobrevibacter gottschalkii
  source 1..1245: mol_type = genomic DNA
ttggttagtataatagaagacgtccaagttcgaaagattttggatagcagaggaaaccctactatagaagtggatgtaattacttggaatagtaagggtagagctgctgcacctagcggagcgagtactggctcatatgaagtagtaccatatcctaaaggtgggattgatgaagttgttagtgaaatggaagatttaattgcttctgaacttattggaatggatgctgaagatttagtaactattgatgaagtattaaaagaagttgatggaactgataatttatctgctattggtggtaatactactgttgctatttcaatggcagtggctaaagctgcagctgcatcttataatatgccattatataaatacattggtggaaatttagtaaatgaattacctttccctttaggaaacatgatgaatggtggagcacatgcgggtattaatgcaccggatattcaggaatttttagttgttcctgttggagctactaatatttctgatgcagtttttgcaaatgcttctgttcataaaagattaaaggagttaattcaatctaaagattcaaactttactggcggtaaaggtgatgaaggtggatgggtgcctaacatttcaaatgatgctgctttagaaattcaagctcgtgcttgtgaagaagtaggggatgaattaggtattgaaattagaccttcacttgatattgctgcatccgaattatggaatgcagctgagcaaaaatatatttatgctcaagatggtattaaaagagataccggagatcaaattgatttcgtaaaagatattattgatacttacaatatgttttatgtggaagatccatttgatgaatctgactttggaggattttctcaattgactgcgaaagttggagataaatgccttatctgtggtgatgatttatttgtgacaaataaagaattattggctaaaggtattgaaatgaaagctgcaaatgctatcattattaaaccaaatcaaattggttccttatctgaaacttatgctactgttaaattagctaaagagaataatattgtccctgttgtatcacataggtctggtgaaactactgatgaaactatcgctcatttggcggttggtttttcatcgccattgattaaaaccggagctattggtggggaaagaatagctaaattaaatgaactaattcgtattgaagaggaacttccaaatccaactatgaacaaattttaa

SEQ ID NO: 7395 - DNA, 195 bp, Methanobrevibacter gottschalkii
  source 1..195: mol_type = genomic DNA
atggctaaagtaactattgattatgataaatgtgatggtgcagactgtgcagaatgttctgacgtctgtcctatggaagtattagttcttaaaggagacaaaattgaaattgttgatccttcagaatgtagttattgtgaagtatgtatggatgtatgtccaaatgattgtattaaaattgaagatgatttttaa

SEQ ID NO: 7396 - DNA, 603 bp, Methanobrevibacter gottschalkii
  source 1..603: mol_type = genomic DNA
atggcaaatgatgaacttttaatagatttagataattacttagcagctggtttacatattggtactcaacaaaaaaccagtgatatggaaaaatatatattcagagtaagatctgatggtttatatgtattggatattcaaaaaactgatgaaagaatcagacaaattgcaaaacttttagcaaaatatgacccagaagatattttagtagttgctaccagacaatatggtcaagctcctgttaagaaattcggtgaaatcaccggtgcaaaaactattcctggcagattcattccaggtactttaactaatccaaattatgctaaatttattgaaccaaaagttattgttgtaactgacccaagatctgatgcacaagcagttttagaatccaaacaaaatggaattcttgttgttgcattatgtgatactgaaaatttacttagtttcgttgatattgcagtacctgttaacaacaaaggtagaaaagctattgctttagtttactggttacttgcaagacaaattttaagagaaagaggagacattcctgaagacggtgacttagatattgattccactgactttgaacttaaattttaa

SEQ ID NO: 7397 - DNA, 849 bp, Methanobrevibacter gottschalkii
  source 1..849: mol_type = genomic DNA
atgttaagacaacctgctgtagccggatcattttatccaaatgatgctgaaaatctaaaaaaaatcattgagagttgttttttagataaatcgggtgttggtttcatacctgaattaaataagtttaatggtaaagattatcctatcaatgttatggttccacatgcaggttatcaatattctggtgcaatagcttctcatagctattgtgacatcgttagaaatggttttcctgaagtttttattattataagtccaaatcacactggattaggtagtgaaatttctgtttttaatgaaggtgaatggataacacctttaggggatgtagaagttgataatgaatttgcaaatgagataatttctatttctgatattgcaagttcagattttcatgcccatgtccatgaacacagtattgaagttcaactacctttccttcaatatttttcttctgattttaaaattgttccaattactatgggaacacaaacatttgcaacttcaaatgatttggctaatgccatttttgaagctggaaataagttaagtaaatcttattgtgttattgcaagcactgacttatctcactttaacaatcaagagaaagcaaataaagttgatggctttgttttagaagatattgaagagatgaatgaattcaaattgtttgaagaagttgttcaatataatattactatgtgtggttatggtcctgtaatgaccaatatttcactttctaaaagatgtgggaaaaattcttgtgaaatattagcatatcaaactagtggggatgtcactggtgattttagctctgttgtgggatatgcttcaggagtttttaaataa

SEQ ID NO: 7398 - DNA, 963 bp, Methanobrevibacter gottschalkii
  source 1..963: mol_type = genomic DNA
atgattgcaaaagcttctgctccggcaaaaactatattgtttggtgaacattcagttgtttacgatgaacctgcaattgcaggagcggttaataaaagggcttatattacaattaaagagtccaaatctgataaatctatttttagagctccagatataggttttgaagctgaattactttcaaaacagaaaaaatacattttaacaaagggaaaacctggtattattagatatattttagaatctctttacagagcacatgaccactctccaatcgacataacattatcatcaaatgtccctattggttctgggcttggttcatcagcagcagttactgtagctacacttgctgcattatataggtatcataatattcggtttaataagaaatctttagcacatgatgcccacatggtagaacaagctgttcagggggtagccagtcctcttgacacattggtttctacttatgggggtcttgtatatttgtctaggaataaaaaagttgaacattttaaagtaaactttaatgctccattggttgtaggttttaccactaaacatggaaatactggaaaaatggttaaagatgttaaaaatttaaaaaatagaaatccaaaaattatcaatcctgtgattactgcaatgggtaatttaactaattatgctaaacaagctattttgaaaaaagattataataaagttggagaattaatgaatatcaatcatggatttttggatgttattggtgtaaatacattagaattatctcgtatggtatataatgcaagagaagctggagctatcggttctaaaactaccggcgccggtggcggaggaagtattattgcactttgtccgggaaaagttgatgaagttgcaaatgctattgctcgtgatgatagtattttaaaagttagatttactagaagaggtgtctcttcaagggtttataagtga

SEQ ID NO: 7399 - DNA, 801 bp, Methanobrevibacter gottschalkii
  source 1..801: mol_type = genomic DNA
atgattattttaaaaattggtggaagtagtttaactaataaagattcctctaaaagtgaagttaattctgatagtcttaaaagaattgctttagaaattaaatcttctttagataattctgcaaaagaattaattgttgttcatggtgcgggatcatttggacatccacctgctaaaaaatataaaatcggcgaggtatttgataaatcagaatatcctcaaaaaagaattggattttgtgaaactcagaatgctgttaaaaaattaaatatgtatgtatgtgaagcattcattgaacaaggtttacctgttgttgcaattcctgcttcaagtttcatgacagctactaataaaagaataactcatggggatttagattcttttaataaatatttggaaaaaggttttattcctgtaatttatggtgatgttgttctagatgatgaattggaattttgtgttatttctggtgatcaattaattcaataccttgcaatgaatttaaatcctaatcaggtaattctcggaacagatgttgatggagtttataataaaaacccaaaaactcatgatgatgctatattttttgataaattatcttcacttgaagagttagatgcatttgaaggaactacaaatgtagatgtcactggtggaatgattgggaaaattaaagaattattatatttagcagatttgggaattgaatctaaaataataaatgcggaagttgaagacaatatttttaaagtattggaaaacgaagatgtaaaaggaactgtgatttcaagggggaagtaa

SEQ ID NO: 7400 - DNA, 1047 bp, Methanobrevibacter gottschalkii
  source 1..1047: mol_type = genomic DNA
atgatttcagatagaaaattagagcatttattaatttgtgaaaattatgatgtttcatttaaaaataaaactaatggttttgaagatattgaattgatccataatgttttacctgaaattgacaaacaggaaattgatttgtccacttctacttttggtaaaaaattagattcacctctttttattacagccattactggaggacatcctgctgcaaaagaaatcaataaacaattagctattgctgctgaaaataataatattgcattaggtgttggatctcaaagagcagcatgtgaacatccggaacttgaggatacttatactgttgttcgtgaaaatgctcctaattgtttacttgttgggaatataggtgcacctcaattaaatttagctgaaaaagcagttgaaatattggatgcagatattctagcaattcatttaaatcctcttcaagaatcaatacagcctgaaggtgatttggatgcaaggggatatcttgatttaatcagtcaaattacaaattcagtcaacattccaattattgcaaaagaaactggctgcggtatatcagcagaatctgcagaagcactagtcgaggcaggtgttgattttattgatattgaaggtgctggtggaactagctgggcggctgttgaaacataccgggctgaagatagatatttaggagaaatattttgggattggggaattccaactgcggttagtacagttgaagttactaatgctattgatgttccagtaatttcatctggaggaattcgcagtggtcttgaagcggccaaagcaattgctcttggagcagatgctgttggtatggctttacctttcttaaaaaattctacctcacaggaacaattaaacaaatttatttcaagattcaatgagtcattaagaattgcaatgtttctagtgggagctagtaatattgatgaattaaaagaatctaagttagttattcgtggaaaaacaagggagtggcttaatgaaagaggtattaacacaaaaaattattcaaggagataa

SEQ ID NO: 7401 - DNA, 1344 bp, Methanobrevibacter gottschalkii
  source 1..1344: mol_type = genomic DNA
atgagcgttgaagtaatcgctattggaggataccaagaagttgggaagaacatgactgctgtcaaagttggtgaagatgtcatcatttttgatatgggtatccatttggacagaattagtatgcatgaagatacagatatcgatagaatgcatagtttagatttaatcgaaagaggagttattcctgatgatacattaatgaaagatgtagatggaaaagtcaaaggaataatcttttcacatggtcatttagaccacattggtgctgttgctaaattagcacatagatatgatgcaccattaattggaactccgtatactgctgctttaattgaaaaacaaattaaaggtgaacgcaaattcaaagtaaataatccaattagacctttaaatgcaggtagtaaattaaaactttcaaaagatattactttagaatttgtccaatcaactcatagtattccacaagcagtatttccggttttacacactccggaaggaattattgtttatgctttagattttaaatttgacaatcatcaaaaagtatctcctcctcctgattataagagattaagagaattaggtagggaaggagtacttgctttaatagtggaaacaactaattctactaattataatgaagttaaaactcattccgagcgtattgctcgaaatatattggaagatgtaatgagaggacctcttcaagagaaaactggtatgatagtcactacattttcatctcatgttgaacgtgtacaagctattgcagatattgctaaaaaaagtcacagagaaatatttttcctaggaagatcaatggaaaggttctgtggtattgcacaaaagttaggtattttaaaattacctaagaatgctagtatttatggatctcctaaagcaataaatagagctttattgagggccgatgaggatagggctaattatttgcttgtaactacaggtcaccaaggtgaacctgatgcattacttccaagaatagctaatggtagaacaccattcaatattaaaaaaggagataatgtaattatttcagcacctattattccaaatccaactaatgctgcaaataggcatatcatggaaagaagattaaaattaaaaggtgcaagaatttatcctaatgctcatgtttctgggcatgctggaagagaagatcacagagaatttttacgcatgttaaaacctcagcatatcataccagcacatggagacttaacaatgctttcagcttatgcagaacttgcagaagaagaaggatatagaattggatatgatattcacatcttgagaaatgctcaagcacaagtttttaaaagttaa

SEQ ID NO: 7402 - DNA, 981 bp, Methanobrevibacter gottschalkii
  source 1..981: mol_type = genomic DNA
atgagtgatgtaaaaaaaatacttggaaattattccactgatattacaagaacaattgaagaagaattatcagcaattactcctaataatcttgcagaagcatcagtttaccttacaagagctggtggtaaaatgcttaggcctgctttaacattaattgctgctgaggctgttggtggtaatcgtgaatctgcattaaaatctgcagccgcaattgaattgatccatacattttcacttattcatgatgatattatggatcaggatgatatgaggagaggaatgccttctgttcataaagtttggggtgatgatgtagcaattcttgcaggagatacattattttcaaaagcttttgaaattatcattggaaataaaggaactacctctgatcagaataacaaatctttagctactgttgctgatgcttgtgtaaaaatttgtgaaggtcaggcattagatatgggctttgaagaaagatttgatgtaacagaagatgaatacatggaaatgattttcaaaaaaactggtgcattaattgcagcggctactaaagttggagctattatgggtggggcatcagaaggagtcattgatgctatgtatgaatatggtcgtttgattggtcttgctttccagattcaggatgattatcttgatttagtatctgatgaagaaacattaggcaaaccaattggttctgatattggtaaaggtaaaatgaccgttattgcaattaaaggtttggctagtgatgatactggcagattgcttgaaatcttaaaagatgatgaaaactcaaatgaagatataactgaagcaatcgatattttaacaaaatgcggcgctattgaatatgctcgtaatttggcattagaatctattaagcaagcaaaagaagtacttgaaatattagatgattcttcatctaaacaaatgcttgtagatattgcagattttgtacttgagagaagtgcataa

SEQ ID NO: 7403 - DNA, 1014 bp, Methanobrevibacter gottschalkii
  source 1..1014: mol_type = genomic DNA
atgttggagattaagcatacattatgcccttcctgtagtgttggttgtgggattaatgtagttttaaaagaggggaatgttgtcgggacttttccctataaaagacatccggttaattctggaaaaaattgtttaaatgggagaaattcaattgaatgttatttaaacaaatttgaagatattaatgtggatgatgttgttgcagatgttttaaaagagttgaaatctgctgatgcatctagtgttactgttgtttgttcaggtaataatgatgttgaggaaattaaggctattaaagaatttgcagaatctaataattttaatttggcattttatgctgataatttaaaaaattttgatgatgttgcaacatatgatgatgttgctgatgcaagcaaaatatttgttattggtgatcttttgtttgaaaatcctttgattggtaggaggattgttcatgcaaagcagaatggtgctaaaatttatgcattggggaagactgaaaaatctgttacattcaatattgcagatgaaactttcaacacttctgtagttgattttttggatgctaatgattctaatattgatgaatcctctgtaattgtatttaattatgttgattcagccgaggatttagataaaattgaatctattggatgtaaatcttttcctgttttcagcaaatccaattctaaaggtgcattggatattgttgaagttaaatctttagatgaaatgatggaattgctggaaaatactaaagttttattggtattcaatgatgatattgctgatgaaatagattttgattttactaaaatctctaaaattataagtttcgctccatgtgaaaataacacaacaaaaatctcagatattgttgtacctattaaaacatggcttgaaaaagacggatcatttgtaaatgcaatgggtgatactcaaactttcaccactgtcatagattcagatgtattaagtgaaatcgaagtaattgaaaaactaaatagttaa

SEQ ID NO: 7404 - DNA, 1143 bp, Methanobrevibacter gottschalkii
  source 1..1143: mol_type = genomic DNA
atgagttatgttttagcaaaatctaaagatgatgatattcttagtgcaggtgaatgtggcggagcggtaactagtattcttaaatatttgcttgatgaaaaacttgttgatggtgttttgacattaaggccatttgatgatatttatgacgctatgccagtatatgtgactgattctgatgatttgataagtactgcggggtcttatcactgtgctcctacaatgattggggatattattgaaagattcattgatgatgatactaaaattgcagtcactgttaaaccttgtgacatgagggctatgaaagagcttataaaaaggcacagaattaatgatgataatgtttatttcattggtttgaattgtggtggaactgtttctcctgttagtggtagaaaaatgattgatttattctatgaagcagatcctaatgatgttgtaagtgaagagatagataaaggtaaattcattatcgagcttgcagatggtggggaagaagcagtaaaaattcatgatcttgaagcagaaggatatgggcgccgtaacaattgtcaaagatgtgatgtaaaaattccaagaatggcggatattgcttgtggaaactggggtgctgaagatggctggacattcattgaaatcaatgatgaaaaaggtcaaaagttagttgatggtgctaaaaaagtgggcattcttgaaactaaaactcctaatgatgcggcggtggaaggaagaagcaaagttgaaaacatcatgattaaaatggcaaaaaagaaccaagatgcaacttacccattggttagtgaaagggatgaatggagccgctgcatcggttgctatgcttgccgtgatatttgccctgtctgctggtgttttgaaaactgcgaattaaacaaatcttacttcaaggatgaggcaaacgcattttcaagtcctattgcttttcagggtgtaagactgtctcatatgagtttcagttgttgtgattgcggtcaatgtgaagatgtatgtccaatggatattcctgtttcactaatttttgacaaattacagaaaaaatactatggaagaactggttatgtagctggagtttcagaggatatcaaacctcctttatacagtccagaaaaaacagaattataa

SEQ ID NO: 7405 - DNA, 402 bp, Methanobrevibacter gottschalkii
  source 1..402: mol_type = genomic DNA
atgtctgaagatttaaaaattgtaggtttattgtgtaattggtgttgttatggtggtgcggatactgcaggaactgcacgtatgcaatatccatcaaatattagaattattcgtgtaatgtgttctgggagaattaatccgtcaatggtctttaaagcatttcaggaaggtgctgacggcgtatttgtaggcgggtgtcatattggtgactgccactatgatgcaggtaactacaaatggtctagaagatctaagattgttgaagatattcttgaggaatttggtattgaaaaggaaagattccgtcatgaatggatttcagcatctgaaggtgaaaaattccaaacaacaatggaagaattccacaaaacattaaccaaattaggaccattagaattataa

SEQ ID NO: 7406 - DNA, 366 bp, Methanobrevibacter gottschalkii
  source 1..366: mol_type = genomic DNA
atggaaatttatatgcaaaaaattggattgattagacaaagtttgaaccctaaaaattcaagtttggatttggatattgattggaatattgagtatgttcatagaaatcaaaatgaaataaattttgacatcaatttaagatcaattgaaaactttaatttaaactttaaaattgaaggggttattgtattagatttatttgaaatttttattcaagaagatgtttctcaaataatttttcatcgtgcatgtaatgttcttatggatatgatatctttaacccgtcaatcaagtcatattttatcaaatgaagataaatatccggatataggcagtgaacatattccaaaaactctctataactaa

SEQ ID NO: 7407 - DNA, 1017 bp, Methanobrevibacter gottschalkii
  source 1..1017: mol_type = genomic DNA
atgttggagattaagcatacattatgcccttcctgtagtgttggttgtgggattaatgtagttttaaaagatggagatattgtcgggacttttccctataaaagacatccggttaattctggaaaaaattgtttaaatgggagaaattcaattgaatgttatttaaacaaatttgaagatattaatgtggatgatgttgttgcagatgttttaaaagagttgaaatctgctgatgcatctagtgttactgttgtttgttcaggtaataatgatgttgaggaaattaaggctattaaagaatttgcagaatctaataattttaatttggcattttatgctgataatttaaaaaattttgatgatgttgcaacatatgatgatgttgccggtgcaagcaaaatatttgttattggtgatcttttgtttgaaaatcctttgattggtaggaggattgttcatgcaaagcagaatggtgctaaaatttatgcattggggaagagtgaaaaatctgttacattcaatattgcagatgaaactttcaacacttctgttgaggaatttttagataaaaatgcaaatgagtttgatgattcctcagtaattgtatttaattatgttgattcagttgatgatttagataaaattaatgaacttaattgcaaaaaattacctgttttcagcaaatccaattctaaaggtacattggatattgttgaagttaaatctttagatgaaatgatggaattgctggaaaatactaaagttttattggtattcaatgatgatattgctgatgaaatagattttgattttactaaaatctctaaaattataagtttcgctccatgtgaaaataacacaacaaaaatctcagatattattgtgcctattaaaacatggcttgaaaaagacggatcatttgtaaatgcaatgggtacttgtcaggagtttactgctgttgtggaatcagatgtattaagtgaaatcgaagtaattgaaaaattaaatggaaactag

SEQ ID NO: 7408 - DNA, 1143 bp, Methanobrevibacter gottschalkii
  source 1..1143: mol_type = genomic DNA
atgagttatgttttagcaaaatctaaagatgatgatattcttagtgcaggtgaatgtggcggagcgataactagtattcttaaatatttgcttgatgaaaaacttgttgatggaattttcgcattaaggccatttgatgatatttatgacgctatgccagtatttataacagattctgaagatttgataagtactgcggggtcttatcactgtgctcctacaatgattggggatattattgaaagattcattgatgatgatactaaaattgcagtcactgttaaaccttgtgacatgagagcaatgcatgaacttgtaattaggcacagaattaatgatgataatgtttatttcattggtttgaattgtggtggaactgtttctcctgttagtggtagaaaaatgattgatttattctatgaagcagatcctaatgatgttgtaagtgaagagatagataaaggtaaattcattatcgagcttgcagatggtggggaagaagcagtaaaaattcatgatcttgaagcagaaggatatgggcgccgaaataattgtcaaagatgtgatgtaaaaattccaagaatggcggatattgcttgtggaaactggggtgctgaagatggctggacattcattgaaatcaacagtgaaaaaggtcaaaagttagttgatggtgctaaaaaagtgggcattcttgaaactaaaactcctaatgatgcggcggtggaaggaagaagcaaagttgaaaacatcatgattaaaatggcaaaaaagaaccaagatgcaacttacccattggttagtgaaatggatgaatggagccgctgcatcggttgctatgcttgccgtgatatttgccctgtctgctggtgtttcgaaaactgcgaattaaacaaatcttacttcaaagatggaacaaatatgcctccgagtcctattgcttttcagggtgtaagactgtctcatatgagtttcagttgttgtgattgcggtcaatgtgaagatgtatgtccaatggatattcctgtttcactaatttttgacaaattacagaaaaaatactatgaacggactggttatgtagctggagtttcagaggatatcaaacctcctttatacagtccagaaaaaacagaattataa

SEQ ID NO: 7409 - DNA, 405 bp, Methanobrevibacter gottschalkii
  source 1..405: mol_type = genomic DNA
atgtctgaagatttaaaaattgtaggtttattgtgtaattggtgttgttatggtggtgcggatactgcaggaactgcacgtatgcaatatcctccgaatattagaattattcgtgtaatgtgttctggaaggattaatccgtcaatggtctttaaagcatttcaggaaggtgctgacggcgtatttgtaggcgggtgtcatattggtgactgccactatgatgcaggtaactacaaatggtctagaagatctaagattgttgaagatattcttgaggagttcggtattgaaaaggaaagattccgtcatgaatggatttcagcatctgaaggtgaaaaattccaaacaacaatggaagaattccacaaaacattaaccaaattaggaccattagaattaaaataa

SEQ ID NO: 7410 - DNA, 1656 bp, Methanobrevibacter gottschalkii
  source 1..1656: mol_type = genomic DNA
atgggtttggagaataaaaaatttttaagcgcactgaataaaaaatttaaaggcgaagatcaggaaaatgaccacaccagtttctattgctttgacggatggaaacaatctgctaggaaaagagaatttaatgaagctgctgaaaaattggctaaagaaagaaacattcctttttataatcctgatattggtgtacctttaggtcaaagacaattaatggcatataaaatttcaggaaccgaagattatgtcgaaggtgatgatttacacttttgtaacaactctgcaatccaacaattagttgatgatattaaaagaacaattattgttggaatggatactgcacattcagtacttcaagaaagattaggtgtagaagtaactcccgaaacaataaacgaatatatggaaaacattaaccatgcacttcccggtggtgccgtagtacaagaacatatggtggaagtacatccgggtcttgtagatgattgttatgcaaaaatatttactggaaatgatgatttagctgatgaattagataaaagactattaattgacattaacaaggagtttccagaagaacaagctgagatgcttaaaagctatgttggaaataaaacttatcaagtaagtagagttccaacacttgtagtaagagcttgtgatggaggtacagtttccagatggtcagcaatgcaaattggtatgagttttattaatgcatacaaattatgtgcaggagaagcagcaattgcagatttctcatatgctgcaaaacatgcagatgttattggaatgggtgcatttttaccatcaagacgtgcaagaggacctaacgaacctggtggtgtagcattcggtacattagcagatatggttcaaacatccagaatatcagatgacccctgtgaagtttccctagaagttattgcagcagctgcagcattatacgaccaagtgtggttaggatcatacatgtcaggtggtgtaggatttacccaatatgcaagtgcagcatatactgatgatattttagacgatttcctttattatggtaaagattatgttgaaaagaaatatggaatgtgtcaagctgatttaagtatggacactgttcgtgacatatcaactgaagtcactctttacggattagaacaatatgaaacaccaaccctcttagaaactcattttggaggttctcaaagagcttcggtagtgtctgcagcagcaggatgttcaactgcatttgctactggaaattccaatgcaggtgtgaatggttggtatttaagtatgattttacacaaagaaacacattctagacttggattttatggttatgatttacaagaccaagcgggtgcatcaaattctttatcaattagaagtgatgaaggtttaatccacgagttaagaggtccaaactacccgaactatgcaatgaatgttggccatcagccagaatatgctggtattgcacaggctcctcatgcagcaagaagagatgcattctgtacaaatccattaattaagattgcatttgcagatcatcatcttacttttgattttagacatccaagaaaagaaattgcaaaaggcgcattaagagaatttatgcctgcaggagaaagagaaataattatcccatcaagataa

SEQ ID NO: 7411 - DNA, 795 bp, Methanobrevibacter gottschalkii
  source 1..795: mol_type = genomic DNA
atggaatataaagcacaatattgtcctggtgaaacaataattgctgaaaatagaagaaagcatatgaatccagaacatgaattcaaaaaaattagatccgtttctgatgaaggacttgtaaaaattttaggccacagaaaccctggtgaaagttataaaactgtacatcccccattggctgaaatggaagatgatggcgatattattaaaagtatcatagaacctactcctggagctgctgaaggaattagagtaagatacatccaatttgcagattcaatgtataatgctccagcacaaccatacgatcgagcaagaacatatatgtggagatataggggagtagacacaggaacattatctggaagacaagttattgaaataagagagcaagatttagaaaaaatatctaaagaattagttgaaacagatatttttgaccctgcaagatgtggtatgagaggagctactgtgcatggacactctttaagacttgatgaaaacggtttaatgtttgatggtcttcaaagatatatttttaatgaagaagatggtcatgtttactacataaaagaccaggtcggacgtcaattagatgaagctatagatgtaggtgttccattagatgaagaatatctaaaagaaattaccacaatatatagagaagacaatattggtatgagacaagataaagaagcgcttgaagttatagaaaatatacatactgcacgtacagaaggaggatatggtatgggagtattttttaaagacttgaaaaagaagttaggtgaatga

SEQ ID NO: 7412 - DNA, 495 bp, Methanobrevibacter gottschalkii
  source 1..495: mol_type = genomic DNA
atggatgaatcagaacaaattaatgttatagatgttaaaattactccatacagatttttaaaacctaaaacaaccgaaaagattttaaatgagatttataaattaaaaggtcaacaaagagtcttaatacatggtccttctattccaaaaaaggttttttacggaccgggtaaaggacatgttgtaaatcacactgatagaaaggaaataaatgttaaaggatgtgatgttgagttacgagtgatggttggggaaataattgttactgtagacatgtcagaattaaaagaatttatgaataatctaaaagacattttagaaacacacatgccatgcgattattatatattaatcggagtatttacacggacaaaaacaacgatttcagattatttaaaatatggaaacaatttcgaaaattctattgacagacgttacattggtttagtagattcacattcaaaaacttctgaaacagtcaaagttattaaataa

SEQ ID NO: 7413 - DNA, 1332 bp, Methanobrevibacter gottschalkii
  source 1..1332: mol_type = genomic DNA
atgaaaatatatgatgacaatttagatttatatggtccagatgggaaaattattgaagaatcagtaccccttgaatctattagtccccttaaaaattctgctatacaacagatgatatatgatattaaaagatcagccgctgttaatttagtaggaattgaaaaaggtttaaaatcaggtgcaatgggtggaaaatccacttatattccaggccgtgaattagatttacctattgttaaaaatgcagaattaattgcaacaaaaattaaaaaaatactacaggttaatgaagatgatgacaccacagtcaatctcattaatggtggacaacagttattagttcaactcccatttgaaagattaaatgtagccgcagattacagtgtatctactttacaaacaagtgcagcaaccattcaatcaatcattgacagctttgaaattaatatgtttgatgcatcaaccattaaaactgcagtaatgggagcatacccaagaacagttgacctttcagggtcaaatattagtgcattacttggaccacccgttcttttagaaggattgggatatggtttaagaaacattatggcaaatcacgtagtggctattacaaataaacaaactttaaatgctgctgcattatcttcaattatggagcaaactgcaatgtttgaaacaggtgatgctacaggagcttttgaaagaatgcatttattgactttagcttatcaaggattaaatgcaaataaccttgtatttgatatagttaaagaaaatggtaaaggaacagtaggtacagttatccaaacattagttggaagagcaattgaagataaaatcattaaagtagctaaaaaaatgccctcaggatataatatgtatgaacctattgattgggcattatggaatgcatatgctgctgcaggtttacttgcagcagtaattattaatgtaggggctgcaagagccgcacaggcagtagcatcaacagtattatactataatgacatgttagaatatgaaactggacttccaggagtggattatggtagaacagaaggtgttggtgtaggattcagtttcttctcacattcaatttatggtggtggaggacccggaactttccatggaaaccatgtggtaacaagacatgcaaaaggaactgcaatcccatgtgcatcagcagcaatgtgtttagatgcaggtactcaaatgttttcagttcaaaggacatcagcattaatcggaactgtttatggcaccatagacaatcttagaaatccaatccccaatgtagcaaaaattgcaggagaaattaaagataaactttga

SEQ ID NO: 7414 - DNA, 822 bp, Methanobrevibacter gottschalkii
  source 1..822: mol_type = genomic DNA
atgagttgttataaatattggggtaaactcgaagaaattgctaataagttatcctcatatggtgatttagataaatatggtgattctgcattagatgatgtggatattaacgaaattattgaaattttagatgatgttgaaattattgctcatgataaaacaatagattttgattctgcaaagcatattcttgatgatgaaaaaatgaataaggcgttgaaattaattagaaaattctatgtttatgttggtgcaagactcgaaaccgaaaaggcaattgaaatgttagaatcggatgatcttgatacaaatctagaatcatttgaattttatgaccgttatgttggattgttaaataatgaaagtcaattagctaaattcaatgaaaataaaacattcgtgtttttaggctccggtccacttccaattactttaatgatgtttaatgaattgtttggatgtaaatgtattggaattgaacagcaagaagatgttgctgaactttcaagaaaacttttaaagaaattaggtcttgaaaatgaaattgaaattatagttggggacgaaaccactattgaatcattggaatatgatattttaatggttgctgctttagcagaaccaaaagaaagggtattctcaaatatctggcaatatgttgatgagaaaactcctgtaatatataggacttatactggaatgagagcaattttatactccccagttttggataaggatacaagaggattccataaagaggtaatgatcctaccaacaggaaatacaaataacacttctgttttaattagaaaaatagtttga

SEQ ID NO: 7415 - DNA, 786 bp, Methanobrevibacter gottschalkii
  source 1..786: mol_type = genomic DNA
atgaaaggaattttgggcgcaatttgtggagatatcattggatcaactcgtgagtttaatccaattaaaacaaaagattttaaacttttcaaacgtaaatctacattcactgatgatactgtaatgacattagctattgcaaactggttaattgaagatacagcctctgaaagtatattgattaaacagttacaatattggggaaataaatatcctgattcaggttatggcggaagatttagaaattggttaaaagaaattgatccgaaaccttacgggagttgggctaatggatctgcaatgagagtttctccctgtccctgggttgcaaattccttacaggaatctcaaaaattagctaaattgtcagctattgtaactcataatcatcctgagggaataaaaggggcacttgcaacttcagatgcaatttatcttgcaaaaactggtgctggtaaagagaagataaaacatcatattgaatctcattacagttatgatttatctcgtagtgtagatgaaataaggactaattattcttttgatgtttcatgtgctggaagtgttccagaatctataatctgctttttagaaggagtttcatttgaagatacaattagaaatgcagtttcacttggtggtgatgcagatacacaagcagctattgctggaagcattgcatctgcatattgggatattccaaaaaatatttcgtataagtcaattaaccgtttgaattatgatttgctaaatgttttagttaattttgaagaaaagttcatgtag

SEQ ID NO: 7416 - DNA, 783 bp, Methanobrevibacter gottschalkii
  source 1..783: mol_type = genomic DNA
atggatgaaaatatagctatacttaaaggaattggtcttactatgtatgaagctcaagcatatgtaacactcgtttcattaatctcatcaaatgcaacagaaatatctgaaaaatcagggattcctcgaagtaaaatatatgatgtactcaaaggactaatccaaaaaaattacattgatgttgaagatggaagacctttaacttacaatgttaaatccccagttgaagtattaagtcttgaaaaaaacagattgactacagaactggatgatacaataactagactaacaaatgtatatgaaaatggaatgagtcaggttcaagcccctatttggaggatttatggtgttgataaaatcataaatcaagaattagaaatcattactcgcgctaaacattcaattaacatgagaatcggatttttatttgaagaagaaggagaagcattagttaaaatactcaaaaaaagaaaaaacttaaatatcaatatacttgcttcaccaacttgctgtattaacaataaaacattcaacattatcaaattttttaaagacaatgacatgccagttcacaaagcagacattccatttgttaaagtattaatttctgattcaaaagaaatgatgcatacatatactaaatttagtgaagacaaaagaactgttcttccagaaaccgcaattggaatttggaacaaatatgaagatattgcaagaaattatgatgagcgattcatgaaccaattacataaaatacaaaataaaaagaaaaaaactacatga

SEQ ID NO: 7417 - DNA, 1308 bp, Methanobrevibacter gottschalkii
  source 1..1308: mol_type = genomic DNA
atggcagatggcttagatatgttttgttatcaatgttctcagactgctcatggtactggctgtactataagtggtgtttgtggtaaaaaaccaaccgtagcaagattacaagataatttaatctttactatgaaaggaattagtgcatacaactacaatgcaaatgttttaggaaaatacaatcctgaaattgatgcatttttaactaaaggtttgtatactactttaactaatgttaatttcgatgctgaggatttagttgctcttgcattggaagcaggtaaaatcagtgtggatgtaatgagattgcttaaagatgcacacatcgaagcatatggtgaaccacaacctgtggaagtaaaagtaggtgcacaagaaggacctgcaattattgtaactggtcacgacttaaaagcattggaagaattattaaaacaagttgaaggtactgatgttaaagtttacactcattccgaaatgttacctgctcatggataccctggacttaacaaatacgaaaatttagtaggtcaattaggtggagcatggcacgatcaaagaacaatcttcaaaaaatacaatgcagctattgttggaaccagtaactgtgtattaccggcacttgatgcatataaagaaagaatgttcaccatggatgtagctaaacttgaaggagtaaaaactattgaaaattatgatttctctgaagtaattgaatgtgcaaaatctttaggatcattagaacctgaagaattaaccactcttactacaggttggagtgcaggtgctattgttgaacatgctgatgcaatcaaaaaattagttgaagaaggtaaaataagaagattcttcgttgtcggtggatgtgacaaagcatcaaaacacaacaactactatagggaatttgtacaaaacttaccgcaagatactgttatcttaacattagcatgcggaaaatacaaatttaatgacttagatttaggtgatattgaaggaatcccaagattattagatttaggtcaatgtaatgacaccattgttgcagttgatgtggcattagctttatgtgaattatttgatatggaattaaatgaattaccattaactattgttctcagttggatggaacaaaaagcagcggcagtactatgggctttactctatcttggaaaaactgacatgtggcttggacctattcttcctgcatggtgtaatgaagacattttaaatgtcttagttgaaaattacaatttgactccaacttctggtaatgcattagtagatatcaaaaaaattatgggggaatag

SEQ ID NO: 7418 - DNA, 330 bp, Methanobrevibacter gottschalkii
  source 1..330: mol_type = genomic DNA
gtgaatgaggatattaaagctaagtctttaaatatccaatttttattggactatcaaaaagatagtgttgtcagtcgtgaaataatcaaaaaagagttaggtacagtcacattctttgcttttgatcaaggtcaaggattgtctgaacactcagctccttttgatgcaatggttcaaattattgatggtgaagctgaaatcacaatttctggtaaaaaaaatactgtttgtgcaggtgaaataattatcatgccagcaaatgaaccgcatgcacttcaagctgaaaattgcccatttaaaatgattttaaccatgattaaatcagattaa

SEQ ID NO: 7419 - DNA, 813 bp, Methanobrevibacter gottschalkii
  source 1..813: mol_type = genomic DNA
atgaaacaatgtattgacaacccaaatgatgtagattgggtgaatttttgggctgaacgcttaaaaaataaaaaaaataaagattgggataaagcagcgcctggtttttataaaagaaccagaaaagatgactatcaagatgcattatttgaaaaattaatacttgatgaaaatgatactgttttagatgtcggttgtggtgaaggttcagtcactatcccaatagctgaaaaagtaagaaaagtaataggaattgattcttctcctaaaatgcttgaatatctcaaaaaaagagctattgaaaataatataaataatattgaaacaattctaaaaccaattgaagacataacttatgatgaaattggaaatgtagatgtagtaatttgctcaagatcactaaacggtattgttcccattgataaaacattatctgaactaaataaaattgcaaacaagtatgttttcataactatttttggacctgaaaataagaaaatcgaaaaagattttgaaaaagaaatagggattaaaactgaagatttcccagattacaactttttctttaacatattatttaatttaggaatttatgcaaatattgaaagatttgacttaagcaattatcgtgaatatgatagtatcaaagaagcaatggacaatggtaaatttagacttgatttatacaatgataaagaaaaagagcttcttgaaaaatatttagaaagaattcttacttacaatagaaaaagtaaaaaatattataatgttaaagacaaagctgattggattttgatttggtggagaaaataa

SEQ ID NO: 7420 - DNA, 1020 bp, Methanobrevibacter gottschalkii
  source 1..1020: mol_type = genomic DNA
atggttattaaaatgaggcttggaaaaactaattttaaagtaaataaaaatggatttggagcccttccaatccaaagaagaaatgaaaaagattcaattgaaatacttaaaaaagcatatgataatggaattaacttttatgattcagctcgtttttacacagacagcgaagggaaactcggaaaagcatttgaagatattcgtgaaaacatttacatcgcaacaaaaactggaacagaaactcctgaagaattttggaatgatttggaaacctcccttaaagaattaaaaactgattatgttgatttataccagtttcataacatttcattttgtccaaaagaagatgatgaattatataaagcaatgcttgaggctaaagaagaaggaacagtgaaacacattggaattacaacccataaaataacacatgcacatgaagcactagatagcggactttatgaaacattacaatacccattttcatacttaagtggtgaagaagagttaaaccttgttgaaaaatgtaggcaattagatgttggttttattgctatgaaaggaatgggcgggggattaattaaaaattcccaagccagttttgcatatatgaatcaatttgataatgtcttaccaatatgggggattcaagaattagaagagcttgatgaatttctatcttatgatgccaatactattttaaccgctgatttaaaagaatatattgaaaaagataaggaagaacttggagtgaacttctgtagaggttgtggatactgtatgccttgtccagaagaaattaatattagtttatgttcaaggatgtctttatggcttagacgttttccgacagaacccagtttagatgaaaaaactcaaaaaattatggaaaaaacaaaagactgcactgaatgctattcatgtgttgataaatgcccatatgaacttgacatacctgaacttttaaaatcaaactatgaagattatcaaaatgttttaagtgggaaaacaaaggtgtga

SEQ ID NO: 7421 - DNA, 1005 bp, Methanobrevibacter gottschalkii
  source 1..1005: mol_type = genomic DNA
atgaatactgacattaacaaagcacaaaaatacatcgatgatgaaaattacaaagatgctattattctagctcgcaaaaaacattcaaaagatgatgttgaaacttatttatccattttagatttattaattgaagcggattacataatagctattgaagaaaaaggaatgtattatcaatattatgataaaacacatgacaatggagattatggtgaaaaatactttgatgaatatctcaaaaaacaaccaaaatccattaatgccctgtgtgacaaagcgatgtccagatttaataaaggacaaattgacgaatctttaaaatatatggatacggcatataaaaattataaaaattattctaaaattgaaaaaccacgtatttctaaaaaagaacttttaattgcaaaaattgaactcctaatgcaagcaaaaagatatgatgatgcattaaaatatcttaataattatgaaaatcaatttggcggcaatcaaaagtcagatttatacaaaggtcaaatgcttcaaaagaacggtaaaaataaagaagcacttgtatatttaaacaagtcattgcttgaagaagatacattagttggatttaatgcaaaaggtgatgcattattcgaccttggaagatatgaagatgcattaaaagaatacaaaaactgcctaaattatgaaagtaaaatagaaggtgatttagaattaattactaattttaattacaaatctgcattttgttgtgtcaatcttggagatgatggtgaagctataaaatatttaaataaaactattaacatgttaaatgaacatggaagacttccaagaaatattgaagcaatatatcagaaatgttcctttgaaaaggaaagaattatgaaaaaaggaaatgtaacagatgaagaattcagaaaaagtaaattcttctcaactaaaacatctttaatcatattgttcattatttttatattttttatcatattaaaattaaatggttattaa

SEQ ID NO: 7422 - DNA, 1671 bp, Methanobrevibacter gottschalkii
  source 1..1671: mol_type = genomic DNA
atgaatgatttagaaaaaattgtttttaaacatgctttattaaatgcggctaaacataaaggaagtgcaaatcccggtgctgtaatgggttcaatcatgtcaaatgaagtagaacttagaagtaaagcaaaagaaattggttcactggcgggtaaaattgtagcaaaggtaaatgctttatcaccagaagaacaagctagtgaaatggaaaagtttggtgttgaagttcaggataaaaaaccaaaaaccaaggattcgggacttcaagaacttccgggaactcatgaaaatatagtattacgttttgctccaaatccaagcggacctttacacatcggacactcaagagcagccgttcctaatgcagaatatgttaaaagacatgatggcaaattaattttgagaattgaagatactgatccgaaaagagtatttgaacctgcttatgaaatgattcctgaagatttagcatggttgggaatagaaccaaatgaaatcgtttaccaatctgatagatttgaaatttattatgattatgctcgccaattaatcgaaaaaggtgctgcttatatgtgtacttgtgatggtgaaacattcaaagaacttaaggataattgtaaaccttgtctatgtagagataacagcgtagaagaaaatcttgcattatgggaaaaatttgatactatggaatctggagaagcagtacttagaataaaaacagatattaatcacaaaaacccggctattcgtgattgggtcgcaatgagattggttgatgaagaacatcctcgtgtaggtactaaatataggatttatccaatgatgaatttctctgtttctgttgatgatcatttaatgggtatgacacatgttctaaggggtaaggaccacttagcaaacagtgaaaaacaaaaatacttatataatcatatgggatgggatttaccagaatttatccattatggaagacttaaaatggaagacatagctctcagtacttcaaaggcgatggcgggaattgaagatggcacatacagcggatgggatgatccgaggctgggaacattaagagctattgcaagaaggggaattgatccaagaacaatttataacttaatcactgaaattggtgttaaaatggccgattctgcaattagctggaaaaaaatttatggattgaatcgtaattttgtagaacccatcgcaaacagatatttcttctgtgaagatcctgttgagattaaaattgatggttataatgatggcgaagtctcaatcgaaagaccgttgcatgcagaccacatagacagggggaataggattttgtcctttgacggtagtgcttatttagcaaaagaagatattgctgacggtatttttagattaatggatgcagttaatgttgaaattgatgggaataaaataatttatcattcaacatcttttgaagatgcgaaaaaagtaaaagctaagattattcaatgggttccaactaaagataatgtaaatgttaaaatagttatggatgatgcatcagctaaaactggagttggtgaggatacacttcgtgatttggaagttggagatattgttcaatttgagagagtgggttttgctcgtttagatgaaatcaaagatgataaattagtattttattatgcacataagtag

SEQ ID NO: 7423 - DNA, 483 bp, Methanobrevibacter gottschalkii
  source 1..483: mol_type = genomic DNA
atgcacataagtagtgataaaatgactatgtttagtaatggttattcaactcttcgaatgccggaggattttgaaccagttaatgccaaagacgagttcaatgatttgtatttagtaaatactaaaattccaatgtctattaaattttcaacaacacctacattagttgggcttccttctataaaagaggatattgaaaagaatattaatgataatcccagaattaatgtaatattgtctgattttatcccaataaatgaggatatttattatttgattgtttcctctttttccgatggtgaaaaagagattagacgtaatgaattcttatatgttgaagataataatttatatatcttcgaattcacttatccttatgcagatagggaacttgatgatttttacctgaatatcatccgttcttttaagattagtgttccaaaatatattgttgaagatggaaattataaattgaatgaataa

SEQ ID NO: 7424 - DNA, 1476 bp, Methanobrevibacter gottschalkii
  source 1..1476: mol_type = genomic DNA
atgaatggaataaccatattaatttggataactattgtaataattggtgtaattgcctgcatattagttaaattacactacaaaggtaatgaactcgaacaagatgaaggatcaataattccaagcacagataaattaaatggaatattatcacaaggaaaagaaaaaattaattcaaaaaaccttactaatagtttatcttcaaaaacaacccgaacccaaaattctcaaaataccaaatcactatacggaaacaaacaacatacctcacaagactatgatgtttatattgtccccgaagttaataataaaaaaacttatgaatatgagtctgaaaaccaagttctcattgattatggagataaagttaaaaaatttcaagaaccaattaaacaaagccagatggatattatgaatcaaaataaagatgataaaacagaattaaaagatttattcacaattgatgaattaattaaagaatctaaaagaaaagataacgaaagagaaaaagagcaaccaaaagttgaagatagtgaattaactgaacttaaagaaagtattgctaagaaacaagaaaatactatcgaaaaatcttctagtgaagaagatattggtgaatttgaaacaattgaaagtttattaaatgaagaagaacttaatgaggatgaaacatctgaagaaattgaaacatcaacaacatcacaaaaaactattgaagaagcaatttcctctgcttctcaagaaaaaaaagaagaaattgaaaacctttctgaaaacgaaaacataactgatgtattattacatgcagatgatgatcaaatggatattcctaatgaagagattaaagaaccaactctaaaaactccaacaaaagtcgatgaatcaaacgattctgaatttaattcccctcttaaagaagacaatgaagaaactatggatttagattatagaaaagatctggataaatttacacaaaaaattaaaggatccaaactcttcaaagatgttaaagaaaaacttactgctgaaccagaagaatacattgaagaaggaattcccaaagatgaaacttatattagaaatgtgaaagaatatgatgactttgagcctattataaacgagacacatgccgattatgtagatcctattggagatattgaacctgcatttgaagataatcagtcattaaaattagaaaataaacctaaagcttttgaagtgattaaggattcttcaaaacctgaagttacacaacaaaaaatcccaactattaaaagtaaaccttcaagaaacaacataaaaataaaattaaataataatgaagtagtacttaaaaaaggagacgaaatcatattcaatcatttaggtgaaacttattccagccaagtttatgctattaatggtgatgatatctccgttaaatacagacgtcaaaatatcataattaaaccagctgatgttaaaaagatatattaa

SEQ ID NO: 7425 - DNA, 1230 bp, Methanobrevibacter gottschalkii
  source 1..1230: mol_type = genomic DNA
atggttgttaaaattaatgaaaattatcttaaattaaaaagcagttatctctttgttgaagtagctagaagggaagcggaattcgtaaaaaataatcctgatgttgatgtcattaaaatgggtattggggatgttacaaaaccattagtgccatctgttgttaaagcattcaaagatgctgttgatgaaatgggaagtgcagatacttttatgggatacggaccggaacaaggttatgaatttttagcagaagctattgtgaaagattatgaaaaatatggaataactcttgatacatcagaaattttcattagtgatggtgctaaatgtgacactggcaatattcaggaaattttcggaattgataataaaattgcagtaactgatccagtctacactgtttatgttgatacaaatgttatggcaggaagaactggtgaaatgaatgatggtatgtatgaaggtttaacttacctcaaatgcaatgctgaaaacggatttgttccagaattgccttcagaacctgttgatattatctatttatgttatccaaataatccaactggtactacattaactaaagatcaattaaaagtgtttgtagattatgcaagagaaaacaaagctattattttatttgatgctgcttatgaagcatttatcaatgaagaaaatgttcctcattctatctatgaaattgaaggtgcagaggaagtagctattgaatttaaaagtttttcaaaaactgcaggatttactggaactcgttgtgcatttacagttgttcctaaacaattgactgcatatgatagtgaaggcaatgaagtagaagttaacccattatggaataggagacaaactaccaaatttaatggtgtttcatatccggtgcaaaaagcagcacaagcaacttattccattgaaggtcaaaaagaaattcaagaagtcattgattattacatggaaaatgcaaaggttatttgtgaaagcttatctaatttgggattggaagtttatggtggaattaattcaccttatatctgggttaaagctccaaataatatggattcatggactttctttgatttgttattaaatgaagcaaatgtgattggaactcctggttctggattcggtccaagcggtgaaggttatttgaggcttactgcatttaatacattagaaaatactaaagaagcaatggataggatttctaaattagaattttag

SEQ ID NO: 7426 - DNA, 693 bp, Methanobrevibacter gottschalkii
  source 1..693: mol_type = genomic DNA
ttgaaaaaaatagaaaaaccggtagaaattgaagatggggattcatttaaagtaatcttatcaaaatatggtgcactggcacttgataaacaagaaaatttagctgaattaattggtgaaacaattggtgatttggatattgaaaatgaggttatttcttttgatgatattaagatgccaattcacgttttgggtttttactcacaagacttaaatcaatggtcttgggcatgggattgtgaagaaatattcggcaataatttaattgcatctgcagtggaaattaaaaaacttggagataaatttgatgttcctgaattcaattcctcattaattaaaacagatttcaatttttgccatactattgcaatgactgcaactactattcttggatttgatggttattatgctgtttctgaagatggtctggatatttttgttgctatcgaatctgatctggttaaagagaacaatgatgttaaaaagttcagagatactttttatactttccaaaagaatttcaatatatttccaaaaattgcttttgaatcttacactaaacttaaaggatatggttttaaaccgcaagatggtttttatttggctaaaataggtgaatctcgtgttatggcggggtttactgaaagaggaaatgtaacacggattttaatgtttggtgaagatgaacagtga

SEQ ID NO: 7427 - DNA, 612 bp, Methanobrevibacter gottschalkii
  source 1..612: mol_type = genomic DNA
atgaacagtgatattatgaatcaggatttagttgatgaattagaatatatggaagagttactcactaaatccggattttttgatagtgaagagatattggaaatattggaagatcagttcattgatgaggatattgatatttctcaatattctgtttcttcaaatgatttttctaatgaaaatttctcaaaattggaaaatgcctttacaaatttagctagtgaaaaaattgtagctattcataattgtggctatgatattagtgaaggagtaaatgatgcatttgaattatatgttcatttgcataataataaattctcagttgaaggtttcagtttttatacttttgaagatattgaagaatctatttgtgaatgcaaattaaagataactttcggtgattttgaaaataatgaagaaatggcattaaaaatcggtaaaatagttttcaaatatctaaaagaagaaaatttcaatattgcttgggatggaacaattaataatcaaattgaaatttatccgtttaaatgggataaatcttatgattctgaaaaagaatatgaaattgaaggagcatatgaagtttttattaaaaatcaggtgttaaaatga

SEQ ID NO: 7428 - DNA, 585 bp, Methanobrevibacter gottschalkii
  source 1..585: mol_type = genomic DNA
atgaatactagatctttaaaattaattcgcgaggttatgattaattcaggtaagtggtcttcaattgaaatatcacaggattcaatttacctgcaatttagagatgttgaacttggaactccaaaaatcgatgaagatttttctctggttgttaggtttgctgatgattcatttttcacagtattctataataatatttgggatattgattttttatcaaaatatgattttaaaaatcagttattaagtgaggaagtatcattcaatattaaagatattaaattcattgattttgaatatttaaatacatttttcactaattataaaaaagagaaatcagtttctgttgttgaggattttaatattcacaatattcgcaatgattttttcatgttgcttgaaactgatgaaatagctattgttgttggtggaaaccaaatggatttcttttcaccttttgaaagattagatgatgcatcgcttcgtgaactttcaaatgattggatgctttattttttaagatatcatcaaaaaagaaatatagttagagatccgatgtgtgaaaaccacccattgaaattataa

SEQ ID NO: 7429 - DNA, 1023 bp, Methanobrevibacter gottschalkii
  source 1..1023: mol_type = genomic DNA
atgacttgtaatattttagttggtggagcatggggtgacgaaggtaaaggaaaatgtattacttatctttgtgacaacgataaaccagatattattgctcgtgcaggagttgggccaaatgcagggcattctgttgaatttaacggagaaaaatatggtttaagattaactccatctggtttcgtccatactggtgctaaactcatgattggagcgggagttctagtaaatccggatgttttatttaaagaatttgaagatttaaagaaatataatgtaaaagagagaatgtgtattgattctagatgtgctattattaatgaagagcacatgactagggataaaggttcagaacatttagctaaaaaaatagggagtactggatctggttgtggaccagcaaattccgacagagtattaagaactattgaattggctcgtgatattccagaacttgaagattacatcactgatgtttcattagaatgtaatgaagctattgatgaaggtaaagatgtatttattgaaggatctcaaggttttgcattatctctttattatggaagttatccatatgtgaccagtaaagacactactgcatctacattcgctgcagatgtaggtgttggaccaactaaagtagatgaagtcattaatgtattcaaatcttatatttctcgtgtcggtgaaggaccattcccaactgaaatgacacaaaaggaagctgaaagtcatggatgggaggaatacggtgttgtaactggacgtcgtagaaggattggatattttgatatggatcttgcaaaagaatcttgcaggattaatggtgcaactcaaattgctctgacttgtgttgataaattatatcccgattgtgcaagaactcaagattatgatgagttatctgcagaaactaaagctttcattgatgatatccagtctgcaactggtgtaccagtaactatcatttcaactgggccggatttgaaagatacaatagatttaagaaaagagttattatag

SEQ ID NO: 7430 - DNA, 495 bp, Methanobrevibacter gottschalkii
  source 1..495: mol_type = genomic DNA
atgtatattcgaaaagcaacacttgatgatttgagtaaaatcatgagcatttataaaattgcacaggatttcatgattgaatcgggaaatccaaaccaatggggacataataatccttcagaagaaaaagtaaaagaggatatagataaaaaaaatagctatctagtctgtaatggagaagacattcatggtgtttttgtaatttttaaaggtattgaaccaacttataaacatattgagaatggtagatggcttaatgaagatgaatatatcacaatacacagaattgcaagtgatggaacacaaaaaggtatttttaagtttttaatagattattgtaaaagtaaatccgaaaatattagaatagatacgcatcacgacaataaaataatgcaaaagttaatagagagaaatggatttcaaaaatgtggaagaatttatgtaacagatggatctccaagaattgcatatcagtggatgaatccattacattaa

SEQ ID NO: 7431 - DNA, 603 bp, Methanobrevibacter gottschalkii
  source 1..603: mol_type = genomic DNA
atgactgatcaatatatgaaaccgcatggtgaagaaggacttcagacaattaaaaatatgaatgaaaaccacaaaaacatctctgaatttgcatttaaatgtgcaattattggagataatgataaaatattagatgccggatgtggtggtggagttaacattgaaaaattcctcaaaataacaaaaaataatgttgacggacttgattattcagaaattgcagtaaccgaatcaataaaaagaaatcagaaagctattgatgatggaagatgtagaattattcaagcagatgtgagcaatatgccatttaaagatgaatgctatgactttataagtgcatttgaaaccatatatttctggccgaatcttgaagaaacctttaaagaagtttcaagaataataaaaccgaatgggcaattcatgatagctcaagaaactgacggcaataatccgaatgatgaaacttgggtaaatactgttgaaggaatgagaatttatactgctccagaattagaaaagtacttacttaatgctggatttagaagtgtggaagtatttaaaaaagaagatgaatacattttagtagttatcgggaaaaaataa

SEQ ID NO: 7432 - DNA, 939 bp, Methanobrevibacter gottschalkii
  source 1..939: mol_type = genomic DNA
atggataaaaagattattgcaattattgttgcattcatagctattgttgctattggaggatatttcctactgggtggtggtagtgataatgtaactatagggtacttgccatctgaccatgatgcggctctttttgttgctgatgcacaagggcaatatgctaaaaatggaattaacactaaacttgttcaatttaacaatggcggggatttgatgactgctatggctagtggggaagttgatgttggttatgttggaatcactccagttttatcttcaattgaaaaaggagttcctgtaaaagttatttcagcagctcaaactgagggttccggaattgttgttgctaaaaactctggaattaattctgtatttgatttggagggtaaaaaaatagctacaccaggtgaagcatctattcaacacatgttgcttcaatattacttaaaacaaaatggtattgatattaaagatgttaaagtatctgcaatgaaagttccttcaatgaatgatgctttaaaaacaaataatatagatggtatgattacttttgagccatatgtatcaattgctgagaaaaacggtgcaaaagttttagttgattcctctgaaatactgccgaatcatccatgttgtgttgttgtggcttctgataaattccttgatgaacatcctaatgaaactcaaaagattttagatattcacaaaaatgcaactgattatataaataataacactgatgaagctgcagaattacttcctagtgatattgttagtgatgtggatgttgaaaaacaagcacttgcaggatttccattcatttctggtttaaatgatacttataaacagaatgtaatggaatttatgaatttggaagttgaattgggcgttttaaagaaaccactatctgaagataaaatattttggaacggtagttaa

SEQ ID NO: 7433 - DNA, 1407 bp, Methanobrevibacter gottschalkii
  source 1..1407: mol_type = genomic DNA
atggaattaataaatttaagtaaaatatcaagtgaagaaattcttgcaggttcctttggtatagaatgggaaagtttaagagtcaaatctaatggggaattagcattaactcctcacccttctgtttttggggataaattaaaaaatcctgttgtaacaactgatttttcagaaagtcaagttgaaataataactcctgcttttgatactgttgatgaggcttttgacactttttcggcattatctgatgtggttaattcatctcttccagagggtgagtatttatggttccagtcccttccatgtattttaccatctccaaatcaaattccaattgcacaatattcacaggaaggtgaagaatcccaaaaataccgggaaaaccttgcatcaaagtatggcgttaaaaaacaattgatttcaggtgttcattttaacttttcatttgatgatggattcattgagaaattacgtaaaattacaaaatctgatttgtcatttagacaatttagggatgaaatttacttaaaaataactagaaattatcttagatattgttggttgataatttatttaactggttgttctattggtgcacatgagtcattttcatctgaatgtattaatttaatggatatgcaagatggatttggaggttattactctacaaaaggaccatcatttagaaatgcgtcatccggatataagaatttaaaaaagttatatccaagttataatagtatttctgagtttactcgtgatgtaactaattttattgataatggtgatttatcagaagctaaagaattatacacacaaataagattaaaacctaaaaatccttctgatgtcttaaattctcttaacgaaactggaattgaatatattgaaattagaactttggatattaatccattttataaatgtgggcttgtaaaacatgatatgaaatttttacatttgttcttaatttatatgtttgttaaaaatgagtctgattatcctgattggcaaagggaagctaatattaatgaggaaagagtagctgaaagagcatttgatgaatctatgagactattaaaagatggcaatgaagtcactcttaaagaatgggcatatgatttaattaatgagatgtatggtatgtgtgatgtttttgatattaatgagtataatacattaaaattaatgcatgatcgtgttttaaatccagaactaactccgggtaaaaagttattgaaactaattaaaagagacggtttcattaatgcacatatgttttccgctattactcataaacaaactagtaagaatttaattaaaaatgttgataaagaggaatacggcagacttaaaaaatatttgaatatagctctttacaggaaaaaatctgataagaatagttaa

SEQ ID NO: 7434 - DNA, 1047 bp, Methanobrevibacter gottschalkii
  source 1..1047: mol_type = genomic DNA
ttgaggcaatatatttataacaatgttcctaatattaaatattataatgaatttaaattgattgatggtgaaaaaatgaataaaaaaattacatttgttttagtgtttgcacttgctgcatgtttagctatgggttcagctagtgctggtcttttcgactttttaggtgggggagatgacactgtaaagataggttacttaccttctgatcacgatgcagcattatttgttgctgatgctaaaggtatgtataaagataataacattacaacagaacttgttcaattcaacaatggtggggatttgatgactgctatggctagtggggaagttgatgttggttatgttggaattactccagttttgtcttcaattgaaaaaaatgtccctgtaaaagttatttcttctgctcaaactgaaggttcaggtattgttgtaactgatgattctggaataaaatctcctgctgatttaaaaggaaaaactattgcaactcctggtgaagcttctattcaacatgctttacttgtttactacttaaatcaaagcgacttaactgttgatgatttaaatgtttctgcaatgaaagttccttctatgaatgatgctttaaaaaccggtcaaattgatggtattgttactttccaaccttatgtgtccattgctgcaaatcaaagtaatgctcacatattagaaaattcatctgaaatattgccaaaccatccatgttgtgttgttgtagcttctgatgattttatcaaaaaccatgaagatcaggcaaaaactattgtaaaaatccatgaaaatgcaactaaattcatcaatgataatgttaaagcaggcaacgcagataaaattgtaaaactcttacctgaagatattgtatctgatgcaaatttggaagctgattctttagctagtttcccatttatttctggtattgataatgatttcaaagcagatgtggatgaattccaagcactggaagtaagtattggtcttttaaataataccattcctcaggataaaatatactgggaagcatag

SEQ ID NO: 7435 - DNA, 627 bp, Methanobrevibacter gottschalkii
  source 1..627: mol_type = genomic DNA
atgaaatttgatttatccgaaatcggaattaaatcaggcttgcaatatgaatgcattaccacaactgttaacaaagaaggtgtgaaaaatgcaggtgcatttgcatttgaatatttgggtgatgataaagtaaaatgccacatctttgaaggatcaaaaactttaaaaaatatcctagatactaatgaatatgtagttaacataacacaaaatccactagttttcacatatgctacattagattgtttaggcgatgaatattatactgatgatgaatcaatagccatcattaaaaacactccagcttacattattgttgatgttgaaaatgttgaaattaaaacacctgaaaattttccaattaaaggagatagcaatatctattttatatatggaaaaatcagaaaattagttgtaaatgatgaaagagcagcagcattcaatagaggaatgtctgcattaattgaatcattagttaacttttcaagatacaaaatagtagatgaagaaaaaagaaaagaatatatggacaaactaattgaaaatcagagagttataaataaagtttcagatgaaaaaactaaaaaggcaatttccgatttaaaatctgaatacgaaaaatactaa

SEQ ID NO: 7436 - DNA, 375 bp, Methanobrevibacter gottschalkii
  source 1..375: mol_type = genomic DNA
atggatggtgaaattgatttagaattatatacaatttcaattattcgattaaattccatttttcaaaaaattgaagataaaaaaatagtaactgatataatttctgatataaatgattgttttaatgatttaaaccagatatatgaagatatattgaacgaattatcaaaagaagaaattaatattaatgaatatgacccattttttgaaaatggaatggtgatgtttccagaatataccaaaagtattgatgaaactataggaaaaatagatgatgaaaaccttaaagttgcattgaatagtttatcagacctttttgtgaaattaattaaagtgggtaatgaatactttgaaaaaagaggtgcattcaaatga

SEQ ID NO: 7437 - DNA, 2097 bp, Methanobrevibacter gottschalkii
  source 1..2097: mol_type = genomic DNA
atggtagatctcaataaaatgtttaaacctgaatctgtggcagttattggagcttcaaatactccaggcaaagttggatatattattgttgataatcttattaatgacggctttaaaggtgaaatatatccaatcaacccgaaaggtggagagattttaggtaaaaaagcatatgcgaatatagaagacgttcctggaaaagtagaccttgcaataattactatcccatcagtatttgtaaatgcagtagttaaagaatgtggtgaagctggtgtggaacatatggtagttattactgctggttttaaagaagtaggcgatgaaggtgctaaattagaagcagaattaacagcaattggcaaagaatatggaataaacataatcggaccaaacagtttaggaattactgattcccacactccaatgaacggatcattttcacaaatgatgccaccaactggaaatatggcattcatctcacaaagtggagctatgatggtagctatcattgactggagtgtaacctccggaattggattcagtaaagttatcagtctaggtaacaaagctggagtaaatgaaattgaactattacaatacttagcagatgatgatgaaactaaagttatcatttgttacttagaatctatttctgagaatgaagacttcgttagaacaatgagagaaactgcacgtaaaaaaccaattatcatacttaaatccggttcaagttcagcaggagcagcagctgcatcttcccacacaggagcacttgcaggcagtgaccttgcatttgatactgcattccgccaatccggaattatccgtgtggacactatggcggaattattcgatttaggtttagcattctcaaaagcaccactcccaagaggagaccatgtagctatcattacaaatgctggtggaggaggagtagttactgtagatgcaatggaaaaagcaggactaaaactcgttcagtttgatgaagaaacaactgaaagattaaaaaaatgtgttacagaagaaggtagtgctaaaaatcctattgatgtattaggagatgcgccagtaagcagatacaaagaatccttggagattgtattgagtcaggatgaagttgacagtttgattgttatggtttgtcctacagcatctgcagacccagatggaattgcaaatgcaatcttagaagaaagaaaagaatttgataaaccaattattgtagtgaacatgggcggtccatcattcgaaaaagcaaacgatgctttaagagaaaatggtgttccaacatatgtattccctgaaactgcagtaacagcactcaaagcaatgacagattatgcaaaactcgaagataaatcatatgatgatgttgttgaaaacatagatgatgttgacaaagatgctgtaaaagccatttttgaaaaagttaaagcagatggaagagacactttgcttggtagtgaagcatatgcagttgctgaagcatatggaatttcagcagcaccaataaaactatctacaaatgctgaagaagcggcttcccttgcagaagaaatggaattcccagttgtacttaaaattgcatccgataaaatattacataaatcagatattggtggtgtaaaagtaggaatcagcagtgctgaagaagccaaatcaacttatgatgagattatcgcaaatgcaaaagcagcacacccagacattatccctgacggcgtagaagtacaaaaaatgatggattctggtgaagaagttattgttggtatgatccgtgatgaacaatttggaccgatgattgcatttggtatgggtggaatctatgttaaccttattgaagatgtttcattcaacctcgcaaaaggtatgagttcacaagaaattgatgaacaaatcaacaccaccaaagtatctcaattgcttgcaggatacagaggagaagcagcttgtgatgttgaagaagttaaggaagcaattaaaagagtagctagattaactttagacttcccagaaatatccgagttagatattaacccgatcttcgtttatgaagaaggttcaagtgcacttgatattaaaattaaattataa

SEQ ID NO: 7438 - DNA, 921 bp, Methanobrevibacter gottschalkii
  source 1..921: mol_type = genomic DNA
atgagcttaattattgcttacataggtaaaaaaggatgtgtaatggctgctgataaaagaagaataggatattttggtgataaaaagaatttagatttattagaagaagaattgtatgaaggatctattggaaatgatgaagaatttttagctagggcatcagaacttggaatttcaattaaaattactgatgatgcaaataagttaaaaacagttggaaattgtattcgtggtgaagtaagtacaaaaggaacactggaaactaaaagaagaaggatttatggtacaactaatggttatcaaatcattgaattattgggttcggatacaaaatcacgtaatgcaggtgaaaacggaattgttatttttggtaataatttcgcaaaacaacttgctcacaatttaatttcaaaaaaattaaaaggttctaaaagtttaaggtatatgggagaagtatttgaagacattttaaaagaagtttcttctaaaactcccactgttggaaaaaacattgatgttttaatgcaacaaccggatttcaataaaacagaagcacaaaaacatttaaacttgacaattgatcacgatattaaagtattgactaaattcagacaagaattaacagaacagattgtccaacagtctattgaaattgaaatggcaaataaaattatcaataaaggtagtgtaggtcatgttgtaaatgttgatggaaacatgttattcatccaattaaatgataaaacacaagcaatggatggtaactggaagcaattagcagcaccgggtcagaatgtgttaatgtttagtgaaagcagtaatgtggaaattggggatgaagttgttattgaaaatgaagagttatgtctaaaaaaagataaatcttctcttaaatgtgatataattttatgttctttataa

SEQ ID NO: 7439 - DNA, 924 bp, Methanobrevibacter gottschalkii
  source 1..924: mol_type = genomic DNA
atgaaaattacatttttaggaagtggtgggggaagattctcctctatttctcagcgaagaatgactggcggttttagaattgataatcttggcggtaagaattatcatatagatcctggtccgggggcacttgtcagaacatatcaatttgggtttgatcctcgcaatctaagtggaatttttgtttcccatgcacatactgatcattataatgatgctgaaattttaattgaagcaatgaccaagggtatgactaaaaataatgggactattcttggaagtgttagtgttttagatggttataaaaaatggggtccatgtatttcaaaataccatcagtcaaaatcaagaactgtcatattggaaccgggtgagactaacgaatttgattcaattaaagtaaaaggtactaaaactcagcatggtgatcctgtaggttccggatttcaaatagattataatggatttaaaatatcttatacttccgataccggctattttgatggattagcaaaagatcacgagggtgcagacattttaatagctagtgtattaaggcctggagaaaaatcaatacctggacatatgtgttcacgtaatttcattgatttaatcgaagaagtaaaaccgaaagttgctgtaatgactcatttgggtcttaaaatgatatccaataatcctgttgttgaggccaaaaaaatttccaaaaaaacgggtgttaaaacaatagctgcatttgatgggttatcatttaatataaactataataatccaagaaaatttaggttaatttcacttaaagatgttgaatcttcaatgcatagcactagtcattcattatttaatagtggtaggagaaactcatatcaaacttcttttagaaataaagagtttgatgagttgtccatagtaaaaagaaactaa

SEQ ID NO: 7440 - DNA, 1101 bp, Methanobrevibacter gottschalkii
  source 1..1101: mol_type = genomic DNA
atgtcaaattcaatcggagaaaaatttaaaataaccagtttcggatcaagtcatggctttggtgttggagcaattgttgacggatgtcctgcaaatcttaaattaacaacagaagacatacaaaaagaactcaataaacggaaacccggaacaagcagtgtgaccacccctagaaaagaaaatgatgaagttcaaattctttctggaatatttgaaggaaaaacagatggcacaccaattacaggcattatctttaataaaaatcaacattcaaaagattattcaatgtttaaaaatactccacgaccatcacacggtgattacagttggatggtgaaatacggaaactatgattacaatggaggaggtagaggtagtggaagagttactattggacatgttattggtggagcaatagctaaaaaactcttaaaaacacaaaaaattgaaattatatcccatgtcgtccaaattggagatattaaagcaaaacctcaagattacagcacaatcaaaaaaaatattgaaaaaaatccaattaggtgtggagatttaaaagcttccaaagaaatggaagaatttattttatctaaaaaacaagaaggtgattctgttggagggattgtagaaacaatagcaattggagttccacaggggttaggagaacctgtctttgaaagattagatggtgatcttgcaagaatattgatgaacattggatcagtgaaaggagttgaaatcggccttggatttgatgtagcaactcatactggatctgagataaatgacgaatatcaaattacaaataataaaataacaacaaagacaaacaattcgggtggaattattgggggaatgagtaatggaatgccaatcacctcaagaattgcagttaaacctacaccctccatttccaaatgccaaaattcaattaatttagaaaaaatggaaaatgaaaaaatagaaattaaaggacgtcatgacccatgtatctgtcctagagtaacagtagtggccgaatcaagtactgcgattgttcttgcagaccatatgattcgctcaggattcatccatcctactaatttggataaaagtatttag

SEQ ID NO: 7441 - DNA, 2628 bp, Methanobrevibacter gottschalkii
  source 1..2628: mol_type = genomic DNA
atgaaacggcatggactttttattttaatattgttaattgtagtattggctataatgaatagtgcatctgctgaaaattcgtcagctgatttgatttcagatactcaatatgagaatagtgttgatattgatgttgctgatgataatttaaagtcttatcaaagtgtatcttctgatttggaagataataatgaggtatataatcttaaattaaatgataattctcaagtggataatacatttttaaaagataatgcttctgtatctgattcaaagatatataaattaggttatgatgttacacatgttgcagataaattgcttaatttctcatctgctgatgacatattggtaattacaactgcaggtatggcttggattgataataaaactactgaaagtgcattaggcgggatagtcgatgcttcaaataattatgtaagttatggaaaaggcaatatattgacattatcttccacaaggaacgatcctactaatattgcattttttattaaaaaagacaattcattaaccatggcattttataaaaatggatctttaactccaattttccatggaaatgcaggtccaacattaagtgctggtgaatggaaaaaactacaaaaagcattaggtgatgaagatgcctattcatacattagtatagctaatgcatggtcagccggaatgcctaatgatgtgttaactcaagctacttatcatggacatgtttgcactggtcttataagtggtcaggctatgattcaaacattattaacttattatccaccaaaagatgaatttggattgcccttagagcatacagcatattatgtacttggagttccgggcggatctgaggatgatgcatttacatggtcattagacattactccaggaaaaagggcgtacataggtattgataccatggtaaataaagccatgactggatttatccgatggaatacaacttcaaatactggaattattattataatgagttataatgaaactgcaataaaagaaagctttaaaaaagtttctggtttaaatcctgatgcaagtgcaactaatgacttgaaataccaaaattggcttattagtaccttacatacaaacccaacatcacttgtcacaatactttatgaatttaaaggattaactaaagataatcttgaatatttgatgggattggaaattggtaagggtaatgtggttaaaagtgctcatggtttggatatgaattatattcttggattaaacttaactaaagcaaatcgtgaagctaatgttaatattgctgaaataaaattaagcgatgctaaattaaaacagataggtattgatgcttgtaacaatgcaattgaatattttagttcacaaggaattaccattagcaaagatttaaataatttatatgttttaacttctgcgggatatgttagaattaatggtactcctacttcaatggtatttgatggtatttacgaagtattaggttcagcactatacaaaaaaacattattcccagttcatacgcctatatggaaagatttagtgtttgatttttattgggtagatccaaataatgttacaaatgattcttcatttagtttgaagtatgatgttgctaaagatgaattaattgttataggcaacaccactagaaatgcaaattacattcttcaaaatgctataaaatatgaccctccatatgatgtattaattggatggttattccacaatcacgtatgtggtggaagtgcaccaggttatttaattgctgattatatatatgaaaacttccccactaatgaaaatgaatcatatatctacttaacaactaatgcgaattgtaaggatgatgtgatttcaagagttttaggtgtatcaccaggtatggggacatattataatttaagatatgataataataaaacaaactcaacaaatgtaggtattgcaattaaatggaatagcaaaaccaaaactggagaattaattattattaatcttgataattggggttcaggagcaatattcaaaaaaggatccaatatgtatgaggaatatattaaactatataaaaaagattattcctctccaaatttaatttcaagaccgcaaatttcaataacagcaagaaaagaaattaatgaagaaatgctgaacaaaattattggaggagcaacggatactaaagaaggaaattctattgcatatattatgaatcttccagacaaacttccaattaataatggagaaaacaacaacaaaaaagacaataaaaaaacaaaaataactggaaacaaaaagaaaacggatggaaagcatataaataatagcagttcatcttcaaattctattgattctaatagtcctacaactggaacttatggaaaatccaatgcaggtttatccgtcggaatttcaaaaaatattataaatgcaaatagtaattctgaaagttcagatgaaagttctggtgatggaaaaacttatgaaataagtaaaaaaagtcctaataaaaaaattaattcaaacaatgccatttttgcaattttagcagttcttgttttaggcggtattgttggatatggttacattagaaaaaatagaggtaaataa

SEQ ID NO: 7442 - DNA, 480 bp, Methanobrevibacter gottschalkii
  source 1..480: mol_type = genomic DNA
gtgatttcaacggttttatcggtatcttatgctcatccgggacatggtcactatgtagatgagattacatctgaagatgttggccatagtaaccacccttcaagtgattcacatgatagttccggtaaagaattatcatcaaaaagttcatcaaatagcagaattgcttcttctcatagtaattcgaaatcaaataaggtttcaagttcggatacctccaattcagatttatcaaataaacacacttcatcacaaagcattaaaagttcaaaaggtgatgtggaacctataaattctcaaaatgaggaaatgccaaataatactcaagttaaaaatacaagcaatattactaatcatacaataactgaagaagcggaaaatacaaacttgctgactcagtcaaacatattattattcattttagtggctattgttgggttttgtatagttgttctatttgataaatttaaaaatcgatga

SEQ ID NO: 7443 - DNA, 1005 bp, Methanobrevibacter gottschalkii
  source 1..1005: mol_type = genomic DNA
atggaatttccaactacaagattgagaagacttagaaaaaatgctaaaattagagatattgttcgtgaaactaaacttctaaaagaagatttaatttatccaatttattttaaagaagaccttcagggattggaaaaagaagaaatttcatcacttcctggtgaattcagatactctttagatagtggtgttgaatttgcaaaagaacttgagtcaaaaggattaaaatcaattattgtatttggaataccgaaagaagaaactaaagatgaaattgcttctccagattattcagcaacaggtattgttcaaaaagcgattagaagacttaaaaacgaaacaaatcttgttataattagtgatgtgtgtttatgccaatatacatctcatggtcattgtggattgattaaagaaaatgaggacactgatgatggaattgaaattttaaacgatgaatcattaccttacattgcaaaagtggcattgtctcatgctgaggcaggtgcagatattgttgcaccatctgacatgatggatgggagaataaaatctattcgtgaaactttagatgaaaatggatattataatgtaatgataatggcttattctgcaaaatatgcatcagctttttatgaaccatttagagttgcagcttgctcatccccacatttgggagataggaaatcttatcaaatggatccgggcaatgcagttgaagcaattcgtgaatgtgagcttgatgtagttgaaggttgtgactttttaatggtaaaaccggcactcccatacttggatgtagttcggatggttcgtgatgagttcatgttacctttagttgcatataatgtaagcggagaatatgcaatgattatggcagctattgagaaaggatttttaacagaaagagcgattaccgaatcgttgctctcaattaaaagagctggtgcagatttgataatcactaacttcgcaccttatttgcttttaaatgatgtgatagaatga

SEQ ID NO: 7444 - DNA, 882 bp, Methanobrevibacter gottschalkii
  source 1..882: mol_type = genomic DNA
atgaatgcatctgaaatcgcaaaaattgctcagattgcatcagcacttgaagtaagcggatatccaaaacctggaaatgttcacagaattcgtgattatgatgatatggagtttgaggactttgtaatcagtggaattgtaattggagacactattcgtgaagcatgtgatgatgttgatgttaaaaatcctaagttgggtaaatacatcttacaagcagtatctgaaactgataaatggattaaaaataacacaaatcttggtattgtcatgatgattattccaattgcagttgcggcagctattagtaattcatttgatgaaattcgtgataatataaaagtattaatgaaaaatacttcagttgatgatgcatgtgatctttatgatgcaattaatattgcagatgcaggggggatgggtgaccaagatgaatatgatgtggctagtgataatgctaaaaagggacttaaagaaaataaacagacaatgtatgatgttttaaaaatctcagctccctgggacatgttagctcgtgaaatgacatcggatatgcccgctgtttttgaaattggttatcctacttatcatgaattgtctaaaaagaaatctaaaaatgaaacttgcattttaacattcttaacattgctctctcaagttcctgatactttaatctcaagaaaatatggttctgatgaagctttaaagatttctatgatgactagggatttgcttaatcttaaaaatgaatctgattttaaagataagcttaaagaattcgatgatttcttatttaaaaataaatataatccgggaacaactgccgatttaactgcagcctctatttttgtaagctatttgaaagataattttatgatttag

SEQ ID NO: 7445 - DNA, 324 bp, Methanobrevibacter gottschalkii
  source 1..324: mol_type = genomic DNA
atggaaattgaatataataaacatgcaacatatcctcctttaattgaggatttagtaaatgaattgttaaaagatgattttgtgcattttaaaattttatgtgcaaatgaagtgcatcattttaataaatctgataattctatcattaaatttgaaactacatatgtaaaagaaacttgtgaaaacggtgatatgttatatattgcatatcctgatattttcagagttaaactgtacagggatgcaactcaatacattaaagataaagaaaaaattgatgcatttaatgatgtcgactggactggaaatagaattatattctag

SEQ ID NO: 7446 - DNA, 1545 bp, Methanobrevibacter gottschalkii
  source 1..1545: mol_type = genomic DNA
atgagtgaggatattaaaaaaaccattaatgaattacatatttacgaaaaaaaacttttaaaagaattggaagcaagtgcaaatgcaaatcccgaaaaaatagctgaaaaaactggcatggatattaaagcagttatgagtgcagccggatctcttgcttcaaaagatattattgaagtagataaagaagttgaagaggtaatttctttatctgatgtgggtttggaatttgttcaggataaacttccagaacgtaaaattcttgatgttttaattgaaaaaaaagaaatacatatgaaagatttgactgatatttctggccttgataaaaaagaatctaatattgctattggttggttacgccgtaaaaactgggctcaaattgataaaggtgttgttaaattaactgatgatggtattgcatttaaagataaactaggtgatgatgaagaattactgaatattttatctgagactaaaaacattataaaagaaaatttgtccggcgatttaattgacggatttaataaattaaatgaaagaaaaaatatcttaaacattaaaaaaaatacctcacattcttttaaacttttagataaaggtgaagcaatactcaaacagggattcactattcaaaaacaagctacccaattaacacaccaacaattaaaagatggggaatggaaaaacttacagtatcgtccttatgatattaatgctgaagcacctattgtttttgctggtaaaaaacatcctttaagggttattattgatgaaatcagagaaatcttcttaaacatgggattttctgaagataatggacaatatgtagaatcagctttttggaactttgattctcttttccaaccacaagatcatgcggctcgtgaaatgcaggatacattttacttaaaaaaccctttaacttgtgatttgccagatatggatttggtaaaacgcactgctgaaactcatgaaactggtgccggcacaggttctgttggctggcagtatgattggagtgaagatattgcacgtcaaagtgttttaagaactcatacaacaggaatttctacaaaacatttatttgaacatgagcctccaatcaaaatgttttctgtggggagagtgtttagaagggaaacttttgattataaacacttacctgagtttcaccaagttgaaggacttgtatgtgatgaaggaattagcttccaaaatcttcttggaactttaaaagaattttataagaaattaggttttgaagtaagattcagaccggcttatttcccttacacttatttatctactgaaaccgaaatttatttggaagaaaaagaaagttggattgaacttggaggggcggggatgtttaggccagaagtgctaaaacctttaggaatcaatcaaccagctttagctttcggtttaggtattgaaaggcttgcaatgattagatatgatgtggaagacattcgtatgctttataagagtgatattaaatggcttcgtgaattacctattgataggggagtcgaattataa

SEQ ID NO: 7447 - DNA, 774 bp, Methanobrevibacter gottschalkii
  source 1..774: mol_type = genomic DNA
atgtctataaagctagtttcttggaatgttaatggaattagggcactctcaaaaaaagaagaattttgggaatggtttgataatactgatgcagatattattaattttcaagaagtaaggtctacaaaagaacaaattccagaaaaattagcagatgttgaaggatttcataaatcatttaatgaagccgaaaagaaagggtacagtggtgttggaacttattctaagattgaacctgttgatgttgttaaaggtttaggtattgaagaacttgacggtgaaggaagggttttaagaatcgagtatcctaactttattttatataatatttatttcccaaacagcggcacgggagctaaaagactggattttaaagttgagttctgtaatgcattattaaaacagattgttgatctgaaaaataaaggtaaaaatgttgttgttactggagattataacattgctcacaatccaatagatgtttataaccctaaaaattgcgaaggaaaatcaggatatttgcctgaagaacgttcatggttggatgaacttgaaaacgcaggttttgttgatacattcaggatgtttgatgaaggggaaaataactttacctggtggagttatagaactcgtgctcgtgagagaaatgctggttggagacttgattatttttatgtaaatgaagaaataaaaggcaatgtaaaatcggctaaaattttaaatgaggtttttggttcagaccattgtcctgtgactttagagcttgatttctaa

SEQ ID NO: 7448 - DNA, 696 bp, Methanobrevibacter gottschalkii
  source 1..696: mol_type = genomic DNA
atgattaacaatgacaacgatcgtgtagttttttttgatatagatggtacattacttgatacatcaaattttgctgaaaccgctagaaaagcagccattggattaatggtagataatggcttgcctttagataaagatgaagcatacggtgttttaaaaacaattatccgtgaaaaaggatctaattacaataaacattttaacatattaacacaagttgtcttaggccatgaggatccaatgcttgtagcacttggaatggttacctaccacaatgttaaaatggcacttttaagaccttttgcagaaacaatcgacaccttaatttatcttaaaagtagaggataccgtctagctgttatttcaaacggcattaccattaaacaatgggaaaaacttgttaggcttaatgtctattcatttttcgatgcagtaattacctctgaagaagtgggtaaagaaaagcccgacaacttaatttatgatgttgcacttagaaaaatgagaggaaatcctgaaaaatctgttatgataggtaataaattaaaagaagatggattaggtgcagttaatgcaggaatgagtgcaattcttgtaaattctgatgtaaccgaagaagacagagaatttatcaagaaaaataaattagacattaaaattattgaaaatattggtgatgtggatacaatattataa

SEQ ID NO: 7449 - DNA, 684 bp, Methanobrevibacter gottschalkii
  source 1..684: mol_type = genomic DNA
ttggtcagtgagacaaaagaacaattagaacttgaagcagaaatcaaagagcaagctcaaatatttctaaaatatcttaattcaactcttccagagagtatggaacttgaatacgaaggattttacagaagaggatttttcgtaagtaaaaaaagatatgctgtaatcgaagatggggagattatagcaaaaggattagaattagttagaagagactgggcacctattgttaaaaaaacacaagaagcagttttaatggctattttaaaagaaggtgatgctgataaagcaatcaatgaagttaaaaaagtcttaaaaaatattaaaaaaggcaatgtggataaaaaagaaatgataattcacacacaaatcactaaacctcttgaccaatacaaacaagttggacctcatgtaatagctgcaagaaaaattgaagaacatgggattaaagtctcccgtggaactattatacagtatataattgttaaaggaaaaggttctatcagtcagcgtgcagtaccttacgaatacagtgagggttatacatatgataaaaattattatatcaacaatcagctaattccagctattgagagaatcatgtattcattcggatatacaaaaagagacttagaagacatggcaaaaggggaagtccagcaaagtttagatgcattcttctaa

SEQ ID NO: 7450 - DNA, 345 bp, Methanobrevibacter gottschalkii
  source 1..345: mol_type = genomic DNA
atgaaaaaaagattgatttcaagctatgatgagataaatgatatatttgttggaaaagttgatggtgaaaatggtttttatgcggactttgatatttcggatgggatatttcttggaattaacaaagataactgtccaaattcaatatatgtaagtgatgcatctcgtgtactgaatgtttcaaaacaaactttagaaaattcagatgttaaaataacagttagttgtgattcaacatgtttgtatttttcaatgtttattggaaacttacatatctgttcatataggtgtaaaaacatatttaaaattccattcattgactttgaaatggatagtaactattaa

SEQ ID NO: 7451 - DNA, 276 bp, Methanobrevibacter gottschalkii
  source 1..276: mol_type = genomic DNA
gtggataatccaaaaataaatgttaactcggaagatgaaatagtaattgtcgttcctaaagatgttgatgaagacgagttagtgattgatttagatgaattaggtattgatattgagcaattgggtgatgaagttaatattgtaattcaagttgaaggcgatgatgagttggaaagcgatttcatcactgatgaggattttatattggaaccaaatgaatggtattttgatgatgatccttatggtattgtatattatgaatttccagaagaatga

SEQ ID NO: 7452 - DNA, 231 bp, Methanobrevibacter gottschalkii
  source 1..231: mol_type = genomic DNA
atggataaagaaattccttattatgttttagatgaaaatggtcaaataggttcaatcaatgaaccttacattgatgatggtgatttaaaagaattattgttatcaattttgggggatgacattcctcaagaagagattcaaaagattttagatgcttcggccgatgaaaaattaactgaagatgaatttgataagttggtcgatgaatttattttaaaaaataagaagtaa

SEQ ID NO: 7453 - DNA, 375 bp, Methanobrevibacter gottschalkii
  source 1..375: mol_type = genomic DNA
atggcaatttctcaaggaaaatcaacaaggagtccttccggtgcaagaaatgttgcaaaccgtggaaaaagaaaatccgaattaggaagagacccagcagaaactaggttagatgcaaaaagattaagaaaaattagaactcgtggcggaaacgaaaaactcagattggctactggtaatagaatcaatgttactgatgcagatggtaaaaccaaggttttagatattctcaacgtagtagaaaacactgcaaaccctaactatgtaagaagaaacatcattaccaaaggtgcaattgtagaaactgctgaaggtaaggctaaagtaacatcaagacctggtcaggatggtgttattaacggaattttaatttaa

SEQ ID NO: 7454 - DNA, 1380 bp, Methanobrevibacter gottschalkii
  source 1..1380: mol_type = genomic DNA
atgaaactaaaaaaatcagattatattataataatatcttttatagcttcatttattgcagcattcatctcagcagcacctgcagttgcacttccccaactagcaaatgaatttaatttaaataatattatgcaaaattgggttgtgaatatatttttatttactgttgcaataactgccgtacctcttggaaaattctctggaaaaaatggaataaaaaaaacattaaaccttggattaattttgtttttaattggaacaataattactacatttgcaaattcttatataactttattaatttttagagcaatacaagcaattggtacagcaatgatttataatacacaaacaagtattgttgtattagctgtagaagaaaaaaataggggaaaagcattaggaataataatatctggcgtatacattggacttgcgattgcaccatttattagtggaatattaacttataattttggttggagaactatattttactttacaataccatttacattacttgcattattcttatcattatataaagtcaaagatgaatggaatatgtatgaagatgagagttatgataaatttggatctatattatatatgattggaatattcttctttatttatggatttacaatattaaatcaaacaaaaggtgtgatattcacagtaattggtatagttttattaattggatttgcagtaattgatttaaaaattaaaaatccaatattcgaccttaaattatttaaaaataaaagattttcatcttcaaatattgcatcattaataagttatattgcaacatttgtagtaacatatatacttaattaccatttccagtatattttaagtttaaattcacaaacaacaggcatattactggtagttacgccggttataatggcaataatatcgccattttcaggaaaattttcagataagattgattcacaaaaattagcagcaattggaatgggctttgtaactattgcagtatttatattaatatttttagattattcaacaccattatgggtaataattattgctatggcattacaaggtttgggttatggaatattttcatcaccaaatacaaacatgataatgagttcagttccgcaggaggaaacaccaagcgcatcagtatctattactgtaatgagagtaataggtcaaactatgagtcttgcaatgttgactataatattttcagtaataatgggtaatgtaccaataattccagaatactttagtttattaacaaaaagttctcaaacagcatgtataatatccacattattatgttttattgcagttatagcttcacttgtaggaattggtggaaaaaacgatttaactaattga

SEQ ID NO: 7455 - DNA, 1023 bp, Methanobrevibacter gottschalkii
  source 1..1023: mol_type = genomic DNA
atgtcagaagataagattagtatgaatcatggtgctggcggagaagtaatggctaatttaattgctagcacaattttagataatatcactaaaaaaagtgttaatggaggtattagtttagatgcattggatgatggtgcatcaatacctattggagaggattatgaacttgttttaacaactgacggtcacactattgatccattattcttcccaggaggagatattggtaggatttcagctgctggaacaataaatgatgtttcagtaatgggtgctcgtccattagcgatttcaaatgcaataattatgcaagagggatttccaattgaagatttggataggattatcaaatcattaaatgaagcttgtgaggaagtggatgttgctgtgattactggagatacaaaagtaatgcctcaggacaaacttgagggtattgtaatggttacaaccggtcttggaatagctaaaaaaggtgaagttgttcgtgattcaactttggaagtcggagacaagataattgtcaccggtagtctgggtgatcatggaatgagtttaatgtcttttagagaaggtttcggatttgaaactgatttaaaatctgatgttgctccaatgtggaatattattaaaaaagctttggagattggaggagttactgctatgaaagatccaacacgtggaggatttgcaaatgctattaatgaaatggcatcaaaatctggtgtaggggttgttcttgaacaagaagcgattccaatcaaagaagaagttcatgctgtatctgaaatgttaggtattgatccgtttgaagtagcaaatgaaggaaaagttgtcatgggtgttaaagccgataaggcagaagcaatccttgaagctattaaaaatgaaaaatacggtgagaatgcagctataattggtgaagtagttgaaggagactatgttgtagttaacactcctattggtggtgaaaggatacttgaagcacctattgcggatccggttcctagagtttgttaa

SEQ ID NO: 7456 - DNA, 396 bp, Methanobrevibacter gottschalkii
  source 1..396: mol_type = genomic DNA
atggtaagtatattttcaagaagaattattgcatattttgttgatttctttgtagtttcagctttcatgtggattgtatcttatttgttatcattagtaattggcactaataatcctatatatcattattttatatatttagttccaattttaataatgatttactttgttttatgtgaaaaaattgtcggggcttctgttggaaaatctttattgtacttgcaagtaagatcccaaaatggtgcacatatttcttggtctcaagctattgtacgcaatttaactaaaatttattggattccaataatttttgactggggtattggtaaagtattaaaaaaggacaggttatttaatagcattacaaaaactgttgttattgatgagcttaattaa

SEQ ID NO: 7457 - DNA, 450 bp, Methanobrevibacter gottschalkii
  source 1..450: mol_type = genomic DNA
atgaataaaaaatccatttcagtaattttactaattattttttcaataacaataatattcactactgcaaatatattaattaatgacaatactccactagaaaatcaagcgggaaccttaaaaatcaacaataaaaccatacactatgaaaaatccggaaaatgtttagaagtaattgatggaaatacaataaaagtttatggcatcggtaaagttcagcttacacaagttggaagtccaagtagtgaagctaaagactttgttgaaaataattgccttggaaaaacagtatatctggatattgatgataaaaaagtagaagatgaatatggtcgtgcattagctattgtttatacagacactgttgatgtcaataaagaattaattaacaataacttatctgaaatatcttactttacaccaagtgaatttaaaaaaggagatatttaa

SEQ ID NO: 7458 - DNA, 687 bp, Methanobrevibacter gottschalkii
  source 1..687: mol_type = genomic DNA
atggaacaaaaaaacattacacaatactcaattaattatgaaactaaacagcatccttcagtgaaaggtcttcagataattgaaggaaaaaacaatttccccattagttggttaaataaacaaggatattgcgaataccaactatatctggaacatgtaaaaaatataaaatcaccaacaacacctgaaatgacccatggaagtgaaattcacaagcaacttgaggatatattcaaacaagaatctgcacaagtcagctttgaagaagtgattgaatcatctaaaagtgaagcctcaatgtctagagaatgctttgtcatatctcccaaatatggaatcagaggacatattgatgaaatatggatgaaaccagaggaaattgtaataattgacgataaacctggaagaacaccttataaatctacaatgaatcaagtaagagcatattgccttgcatttaaagacatgtctggagatgatagaaaaattaaaggagcgcttcgtgaaagaggtactgaaaatctcttctggattgaaccattcacagaagatgttgaaaaagaaattaaattcacaattgatagaatacatggattatttaatggatccaaaccattcatgccaactaaaaatcctaaaaaatgtcattcatgcagatttaaacatgactgcgaacatgcacaatag

SEQ ID NO: 7459 - DNA, 861 bp, Methanobrevibacter gottschalkii
  source 1..861: mol_type = genomic DNA
atgcactatattaattcaaaaacaatactgtcaccaaaaaacggaatgaacctatatcgcggttgtactcatggttgcatatactgtgattctagaagtgacatatataatatgaatcatagatttgaggatgttgaagttaaaaagaatgctttagtgttacttaaaaatgaacttcttaaaagaccgcaatctatgattggaactggagcaatgactgatccatatatcccacttgaaaaacacttggaatatcttagaaaatctctgaatctaatttatagatatggttttggatttacatgcattacaaaatccgatttgattttaagagatttggatttacttaaaaaaatcaatgaaaaaacaaaagttgttgttcaaatgactttaactacctctgatgatgatttgtgcagaatattggagcctcatgtatgtaatacaacaagaagggttgaagttttaaagatacttcagaaacatggtattccaacagttgtttggttaactccaattttaccttatattaatgataatattgagaatattgaatccattttgaattattgtattgatgcgggtgttaaaggagtaatctgttttgaaatggggatgacattaagagagggggacagggagtactattataaaaaattagatgaatatttcccgggtcttaaagataaatatattgaagaatttggaaatagttactcaattccaagtccaaataataaacaattaatgtctatttttaatgaaaaaacagataaacatgatattttaaacaaacctgatgaagtatttgactatatttcttattttcctcaaaaatcagttcaatctagattaatctaa

SEQ ID NO: 7460 - DNA, 1284 bp, Methanobrevibacter gottschalkii
  source 1..1284: mol_type = genomic DNA
atgaattttaatgaattaaatatttctgataatattaaaaacggactaaaaggaatgggttttacaaaagcaactcccatccaagaacaatcaattcctgtaactttaaaaggaaaagatgtaatgggtcaggcacaaacaggttccggtaaaactgttgcatttgcaattccaattattgaaaagattttcattgatgataaatctcctcaagctattgtattatgtccaacaagagaactatgtatgcaggtagcagatgaaatttcgaaagtagcatcaaacattaaaaaacttaaaattttatctgtatatggtggccaaccaattggaagacagacaagagtccttaaaaaaggggttcatattgttgtcggaactcctgggcgagtaattgatcatattaataggggcaatcttgatttaaacggcattgaaagtgttgttttagatgaagctgatgaaatgctgaatatgggttttagagatgatatggaatttatattaaaaaacactcctaaaactagacaaacattactgttctcagccacaatgcctgatgaaattaaaaaaatagctagaaaataccaaagaaatcccaaatttattaaggttaaagcaaacaagaagaactctccaaaaataactcaatattcttttaaatgtaatgcgaaatataaattcgatgacatgacaaggttacttgatgtatttgatgttgaacttgctttaatattctgtaacactaaaaaaggtgttaattatgttgcaaaacacttaaaaaaaagaggatactctgttgacggtcttcatggggacatgactcaaaaaatgagagataaagtgatgaacaagtttagaaatgataatattgacattttggttgcaactgacgtggcagcacgaggactggatgttgataatttggatgttataattaattatgatgttcctcaaaaccctgaaaattatatccacagaattggaagaactgcaagagcaggtaaacttggttatgcttttactttagtatgcagggatgaaactaggagatttgcagctattaaaaaagctaataacactaaaattacagaaaaacagattccttcttataaggaagttgaaactattaaaaataaactgattttggataaagttataaactgtatagaacgtggagaattggaagacagttatattaattcaattaaagacagtatgaataaaaaaataaacgcacagcaattagctgcgggtttattgaagatggtaagagaaaattaa

SEQ ID NO: 7461 - DNA, 807 bp, Methanobrevibacter gottschalkii
  source 1..807: mol_type = genomic DNA
atgatgaaagcatttaaaaaaagaggtgcattaactcattttcagattttaagtgaaatctcaaaacaggaccctcacctcaaacaaaaagatttggctaataaattaggaattacaatacaagcagtttccgaaaacataaaaacattaattgaacaaggatacatcagttctaaagacggcagatcaccatataaaataactcaaaaaggtattgaaaaagttaaaaaagatgcaattagtcttagaaaatattcagatgcagttttagagactatgaaccattataaaactatttggccagctattgcaagagaagatctccaaaaagatgatatagtgggtttatttatggatgatggagtattatatgcccataaaaaagaagaaaatgcaacaggcattgttatggataatactaaagaaggaatggatgtggcattatcaaaccttacaggaactattgatgtaagtaatggtgaggtaactataattaatgttccaaccataaaagatggcggatccaaagcttctgatttagaattaattaaaaaagtttatgagaacggaacaaacagtggtgagccaatcgataaaattgcatgtgcaggtactgtttcacgcgccattatcaataaattagaattaccactagatattgaatatgctgctccaaatgcaactgcaaatgctgcacgtaaaggtttgaatgttcttgcaatctgtgttggtgatatgagtaaagcatttactcgtgagctcgaatctgaaaaaataaaatataatgttattgatggtaaaaaataa

SEQ ID NO: 7462 - DNA, 1407 bp, Methanobrevibacter gottschalkii
  source 1..1407: mol_type = genomic DNA
atgcaaataccacaattaatgcacgagcaatacaggcaagcaaaagaacttatcgaaaatgcggaagacattaaagtttattcccatatcgattgtgacggtatctgttcaggtgcaatcttatcaaccatactagataggcaaaataaggaatatgaaatagaatttgtgaatttagacgtgttggatgacattgaacttacccatgaacttacaatattttcagatttgggttcagggcaaaaaattgatgcaaaagctcaaaaaaatcagaaaatactcattttagaccaccaccctcctttaagggatttggactataaaaataacaaggattatacttatttagaaattaatcccaaccatcacggtatcgatggatcatactatgtttgtggtggaggattatgttattttcttgcaaaaagattcggatatgatgatttaagctggattggtgttttatctgcaattggagatatgcaaaatacaaaaacaggtcattttgaaggtttgaataaaatcatacaacaggatgcaattgatggaggataccttgaaataataaaaagcgacatcaacatttacggaaggaacacccgcccattatttgttgcactttcttattttagtgatgttaaacttccaatcaccaataataccaatgaaaccatggctattttagaggagttaggtattgatgaaaaacataacagaaaaactttaaatgagttaacaatggaggaaaaaggtaaacttttccaacgtctcatgtccatgcttacacaggccgttccaccgaaatatattcaatatttacctcaattaatcttaggggactcatatactttcttaaaagaggatgaacatagctttttaagagatggttctgaattttcaacagcaatgaatgcgtgtggaagaaatcatgaagagcagatagctatggaagttttgaaaggggacagatttgttgcacttgatgaacttgaagttgtaagtaaaattcatagaacaaaccttgctaaagggattagtagtgttgcagaaaatgatgaaacaaatatcatagaactcgaaaatttacaatactttgatggaaccggaattgctcctgaaattgttggaacaataacaggaatgattttaggatactgtaattggaaaaaaccaattattggttttacacaaacagatagtgacggtcttaaagtatctcttagatgttccagattactttcatatgatggaattcactttggaaatatcatacgagaagttgcaagtgatgttggaggatctggtggaggtcacgcaatggcttgtggagcttacatcccaattgataaaaaatatgaatttttagaagagtttaataatagattagatggaaaattaacaaaataa

SEQ ID NO: 7463 - DNA, 270 bp, Methanobrevibacter gottschalkii
  source 1..270: mol_type = genomic DNA
atgattactgtttggccacaatatttaaataaaaaattatccctcaatgaaggccgtaagatttcaaaagaggattgtgtaaaagatccgactataaatgacatagaaagggcattgaagagactgggacttaattatgaacttgaaaaagataaatcataccctggaaaatggtatgaaaaatccggaagagcactcgttgaatgggataaaagcaaattagaattaataaaagaaattagcttaaagattaaagaaattagaaactga

SEQ ID NO: 7464 - DNA, 1095 bp, Methanobrevibacter gottschalkii
  source 1..1095: mol_type = genomic DNA
atggccgattataaatatgtgattgtaggtgctggactttctggtttaacaattgctgagagaattgcaaatgaattaaatgaaaaagtattgataattgaaaaacgtgaccacatcggaggtaatgtttatgatttctacaaagacggcatactaattcagaaatatggacctcacatttatcatacaaattataaaaaagttcacgattacttatctaaatttactgaatggacagattatgtgcacaaagttttaagttatgttgatgataagctcgtaccaatgcccatttgtatagatacattaaataaattatatgatttagatttagatgaaaattcaatgaaagaatggattgaggaacacaaagaagacattgacgagataaaatcctctgaagatgttgtgctgaaaaatgctggtcgtgatatttacaataaattatttaaaaattatacagaaaaacaatgggggacatcagcagctaatttaagtccagcagtcatttcaagaattccattcagatttaatcatgatgacagatactttagtgacacttatcaaggaatgcctaaagaaggatttactaaaatgtgtgaaaacatggcaaaatcagacaatattcatattggccttaattccgactataaagattatattggtaaaattaattatgaaaaattagtctacacaggtccaatcgattacttttacgattacaaatatggggaattgttatacagatgcttaaattttgtatatgaagttttagatgaagattcatatcaggaagcaggtgttgtaaactatccaaatgacccgtattttacaaggataactgaatttaaaaaattaactcaacaaaaagttggtggaaaaactgctattatgagagaatatcccggattcaatggagaaaaatgttatccctaccctactcaggaatatctggataaattcaaattatacgaatcagaaatggaaaaagaagaaaatgtaatctttgcaggtagacttgcaaaatacaaatattacaatatggatttagttgttaaagatgcattagaaatttttgaaaatgaaattaaatag

SEQ ID NO: 7465 - DNA, 1104 bp, Methanobrevibacter gottschalkii
  source 1..1104: mol_type = genomic DNA
atgaatgataaaataagcattattttaccaatttttaatgttggtgaccatctcagaggaggaattgactcacttattaatcaaacaataggaaatgaaaatttggaaataataatggtcaatgattgttcaaccgatggatccgataaaatcatagatgaatatgcggaaaaatacgactgttgtattgcaatccatcatgaaaaaaacagtggtgcggcatacacaccacgtaacaccggcattgatgcttgtaccggggattatataatgtttttagatccggatgaccgatacacaccagatgcatgtgaaacattataccatgcagctaaaaaaaataatgcagatgttgcttttggtcgttttagaagaatatttgaatatggcggtaaagttcaaaaatcgttctcgccctacattgacactctagaaaatagctatccaaatgaaacttttgatactgcaaactttttagatgttccagatttcatttgggataattttgttgaaagatttctttatggcaaaaccttagaagtaacttatccaagggatgttccaattgacactatccatgttgagaatatcgagcaggaaccagatttattaaaaatggctcctgctgtctggagtaaaatctataaaagagagttgattacggataataacttacgattccagccatttgtttcaggtgatgatatggcattttcactcgaagcactattaaaagcaaagggaattgtgtttttaaacaatttcatgtgttataattactacatcagggatttgcctaatgataaatccattaccaatactgttaatgttagacttttatatgaattaatggaatcatacatttactgcagacaatgtactgaaggattttctaaagaagttcaaactgtctccataaatccacatttacttcattggactaattcttggaaaagctctccatttaccaaagaagaaaataaattgttacttagtgaagtaaataaacttaaaagcattcataatacagatttaaaaactaaaattttattaagctcaatttcaaccgcaattgaatctaaaattcaaattcaaaaggagtga

SEQ ID NO: 7466 - DNA, 771 bp, Methanobrevibacter gottschalkii
  source 1..771: mol_type = genomic DNA
atgtcgaaacccgttgttgcaataacaagacctgaagatagagcaaaaaaggcttgtgatattgtagaaaaattaggtggagaaccttttttagcaccaacacttgatttggaacctgtaaacagcaaatctttaaaagatttaattaaaagaaaggatgaacttgactggattatttttacatcccctacaaccatcgtttcactgaataaattttaccctgattttttaggaagtttaaattgtaaattagctgttattggaaataaaactggaaaacttgctgaagaaaacggacttaaagttgatttaattcctgaagattttacagcagaaggtttgattgaagagtttaaagaaaggaaaataacaaaccaaattattggaattcctagaactttatctgcaagaccagtcttaccagaagagttagaaaaaatgggaaatactgtgattctagcagaagcatataaatctttatttccaatggataaaaaagcggtaaaagaattaatttctaaaattgaaaacaaagaaattgatgcaattacatttacaagtccattaactgttgaaaacttctttaagataatagagaataaagaaaaaattgctaaactgctatctgacaacatacttaccgtttgtattggacctattactgcaaaagttttaaaaaaatataatattacttacattcaccctgatacttacacagttccagatatgatggaattgttatttaaaaaatggagagagcaaaatgaatga

SEQ ID NO: 7467 - DNA, 306 bp, Methanobrevibacter gottschalkii
  source 1..306: mol_type = genomic DNA
atgcatgataggattgagattgctcgtgagttcgcaaatgcaattaaatcagataaaatcattaaaattattttatttggttctgttgctcgcgaagacgatattgaagactctgatattgatattctgattatatctaatgaatgggagcaaattgattcattaataactgatgaagtcttcaaagttgtcctagacacacaagaacttatctctccacatatattgtctgaaaaacaatttgaggaaactaaaaatttcaatttcttaactaatgttttaaaggatggtgttgaaattggatga

SEQ ID NO: 7468 - DNA, 363 bp, Methanobrevibacter gottschalkii
  source 1..363: mol_type = genomic DNA
atggtgttgaaattggatgaatgtgaagcattcatcaaaaaagcaaaaagtaaattaacctccagtagagcattatacgaaatagggcaatatggggattctgttggaagatcatattatgcaatgtttctatcagcaaaagcattacttgttagagatggttatgatgtaagttcacataaatccttaattggtatttttggtagggattatgttaaaaagggagattttgacagtaatattgccaaatatctttcaggtacgcaatccttaagggataatgctgattatgatgctattgatgcaatttcaaaagaaattgcacatggtagaatcaaacaagctgaaagattcatagcctaa

SEQ ID NO: 7469 - DNA, 468 bp, Methanobrevibacter gottschalkii
  source 1..468: mol_type = genomic DNA
atgactaatgttttaattgcatatttctcagccagtggtgttaccaaaaatcttgctgaaaaaatagccaatgataatgattatgatatatttgaaattgttccagaagaaatctatactcctgaagaccttgactggaccaacaaacagtcaagatcaactattgaaatgaatgataaatcattcagacctccaatttctgaatcatgtgatgtaggtgaatatgagactgttgtaattggttttccggtatggtggtatactgcacctacaataattaacacattcatcgaaagtgttgatttaactggtaaaaaaattaaaatattttgcacttccggtggatctggggttgacaagtgtgtaaatgatttaaaagccacctatcctgaacttaattttacaaaaggtattcgattcactggtaatgtttcaaatgcaaaagaatggattgaacaggatttgtga

SEQ ID NO: 7470 - DNA, 969 bp, Methanobrevibacter gottschalkii
  source 1..969: mol_type = genomic DNA
atgttttcaaatataggtgttgttggtgcaggtgctatggggactgcaatttctcaaaccatctgtgataatactcaaaaagtttcactgtatgctagaagggaagaattagttgattcaataaatacaactcgttttaataaagattattttccaaatattcgtttaaaagataatataatagctactaatgatttaaatgatttgaaagatgcagaaataatctttttaacattgccttcttctacaataagggaagtttgttctcaattgaaatatattatttctcaagattgtgttttagtaaacactgctaaaggtcttgaaaagggttctcaaaaaaggatgagtgaagttatcatggaagaaactggtaggccagcttgtgtattatcaggaccaaatattgctgttgaaatggttgaaagaacattttcttcagcatctattgcatgtgaaaataaacagtaccttgaaaaagttgaaaaagcactatcaacttttagattcaaagtttcggccagttgtgatgttattggtgttgaatattgtggtgtaattaaaaatattattgcaatatcccagggaatctgtgaagggatgaaaataaatgacaatgcacgtttttctgtatttacaaagacttataatgaaactaaagatatgatagaaaaatttggtggtaataggaacactgttgatgattattgtggttttggggatattattactgcttctactttaaatgtaagtaggaaccatacattgggtgttttatatggtcaaagaattgtaattgatgagaaagcatcaggtgttctttttgaaggaaaaaatacaattgtaataatgaaaaaattatgtaaaaaacataatattgattgtgcaacagttgattttacttatgatgtaattatcaatagaattaatcctaaaaaagcatttgaaatattttgggataaattatag

SEQ ID NO: 7471 - DNA, 696 bp, Methanobrevibacter gottschalkii
  source 1..696: mol_type = genomic DNA
atgatttgtgcagcaatacttgctggtggtatagggagtagattaaaacaaggaaaacctaaacagtttgttaacattaataataagccaattttggttcattctgttgaaatatttttaagtgttgatgaattagataaaattattgtatcctctccaaaagaatgtgttgataaaacaaatgatttaatggatgaatatttccctaaaaatgataaaataattgttattgaaggtggagaaactcgtaatggcactatattaaattcaattcaatatatgaaaggtcaaaattgcgaaaaagattctattttagtaactcatgatgcatcaagaatatttgtgtctaaaaaattaattaaagatagtattaaatacgcaattgaagttggtgcagctagtgctgcaatacctgcaacagatgttatatttgaaacagaaatagatgggaagcttactggtgttccattaaggaaatatttatgtcatgcacaaactccacagtcatttaacattgataaatttttagatatttatgaagatttatcagaagaggaaatatctaaattagatgaagctatggtgcttttccatttaaggaatgccgatgtaaaattattccccggcgatcaaaataattttaaaataactcgtccttttgatattaaattagctgaatctatttttaaaaattaa

SEQ ID NO: 7472 - DNA, 1068 bp, Methanobrevibacter gottschalkii
  source 1..1068: mol_type = genomic DNA
atggacaattttaagtgtggaagtatggattttaagattagtgttattgcaccggtttataatgctgttgattctttagaaatagcaataaattctatcatcaatcaaacaattggttttaagaatattgaattaattttagttgatgataaatctaatgatggatctcaagacattattaaaaaatatgctgataaatatgaaaatgttattggaatatttctaaaggaaaattcaggacttccaggaaaaccaagatcacttggaattaaatatgcatcagcaccttacttaatgtttttagatgctgatgatgaatatctgcctaatgcttttgaactgctttataataccattgttaatgaaaaatctgattttgtaatgggttctcatttctggaatatgaatggggagagaatgaaaattaatattttacatgattgtaatgataaatcagatgtaattaatattaatccttttttaaatcaaagaaattttattttacttagttataatcatgttgcaccatggggtaaaatttttaacaaagagttaatattaaaaaataatatttcttttccagaagatacattggctgaagatacttatttttattttaaaactctaattaactcaaaaaaagttacattattgcctaatgattcattatatatgtataatgtatttgaaaataaagattctgtaattcatactcataacctatctaaatttaactattttttaaaaggttttgctaatgtgatggagttaattaaggatattccattttctaaagagcggattttaattagtaatatgggaagtttgttattaatattttcgaatttatctatgaaagaaaaaaaagaagctgtcccgaaaatttattattttgaaaaatcattagatgaagaagttgttcttaaaagaaaggaactcatattattaaataaattgattttaaaaaaacatttttatttagcaattattatttctgatatttactctattctgtataataatgaaaaaattaaaaatttgtatagaaaatggggtcataaggaatag

SEQ ID NO: 7473 - DNA, 999 bp, Methanobrevibacter gottschalkii
  source 1..999: mol_type = genomic DNA
atgaaaaccaaaaaagagagaatattttattacgattttttaagagcatttgcaattattgcagttattatttgccatgtggactatttttttggcccactaacaagtacaacacaaataattgttcaaatgacttttcatgatattggaagaattggtgtgccaatatttttaatgataagcggagcgcttctattaaatcgcgaatatcctgatttaagtcaatttttaaagaaaagatttgtaaggattatttacccatttatcttttggataatacttattttagctcaaatatattattatgggggcaatccaacatatctctggaaagtatttattggtgaaccctcaattacttggtatttttgggttttaattggaatttatttatttctaccaatactcaattcatttgtaaaagaatatggtgaaaaaggtttaaaatattttttagctatatggtttagcattataattttacaaacatttaatgtttatccattgtggactaaccttgatttaagctattttgctggttatgttggttatccagttttaggttactacttagaaaataaagaatttaaactaaataatgaaaaaatttgtattctaggagttatcactcttttaatttcattaagttgttttgtatacttaaattacataaatagtactgctatccattctatttatcagaatatcccaattgtatttatgggattaggtttattcatatctattaagtatgcagataaattaaacaaatttaaagcgataaaagataacttcattggcaaaagcattatttctttaagtatatgtagttatggaatgtacttttcacatgtaattgtaactaaatttttatcttattacaatccccattccaatctaatgtttccattaatgttcataatgataatttttttatcttggttaatgccttatattttaagcaaaattccttatgtaagaacatttagtggaatatga

SEQ ID NO: 7474 - DNA, 1083 bp, Methanobrevibacter gottschalkii
  source 1..1083: mol_type = genomic DNA
atgaatttaactgaactttattataaattacctaaaaaaattcgttattctgagagatttatattgttttgtatcaaattagctaaaccattccacaagaaaaaaacacatgaaaaggagattaattatacattaaattatttattcaagtcatctgatgttaaaattgaaggtactttaaggaatattcaattattgtatgctgaattattaagattcattgataatatatgtaaaaaatacaatttagattattgtttagcttatggaactttattgggtgctattcgtcatgatggttttattccatgggatgatgattgtgatatcatcatgattagaaatgattataataaattaatcgaggtattgccttccgaaatcaataaacacaaatttttaaaagaaaatattggtttaacaaaattagtcggttttagagaaaattattttaataatgttaaaactctttatgatgaagaattggggcatgatgtttattttcacgattataataaagcacctaaacaatttgatagtaagtataatgaaaagttaccgaatttatgtaaatcattatttttacagataggttggctaaaaccgatggttaggttagatatatttccatatgactatattgaagaaaaatccctaaatcattatgataaacattatcgtccggctaaagtgtcatttagaaatttctttgcagatgatgatttttcttatgaaaaagaatttaataagcattttgataaattaggcttaactcttgagaaaactaaatatgttggtgaaggtatagatggatctgatgaatatgtaggatcttatgattcaagcatgtttttcccagtaaaaacacataaatttgaaggatatgatcttaaatgcccaaataaatctgaagagttgcttaaaagatggtatggtgaaagttatatgagtatcccacaagctattgtaatgcacggatactcagagtataattctcgtttctttgattcaattgaagatatgaatgaatcatttaaacttgctataaatgaacttaaaaagattaatgacgaattcgagtag

SEQ ID NO: 7475 - DNA, 834 bp, Methanobrevibacter gottschalkii
  source 1..834: mol_type = genomic DNA
atgttcaggacaaaacgatacgatgatgagactctaaaacatttacaaaaagtccaaatgtgtattttaaagtatttcattaaactctgtgaagaaaatgatttaacttatttcatatatggcggaagcctacttggaaccataagacataaagggttcatcccatgggatgatgatattgacgtgataatgtttagagaagaatttgaaaaattaaataaaattatagagaaggatattgatgataaatacagatttatcaatgttttaaatgaagaaacataccattacacatggggcaggttaatgctaaaaaatactgtaataaatgaatggtgggcagatcaagttgattacactcaaaatatttttattgatgtattcattttagataatattccaaataatagcttcaaaagatttattcataaatgggttagtttttcacttaatcagttaaccatgtatgcattcattaaatatgacaatcagtcaaaattaaaaaaaatattacaacaaacaatacattatttaataaaaataatccctatttcagcatatggaattaaaaaaagatgtgtgaattcttatcgcaaataccaaaatgatgactgtgatgacatatgtgatttcccggcaatatgccaaatgccaatttatcataaaactgattggttacctccaaaaaaagcacaatttgaagatattgaagtaaatataccgaataattatgataaagttcttaccagaacatacggaaattatatggcattacccccagaagaatccaaatggagtccagcacctgacgagattgattttggcgaatattaa

SEQ ID NO: 7476 - DNA, 1308 bp, Methanobrevibacter gottschalkii
  source 1..1308: mol_type = genomic DNA
atgaaatctgataatccaattgtatatacttgtttctgtaccgatattattcatgatgggcatctaaatttaattaatgaagcaaaaaaatatggagatgttgttgtcggagttctttgcgactctgaaatggtcaaatataatagatttcccttaaaaacaactgaagaacgtattgaattagttaaagagattccggatataaaagatgtaattgttcaaaataaaattatgtatgatgatgtggtttctgaactcaaaccggattatattattcatggagataactggtctgaagaatctatgaaggttataaggagaaatattatttctgttcttgataagtatggggggaaattaatcgaagttccatatactttcaatgaaaaaatacaaaaagttgataggcaaatgagagaaaagttagcaatgcctgaactcagaagagccagattaagaaaattattaaacatgattcctgttgtaaaaacaattgaagtgcacagtggattaacaggtttaatagctgaaaaaactgttgttgctgacgatgaacacattgaccaatttgatgcaatgtggatttcaagcttatgtgacagtacagaaaaaggtaaacccgatattgaattagtggatatgacttcaagatttagaacaattaatgacattatggaagtcactacaaaaccaatcatatttgatggggatacagggggaatagcagaacattttgtttatactgtaagatctcttgaaagaatgggtgtttcagcagtgattattgaagataaaattggattaaagaaaaattcgttgtttggaaatgaagttaaacagacacaagatgaaattgatcatttctgtgaaaaaatttctgcaggtaaaaatgctcagttatctgaggatttcatgattatagcaagaattgaaagtcttattttagaacaaggtatggatgatgcacttaaaagggcatttgcatttcgtgatgctggtgcagatggcatcatgattcacagcagaagaaaagaaccagacgaaatcttagaattttgcgacaagtttagagcagaagataaagaaaccccaattgtagtggttccatcttcatataatacaattactgaagatgaattaaaagcgcatggagttaatattgtaatttatgcaaatcagttattaagagcagcgtttccatcaatgcaaaatgctgcaaaaagtattttaaaacatcatagggctcatgaaatagatgaaaagttattgtctattaaaaaaattattactttaatagatgaattgtaa

SEQ ID NO: 7477 - DNA, 732 bp, Methanobrevibacter gottschalkii
  source 1..732: mol_type = genomic DNA
atgtcaagatatgcaattttatcggatattcatggaaatctatttgctctaaaagaagtttttaaggatttaagtacacaaaaaaccgattatataattcttttaggggacttaattgattatgggatgcagtctaatgaagttgttgagttcatccgtgataatttatcttcaaaaataatctgtaatatctggggaaatcatgaaatggctattttgacaaaagattttaaacatttttcaagctcaagaggtgttgaatcagcaaaatttactgattctattttaactaacgattctaggagctatttaaacaatgaattggttaaagagggtaaattagattttgaaatatgtgaaaaacaagttttagcagttcatggatctttaacggattattattggaaagctatttttccagataatttaaatggaaattatattgattatgacattgttttatcaggccattcccattatcctcatgtttttcaaaagttttatgaagttgatgatccggacatgagaaataagaaatccgtattgtttattaatccgggatctgttggccagcctagaaatcataatcctaatgctcaatatgcaattttagacactgatttaatgaatatcgaattaaaatcagttaaataccctaaatatgatgctatggatttatatgatggtaatattgatgatttttatagaaaaagattaaaaaatggaatttaa

SEQ ID NO: 7478 - DNA, 1005 bp, Methanobrevibacter gottschalkii
  source 1..1005: mol_type = genomic DNA
atgaatatattatatattattagtggtgttactggaatgactggtaacgagttagttcgccagttgttaaatcagaatgaagatgaagtgaaaatcatcggcttcgataatttttatgcatcttcaattgatactgtaagcgattgtattaatgacggtcgttttgatttttatgaatatgacttaaacagtaatgatgatatggataaaattgaagcactggttttaagtattaaagatgatttcgatgaattagtatatattaactgtgcagctgttgttcataccgaacacttctataaagtttatgaaacttatcaaactaatgttgctagtatgaatgacttcttacaacaggctattcgtgtgggtgctgaaaaatacattaattgttccacatcagaagtttattccatgaattcatggaatgaagagggtggggttaaagaatctgatttcatcactatggctgatgcagaacacagtcaaagaactagttatgcaactggtaaattgttaacagagttttttatgaaagattctgtagataatggcaaaatcaagggatgttctattcgctttgccaatgtttacagtaaagatgaaaagtatccaaaacatattattccacatattattgatagctttaaaaacaagggtgaagttgttttacttgaaaattctaaaaagaattgcagaactttcttaaataattatgatagttgtagtgcagtaattgaattagctaaaactgattctgcacttgatggtacaatttataatgttgcaacagatgaagaaatttcaattattgatttggcaatattaattgctaaaaaaatgggaattgataaacctgttattaaatttgaaggttaccgtgaatctgatcctgaaagaagactattgtccactgaaaaaattataaccagaactaactggaaaccaattattgacttggataaaggattggatgaatgtattgagaactacactaaaaattag

SEQ ID NO: 7479 - DNA, 771 bp, Methanobrevibacter gottschalkii
  source 1..771: mol_type = genomic DNA
ttgaaaatttccattattactgttgctggtgtttccagcaggttcaataaagatatttctgaagaagaaaagatgttaaaatgcatatattatgaagaaaatcctaaagacactttaatttataaaatgattaataaattatcatattgtgataaaatagttgttgttggaggatacaaatactctgatttaactgaatatgtcaataaagaaattcctatagagttacaggaaaaaatcatgcttgttgaaaacgaccgttatgctgatctaagctcaggttacagtttatacttaggaatcaaagaatctttaaataattttgatggtattgaggaattactttttgtagaaggtgatttggacattgattcagaatcattaacaaaggtaatcgattctgataaaaatgttttaacattcaatagagaaccaattttttcaaataaatctgttgttttatatcaaaatgaaaatgatgaataccattacttatttaacagtaatcatggaatgttaatcttaaatgaaccatttaaagctatttttaattcaggtcaaacttggaaatttagagatattgaattacttaaaatagctaatgattatttttatgaaaattgtatagatgatactaatttgggcattatccaaaaatattttgattcagttgaaaataaagatactattgagattatcggattggaacattgggttaattgtaatactcgtgctgattatcaatatataaaagaatactgggggaaataa

SEQ ID NO: 7480 - DNA, 1182 bp, Methanobrevibacter gottschalkii
  source 1..1182: mol_type = genomic DNA
atgaaaaatttagatgaaaggttaaaaatagtagaaaaacatgtaaaagatgatgaaattacaataatgattattggtttaggtagtgttggaacatatttgcttgactttttagtaagtaaaaatgatgctgcgataaaattagtagttgttggaagaaatcaggaaaaaatgcaatctgatgttaatattgtccgtgttgcaggtcttattcgtgaagttaacaaatctcaaattgtagttgaagcaggtgttgacttaaacgatattgattcaattcaaaaagcaatcagtaaacataatcctgattttattgttaattcaagcagagcatatcctggtcttaaatatggaagtatatcttggagtaatgtaagggcttacggtatttggactcctttgtcaattaaatttactaaaaatattatggaagcatgtgaaaatgttgacactgatgcagttgtcattaacacttcatactctgatgcagttattccatggcttaaaagtgctgaaaaagcatatcctgactttggaagtggaaatttaaatcacttaattcctagaatgaaatttgcagtagcaaatattttaggggtggatgatttctggaatgttgactttaattttgcagcagctcatttccatgatgtatgtattagtaaagaaggacaaaccgaaggtgtggacttgcctctcaagatatactacaaaggcgatgaacaagacattcctcatgatgaaatttataatgcatgttcaattagtatgcccgttgatcaaaaaaggaatatgatgaatgcttctagtaattatcgtattatttcagcaataattgatgcaatacgcaccggtgagaatcaaaaaatattttctccaggagcgtttggtcatattggaggatatcctgtaattattggttataaagagggtaaaatttctgcttggattgatgaatctgtatttacatttgatgaaatggataaagcaaatcgtaaatcccttgctttagatggtgtggaagatattcttgatgcaaccttaatctacactgatgatttaattaaaaaagttgaaaaagcatttggtgaagatttaccgaaaaaagtaaaatatgatgaaattgaaaaaaccgctgaatttctcattgaaaagataatcactccacaattaaataaatag

SEQ ID NO: 7481 - DNA, 1119 bp, Methanobrevibacter gottschalkii
  source 1..1119: mol_type = genomic DNA
atgaaagttgaagattttgttgatgttttggattgtgaattttatactggtgttccggattcacaattaaaagcattatgtaattatttgataaatgaatatggcattgatgaaaagcatcatttaatcgcagctaatgaaggtaattgcaccgctcttgctgcaggttatcatttagcaactggaaaagttccagtcgtttatatgcaaaatagtggtgaaggaaatattatcaatcctgttgcatcacttttaaatgatcaagtttatgcaattccagctatttttgtcatcggatggaggggacaacctggaattcatgatgaacctcaacatatttatcaaggaaaaattacttgtgatttgcttgatttaatggatattgagaactttacagtcagtccggaaacttctgttgatgaactgaatgatgtaatgattaaatttaataatgttttaaaatcaggtaaaagtgttgcatttgttattcttaaaaatgctttaacttatgatgggaaaactatttatgaaaatgataatgaactaattcgtgaagaaattatagaacacattgttaatgtatctgatagtgatccaattgtatcaacaacgggtaaagcaagccgtgagctatttgaaataagggaatctaaaaatcaagctcataaacatgattttttaacagttggttcaatggggcattcttcttctattgctctagggattgcaataaataagccggataaacgtgtttggtgtattgacggtgatggagctttattaatgcatatgggatcaatgccggttgttggaaatgttaatcctgataatttaattcatattgtaataaataatggtgctcatgaaaccgttggtggaatgccaactgcagcggcaggtactgatttagttgctattgcaaaagcttgtggttattcttatgcagtttctgtggataatattgatgatttggatgaagaacttattaaagtaaaaaatatgggtaatttatgctttattgaagtattatcttcaattggttcacgtgctgatcttggaaggccgactacaacagcattagaaaacaaaaaaagctttatgaactttttaaatcaatga

SEQ ID NO: 7482 - DNA, 843 bp, Methanobrevibacter gottschalkii
  source 1..843: mol_type = genomic DNA
ttgaaatataatgaatatgatgataaaacattaaaacatctgcaaagtttggaattaatgattttaaaggatttcattaaaatttgtgaggaaaataatcttacatattacatgtatgctggttcccttttaggaaccattaggcataacgggtttattccttgggatgatgatctggatgtaatcatgtttcgtgatgattttgaaaaattcaaaaaaatttttatttcatctcaaagtgataagtatgaattattgtccaatgaaactgaaaaagattattttcatttgctttcaaaattaatgcttaaaaatactaaatttgaggaagactgggttaatcaggttgattttcatattggaataaatatggatatttttgttttagatgatttggctaatggcaaattcaaaaggaattatcaacttaaaaaatcatttttatataataaactgctgattatgtctaaaataaaattaaatgatttgcctttttctacaaaagtaataactcatgcatgttaccatattttaaatttatttggaattaaaccatcaaaaataaataaaagatgtttaaattttttaaataaatataaaaatcctgatgccgaatttgtatttgatatatctgctaatgcagatgaataccctcaaatatttcgtagggatgattttaaatctataataaaagttaaatttgaagatattgaagttaatgtgcctgttaactatgatcatattttaaaaagtttgtatggggattatatgagtttacctccaaaagaggacagatataatcatattacagaaaccttggattttggtccatatgaactataa

SEQ ID NO: 7483 - DNA, 1488 bp, Methanobrevibacter gottschalkii
  source 1..1488: mol_type = genomic DNA
atgtcagataaaaacgaatggggcagcaacatgtcattcatccttgcaatgataggttctgctgttggacttggaaacatttggagatatccttacgtactttattctaacggtgggggtgcattttacatcccttatattgtagcaattctcttaatgggaattcctttcttgatcttggaatatggtgttggatataattataaatcttcatttgcaaaagcaatcagaaagattaatgccaaatgggagtatttaggctggtttttaccagttgctgtatttatgattatgatttattactctgctattttaggctgggatggaatctacatggttttgagtttctttaaaggttggggagcagatccgaacacttactttgcaactactctcttacaatctagtgattccatgaatggattattcactttcattccggttattgctattgcaatgcttgcaggctgggtaattatttggtttatttcacataaagaccttgaatctggtttaggtaaggtatcaaaaatattggtgccgttattgttcttaatcatggttgttattgtagtattttcacttacattgcctggatcttcaattggtcttgctgagctatttaatccggactggtcacttttaactcactttgaaatatggatggctgcattcggacagattgtattttcattaagtttgggcatgtctattgcatttacatatgcaagttatacaaaagacggttccgatttaattacaaatacaatttctattgcacttgcaaattccatatttgaaaattttgcagcattaggagtattttcaattttaggttatatgtccctgcaatccggaactgcagttgcagaccttgtaactcaaggtactggtcttgtatttatagcatatccaactgtatttaatgtattgggtgattgggcattagtacttggaccgttattctttttaacagtttatcttgccggtcttacaagtattttatctacaattgaaccattgtctttttcaattcaaaacaaattcggtctaacaagatccaggacaatgacaatattgtgtgttgttggtgctgttgtatcgatgctttatgcaactgcttacggcggatccttacttggatatgtggatacatttattaaccagatagcattattaatcggggttgtagctgaatgtattgtatttgcttggatatttgaagctgaaaaattaattgatttcttaaatgcgagaagtaaaacaattaaacttggtaaatggtggttgggtattgttaaatacatattacctatttttgtaactgttatttggattggtggtatggttgatgtagtcaacaatggtacaatggatcaattaatatttacaataatttcagccgctgttttattaattgctactttgatctttactgttcttcctgctaaaactcctgaatgggataatgctgaagacagagtatag

SEQ ID NO: 7484 - DNA, 369 bp, Methanobrevibacter gottschalkii
  source 1..369: mol_type = genomic DNA
atgaaaaactatgttataatcttgattggtgtaattatcgcattggtgattgttggtggtgctattgcatacacttctatgcatgatgacactagtgataacaacaataccactataaaatcttgcatcccgaatataacaaatgcaacaaatgatgctccaaatgcaacaggtgatgataaaaataccacttcatccgaaccttatgttgtaagtgaagttgttaaatttaatgcacagcaaggtgaaggatattaccgtgaagtaacatatagtgatggtaatttccgtcaatatgatgttgatactggtaaattaataggttcttcatatgattcggatcaagataaactcccaagcatggaatga

SEQ ID NO: 7485 - DNA, 285 bp, Methanobrevibacter gottschalkii
  source 1..285: mol_type = genomic DNA
atgatttttagtgaattattaaaacatttcaatatcaaagaggagtttccaccttatcttcttgatcaatcctttaatgaagttttccttgatggagagttgtttagaattgataaaaactataaaatagtagttaaaacacgtcaggatgttgttcataaaatgtttataaaaccggatgatatgtatcctgtaattatattgtcaaagcttccaaatggccttttaaatggtatgaaatttgggcatgctaaagatgatgtaatttatattaataaattataa

SEQ ID NO: 7486 - DNA, 729 bp, Methanobrevibacter gottschalkii
  source 1..729: mol_type = genomic DNA
atgaacaaaaaagagttaattaatagcggtaaagtaaaaagtgtattcaacacagataatgatgatgaagtaatcattgagtttagggatgacatgactgctggtgacggtgcaagaaaagaaataatggcaaataaaggagcttataatgctgtgatatcttctaaaatatttagagtattggaggaaaatggtgttgcaactcaatttattgaccttcctgaaccaaatgtcatggttgcaaaaaaacttgaaatgattcctattgaagttattgtaagaaacattgcaactggcagtttagtgcgtaaatatccaattgaagatggcactaaattaaatccaccaattgttcaaatggatttcaaagatgatgaatatcatgatcctatgctcaatgattcaattatcaaagcattaggaatagctactcaagaagaaatagatattttaactgaaaaagcattgagaatcaatgaaattttaactaaattctttgctgattcaggaattattttagttgactataaagtcgaattcggtaaggataaagatggaaacattcttttaggtgatgagatatctcctgatggatgcagattatgggatagtgaaacattggacatgttagataaagaattatttagaaaaggaaaagatgatgaagttatgactgcttatatggaagtttataatagaatcatgccggaagacgaaaaggtgatttaa

SEQ ID NO: 7487 - DNA, 267 bp, Methanobrevibacter gottschalkii
  source 1..267: mol_type = genomic DNA
atgttatttgatattgaagttaaaatctcacttaaaaggggaatgctgaacccagaagctactacaattgaaagatctctagatttacttggttataaagttaaaaatgtaaaaactgatgaaatcattaaattccaaatggaaggtgaagatagggaagtaatcagatcaaatgtaactgatatgtgtgaaagattactttgtaatcctgtaattcatgattataagattaatgttattccacaaaacatggcttgcggtaaataa

SEQ ID NO: 7488 - DNA, 645 bp, Methanobrevibacter gottschalkii
  source 1..645: mol_type = genomic DNA
atgaaaattggagtaattagatttccaggaaccaattgtgaccgggatgttgcaaaagcctgcgagcttgcaggtcttgaaccggaatatgtttggtggagtgaagaaaaactgactgactttgatggtattgtaattcctggcggattttcttatggggatttcttaagagccggtgcaatggcttccattacaccagtaatcgatggaataaaagaattagtaaaagaagaaaaaccagttcttggaatttgtaatggtgctcaaattttaggcgaaatcggtctcattcctggaatttttattacaaacgaaaaccctaaattcaattgtgaatggtctaaattaaaagttgcaactaacagaactccatttacaaaagcatttaaaaaagaccaaattattgaccttccgattgcacatgcagaaggaagattttacacaaaagatgttgatttactaaaagatcaggatcagattgttttgcaatttgaaggtaaaaaccctaatggttctattgaagcaattacaagtgtatgtgatgaatcaggtttggttgttgctatgatgccgcatcctgaaagagcttgcgaatcaatattcggttctgatgatggtctaaacttctttaaaggatttttataa

SEQ ID NO: 7489 - DNA, 720 bp, Methanobrevibacter gottschalkii
  source 1..720: mol_type = genomic DNA
atggtagtttatttaattggtgcgggacctggagatgctgatttaataactcttaaagcggtcaaagctttaaataaagcagatgttgttttatatgattatttggctaatgaagaaatattagctcatgctccggaaacttcacagagaatttatgtgggtaaaaaagcaggtgagcattacaaaactcaggatgaaataaatgatttaattataaagcaggctcggaataatgaaaatgtagttagacttaaaggaggagatccttttgtctttggtcgtggaggagaagaaatattggctttaatggaacatgatatcaaatttgaagttattccaggtgtaacttcagctattggagcaccaacttctcttggactgccagtaactcataggggtgttgcaacatcactcacgattgtaactggtcatgaagatcctacaaaaccggaaagtcaagttcattgggattatactgcagacactttaattattttaatgggtattggtaatattcgtgaaaacacagctgaaatcatgaaatatcgttcagccgatactccagtttgtgcaattgaaagcgggacattggctaatcagaatttagtattcggtactttaggcgatatttcaaataaaaaaataaatactccggctattttggtaattggtgatgttgtaagcatgtataaggatatctataattatcagggtgattag

SEQ ID NO: 7490 - DNA, 1788 bp, Methanobrevibacter gottschalkii
  source 1..1788: mol_type = genomic DNA
atgtgtggaattgttggttgtattttaaaaaatgatgatgatgtagctccaattctttttgattgtatttctaaattggaatacaggggatatgattcaataggtcttgccacttacagtgaagataagattcacattaaaaaagacaaaggtaaaatcaaggaagttgataataaattaaacctatctgatatgcctggaaattatggtattgctcatgtgagatgggcaacacatggcgatccttccaaattaaattcacatcctcatgttgatgaaagaagagatgtggctgttgttcataatggtattattgaaaattacttggaaattaaagaaaagttaataagtgaaggtcatgtattcaaatctgatactgatactgaagttattcctcatttaattgagaaattcacaaatgaaggttttgaccttgaacatgcagttaggaaaactgttgatattatacatgggacttatgcaattgcagcaatatctattaatgaacctgataaaattgttgcaacccgtaaggattctccattaattgttggaatcgggggggaaggatattaccttgcatccgactctccagctattttaaaatatgctcgcgacattatttatcctgaacagggggaaatagtcattcttgataaaaatggtgtcgttgttcatgatgaatttgataatccagtcagcaaagaaattgaaacaattaactggacacctgaaatggctgaaaaagagggttataatcacttcatgattaaggaaatcaatgaacaagcaacttcggttagaaatactttaactcaaagggaacatattcaggaaattattgatgatattgatgagggcattcaaagaatatgctttgtagcatgcggaacatcatatcatgcatcgttaactggaaaatatttaatagaatctcttgcaggcattccaacagatgttattctggcttccgagtttaaatattccgccaatacattaaatgataaaactttagttatatttatttcacagtccggtgaaactgctgattcacttaaggccctggatgtggcaaatgaaacttcaaaaactttaggtattgttaatgtagcaggttcttcaattacaagaagggcggaatatgtaattcaaactcaggcaggtccggaaattggagttgcagcgacaaaaacttatgtggcccaacttacttcaatttatttatttgctgcactgcttgccaaaaatacagaattgcttgaagaacttgaaaaagttccggatttcattgatgaggctcttgaagatattgattttatcaaagaaatttcaaaaagatataattatgctcgtgacttcttctacttgggaagaggttattcatatcccactgctcttgaaggagctttgaaacttaaggagattacttatattcatggtgaaggctatgctgcgggggaacttaaacatggtcctttagccttgattgatgaaggcattcctgttgttgttattgcgccaccgggagattctcacaggaaaacaatgagtaacttagaagaagttaaatccagaggagctaatgtactggctattggttcggctgatgatgatgcactaaaaactaaagcagatgatattattacaattaatccggaagtaaatgagataatcgcacctttagtttatgttgttcctcttcagctgattgcatattatattactcttgaaaaagggcatgaccctgataaacctaaaaatctagcaaaatgtgtgactgttgaataa

SEQ ID NO: 7491 - DNA, 1896 bp, Methanobrevibacter gottschalkii
  source 1..1896: mol_type = genomic DNA
atgtttaataagaaaattagtttaattttattaacattagtttttatgttatcaatttctgcagctgttgcaactgatacaaattctactgatgatgtaatttctagtgatgaggaggctgaacctccatcggttgtatctcaggacatatctataaatgaaggaaatgattcaaaccctcaggaaaattatactttgaagggcagcgatgtaagtatgtattataactcaggatctggttatgaagcatcattatctgatggaaatgattctgtggaaaatgcaactattaatttaaacattaatggtgtagattataataaaagcactgatgcatcaggtaaagtttttttaatcataaatttaaaaccgggcgattatgtaatcacagctagctacggtaatttaactacagaaaataagattaatgtattgccggttataactggaaatgatgtttcaacaacttataaacattcagtaccatattcagctacatttttaaaaagtgatggtagcccattatccaatacctatgtcaaatttaaattaaatggcaaaacatattccaagaaaacaaattctaaaggaatagctaaattatatgtcggttcaaaaatcggaacttataatatttatgcaatgcatcctaatggatacagcatttcaaataaaataactgtaaaaaattcaatcatatcaagcaatctgaaaaaacattataggagctcaaaaacttttaaagcaacattttatggtaaaaatggtaaattattaactggtaaaaccattaaattctacactaaaggatcttatttctataaaaaaactaattccaaaggtgtggcttatattaaagtaatttcaaaacctggaacctataagattacttcaattaacacaaataccggtgagaagaaatccaatacaattactgtgttatcaacactggaagcgaaatcaatgacagttttcaccggcaccacttcaaaatttaaagtgaaactttataaaggtgaaaacattgctaaaaacactaaaatgacagtttatgttgacggtgttaaaaaaagagtaactacaaactcaaatggtgttgcaaccgttaagttcaaattagataaagggatttataacatcaaatcggtagatccttttacaggctatgttttaaataaaaaagtaactgtaaaactggcttctatcagtgctattaatgtcaatgcaattgaaggcaaggaagggttattccctgccaagcttttacagcagaatggtaaggtagctagtggtacttatatggagatgactattgatggtgtaaaacataaagtcaaaactgattcaagaggtattgcaggttataagttcacatttaaggatgctggtgtgcatactgtagtttgtaaagatttatctacaggctataaggtaaccaaaaagattaatgttgtaaaaaagggtgaaggtaaatcttatgatcagtttggtgtttcagaagatggcaaaacaatgcttgtgattggcaggccatctgcttctggtgaaacagctaagtatggttatacatattataaaactgaagtggatagaacctgtccgatctgcgggagcaatgaactttactggagcatcttttgggcttccggtaatactgatggcggaactttcccagaaacacctagccgtccggcccattatgatgagggcaatttagatggcatcattatttgcatgcattacactggagatgatgagtattgtgatgccgactggtctgttttcgggcataatcatgatggtagcggtagggatttaaagcttgtatcaaaaccagtcagatcatcagaaatagaagcatatctgcttaaaagcggatattatgttaaagtataa

SEQ ID NO: 7492 - DNA, 1227 bp, Methanobrevibacter gottschalkii
  source 1..1227: mol_type = genomic DNA
atgagttatgaaaatagtgctaggataattaatgatgatatttttgatttagtgaatgaatgtttcggtcaggaaaaaactagtcaaaataatgaaagcagacttaatttttttgatacttacaagaattactttgttttaaccgatgatggatcttattctattaattcaaaagaaataaatcataaagttgaaacattacatacatctacaggtgcaataagtgagtcattcgagaaatttataaaaccgatgaaatttgattacacaaaagatattgcaattttagacatttgtgcaggattaggctacaattcatcagcagccattgctgattttattaaaaatagctttgattcaaatttaaaagtagacatggttgaaatttcaaaagcaacatttgcctgtggtcttttagttccatccccaataccggaacatgacattacaaaaaaagctattgaagacgaattaatcagattagattatgcaactttaagtttagaagaatgtgaaattccggaaaatattgatattaatgtgtttgttgaagatgcaaggcagactgttcagaatcttgaggacaatacatatgatgcgatattcctagatccgttcagtcagaatatgactccagaactattttcacttgagtttttcaaagaatttaaaagaataataaaagacaatggcattgttgcaacatatacctcatcagcaccagtaagagctgcttttattgaagctggcttctatatcggtcttggtccgatttttggaagaaaacaggggggaacacttgcaagcccgaatcctgaaatgcttgattattcacttcccaaaaatgatgaaataagaattgcactttcagatgttggaataccatttagagatccggatttgaataaatccagtgactttattttaagtgaaagatctgaagaaaggcacaatgcacgtcataatactaaaatttcatctgccgttaaaacaccaatatttctgggggatgcaatggaaaatgatgaaaaattaaaaagacgtgttgaaagaaaccttattaaaatgaatattccgtcaacaacctcccccgaagcattctacatcattgaatgtgaaaaaaaatactcagaaaagcaagacagagaaaacaattcaacagccagaatattggatatgaaaaaaagattagaaaaagttaaagatggagattatactttaacataa

SEQ ID NO: 7493 - DNA, 1977 bp, Methanobrevibacter gottschalkii
  source 1..1977: mol_type = genomic DNA
atgtttgaaattaaagcaaaagataatatgggtcgtgttggagttttaaaaactaaacacggtaatgtaaagactcctgcattaatgccggttattcatcctagaaaacaggcaattgatgttgggaaatatggtgctgatatcgttattactaacgcttatctgatctacaaagatgaagaattgaaacaaaaggcaattgatgaaggactgcataaattaattaactttgatggtccaataatgactgattcgggatcatttcagttatctgtttatggtgatgtggaaataacaaacagggaagtgattgaatttcaggaatcaattaaaaccgatattggaacaagccttgatattccaacagctccttttgttgacagggaaaaggcggaaagtgatttaaaaatcacattagaacgtgcaaaggaagcagttgaatttaaaaaagaaaataatattgaaatgttattgaattctgttgttcagggatccacttatcttgatttaaggcaagactgtgcccgccaactctcaaaactcgatgctgatttatatcctattggtgcggtagttcctttaatggaatcttaccattacaaagatttggtggatgttgtaatgaattccatgaaagaattgtccgacagtgttccccgtcacttgatgggtgcgggacatcctatgatttttgcattatgtgcagcaatgggatgcgatttattcgattcggcagcttacatcttgtatgcagaagatgatagattcttaacaactagaggaacttacaagcttgagaacttacatgaaatgccatgctcatgtgaagtctgcactaaatacactccagatgacctgagggcaatgcctaaaaaacaaagaagagatttaattgctcagcacaatttgcatgtttcttttgcagaattaagacgtatcagacaagctatttatgaaggcagtttaatggaacttgtagaggaacgctgtcgtgctcaccccgcacttctggatgcagtaagacaacttggaatgtatgcctgtgatctggaaaaatatgatccgagaagcaaaaaatccgcatttttctacacaggacctgaatcattgggaagatctgaagtattaaggcacattcaaaaactaatggcaatgcctaaaaagagggatttaattttacttcccccatcaagaaagccatattctaaattcatttcaggtaaactcggtgacttttacagatacggcgaagaacatgatattgatttggataatgctgactttatggttgttgatgttccattcggtttgatacctcttgaagttgatgaggtttatccgttaagtcaaaattcaactccaaaaatacgtgatgtagatgcagttgagtttttacaggaatttgttgatgaattctctggatattatgaacaggtattaatacattcaagagttcttaaggatttagaaatagaaggggaaaataatcttgttgatgcagaaatcagatacgcaaaagatgatgttaaaaaaataaaggctattgcagactatcagtttggtgtgggtgcgggtgaagcattatttgatggcaacattaacattgagaaaagtaaaaaaacaggtaaaataagacacatttatgatggtaaaacattaattgtcaatatgagggcatctgattcctttttggttttatcaaaagaaggtgcaagaagacttcatgctgcaatgccgtctttaagtaacagggttgttgtaaataaagattcagaaccatttgcacttgatggcaaaagcgtattctgtaaattcgtcgttgactgtgatgataatatacggtctaatgatgaagttttgattgtaaatgaagaagatgaattgcttgcttatggtaaagcattgcttggagcctgtgaaattaaggaattaaaaactggtcaagctattaaaacacgtaaaggtatgaaaaagtga

SEQ ID NO: 7494 - DNA, 669 bp, Methanobrevibacter gottschalkii
  source 1..669: mol_type = genomic DNA
atggttgataatgataaagtaaatactggtcacaatattgaagataaagaacttattaaaaatgcaagaaaacctgttggtgagctgggacatcagatattggacaggatgaataaatctcacgaatccatggcgcagtggggagtaagtcactttgaagtaaaagaggatagtaaaatattggatatcggctgtggcggcggaaagaacattgaaagatttgcaaaacaaatttctcaaaacggaagagttgtaggtattgattactctgaagtaagtgttgaaaaatccgctaaattaaaccaaaaattcatagatgggggaattgttaatgttcttcagggatctgtttctgacatgccgtttcacgatgaaacttttgatattgtaactggttttgaaaccatttatttctggcctgattttataaatgacttaaaagaagtgaacagggttcttaaaaatgatggtattgtatttttctgtaatgaagcagtatatagggaaggtgaaatggaaaaatacgatgatttggttgaacttttggacatgaaaatctattcggaagaagttttaagaaattcattggaaaaaactggttttaaagactttaaagcttatttaaatgatgaaaacgattggatttgtgtgactgctagaaaaatttaa

SEQ ID NO: 7495 - DNA, 1428 bp, Methanobrevibacter gottschalkii
  source 1..1428: mol_type = genomic DNA
atggctaatcaggtaaaaacaatatttgcaaacatgagtttcatgctagtctcacagattattgctagtgtctgtgcttttgtttggacaattgttactgcttggtatttgggtccgtctgattacggagtatttggtgcagcagtatcttttgcagcactttttggtattgtaattgattttggactctcgacttatgttgtaagggcaatttctacggattttgctaatgaacataaatatctggataatgcaatttctcttaaactgtttttatccgtattttatgtaattgcagtatacttatcggtattggtcatgggttggcagcctaaattggtgttagcttgcgtattccttgcttttgaaaatgttataaaatcttatcatgctattttatttacttcattccaagcacatgagaaaatgaaatatcaggccgttaccaatactgtcatcaatgtattcacactgatatttatattgttggttgcatgtactgattatgcattagttggaattttaatggcatatattgttgcaaatgcattgggtttgttttatgaagtttatgcacttagaaaacacattattaaaccgaaattgtcgtttgattttagtttttacaaggcattattaaaagcaggacttccttttgctctaaccggtcttttttatacagtttattattcaatagatcttgtcatgattacacagttttcaactacttatgcaacaggactttataattcagcatataagttaataacagttttaaccttattctatacaatctatacctctgttattttcccggtaatgagtaaattgttcacagatgagaaggatttattgaatttaagttttgtaaagtcaattaaatatctgatgctggtcactattcctattgcagtatttacttcattttactcatatcagattattgcaatttatggggcggaatatattgaagccggtggtgttttacagatactgatttggacagtatgcttcttgtttgttaatggtgcgtgttcattggtattgaatgcatcacaccaggaatattcagttacaaagatttatacaatcgccgcattatttaatgttgttttaaatttagcattgattccgaagtattccgtttacggcgcttcggttgcaacagttttaagtgaaattttaattttggtcttggaactgtacatgcttggaaaaatcaaccagcttccggacaggcacttaattcatgatattttaaggattattttcgcatctttggtcatgggcactgttttatatgttcttgatttaaacatatgggctgctattgcggtatctgtggtggtctattttgcagttattgtgctgattaaaactgttgatagtgaagataaactgataattaggcagattatcaacagataa

SEQ ID NO: 7496 - DNA, 1038 bp, Methanobrevibacter gottschalkii
  source 1..1038: mol_type = genomic DNA
atggtaggaattgtaggatatggggcatatgttccctcatatagaattaaagtagaagaaattgctaaagtttggggagatgaccctgtagctttatcaagaggattaatcgttaatgaaaaatccgtaccttcttctgatgaagatactgcaacaattgcagttactgctgctagatacgctctagcaagagctcagattgatccaaaaaatattggtgcggtttatgtcggttccgaatcacatccttatgcagtaaaaccaactgcttcaattgttgctgaagcagtttgtgcaactccaaaattaactgctgcggatctggaatttgcttgtaaagcaggaactgctggcattcaaatgtctatgggacttgttcaatctgatatggttgattatgctttagctattggtgctgatacatctcaaggagcaccaggtgatgctttagaatacactgcatctgctggcggggccgcatatattattggtaatgataatactgttgccgatattgaacacacttgcagctatacaactgatactcctgatttttacagaagggagggtgagccttacccatctcatggtggacgttttacaggagagccggcttactttaaacatgttttaagcgctgccgaaatgttattcgatgaaaccaataccgctgctgaagactatgattatgcttgtttccaccagcctaatggtaagttttacttaagggcaggtaaaaaattaggattcacttctgaacagattgaaagaggattactcactcctaatattggaaacacttattccggtgccgtacctttagcgttgtctaatattttagatgttgcagaacctggagataaaatatttgttatttcatatggatccggtgctggaagtgatggttttgcaataactgtcaaagatgaaattgaagagagaagagaattggctccgaaaacagaagatatcatcagtaaaaaaacctatgttgattatgctgtatatgctaaattcaaaggtaaaattaaaatgtaa

SEQ ID NO: 7497 - DNA, 1158 bp, Methanobrevibacter gottschalkii
  source 1..1158: mol_type = genomic DNA
atgagagatgttgctattgtaggagtttcacaaacaaaattcggtgaattatgggattcatcatttagagatttaattgctgaagcaggtgtaaaagctttagtggatgctgaaattgatggtgcagacattgaagcaatgtttgtcggaaatatgtcatctggactttttgtagagcaagaacacattgctgctcttatatctgatcatgttggtcttaatccaattccaaccacaagagttgaagctgcttgtgcatccggcggtttggctttaagacagggaatcatggctgttgcctcaggattccatgatgtggtaatttctgcaggtgtggaaaaaatgaccgatgtcgttgatgctactccggctattgctactgcatctgataaagaatgggaagcacagcagggagctactttcccatcattatatgcaatgattgctaaaaggcacatgtatgaatacggtactacccgtgaacagttggcgcagttttctgtagtaaatcataaaaatgcatctaaaaacccgaatgcacaattcccgtttgaaattactgtagataaagttttaaatgcaaccatggtagcggacccattgactttatttgactgttcccctgtatctgacggggcggcagctgttgttatggtgcctgcggaagatgctaagaaatatactgatactccaatttatgtaaaagcttctgcacaggcttctggaactttaacattacatgacagaaaagatttaactaccattgaatctacaaaagtcgcatccagaaaagcttacgaaatggctggagttacacaaaaggatattgacttgactgaagttcatgactgtttctcaatcaatggacttttagctgtagaagacttaggatttgctgaaaaaggtaaaggtggaatagctattgaagaaggtcaaactgaaattgatggtgatttcccaatcaacacatccggcggtcttaaagcacgtggacacccattaggtgcaaccggtattgctcaggctgccgaagtagtatggcaacttagaggagaggccggtgcacgtcaagtggatggtgctgaaattggtatgactcacaacattggaggtaccggaggtactgcagctgtacacattttcggaagagatttataa

SEQ ID NO: 7498 - DNA, 924 bp, Methanobrevibacter gottschalkii
  source 1..924: mol_type = genomic DNA
atgataattaacacaggttccagaactgacattcccgcttttttcagtaaatggcttttaaacagaattgatgaaggttcagtctgcaccagaaacccatacaatgatgatatttataaatatccgttggattcaaaaataattgactgcttgtgtttttgtactaagaatccaaaaccgatgattgctagtttggataagctggatgatttcagacaatactggtttgtaacaataactccttatggaaaagatatggaacccaatgttccaggttataaaaacgtaatgaaatcattcaaaaagttgtctgaacatttgggaatcggcaaagtatcctggagatatgaccccattttcatatctgaaaaatataatctggatttccatattgaaatgtttgataaaatggcatctgaacttggggattatacgaatgattgtacaatcagtttcattgatttgtatcaaaaggtcttgagaaactttcccaattcaaaggaagttactcaggatgaacaattaattataggcagggaattttcaaaaacagctaatgaacacaatattaaaatgaaaacatgtgttgaaggaactttgcttgaccagttcggctttgattcaagaggatgcatgactcaggaagtaatcgaaaaagctattggtaaaaatttaaaaatccctaaaggaaaatatagaatccgtgaatgcgactgtatatttggaagggatatcggagcatataatacctgcctgcatggatgcaagtattgctatgcaaacaccaacatgaagctggttaaaaagaatcaaaaactgcataattcaaattcaccattattgatcggggatgttaaagagggtgatgttgtaaaagaggttagggaacctagctatattgatacacaacaaagattcatttga

SEQ ID NO: 7499 - DNA, 1203 bp, Methanobrevibacter gottschalkii
  source 1..1203: mol_type = genomic DNA
atgatcatccaaagaaaagattatattgataaaattaatccttttgtaaataaacatattattaaagttttaataggagcaagacgttccggcaagtcaaccatattaaaacaaattattgattcattaataaaacaaggaaccccaaaggagaatattgtttggatgaactttgaattaagtgattattttgaaatggataatattaaaaagcttgaagagttcatatctaataaaactgaaaatattgatggtaaaatttatctattttttgatgagatacagattgttccccaatgggaaaaattaatcaattcttactttgcaaaagaaaattatgacatatatattaccggatcaaactcaaaattattgtccggcgagtttgctacatatttatccggccgctatgtggaattaaacatatatccattttcttttagggaatatcttgagtactatgaaattacttctgatttcaaatctcatttttacagatatttggaagatgggggtatgccttcaacatttgactacaggggtgatgataaaagattaattctgattgatttatacaattctattgtccttaaagatataattcaaagaaataatgttaaaaatgttgacttgttggatagaattatgagatttgtaatgtataacattagccagcccttttccgcaaataaaattcataaaagactaaagcaagatatggtaaacttatctgtaaatacaatttacaattatctgaaattctttgaaaatgcatgcctgatttatcaggtaaagcgcgaagatttacagggtaaaagaatattaaaacatgatgaaaaatattatatatgtgatttgggttttagacaggcaataataggaaacaatcaaagggatatcactcgtgcaatcgaaaatattgtttatttggaacttttaagaagaggatatgaaatcaccatcggtaaagttgataacttggaagtagattttgtatgcaaaaaacaaaataaactcatttatattcaagtttcttatttattggcaagtgaagaaactattgaaagggaatttaaaccgttaaataatatttcagataattatccgaaatacgtaataaccatggatgatgcggacatgtctcatgatggaatcattcatttgaatttaattgattttttaagggataatgaagtgatttaa

SEQ ID NO: 7500 - DNA, 1191 bp, Methanobrevibacter gottschalkii
  source 1..1191: mol_type = genomic DNA
atggatgaaattgcaagcataacagatacaaatttaaccgaaacacaatttttcaatcgaagagatgaaatcaacatattatcaaatttattgatcagcactgaattcaactccgcacccacaatactattaacaggaattagaggagttggaaaaacagccctcatcaaaaaaatcagaaataaatttgaaagggaatatttagttgtagatatcgatttatccagaagcagtgcatatcaacagaaaaatctcacaagggcaagcatgataaaaataatctacgactcaatcatcagatcatccaaagaattcggcttaaaaacaatcagcaatcaaatagaaaaatattttaaaacaaaaaatttcaaaatagataaactcttatcatacgaacacatccccatcccaatctttgaaagtgaagacaattatgagagattggcggaatttgtaatggaactgcctcagaaaatttatgaagacaataatgataagataaaaggagttttcatattcattgatgaaatccaattaatcaaagatttgggagatgaattgaatggatttttatggtatatgcgcagtttcattcaaacacaaaagaatgttgcatacatcttttgcggaagcatgagcctgaaagacagtttaataaatgacttaaatggaaataaaggggcatttggagggaggatgctgacaattgaagttcaaccattttcaaaaaagaccactgaaaactatatcaaatcaatgagaagaaacatccaactagaccatggaggatttgaaagattttacaaatgcacacgtggaattccttattacatcaacatatttgcaaaatatcttccagaaaacctaacattaagtgaaaataacataagcgaattattcaaggattcaattgattatcttgcaatccatttcgtatacatgtggtccaaattaacattccaggaacagaaaatcataatttcactacttgaaaatccaaaaaagagaatagaagtggcaaattccctcaaagtaactagcggatcactaaacagacccttaaatcgccttctggactatgatttaattgaatatgcaaatgacaaatatcaaattacagacccgatatttggatattggcttaagaacagttatgaaaaaaatggaatatacccatttagaagcatttaa

SEQ ID NO: 7501 - DNA, 918 bp, Methanobrevibacter gottschalkii
  source 1..918: mol_type = genomic DNA
atgccaatatataatattgatggagaaacattaactccaattaaacaggtaaaatttaaaaacgaaagggaattacagattttaaccgaaaaaaaccttgaagaactattcggtttaaaatttattgcaactgaatttcaggttgacaatttaagaatagatacattagcattcaatgaagaaactaattcttttgtaattattgaatataagaatgtaaaaaattatagtgttatcgaccaaggatatagctatttatccctattgcttaataacaaagcagaatttgttttaaagtataatcttgtttgtaatgctgcattatctaaagatgagtttgatttttcacaaaccaatgtaatgtttatctctccaagctatactacttatcaattaaggtctgttgaattttctgatatagcttttgaattatggaaagtagttaaatattctaatggtactgttttatttgataaagttaataatactgatactcaagcttcaataaaacaaattaccaaagaaaacactagtaaagataaggtcaataaggaaattaaaaaatacacggaagaagatactttaatgaacaaatccgatgacattaaatctttgtatgataatttaaaggaattaattttatccaattatgatgatattgaaattaaccattggaaatattatgttgcaattaaagtgaataataaaatggttgctactgtaagtgttttatcaaaatctttgaaaacatggattaatttaaaagaaactgaattaagagattccgaaggcaaagttagaaatgtgtctaatattggacatcatggtgtaggtgattatgagtatgtaatctcttcagaagatgatttatattatttcaataagttatttaaacaatcttacgatgaaaaaatttaa

SEQ ID NO: 7502 - DNA, 696 bp, Methanobrevibacter gottschalkii
  source 1..696: mol_type = genomic DNA
atgaaaattgttacttggaatgccaacggtaaattcagtgaaaagtttccagctattctggaaaaagatgctgatatttatgtaattcaggaatgtgaaaatcctgaaataattaatttaaaagaatatagtgaattttcttccaattattattgggttggtgaaaaccaatattatggtcttggaatatttgctaaagataatgtaaaattagaattggtagatttggatgataagggactcagatatttcataccatttactgttaatgatgattttaatcttttaggtgtttggaccaatcctgatatggatggcactaaaacaatttattatcctaaagaaataaccaaatattacgaagaacacaaggattcaggattcttcaatgaagacatgattatctgtggagattttaattgtgatgtaagattaaaaggcactcatgccaagaatgtttatgaagtaattgaaaaattgtctgaatgtggtcttgtagacatatatcaccatttaactggtgaaaatgaaggtgaggaaactacgccaactttttacatgtataggcacttggataaaccttatcacttggatcatatattttcgtcatcagataaagttaaagctttggaaattggtgatgcagacaaatggctacagttaagtgatcatgtaccgttaatctttaaaatttaa

SEQ ID NO: 7503 - DNA, 1452 bp, Methanobrevibacter gottschalkii
  source 1..1452: mol_type = genomic DNA
atgtttgaaaaggaagaattaatcacaaatttcattaaggaagaactgactgatgttcccaatatcttgaacaaagagttatctaaaaacaatgaaaaattcaactccagagaggaactggatgagataaaaggatacatggacacttttttaaatgaagatacatcaaataagattatagttttgccgggcctcaggggcgttggcaaaacaacgctggttctgcaggcatatgaatatctcctaaaagaaagggacattcctcccagtaatgtattatacatttcctttgacgatttaaatgatctggttgaatgcagtataaggcagatggttgaaatatacctgaaaaacatatttcatgcaaacataaggaatttggatgaaaaggttttcatattcgtcgacgaatcacaaaccgataaaaattgggctttatccggtaaggtcatatatgacaaatcttataacattttcatgatatttaccggttcatctgctcttcatctggaacgcagcgatgagcttgcaagaaggatgcgcaaaaaatccgtaactccactaaactacacacagcatctgaaattaaagtatggcattgatgtgggaagtctatcagatgatttaagagaactggtattcactggaaatattgacaatgcggcagcctctgaatttgaggcaaataacttattgaccaattgtttggattattcttcaacagattgggacgagtattataaattcggcggttttccaatattatttgacaaaaagtcccatagggaaatctgtgaggacttggttgaaatcacagaaagggtcattacaaaagacatgccgcagataaaagagatttcctctgaaaatcaatccaatgcaaaacgtatattgagatatctcgccctccaacagccgggtgagttaacacaggcgaatctggcaaattatctgaaaacatcaaccgcaaatgtaaacaaaatattggatttgcttgaaaaaactcatctgattttccattgcgaaccatatggaggttcagccaaaagggttaaaaaatcatggaaatattattttgcagcacccagcatcagacacgccctgtcagctaaaataggaaacccattattgggaactgatgattatgaaggtctgcttctggaaaatcttgtagcgtcaaatttgtttaacttatccaataggcaattcacaaatttcacagtttattatgatgcagacaaaaaaagaaatgttgattttctgattcataaggattcagaaaacatcatcccaattgaggtgggacgtggaaagaaaaagaaactgcagatcaaacatgccattaacagatatgattgtgaatatggcatagtggttgcaaataactattcttctctaaaaaaagatgatgatgtaatttatatatctccaaaaacattttcatttttatag

SEQ ID NO: 7504 - DNA, 1440 bp, Methanobrevibacter gottschalkii
  source 1..1440: mol_type = genomic DNA
atggaagacgtaatctataactatcttataaaacagttatctgaagtacctatgattctaaacaggagattatcatataaaaacatcaagttcaataacaaaaacgaatttgataagctcagattaatgattgacagttttttagatggggaatctgaagaaagatactttgtacttccgggaattcgtggggttggaaaaacaacaatattataccaatgctatgagtacctgttaaaggaaaaaaacttcaattcaagtgatctgttatacatttcatgtgaaacaactaatttcgcaggggaaacagatatcaaaaaaataatagaaatttatttagatgaaattcacaatacgtcccccgcacttttggataggcctgttttcattttcatagatgaagcgcactttgacatgaattgggcaatgaacggaaaaaccctttatgatgaatccccatatattttcctgatattggcaggttcatcatcacttcatctaaattataattctgatgctgccagaaggctcaatatactgccggtcatgccattaaactattcccagcacttaagcttaaagtacaactaccaaacagatatcggaaatgacttaatcgatttgatattcacaggaaacattgaagcagcacaggaaaaggaactaaaaatccaaaaggacttaataagcttaaatagttatccattaaatgactggaacatttatttaaactatggcggatttccagcaacattcaacatcaaattcgaggacataattgtatctaaactatggacaataatatccaaagtaataactgtcgacatggcgaatgtattcaatttaaacaagaacaatcaaaacctggcttataaaacattggtgtatctggcatcacaaaaaccgggagaaatatcacatgacaaactgtcaaactacttggattgcggcaaaacaacaataaacaatattatcaacacattggaaaagacacaattgatatttcacagtgaagcttatggtggagcttccaaaaaagttaaaaaaccatggaaatataatcttgcaacaccaagtatcagaaactgcataaacataaaattcggaaacagcgcaggatcaaaaagtgaatatgaaggaatattactggaaaaccaaattgcatctaatctatttaacctaaacaacaataacacatcattcgacttcaatgtttattatgattcgcaaaagggaggcgtagactttatcgttaaaaaattattcggcaatgcaataccgatagaatcagggataggcagcaaaacaagaagacaaataaaaaaagcaatgaataaatatgatgcagattatggaattgtggtttcaaataaaacagatttcatagaaaaagaagatgatgtgatattcatacctccaaaaacattcacatttttataa

SEQ ID NO: 7505 - DNA, 456 bp, Methanobrevibacter gottschalkii
  source 1..456: mol_type = genomic DNA
atgagcaaactgttaatcgattcatcattcatcattgcattgtttaggaaaaatgatgggcttcaccaaaaggccattgaaaacaaggacatgcttaataatgactgctacatcacagacggaatattggctgaagtaatgacaattattgggcagaaaacaaaagacattgggttggttagaacagtttacaattatctaaaggacaatttcaccatcattcatgaaagtgaaatcagcatgtacaatgacaatgtattatccgtttttgaaaaatacaatcaaaatagctttaaggtaagttttatagattgctcacaagtcataatatataatcattataatttggattatgtaatcagtttagataacggatttggactttttgaagaaatagaattaaaaaatctaagtgaacagaagcgtactatacaattcattaaatataacatttaa

SEQ ID NO: 7506 - DNA, 243 bp, Methanobrevibacter gottschalkii
  source 1..243: mol_type = genomic DNA
atggataatatactagctacaacaacattatataaaaactatcaactggccatacccaaggtcattcgcagtcaatttaaagaactgaacagtaaagacacagttattgactggttcatcaatgaagaaaatgaaatcataataaaaccaagaaaaaaagtaagtttagaagatgtaatcggaatcattgaagatgatgatccaagaaatgcagttgaactaaaaaggagtctatacaaatga

SEQ ID NO: 7507 - DNA, 120 bp, Methanobrevibacter gottschalkii
  source 1..120: mol_type = genomic DNA
atgaagctggtcaaaaggaaccagaagttgcatagtcctgatttgccattgctgattggtgatgttgtaaaagaggttagtgaacccgctatattgacacacaacaaaagattattttaa

SEQ ID NO: 7508 - DNA, 1239 bp, Methanobrevibacter gottschalkii
  source 1..1239: mol_type = genomic DNA
atggtaaaaagagaattatatctagaaaaaatttacaattttatgggcaaaaatttaataaaaataataacgggcatgagacgttgcggcaaatcctatttattcaaattaattatccatgaacttaaaaaaagaggaaccaaagatgaagatatactactaatagatttagagttacccacatacaatcacataaaaacacgagaacaactagatgaaattgtagttccgttcatagaatcccatgaaaacaaagtttatttattctttgatgaaatacaaaatgttaaagaatgggaagtaagtatcaacagctactacaaactagaaaacaccgacatatacattacaggatccaactcaaaattaatgtctgcagaatttgcaacattattaactggaagatacgtaaatatagaactatatccattttcatttaatgaatttttagattataaacaagaattaaatcaccccccttcaataacaaatgaactaaatagtgatttggaaaactttttcgaagaataccaaaaatatggcggaatacctctcaccatatcctcccaacatgacaaagagctagtgttaaatggaatatactcttccataatcctaaatgacatagtagaaagatatgaaattagaaatgttggattgttcaatagaattgtaaaatatataattgaaaacacaggaaatttaatatcagcaaatgcagtatacaaatacttaaaacatgaaaaacttagaattacaaaaccaactatctacaattacttagaatatcttgaaaatgcatacctaattgcaaaagcctcaaaagaagatattgctggaaaaaaagaaattataggctctgaaaaatattatttactcgacactggattttataaatcacaacttgaggaaaagcaaagaaatatagaccacatattagaaaacataatattcatcgaattaaagcgacatggatataaaataacaataggaaaagtaaatgactatgaaatagacttcatatgtaaaaaaaataaccaaaaaatctacatacaagttacatatctactggaaaatgatgaaacaattgaaagggagtttaggccattattaatgattaaagataattatccaaaatatgtattatcaatggatagaactgtccaacctcaaaatggcataaaacacatgaatataattgattttttgaaaaactttaaccatgatgaaatattttaa

SEQ ID NO: 7509 - DNA, 1188 bp, Methanobrevibacter gottschalkii
  source 1..1188: mol_type = genomic DNA
atgagtattgttccattgcatattccaattaatgaaatcgacagatatttctataaccggactgaagatattaaaaaaattgagtattatctaaattcattggaaatcggaatatctcaatcattattaataaggggagttagaggtgttggaaaaacttttttacttcaaaaattaaaacaggactcaaaaaagaattttctggtttcatacattgatatttcaagaattgtgggcattgatgatacgcagttaactgcacaatcagttttattggaattattggacgaaatgaacaatacaatctatgataagatacatgacggtaaaaaagtaacttttcttttgaaaaaattaattgacaaattaaaaattaaagatttcagcttttcaaaaggcattcatatggctgaaataccaataccagcaaccgaagacaattacaaaaaaatcagtaaatttgtaatggaatatcctcaaaatgttgttgaaagtattgatggcattaatggattcataattataattgatgaattccagatgcttaaaaagttaaaaaatccagaatcctttttttggttaatgaggagttatagtcaattccaatcaaatgtcagttatgtgatgagcggatcaatctcacaaacatcagatgcaattgaaatgttgaatggagcaactggagcatttggtggaaggatgatgcaaataaatatagatcctttcacaaagcatgaaaccaaatcttatttcaatgacagatttccagaaataaaattcactgacgatggttttaatcgtttttatgagtatacaaaaggaattccaatgtatataaatagcttttacaatgcattatcatcccatgaaacatatgatgaaaaatcaatagattatattttcctcaataacatggaccaaattcttgtaatgtggattaggatatggggtactttaaacaaatatgaaaaaaagataatatgcgccatgttaaacaaagagaatatttcctggtctaaactggaaaggagtttagacatgtctccagctactttaaccaagtatattaaaactctacaggataagggaatcataaaatatcatgatggaaattataattttgaagatttaatgttaaaaacatggctgaataatgaaaaagagaggactggtgtttatcctcaatag

SEQ ID NO: 7510 - DNA, 1530 bp, Methanobrevibacter gottschalkii
  source 1..1530: mol_type = genomic DNA
atgacaaactgtatcatggttcaaggaacctcatcaaatgctggaaaaagtatgcttgtagctgcattatgtagaatatataaaaacagaggatacaaagtagctcctttcaaatcacagaacatgtctttaaactcatacaccaccaaagaaaatggtgaaattggaatagcacagatgctacaggcagaagcagcgatggttgaaccgagcatacatatgaatcccgttttactcaaaccaaaaggagatttcacatcaaatgtgattattcagggaaaatccatcggggatatggatttctatgactaccagcataaataccatgataccgcattagaagctataaaagaaagcttcaatattctaaaagaggagtatgatgtgattattattgaaggagcaggttctcctgctgaaatcaatatgcgtgatcaggatattgcaaatatggaaattgcacatcttgcagacgcaaatgttattttaatagcagatatcgaaatgggcggtgtttttgcagcaattgcaggaacttacgtattgcttgatgattatgacaggtcaagattaaaagcaactgtcataaacaaatttagaggcaatctggatattttaaaaccagggcttgacagaattgaagaaattaccggcgaacccgttttaggagttctcccatatgatgaaactttaaaattgcctgaagaagattccgcctcactaaccacacatagctttgcagaagataaggacattacaattggcgtcattagacttccaaaaatagccaatttcacagatattgacccgtttgaatatgaagatgatgttgcacttaaaatgattgacatcaacgacaatataagtgatgttgatgctatcataattcccggaacacgcaactcaacagaagacatgtttgaacttcgcaaaagcggtcttgcagatcaaataattaaaaaagcagatgaaataccaataatcggaatatgcggaggcctgcaaattcttggaaatgtcatttatgatgatgaaaaaagggaatcaaaacacggaacagtaaatggtcttggccttttagatattgaatctgaattttcaagagcagacaaaatcgtaacccaatcagaagccacaataccggataatctcgatggtattgctggtgcaatatttaaaaacattgcaggtgaaagcattacaggctatgagattcacgaaggtaccagtgaactattaagctctaaagcattattaaatgttaaaaaaggacagggaaacaatgatgagggaatgattgatggggcatgcaatggaaacatctttgcaacttattttcatggaatattccacaattacaacttcagaagagaatttttaaactacatacgtactaaaaaaggccttgaagccagatatggtgaagacccatatgaaactcaaaaagattattccctaaacagattagccgaaattgttgaagaaaatttggatatggatattatcgatgacctgttattttccaaataa

SEQ ID NO: 7511 - DNA, 1980 bp, Methanobrevibacter gottschalkii
  source 1..1980: mol_type = genomic DNA
atgaaatttgaagaagtagaaataactgaagattctcctcaagaattagttgctgagccggtagtggaaaaagaagatcatggcgaagaaactaaaccaatgttagattatgacaatattaaaagttcacaggatattgaagttccacctctattaattgaccaggttatagggcatgaagattccatagaaacaattaagaaggcagcaaaacaaagaaggaatgttttactaattggtgatccgggtgtgggaaaatcaatgcttgctaaaggaatggcgcaaattttacctcacgaaactttaaaagatgtattggtatacccgaacatggaagataataaccacccgttaataaggacagtgcctgcaggtgaaggtaaaaaaattgtaaaagctactaaggggtctgctaaaagccatgaagaaaagaaaactattattacaatgtttgcaattggaggtattctggtaattggatttatgtatggaagattacttgaatctattattgcagcagctttaattttacttatttcaattcagattaaaccaaaaaacagtaatatgtctccaaaattattggttaataatcaggattcaagatttgcaccattcatggatgcaaccggttctcatgctggtgctctcttgggggatgtacgtcatgacccataccagtccggaggacttggaactcctgcacatgaacgtgtggaagcaggtatgattcacaaagctaatcgtggagttttatacattgatgaaattggtacaatgtctatgaaaacccaacaggagttattgtctgcaatgcaggaaaaacaatatgcaatcacaggtcaaagtgaaaactcaagcggggcaatggtaagatcacaggcagtaccatgtgactttgtgcttgtagcatccggtaaccttcaagttttagaaggaatgcacattgcaatgaggtctagaatcagaggatatggttatgaagttttcatgaaggattacatggaagacactactgaaaacagagaaaaactggtccagttcgtagctcaggaagttaaaaacgatggaagaatccctcattttgcaactgatgcattggatgaaataatcatggaagcaaaaagaagatccggaaaacagaatgctttaactttaagattaagggacctcggtggacttgtaaggtctgcaggggatgtggctatagaaaaaggagcaaatcttgtaactgctgagcatgtatttgaagctaaaaaatatgcaagaacattggaacagcaaatagctgataggtctattttacagagaaaagactacagtatggtttctgctcaaggtggaagagttggtcttattaatggccttgcagttattggtgacaggagcggaattgtatctcctattgcagcagaagcagctccgactcaatctaaaactggcggtaaaatcattgccactggtaaattaggtgagattgctaatgaatctgttcagaatgtaagtgcattaattaaaaaatacactaataaggacatttcaaattatgacattcatgttcagtttatccaaacttatgatggtgtggaaggggattctgccagtgtaagtattgcaacagctgttatttcagctattgaagaaattccaattgatcagactgttgcattaaccggttcacttaatgttcgtggtgatgtaatgcctattggtggagcaactgctaaaatcgaagcagctgctgaagctggaatgaaaaaagtgttaattcctaaatctaacttgaaagatgtcatgattgagaaaaaatatgaggatatgattgaaatcattccaactgaaacattaagtgatgttttagaaaacattctaattagtggttcttctaaagataagttaattgcaaaaatgaagaacttgagttctaaagttgcagataaggttccacaaacaggtttaaacaatccaactataaattaa

SEQ ID NO: 7512 - DNA, 483 bp, Methanobrevibacter gottschalkii
  source 1..483: mol_type = genomic DNA
atgaatatttatgaaactattaaaaatattagagcatcctgcgataattatgtggatccaaacctgctggcattcattattgatgatgataaccatatgggagacaacaatatcctagaaattaaaggttatgatatcagagataatgacgcctatgaagaaagacttttcaaaattcataaaaacgaaaatattttcctaccatgtggaatgattacttttataccagttttaaatgaatgtgacatattttccactaaagactatagcttaaaactttcaccggaagaatttgacaaatactgtgaacaagaagaaaagttatttggaattttgataaaaaaagattccactgattataaaatcggacaaacagatgtctgcaactgcagtattactgcatcatttaaagaatttaaaaaagcagacgggaaattttataaaaaaattgaagaaataatagaaagtaaaattatcgattaa

SEQ ID NO: 7513 - DNA, 906 bp, Methanobrevibacter gottschalkii
  source 1..906: mol_type = genomic DNA
atgaaagtcaaagatgggattatcggtttggtagtaggggatgcattaggtgttcctgttgagttttacagaagagaagaccttgaaaagaatcccgtgacaggaatgaaaagttatggaacatacaataaacctgcaggaacctggtctgatgatacttcactgacaatagctacaatggccagcattataaacaaaaaatgcattgattattcagatatcatggaagagtttattgaatggcggaagaataataaatactcccaagaggaaacctttgacataggcattacaacacgtaatgcattggacagctacactccaggaatcaatccgctttgtggaatgggaggtgagggagacaatggaaatggttctttgatgagaattcttcctctggcttttattggcaatatcgattatgaaacaattgaaaacatttcatctttaacccatagacatgaaagatcaagaattgcttgcgtattatatgttgaaattgccagatcaatgattagtaactccaacttaactattaacgaacatgttaaaaatgcaagtgctaaaatcattgaatattacaaagattcagaagaactcagtaattttaaaagaatctttgatgatgattactcgaaaggagtttcaggtaaaggttatgttatctccacatttgaagcggttatttattgcctggaaaatacaaataattataaagatgcagttttaaaagcagttaatttaggtgatgataccgatactgtagcagctatttgcggtggacttgcaggcatttactatggttttgatgaaattcctatagagtggattagtgaaattcgtcagattgaaacaattattgatttatgtgaaaaatacgaggtagcatgtgatgaatatttatga

SEQ ID NO: 7514 - DNA, 510 bp, Methanobrevibacter gottschalkii
  source 1..510: mol_type = genomic DNA
atgatttttaaaactgcaaatctcactttaaggccatggcaaatttcagatgcggaatgtttatatcattttgctaaaaacccgaatatcggtccgattgctggctggccaccacatgaaagtgttgaagatagtttaaatattattcaaactgtattttcaaaaaaagaaacttatgctgttgttatagataatgttccaattggctgtgttggattattgtttcatccagactgtaatcattattggggggataattctgctgaacttggatattggattgctgaagagtattggggaaatggatatgctgttgaaggatcggaagttttaattaaaagagcatttgaggattttaacataaatcaaatttatgcaacttacaggtgtgaaaatacccggtcaaaaagagttttggaaaaattaaattttaaatattttgataatttaacaaatgtcaattatttgggcgatcaatttagtgaaattgctatggtgcttaaaaaataa

SEQ ID NO: 7515 - DNA, 369 bp, Methanobrevibacter gottschalkii
  source 1..369: mol_type = genomic DNA
atgacaagattatgtaaaaattgcggatttgaaaatcaggatgattatgatttctgtgctaaatgcggtactccattggttgaaggtctaaaacctaatcaatttagggtttatagaacacaagatcttgaaattaataaaaaggcattaattgcagcttatattgctactatatttttatcatggagtggtttttttattgggttgatttcaaaaaatactgtttttgcaacatttactttctttggatttttcatgccatttttcttagtgcaatcaaaacacccggcacttaagaaacatggtctgattatgatggctatttcttttgtaggggttgcactttcattttatgtaatgatgcattaa

SEQ ID NO: 7516 - DNA, 513 bp, Methanobrevibacter gottschalkii
  source 1..513: mol_type = genomic DNA
atgaaaaaattaaatgtcgcacttatagcattggtattaatagttgttgcatttttagcatcaactattgtaagcccggttctaatagttgctgaagatgcatctgaagacaatggtattgatatggctgcgactattggtttaactggttttaactggatttatcccggtaattctgttaacgctcaaggtcaaacattacataatgtttatgcagactatcctgataatccatatggtgctgcccgtgacataatgagttatacataccatgtcaccccacatatcataattagtattaacaatgatgcagctgcagccatattcggagaaaacatcatagatgatattcgtgcaaatgatggttataacggatatgcaggtaatgataaagtttcaggaagtatggatagaggagacgctgttggaactgcaatggcagaaaatggaattaatataattgaaattccaatacaatttttaatagggaacattagcccccactttgtctaa

SEQ ID NO: 7517 - DNA, 918 bp, Methanobrevibacter gottschalkii
  source 1..918: mol_type = genomic DNA
atgattataggtggttcatcatcacaggatttagcagctagtgtagcacgcgaacttggagaagaattatgttatgtcgaaactaggaagtttccggatggagaaagatatttgaagattaatggtcatgttgaagatgaagcagtaactgtcatccaatcaactggatatcctcaggatgagaatttaatggaattgttattcataatagctaatcttaaggatttaggtgctaaaaaagtgaaagttgtagttccgtatatgggatatgcaagacaggaaaagcgtttcaatcccggagaaacaatttctgctaaaattgtttgtgatttgattcagacagtaggtgctgatgaatttataacatttaatattcatgaagcatgcgttttagatttttttgatattcctgcaagaaatttatctgcaatgccggctattgccgaatatctggataaaaaattctttaaaaaagaagaacttaaaccattaattgttgcccctgataaaggtgcatatggatttgcacaagaaatatctgaaattattggttgtgactgtacttatttaactaaagttcgtttaggacctgataaagttgaaactaaaattgtagatgtaagatgtgatagtgaaagtgagaacacggttaacattgattctgtaaaaggcatgcatgcgattattgttgatgatattattgctactgggggaacaattgttaatgcagttaatattttaaaacagtatggcgcttctgctgttgatgtatgctgtgttcatccaattttaacaaataatggtgtaactagaatctattctgctggtgcaagtaaaattatcggaactaatacattatcttctgacacttcacgtgtatctattgctaaaagtatagcacaggcattgagggaataa

SEQ ID NO: 7518 - DNA, 291 bp, Methanobrevibacter gottschalkii
  source 1..291: mol_type = genomic DNA
atggataaagaaacaataaaaaaagaattagctgataaatctaatgaacttttagctaaatatggggagcaggatttggtagaggatatatcagtaatgaatatggctactaaaactgtgtttttgggatctcttagagtttataattatgataatgcaggcaaaatcaaaaatgatttggaaaaaaagattaaaaactatggggaaattgcaatcagggatgaaaaaatagttccttgttgtgctccaagttacattcatgtcagtttcaatgtttcaattaataaatag

SEQ ID NO: 7519 - DNA, 1965 bp, Methanobrevibacter gottschalkii
  source 1..1965: mol_type = genomic DNA
atgaaagaattcaagttaaattcaccttataaaccattaggtgatcaaccaaaggccattaactcattagctgaaggtataaaaaaaggcataaaggaacaaacgcttttgggtgtaactggttcgggtaagacttttacaatggcaaatgtcattgaaaaggttcaaaaacccactcttgttatttcccataacaaaactttggctgcacagttatatgaggaatttaaagaatttttcccagataatgcagttgaatattttgttagttattatgattattatcagcctgaagcatatgtgccaagaacagatactttcattgataaagaagcatctattaatgatgatattgatataatgaggcattcagcaacacaatcattattatcaagggatgatgttatcgttgttagcagtgttagttgtatttatggtattggttcgcctgaagattatggtgaatttgcttttggaatatccgttggagatatttatgataggtcagaaatcctggctcgtttagttttcatgcaatatgaacgcaatgatattgaatttgcccgtggtcaatttagagttaggggagatgttattgaaataaatcctgttcatggaacaccgccaatacgaattgaactattcggtgatgaaatagatgcaattagtattattgataaagttacaggaaaaaaacaggaatcgcttaaaagatacatgattttccctgcaaagcatttcgttgttggccaagataagatggatgaggcactttcaaaaattacaagtgaattggatgagagattatctgaacttaatgcaatgggtaagttgttggaagcccaaaggttagaacagagaacccgttttgatatagaaatgcttaaagaaatgggatactgtcctggaattgaaaactattccatgcacttgtccggacgtcattggggagataaaccttactctcttttaaaatacttcccggatgattttttaacaattattgatgagtctcacgttactgtacctcagattagaggaatgtataatggggaccgtgcacgtaaggaaacattagttgattatggtttcagattgccgtctgctaaagaaaatcgtcctttaagattcgatgaatttgaatcatccgttaatcaagtaatctatgtatctgcaacacctgcagcatatgaactttcaaaatcaagaaatgttgttgaacagattataaggccaaccggactcgttgatcctgaagttataattagaccggtttcaggtcaggttgaagatttgcttaaagaagttaaagcaactgctgagaaaaatgaaagaattttagttacaactttaactaaaaggatggcggaggatttgactgattattatgcacgtataggtattaaagtaagatacatgcattctgaaattgacacattggagagaattgaaattgtagatgatttaagacgtggcaaattcgatgtattggtgggtgtaaatctcttaagggaaggtttagacctgccggaggtatctcttgtagctattttggatgcagataaggaagggtttttaagaaatgaaacttcattaatccaaactatcggccgtgcagcaagaaatgttaacggtcgtgtgataatgtatgctgatgaaatgactgattctgttagaaatgcatatgatataacacttaaaaggcgtaaactacaaatgaaatacaatgaagttcatggaattactccaacatcaactcaaaggacattaaaagaaaaattggctgaggaagatgaacggtataaaattgctggagctaatattgaaaaaatgcctaaagatgagcttagattactcattaaggatatagaaaaagatatgaaagatgcggctgcaagacttgactttgaacgggctgctgatttgagaaacaaactttatgctttaaaaggtatggataagtaa

SEQ ID NO: 7520 - DNA, 2889 bp, Methanobrevibacter gottschalkii
  source 1..2889: mol_type = genomic DNA
atgactgaagattctaaaaaacagattatcatccgaggtgcacgtgagcacaatttacaggacattgatgtttgcgtcccccgtgatgaattcattgtaattacaggtttaagcggatcaggtaagtcttcattagctttcgatacaatttatgctgaaggacagcgtagatatgttgaatctttatcagcttatgcaagacagttcttaggtcaaatgaaaaaacctgaaatggaatccattgaaggattatctccggctatttcaattgatcaaaagactacaagagaaaacccaagatctactgtgggtacaattactgaaatttatgactacttgagattattatttgcaagggttggaattcctcattgtcctaattgtggaaaagaaatatcacaacaaactcttggacaaataggtgattcaatcatcgaggaaggggaaggtcttaaaatccaaatcctagcacctattgtaagagataaaaaaggtcagcacaaagatgtctttgaagatttaagaaacaaaggttttgtaagagtacgtgttgatggtgagataagagaattggaagaagatattggccttgcaaaaacatacagacacagtattgatgttgtggttgatagacttaaaaccagacgggatgttgattttaaaaggagattggttgattctcttgaaactgcatcagaattttctgaaggtttaattaccgtattattcaccaaggatgatgaggattatgagaaaaaatactcagaacattttgcatgtgttgattgcggaataaactttgaagaattaactccaaggatgttttcatttaacgctcctcagggagcttgtccagaatgtaatggtattggttctaagatggagattgatccggatttaattgttccggataaaacactaacattaagtgaaggagctattgcgccgtggtcaaaatcttcaacaaaagaaaattattattaccaaatgcttgaggcagtatccgagtattttaatttcagtatggacattccatttaatgaattggataaagaatatcaaaatacaattctttatggttgtaatgataaaatcccgttcacttttaaaagaagaaataaatcttacatggttaaccgtaaatttgaaggtgttattccaagaatggaaaggttatatgtggaaactaaatccaactattcaagaaaatacctctcaaagttcatgtctgatagaaaatgtcatgtttgtggaggtaaacgactcagaccagaagtattggcagttactgttggcggaaaatcaattattgatgtttgtgatatggcaattaaagattcatatcaattcttccaggatttaaaattaactgaaagagagaatttcattgcaaaagaagttttaaaagaaattaaagaacgtttaagctttttagttgaagttggacttgattatttgtccatgtcaagatcttccggtactttatctggtggagaagctcaaaggattagattggccactcagattggttctggtctggtgggagtactctacattttagatgaaccaagtattgggcttcaccaaagagacaatataaaacttattgatgctcttaaaagacttaaggatttgggaaatactcttgtggtagtggaacatgatgaagaaacaattttgtctgctgattatgttgtagatatcggtccgggtgctggtgagcacggtggtaaggttgtggctcagggaacaccgctggacattatgaataatccagattccattactggtcagtacatatcacgggttaaaaaaatagaaattcctaaacagagaagacctggaaatggtaatttcataagaattgttggtgctgctcaaaataaccttaaagatattgatgtggatatcccattaggtaaatttacttgtgtaacaggggttagtgggtctggtaaaagtagtttaattaatgaaatattatacaaaggggttcaaggtaaattagctaagaaatttactttcgccggtaaatataaggaaattgaaggattggaaaatattgataaagttattgcaatagatcaaaaaccaattggaagaactccacgttcaaatcctgcaacttatactggagtgtttactgatattcgtgagttatttgcaaacactccagaatctaaagctagaggttacaaacctggaagattttcttttaatgtaaaagggggaagatgtgaagcatgttctggtgatggtattgttcaaattgaaatgcactttttagcagatgtttatgtgccatgtgaagtttgtggtggtaaaagatacaatgaagaaactttggatattaggtataaaggtaaaaatatctatgaagttttggaaatgactgttgaagaagcactagagttctttgagaatattccaaagattactaaaaaacttcagactttatatgatgttggattaggttatatgaagattggtcagcctgcaacaacattgtctggtggtgaggctcagagaattaaattagctaaagagttatctagaacaagcaccggcaaaactttatatattttagatgaacctactactggtcttcatttcgccgatattgaaaggttgcttgatgttttagcaagattgactgatgcgggcaattcagttgttgttattgaacacaatttggatgttattaaaacagctgatcatattattgatttaggtcctgaaggaggtgacggtggtggtcaggtgattgctactggaacacctgaagacattgctaaagctggaacttatactggtgaattcttggaaaaaatgcttaatgagaatattactccttatgcaaaagaattagtagaggatattggtaaataa

SEQ ID NO: 7521 - DNA, 1209 bp, Methanobrevibacter gottschalkii
  source 1..1209: mol_type = genomic DNA
atggttttaagtacaggaaatactgcatggatgcttattgcaacgattatggttttattaatgagtgttccaggtattgcatttttttatggtggtttatcaaaaagaaaaaacgtattaaactcaatgtttctatctttaatagcatttgcaattgttagtattctttgggttatgtatggttatcaatttgcatttgcagatttaagttttgcgggtttaataggaattccaaaaacattattcatggaaggaattggtgtaggttctctgacaggaactattccaacatttgtctttgccggatttcagctaacatttgcaggattaactgctgcagttgtatcaggagcaattgttggaagaatgaaaacaaaagcatgggtaatatttatcatattatgggcaacatttgtttatattccaatttgccactggatttggggtggaggatggttaatgaacattggagccattgattttgcaggtggtgttgcagttgaagttaactctggtttttcagctcttgctctagctttaatacttggaaaaagaaaggatacatcattgcttccacataacttaggatactcaattctaggtgcaggattcctatggtttggatggatgggattcaatggaggatctgctcttgcagctaatggtcttgcaggttctgcaattcttgtttcaaatactgctgcagctgttgcaatgattgtttggttgcttttagatgtgctcaatgatggaaaaccgacagttttaggtgcaattactggtgcagttgcaggacttgttgcagtcactcctgctgcgggttttgtttcactttctggcgggataataattggtttaggcgcatcgttgatttcatattatgcagttttttatattaaaagcaaatttggttatgatgatgcattggatgtatttggtgttcacggactttctggtgtttggggattaattgcaactggtttattcgcagcaccatcaataaatggtgtggcaggtctattttatggaaatcctgaacagttgattattcaattaatagcagttgttgcagctatttcatattcatttaccgtaagttatttcattggaaaagtgttagatattttaattggattaagggtagatgataaagaagaaataatgggtcttgattctgcattacatgaagaatcaggatatagaatttaa

SEQ ID NO: 7522 - DNA, 339 bp, Methanobrevibacter gottschalkii
  source 1..339: mol_type = genomic DNA
atgaaaaggattattgcagtaatacgtgaagaaatgtttgaccctgttaaattagcgcttttggctgccggatgtgaagggatgaatgtttcaacagttaaaggtcggggaagacagactggtattaaagaatcttacaggggttctagctattgtattgatctgattccaaaaacaagagtcgaattaattgttaacgaagaggatttggataggattattaatattattctggaaaatgctcgaactggggatattggtgatggaaaaatattcgtttctgatgttgaagaagtaattaggattagaactggtgaaagaggttctgatgcagtttaa

SEQ ID NO: 7523 - DNA, 1500 bp, Methanobrevibacter gottschalkii
  source 1..1500: mol_type = genomic DNA
atgaaagaattatatgaaaaaatgattgacgaagcaatggctgctcaaaaggctgatgtttctgttgtatcaaaaaataggtataatgactttaaaatagttgatgcaaaaccatatgctgatgctgtttcaaacatgaaagcacttgacaaccaagcagaatctgtgattaacttgcataaagaatctgttaaaaaccattatgaaattttgtcttccatcacaaagactttgaaatgtgaagatgatccgttcattgaacatttccaaactcctccggtatttgaaatattatgtgacgaagatggtgactttgcagatagtgtggacaaatttgttcaagcaattgctgatgcggaagcattaattgctaaagaatccatcaggagatatggcggattttatggacctacatgtgtagttgactttgctttaatgccgggaagtacaagtaatgttgtaaaccaaatattaaaaacagtagatattccagttcaccacaaacaggcaattttatctgcaaaatcatggggtatgaacacttcttatggtattggagatgcatttgctcatgcaattgaagatggtttaactgctgcacaggctactgaaaaagaaattgaaacattacaaatgatttacaaaactcctattgaaggacaaggtactttaatggataatgcaaatcattcttcatttgatgtaagagatcacatgaataagtataaaaaggcaatgaccaaatctgttaaagctgcaatggatgatggtgtacactatggtaacattgtaactgttccagcatactgtgttggggacattggacaccacattggtcagtctacttacaatatgtgtaaagatgatgtgataatggctattatagaagctactacaggtgttattgaaaactcattaagaaacaacatcgataaatttaaaactccatttgatgtattaaaactttcaactggtgctccggcatgtgcaactgaattcttattggaacttgatggattcacagctccaatgattgttgacttgttaaataaaagattccataactatgtacaacaatatcctacaagaggtgcagctgctgagctgcacaattgtgatttcatggacatgatttacagaggattcaatgcaatgagcaatgcaagaaaaatgagatcctctgcaggatttgaaattatccctagaattaaaggtatggaaattgatttcacacctatcttagaaaatgaagtgttaatgaacccgcaaagatacacatatccggcatgtgctatttctgtaaggttctcatctcttatgagattggcagattacccatgtcttttaacttcagaacctattacagcaacaatgatgacaaatattatagcacttgacaaaaaaactcccggttctccagtaagaggatgtaaacaatgtgcttctgcatgtttagcggataacactcatgaatactgtcaatggagagaagctgtatag

SEQ ID NO: 7524 - DNA, 774 bp, Methanobrevibacter gottschalkii
  source 1..774: mol_type = genomic DNA
atgccttgtaatataagaaaaaaattttttgcagaactattgggaacctttttccttgtattttttggtacaggatcagcagttgtaacccttttagtatctcaaagtatcaatcctgctaatgtaggcattggtgttttgggaggtcttggtgactggattgcaattgctttagcctttggtttaactgtaatgattggaatatatgcatttggtaggatatctggtgcacattttaatccagctgtaactataggattgcttgtaactaaaaacattcctttagttgatagtatttattatattgttgcacaattaattggcgcatgtcttggaagccttgcattattcctgtgtcttggggctcaggctgttacaatcggaggattgggtgcaacagctccgggtcttggtattggatatatgcaagctatgtttgctgaatttataggaacatttttcttaatgatggttataatgggtgttgcagttgataaaaaggcagaacctggttttgcaggagtatcgattggtatgactgtaactgctgtaatcgtagttttaggttcattcactggtgcttcaatcaaccctgcacgtacattcggaccgtacttgatggacatgattcttggaggtcaaaacctttggggattcttcccaatatacttagttggacctatacttggtgcaatttgtgcggcatttgcatatgcatatcttgctaaaaatagtggagtttgtgaactcccgcaaccatttaaagacgaataa

SEQ ID NO: 7525 - DNA, 1782 bp, Methanobrevibacter gottschalkii
  source 1..1782: mol_type = genomic DNA
atgaataaagagattattgcagcagttatggcttctacaatagatatggataatatgtctagtgatagacttgaagcattaactaaaggacatggtatgttaaatattgcagcaatttgttctgctaatgtaattgctgaggaagttttaaggggagttaatcttcagttaactgatgaaaatattggagaacttccaattgatgatcttttaagaaaatccatcgaagcagctgaaaatgctggtgcggatgcagcaaatgctgctttattaagtgcaactttatgttattttgcaggttcaaatgcacaagctggtgttccggcaggtaacagaaaattaggtgcaatggcacgtatgattgcaggtgtggacagatgcggagtattagctattccaacaccaaaagcaaataacagaatttcaggatatgctgcagttaaagcagtttatgatgaggtgtttaataatagtttaactccaattgatggcagtatcttgcccttgggtgtgggtggaggtccattatatggacacaatgcattaggtgaagatattgggttttcacaattagcaattaatggtgctaaagcaggtactaaggggatgttgcaagcatttgctaatgtgggaatgcctccaagcccgattattgcagcaattttaggtgttgcagcaattttagaaattgttcatccagattcagaagttgctgaagaatatggtgaattttttgtagcaaacagtgcatatgttgcaggtttaggagcatgtgaagtggcaggacttcctgaaaaattacatattagggggactggcgaagaatatgatactgcaaatttagtaggggatttaggagtcattatgaaagatattggaggaccttccgtagttggtatgattgcatttgaagaaatgctttcggcttttgaagaatctttggacattggtgcaggattttcaggtggacctttacaaccacctttaggacatatgactgctgatgcgattttagcacttaaagttttactttcaacaaatggagatattgatcaagctgcagaaaaaatcaaagaaattaaaactaatttctggttagaacctgaaatagcaaaaatagctacaaacaccattgcacgtaaatcagaacaagtaagaagaggaccagttacacgtgcaatgattttagcaactgaaggtgcattaactaaagaaactttaaggattgcagaatttacacaagaaaaaatcactgaaggaatggatttaagtgatattacaaaagcactagatgatgaaaaacttaataatgtttgtaaggcggcatctagtttatttagtggaatgatggataaggacattaaaatcatgattactaaatatgctggaagatcacgtaggaaagaaaatccatttttagataattatgctggttttgatactaatgtcgatgttgaaatagaaattgaaggtgaaaaaatagttatggaaaaattagccaatgaaataattcctgatgcggttgttaataaaaaacaagatgtattggaagttttacctcttgcatcagttcctgttacagaattacaactttgcggacacactatcgttaatgtaattgttcctgctgccgttgcaggtgcaatgggtgttgatgaaagtgaagtcattgctaaaaaagcaacaaaaggtgcttatataacttcatctattcctggtggaattgaaagggcaagagatgtggctaaaagagctgcaaatataatgaaagatttaaattaa

SEQ ID NO: 7526 - DNA, 849 bp, Methanobrevibacter gottschalkii
  source 1..849: mol_type = genomic DNA
gtgtttttaatatttgttcgtggagtattgatgggttctgctgatattgtccctggtgtttctggtggaacaattgcattgattactggaatttatggtcatttggtagaagcaattagcaatattcgtttcggttttttaaaacccttgtttaagggtgattttgatggttttgtaaatagtattcttgatgaaatcgattttaaattccttatacctttaatattaggtatcggtgttgcatttttaactcttgcaaaagttgttacttattgtatggatgtatatactgcatttacttatgcattctttttaggtttaattatagcttcagctgttattttattcaaaaaactcaatcatattaactttaaaaacatattattcgctttaataggttgtattttgacatttatatttgtaagcttaaacccgattgccaccaatcattccttacttgtattatttatttcaggaatgatagctatttgtgcaatgattttaccgggtatttcaggttcattcttattattgcttcttggacagtacaaatacatgttaaatgcccttcataattttcatctttcagaaattattgtttttgtagttggtgcacttattggaattcttggattttcaaaaatcttaaattatttacttaaaaaccatgaagagataacaatggcttttcttattggtgtaatgattggatctctaagagttccatgtgtagaaattgcaaactcaattagtataaacattgctagtttattcccatgcttaattgttgccgtgattggttttgcaataattattgtcttggaaactagatttgattatattgattaa

SEQ ID NO: 7527 - DNA, 2577 bp, Methanobrevibacter gottschalkii
  source 1..2577: mol_type = genomic DNA
atgattaaaaaacagtggagattatatccgattggttcaccaaaaggtgctttgaaccgtaaaagagaacctgatttcgttggtaatataaaattttcaagaaatggggatgttctatcaatttcaagatttgttgccgattataatttcaatgataactccacattaaatgaaaagttaatgcctccgggggaagtaattaagcttctacgctcacaagctgtttttcttgcaactcctgatgatgatgtggagaagtttttaagatcccttaatatcaaagttagaaaaactcaagtctgtgacttttgtgcctatgagggtgatattacaattgtcaactcttcctattcatataagtaccacaatcaattaatatgtaggaattgtgcatttgatacgataaaacaagaaatcaaacttcaaggtttcgataaaaagatttttagaaatttaaaatctactcttgaaaaaacaggaaatctggaaaaaacattatcagttcttgatcctcactttgatcctttagggaatactaatttaacattatttgataaaacaaaaaaatcaaagcatatcatacctccagttgatatgaaaaggcttaaaattcctaaaaactttaaaaaagttcttttggaatctggaaataccaaattgctgcctgttcaatatttggctattaaggaaggtcttcttaagggtgaggatttgcttgttgtaagtgcaacaggttctggcaagactttagttggtgaactttcaggcattacaaaagcacttaaaggtaaaaaattcatctttctcactcctttagttgctcttgctaatcaaaaatatagggattttaaaaagaaatactctaaactaggccttaaagtatccattaaagttggaagaaatagagttaaggctaaaggagaacttaaccttccagattcagatgtatcatcctcagatattgttgttgctacatatgaaggaattgattatttgctcagaaatggtaattcgcaggcattatctaatttgggtgttgttttaatagatgaaattcacatgattgatgatgaagataggggaactcgtttgaatggtttaattaaacgtttaaaaaacttatatcctaaaactcagattatcggattatctgctactgttaaaaaccccgaatttttagcatctgaatttaatatgaaattagttcaatactctcaaaggccagttccattggaacgacatttggtttatacaagaaacgaatctcaaaaaagacatttgatgagaaagcttgttcaaaaagagcataatactaaatctaagaaagggtatagtggacaaactattatatttacaaattcaagacgtaaaacccaccaaattgccaattatttaaataacaaaagagttaatgctcaagcataccatgcaggattgtcttattataaaaaagagataattgaaaaagattttgataagggtaaaatatcttgtgttgtaacaacggccgctcttgcagcaggtgttgattttccagcatcacaagtaatatttgattcacttgtaatgggaaataaatggattaacccaaatgagttctcacaaatgttagggcgtgctggaagaccatcttatcatgatagaggtgttgtttatttgatgcccgaagtaggtaatgattttgccggtgaatctgaagaagcaaaagcgttagaccttttagaaagcaatagtgaagatgtatatatagaatatgatgaagaatcctcttatgaacaaattctcgctgacatttcatccaattcaattaaatctagaaatgaattgaatgatttctatgaaaatattgatgttccaatttcacttaaaacagcaactgatgaaatggaagatttaggattaattagatatgcctcaagcaataaatttgaaattaccaaatatggaagagcaacttcagtgtcatttttatcagtcgatgaagcagaatttattaaaaacacattaaataataaagaatacttaaatagatatgttgctcattctccaatgtataagaaaaagaaaaaatatgataaactaaaagtattggttttagctatggcattggatttggaaatgtttgaaaatgcatatttatctagtgtcattcacaatcaaattgcaaatgcccttaaaattaaattttcaacaagattattcgcagaatctactttggatattatatctagtggggaagctattgaaaaagttgataaaaagttccaagatgcattgattgctcttcaaagtgatttcatgcaatgcaaatgtcaggataggccattttgcacatgtatgcagaaaggaatttctgaagttattattcatgaaaggcttaagggaaaagatccccaagatatctcaaataagttatttagaaaatatcagattcaagtatatcctggagatatattttcatggttagataattttgttaagaatttggatgcaattaaaagaattgccaagtcatttaatagaagtaatgtagttaaaaagactagttatttaatcaagaaaattgaaaatgggtga

SEQ ID NO: 7528 - DNA, 420 bp, Methanobrevibacter gottschalkii
  source 1..420: mol_type = genomic DNA
atgaaaggatgttattgtttaataattaatgttgattctaaaaaaacaatcaaaatcggcaaattgggaaaaatccagtttgaaaaaggatattatatttatgtaggttctgccatgaattcactaatggcaagaattaaaagacatttaagtgacgaaaaaaaacttcattggcacattgattacttattaaaaaatgcagagataactgatgtaatatataacagttcaacaaaaaaagtagaatgtgaattatccgagtttattggaagtaaaaccactggaattacagattttggatgcacagattgtgattgcaaaagtcatttatattactttaaaaataggaataaagctattcattgtgttttaaatgcttatgactcaatagatattccatgtgaattttttaaagaatga

SEQ ID NO: 7529 - DNA, 414 bp, Methanobrevibacter gottschalkii
  source 1..414: mol_type = genomic DNA
atgatttttaaacttcaaactaagggacataaaaatgtcacttcacttcataaatctacttttgaaataaccgaggatgttgaaattggactggctgcggattgtattattggaacaagtatggacaaatccatgtctgattttccagaagaatttaaagataagatagctaattcaaatacaaaaataacagttattttagatacggagaatggacatgatgaaattgttggttttggtcatgaaaatttgacattaactcatccaacagatatggtatcaagaactagcgattatacttgttcccgtacattaatgattaaagcaaataaagctgcaagagatcttgatgataatctgattgaagatttaaaaaatgaaaaaatcatggatgttactataaaattagagtaa

SEQ ID NO: 7530 - DNA, 852 bp, Methanobrevibacter gottschalkii
  source 1..852: mol_type = genomic DNA
atgaaagctgtaattccggcagcaggttttggaactagatttttgcctgctactaaagcacaacctaaagagatgttgcctgtttttgataaacctactattcagtatgttattgaagaagcagtagcttcaggtattgatgatattttaattgttactggtagaaataaaagatctattgaagatcattttgataaatcatttgaacttgaacaaactttacagagtgctggtaaagatgatcgtttaaagcaagttcgtgctattactgatttggctgatatttgttatgtgaggcagaaggagcagaagggtttgggtgatgctatttattgtgctaaaaagcatgttggtgatgaggcttttgctgtaatgcttggggattctattactaaagggccaactccatgtactaaacagttgattgatgtttataggaagtatggtgcgtctgcaatttctcttgaagctgttccaagagaaaaggtggaaagatatggtattattaagggggaggaagttgaaaagggtatttataatatttctaaacttgttgaaaaaccgttagctcatcaggcaccatctaatttggctattatggggcgttatgtattaacacctgatatttttgatagaattgatgaaactgaacctggtgttggtggtgaaatccaactgacagatgctcttcaaaaattagatgcaatttatggggttatttttgatggaaaaacttatgatattggtaatcgtttagaatggttaaaaacatcaatagaatttgctctagatgattctgaatctaaagacattttaatcgaatatatgaaagaaatgattgatggagtttaa

SEQ ID NO: 7531 - DNA, 1266 bp, Methanobrevibacter gottschalkii
  source 1..1266: mol_type = genomic DNA
atgcagtatagattaatcaaaaaaacaggggatgaaatttcatcaattggttttggtgctatgcgtttgccattgaagaatggtaaaattgatagaactgaagcccgtaaacttatttttcatgcaatagataatggaatcaatttcattgacactgcttatttgtatggtgatagcgaaacgtttttaggggaaattttaactgaggatatacgatccaaggttaaaatatgcactaaattacctgctatcaatgttaaaaaatatgaggacatggaatcctttttaaatgaacagttaaggagacttaatattgattgtattgattattatttaattcatggggtggatttaaaaaatatgaatcgcttgctaaaacgtgatttgattaaattcattgaaaaagcaaaatctgatggtaaaataaaatacattggattttcataccatggtcctaaagaagaatttcaaactgtagtggactgttatgactgggatgttgtaatggttcaatataattactttgatgaaaatgtccaagctagtatagaaggaatagaatatgcggcttcaaaaaacatgggtatttttgttatggaaccattaaaaggtggaattcttgcaggtaatatgcctaaagaagcagagaaagtttttagaaaatctaatccggataaaactaatgctgcatgggcattggaatgggttttaaataatcgtaatgttacatgtgttttatcaggtatggatagttttgagcagcttgatgaaaatttagctgttgcaaatagaactacaccaatgtcgatgacttttgaagatttggaaactgttgaacttgttaaaagagtaatgagaaattccttaaagattaattgttctacttgtggatattgcatgccttgtccacagggtgtaaatattccggaatgtatgaaaatatataatgagaaatatttatttaaccataaaggaattgctaatctgtataatgatgtctacttatttaatccaaaaggtcttattaatcagtctttcattgattattaccaatatgtaggtggaattatgggaaattctggaaatgcaggtaaatgtaatgcttgtggaaaatgtttgaggaaatgccctcagaaattggatattattgcagaattggagaaggttaagaaagaatttgaatttcctggtgtcaaatatatgttgttatttgttaaacatgttggtttcccactttataaatttataaataaattattaaactaa

SEQ ID NO: 7532 - DNA, 210 bp, Methanobrevibacter gottschalkii
  source 1..210: mol_type = genomic DNA
atgaaactcgaagaattattagcaccatgtccaaaatgtggttcaaaagacaaaatagctcacagaaaaatgttggataatcatagagctcacgcagaaatggatactgtaaaatgtgaagaatgcggttatattttcttcgttaatgaaaacatggaagaagatgagaaaaaacaattactgaatgaattaaacaaaatatacggttaa

SEQ ID NO: 7533 - DNA, 1113 bp, Methanobrevibacter gottschalkii
  source 1..1113: mol_type = genomic DNA
atgattattcccactctcaattgtccatcaaaatgcaaatattgttggggttctgaaaataaaaaagaaatgatggatattggaattatagatcagattataacttggttaagtgatttcagagatgataaagttcattttacattccatggtggtgaaccgcttcttgcaggctatgatttttacaagaccgctttagaaaaattgtctctattgcctaatttagatggattttctcttcaaagcaatatttggcttttaactgatgaacttattgatttatttgttgagtacaatgttgttgtaagtacaagtattgacggaccaaaagaaatcaatgattatcaaagaggggagggttactttgataaaacaatggccagatatgaagctgctaaaaataaaggattattaattaactttgttttaacagtgactgattattcaaaggatttctctgatgaattgtatgatttctttaaaaatgaaaagatgaatttaaaaatccatgcagctcttccatcacttcgtggagacaatgcagattcctgggcccttgaacaagaagagcatggtaaattattggttgaatggttggataaatacctttatgacctggacaaattctcaataatggatttagatcatatctctaaaagttcacttagaagaaggggaactctgtgtacctttgcagattgtataggaactacatttgcggttggttttgatggttctatttatccatgttatagatttgtgggaatgccggattacattttaggtaatgtcggtgacaatccaagtttcgatgacttaaagacatctgatgcatgggtgaaacttcaagaattcagagattatgttgatgaaaactgtaagaaatgtaagcatgttaaatattgtgaaggaggatgtccttacaatgctattgttgcatatcagacacctaaagcagttgacccgcagtgtagagcatataaaatgatatttgatgaagtttcaaaaagaatgaacaaagagtttgctcgttctgcttttggtttaggtggttctgagcctaaaggtgaaggtgaagcttttagcataatggatttggctatgaagcattaa

SEQ ID NO: 7534 - DNA, 2049 bp, Methanobrevibacter gottschalkii
  source 1..2049: mol_type = genomic DNA
atgatagatgaaataactgatttcctatttggattaaaaatgaccattgtttcaggtatatttttattaattgcagttattttcatgatttttggagttaatactccaatttatttaaaccctgcatggggaacagtaataataagcggtattccaatgttgacattagcaatgtcaagattaatccgtgaaaaatggatttcttctgcacttttaattgcaattgctatggttgcctcacttttgattggtgaagtttttgcagcaggtgaagttgcatggattatggcattaggtgctattttggaagactggacagtggaaagagctaagaaaggattaaaaaatcttattaatctaactccacgaacaggtaggagaataattaatggtaatgaagagatgatatttgtcaatgaaattaaaattggggatattttaagaattcttccaggtgaaagtgtacctgttgatggtgaaattgtaaggggtacatcttcgcttgatcagtcaattatgactggtgaatctcttcctattgataaagaagtaggtgatgaggtattttgcggaaccatgaatatgtatggcgcaattgacattaaagcaactagtttggatgaaaattcatcacttcaaaaattaattgatcttgtaaaagcagctgatgaaaaacaagctccaacacaaaggattgctgataaatgggcaacttggcttgttcctgttgcattaataattgctgttgtatcttggattgtaacgggtaatattgaacgtggagtaacagttttggtagtattctgcccatgtgcattaatacttgcaacaccaactgcaataatggctgctattggtcaggcaacaaaatatggggtacttattaaatctggtgaagcacttgaaacccttggtggtctaaatactttagtattcgataaaactggcacattaacttatggtaacttagaagtttctgatgttatctccttaaatgagcatttaactgatgaagatttgctaaaaatcactgcttcatgtgaaaaattaagcgaacatccattggccaaggctattgtaaataatgcaaatgaagttaaaattcaaattgaagaaccagaagaatttaaaatgtatcccggtaagggagttacatgtataaattcctatggtagagtatatgtaggaaactccaaatttctatccgaaaacaatattcatataaatattgatagtcaattagacaaattaaaacatgaaggaaaagcctcaattataattgcattaaatggtgaagtcattggattaatcggattatctgatgttgttcgtgaagattccaaaagcatgattgataaattacatgatttaggtaatgagactatattgctaacaggggataacacagaaactgctaattactttgctgcaaaagtgggaattagcagagtttatggaaatttactgccgcatgaaaagcttgatcggattgaaaaactcaaaaatgatggtaaaaatgtctgcatgattggagatggcgtaaatgatgcacccgctttaaaaacttctgatgtgggtgttgcaatgggttcagttggaagtgatgtagctatcgaagcagccgatattgctcttttaggcgatgatattggtaaaattccctatcttaaaaaactgtctaattctacattatttacaattaaagcaaacattgcaatttccatgacaattaatgcagtagctattgtctgttctgtacttggtttattaaatcctgtaaccggtgctattgttcacaatgccggatcttgtcttgtagttttaaatgcagcattattatatgacaggcactttgatgattcagttaaaataatggatactgaaagtgttgaacattctcattatcatttccacaatgatggtgaacacacacattctcatgaccatgttcatataattaatgaaataagaacagataatggaattaaacatattcatgctcacaaacatgcttttagaaggcaaatttgcaaaacttatcacagttag

SEQ ID NO: 7535 - DNA, 903 bp, Methanobrevibacter gottschalkii
  source 1..903: mol_type = genomic DNA
atgttaacatctgttcaaaaggaaattttacaaaccttaataaatttatatcaatcatctaatggtaagtctattaagggagaggatattgctgaggttatgggaaggaatcccggaacaattcgtaatcagatgcaatcattaagaagcttaggtttagttaagggtgtaccaggtcctagaggaggatataagccaactattgaagcttaccactctttaaacataactgtttcagataaagattccaaagtgcctatttttaaaaacggcaatagggttgaggatatttctgttgcaaaaattgaatttactagtgttccacaaccgagtgaatgtgaagctgctattaaagttttaggaagtattaaagacttaactttaggcgatactataagtattggaccgactcctgtcaacaacttaggaattcttggaactatagttggccgtgatgatatggacaatatacttttacttgatacgaagactattagaagtattcctaaacaatcagttggtgaaattgcaagtcgtgatgtcatatcctttaaaatgaattgcactataaaagatgccgcaaaaagattagctgaaaatgagattgatggtgcaccggtaatgaaggatggaaaagtagttggtgtattcacagtgtctgatcttgttcacgcgattgctgaagataaagataattgtactgttggtgaattgatgtctacaaatcttataattgttaatgaggatttgaaaatagctaatgcaatcgaagtgatgcttaaaaaatcaatttccagattaattgttgcagataacaatcaagatttactaggtattgttacaagaacagatttgattaatataattgccaatttagatcaattcccaataattacaaactaa

SEQ ID NO: 7536 - DNA, 924 bp, Methanobrevibacter gottschalkii
  source 1..924: mol_type = genomic DNA
atgaaggttaaccaaattaatgtagaaagtaatatgaatgtgtctgatttaatagataattttgatgcatccggtgttttgggtgctggtagagtagctcgtgcacgtaatattttagttgacatgatacaagataaagacatgaatgtgtttatgagtcttggaggtcccttaatacctggaggtatgagaaatgttgtatctaaaatgattaaagaagggcatgttaatttaattgtttcaagtggagctaatttaacacatgatcttgtagaggcatttggtggagctcattatcgccatgaaggaaaagatgatgaagaattaaatgaagaagggataggtcgtattgctgatattaatgttggttcagatgattttactatttttgagacagaaataactaaaatatttgaaaaaatagcttctaaaaggaaagttatttcaattcaagaattattatatgaaattggtcttctagttgaagatgaaaactcatttattgcaaatgctgcaaaaaataatgttccaatttttgctcctggaataattgattcaatgattggattgcagctttggattttttcccaggaccatgactttacaataagtgctgcaggagatatgccttatctatctgatattgtattcggttcggagaaagttggtgcaatccttttaggtggtggccttactaaacattatactttagcatctaatgtaattactggaggacttgattcagctattcaaattacaatggataggcctgaagcaggtagtttaggtggagcgccattagaagaagcaaaatcatgggcaaaagcaaaatgcggatctaatttagctagtgtggttggggatgttacggttattttcccattaatttatgcatctgcattagataaaatcaatagtgattag

SEQ ID NO: 7537 - DNA, 480 bp, Methanobrevibacter gottschalkii
  source 1..480: mol_type = genomic DNA
atgaaatattcggatgatttatttgatgacaagaaggatttaaaatttgcaagtgttttcggtgttttatgtgctattgcatctgctggtgctacaatttatagtacagaagcagcatatatttttattgcaatcctgttaggcaatttaatagctctaaaagtagatggcattcatcatattataacattgcttttgtttgttttattatgtctcgtattcgggattcctgagttaagttatgtcattttattaatctgtattttagcagctcttggtgatgaagtaggtcatgaattaatctcaaaagttactgataataagtttttaaatctatttttcgaatataggtttgtaatgaaagttgtgattttacttttggctattggtggtgtatttagtatttggatattcctatgctttttatcctttgaaatagcttatgaatttgcaggaattatttttgaaagatttaattaa

SEQ ID NO: 7538 - DNA, 246 bp, Methanobrevibacter gottschalkii
  source 1..246: mol_type = genomic DNA
atggcaaacgaagtaaccaaattagtaatggaaacaatcttaggattaattactactgcatttgcatttgtagcaggtttagcatggaatgatgcaatccaaaaattaattgcaacaatcattggtactggagatgcacttcctagtttatttatctatgcaatcatcgtgactattgttgcagttgttgttacagtacttcttgcaagagtagcaggtaaaatgggcatagaacttggtgaataa

SEQ ID NO: 7539 - DNA, 648 bp, Methanobrevibacter gottschalkii
  source 1..648: mol_type = genomic DNA
atgaatataaaaaataacttaatcttagcccttgatgtaatgaacgaaagtgatgctattgaaatttgtgattcaattaaagaatacattgatacaataaaaattggttatccattagcattggcagaaggtcttgaaattattaataaattaaaaaataagtttggatttaaagtgatatgtgacttcaaagtagcagacatagacgcaacaaactctaaaatatgtgatgaaacttttaaagcaggagccgatgcaataatctgccatggctttgttggagaagacagtgttcaagcatgtctgaatatggcaaacaaacatggaaaagaattatttttacttactgaaatgtctcatcccggtgctaaaatgtttttacaaaaaaatgcagatgcgatagctcaaatgggagtggatatgggaatcaccaactatgttgcaccagcaactagattagatcgtttatcagaaatcagaaatattgttggaaatgaatcatacattatttcaccgggagttggaaaacaaggaggagacggtaaaaaaacacttgaatactccaatgcaatcattgttggaagaagcatttatgaatcagaaaagccaaaaactgcatgcaaaaatttaattgaatctttaaaataa

SEQ ID NO: 7540 - DNA, 666 bp, Methanobrevibacter gottschalkii
  source 1..666: mol_type = genomic DNA
atgcatattatggaaggatatttaccattaacatggtgtattgtgtggtttgtcatatcattcatcattgttgcatttggtatttatcaaattaaaaaaattgttgatgaaacccctgaatctaaagctttacttgctgtaagcggtgcattcatgttcatcttgtcatctttgaaattaccttctgttactggaagttgttctcacccttgtggtaatggattgggcgcagcattatttggtcctgcagtaactgcagtattagcaactattgttcttttattccaagcaattttacttgctcatggtggtttaactacattgggtgcaaacatattttcaatgggtattgtcggaccattcgtcgcatggattgcatacaaaggtttgactaaagctaatatctcttctaccattgcaatattttttgcagcatttttaggagatttattaacctacgtagctacttcattccaattagcatttgctttcccagctcctactttcagtgcagctttaggaaaattcttagttatttttgcagtaactcaagtaccattagctattggtgaagctatattgactgtaattatttgggatagattaaaagcttacaaaccaaaattgttgaacaaacttggtgcattagctcctaatgaagcatag

SEQ ID NO: 7541 - DNA, 288 bp, Methanobrevibacter gottschalkii
  source 1..288: mol_type = genomic DNA
atgaaaacatctacattaattattttagcagttgtttgtattatattatttgtagcaccattggcaatgtataatggtcatggggaagatgatggatactttggtggtgcagatgatgctgcaggcgaagctattgaggaatcaggttttgaaccttggttttcatcaatttgggaaccacctagtggtgaaatagaaagtttattatttgctcttcaagcagctataggtgcaatcattattggatatgcatttggttactggagaggtaaaggtaaagaagaataa

SEQ ID NO: 7542 - DNA, 690 bp, Methanobrevibacter gottschalkii
  source 1..690: mol_type = genomic DNA
atgaaatttgacatggattatattgcgcataacaatgctttaacagaaacaaatccttattttaagttgtttttaacaataatacttttaattgttacattagcatttgataatttatattttgatgtaacagtttttgttataatgtctattgtcatattaaccattgctaaaattaattacaaatcatatttgaaatttctatcaattccaatggcttttcttgttataacatgtatatttttaatattcttctttggaaaaggagatgttatatatgaaacaggaatattgggtattgtagttactaccgattcgtggcactatggtgtttacacatttatgagggtgttgggttgtttaccctgtttaggatttttagctctaacaacaccaattgcaaagattttaaattgtttaaggactttgaaagttccaaaaattttaattgaaattgcacttttaatgtataattcaattttcatatttttaaatgaaatcgatacaatgcaaaaagcacaagagactagacttggttatcattcctattggtcttcatttagttctttgggggctcttgtaagtataatatttttaagatctcttgataaaagtgaaacattacagtactctttagactcaagaggttattctggtgaacttccggtttacgaaccaaaaaagagatga

SEQ ID NO: 7543 - DNA, 843 bp, Methanobrevibacter gottschalkii
  source 1..843: mol_type = genomic DNA
atgattaacatgttagaagtaaaaaatattaaatattcttataattcaaattatcaagcacttaaaggagtaagcttaaaagttgataaaggtgaaatggtagctcttttaggtaaaaatggtgcaggtaaatctactttatttcttcatttaaatggaatttacaggccggatgaaggaaaagttttcattgatggtgaagaattaaaatatgataaaaaatctctgcttaagtttagacaaaaggtcggaattgtatttcaaaatcctgatgatcagatatttgcaccaacagtcgaggaagatgttgcattcggtcctctgaatttaggattgccaatggaagaagttcaagacagagttgaagaagcattagttcgtgttggaatgtcaggttatgaaaaaacagctcctcatcatttaagtggcggacaaaagaaaagagtagctattgcaggtattcttgcaatgaaacctgagataatggttttggatgaaccaactgcaggtcttgatccacagggagttgtagatttatctaaattattgagagaacttaacgatgaaggaattacaattataatttcaacacatgatgttgagttagttccgaattatgctcaaagagtatttgttttagttgatggtttattgattgcagaaggcactcctaaagagatttttgcaaaaccagaaattttggaaaaagcaaacttgaaagttccaattgttacagaattatttcaaaaacttgaagatgaaggttttgacatggaagggaattatcctctaacaattgatgaagctaaggataagtttttaaaattattgcacgaaaactaa

SEQ ID NO: 7544 - DNA, 459 bp, Methanobrevibacter gottschalkii
  source 1..459: mol_type = genomic DNA
atgagaattggaatttgtgatacaacttttgctcgttttgatatggctggagcagctatagatgagcttaaaaagaatgcttatgatttaaagataattcgtcaaacagttccaggggtaaaagacttgcctgtaactgctaaaattctcattgaagaagaaaactgtgatattgtaatggcgcttggaatgcccggaccaatgaaaaaggataaaatgtgtgctcatgaagcatcaacaggtcttattaatgcacaactgatgacaaataaacatattttggaagtatttgtacatgaagatgaagaagataatcctgttgaacttgctaaacttgcagaaaacagggcacgtgaacatgcacaaaatttaattaaaatgatgtatcacagaaaagcaatgagaaaagaagctggaatgggaatgcgtgaaggaaaagaaaatgcaggaccattataa

SEQ ID NO: 7545 - DNA, 708 bp, Methanobrevibacter gottschalkii
  source 1..708: mol_type = genomic DNA
atgggatttgaagtcacagaggaagataaaaaagctacatatgttattcttccagcatataatgaagctacaagaatccagcctgtaattgaagaaattgcggaaaaaggatataacatgattattgttaatgacggttcttcagataatactttggatgttataaaggaatctcaaaataagtatcctgataagatttttatttactctcatatgattaatcgtggtgttggagtagctatgcaaacaggctttgatgctgttttaagatataatccaagatatattgttaatatggattctgatggtcagcatgatgctgatgatttggaaaatgtattggaacccttaataatgggcagggctcaggcagtaataggggtcagacctttaaaagacatgcctttaactaggaatattgctaatgcaataatgaatcttctcacaaaagtattttataaagttgatgtaagtgattcacagactggttttagggctattacaattgatgctttgagaaaaataaatattaatgctagaggatatcttatctcttctgaatttatacgtgaagtcaatgataataaaattccatttgaagaagtcgagataagaacaatttacactcctgaaactcgagcgaaaggaacaaatgtggctgttgcatttaaaatattaattcaaatgattaaacacaggttgaggtga

SEQ ID NO: 7546 - DNA, 348 bp, Methanobrevibacter gottschalkii
  source 1..348: mol_type = genomic DNA
atgttattttattcaattttatttccaataatatctttaattgctattatttggcttttatggagatatctgaatgaaaaagattctttaattacggttattttatgggctgttttcttgattattgttagtgtatttgcaattttccctcatgcaagtactacatttgctaaattgtttggtataactcggggattggattttataatcataattgtatttgcagtgttggtatatacaatttttaaattatattataaaatcgataaattagaagataacataaataaaatagttaaagaagtagctttgagcaatgaaatatcccttaaagataaagaggattaa

SEQ ID NO: 7547 - DNA, 672 bp, Methanobrevibacter gottschalkii
  source 1..672: mol_type = genomic DNA
atgttgtattttagaggatgtacagcacgggaaaaattaaataatattcaatctgcaactgaaaagttattaaaactggcggatgttgattatcatattttagatgatgaaaaatgttgcgggtctgttttacttagaacaggttttttaaaagaagctgaagatcaaattaaaaaaaatactgaaattcttaaaggagaaaccattattacttcatgtgctggatgttataaaacattaacagaagattatgatggtttggatgtaatccatatctcccaattacttgatgagctaattaaagaaggtaaactcaagttatctaaaatggatttggatgtcactttccatgattcctgtcatttaggacgccattgtgctgtttttgaggaacctagagatgtgattacatctgttgctgatattgttgagatgaaaaatattcgtgaaaatagtttgtgttgtggtgctggcggtggtgtaaaatctgcttatcctgaaattgcagatcaaatggcaaaatcaagaatagaacaagcaaaagaaacaggttgcaaaacgttggtaacttcatgtcctttctgtaagcttaatttggaaaacggtgatttggaagtacttgatctaactgaatttttagttaaatatggtggtttaaatgaaagacagtga

SEQ ID NO: 7548 - DNA, 1203 bp, Methanobrevibacter gottschalkii
  source 1..1203: mol_type = genomic DNA
atgaaagacagtgaacttgaaacaatgagaaattcatttaatacagttaagaatagatcaaattcacttattgaatcaccatctgctaaaagactgatttcaagaggtcgtgaaatcaaaaaatattcaattgaaaataatgatgaattacttaatcaggtttgtgaatcatttaaacgtaatgatgttgattttaaaattgctgaaacggcagaagatgctctaagtattatagatgatttgctctgtgaatatgattgcaataccattgcaaaagctaaatctaatactttaggtgaaatcaatcttaaaagacatttagccaatgaaaatattgatgttgttgaaacagatcttggagatagaattttacagcttaaaaaaattgataataaaccagttcatccaactggacctgcttcacatttgaatgttgataatatcactgatattgttaatgaatcattggatgtcaatgttaatccggttccaagagaaatcatggaagctgtaaggtatgatgtgcttaagcgtttggaaaatgcaaatgtaggtataagtggagctaacgcaatagcatctgaagagggatctattgtgatggtgcataatgaaggtaatatttcgcttgtttcactaaaggatttgcatataattgtggctggaattgataaaatagtgcctacattggaagatgcaatttcaattgtaaagcttgaaactatatttgctactggaaactatgtaacatcatatatgaatgtaatttcaggaccatcaaaaacagcagatattgaaaaaaaacttttaaaaaatatgtatggtgctgaaagagtagttgttattttacttgataatggaagaagtgatgcaacacaggaatgtctttattgtattggttgtggtaattgtgttgttcactgtccagtttataatgctgttggaaatgaattcggatttaataattatttaggtggtcgtggagttgcaatgtcaaagttcattgaagatgatgagacatgttataactcaggattatatatgtgcactttatgcggattatgcactttaaattgtcctgttgatattccaactaatgaaattattgaaaatatgagaaaattatctgctgatgccggtttctatccgaaagctcatggaattattaaagataatgtttctagtaaagattcaccctattaa

SEQ ID NO: 7549 - DNA, 714 bp, Methanobrevibacter gottschalkii
  source 1..714: mol_type = genomic DNA
atgcttctattaattagtcctataaatcgtgaagaagctcttgaatcaattgaaggtggagcagacattgttgatgtaaaaaatcctaaagaaggttctttaggtgctaattttccttgggtaattaaggaaattagagaattaactcctgaagataagcttgtaagtgctactttaggtgatgtaccttacaaaccaggtacagtttctcttgcagcaatgggcgctcatgtttctggagcagattatattaaagtcggattatatggaacaaaaaaccatgatgaagctgttgaagtcatggaaaatgttgttaaaactgtaaaagaaataagtgaagaaactattattgtagcagcaggatatgcagatgctcaccgtgtaggtgctgttgagcctatggaaattccaaaaatcgcaaaagatgcaggttgcgaccttgcaatgttggatactgctgttaaagacggtcatactttatttgattatttggatttaaatcaattaaaggaatttgttgatgaagctcacggatatggtttgttaactgcacttgcaggttctgttaaaaaggatcaattaaaaccattacatgatattggttgtgatgttgttggtattagaggagctgcttgtgttggtggtgatagaaacactggtaaaatacaccatactgcagttgctgagcttaaagaattatgtgattcattttaa

SEQ ID NO: 7550 - DNA, 1485 bp, Methanobrevibacter gottschalkii
  source 1..1485: mol_type = genomic DNA
atgtcattttccaaaaaagttcaagaagcaagaatgtcttacacttttgatgattttcttttaactcctaatgcaagttatgttgaaccaaaagacattgatactagaatcgaattaggaaaaggaattagattgaatattccagttttaagtgctgctatggatactgtaactgaagcagatcttgcaattgctatggcacaagaaggtggagtaggtgtaattcacagaaatatcactcaagaaagacaagttgaagaagttaaaaaagttaaaaatgctgaagatttgacaattcgtgatgttataactatcactccggattccactattgcagatgttcaaactaaaatgcaagatgaattgataagtggtcttccagttgttgaaggtgataaaattattggtattatctctaaaagggatattaggccagttttaaaatcagaacctgataaaactgtaaaagatatcatgacttcggatgttgtaactgttgaagagggagtttcagctgaagaagcattaaatatcgcttatgagaataaagtggaaagacttcctgttgttcgtgatggcaaattagttggaattctcactattaaggatattttaaatcaagcacagtatcctaatgccgctcgtgataaaaatggtaactatttagttgctgcagcttgtggaccatttgatttagacagagcaatggcacttgatcaagcaggtgcagatataatttctattgattgtgctcatgctcacaatatgaatgtagttaaattcactgagactattaaggataacattgatgccgagttatgtgttggtaatattgctactgctgaagctgctgaagacttgatatccatgggtgtagatgcacttaaagttggtattggtcctggttcaatgtgcactactcgtattgtggctggtgttggtgtaccgcaattgactgctatttctgatgttgctgatgcagttgaagatactggtgttcctgttattgctgatggtggtattagatattctggtgatgttgctaaagctattggtgctggtgcagatgcagtaatgcttggtaatttacttgcagcttctcttgaagctcctggagatattgttgttatgaatggaaaacaatacaagaaataccgtggcatgggatcaatgggtgcaatgaccagtgaatatgacggtggagcagacagatatttccaaggtcaaaaaagtaaaatgaaccacactaaatatgttcctgaaggaattgaaggtgctgtaccttataaaggaactgttgcagaaatattattccaattagtaggaggattaaaatcctctatgggatactgtggtgctaaagatattgctgctatgcaggaaaaagctaattttgttagaatcactagtagcggtattaaagaatcccaccctcatgatttgttaatcactaacgagagtcctaattatccaactcttgactag

SEQ ID NO: 7551 - DNA, 270 bp, Methanobrevibacter gottschalkii
  source 1..270: mol_type = genomic DNA
atggcaagaactaaaaaagttggtattacaggaaggttcggtgcaagatacggaagaaaagctaaaagatctgtaaagattattgaagaaaacatgaaaaaaaatcatgtttgccctaaatgtgctagaccttatgttaaaagacaagctgctggaatttggaaatgcagaaaatgtggcgcagtatttactggaggagcttacattccacaaactcctatggcaaaatctgcaacacgtaatattagggatattaaagtggaggaataa

SEQ ID NO: 7552 - DNA, 132 bp, Methanobrevibacter gottschalkii
  source 1..132: mol_type = genomic DNA
ttgtataggtgtccaagttgtggagcagaagtagaccacaaaagttacatggaaaataaatgtcctaaatgcagatataggattttatttaaaaatgtgcctgaaactactagaataatcaaagcaagataa

SEQ ID NO: 7553 - DNA, 486 bp, Methanobrevibacter gottschalkii
  source 1..486: mol_type = genomic DNA
atgttaatttcaacttctagaaagccttctcaaaaaactagaaagttttgcaagaacttagctcatgctacaggttcaatttctgttaacagaggtaaaatgaatatgcgcgagttattaatcaaagcattagaagttgaagaatataatctggctattgtaaatgagattaaaggtaatcccagcagaatttcattttactctaacaaaggtaagttattattaacactgattatcggagcatctgaagaaaaagaaaaaatgaacattgctccttctcaattaaaaatagtttctgaagtaaaagaactcaatattttaagtgaaatcttagatatggatttagtagataatgctgaaagtaattatatattaatatccgaagatgaggattcattagctaatattaatttcatcaataaattcggtgacatgaataactttaaaattaatgttaaaaagattttagaggtttcaaatgattga

SEQ ID NO: 7554 - DNA, 267 bp, Methanobrevibacter gottschalkii
  source 1..267: mol_type = genomic DNA
atgattgatgaaagtcctcttgagagggttaggagcaatatagttattgaatttgaagataatgcccaagctaagattatttatgattctattattttagaatttagtactgctccggattttagatcatctatgactattgatttggatgagtctaatatcataattaacatcgatgcagaagattccacatcatttagagcttctgttaattcggctattaaatggattaaattagctttagaaataaatgatttaacaaattaa

SEQ ID NO: 7555 - DNA, 348 bp, Methanobrevibacter gottschalkii
  source 1..348: mol_type = genomic DNA
atggagattcctgaaaatattcaacaacaattaaatcagtttcaacaattacaacagcaagctcaggctataagcatgcaagttcaaaatgttgaaattcaaattcaagaaactgaaaaagctttagaagaacttaaaaaaactgatgaatcaactgaagtattcaaacaagctggtactttacttattaaagttgaatatgcagatgcattatctgacatggaagataaattagaaactttaggtttaagaaaacaaaccatgtcacgtcaagaagaaagagttatgaaaaaacttgaggaaatgcaagcatctattcaatcagttatgcaaggtatgggccaatag

SEQ ID NO: 7556 - DNA, 285 bp, Methanobrevibacter gottschalkii
  source 1..285: mol_type = genomic DNA
atgtcaaaattaaaaacattatcacaagatgatttatcctctatttctgataagtttggtgaaattcttgaaaaagaaatttcaaaatcaatttcaatgaaagaattggaagatttagacttagatattattcttaactatgaaaacgaacagttagatgttgatgttaatgtgggagttttgtttgatgaactttctgaaattactcaagatcaggttatgcagtctattgatgaagcttatttaaagttcgattcatatattgatgataatttcagaatgtaa

SEQ ID NO: 7557 - DNA, 690 bp, Methanobrevibacter gottschalkii
  source 1..690: mol_type = genomic DNA
atgattaaaaaaattccagttatagatttaaaacaacatcaggcagtaagtggtaaatctggaatgagagataagtatcaacctttaaaaacagtttttgccaaatctgccaatcctgttgaaattgctcaaggattaaaattaaatggggctactgaaatgtatattgctgatttggatttaattgaatctgtggggcataatatcaatgatattaaaatggttaatacaattttacctgtaatctttgatggaggagttaaaaattgtgaaggatttgaatttttccttaattatgcttataagattattattccgaccgaaacacttgaaagtattgatgagatgagaaaaatatttgaaaaatatcctaaagagaggattgtaattagtgtggatgttaaaaatggtgaactacttgcaaaacatttaaatttaaatttatctgaatttaaagagattttaaaagagcttgatccaaatgatattattattttagatatttccagtgttggcactgaaaggggatataataaaaagttgcttgaggaatttggagatttaaaagaaaaattaattattggtggcgggttaaataaagattctttagttgaattggagtcattaggtataaaaaaagtattaataggaactagtctacattccggtgaggttaaactcttagactag

SEQ ID NO: 7558 - DNA, 180 bp, Methanobrevibacter gottschalkii
  source 1..180: mol_type = genomic DNA
atggcgatagttggaacaacaatattttctcatattcttccagtaatttgtggattttttggaattgtaatgattatttctggatctttggaaaaaagcaatagtaaattaggattaggtattgttttatttattatagcttgcatattcccgtacttaattttaagtgttctagtctaa

SEQ ID NO: 7559 - DNA, 849 bp, Methanobrevibacter gottschalkii
  source 1..849: mol_type = genomic DNA
atgagaattgacacacatcatcatcacaaaaaagcaggtgaaaatctagcatttgtttttttcatgaatttgacgttcaatataattgttattgcaggtggtcttgcaacaaatagtatggcaattcttgctgattgtattcatgatatgtccgatactatttcaattgcttttgcatggtttttagaacatgttgctcagaaagattcaactgataaatattcttatggttaccaaagattttcaattcttggtgcggtaataatttctatttttgttattattatggctttattgattcttcaagaggctattcctagattattcgctcctgaaagtgttgatgcaaatggaatgcttttaatggcaattgttggattggtatttaaatcaatttcagtttatcgtttacatggtggtgaaacattcaatgaaaaagcaattttattacatcaacttggggatgtccttgaatggattactattttaatattaagtttagttttgatgttctgggatggcgcaccttatttggatcctttcgtatcaatcggtattgcattatggttaatatttaatcttggaatgaatttatataaatctgttgaggttttacttcaaaaaactccaaaccattttgatgttaaagagtttaaagtaaatgttttaaatattgaaggcattaaatcatttgatgattttcatgtttggtcacttgatgggattgattctgtgttgacattaaaagtttctattgatgattggaacaatcaggaaaaaattaaaaatgatatttataatattgcatctaaatatcatattgttgatattactattgaatttgattaa

SEQ ID NO: 7560 - DNA, 885 bp, Methanobrevibacter gottschalkii
  source 1..885: mol_type = genomic DNA
atggtggaaaaaggaactgatgtattaaaagaaggcttcgctaaaatgacaaaaggcggagttattatggatgtagtaaacgctgaacaggcatcaattgcagaagatgcaggtgctgtagcagttatggctcttgaaaaagtgcctgctgatattcgtgctgctggtggggttgctagaatggcagatccgacaatcgtggaagaggtagttgatgctgtgtctattccggttatggcaaaagctagaattggtcatattgcagaagcacaaattttggaaactcttggtgtggacatgattgatgaaagtgaagtactcactcctgctgatgaagaatatcatattaacaaaaaagaattcactattcctttcgtatgtggtgcacgtaacttaggtgaagcgttaagaagaatcgatgaaggtgcagctatgattcgtaccaagggtgaacctggtactggaaatattgtagaagctgtacgccatatgagaatggtaatgggtgaaatcagaaccgttcaaggaatggaggaagaagagatttggaagtatgcaagaaaaattgaagcacctattgatcttgttaaaaaaactgcagaacttggaaaattacctgttgtaaactttgcagctggcggtattgcaactcctgcagatgcatctttaatgatgcaattaggttcagatggtatctttgtaggttccggaatcttcaaatcaaacaatccagaagcattcgcaaaagctattgtagaggcaactgcaaactatgataagcctgaagtgttggctgaggtatccaaagggttaggtcaggctatgaaaggtattgaaatgtcaactttaactgaagctgacagaatgcaggatagaggaatttaa

SEQ ID NO: 7561 - DNA, 813 bp, Methanobrevibacter gottschalkii
  source 1..813: mol_type = genomic DNA
atgactctcgttattattggtcctgtaacccaggatttggttgttattggtgagaaaagcactcataaaatcggtggagccacttattttcaatcttttgtttttgaaaaattttacaatgattatttggctattgtaaactgttctgatgaaaaaatagctaatgaatttccttcaaaggataaagttaaagttattttaaaagaatttactcatttttttataaacaattatccagatgtcaataacaaagattacagggagcaattaagtaattttgttcaaatacctatatttaaaagtgatttggagaaaatcttacctaaaaagattgatgggtttgttattaacccccttaataggcatgattttccaattgaaacaattgattatttaaaaagtttcaatgttccaattttcatatcaattcagggatttttacgaattcctgatgttgaagtaaatggaaaatatgctattaaattaggtacttttgataaattaagtgatattttagaaggtgtctcttcaatatttttagatgaaggtgaagcaaacataaccggaattgactttgatgtagatgaagtagttataactgatggaagtaatggatctagaataatttcagacaatcatgaaactaaaattaatgctgttaaatgtgaaaatattgcagatgcaacaggttgtggtgatacttatatggccgcatatatttctaaaagactaaatgattattctattagatcttctggcgaatttgcttctgatatttccagtaaaaagttaacaaaattcggacattattaa

SEQ ID NO: 7562 - DNA, 585 bp, Methanobrevibacter gottschalkii
  source 1..585: mol_type = genomic DNA
atggtaaaaattggaatactgaatttacagggtgctgtaagtgaacattataatataacacgaaaagcagttaaaaatatgggtgttgatgtggaagttgaatctgtacgttatgccgaagatgttgaaacatgtgatggtttaattatttcgggtggggaaagcactgtcattggaaaactaataaaacaaagaggaattgataaagttattaaagagaataatattgcagtttttggaacttgtgcgggtatggtattgcttagtaaaaaaacagattttaatcaaccgttaattggattaatggatattgcagttaaaagaaatacatatggcagacaaaaagattcttttgaatgtccaatagatatttttggtaaaaaatatttgggagtatttattagggctccagcacttgacagttataatcattcaaaggaagatattaaagttttatctgttttagatgatgaaatcattgctattcaacaaggaccgcatattgctatttcatttcatccggaacttactgaagacaccttaattcatgagcactttattgatggagttataaataggtcttaa

SEQ ID NO: 7563 - DNA, 7176 bp, Methanobrevibacter gottschalkii
  source 1..7176: mol_type = genomic DNA
atgttaaataaatcatctaatataatcgagaaggaatttaaaaatttacgtaaggaattattggatttaactttaagaaatcaacttcttaactttaaatcaagagctaaaaccattactatagtaaatcaaactcctgtaaatctttttcaaacattagttttacaagataataaaatgtattttgtagctaataaaaaagataaaaaggaagacaaatcatcagtatgggatcatattccatttgatttttcaaagttttcagaaggggataagaaattagctactgagttaactcccaaagagcttcaaaagagattgtattatattaataaccaagctaaaacaatgcttcaggaacaaggttataatattttatacttggctatcggttttttagaatggactgacaaatcaaaaccaaaacaaagaaataatgccccattagtgttaattccagttgcaatggaaagaaaaaaggttggtgaatcattcaatcttgaatggacaggagaagacattcagactaatatttcactcaaagctaaattattggaggcaggtattgattttcctgattttgaatttaaaagatatggtgaagttattgaccattatattgcaagtgttcgtcgttcagttagtaaaatggacggatggacagttaacaataatgtagctttaggtttctttagttttacaaaatttgtaatgtacaatgatttaaatccagaagcttgggaagataatgtggatttgactaaaaatgaattaatccaagctatttttaaccctgctaaaaatgaccatgaatcatttagagaagaagatatagattcaagattggaatatcagaatatgtatcaagttttagatgcagattcatctcaaattgcagctattcaggacgtgaaagctggacgtaatcttgttgtggaaggtcctcccggaactggtaaatcacaaaccattgtaaatttaatcgccgaattacttgctgaaggtaaatccgttttatttgtatcagaaaaaatggcggctcttgacgttgtaaaagataggttaacaggggtggggcttggtaaatttgttcttgaattgcattcacataaaacaagaaggaaaaaattccttaaagaattgcagaaagctactaatgtacaatctcaagaaccattaaacattgatcaaactattcgtaaattggagactttacgtcgtcagcttgatgattattctcaaattatacataaaccagtttttgctgttaatttatcagcatttcaattatatggtatgaaagaatctgccgatgatcattttgcaaccaaaaacgcattaatgccattggttagatttgataatcctgaatccattactttaaaagatttggatgatatgaaaatagctttagaaaatcttgctgaattatatcaaacaatttctaaggaaaatccttggagtaaatgctctccaaaaagcttgcttcctgctgatttaagagaaattgaaatgttaattggagattcattgtatgctcttgataatttcctagttgaacgtggcagagtctatgatatttatgggattaaaaaaccagatactttaaatgaattccaaaactccctttcagcttttgaaataattaaatctcaaaatgcagaattaatagatggaaatatattgaaatcaggagcatggaataacaacaatgatgatgcatttaaattaattcaagagctccaaagatatcaaaaatatgctgaaaccttaactaaatttaatcaaagtattttccaagccgacattgatggattagtctatgagttaagaaacatttctaataagaaattcagattcttcaataacaagcaacacattgaacttgttgagagatattattcaataccggtttctggaagtgttgatgatattataagagagttacaagaagcaaaaacaataatcaatattagaaaaagtcttgaagctaataatgcattaggtcaaaaatactttggaggttactggcatttaaatgcaaatatagatgatttaaatgctattgcaaaatggatgcatgaatttactgcacttgtacatgaaggaacattttctgagaatactattgaattaatgagtaaagatttatttgatattaagcctgaaagagacctttcagattatattgatgctggagaggaatttgttcatgtattatcaagacttaaagataaattaaatccaagaagtaaattaatatttaaaagagaaactggggatgttccatttgaatcatggaaggaacagttgtataattggagagggcaactatcaagccttcacttatggtctcaatatttaaatactaaaaattcacttaaatcttcaaatgctaaaatgtttgtagattcaattgagaaaagaaacattaaaaaagaggatattgaagcacttgttgacggaaatttcgctgattcacttttgaatatattgtttgtggaaaatcaggaacttgcaacatttgtcggcgaacttcatgaaaataggattcgtgaattcaaagatttggataagcaaattttagtattgaatcgtaaaaggatttatcaaaaattaaacagcaatattccaaaaatttttggaggaactgaaaatccacaagctaaaatattggccggtgaattcacaagaaaaagtggacatatgccagttagaaaactcttagaaaagactggtggaatgataaaacaaattaaaccttgttttatgatgtctccattatcaattgcacaatatttggatccaacgaatgaagaattgcagtttgatgttgttatttttgatgaagcaagccaagtgaaacctgaagatgcattaggtgcatttatgagaggaaaaacagcagttgtcatgggtgatactcaacagttacctccaacttcatttttcgatcaaatgtctgatgcagaaagtgatgaggaagaagctacttcattagacatggaaagtatcttgcatttgtgtaaattgtcattcccagttaaaatgcttaaatggcactatcgtagtcgtcatgaatcattaattacagtttcaaatagggaattttatgataatgatttattagtttatccttcaccttctcataatgatcctgagcttggtttgaagtttcactacaatccaaataccgcgtatcatagaggttcctcttctgcaaaccctctggaagctcaggatgttgtagaagaaatattcaatcattttgaaaaatatggtgatacaaaaagtttaggtgttggaacattttctgttgctcaaaaaaatgcaattcttgaagctttggaagtaaaacgtaaagaaaggcctgaattcgaacctttattttcggataataaagatgaaagattctttgttaaaaaccttgaaacaatccaaggtgatgaaagagatgttatattaatcagtgtgggttatggttatgatcaagatagaaaaatgtctcttaacttcggtcctttaaaccagaacggtggtgaaagaaggcttaatgtattaattacacgtgcaagagaaaaatgtgttgtattttcaaactttaaagcttatgacatgaaattaacagcgaatccaccatatggtgtaaaatctctaaaagaatttttagaatatgctgaaaacttaacattaggcactgataatcaagattcttatacaagagaaccatttgaagatgcaatagctagttttctggaagaaaacggttatacagttgatagacagattggttgtgcaggatttagggtagatcttgctattgttgatgatgagaatccggggaaatatattttaggaattacaactgatggtaaaatgtattcttcaagtaaagtagcacgggaccgggatagactacgtgagcaggtcttaagcggacttggctggaaactttaccatttatggtcaactgactggtatagaaacagggatttaggacgtaaaaaattattggattttgttcaaaaatcaattcgccaaactcgcgaagaagaaaaacgtaaatcagaagaagagaaaaaattagctgaaaaaagaagattagaagctgaaaaaaaagctgaagagttacgtattgcacgtgaaaaagaagaagcagaaagaaaggctaaagaagaacaagaaactaataatgaaataaacattggagatattggtccagcagactttgttgaagttgaaaaagttgatgatggggatttcttagaaaaacctattgatgttagttcaattaatccttctgaattctttgaagaggaaccctcaaggaattcaataaatgaagataaaacaacaaaagagactccttctgagtttgtcagtattgaacatccggataaagatgttgattttaaaaataattcttctgaagttgctaatcaatattcttctgatgatgaatcatttgaggtaaggaataacgattttaaagatattgaatctgaacatcctaaatcagatgaagatgatgatgaagtcaaaattgaatctcttgatgatttaaatgctgatgaatataatgaagaaaatgaatcatatgaagaaattcataaagaaaatacttctaaagtcatggaaaatgatgaagattattctgatgaatcggatagtatttctaaaaagctttctgataaattcaaatcaattttaaaatctgatgggcaagaacaagaagaaaatactcattcattcttttcatcttctaaatttgcaaaggatttaggtaaaaattcagatttaaatgatgaaaaatcttttgaagtaaatgatgaatttgattcaaaaatcaatgaatatactgataatgaaattcttgaagaaaatccagttgatctggattcaaaagaagatacatctgtaaatgaagaggatacttcagatttcaaaacaccaaaatttagtaataaaattgatttagaatctgatgatttcattgttgttgatcatgaagataatgaagtttcgaagtcttcttctgaaaatattgaaaatgatgatttcattgttgttgatcatgataatgatgaagtttcgaagtcttcttctgaaaatattgaaaatgatgatttcattgttgttgattatgaagataatgaaattgatgaaaatcaaaaatattcttctgttggatctgatttagatgatgaagttataatggattataatgaagttcctaaaaataaatcttatagtgataaaactgaagatatttccaatgaaactactgatgataaagttgatttagatcctgaagaggattatatttatgttgaccatagtcatgacgatgaacgtgtattggatgaagatgatgtggaaaaattcagtttcaaatctgatgaaatttccgaagaaccggaatttgaagttgataaaaaaccacaaggtcaaaaacaatatcatagaaaagggagtacttttgtaaaatcaattatttctgatgttgtcatgggagaatcacatcttgaacaagaagaagttgaaacagttaaaggggaaataattgaagaagatgaggattatgactataaagatgctccaagtgatgattctgttgttgaagcggaaattgtctatgatgatgaagagttgaatattctcaatgacaatcttcctgatgatgcccttgaaaaaccaactcctaaacatgtttatgacgatgaagagttgaatattttcaatgacaatcttcctgatgatactcttgaaaaaccagctcctaaaagaaatcatgatattgaaaatgatgatcttgataagccaactccaaaaatggattatactgaaggcgatgaattaaatatatttaccgatgatttaccagatttaaataaagaagaaattaacagaaatgcaactgatattgtaactaaggcaatggaagaattccttgaggacgtatttgaaaatgatgatgacattgagaaaattgaattagaaaatgaaattaaagaagacattcctcaagataatgaaatggttattgaagataagggaataacagaacacaatatagaggaaacttcaaacgatattggtgatggcgttacttattatcaaggttctaatgatgtaagaagtaaacttagaaaaaacaatttctactatgaagaagaaaaaccaaaatctgttagagaatccattaaaggaattaaaaaagacatggaatatataaataaatcgttaaaggaaattgaaaatcctactaaaattgattatgtttctgttgttgatagaactgaagaatatgatccaatggattatttaaatattccaagtgatgatgattctgataaaatcattgaaaaagaagaagaattaacatttgctgaaaaagaagagttaagaattgaaaaagaaatgatgatggatgatcttaaaaaagaaataaaagaagaaaaagatgtcattgttccagttcatgaacaggataggcgagaagagcttaaagatcaagcattggaaaatattatcttaagcgccaatgaagattataaggaaatagaacgtgaaagacgtagaaaagataatcagtttaaatcatttgatgataataaacttccgggaaaaagaaaaatggaagatgaaattgttgattatgtccatattgaggatattggattacattcctcagatgagttatacagacaatcaatagataaaattgctaaatctatcaatgatatcgtagacattgaaggtccaattcatgttagtgaagttacaaaaagagttaaagagtcatgtaatattaaaagagcgggagctaacttgaaaaaacgtgttaatgaaggaatcagtgaagctgaaaaattaggatatattattagaattggaaattttttatatgattcttcaaacaataatattgtcattaggaaaagaaataaaccaaatattgagctgatttcagatgaagaaatagctaaaagtattgagacagtattgcttcacaagcaaaatgttacaacaaaacaaattgcaaaggaagcatcacgtaattttggtttcaaatcaacttctaaaaagacagctacaagaattaatagcattttggatttaatgattgctaataataaagttaaactggataaagatattgttgaacttaaatag

SEQ ID NO: 7564 - DNA, 1752 bp, Methanobrevibacter gottschalkii
  source 1..1752: mol_type = genomic DNA
atgtcaaccaaagttaaatctcctgataatttgccaaataaacctggtgtctatattatgagagacaatacagacactataatttatataggcaaagcaaaaaatcttataaaaagagtcaaatcttattttagagaaaaacttgataggccaaaaactcaagttttaatgagtcattttgatagtttagagtatattgtaactaattctgaaaaagaagctttgatattggaagctaatttaattaaaaagcatcgcccaagatataatgtccaactaaaagacgataaaagatatccttatgttaaaattactgatgaggaattcccacgtttggtcattacaagaaatgtaacaaaaaatggggtgtattttggtccgtttactgatgtgggttcagttaaacagactgttaaatttttaaaatcattattcaaaataagaacctgccgtaatatgaatgggccttgcttaaactcacagattgatttatgttatgccccctgtgatggaagaatttctaaaaaagaatattctgaaattataaataaaattgatttgtttttccaaggaaaatactcaactattgttaaaaatcttaaaaaagagatggcggatgccgctggtaaggaagagtttgaaaaggcagctgtgataagggatcaaatttcatctattgaggagataatggaaaagcaatttgttgatttggttgatgatgatttggatcaggatgtaatagctatggctatgggtaaaaatgaggttgtagttattataatgccgattagaaatggaaaaattgttggccgtgatgactttttaatgagtggctctaagtatgattcaccttcagaagttatgttttcatttatacagcagtattatggttataacagacatattccaaagcaaattcttttagatgaggatattaatgataaaaaattgcttgaagattggttaagtgatttgaggggtaataaagttagaattaaaattcctcaaaagggtgttaaattaaggcttgtaaaaatggctaagaaaaatgctgagattattaaacatcaaaagaaaaaaatggaaaattcattaatagaacttaaaaaataccttaagcttgaaagaatacctcatgtaattgaaggatatgatattagtaatatttcaggtaagtttgcagttggttcaaaagtatcatttaaagatgcaaaacctaataaaaaaatgtataaacattttaagatggaaactcctggtccgaacgattttgcaatgatggaagaattattgacccgtagattaaaactgattgattcagaccctgaacctgacttaattgtgattgatgggggtaaaggacagcttggtatggcttgtggtgtattggagaaattaaatcttactcatatacctatcattgggcttgcaaaggaatttgaagagatatatattccaaattcaaaacgtcctattattattcctaaaaataacagggcactacatttgcttcagcaagttcgtgatgaatctcaccgttttgcgataacatatcatagaaaactccgcagcaatgatattcaagcctcttctcttgatgatatcgttggaattggcaaaaagagaaaaattaatcttttaagagaattcggtagtgttgataacattaaagaggcgtcaattgaggaattagctaaaatagacggcatgaatttaaaaacggctaaaaatgtttataattattatcactaa

SEQ ID NO: 7565 - DNA, 540 bp, Methanobrevibacter gottschalkii
  source 1..540: mol_type = genomic DNA
atggtgaaatgtccacgttgtggttatgagaattcatccacagcagtatattgtgataattgtgcatatcttctgactgattctgaaggaaacagaattgataattctcctagagttagtagttggaatataagttttgcaaaaaaaattgttatcgtattgggaataattgttattgcaatgttactattctcatttatttataataatactcaaccttctcatgaagattctttaaatttaataacggataatggtactgttcataaaactgcttcttacccatataaagctgtaattgaatatgaaggtagttggggtgctaaaatgggtgatccaaattatctagtaagtgaagatggttatggcactaaatcatttgtactcgattgcgctgcttgggatagagtatctatttctgcacaaaaatatgattatggtgaaggggagttgcatgttaaattattaagaaatggcgaagttgtagctgaaaattcaactacaaatgttactggtgctgttgtagttaattataattag

SEQ ID NO: 7566 - DNA, 306 bp, Methanobrevibacter gottschalkii
  source 1..306: mol_type = genomic DNA
gtgattaaagtggctagtgaagacaagattcaagaatatcaaaacattttagaagaagaaaaacttatgattgaaactcattttgtgaatatagaaaggattttaaaggaacctgaaaaaattgaaaaagacaaaatatttgcactaatgaacagctacaatacactaaatattcaatatgagcaattatgtagtgatcttattgaattcatcaaaatattcaaaggcagtgatcaggaaattagactatataaaactgatgaattaattaatttattagaatcaaaaattaatcaaatggactaa

SEQ ID NO: 7567 - DNA, 1704 bp, Methanobrevibacter gottschalkii
  source 1..1704: mol_type = genomic DNA
atgataaaagttgaaaatgtaagtaaggattatgaattagccgatggaactaaaatcaccgcacttaaaaatgttagttttgaagttaaagaaggtgaaattttaggtatcatgggtaaaagtggttcaggcaagactactttattaagagcacttaggggtgttgaacatatagacaatggaattattgaagtaggtaaagcaaaagttacttctgaatcatctcaattttattataataatcttaaaaaagaaactgcaatacatcttcagagatcttttggtatatggccggacactgttcgtgaaaatgttttaagaaaattatatgcaagaagatattttgacgaaggggatactaattttgaaattgcagaaagcgaattcggaaaagaagctgatgaacttttagaacttgtttccttaaccgataagcaagaccattatgcatctgtattaagtggcggtgaaaaacaaagacttattatggcaagacaacttgccaaacaacctaaagctttacttcttgatgaacctgcaactatggcatgccctaaaacaaaacaggaaatattggatgcggttaaaaaaatcaacaaagaattaaatataactgttgttgtcgtatctcatttaccggatgttcaaaaatatttagccgatagggttattttacttgaaaatggcgaaattgcagaggaaggttctgcaaatgaaatttgtgataaattcatggatgaaatggatgatattgttgatatagacaatattgcaactgatgaggatgttattcaagtaaatgatatatataaaagatttttcttgttaaccggtggggaagttttacaaattgaagatgtgaattttactgttcaaaaagaaaacattctaagtattattggtccaagcggtgctggtaaaaccgttcttttaagaatgcttgggggattggaggatcctgatgagggagaagtcttatataatgttgatgatgaatggagtgacattgatattcccggcatgggccgtatgaaaattagatctaaattaggttttatgcaccaagaatttgcattaaatcattattcaacagttttaaatcagttagctactagattaggttataaaaatcagaatattgttaaggaagctcaacagagagctaggaaaattggccttagtgaagaattattagattcgttttatttactcactgatctgcctgaaatagaagcaagagacagattgaaaaaagttggtcttgattcagatattttagatgatttattcccaagatttcctgaaactgcaacaaaagaagctgttgcagacatatttgaaagtcttgatttggatatgagtattttacacagaaaatcttatgaattatccggcggtcagaaagttcgtgtaatgcttgcattaattttagtttccagacctaaattcctacttttagatgaaccgtttggagatttggatccggttaccttaagagatgttacaaatgctcttaaaaaaatatcaaaagattatggaattacaattgtaatgatttctcacaatactgactttattaaagaattaagtaatagagctgtatttatggatgacggaaaaattattgatgatagtgaggatattgataaaattgttgataatttcattgatttctgtcatgcagactatttaaaaggtgaataa

SEQ ID NO: 7568 - DNA, 426 bp, Methanobrevibacter gottschalkii
  source 1..426: mol_type = genomic DNA
atgttcgatattattgcagtcccggtagatggttctgattatggatataaagcagctgatgtcgctattgaaatagctcaaaaattcaactctaaaattgccgctgtgcatgttcttgaggaattttcttttagcagctatgattctgaagaagatgaaggtaattcaattttatcaaaaattactaaaaaagctaatgatgtcggagttgaagttacggaacatttacttacagctgatcctttaagagacatgaaattcatagttgatcaaacacgcgccgatttagttgttattcatgcccatggttcaaacaataatagattcgtatcttttgaagaaaataatgtttccgatactcaaataggttcagtttcagaaagactcctaagaacttctgaagttccggtattattaatcagataa

SEQ ID NO: 7569 - DNA, 168 bp, Methanobrevibacter gottschalkii
  source 1..168: mol_type = genomic DNA
atgatagttaaagattggtgctcattttgcggtgagtgcgctggggtttgcccaagaaatttaattcaagtaagagaatattcattagtatttaatgatgatgattgtaaagattgtaatacatgcattaaagcatgtccaatagatgcattagaaaaagaggactga

SEQ ID NO: 7570 - DNA, 1179 bp, Methanobrevibacter gottschalkii
  source 1..1179: mol_type = genomic DNA
atgattgaaactgacgtaattgtagtaggttctggacctgcaggatcaagtgcggcaaaacatgctgcattagggggagcaaaagttattttaatggataaaaaatctgaaattggttcaccaaaaagatgtgctgaaggtgtttcaattcagggacttgaaaaattaggtattgaaccttctcctcgttgggttactcaggaaatccaaggtgtaagaatccaaactcctgatggaactgacacatggttaacaaaagatgaagtgaaattaccggaagccggttatattctggagaggaaagtatttgataagcacatggctatggatgctgcaagagcaggtgctgaaatcagaatcaaaactttggtaaccggaattgaaaaaattgaaaatggttatttggtatttactgagtccatgggcaaagaagaagttttcaaatgtaaagtattgattgcagctgatggtcctgaagggcacattgcaagatgggcaggtttaagaccggctgcaaaagctaaagaaatggaatccggtgtacaatatgaaatgtgtaatgttgaatttgaaaaaccaggagtaattgaattctacttaggttcatgtgcacccggcggttatgtatggattttccctaaaggggatgacattgcaaatgtgggcttagcaattttacctcataaagctgaaaaaaccgctattgagtatttagatgactttgttgcaaagtccccttacttaaaaaatgctcaagccgttgaaataaatgttggtggagatcctgttggtggaatgactaaaaaactctatgatgataatattctcgtctgtggagatgcagccggacaagtaaatccattaaccggtggaggaatcattagtggtatgaccggtggaatgtgtgctggtcaagttgctgctcaggctattaaagaggattgttctaaaaaattcttaaaacaatatgatgaaatggcgcatgctgaattggaccatgaaatcaaaagatataaaaaagtgcaagagtacttgctcactttatctgatgaagagttaaatgaaattgcccatgcatttgaaggagaaacttttgaaaaaatttctacaactgaaatagttaaaaaactaatcaaattatctccaaaagcattacttaaattaggtaaatttatttag

SEQ ID NO: 7571 - DNA, 969 bp, Methanobrevibacter gottschalkii
  source 1..969: mol_type = genomic DNA
atgattcttattactggtggagcaggatatattggttcccatacaaataaagcattacacaatgcaggttacgatactgttgttgttgataatttatgcaaaggctatgaaaactttgttaaatggggaaattttgaaaattatgactttggaagtaaaactctcagggaggttttcgaaaaatacgatatagatggtgttattcacttcgctgcattttcatcagtagcggaatcagttgagatgcctcaaaaatattttaaaaacaattataaaaatactttaaatcttttacaaataatgagggaatttggagtgaataagtttattttatcatccactgctgcagtatatggaaatcctgataaagttccaatcactgaagatcaggatttaaaaccaattaatccttatggacactccaaatttatcacagagaaagctcttgaaagagaagctgaaaaaaatgattttaattttgtatctttaagatactttaatgcagcaggagcagattttgattgtgaagttggagaatttcatgatcctgaaactcacttaattccattagtactggatgcggctatcggaaaacgtgaaagtatttctatttttggtgatgattataatacggctgatggaacctgtgttcgtgattatatccatgtaaatgatttagccgatgcacatattagggcatatgaatatttatgtgataaaaatgaatccaatattttcaatcttggaaatggtcaaggatattctgttcgtgaagtaattgacatgtgtaagaaggtcactggccgtgattttgaagttaaaattgatgaacgccgtgaaggtgatcctgatatattaatagctgattcagcaaaaattaaggaaaaattaggctggactccaaaatacaatttagagcaaattgtagagtctgcttggaaatggcataaaaaaattaatgtaatttag

SEQ ID NO: 7572 - DNA, 894 bp, Methanobrevibacter gottschalkii
  source 1..894: mol_type = genomic DNA
atggaaaatgaaagtcatgaatcaaaaatagatgttcgtataatagtatccggtttggatattgcacagcttgtttcaaaggcggttaacaatattcacttggaaaatgattataatatcgttgtttcatcaataattcctactgtagaattaagcatagtaaaaaaagtggctagtggtgccgatattcttttaattggtggatatggtagtgatgaaacttataatattcttttcaatgaactgaaaactgattttaatcacattggattatttgattataataatattattgttgaagatgaatctattgactttaaactagctgaaaaggagattcttaattcaataataaaatcaacattgtcttattctttaaatttaattaatgttcatacattagaaaacaagctaatgaaagtgactcataactataataatttacttgatgattataatcaggttctcaaagaaaacgaagttttatctcaggagaataatgaactaatggaagatattaaagagttaaaatcggactttaatgcatttaaattgagatatgaagatatttattcaaaagaaattcttgaaatattcagtttagatgatctgtggcaagaaacatttagacaagatttattggatggtgatagaattgttattgccactgataaatttaaacccgatgatatccttgttggtcagggtttcattgcttcacaatcaaaagaaaaagcaatcgaatggttgaaaatcattagaactgcattgatatttgtcgatgataatgcaggggatttgaaaaaggaatcaggtattggagaagaagaaaatatcccagaagacaaagatgattatgatatgtccaatacttttgaaaacttttgggattga

SEQ ID NO: 7573 - DNA, 1422 bp, Methanobrevibacter gottschalkii
  source 1..1422: mol_type = genomic DNA
atgcaaggagagatagaagataagtgtggtattgttggaattcattgtcctgatgaatctaaaaatgttgcatcttttgtttattattgtttgtatgctttacagcacagaggtcaggaatcagcaggaattgctacttttaatccggaaaaagggttgaattattattgcggtatggggttaataactgatgtttttaaagattatgaaatccagaatctcaagggaaacatggctattgggcatgtaagatactccacaaccggtcaatccagacttgaaaattcacagccttttgtaactgattttgatgatggatttattgctatggctcataatggagatatagtaaactccgcagagttgagaaatgaattggtcaaagaaggttatgagtttaaatctgatactgattccgaagttatttgttatatgcttaaaagggaacattatgacaataataaaaatataattgattcaatagaatctgtttctaaaaaacttgtgggatcttatgcattaactattttagtaaatggtgacttatatggtgtacgtgatcctatgggaatcaaaccacttgcagttgcaaaaagaggagatgaatttatcctcgcatctgaaactgttgcatttgatgtaatcaatgcagaatatattagggatattgaacctggtgaagtggtattttttgaaaatgatgaaatcaactctcatatgttggaaattgcaggggattgtaaaatttctcattgcatgttcgaatatgtatactttgcaaggccggacagtacaattgatggtattaatgtttatgagactagaatgaatatcggtcgccaattgcatgagctgtatcctattgatgctgatgttgtaattccggtgcctgattcatctattcctgcggctatcggatattcaagagcttccggaataccatatggtgaaggtttaatcaaaaacaggtatgtcggaaggacatttatcatgcccactcaggaggagcgtgagctggcggttagacttaaattaaatcctatcaaagatgctattaaaggcaaaagaattattctaattgatgacagtattgtaaggggaactacttccaaaaaattattggatcttgtaaaagaagcagaaccggctgaaattcactttttagtaggttgtccgcctgttatttctccctgtttttatggtgtagctatggcaaccaaaaaggaattaattgcagctaattattctatagaagaaatccaagaccaacttgaaattgatacattgggttatatcaccattgaatctttaattgaagctattggaatgtctaaagatgatttatgtttaggttgcattaatgaagagtatcctactgaaatacccgaaggtcttgaagccgaaacttactataagccttag

SEQ ID NO: 7574 - DNA, 1248 bp, Methanobrevibacter gottschalkii
  source 1..1248: mol_type = genomic DNA
atggttgaattattagctccagcgggaaattttatttcacttcgtgctgttttagaaaatggtgctgatgcagtttactttggccttgatgattataatatgagagccaatgctaaaaatttctcattaaatgatttaaaagaagtgtcaaaaatagctaatgagtatggagctaaaacttatttatgtacaaatactattttaaatgaaagattggcttgttcgttagataataaattaggggatattgcatctagtgaaattgacgggcttattctatcagacattgggttaattgaaaatactgtatccaatggtcttgaagctcacattagcgtacagcagaatgttactaattcatatatgttaaaaacacttaaaaagttaggtgctaaaagagcaattctttctcgggaactttctttaagggaaatcatggatttggctaaaaaatcaccaattgaaacggaaatttttgttcatggtgctatctgcatggcaatttccggacgatgttttttaagttacggtctttatggtaggagtgccaattgcggggattgcctgcagccttgccgtaaaaactggacactgacttatgaagagggggatgataatgttataaacttctcggatgcggaagaggaatcatttattattacctcaagtgatgatggaagttacagaactaactttttttcacctaaagatttatgtatgattgaatacattccggaacttatgaaaagcggtgttgcttcatttaaacttgaaggaagggcacgtagtccagattatggtgcaatggttactggagtttacaggcaagctattgatagttatattgctgatccattaaactataaggttaaggaggaatggatggaagagcttgaaaatgtgtttaatcgtggatttgacactaatttttactttaatactccatttgaaatcagtgaagataatcagtcaaaatatattaagaaagacattggtcaagttgtaaactattataataaagttaaagcagcagagcttagaatttgggatgatttgaaaacaggtgataaaattatcatccagggcaaaactactggttcgattactcatacaatcgattctatgcagattgatggcaagtctgtttcgagtgttaaaaaaggttctaatgtagcaattgctattccgacaaaagtcagggaaaatgactttgtttataaattagttgagaggaatgttgatgattaa

SEQ ID NO: 7575 - DNA, 795 bp, Methanobrevibacter gottschalkii
  source 1..795: mol_type = genomic DNA
atgattaaaaaaatagctatttatggaaaaggtggaattggaaaaagtactactgtagccaatttatctgccgtatggggtagtgataatctgaagtgtattgttattggttgtgacccgaaagcagacacaacacgtacattacatggctcaagaattccaactgttgttcaaactctgaaagataatagaaaacctgaaagggaggatcttgttttcagaggttttaaggatattttatgtgttgaaagcggaggtccggaacctggtgtgggatgtgccggtcgtggtgttattgttgctatgaaacgccttgaaaacttaggtgtttttgatgaagaattggatgttgtcgtatatgacgtattgggtgatgttgtctgcggtggtttttcagtgcctcttcgtgaaaaatatgctgatgaggttttaatcgtgacttctggtgagtatatggcattatatgctgcaaacaatattgtgaaaggggttaaaaaacttaaaggtaatttaagtggtatagtctgcaactgcagaaatgttgaaaatgaagagcagattgtcaatgactttgctcaaaggataggcacacatgttattggcactattcatagaagtaatttaattcaggatgctgaattagatgcaaaaacagttgtggaaaaatatcctgaaagttctgaagcacaagaatacagagaccttgcttcaagtataatgtctaatgagaaaatatcaactccggaaccgatggatgatgaagaattcgaatcattcttcaaatcatacttatag

SEQ ID NO: 7576 - DNA, 480 bp, Methanobrevibacter gottschalkii
  source 1..480: mol_type = genomic DNA
atgtactactctactaattataattccccgattggcgaaatgttatttgtaagcgacggtgaagctgtttgcggaatctggttttgcaatcagaaatactttaaaaataacattgacaagactgtaagaaaagatgatttagttatttttataaaacttaaaaaatggtttgacgattatttcaacggtttaaatcccaaaattgattttaaactgaaacctcaaggcagtgagttcagacaaaaggtctggaaaatattatgtgaaataccatatggtgaaacattaacttatggggatattgcatcaatgatatctccaaacatgtcagctcaggcggttggtggtgctgttggacataatccaattactattctgataccctgccatcgggtattaggtgcaaacggtaaattaacaggttacgctggtggtttggatagaaaaataaaattactgaagttagaaaaaatcttataa

SEQ ID NO: 7577 - DNA, 540 bp, Methanobrevibacter gottschalkii
  source 1..540: mol_type = genomic DNA
atgaatttaccattaaatattgttataggtaatgcaatatccttaattgcaggtatttttattctgttcagtatgtgggttaatgatgaaaaggaagtctataaacatcagttttcaaatgcctttattttaactatctcatcagcattctttttttcctggactggtgttgtaactatggcaatagccgcatcaagaaatgcaatggtttataaggatagattaacttttaattggacaatatttttcattatagtttcattaacagtcggctgtttagtaaatacaatgggtattgttggattattgccaattattgcattagttcaaattacattatccaattactatttaaaatcaatcaaagcaattaaaataagtttcattgtaaatagtataatttatataatttatttctttgcaatatgggatttttcatctgtagctattgaaagtgttactgtagctgtggggatgatttcattattgagattaattaatctaaataaaccaattttttgcaacaatgaagtatcataa

SEQ ID NO: 7578 - DNA, 804 bp, Methanobrevibacter gottschalkii
  source 1..804: mol_type = genomic DNA
atgcaaagtaacatatcagaagaactggaaatgaaatttccaccaattgttttaatcaaaagcaacaccaaaccaaaagatgtaaaagaacctaaaccgggcaaagggggatgtgtaatgagttttgttgcacaaacaatagctaaacgtataactacctgttttggtcgtgaacacattagctgtggtggaatttctgtaggttttggttggggagacggatttagggatgaaaatgcaatggattttcaagcatcatttttatcctgcggtgttgattcagcaccaaataaggagaaatatttggaaaagttaagtcatatgtctaaaccaacccgtgaaatgtttgaacatggcgagagaatttattcagattttaaaactgcaaaagaaaatataaaatcccgacctgtttatgatagtgaagattacgtgatttttaaaggattggagaatttgaattatggtgaaattccagattctgtaatatttactgttaatccaattgaattaactgcattaattcaaataaatacctcattcagacttaaagacacttatattttaacacctcaagcatcaggatgccaagccattggatgttttacttttagagaagatgaaagtgatgacccaaaacctgttttaagtccaattgattttgccggacgtagtaaaatgaaacatttcatcccaaataactatttaattgtttcaatgccttggaaattatttttaaaattagaagaagtaagtgaaaaaagtgttctccaaactggaatgtggaaaaagtttattgattaa

SEQ ID NO: 7579 - DNA, 426 bp, Methanobrevibacter gottschalkii
  source 1..426: mol_type = genomic DNA
atgtttaattcagatgaaaacaatacaatcaaagttgttgttgattatgtaaaggaatgctctgaatatgatttatcagaagaattatataataaaatagagctaatgccaaaaattgaagaaaaaattggcataacctacgaagcactttcaataagagttctttatttggaatttcttaagaactattcaatttatgtctatggtgatattgttgaaaataataaagaaacattaaataaattaggcccatatcgaaaaatagagactaatgttaatttatatgatgaaaatggaagaattattgaaaccgcacaacatgaatttgcagttaaggattttttaggaatgcatacatttaaagtaagttttaataatattaaatcaattgataaaattgataaaattagaatatttccaacatga

SEQ ID NO: 7580 - DNA, 543 bp, Methanobrevibacter gottschalkii
  source 1..543: mol_type = genomic DNA
atgggtgatattatgataacttttgaggttgattcacaacttaatgagaactgcggtattgttcttagaaatttaagttttaacagtgaaataagtaatagtgaagaatataaatgcaatgtatatggagaatttagtctaaaaaatcatgaagattatgataatttggaattgaaatctattttttatgatgatgaaagcaatattattaatattgaacgagactatattaatttagatgggtttttgggaagtggaacttttgatttttgggtatatttaaataaggacaaattaataaaaacacataaaattaaaattattccatcaaaattacgtaggaaaatattgaagagaagtgtatgcaataataaaatatcaattgaatctgaaaacttatccattaatataaatcttaaaaaggattattctgaagttgaaaaaagagataggaaaaaagaattaatcaaagatattgatgaaactattgatgcattgtcaaaaagtgatgagattattaatttgataaattactatgattaa

SEQ ID NO: 7581 - DNA, 183 bp, Methanobrevibacter gottschalkii
  source 1..183: mol_type = genomic DNA
atggaaaaatattatgaatccataatgaaaaatcttgaaatttatagaaatattgcaaattttgtttcaaactttaatatttatggaacttcagaaggaaaatatttgattatattatggcaaaaaacggttggattgaaaaccgaaaaaagtcataacaaattggcagttccaaaactataa

SEQ ID NO: 7582 - DNA, 858 bp, Methanobrevibacter gottschalkii
  source 1..858: mol_type = genomic DNA
atgcgtaagatttcaatactcgtattactgttaatcctcgttggtatgctaattccaaccggatttgcaacagattcaaatgtcgtaataacctatggggagactacctattcaaattcaaattacaaatcttttgttgacaatttttttgttaaccaggcaaatgttgatataaacaatgtaggtgttaaaacaatcactgctgatcaggtgaatcaagtatcaagcggaatcactggtaaatcatataattcaaatcaaatactgtcttcagcacttgttgatttaaatgataatggaaatttaaaggtaagtgttgataaatccaaaattactacaattaccggtgatatgtacatttcagctttaaaatctgctggaattacaagtgggcatgtgtatgtgacaagtcctgttcaggcaactggtgaatctgctcttgcaggaattatgaattcttatgaggaagtaactgatgttcaaattccagactctgtaaaagaagcagcaaatgatgaaatttacacccaagctgaaattgtaaataattcaggtgtaaatgctgatgatttatccaatctggtaaatcaggtaaaagatgaagtatcaggcggcaatgttactaaccatgatgaaattgtaaatattattaacagtcatgttgaaaacaataacattaacattacaaataatgatattgaaaacttagcagattcaattgaacaagtacagaacgtacaaggtgatgtaaactactacaaaactcaggtaaacgaatttctagacgataactccacaggaggtttttcattagatggtttatttgactggattaaatcctttactgatgggatttaa

SEQ ID NO: 7583 - DNA, 609 bp, Methanobrevibacter gottschalkii
  source 1..609: mol_type = genomic DNA
atggttgttaaacattgcccaaaatgtggaaatgatattgatgatgaggatattgaattttgcactgaatgcggtcataaattatcaaataaaattataaaaaatagttctaaaggttttttcgacaatttaaatgaaaaaacaagtttttcagttatcatattctcgtttattatttttggcgtatttttattcattggttcagtagtatggtcatctttcatggctaacggttcaattgatcttgttacatatcttttattagttattgtattttcagtattcttcggtggcatatttgttggatacttcggatgtatggatgaatcttatattattccgaatttctcaatatatttgggaagtattttttcagttgttctatgtggaattggattaatatttacatttctaatgggagtaatttcaattttaagttctattgctccatttggctcatcaaactcaatatctcaaacttcaacttcaagttacgctcagtctgttgatttgagttttatttttaaattagtattatttattcttttaattcctgtggcatcttatattggtgtatatttaggatactttttaaagaagaatatttaa

SEQ ID NO: 7584 - DNA, 456 bp, Methanobrevibacter gottschalkii
  source 1..456: mol_type = genomic DNA
atgaaagttagaaaaattttagtcatgttactaattttagtaactttaggttttacattaaatgcagtagtagcaagcagtccagatcctatcaaattaggagacatcaaaaatgatgacttggtaattacagaagtcggtcagaataaactgaattttgaatattccgttgaagtagacatttctgatttatctagtgaggataaaaaattatttgaaaaagcattaaataataacaatacctcatttattcttaatttaacatcttcaacaccaacgaaaattgcaataactatgcatagtttacctaaaaaagctgaaattataggcaatacattatatattaaaaataacaatatgtttcgcttaattaatggtatacaactagataatttaaagatatctgcagtatctttcaatacaactagtggccaattatttattgctagaaaataa

SEQ ID NO: 7585 - DNA, 957 bp, Methanobrevibacter gottschalkii
  source 1..957: mol_type = genomic DNA
atgaatcttggaaagttggttggaaatactccaatgataaaaattaactatgaatatggcggaaaatcagggagcatatattctaaactcgaattctacaattactccggaagtataaaagatagaattgcattatatattattgaaacagaaagaaaaaatggcaacttgaaagaaggacaagctgttgtggaagttacaagtggaaacactggtattgcatttagcgctatcggtgctcttttcggtcatgaagttcatattttcatgccggattgggtgtctcttgagagaagaaaacttatccggatgtatggcgctcatgttcatttagtatccaaagaggaaggtggatttaaaagagctcttgagcttgcagaggaatttgctataaaacatgacgcatatatgccactccaatttgataataaattaaatatagaagctcaatacatcaccggtcaggaaattattgatgagattccggatatagatgcttttgttagtggtattggaactggaggaacccttatgggaataggcaaaaagttaaaagaaaacaatcctgattttaaattatatgcactggaaccaagcacactttctattcttaaaatgggaatggaagaaggaactcatatgattgaaggaattggtgatgattttattccgggaattgttgataagaatctgattgatgatattgtactaattgatgatttggatgcaattaacatgtctaaaagaattgctaaagaatttggtttaggcatcggcatctctagtggtgcaaatttcttggctggtgttttaattaatactagtgatattaaaatagctactgtctttgcagatgacaataaaaagtacattaccactaaactgtccgaggaaattgatgatgatcccaatctgatttccaataaaattaaactgattaattttgaagtaatttaa

SEQ ID NO: 7586 - DNA, 885 bp, Methanobrevibacter gottschalkii
  source 1..885: mol_type = genomic DNA
atggttcagtattgtagaaaatgcggaaaagaattagaagatgatgctgaattctgtgatggatgtggttttaatcttaataatcatcctacagaagataagcaagaattgaataaaaaaattaaacaaacatctcaaaaagataaaaatgattttataaccaaattacccctatctttagcaataatcagcataattgtagttattgctgaaggattaggaacccctatgattatgggttgggacaatattatgcttgcaattgctataggaattattgggggaataattggaataattttaatggaaaaaatagatgaacctctaatagcttctgttgaatttattgcaactggagctctagtttactcatttattggtcgttttggtgacatatcccttataatatttattataaccgcaattttaacattatactttaaaggtcatagtgctaataataaaaaactatggacaatcccaattttaactatagttttattatttgtattattaatagctagtggagcattatatcagataaatgctgaaaattcagtaattgtaggtaatttaagccaaaatataacaaatgatggttatggatactataatggttatgtaactggagacattaaagtagattctagttttgattatttatgtgttaatgttaacttccttgacaacaacggaaaagtaattgattcaactataggttggaatgatttgaatcctcagagtggaaaaacatataaaatttctgcttggtatttcgaacaacaagcaccagaaaaagcagaaataagtgttgttgattctgcagattcaacaacaccattatatacagagaatataacaatttcaacatcaagtggagtttag

SEQ ID NO: 7587 - DNA, 2724 bp, Methanobrevibacter gottschalkii
  source 1..2724: mol_type = genomic DNA
atgtcaactcaaagtgaagcagttttagaaaataatttaataaaaagattatctgaaaatggatatgaatttgttaaaattagaaatgaaaatgatttattagctaattttagagttcagttagataaactaaataaatgtaaattaactgatgaagaatttaataaagttttattatttttagatgaaggttcgattttcgataaagcaaaaaaattaagagatcattattatattgatagaaaagacaatccattttatattaaatttttaaatcaaaaagattggtgtaaaaatatttttcaagtatcaaatcaaataactatggaaagtaaacataaaaatagatatgatgtaactttattaattaatggttttccattagttcaaatagaacttaagagaagaggtatgcctttaaaagaagcgtttgaccaaatcactaggtatacattacattcatataaaggtcttttcaattatattcaaatatttgttgtaagtaatggaattaatacaaaatattttgctaatggattaaaaaacgaccttcaatttgagtttacattttattggaaagatgaaaaaaataataacatcctttcattagatgattttgctaatacatttttagaaaaatgtaatcttgcaaaaatgatttcaaaatatatggttctaaatgaatcttcaaaaagattaatgattttaagagcttatcaaaaatatgctgttgaagctgtaattcatcaagctttagatattaaacaaaatggttatgtttggcatacaactggtagtggaaaaacacttacttcatataaagtaagtcaattgcttgcagaagatgaatcaatatataaagtcattttcgttgttgatagacgtgatttagatattcaaacgaataaagaattcaatagtttctgtgatggttgtgttaatacaacaaaacatactggtgctttaatcaaaaacttaacaacggaaggtaaaggtaaattagtaactaccactattcaaaaattatcaaaagcagttaaaacagcgggtgataaagttaaacttcagaaaattaaagataaaaaaattatcttaatttttgatgaatgtcatagaagtcaatttggtgaaatgcataatgtaattacagaatttttctcaaattcattatcatttggttttacaggaactccaatttttgctaaaaattctgatggaacaagaacaacaaaagatatttttggtaaaaaacttcacgaatatgtgattaaagatgctattgcagataataatgttttaggtttttctgttgattatgtaggtggtgctaaatcacatactgatattgataaagaagttaaaaaaattaacactaaggagtatttggaatcagataaccgtttaaatcaaattgtagattatattattgaaagttatgatagtaaaactagaaatagagaatttaatgcaatgtttacagtttctcgcggtggagtgatacataattattatgagttatttaaaaagaaaaagcatgatttaaaaatagttacaatattcacatttaaagctaatgaagatttaagtgaaaatgagcactcacaagatttattggacaaatatatcttagattataataaaatgtttgaaactaattttacaagtgatgattttaaacagtatcatgcagatgtttctaaaagaatgaaaaatagggaaatagatttgttattagttgttgacatgtttttaacaggatttgatagtaaattattaaatactctgtatgtagataaaaatttacaatatcatggtttacttcaagcattttctagaaccaatcgtattgttaataaaagaaaatcacagggaaatattgtttgttttactaatttgaaagataatgttgatgaagctattgcattattctctgatcctaacgcaattgaagatattattctacctccttatgaaacatttgttaaatggtttaatgaagatcttaaaagattatttaaacttgttaaaactgctacagaagcattggatcttcaaagtgaaaatgataagaaaaaatttgtattaatttttagagatttaattagaaataaaaacaaattagatattttcacagaatttaattgggatgatgttaaaattgatgaacaggagttcaatgattttaaaagtgcttatttagatatttatgatgaatttaaaaaggataatgaggatggtgaatctgttttaggagatattgattttgaacttgaacttcttaggaatgatcaaattaatgtggattatatattgaatttattagctgatttagataagaatagtactagtttcaagcatgataaacaacgtattattagcctcatgaaagaacacgagaatttacgtagcaaaattgatttaattgagaaattcataaatgaaaaattaggcaatattgatagtaaagttacaaatattaatgaagaatttgataagtttatgaaacatgaaagaaaacaagcaatgtgcgaaattgttgatgaagaaaatttaaatgaagatgtggctcgtcaaatttttgaatattttgaattttctggtaaaattgatgaagagttaattaaacaatcattggttgaaaaattgaaatttaaagagcgtaaagctaaggttaatacaattaaatttaaaatatttgaattatttgaaaaatttgattattaa

SEQ ID NO: 7588 - DNA, 555 bp, Methanobrevibacter gottschalkii
  source 1..555: mol_type = genomic DNA
atgatagtaaaaaaattagaagatattgcagaagtattttcaggagtacaaatatctagattcattgatttaaatgagaataaatttccagttattaaaaataaatttgttgaagatgaaattttagattatcattatgaaaatatttctaaaaatataaataaaaaatattattcaaaaaaaggagatattataatttctctttcacaacctaatacagttagtttattacaaaaagaaggatttattattccaatgtattttgcaattattcgattaaatgagggatatgattcttcatttatatatcatttaatgaatagtgatttgttccataataaattacatgttcttcttgaaggtggtactttaagagttattaaagttgctgatttaaaaaaaatgaaaattaatattccaaattttgaaaaacaaaatgattatggtaaatttttagatttaattgataaaaaatgtaaattgttaaattataaaaaaagttgcaatgaaaaaattaaagaatatttaattcaaacacaattaaaaggtgaataa

SEQ ID NO: 7589 - DNA, 1545 bp, Methanobrevibacter gottschalkii
  source 1..1545: mol_type = genomic DNA
atgtcagattatcaaaataatttagaaagtaaactttgggcaattgccgatgaattaagaggaaatatggatgcaaatgaattcaaaaattatattcttggatttattttctatagatatttgtctgaaaaattagaattacacatgaatgaagaattaaaagaagatgaattatctttcactgaagcttgggatgatgaagaatataaagatgatttaatggatgaaggaatttcttctttaggctacttcttagaaccacaatatctttttagtacagttattgaaaaagcaaaagttaatgattttattttagaagatttaattaaatcattaaattatattagtaattcttctattggtactgatagtcaagatgattttagtaatctttttgaagatgtagatttgaattcttcaaaacttggaaaatctgatgatgataaaaataaattaatttcaaaaattttattaaatcttaatgatattgattttaaattaggagatgatgaatcagatatattaggtgatgcatatgaatatttaataagtcaatttgcatcaagtgcaggtaaaaaagcaggagagttttatactcctcaagaagtttcaaaaatacttgctaaaatagtcacacttggtaaaaagaaacttagaaatgtttatgatcctacttgtggttcaggttcgttacttttgagagttgctaaagaagttgaagttggtgatttctgtggtcaggaattaaatcaaaccacttataacttagctagaatgaatatgattcttcatggtgttaaatatgttgattttgatattaagcaaggagattcattaaaatatcctcaacatattgatatgaattttgatgcaatagtagcgaatccaccattttctgcaaaatggtcaggtgacaaatcatttttagatgatgaaagattttctgcatatggtaaacttgcacctaaatcaaaggccgattatgcatttgtacaacacatgatttatcatttagaagaaaatggaacaatggcgattgttttacctcatggagtattatttagaggtgctgcagaaggaacaatacgtaaatatttaattgatgagaaaaattatttagatgctgtaataggtcttccagctaatatattttatggaacaagtatacccactgtaattttagtatttaaaaaatgtcgtgaagaagatcaagaggtattattcattgatgcaagtaatgactttgaaaaagtcaaaaatcaaaataaactcagatcagaagatattgaaaaaattgtaaatacttatgcaaatcgtgaagaaattgataaatattctcataaagcaacaattgatgaaatccgtgaaaatgatttcaatttaaatattcctcgttatgttgatacttttgaagaagaagaaccaatagacttaaatgaagtagtatctgaacttaaaatgattaatgaagaaatgaaaaaagtagatgctgaaattaagaaatattgtgatgaattgggcatcgaagcaccaatttttgattga

SEQ ID NO: 7590 - DNA, 1125 bp, Methanobrevibacter gottschalkii
  source 1..1125: mol_type = genomic DNA
atgagtgaagaaagattggttcccaaactacgatttagtggattttctgatgtatgggaatcttataaaattggtgatataagtaaaacttattctggaggaactccttctacatcaaaaagagaatattatgaaggagatattccatttattaaatctggcgagatttgtaaggataaaacggaacattatattaatgaaattgcaataaataattcatctgctaaaaaaattaaaaaaggggatttattgttagctttatatggtgctacaagtggtgaagttgcaatttcaaaaattgatggtgctattaatcaagctgtcttaaaaatagataataatatggataattatttccaatacaattattttttaaaatataaagataaaattgttcataaatacattcagggaggtcaaggaaacctttcagcaaacattattaaaaaattggaatttaaatttccaaaattagatgaacaaaagagaataagtcaatttttattattaatggacaaaaaaattgatttattagaaaacaaacttcaatattatcaagatttcaagaaatatttaatgcaacggatattcacacaaaacttaagatttgattttgataatgttaaattaaaaaatatttctaaaattaataaaggtaaacaattaaataaagatgacatggttgaaactggcatatttcatgttttaaatggtggaaaagaaccatcaggttacacaaatgcatggaatactcctgaaaacacaattacaataagtgagggtggaaattcgtgtggttatgtgaatttcaatacagaaaaattttggagtggggggcactgttattatttagataatttagctgaaaaagttgatggatattatctttatagttatttaaaatttatcgaaccaaaaataatgagattaagagttggatcaggattaccaaacattcaaaaaggagatattgagaatattaaagtaaaaatagctcttccaactgaacaacaaagaataagtaatttattgtattcaacagatgaaaagataattaatattgcaaatcaaaaagataattttgaacttttcaaaaaaggtttactccaacaaatgtttgtttag

SEQ ID NO: 7591 - DNA, 1161 bp, Methanobrevibacter gottschalkii
  source 1..1161: mol_type = genomic DNA
atggagtttacagataattggcaaacttataaattaggagatatattgacattttattccacaaattcattttcaagagaaaaattgaactatgaatttggaaatgttaaaaacatacattatggggatattcacacaaaatatccaactattgtttcattacagaataataaagatgttcctttcattaatgaagatatagatttgtctaagtttaatgaagaccaatatttacaagatggtgatttaatcattgttgacgcatcagaagattatgatgatattggaaaagctattgaagttatgaatgtcaatgatgaaaaatttttagcaggattgcataccattttagctcgtgatgaaaagaatataactgttaatggatttaaagcagatcttttttcaactaatactctcaaaacaaaaattaaagtaattgcaaatggaatatctgtattaggaatcagtaagaaaaatatttcaaaattagaagttaaaatcccttctaaaagagaacaacaagaaattgttagttttattaatactatagatagaaaaatagaactattagaagaaaaacatcagtattatcaagattttaagaagtatttgatgcaacagatattcacacaaaacttaagatttgattttgataaagaatgggaaaatattagattgaaagattttttaaaatcttcttcatcaagtttatctttgaatgatttagaagaaaatcatggagaatatggtttatatggtgctacaggaattgttaaattaatcaatttctatgaaaaaacagaaccttatttatccattgttaaagatggtgcaggagttggaagaatttttttatgcgaaccaaatacttccattgttggaacaatgcaatatcttactcctaaagaaggagtggatttagaattttcatattatcttttaaataccattgaatttagaaaatatgttgttggaagtacaatccctcacatatattttaaagattattctaaagagaaactattggttcctcaaattgaagaacaacaagaaattgcaagtattttatcaaatattgataataaactcaatttgatacaagacagaattaatcatatgggacaattcaagaaagggctgctccaacaaatgtttgtttaa

SEQ ID NO: 7592 - DNA, 996 bp, Methanobrevibacter gottschalkii
  source 1..996: mol_type = genomic DNA
atgaaaactagaataattaacaaaattaaatcaaaaatgaaattatatttggatgaaaatcaattagtcatattggatgaaactttaagaaatattcttaaagattatgatttggttgaaactgaaagtgaatttactataaaagaatctaaggaaaattctattttattaatgaattttttagcatctaaacatgttgaaggttgttctgaaaggaccattacttattatcacacaactattgcaaaaatgctagagtctattagtaaaaaaattgaattcatttcaactgatgatttaaggaaatacttggctgattatagaaaagtaaatggagcatctaaaacaacagtggataatattagaagagtcctttcaagtttttttagttggcttgaagatgaagattatattttaaaaaatcctgttcgtcgaattcacaaaatcaaaactaaaaaagttgttaaagaggttttgagtgatgagcattttgaagttttaagggataattgtgataatattagggatcttgcaatgattgaacttttagcttcaactggtatacgtgtaggtgaactggttaatcttaatattgatgatgttttatttaatgaacgagaatgtgttgtattaggtaagggtgattctgaaaggattgtttactttgatgcaaaaacaaaaattcacttactaaaatatttggagtcaagaaaagataataatcctgctctttttgtgtcatttaaaaaaccatttaaacggctgggaattaacggtgttgagcggagaataagggaacttggtaatggggctaatattaaaaaagtacatccccataaatttagaagaactatggcaacaaatgcaatagataaaggaatgccgattgaacaagttcaaaaacttctaggtcatgtgcaaattgatacaacaatgcagtatgcaatggttaatcagaacaatgttaaaatagcccataggaaatttattggataa

SEQ ID NO: 7593 - DNA, 1671 bp, Methanobrevibacter gottschalkii
  source 1..1671: mol_type = genomic DNA
atggatgctggaaaattacaattattatattttttaagtcaaaatcaacagttatcaattccaatttatcaaagaaaatatagttggagtgaaaaagaatgtagtcaacttttagaggatattttgcgagttggtgaaagtgatgaacaaaaccattttatcggatctattgtttatatgaatcaaaaaggccacattgcaagtcctattaatagtttgatgattattgatggtcagcaaagagcaactacaattacattattaatttcagctattgttgaatttttatttaaaaatccaaatgataatgtaatgtctcctgaaaattttattagttattaccttttaaatgatagagaaaaaggagaaactagatataaacttattttgactcaagatgataaaagaactttaattaaaataattgattatcttgaaactagtgatgaaattccatttgatagcaatgattctattagaattaaagagaactttgaatttttcaaaaagaagattaatacggacaacatagaaattcttttcaatgggttaaataaattattaattatttttgttgcattggaacataatattgataatcctcaattgatttttgaaagtttaaactctactggtttagaattatctcaggtggatttaattagaaattatattctaatgggtttggttccggaagaacaagaaaaattatataatgatttttggcatgaaatagaaactttatttgagaaaaatgaggggaattttgataaattcattagagattatctgacagttaaaacggataaagttcctgtatttagaaatatttattctgattttaaaaaatattcagcacaaattgatgttaaagaattagttaaagatatccacaaatatgctttctatttcaattcaattgcttttggtgctgaggagaatccgaaactgaaagaatcccttgacagtttaaatagtttgggttatgatgtaactgatccatttatgcttcatttatatagggattacaaagaaaataaattgtccactgatgatttctgtgaaattattaaatatactgaaagttatttgcttagaagattgatttgttctattccaacaccatctttaaataaaacatttgctggaatgtatgttcaaattgacaatacaagtcatttaagttcatataaagcgattttacgttcaaaagaaaattatcaaagaatgccgagcaatagggaattcgtagccaattttagacaaagggatatttacaatttaagatcaaaaaatagggattatatattcgataaatttgaaaattggggctcaaaagaaaaaactaatattcaaaattacactattgaacatatcatgcctcaaaatccaaatctttcacaagattggaagctagaacttggagaacaatgggcagatattcaaaagacttatttgcatacaattgggaacttaacattaacagggtataattcggagttaagtgataggtcattcaatgaaaaaagagatatggctggaggttttaaagatagtgctattagattaaatatttatttgcaggatttaaataattggaatgaaaatgaaattaaattaaggacaaacagatttgtagaaaaagctaaaacaatttggccatatccgtaa

SEQ ID NO: 7594 - DNA, 825 bp, Methanobrevibacter gottschalkii
  source 1..825: mol_type = genomic DNA
atggttcgattttcacaaactcttgatgataaacaatcaaagaatagagaaaaatcttataggcaagttatggagaatccttatcatgcatctgagaataggcaatcctatagtgctcaaaatgaggatagattttatagccaaccgtctgttcagagatccaattatcatgaggataattttcactcacaaaaagatgaggtcatatatgaaatgtctgttattgaaaaggaatctgtcaaaccagattattcaaaaccagaattaaagttccctgccgatcaaaacattcagtttggtgttgaatatgcaccaaattcaaaacctcctgttattggtagaaattacacaataagatcaaattccattatttacaatgatgttgtaattggtgataatttcagaacaggtcataatgttgttattcgtgaaaacaccaatattggggatgatgttttaattggaaccaatactgttattgaaggggatgttattattggaaatgatgttagtattcaatctaatgtatatattccaactaattctgtaattgaagataatgtatttatcggaccttgtgcttgttttacaaacgataaatatcctgttagaattaactatgaacttcaaggacctaaagttaggcgtggtgcgtctattggaggcaatactacctttttatcaaatgttgaagtaggtgaaggttctattgttgctgctggagctatcgtaatacattctgttccaccattctatttggctattggaacacctgcccgtattaaaccacttccggatcacttgaaagttccaaataaattttag

SEQ ID NO: 7595 - DNA, 162 bp, Methanobrevibacter gottschalkii
  source 1..162: mol_type = genomic DNA
atggctaaatataaatgtaagatttgcggttatatttttgatgaagataatattgaagagggattaaatattcctgaaggaactaaatttgaagatttaccttcttcatttaaatgtccaaaatgtgggatgccaaaatcaatgtttatgaaaatggattaa

SEQ ID NO: 7596 - DNA, 120 bp, Methanobrevibacter gottschalkii
  source 1..120: mol_type = genomic DNA
atggcaaaatttaaatgtaaaatttgcggatacgtaactgaagaattcgaagaactcccagaagactttaaatgtcctatgtgcggcgcaactgcagacatgtttgaaaaaatagaatag

SEQ ID NO: 7597 - DNA, 111 bp, Methanobrevibacter gottschalkii
  source 1..111: mol_type = genomic DNA
atggcttttatatgtaaagtatgtaatttcgttttagaagaagatgaattacctgaagattacatatgtcctgtttgtggcgtaggtgcagaacattttgaagaacaataa

SEQ ID NO: 7598 - DNA, 600 bp, Methanobrevibacter gottschalkii
  source 1..600: mol_type = genomic DNA
atgaaaactattaaaaatgcaattcaaagcgaaatcaatgttaaaaaatcccaatttatctgttcactagttccaactgaaacaaaggcagaatcaaaagccgtaattcagaaatttagggaacagtacagtgatgcaacacataattgcactgcatatattgtaagtgatggagaaggctttgatgatgatggagaacctggaggaactgcaggaaaacctatgatcaacgttttaagaaaaaatgaacttcacaacgtaactgcaattgttacaagatactttggtggaattaaacttggtgccggaggccttgtaagagcatactccaaatccgttatggaagctgttggtgaagctgaaatacttgaaattgaagaatatgatgtttataaacttatttttgaatattcaaatatcaggatagtagacagtgaagttagaaataataatttagaagtaatcaataaagaatacagtgataaagtcagttatgatattgtatcaaaggacggtagagatattttaaaaatatttgaaaaatactcaggaaaaataaatactggatttaaaaataaacagtttctagaaaataaataa

SEQ ID NO: 7599 - DNA, 420 bp, Methanobrevibacter gottschalkii
  source 1..420: mol_type = genomic DNA
gtgatattcttgccgggcagtaaatctgctacatttctagtaatttttatagtggctattgtagctttctgtattgcatgtgtttgtgcatctatgacaggacaaatatcaatcttgccaaatgataatgaatcagagagtatattggataatctttctgctattacaaatgatactggtaacagcggacaaagttacggttctaaagattatagttcatcaagttcaagtagttcttctaatgatgattcccaagtggagactacaactgaccattcaggtgataatcaaggggactcccagaaggattcagatgatcatgaccatgagaattctaatcaaaataataaagataaagatactaaaactgattctgggcatgcaggtcaaggctcaggagatgctaatgattttgattaa

SEQ ID NO: 7600 - DNA, 693 bp, Methanobrevibacter gottschalkii
  source 1..693: mol_type = genomic DNA
atggctgaattaagatacagagcaggaaacataagaaatcccgaagttcacaaaattggaatcatagcacttggttcacacttagaaaaccacggtccggcacttccaattgatactgatgcaaaaattggagcgcacattgcattccagtcttctcttcaaacaggagctaaatttttaggaataatatttccagcttatgaattagatacaattgaccatggtgtgcacgtttctcttgaaacattgaaagaaaatgttattagaacacttaatgatgctaaaaaattcttagatattgaaaaagtagtaattgttaattcccatggtggaaatattcctttaatgagtgagttatgggatattgaagataaaacagatatgattgtcgtattcaacaataaagtaatctcctccgaaggcccccatggaggaagtggtgagttgtcaatggcaaaggttttaggtattgttaatgaaaacgaattagacaatcaaacaaatgttaatgaatatgaggaagttggtttatacggttttaaacaagcacgtcgtgatgacccgaacattgaagaaggtgcacgcgatgttgaagaaaatggtgtttatatagatgaagaatacggagaaagactattcactttagctattagctccgtactctttgatgttgaaaagttactggatttctag

SEQ ID NO: 7601 - DNA, 483 bp, Methanobrevibacter gottschalkii
  source 1..483: mol_type = genomic DNA
atggttgtaaaagttaaaaaaagaaatttcttgaaaaaaaagaaaattaaagaaataaaagcagaattaggtgaatatggaaacttacttcagggaaagaaaaatgtagaaatacttgaagcagaacctaattcatttatcttagtagatggtgaaccatatattatattgattgatgaaagaccatttccaacacttaaagcagctcttgataatgaaattgatgctaaaactgtaactgtagacatgggtgcaattagatttgtagccaatggtgcagacattatgagtcctggaattgtagctgcttcagaaggtgtgaaagaaggagatgtagttttaattattgatgaaacacatggaaaaccattagctattggagtaagtttactttctggtgaagaaatggtcagaaatgattcaggaaaagcagttgaaaccaaacactatgttggtgacgatatttggaattttgaattataa

SEQ ID NO: 7602 - DNA, 498 bp, Methanobrevibacter gottschalkii
  source 1..498: mol_type = genomic DNA
atgaatttcaaccgtgaaaaatatattgatttaataatgtacattctcttaaaatgttattcaaaacccaatttaggaaaaaccgtactctgcggcattttatattttattgatctcaattattatgaagtatatggaaaatttctcacatgtgaaacgtatatcaaatccaaaaaaggaatagaaccaaaacatttcaaggaagttacagaagaattaatagctacagataaactgtttttaagaagggaagcatattacaacagaattatacacagatactacttaacgataatcccccagtttaaatttagcaaaaaggaacttgagataattgatgcatcgataaaaagattaaaggataataatgcaagttcaataaccagatatgcaataaaagatcctccattgcatattgctaatttcggagaggatatagattacaaatatgttttttcaagaaacagtgcctattctgcaattaaaaactttttataa

SEQ ID NO: 7603 - DNA, 231 bp, Methanobrevibacter gottschalkii
  source 1..231: mol_type = genomic DNA
atgagcggacaaaatgttcaaagaccacttgacgcattaggaaaatctgtggatgctcctgttttaataaaactcaaaggagatcgtgaatttagaggtatacttaagagctttgatttacacatgaatttagttcttaatgatgcagaagagttacaagacggggaagttactaggagactcggtgttgtgcttattagaggagacaatattgtttatatttcaccataa

SEQ ID NO: 7604 - DNA, 189 bp, Methanobrevibacter gottschalkii
  source 1..189: mol_type = genomic DNA
atgtcaaagggaactccatcaatgggtaagaagaataagaaaacccatattagatgtagaagatgtggtagaaacacttaccatatacgtaaaaaagtttgtgcttcttgtggattcggtaaatctaaaaaacttagaagatacagttggcaaaacaaaaaacctactactagacaaagattggtataa

SEQ ID NO: 7605 - DNA, 1392 bp, Methanobrevibacter gottschalkii
  source 1..1392: mol_type = genomic DNA
atgaaatatgataaaagtctaatagtactttttataatacaaatttgcgaaggatttagtttttatgggcttggagctatattaactttattcatgactcaatttttaaatttaagcctttcatttgcatttttagtttatggtacctattttggattagtttatattgcaacattatttggaggatatttgtctgataaatatataagaagcagatgtcttataaatgcgggaataatcctgatgggtttaggttttattgtcctgagttattttgcatcatgggctaatccccttgtgcagacacattcttatttctattttaatactcccgaaatcatgctgataattagtttaatgtctataattttgggtgaaggactattgagagtaaatatctcctcaactgtaaaacaggtatatgaagataatgaaaagaaagttgaatctgcatttacattattgataatggcattaaatattggagctgttagttctgcaataatacttggattaacaattggtgaaggaaatttaagtttatataagtatggattcttaatacttgcagttagcttattcattggaataataatttataatctatttagaaataaatatttggtaaattcaaaaggagagatagttggaattaagccttcaataaaattggaatctgtaatggacaatgcggaggaaaaattgaccaaacaagaaagaaatcatgtgaaagctattataattatactttccatatctttaatattcttcatcggttttgaagtaatcgattcatcattaatgttttttgcaaaagattatgttgcaaatacaattccatttgtcccatttaggataagtcctgaaataatcaaatttatagaaccctttggtgtaattatattctcaccatttatactaacatactttaatctaaaagacggtgatgaaaatgaatctttaatatttagaataatgcttggaattattgtattgcttgtaacttatgcagtatttttcataccttgcatgatggtcgataataatatgactgatgtctcaataattttcattataatcatggagctaatcagatcaacttctgaaatattaatacttcctataggtttgagtattgtatcaaaattatctccagcaaaatacttatctcgattactcggattattctattgttctttggcaggagcatatgtggtgtccggatatatggcaggattctatcctaatgctgaaagtatggcacataagttatttggtttaatacaaatcaatgattttaaaatctttgcttcagtatttatagtgatgtatttgacattgtttacagctacttatatttctcgaaataaaattagggatttaatggaataa

SEQ ID NO: 7606 - DNA, 999 bp, Methanobrevibacter gottschalkii
  source 1..999: mol_type = genomic DNA
atgaataaccctaacataatactaaagatgatttttatgaaaaaaatgaaaggagtactgcttgaagcaagtgcaattgacaaaggagacatatcatgggaagaactttccgaacatgtcgatttaacaatttatgaaaatacaactgaaagaaataagttcgaacatatcggtgatgcagaagtcatatttgataataaagttataatagatgaagaagtattcagaaaatgtccaaatatcaaatatgttggagtttgtgctacaggatataatgttgttgacatgactgctgcaagaaaaagaaacataaccgttacgaatgtacctgcttacagtacagacagtgttgttcaacttacatgggcgcttattttagagcagacctgtaatcttgaactccataatcaaagtgtgaaaaatggtgactggataaattcagaaatattctgctactggctcaaaccaataagcgagctttcaggtaaaacattaggaattatcggttatggaaacattggtaagaaagttgcaacaatagctaaaagctttggaatgaatataattgtaaacacagatcatcctgaaaaatatagtgaggaaaacattaattttgtagataaagatgaaatttttgctaaatcagacattattacacttcattgcccattaacagaagatacaaaagacattattcgaaaagaaaatattgacaaaatgaaaaatggcgttagaattgttaatgtttcaagaggagggcttgtaagagaaaatgatttagctgatgcattaaatagtggaaaagtattgtctgctggtgttgatgttgttgtaaccgaaccaatgagtgaagataatcctttacttgatgccgaaaacataataataacaccgcacatcggatgggcaagcattgatgcacgaaaaagacttgttgatgaaattataaaaaattataaggcattcatcaataatgaaaaaagaaatgtggttaattaa

SEQ ID NO: 7607 - DNA, 915 bp, Methanobrevibacter gottschalkii
  source 1..915: mol_type = genomic DNA
atgagtaaagaaaatattgaaaaaaatgaaattaataattcgaatgctccaattctttataaaagacacgaagattacatccctcgtgtagctgcaatacacgatctctgcggatatgggaaatgttcacttggcgtagctattccagtactttcagcagccggttgtgatgtttgcccagttccgacaggattattttcaaatcataccggatatcctacatggtatatgcatgacaccacagaaatccttaacgattatttgaatacctggaaagaaatcgacatagacatagatgctgtttattccgggtttttaggatctgatgaacaagttgaagtgatcaaaagtgtttatgaaacataccctcatgctctaaaagttgtagatcctgttatggctgaccatggacaagtatatcctacttatgatgatgatttatgtcaagcaatggcaagtcttgcatgtgaagctgatattcttactccaaatcttaccgaagctgctattattttaggtgaaccaattggtgaaaaatggagaggggcaaatattgatgatgaggaagcgcaccgtattctaaacgcacttctagaccatggagccaaatatgttgtattaaaaggtatacaacgtgaagatggaatcattcgcaacttcgttggtggtaaggacatggatatctctgaagcatccaatgaatttttaccttacatgttacatggaactggtgatttatatgcaagttcccttttagcagcagttatggttggtaaagacctttttgagtctgttgaatttgcaggaaatattactcacgatgcaatgattgtttcatcaaaacaacctaacttccaagatcgtggagtgaacttcgaatcacttctcggtcaagtgacagacttatttatctaa

SEQ ID NO: 7608 - DNA, 840 bp, Methanobrevibacter gottschalkii
  source 1..840: mol_type = genomic DNA
atgatgagaaaagtaactcataaaaccaaaggacaaaaagcaattgacggagcaggagtgcatctggtacgtgtattaggcaacactacaaccgatgttcatgatccatttttaatgttggatgcttttgatagtacaaatcctgatgattatactgcaggttttccaatgcaccctcacagaggcattgaaacaataacttttgtcagcaaaggacaaatgcttcatcaagatcatttgggaactgaagcacttgttggagatggtgaagctcaatggttaactgcgggttctggtgctgaacatgcagaatttcccggtggagaacgcatgcttggaacacagttatggttaaatcttccagcaaaagataaaatcactgctcctccagcatatcacagtataactacagatgaaattaaggaattctctttagatggtggatttttaagattgatggctggtgaatataatggtgaggaaggttggcaaggcaaatacttaccagttgatttctatgatattcatctagaaccaaacactaaagtggaaattccagttaaagaaggacggtccgcttttgtatttacattactcggtgatgtagttataagtggtgatgttgttttagaaaaaacagctgcaaagttaagtgatggtgaccatgtaatattcgaaactaaagataacagtgctgaaatattattatacagttctaaaagattggatgaaccagtagcttgggcaggaccaattgtcatgaatacaagagaagaattgaatcaggcttttgaagatttggcaaacggtacttttataaaaaaacaagctgaatattag

SEQ ID NO: 7609 - DNA, 408 bp, Methanobrevibacter gottschalkii
  source 1..408: mol_type = genomic DNA
atggtagaattaaaagatatagctcaagaaaatgaagtggatttagaaaactgtgttgtttttgtaagaggtgaagatgatattttagctgttgatgtttctaatgcaaagattaggcaaagaagtgacgatactatgggttttactttttcaattacaccggaacaaactttaaaatttgaagaatattttaataaatttgcaaatggtgaaaaattttactttgatatttcacaaactggatataggcctgcttattataggggtctgtctcagattaataaagaagtcagtgaagagtatgacacaaagttcaatgtaactttatttgcacaaaaagctattgtagagcctgatgattcatattttgcaccaacttgtgcttgttgccaattctgtcatttataa

SEQ ID NO: 7610 - DNA, 453 bp, Methanobrevibacter gottschalkii
  source 1..453: mol_type = genomic DNA
atgattcatattttgcaccaacttgtgcttgttgccaattctgtcatttataagggtgatataatgtttgattccccattttccaactacattgtattaactcgtaataaaacaaatgaatctataaaactagatcaaagaagagttaaactcagagaaaataagaatggtttaatggctttaagttatattggacctttatttgaaatcatggatttggaagacttttttgatgatatgatttcttctgaaaaattaagtatggatatcagtgaaacaggggaatttcgtgtaagttttagaggaataatagatgggaagggaaaaaatttccctcaaaacttagaccataagattattcttctacaagaacctacttgcttggatgaaagagtcaatattcaagaaactggtttttcaaaatttaaattgaaaaatgaagtttctgaataa

SEQ ID NO: 7611 - DNA, 405 bp, Methanobrevibacter gottschalkii
  source 1..405: mol_type = genomic DNA
atgctctctcaatttatttatatgttcataaaaaccaaattaaaaataaaaactaggattttggtaaatatgattataaactggcaagaagaaataacaagaattgatcccgaaatgaaatttagagcagagggcggatggttaaaaactattgaaaaactagataaaagtgttaaaaacggatattctcttgtaggtgactttgttaaagcaggagactttgaagaaaattatgatgaaggaatatatcttgattgcaataaagaaaaaacaggaagaaaaacccaacaggattatagattattccgtttcagagatggtaaagtaagattacttgatatggtaattgatggtgaaaatgggtgggcagttgacttatgggatgctgtggaagatgaactataa

SEQ ID NO: 7612 - DNA, 672 bp, Methanobrevibacter gottschalkii
  source 1..672: mol_type = genomic DNA
atgaatttatatgaaaagtttggtattaaaacggataataaagttttatatgatactgcatttacacatggttcatattctactaaacatgatttaaaatataattatgaacgtttggaatttttaggggattctgttttaagtgtaattgtttctgagtatttgtatgaaaaatatcctcattatgaagaaggtaaattaacaaaattacgagcaaattatgtttgtcaattcgcattaatttattattctcatgaattgggtcttgataaatatctaaaagtcgctgctaaagaatcaaacttaactaaaaatgaaatattgtctataactgcagatatcttcgaatcatttttaggagcaatgtttttagatcaaggttggtattttgtaaaaagatttgtatctaattcaatattcaaattcattgatgcaaatgttatattctttgcagattataaatctgctatgaaagaatatggggatgctaaagacttggaggtttcatataaaattttaaaagaatgtggtgtacctcataacaaaacattcatcacagcaatattaattgatggtgaagagatgggtgttggaaaaggtaagaataaaaaagaagcagaacaagcagctgcaaaagtagctattgaaaaattaaatattaaagtgttttaa

SEQ ID NO: 7613 - DNA, 1467 bp, Methanobrevibacter gottschalkii
  source 1..1467: mol_type = genomic DNA
atgaataaagagtctgttggaattgttgaaacggaatatcatgatatatccaatcctattatattagatagtggagaaactcttgacgaagtcactgttgcttatgaaacttatggtgaacttaataaagagaagtctaatgctattttaatttgtcatgcattaacaggtgatgctcatgctgcaggctggcatgaaggggataaaaaacctggctggtgggaaatggtgattggtccgggtaaagcattggatagtgaaaaatatttcataatttgttctaatgtattgggaggatgtaaaggaacaactggtccaagttctattagtcctaaaactggtaaagaatatggcgttgattttccagtaattacaattaatgatatggttaaagttcaaaaagaattaatagactcttttggtattagtcaattagctgcagttattggcggatctatgggggggatgcaagttcttgaatggatggtatcttatcctagaatgatgaaaaaagcaattgcaatagcaactgccggcagatcttcgcctcaacagattgcattcaatactgtaggccgtcaggctatattttcagattctaagtggaataatggaaattattatgatacttgtgagattccaagtaatggtttgtcactcgcacgtatgattgctcacattacttatttaagtgatgaatcaatggatattaaatttgggcgtggtcttcaagataaggatgaaattagctatgacttttctgtagatttccaagttgaaagttacctgaaacatcaaggggaaacatttgtaaaacgttttgatgctaatagttatctatttattacaaaagctgttgatctgttcgatctttcagctaatgattcattaattgacggatttaaaaatgttgaagcaaaaattaaaattatttcagttgatacggattggttatatccaacagagcagagtatggaacttgtaactgctcttaatgctaatgatgttgatgtttcattttcagaaataaaatctaactatggtcatgacgcatttttacttgagagaggtcagcttaattatattttctctaatttcttgtcagaaaatgtggttgatgatttaatgatagaggatatagctacaattagggaaaatgccgatattgttgaagcggctaaattaatgctagataaacatttaactcatattcctgttgttactgatgattgtaaacttattggaattgttacaagttgggatttgtccaaatctattgctacaaattccaatcatttaaaagatatcatgacaaaaaaagttaaatattgtcatgcaaatgattcaatagaggaaatcgcacgtaaaatgcgtaaatttgatatttcatgtcttccggtagttgatgaagagatgaaggttttaggtcttattactacagatcagattagtaatttacttagttaa

SEQ ID NO: 7614 - DNA, 624 bp, Methanobrevibacter gottschalkii
  source 1..624: mol_type = genomic DNA
atgggtattgggtatgctgctattgcaattaaagcaggcatgactccattacagacaatttctatgtctgttcttgtttatgcaggtgctggccagttcattgctgcatcaatgatattgagcagtgcaagtgtattggcaatcgtattaactaattttgtagttaatttaagatattttgtaatgtcgacctgtgttttaaatcaaattgaagactccaacttacctttaaatgtcttggcagctcatactactgttgatgaatcatttgcagtgttttcattgagtgaagattcaagtatttgggtctatttgggaattgcagtaactgcatggttaagttggattttaggagctgcaattggtgttgtagtattggatcttcttccggtaatagttacaaacagttttaacatttcactttatgcattgtttgtagcaattttaactcctgctattaaagaaaacaaacagattgcaattttggttgcaataacagctgttttaaatattattttaagtcaattcttaggaaactggtcgttaattgtatcaacccttgttggtgcagcaattggaatgtatattgttgatgatgaatatttgctttcaggtgatgcttaa

SEQ ID NO: 7615 - DNA, 315 bp, Methanobrevibacter gottschalkii
  source 1..315: mol_type = genomic DNA
atggattatatgatgttggttattgtaggttgtactcttgtaacatttattccaagattaattccagctttatttattgataagcttaatttctcaccaaaatttgagaaatttttagatttaattccatatactgctcttgcagcattaatatgtcctggagtattgacagtagataaccaattgtggtatattggattgattggagctgttgtagcagcatgtctggcttggaaaaaagcaccgatgggagcaattgttattataacagtagttgttttaatagcagtttattcaattgttccatttttttaa

SEQ ID NO: 7616 - DNA, 237 bp, Methanobrevibacter gottschalkii
  source 1..237: mol_type = genomic DNA
atgagaaccatgattaaatatttaagacaagagctcaagatgagtcaaaaagaacttgggaataaagttggagttacaagacagacaataaatgctctagagaacggcagatataatccatctttatttttagcttatgatataactcaagtttttaataaaatgttatttaaaggggacaaagaacaatactttgtcatggaggatattttcatttttgatgaggattattattag

SEQ ID NO: 7617 - DNA, 732 bp, Methanobrevibacter gottschalkii
  source 1..732: mol_type = genomic DNA
atgattttagatatatataaagatgcatttgaatattctgctaaagattggaagacattattgatattgggtgttatctgtttattcagttttttattaatcccagtatttttacttgcaggatataattatagggtggttggtacggcagtgcgtggaattatcaatggaaaagatccattgcctgagtttgatgatcttattggaatgtttattgatggaataaaagttgtaattgttcaaattgtttatttaattgtacctgcagttacatttatcgtatttgttctcattgctaatcatttatccggtgttttagcatctgctgtagtacttctgggatgtttagttacattaattcttggaattattgcatgtttaatgattcagatgggaatatgtcacatggcatataatgatggggcgtttacaaaagcatttgctgctgaggaaataaaagcagtaattaatgaaatcggattatttaaatgtcttttgacttatgttggaataataattatatgtgtagttttcggagttgttgttacagggatagttggaataatatttacaatattcggtctttcaggagctatgttaggtgttgatgcaggtggaatccttgttttaggtacattagttaattcactgattacaacatttgttgtaggaccatatttaagtatcttcactggaagatccattggattattatatactatgcaaatatag

SEQ ID NO: 7618 - DNA, 825 bp, Methanobrevibacter gottschalkii
  source 1..825: mol_type = genomic DNA
atgacaagtataacagattgtgttgttgaagggttaaaatatcctttcaatgatttaaaaaaagtattaagctttggtgtattgtttgcattgattaatttaatatcattggatattactactaaatttattgatgcagtaataaaatattctaaattatatccttctgcaagtaatgtgttccatttatcacaattgcctgccaatgatatttatatgataattgctttgctgattattagttttataattgtattgtttataaatggatatgaatggaatattgttagattttcaattgataaaaaggaggatcttccggaatttagtaatgtattaaaaatgtttgtcaacggagtaaaatatttccttgtcaatgttgcatacaatattattccgattgtacttttaataattggattagcattatttaatgaatcatacagtccaattattatattgatttcagtattattgttcttaattgcttattttatcttaattatggcattaaataatatggttgcacatgatagtattaaaaaagcatttgatttaagggaaataactaagaacatttcaaatctcggatggggaaaatatataggaattatagtatttactttaattgtatatcttgttataatggttgctgtaggagttatcttattttttataacagtattcatcatatcagcaattactgatcagtccatgattatatcaatttttttagcaataattgagggattattcatacttccttatgttgaaatattcttcagcagagtatttggatccatttatagagaatcaattaaatga

SEQ ID NO: 7619 - DNA, 633 bp, Methanobrevibacter gottschalkii
  source 1..633: mol_type = genomic DNA
atggatgtttttcaacatcctatttttttattaggtgaacttatgaatattaatgttgaattattttatcttttcaatcatgcatttcaaaatccattttttgattatataatgccggttttcactcacttcggaggatttaaatttttaatattggtattgatagctattgtgttatatgctcatttaagaaataagagaacacttagaaaaatcatttttttaacattaatcgctttgttattttcagatggtattgcttttgtcttaaaacatttaattcatgaaccaagaccttttttaagtttagataatgtacatttattaattgctgaagatgatcctctttcatttccttcaggccatactacttccacaattgcaatagtcacatttcttgtatttaatatgaaagaattagctaaaaaacattataaaatcataaatgtttgtttaataatttttgcaatattaattccattttcaagaatgtatattggagttcattatcccggtgatgtgttagctggtgcagcaattggaattgttggtgcagtaattgttaatcactttaaatgtgaaattttaaatagaattgatatattaaataaaattaaggagtctatatcatga

SEQ ID NO: 7620 - DNA, 276 bp, Methanobrevibacter gottschalkii
  source 1..276: mol_type = genomic DNA
atgaataattttgaaaatcagaaattttgccaatcctgtgcaatgcctcttgaaagtagtgatttttttggaactaatgcagatggaagtaaaaatgaagactattgtatttactgttttaaagacggtgaattcacatcagacatgtcaatggatgaaatgatgaacttctgtattgataaaatgactgaagtccatccagacattgataaacaacaagcgactgcaatgatgggtgaaatatttcctaaattaaaaagatgggcggatgattaa

SEQ ID NO: 7621 - DNA, 1446 bp, Methanobrevibacter gottschalkii
  source 1..1446: mol_type = genomic DNA
atgtgttcaatagttggattgcaaggtaatgttaaagcagaagatattcttaaaatgttaaaggtctctaaaagtaggggtcctgattcatcaggcatttatctggataagctttataaaaatattaatctagatgaatttgaagatgataatacatatccaattgcttttggccataatttactttctatttatgatttgaataatagaatatcaaaattacaaccagtaactgatgataatcttgttttattgttcaatggtgagatttataattttaaaacaattacaaacttactttctaaagttggcgttgaaaaagaaattttgtctgatgcagaagctttactttatttaattgatttttacaataaaggagatttagttaaagctattcaaaatactaccagattattcgatggggactatgcatttgccgtatttgatggtgaaaacttggctcttgtacgtgatcctctaggagttaaaccattattttatggtgaaaatgacaaattaaaaggattcgcatcatcaaaacaatcattaaaagaagtaggaatcactgatattaatacattaaaaccagaacatatactttttaatggtcaggatatatctccagctcaagcagttcacgaaaaagtatttgagggggatgtagctaaaatagagaaaatgttaagattaagtgttcttaaaagagttgaagatataaatgagattggtgtaatcttttcaggtggtcttgacagttcttatttggcattattattaaaagaaatatctgaaaatgttcctttaaaaatcaaactttatgctgttggggtaaaaggttcgaaggatgttgaagcagcagtatatgcttctaaattcttaaatttggatttggaaatctgtgaagtaacagaaaaactaattcttgaagcactgccaagtgtagttaaagctatcggtgacgataatctaatgaaagttggtgttggacttacaacttactttgcaacaaaaatggttgcctgtgatggtgtaaaagttgctgtttcaggtcaaggagctgatgagctatttggagggtataaaagatacttgcagagttttgttgatggaaccttaaactacgatttaagggaagatatgtcaaatatgtatcatgtaaatcttgaaagggatgatgcgtgttccatgcttaacggtgttgaattaagattaccgtttttagataaaactcttgttgaattagtattgaatattcctgacaataaaaagattgtttcaatgcatgacgatatgagaaaaagtatcttaagaaaattagcttttgaaggaggccttgattatgaaattgcatacagacctaaaaaagctgcccaatatggaactggcattgacaaaatattaagaaaaaagataataaaagatatggatatttctcaatttttataa

SEQ ID NO: 7622 - DNA, 216 bp, Methanobrevibacter gottschalkii
  source 1..216: mol_type = genomic DNA
atgacaatcgaaaaagatgcagaagatattatagaaaaattctcaaaaattttagaagatattccagattcagatgaaacctggtatattacagataatttaaatttaacacgtgatgataaatctcaagaaaaaaatcctgagaaaattttaagaaatgctagaattgataaagaaggaaatttaattgttaaaaaagcagattggactaattaa

SEQ ID NO: 7623 - DNA, 486 bp, Methanobrevibacter gottschalkii
  source 1..486: mol_type = genomic DNA
atgaggataaatttagttctcgaacttttagatgctccggggcaattagttaaagcattagaacctattagtacttatggtgctaatcttgtaactattatccataaaagggactataaaaatgataatggtatggttccagttcaacttacgattgaaggagaacgtaatgatcttaaaaatgttgtagataagtatgaagagttaggattcactattattgaaatggatggtgttgttaaaaaagaaaaaattactacaattctttttggtcatattgttgatcaagatttaagggatactatggataaaattaatcaaattgatggtgttattattgttgcatttgatattaaactaaatggtgaagaaaaatccacagccttaattaatatcgaagccgatgttggtttaaaacaaaatgtttttgatagaattgcagaaatagcagaagagaaagagttacttgtgattaatgaggtttaa

SEQ ID NO: 7624 - DNA, 1020 bp, Methanobrevibacter gottschalkii
  source 1..1020: mol_type = genomic DNA
atggatgaatgtaaagtcattatcatgggatttggttcagtaggtcaaggtgtggctaaggcaatttccatgaaaaaagatttaattaaagataaaactggagtggacataaaagttgttgctgcagctgattcatcttcatctgcaatctcacaagaaggattagatgaagaattacttgtaaaaacaaaaaaggaagaaggtaaattatcagcatatcctgaatttgggtctgataagaatggtgcagatattttagacgctgttgaatacgattgtcttatcgaagcaactcctactaatatcgtggatgcagaacctgcactttcactaacattcaaagcatttgaacagggaaaagatgtagtaacatcaaataaaggacatttggctcttaaatttagggaagttgttgaagcagctgaaaaagcgggtgtagagtttaaatatgaagctactgttggcgggtcaatgccgattattaattttacaaaagaaacattggcatcatgtgaaattaaatcaattaaaggtattttgaatggtactaccaattatatattatcaagaatgacctccgaaggttcagaatatgaagttattcttaaagagtctcaagaattaggaatagctgaaacagacccaacacaagatgttgaaggtattgatgctgcatgcaaaactgtaattcttgctaattctcttttaggaattgatgcaacttacagtgatgttaaagtcgaaggtatttcaaaaattaactcacaagctattgaacttgcaaaaaaagacgattatttaattaagttaatagctgaagtatctcctgataatttacaggtatccccacgtttagttaaaagaggaagttcctatgatgtaagtggaactttgaacatggctacaattaaaactgatttagctaatgaagtatctgtaattggacttggagcaggatcacttgaaactgcttctgcaatgttgactgatttaattagtattttaaaaaataaaatctaa

SEQ ID NO: 7625 - DNA, 1212 bp, Methanobrevibacter gottschalkii
  source 1..1212: mol_type = genomic DNA
atgaaatacgtaatttttattccagacggttctagtgatcttccactagatgaaattaatggtcaaactcccttaaaagtagctaacactccaaacattgataaattagctaaagcgggttatggcggattaaccaataatgttcctgaaggttatactccaggttcagatgtagctaacatgagcatcttcggatacaatcctgcagattattatactggtagggggcctcttgaagcaggcagtgttggaattgaaaccactccatgtgatgtgatatttagatgcaacactatttttgaaaaaaatggtaaaatggaagattttaatgcaggccatatcacaacagaagaagcagatgtattgatgaaaggattaaacagatatttcaatgataaatatcctggatttaaaggtaaattttacactggaattagttacagacatttgtttgtatattcctgtgataatgttgaagatgccgaaattttagcaaacttaaaaacaatgcctcctcatgatatttcaggtgaaaatctagttgataatttatttggagactgtgaacttgctcgtgaaatccaaaacatcatgtttgaatccaaagaattcttaaaaacacaggaaattaatcaaaaaagagagattccagcaaatatggtatggttgtggggtcagggtgtaactccaaaactacttaactttaaagaaaaatatggtcttgatgcggctgtaattactggtgtggacttacttaaaggcattggagtatttgcaggaatggaaattattgatgttcctggagctactggatttttcgatactgattatgaggcaaagggaaaatatggaattgaagctttaaaaagaaatgatgtgttatttattcatatagaagcacctgatgaagcaggtcatgctcagttacttgatgaaaaagtaaaggcgattgaacaaattgataaatttattgtcggacctatcttggatagtttagagggtcaagattacagagcagcaattttaccggatcatccaactcctattgatattggaacacatactcgtgatgatgttccgattattatgtacgcatcagatatggagggggatgattgtgttgcatttgatgaggtatctgttttaaatggaagtataactaaaaaagaaggttacaaattaatgcaaagattgattgatggagatttttaa

SEQ ID NO: 7626 - DNA, 636 bp, Methanobrevibacter gottschalkii
  source 1..636: mol_type = genomic DNA
atgaaagtattactagtaaacgggagcccaaacagaaaaggctgcacatacacagcattatcagaagttgcaaatgtcttaaatgaacatgatattgaaactgagattttttggattaaaacaaaaccaataacaggttgtactgcatgtggaacttgtgcaactattggaaaatgtacttatgatgcggatagtgttaatgaatttgttgaaaaagcatatgaagctgatgcgtttgtcttcggttcaccagtttattatgcaagtgcaaatggatcaatggtttcatttttggacagagcattctactctaattctcatggaaaaggggcggaagcatttaaacacaaacccggtgcagttatatgttctgcaagaaggggtggaacaactgcaacttatgatcaactgattaaatatttaggaatttcccaaatgcctattatctcctcattctattggaatatggttcatgggaacactcctgaagaagtacttcaggatgaagaaggattggggactatgagacaattggcacataatatggcatttttcttgcagtgtcttgaagcaggtgctgaaaaaggtctaaaagtaactgaagaaccaaaacctcgaacaaattttataagataa

SEQ ID NO: 7627 - DNA, 1356 bp, Methanobrevibacter gottschalkii
  source 1..1356: mol_type = genomic DNA
atgaacatatttaaaactcctgaaggttacatatattcaaataaagcattgcttgctttattcattcctcttttaatagaatatgcattggaattttttgtaggatttgcagattctataatggttgcatcattaggtgaagctgcaatttcaggagtttctttagttgattttttaattcaacttcttattttttctttttcagctcttgcaactggtggagctgttgttgccggacaatacttgggtaataagcaaatagataaagctcaggattctgctactcaattagtttggttttcaacaatcttatcagtcatattaatgattattgttattattttaaggcagtatttaatcgggattttatttggtcaaattgaagttgatgtttggcaaaatgccgataaatatttatatattgttgcattatctattccttttttagctatttacaatgcaggtgcatcaatttttagaacaactaacaatgcatccctgccaatgaaaatactattcatttgtgatatattaaatattgtaggtaatgcgatttgtatttattatttaggatgggatgttcatggtgttgcaatacctacggtaatatcaagactgttatccgcaattctaatattgcactttgttgttaatgaagattataaactgcacattaaaagaacattaattcataaatttgactttaaaatacttagaaaggtcttgcaggttggtattccttatggtattgaaaatgggttatttcagcttggaagagtgttggttttaagtattgtttcaacatttggaacaatggcaatagctgcaaactcagtaggttatgcagtcgggatattttcagtattacctggttttgcaattaatttaggtttaacagctataatttcaagatgcgttggagctaatgattatgaacaggtccgatattataataaaaagtgtttaattattgtatttgtctcacatattgtaatcaatttaattatttttgcagcattaccgctaattttgaatatttataatttatcagctaagactgcagccatgacaagtgaaatgattatttggcatggcatattcggtattataatttggccactttctttcacattgcctgctacatttagaggtgctggcgattcaaaatcagtgatgtatattagtttaattgtaatgtttacctgtagaattgctctttcatatgtaattgcggattttatgggtgttggtgtattcgggacatggattgcaatgtttattgattggtatgtgagggcagcaatttatatttacaggtacttttcaaataaatggacagaatacagggtgatttaa

SEQ ID NO: 7628 - DNA, 408 bp, Methanobrevibacter gottschalkii
  source 1..408: mol_type = genomic DNA
atggatggaattgtatataaaaatacacataattttagtaaaagagaactcgaagagttatttttatctctggaatggtcagcaggtcattttccagataaactgataattgcaatgaaaaacttcaaaacagtcttttcagcatgggatggtgaagaccttgttggtttggcatgtgctatggatgacggtataatgaatgcatatgttcattatttgcttgtaaaaccggaatatcagttaaaaggaattggaaaagaattgctgaatagaattacaactcattataaagattacatgcgtatagttgtagttgcatatagtgatgaaattaagttttatgaatattgcggatttgaaaaagcagatgatgcaagtccaatgtttataactaaactatgggcttag

SEQ ID NO: 7629 - DNA, 774 bp, Methanobrevibacter gottschalkii
  source 1..774: mol_type = genomic DNA
atggtattattcagaggagatatcaagtgtaaaagcttgcaaagacgtacatcaattagtgtgatattgcctgctgataatattcacttcttaagtgatacagaagagatagttcctcaaccctataaaacattatatctgctccatggactgtatggtagtgatgatatatttcttgcaaatacttctattcaaaaatttgcagaagatcatggaatagctattgtaattccatgtggggaaaatagtttttatttggataataaaaaagctcatgcatattatggtgaatatgttggtcaggaacttttagatattacaagaaatattttcccattatctgataatagggaagatacatttattgcaggtttttcaatggggggttatggggctattagaaatggtcttaagtactcaaaaaacttctcaaaaattggtatgatttcagcagcattaataactgatgaaattgttgattatacagatgatgataatgtgttatggtcaaattcattttataaatcatgttttggtgatttggataaaattaaaaattcggataaagatcccaaatatttaattgaaaatactgccgatattccagatattttcatggcatgtggtgttgatgactttttatatgataaaaatgttgaattttatgagtttttagagtcaaaagatattaatgctgaatttatgcagtctccgggtgaacacacttgggatttttgcgataggtatgttaaagaatttattaaaaggttataa

SEQ ID NO: 7630 - DNA, 444 bp, Methanobrevibacter gottschalkii
  source 1..444: mol_type = genomic DNA
atgaaatgtcctgaatgtggtaatgaactggatgaggataattactgtagtgaatgtatggaatttatagataatcccattggaggcaggctttgtccatattgtggtgaggaattggatgaagataattattgtaatagttgcatgcagtattattatgaagaagaaaatacacaagaacttgaagaaatagattatgattctatggtaaataatggtgattcaatttgtttaaactgtactttttggtctgtaagtccttatgggtcggctcatggaatgatttgtagaaaaggtcagatatctgatggtcctggagattcatgcgggttatttgtccaagaatataattttgcaaactatggtgatgcaggtcaatatcaatttaatgaaacaaatcgtgcaatttcaaataaattatatcattggaaaaatagcgggtaa

SEQ ID NO: 7631 - DNA, 1617 bp, Methanobrevibacter gottschalkii
  source 1..1617: mol_type = genomic DNA
atggagaggatttttctgacaaagtatattattataactggtggggtagttagttccataggtaagggtattacatccgcatctatgggaaggattttaagatcttatggtttaaacgtttcagctattaaaatagatccgtatttaaactgggattctggaacactcaacccatatcagcatggtgaagtatttgtaactagtgatggtatggaaactgatttggatctcggtcactacgaaagatttttggatgttgaacttaaaggattagctaatattactactggtaaagtttacgaatcagtcattgctaaagaaagagaaggtggatatttaggtgaatgtgtacaagttattccacatattactaatcgtattaaagaaatgattagggaaaactctgaaagcgctgattatgatgttgttttagttgaactcggtggtactgtcggagatattgagagccaacctttccttgaagcattaagacaactcagaaatgaggaaggtcgtgaaaatgttatgtttgtccatgttacatttattccctacctggatgcagctggagaattcaaaacaaaaccaactcagcactctacaaaagaattaagaagtgttggaattaaccctgatgttattgtatgcaggtcacaaaaaccaattgatgatggtttaagaggaaaaatcgctcatttctgtgatgttgactttgaagctgttgtaaatactcctgatgctgatacaatttatgaagttcctttagtcttggaagaacacagcattggtgaattaatcgttaaaagaataggattaaatattaaacctgattcttctaaattaaatgaatggagggaagtggttaaatctttaaaaattaaagaacctaaagttaatattggtattataggtaaatatgtggagcttgaagattcatatattagtatcagagaatcactactccatgcagcggcaagcattggtgttaaagctaatattatatatttaagctctgatgttgaagaattggatcaggatgccatgtctgaactggatggtattctaattcctggaggattcggtgaacgtggttttgaaggtaaattggatgcaattgaatatgcaattgaaaataatgtgcctttgtttggaatttgccttggaatgcaatctatggtgactcaatttgcaaggagaaatggtttttctggtgcaaatagttccgaatttgatgatgacttaaaattcccagttattgatatgatggaagagcaaaagaaaatcaaaaacatgggcggaacaatgcgtttaggatcttatggttgtaaaataattgaaggtaccaaaacttatgaagcttatggtgaaagtgatatcgaggaacgtcacagacacaggtatgaatttaataatgattatagggatggtttacaagaaaaaggtttaattatttctggaacaagtcctgatgactttttagttgaaattattgagttgccaaatcatccatgggctgttggttgccaattccatccggaatttaaatcaagaccaaataggcctcatccattatttaaagcatttttagaagctattcatgattattctaaaaattaa

SEQ ID NO: 7632 - DNA, 867 bp, Methanobrevibacter gottschalkii
  source 1..867: mol_type = genomic DNA
atgattattactactatattcctgattcaaattattataacagttttattttcaataatggctgcaatttatgatataaaaagtaatattgttccaaacaaattaaattattctttgatattttttggcttattttcaaatttaattttatcaataatttcaaataatattaaatatattttagcttcttttatttcaatgtttattacatatgctgtaacttatatgttatggaaattaaatatttggggaggaggagatgtaaagttatttacagcaattgcaacagtaataccatctggtcttaatatcaactttttgaatatttttccacaattgtccgtatatccattttcatttagtgttgtaattaatagtattttagtatcatttccatttttggtaatctttgtcactcatttaatatttaaaaataaagtgtttatgggcaatattgattttctagtcaatatctttaacattgaaagtctgaaatatataaaaaattcaactttaaacaaattaattcctattaaggatttaaaggaaggaatgatagtcaatgattattattttaataatgagcacattattgaacttttaagtgagatgggaggtaatttggagatttataaatcaaaccgcaatgatttcaaatattattttaaatcacaaagtgcaggcggaataacaaatgaggaagtatggcagcttaaaattatgaattcacaagatataatttccgataatatatcaattaaattatcatttccatttgctccagcaatatttttaggattggtaatagctatagtgtatggggatatgatgatgttgatcattaaaaacatattcttggtgatatga

SEQ ID NO: 7633 - DNA, 429 bp, Methanobrevibacter gottschalkii
  source 1..429: mol_type = genomic DNA
atggttaaagaaagtggtgctcagatttcattagagtatatgttaattttttcaatatcactggttattttaattgtttttacattacctctagctgaaaattcaattagaaatactcttgatgtttccgattctttaaatgtgaaatcagatttatcaaaaatagctaatgcaattaagcaagtttatggtgaaggtcaaggatcaagacaaacaattaaaattgaaagtaacaagaaacttaaaattaatatagcaaacagtcatgtttcaacaagttttaaacttaaaagtaattccaaaaaggatataaaagagcatgtaatgtcaaatattgggaaaacaaccatctcattaaataaaggtgaaaatgtgataattgtggaatggcctgttaattctaaaaatatgttaatttatacagtataa

SEQ ID NO: 7634 - DNA, 804 bp, Methanobrevibacter gottschalkii
  source 1..804: mol_type = genomic DNA
atggatataataactacaattatttacctcgttttgtttatagtcatgatggtatttgtattttctattggaatgttaagacaatacatgcctaaacgcgaggtaatattagtaatccttgtagcttttttaattggttcaattggaggggcatttttccttgatccgatttatgatgaattaccaaatgttgcaagtgttattgaaaagaatatgccaaataatgaagaaacattatatttggatttatcatcttcaattaatattgatgatttgaaaaataatttatctgcaactgatggatttatatcatttgatgaaaaatcggttaatattccaatgtggacatttaatgagagagaacataattactttgatgaaatagttggaaatattgattcgaattataaagcttataatataagtacatctgagattcaaataactcttgctgataattatacttctgctcaagctttaaaatctttttcagattggtataaattggtttatggtgaaactatttcttatgcgcaagttcatgcagtattggttgttgattcatcatctcttgatacgtttgagcatattttacttcaaaaaggtattgttgcttcaaaaatagaagggccgattcaggacacagtaaacaatacaaattcatcaatgttaactaacatagaatttacattggtctgtggtggtattggtgttgttgtagcatttatgggtatatatgttgattctgttgttccagcatataggaaatttagaaaattcttaagggaaaaacgcagacggtaa

SEQ ID NO: 7635 - DNA, 690 bp, Methanobrevibacter gottschalkii
  source 1..690: mol_type = genomic DNA
atgaatgttgcagttttattttcaggtggaaaagatagtacgatggcattatataatgctttagattcgaaagaagatgttaaatatcttctttctatgaaatccaggaatgatgaatcatatatgtttcatgttcctaatatccatttaactgatttgttgtcacaagctttcgatattccaataatgtctgttgaaactgatgggattaaagaagatgaacttaaagatttaaagcaggcattcgaaaatctcaaagatttaggtgttgaagctatatatactggtgcactctattcacaatatcaaaaatcaagaattgaacagttatgtgatgaagttggacttgttgctatttctccttattggcatgtcgatgaattggagtatatgagaaaaatagtgtctttaggctttaaaattataataagtggagttgcagcttggggtttagatgaatcatggcttggaagaataatcgatgatgaaaccattgatgaattaatggaaattcatgaaaaatatcatgttgatttagcttttgagggtggtgaagctgaaacattagctattgatggtcctatttttaaaaaaagaattaaaatcttaaaatataaaaaagaatggcataatgacagtggtgtttacattattgaagatgcagttttagaggaaaaaatgaatttataa

SEQ ID NO: 7636 - DNA, 540 bp, Methanobrevibacter gottschalkii
  source 1..540: mol_type = genomic DNA
atgcaagtaatgggaatatcaggcctaccaggatctggaaaaagtttagtttctaaaattgcaattgaaagaggagcaaaaattgtaagtatgggagatatcatacgtgaagaatctaaaaaaagaggagaaagcactaaagaaactgcccaaaatttaagagcagaatttggacagtacattgtttctgaactaactattaaaaaaattaaaaaacttcaagaagaaggatttgaaagtaaaattattgttgaaggtattagaagtcctcatgaagttaacatgtttaaaaaaaactttgaaaattttattattttatcaatttttgcaaatccgactttaagatttgaaagattaaaaaatagaatgagagaagacgattccactgattatgttgaatttaaagcaagagaccaaatggaattagattttggaattggtgatgtaatctcactttctgataaaataatcattaatgaaacagatttggaaagctatacaaacagcataaataaatttttagatgaaattgaattataa

SEQ ID NO: 7637 - DNA, 738 bp, Methanobrevibacter gottschalkii
  source 1..738: mol_type = genomic DNA
atgatacccaaatcacaccctcgatacgaatcattacttttaagagataaaatggttaaagcttccaaagagggttatttagcggattcagctttaattgcacatggtagaggcgaagcttttgattatctgattggtgagaaaacaacatatcctgcaaaaagagcaatgtatgttgctgttgcagcactgcttttatcaaacaaccctgtgatttcagttaatggaaatgcaaccgcattagctattgatgaaataattgaatttgccaatgccattaatgctaaaattgaaattaatttattctacaaaaccaacgaaagagttaaaataattaccaaattatatgaagatcacggttacagaaacatacttggtggtcttgatgatgatattgaatacatcaatgatatagaaaataatagggctagtgcaagtaaaaatggaatttacacagcagatacaatattaattcctcttgaagatggagatagagcagaaatattgaaaaaaagtggtaaaaatattctaacaattgatttgaacccactttctagaacatccaaaatgtctgatgtatcaattatggacaatattgttcgtgcaataccttttatgacacaaatagctaatgatttgaaaactcaggataaaaaaatactagttgaacttgttaatgaatttgacaatgaagaaaatctaaaagaatctttagaacaaattaaagtaaaagagtga

SEQ ID NO: 7638 - DNA, 384 bp, Methanobrevibacter gottschalkii
  source 1..384: mol_type = genomic DNA
atgaaaatcaaattagcaataatatttggagtactaatatggattttaacttttgtgctttcagccacattcaacccaatttttacaacaaatgttcgtaatgtcaacatagtggtgcctattattacaataattgtaactggattttttggaatactatatatcagagctattgatactaatgaaattgttgaaggctttttggttggaataatctttgttataatagatattattttagattatatatttatcatatcccttcaaaagaatttatacatcattggaaattatacattgcatgttttttcaatgattacaattactttattaattacaacatttttaggatatttagctcaaatgactattgatttaaaataa

SEQ ID NO: 7639 - DNA, 1035 bp, Methanobrevibacter gottschalkii
  source 1..1035: mol_type = genomic DNA
atgaatgcttatattgaacatgaaaaatatttgaaaaatacattgcttggattaaataattcatcagattccaaacaaaaagaaaagagtttgtctagtcattattttaaagatttaaaagaaaaattgttaatacaatatgagaataaatcattaaaagatgtaatggactgcaatatatgtaacacatcttttggggatgcattgaaaataactacaaaagaaaaaattgattttaatatttatgataataattttaaaaatcaaattaatcacaatctcaaattacttccgaaaattggccttaaaactgaagaaaatcttaaaaataagggatacatgacaattgaatctcttaaaaatcatgacaaatattgcgataccgcatcaaaatttctaaataaaattgatgacatgtcttttcatgaaataatggatttattggataacaataggtattctaaaaagtgtagggataatttacttaaatgtataagtttaactgatgttgaaaacttcaaattcatggatattgaaactaaaggactttcaaatgttccaataattttaataggtgttgctgaaatcaaaaaatgtaaaatcatatcttcacaatatttcttaagggattacactgaagaacagaatattattgaagcatatttgaatcatttggatgaagattctattcatgtaacattcaatggaaaaagtttcgatgttccatttatacggaatagatgtatttacaatagaattaaccataatctggagttgcctcatttggatttaatgtattttgcaaagaatttatggaaaggttcacttccaaatttcaaacttcaaactattgaagaggaaatttttggaataactcgttatagggatgttcccggccaatatattccaggatattatgacacttatttatccaagaaaaatatagggccagttgtaccaataatccaacacaactgtcaagatattatttcgcttgcaagttttcttgagaaaatgtatgaggatgtaaattag

SEQ ID NO: 7640 - DNA, 1503 bp, Methanobrevibacter gottschalkii
  source 1..1503: mol_type = genomic DNA
atgggtttatttgatagatttaaaaaaagcgataaaaaagaaaagaaattaattccagataatccggagattgaagatgaagagctacgtttaaaagaaatagctattaatcataaagataggcttgaaagggcgcaagcagcagataaaatttcaaatgaatttcttgcactggacatggctaagaccgtgaaagatagggctattagattaattgctgcaaataaattaaaagatgaagatttattaatggatgctgctttaaactcacagtttttcgatgtaagaagctttgcatgggaaagacttggggagaacaataaatccatagctgaaattgtaataaatactaagaaaaattctcatgtagatgaaatatttaataaaattgttgatgaagaaactcttaaatggattgcaattgaagcagttgataaaagatatagaacacgtgctctaaataaaattgatgatgccgggatattatatgatttagtttttaaatcaaatgacagttctattaaaaaagcagctattttaaaagattcttttgtaagtgaggatattcttaaaaaagtcgccattgaagataaggatgaaggagtaaaaaaaatcgctattggtaaaattaaaaatgaggattcacttgtattaatagctcaaaatgaagataatgcgaaggttagatcattcatttttgataaaattaacaatccggaaaatttaaagcatattattttagattctaaaaaggcagatgtcaaaacagaattaattaacaagataactgactctgaccttttagccaaaatcgcacttgaagataatgataatattgttagaagtgaagctgttaaaaaaataactgacgaagagatattaattaaaataatcagcacggaaaaagatagatttgttcgccagattgctgtaaaaaatataaacaatcctaaagaattaattaaaatagctttaaatgatgatgatcagtttgtaagaaatcatgcaatttcaaattctgctctggccgatgaaaaagattttaaatatttggccattaattcaatacatgaagatgtggcatcggaagcattaaatcatattaatgatgaaaatgatttcattgatatattaaaaaatgctaaactcacatcaattagaaaaaatacactagataacatcagtgatttagaaacattaattagaattattctttcaaacgaggatgaagaattttctcttaaagctttagataaaatcaaagtggaaaaatgcctgattaaaatatatgaacagaatatttcagaaaatatctcaatcagagctatttcattaataagaaatcaaaaatatttgggtgaagtagctagaaacgattcttcttggaaagttcgtgaagcggctactaaaaaagtggtaagtagaaaagttttaaaagaaatctcaaataatgatgaaaatgagtatgtgagaaatattgctaaaaagaaattgaaattataa

SEQ ID NO: 7641 - DNA, 759 bp, Methanobrevibacter gottschalkii
  source 1..759: mol_type = genomic DNA
atgaaaaaaataactagaatattttttagcccatctgggactactaaaaaaatagtagataaaatagctactaacttcaaatacgaaaaagagatttgtgatttattacattttaatgacactaaagaatttacagacagtgatattgttattgttggaatgcctgttttttctggaagaatcccaaaaaccgctcgcaatagactattgaaattaacaggaaataacacaaaagcaattgctgttgcaaactatggaaatgctaaagtaggcgatgcattaattgaattagtagatattcttaaagaaaataactttgatgttatcgcagcaatttccaccgttagccaccactccatttttaatggtgttgccgttggaagaccagatactgcagatatggaaaaaatcaatgaatttggacaaaaatgtgtagaaaaattggaatctggtgaatccctcaactcagaagttcctggaaacagaccatatgccgattacaaacaattgccttttatcgtaagctgtgatcagaataaatgcatattctgttatgattgtgttactttctgtcctgaaaatgcaatacctgatgaggatcctgccgatgttgaccttgacatatgttcaagatgcactgcatgcatccatatatgtcaagaagatgctagaagttttaccggagaagcatttgaaactaaaaaacctgtttttgaaagtgaaaatagtgaaagaaaagaagttgaactttatttataa

SEQ ID NO: 7642 - DNA, 1032 bp, Methanobrevibacter gottschalkii
  source 1..1032: mol_type = genomic DNA
atgatggaattaatgagagagctatctttaacaccaggcgtttctggttccgaagaaaaaatagctgaaattattacacgtgaattaaaagatgtagctgataaaattgaaactgacagtatgggaaacattattgcaaccaaaaaaggtgaaaaaaaggctcctactgtaatgctagcatctcacatggatgagattggtttaatggtaaggtacattgatgatgatggttttattaaattctcaaacattggtggaattaatgatcagatgttaatgaaccagactgtaactgttcattcttccgttggagaaccgattgtaggagtcattggttcaaaaccacctcacgtaacaactgctgaagaaaaaaacaaagttgttaaatctaccgacatgtttattgatattggtgcaaaagacaaagaagaagcagagaaaatggttagaattggagacaaaatgacattcaattctttatttgctgaatatccaaataatttaatcatgggtaaagcattagacaatcgtgtaggttgctatgtaatgatggaagttttaaaaagagtagatactagagctactgtttatggtgtaggtaccgttcaggaagaagtaggtcttaagggagctaaaacttccgcatttagattaaaccctgatcttgctattgcacttgatgtaacattatctggtgatcatcctggaattaaaccggaggaggcgcctgtagtgatgggtaaaggtccggctattatattggcggatgcaagtggaaggggtattttgactcaacagtctgtaaaagatttgctcattaatgctggagatgaaaatgaaattccatatcagttagaagtaagtgatggcggcactactgatggaactgcaatacacttaactcgtgaaggaattccaacaggtgttttatctgttcctactcgttatatacacactccggtaagtgtatgtagtatggatgatgttgaagcaactattcaattaattacagaagccataaataatttataa

SEQ ID NO: 7643 - DNA, 486 bp, Methanobrevibacter gottschalkii
  source 1..486: mol_type = genomic DNA
atgaatatcgaattagaatcaattggtacaatacatactgaatttaaagaaattgaaggtatgccaattcagcctacaggagcaaaaggaattaaaggaaccattgaaattaaagataaatttgttgatggactaaaagatttaaaagatttttcacacattcatttaatttatttacttcacaaagttgaaggatacaaacttgaagtaaaaccgtttatggatacaaaaactcatggtgtttttgcaacaagatctccaaaaaggccaaatcgtattggaatgagtgttgttaaagtaaataaagttgaaggaaacaaagtacatgttgaaaatgtagatattcttaatggaactccacttttagatattaaaccatatgttccacaattatacgaagatacaattgatgaactaaaaataggatggtttgaatcaaaacaccaaaaagcaaaatcgcaaaaatcagatgacagatttaaataa

SEQ ID NO: 7644 - DNA, 207 bp, Methanobrevibacter gottschalkii
  source 1..207: mol_type = genomic DNA
atgcaacttagtgcaagaaatcaattaaatggaaaagtaactggcgtggagaaaggtgctgtaatggctaacatcaaaatagaagtaagtgaacctagcactattactgcgattattaccaaagaatctgcagaaaaattaggtttagctgaaggtgatgatgtaactgccatcatcaaatctactgaagttataattggaaaataa

SEQ ID NO: 7645 - DNA, 438 bp, Methanobrevibacter gottschalkii
  source 1..438: mol_type = genomic DNA
atggtcgtaagagtcattgaatcaaaagaagataaaattactacagctgatctaatcgatgaattgaaaaaaaattcaaaagttgattactgcggagctatttttagttttgaaggttttgtaagaggaaaagaagaaaatatgaacttacaaaagttaattttaactacccctgataaagaaaaaacaaagtccgaaattgaaaaaatcgttgaaaatgccaaaatcaaatacaatgttgctgaaatctcagtagtacactacattggtgaattttacactggcgatttattattcttagttgctgttttaggttatcatagagatgaaagttataaagctttaaaagaagtaatagaaaccgtgaaattcgatgttgattttaaaaaagaagaaatttctgatgaaggaacaaaagtcattctagctggaggataa

SEQ ID NO: 7646 - DNA, 534 bp, Methanobrevibacter gottschalkii
  source 1..534: mol_type = genomic DNA
atgaataaagttcgtggaatttttattggaagaatgcaacctgttcataatggacatatgcagattattgataaaattttagaagaagtggatgaaatcataataggcataggcagtgctcaattaagccatagcttaaaaaatccattcaccgctggtgaacgtgttgttatgcttaatcaggcattagctgaaagaggtgttgatccgtcaagatactacataatacctatgcaagacattaattttaatgctctttgggtttcacatgttaaaatgttaactccaccattttcaattatttattctggaaatcaattagttaaacaattattttctgaagaaggctttgaagtcagacaacctcccctctatgatagactacgtttatctggaacagaagtgagaactagaatgattgaaggcggtaattgggaggaattagtacctaatgctactattaatcttatcaacgaaattaatggtgatgaaagaataaaaaatttatctataagagaaattagtgaaatataa

SEQ ID NO: 7647 - DNA, 711 bp, Methanobrevibacter gottschalkii
  source 1..711: mol_type = genomic DNA
atgaataaaaaaatgcaataccaaatattacttattgttctaatagctattgtaatatttaatttatcaattatcgttagttccatgatgaacactccagataatgtttataatattacaaatgtagggcacaatgctaatggtactgtttataaaattgaagccggtaatatgtcctctaatgaaaccgttggacttattttaggagtccatccaagagaacatgaaattcacgaagcggtgaataatacaatttataatattacttccgaaaatggaactaataatcttactaaaaaatatgtaatatattatattaaaacaaaagataatttaacttcccgtgaagatacaaggcctgctggtgaagaattagctaacaaattcattgttccaaatattgttaaggataagccatttattgtattggatgttcatgaaataaacccagattatgaatattcaaattttatatttagtttatccaacagaaccaacacagttgactcctatatttcacatattgctaatgatgttaatttagtggattatcaatttagtgaaggaacaagccctgaaaaagttacaaaaccgattgcaagtaaaggagttactacattacttatggaaacttcaattactgatgcattaatggaaaaacaaaaaactgcagacaatttaattaaaagtttagatagtttagaaccgtaa

SEQ ID NO: 7648 - DNA, 675 bp, Methanobrevibacter gottschalkii
  source 1..675: mol_type = genomic DNA
atggaaaataaaaatatgattattatttttgcggcagttgctgtggtaattattgcaatcgccggcattttatttgctactggattcattggcggtaatgatgtcgaaactactccatttaaaatgagttttatggaaggtagttttataggtaatgtaagtcttgaaaatgataaagagaaattcatgcattcttatgaggataaagaaaataaaataacttataatatttccactgtggacaactcttcagtattaatggaaatatatcaaattcaaggtttgggtaatcctgaagtaagatcattcaatggcaatgaatggaatatttactttacacaggcagttccaaataataattcaagcactaattcttctaatggggatgatgcaatgaatattattattggagaatcacaaggtaaaaaacaaggttatttgatttatatgattattgatggcaaatctaaaatcaatgccaccggtaaaatgtatggcgaagcatatactaattattttgaacctttacttgaaagtttaactttgaaagaaagtaagaatgttccacatatttatgatgaatttggacttacaaaagaacagtttgattatcagattgatttgatacgtcagtataaatctggaaatacttctgcacttcagggagctcaatag

SEQ ID NO: 7649 - DNA, 531 bp, Methanobrevibacter gottschalkii
  source 1..531: mol_type = genomic DNA
atgagaattacagtttttcacgcaaatgaatgtgatagaaagaaatgcacttccataaaaatggaaaaaatgggtaaatgtagattggtttatgatataaataaaattcctggtggtgcagtagttctaaatccatatgcggagaaagctgtatcttatgaagattataaatatgtacagagaaggggtgttgttggtttggattgttcttggaatgaagtatcccaatctaaaaaattcttttccttgtcaaaatatcacaggtcacttccttttttaatagcaacaaaccctgtaaattatggaaagccatgtatcttatctacagttgaagctattgctgcaacactttatattacacgtttcaaagatgaggcatatgatatgatggatggttttaaatggggtcatacatttttagagctaaatcaggatttgcttgaggcgtatagtgaagtagacactagtgctgaagttgttcgtcttcaaaatgaatttttagaaaattctaaaaaggaagtaaatgattga

SEQ ID NO: 7650 - DNA, 147 bp, Methanobrevibacter gottschalkii
  source 1..147: mol_type = genomic DNA
atggcaagattcgaagaagcagaaaacagaatgttcaatgtaaaaatctgtttaaaatgtaacgctcgtaaccctgctggtgctacaacttgtagaaaatgtggttacaaaggtttaagatacaaagctaaagaaccaagaggatag

SEQ ID NO: 7651 - DNA, 753 bp, Methanobrevibacter gottschalkii
  source 1..753: mol_type = genomic DNA
atgaaagatgttgaaaattatattcgagatatattgaaaagtaggaagatacactttactttaattgaccctgatgaacagacaccagaagaagctttggaaatagccactcaagctattgaaggtggaactgatggtattatgattggaggatctactgttaatggtgatgatgtaaacaatacttgcaaaatattatctgaaaatattgccgttccgattattatttttccgggcaatactagtagtgtaagtgaatatgctgatgctattttttacatgagttatgtaaactcaagagatccatattggattaatggtgctcaagcattagctgccccggcagttaaagcatctggaatggaaatattatcaatgcattacatggttgtttctcctggaggaactgttggctgggttggagatgcaaatttagtacctagaaacaaacctaaaattcctgcagcttatgcaatgtctgcagaattatttgggattaagtttttttatcttgaagcaggttctggtgcagaagaaccagttccaccaaaaatggttggttatgctaaaatggcaggtccaaaaaatattcttgtcgttggcggaggaatccgtgatggcaaagcagcttatatggctgcaaaagccggtggggatgttattgtaacaggtactgttgttgaagaagtagatgatgtgaaaactaaaattcaagaaataaccggagctattttaaaagcttcaatggagtag

SEQ ID NO: 7652 - DNA, 1074 bp, Methanobrevibacter gottschalkii
  source 1..1074: mol_type = genomic DNA
atgttaaattcattatacgaaaaagccatagctaaaagaggatttattcatgatattgattcacaaactgatgttgaatctcaattggagtataaatggtttaatagagatattctagaaattgataatggtttttctattgctgcaggagatggaagtttcaacaaaaagaaatttctaacaactaatttttgtgcagtaggcgctgaatctataatttatgatggtaaaattaagaagatagatgattcagatatttttgatattccgcatgtctcttttttagatgaattgctcagtaattatatggctatttatgaacttaaatgtgcacttagaaccattaaagaatataatgttgattattatatgattgatggatctattttaggagatttacaaaacccatttccaagaggtgctaaattaccctccaaacttaaaaataatttagatgatattctacttaaagaatttgagagaagattaaacataaaaaaatatggattaatatttccagaaattagggattcactaaatcttgttgaatttccaaaaaatgaaaattcaaataaaattgaagaatataatcttcaccttgcttctattgaaaaaataattctattaaaagaaattttacaatttagaaaaaaaatcatttcaatttcaaaaacttcatctgataatgatttatttcattggaatattccagatattgcattcttagataaatttacagaaaagcagggaatttcattaattaaacataaaacagtatataaaaaaacagcatttccatactttaatgatttttttaagagtataacatttacaatcttttatattcgtttacaagataataaaaatgtattgaaagttgaattgccttataaggcatcaaaagaggacgtatttgaattaattaaaaagattaatgcattaacagttcaaggttatccatatttacttaataaagcacataatgatgttgtaattacagataagaatattaaggaattattaaaaatagctaaaatttatgaaacaactaatagggaagtgatgtcatggtag

SEQ ID NO: 7653 - DNA, 1488 bp, Methanobrevibacter gottschalkii
  source 1..1488: mol_type = genomic DNA
atggtagttggaatttgtattggtgaaacttcacttacagaggtaaccttcatttcagataaaatgccaaaagttggcgaatatgttacaattgaatatgatggaaagaaagttttaggaatgattgaaaatttaataaggggaaatgattctttaaatgttgatattaatgatttcaatgcaatacaaaagatttcaagaattggtgctgaagataattatattaagggtagggtaaaaattctcggtgatgttaatgataatttaaaattaccaagaacacctgtacttccaggaacagaaattcatctagctgatggagaaattttagataaaatattcaatgtaaagaatcccattaagttgggctgtcttgtaaatcaaagtgatgttgatgtaaatgttgaagcaaatccaattttatcaagacatttagctattcttgcaatgaccggtgcaggcaaatcaaatactgtagctgttttaatagatcaattattaggttataatgttcctattttcgtttttgatatgcatggcgaatataaagatgcggaatttcccaatggcaatgttaatgtaataatgcctaaaatcaatcctcattatatgaatttctatgaaatcaaaaaattggtaaatattggtgcaaatagttttattcaggaaagacactttagaagagcattcaaacaagctgaaaagaatatttcagatggtatagcacagactaataatttcctacaaataatgtatgatattttagataaagattcacatgttgaaggatcagataaacaaattgttgatgtaatgaataaaattgatgatgcaatggagagatactccaatttattcgataaaaacattggaaatattttatctaatgtcaaaagagggtatgttaatgttttggatttaagtcaagttgatgagtcagttgcaagtgttttagtaagtcacatattaagaaacgcacttaaaagaagtaaagatgcggcacatactggtgataaaaaagatttaattgataattcagtattctttattttagaagaagcacatattttagctccgaataagagagaatccgattctaaaagatggattcaaagagttgcaagagaaggtcgtaaattcggtttaggtttatgtttggtaagtcaatccccaaaaacagttgatcatgatgcattatctcagatgaacaacatgattattttaaggcttgttgaacctgaagatcaaaggcatgttcaatcagctagtgaaagcttatcacaagatttgattaatcagcttccatcattaaacgttggggaagctattgttttaggtttgatgagtaaaataccaacacttgttaaaattgacatgtttaaaggtcgtcgtcatggtgatgatatggatttaatctcttatttcaaagagttaggtgaggattcagattataatgatgaaacagtagatatggggtatgattactaa

SEQ ID NO: 7654 - DNA, 1242 bp, Methanobrevibacter gottschalkii
  source 1..1242: mol_type = genomic DNA
atgaaatttgcacatttagcagatactcatttaggttatcgtcaatttggtttaattgaacgtgaaaaagacttttatgaagtatttgaaaaggttatagataaaataattgaagaaaaagtggattttgtaattcatagtggggatttatttgaaactgcaagaccgtctcccaatgcacttttagttttccaaaaaggtttattaaaattaaaaggtgcaggaattcctatgtatgcaattgcaggaaatcatgattctgtaatgcgtcaaggagctatccctccgcaagtaatatttaaaaaactgggtttaaaagtaattagtccaattaacactgattatatgcatggagatatttttattgcaggtttgccttactatccatcatcacagagtaaaactctaaaatctaaattagcagaattatctaaaaaggcagccaatcatgaaaaatctattctagtattgcatcaaggcattgacaaatatctaggatatcaatatgaattagaaataggagatattccagataattttacttattatgcttttggtcatattcataagtatattaatgaatcatttggtaatggaagattagtttatcccggatctgttgaaatttggaaaactgatgaagttgaagattataaaaagaacgggaaaggtttcgttgttgttgatcttgagggtccaaaaccaattgttaaaagggtcaaaatcgatgttcctcgtgaatttattaaaagatcacttgattatgaaaacttagaaagtggtattgcaggtattaaagaaacaattaaggactttgataaacagcctattttgaatttaacaattaaagatgttgaatctgatacaagtggtgtttatgatattattaatgaagatttaggtgatttgtctttaatgattagaccaaaatttaatattaaaggtgaagagcttattgatgaagataatattaaaaagaatggtttgggcgctaaagaaatattggtggaacaattaaagaaatataatgatgataatgtaactcagttagctattgacttatatgaatatttatcaaaagataagattgaagagtcaaaagatttaattgaacagttctataatgacttttataattcaactaaggatgaagttgaattacaaacagaagaaattgaacctgaaaccgcccaggtgaagtcagaagatgttcaagcaacatttaatgaggttttaaaatga

SEQ ID NO: 7655 - DNA, 2748 bp, Methanobrevibacter gottschalkii
  source 1..2748: mol_type = genomic DNA
atgattttcacaaaattacgattaagaaatttcaaatctcatgaggatacaattattagatttgaaaaaggcattagtgttattgtaggtgaaaatggtgcgggaaaatcaacaattctggaaggcattagtttttctttattcaaacagcacactgctaaaaaaattgatgacctggttagaaataatgcacaatcaatgtttgttgaattaaaattcatttctaatggaaaaaaatacaagattgttcgtgagaaaaaatcaaacttaaaatcagtattatataagaaaacatctttagatggtgaatatgttcacgtttgcagtggggataaagaagtagcaaatgaaatatatcaaattttagatatagattctgacttattcttaaatgcaatttatattagacaaggtgaaatagctgaattggttgataaaactcccgctgagaaaaaacagttgattgctaaattattgggtattgattcattagaaaaatcttggaaacacttattgcccttcattaatgattatgaaaatcaactttctgaacttaaaggtaaactttacaattcaaaggaattagcagacgatttgactaggaaaagagaggagttaaattcattaaaacaaagaggatatgaacttgaggaaaatattgaagaagtcagcgtattacttaaagagatttctgaaagtaaaagggacatggaaagagaaaaggaaatctatgaaactcaggttaataatcttgaaaatgaagaaaaaacattatctaaattggaacaggataaacatgtaattcaaaataatttagataatattagagaagctgaagaacaaatttcaagattggagaaatatgtttcaaaattagatgtttatcttgattttgaaaaatctgttttaagtatacaaaatttaaaacagaaagaacaagaaattgaggataaaattaaatctattgctcaacaaaaacaacttgttgcagacaataaagagaattataataaatttttagcttcagatgaggaaattaataaatataataatcaaaaagttaatttcgaaaaagaattagctaccatggctaaactggataaagataaaaaagatcttttaaaagaagttcaaaatgaacgtaatgaagttaaccaattttttgcaagagctaaagataagttagatgattatggattggaccaggatagattggctaaaataaatgatattaatagtattgaagatgccacaaacaatttctttgatgagatatctggaaaaattaaaagtttatctgatgatattattgctaagaatgaagaaatcgttgtatttaagcaaaacattaaatcaagccaaaaacctttaaaagatttgaaagatgtggacagtaaatgtcctgtttgtcaagcggatattgatgataataaaaaatctgaattaatcaaacagtacaatgctgaaatcgaagaaaacactaaattaatctcagaatatgaagaaagtgttcgtttactcactaagaataaagcaagttttgaagataaatctgataaattatcagaattatccaaacaaattattgaatataaacataaattctctcatttggaaaatcaattagttaaattaaacaagcttgatgatgaacttgtatctaaggactttattagtggtaaattaggtgaattaattcttattattgcaaataaaaaagaaaatcgtgaatcttataaagaattttatgatgcatataatcaggcaaaaggtgcattagaggttttaggtagtgaaatagacgcacaatataaattaaaacaagttaaaaatgaaattgataatcatgtaactaatattaaacttgcaattgaacaagatcctcatttaagtagagatataactgctgctgaacttcaagatcgtattactgatttaaaacataaaaatgaggaatacaatcaacttaaaggctttattcaaaataaaaaatcgtatttaacacaacttgattcagttaaagaggacattggaatgtctattaatcagatagatattcttaaaaataaaatcaaagcttctgtttatgatactgaaaaatacgaacaaattatttatcattctgatatatatgaaagaagatttaataagtttaacaacgaactttcaggcattaaaggacaagcacgcgaaacaattactcaagttaaagatttgactggtaaattagaatctgttaaagtattccaaaaacagtatgatgacatttcagattatattaatttactaaatcattttagaagcttatatagtaaaaatggcattcaaaaagatttaagaaatatttcaaggccattgattcaaaagtatactaaagacttctttaatgaatttaactttaattattctgatctgactcttgatgatgaatatgatgtgactgtttatggtcctgaaggggaatcttcaatgagtatggttagtggtggtgaaaaaatagctatagcattagctttaagacttggtattacacaagcaatggctaatggggaattggatactattttacttgatgagcctacaattcatttagattcatcaagaagacacgagttaatcaatttattaaaagaaatgtctgtactgcctcaaatgataattgtgactcatgaacctcaacttgagaatgctgcagataatttaattaaagtagaaaaagtgaacggtgtttcaaaagtaataatgtaa

SEQ ID NO: 7656 - DNA, 396 bp, Methanobrevibacter gottschalkii
  source 1..396: mol_type = genomic DNA
atgtttgaagatgaaagagacaataaaatttacaatttaataataacaaatggatttgacacaaacaaagaatataatcagtttacagaaaaattatactcaaagacagattttttatggaaagaatccatgtctggagcatattccactgccggtgaagaattttatcaaaaagtagataggattgttttattggccggcctttataatgataataaagaactttttgaagatttattaattgtaagcgaaaaatatgaaatacctattgttttagttagaccattaggtgtagaagaagtcccaattaaattagaagaaaaagcagcaaccattgttggctggaatgcgaactgcataattgatgcaattaaagatgcagctgaaactatgtaa

SEQ ID NO: 7657 - DNA, 1281 bp, Methanobrevibacter gottschalkii
  source 1..1281: mol_type = genomic DNA
atgaaagcagcagtaattggattaggcgtagaaggaaaaaaagcagtaaactctcttttaaatcatggatgggaagtttatgccactgatttgaatattaatgttgatttatctggtttaaatctaccaaatttgtcacttgatgtaattgatgaaactcaaacagtttcaattgttggagatggcataactcttgatttaggttttacaaatccttatgacattgatcagtgcgatgcagtagcaattagccctagcatgtttggaggagaatttgcaacaaaattattaaaaaattcaaatttactaagtgatgttgtagacaaacataaagatatttttactatcggaattacagggactaatggcaaaacaaccactgtacatatgttaaaagaaatcttggaaaatgctggtaaaaatgttttagttggaggaaatgggggtggaggattttcaggttattatgacttaattcttgaagctaatgaaggggaatatgatatattgcttgtagaggtatgtgatatgactcttgatttctgcaaatattgttttgattttgacatgattggtcttactaatattggtaatgatcatatgaatgttcataaaaccattgccaactataaaaattctcttgttagattttttgagggaaaaacagtattcactgcatttaatcaagattttaacactgattttaaagaatctagcgataaaaacattccttattttgaatatcaggatgaattaaaattatttggcaaatttaatttacttaatgcaggtcttgcaacagccatagcaagggaattgaaaatacctaaagatgttattaaatcaacactttctgaatttaatgctgttgaaggcagattagatgtttacaaaattaataatgtttctgtttatgttggaaaaactgataattccgatgcattaacttcaattttatctgaaaaagatttttatgctatatttataggcacgccccgccataatgaaatccacagattggatattttagatgctgctgttaggtataatccggaagttattgtattattccctggattggatgatactctggacatggcggtttatagattaaattccctcggttatatggggaatatcattacggtaaattctcttgatgaaattatcgaattagttgctgagtattcacatgaggatgctatattaatagggggcaatggtcaagatactcttattaatattcaagaaagaattaagttaatttctgaaaatttatag

SEQ ID NO: 7658 - DNA, 1188 bp, Methanobrevibacter gottschalkii
  source 1..1188: mol_type = genomic DNA
atgagtagcggttggagaagaatatcaattacaatatgtttggcattaattgttttaagtatattatttgttgcatttagtgcagcaactaacgcgccttataccgctcaatccgttgcagatgagtataatcttcctataggacaatccatgtttgaaaaccaatctattttaggtcaacaagattcaatttctgtaccattgatatcaaatgttggattcttacaacatcaaattactgcattagatattcaaggattattaatgactttgactactggtatggttccatttgatttttcaactgtatctagtgaaggtatagactcatatggggatgtggttaatgtagaaggcccaggatttttaacatttgaaggagataaattggctgtaaaatcaccaaataactatgtatgggggtacagtactccatataaatggttagttaaaactgatactggtgtggatgttgttgaaaatggaactgttgttaaatctgttccagaaaatgaaattaagaatttagattatcataatgattattataatagttctactattagaagttggtataactatgatgctcataatgggtctacatttactttagaaaaaggaatgaaaggattttctgatggcaggaataatattagtgctgctgatgtgccagtaatatttggtcatgatgttgttgattatgcatctgaatatcctactggttctcctattctgttatactctggaaattacactgaagaagatggtgaagcttatggaacttctttaggatcacatgcagaatatggtgattcaattagggaagtaaatgcaagacaatttgttgatgcctggaatggaactgtaattccacctaattcaacttcaagtggtaaagattatgtgtactttgaatcagctgttgatccaactgctcctggaggaagtgcagcgcatggtgtatgtccgcctgctagggctttaagagcagcagtcactgctgaaggtttcggtttacctgttggtatgacttgggacgaagatgcagttttatttgggtataatcctgcacaggatattacagttacaaataatcatgattatccagtattgattaaaatgtggactgaaggtgaaggtactggaatgggtatttactgtcaaattgtaagatatattccgaaataa

SEQ ID NO: 7659 - DNA, 654 bp, Methanobrevibacter gottschalkii
  source 1..654: mol_type = genomic DNA
atgtcaatctcaactattattacagcggctggaaaaaattccagaatgagaaatgatcagatttctcgcaatattgaattaacaaataaacttattcttccatttaaaaataaaacagttatagagacaactattgataatgcattatctgcagatatagatgaatgtattgtggtacttggtcattatgctaatgaaattctagaatctatttttgataattataaagattcagttaaatttgtaattaataatcctgttgatgtaggtttgtcagtatcactttacaatggtttatcaaatatttcttctgattttgcattgtgtataacagcagaccaaccaactgtgtcaactgaaacttttaatcgtatgattgaagcaagtcagaactccaaaaatccaaataggacaatttctattttgagaagaagaaaaattggattactggatagtgctgaaggattaggcatgccatttgtagctcatcgtttaaatttaatgaattatttggaaaatgaagatgataatataaatccaattttaagaaaaattttcaatgatggttatacattttatggaataaaagaaaaaaataaaaaagaattattaaatattaattattatgatgattatctggctcttttagattga

SEQ ID NO: 7660 - DNA, 675 bp, Methanobrevibacter gottschalkii
  source 1..675: mol_type = genomic DNA
atgactaatttggaaaaaaacaaaaaatattgcgaagtgattgaaagtaaaattaaacttgatgcaaaacctgttgcaatgaagttgattaaaactgaagatgacttaccagaaggcattgacttaattgatgaaaaaattagacattgcgaaatggttagaaaagcttcacttggaaacactttttactccacaattgatcaacagttatgtttaggtggagcaggtgcaattggacttagagatatgcctgaaaaattagcaaacggtgaaaaatatttctcattaggcagattccaagatttagaaaccgctaaaaaattaacttcaaaactttctattgttaaagatatccattggggaatgatatatgcaccgttggatgaagcagactttgaagcagatgttattcaaattataaccgaacctgttggtggaatgaaacttgcccaaagtattgtttataaaactggtgaaaaaattaatccttcatttgcaggtattcaatcattatgtggagatgcatttgcagacccatatatcacaaatggtgttaatttcactttaggttgcgatggttcaagaaaagcagccgatattaaagataatgaaatgactgttggtatcagtaaagctaaaatcgaagaagttatttctggtcttgaatcaatctaa

SEQ ID NO: 7661 - DNA, 1236 bp, Methanobrevibacter gottschalkii
  source 1..1236: mol_type = genomic DNA
ttgaaattgccatcaagatcaaaatcatatatgattccagaatacagtgtaactggagatttattatcatacttaacttgtaatttacaatacagataccaaaataaaggaacactaccaccatcaaaacctgttcaaagatggtttggggaatttattcatggagttatcgaagaagcatacatacaatgggaacaaaacaatatgcattttccttgggactggaaaaaggatattagaccaattgaggatttaattgatttgagattacaggttagaggcctttacccatttgatgaggatttatttttcagtattcataatcaatcagatgaagaattaacaattgatgatttaaatgaacatgaccataagaaattagcaagtgctagagctgaaaaagcaataaatatttggggaaaagatttattcccattaattgacgcatctgaacacttaataaaaggcatacgtgatatgcccaactatgatgaaaacactagtagatcaaattactatggaattaatggtgtggtggatgtttcatcatctgttaaaatcaataaaacattagaacaaagtaattttgataattataataatagaattatagaatacttaaagaaagatgagaatttccagaaaagaattgctaaatttgacaaagatgacgagtatgaaatacttattgattataaaggaatgaaaagaccccctgaaaaagttaacaatcctaaagttgaaaataaatgggaaactcatgaacaacagatattaacttattcatggcttagatcagaacagaaatcatctaaaccaataatagctggaattattttttacttaaatgaattagttccttcaaaagaggacttgattttaattaaagatgaattaaacaatggattaactgatattggatatgaatatgataaagacattgagttaattaatagctggcaagaagatgataaagctcctgaattaagtgataacttcaaaattgacagatccattagaattataaatgttgatgaatatgaaagagaaaaagcacttttaaaatttgatagtgttgtttcaaatattgaagaatcattaattaaagagatgaaaggatgtaaaattcaagatgcatggaaaggagattcggatgaaagaacctgcagtgcttgtgattttaagactttctgtaaaaataacagtgttaaaacaaaagactttaaaattccttaa

SEQ ID NO: 7662 - DNA, 2439 bp, Methanobrevibacter gottschalkii
  source 1..2439: mol_type = genomic DNA
atgatttcatatgaagaatttgaagacatggttgttaatatacttaaaagagatatttcttcaaataaagaacagaaaaatgcaattttagctccttgcaataaatcattatttcttgttgcaggaccaggttctggaaaaacaactgtaatggtgctgaaaatattaaaatacatttttgtagatgatattgaaccaaatgaaataatagctacaacatttacaagaaaagcagctgatgaattgtattcaagaatattaggttggggagatatgattaaaaatcatcttctaaacacaattcacgatttcaacaatattacaaagattacaagaattgattttaatcaaataaaaataggtacaacagacagcattgcggaagaattgcttagagaatataaaaaacccggtgaaaatcaagcaatagttattgaagggtttgtagctaactccgcaatgataaaaatcattattgaagatgaaaaatatctcaataaaaatctagtagaatatcttaaagaagtgagcggtaaagaaaaaatcgaagaaccatctaaactaagtgaaattctaattgaaataaaaaatagaatctattacgatcaggtcgatttcaatgaattatacaataaaacccaaaaagatagtggagcacgcattgcccttgactgtataaaaaaatatgaagataaacttcaaaatagaaatacaattgattttgctatgcttgaatcagaatttcttaaaaaattaaaaaacaatgaattagaaacatttttaaatgaaactaaaattgttctaatcgacgaatatcaggacacaaatttacttcaagaagatatttactttacaattgcccgctccgctattgcaaataatggcaatataactgtagtaggtgatgatgatcagtcactttatagatttagaggagccaccgttgatttattcacaacttaccaagaacgcattaatgaaaaactaggtattgaagttgaagaaataaatttaaggacaaattatcgttcaacagaaaatataatagaacattgcaatcaatttgctgaattggatagtgaatatcagaatgcaagagttgaaaataagcctaaaatcattgctccagatttcgataatgataaaatgccaattttaggaatgtttagaaacaacccagaaatgcttgcaaaagatttatcaaagttaatcaatcaacttgtaaacaaaggtgaagctgaaattaaagtactgcaggttttaaataaggaatattatgaaaaagtaaatggtgtaattgacatagcaagattacagcaaattaaagcggaaaatgtaaaagcaggaaaagaaattgaaaaaataactcttaagttagatagtgattacggttcagcatcagacattgcaattttatcatattcacctaaagaaacatattacggcaaccgttcattcttacattatcttagaaaaaatcttaaaaaattaagacaaccgattgaagtatttaaccccagaggaattgagcttcaagatattgatattgttggtattttttgtggtttaatgcttgaatgtattgatcctgatagtactgtgcaaaaatctgataagacaatacctaaattagcaacacacaacatgagacgttggagaataaaggctaaagattttattaagttaaatcctgaacctcatgaaccaataacattatcccaatttgttacatattggcaacttagaagaccaagagggcatgaagaatggcccaaaactgcaagtttgatggaacttgcatacaaaataacgacttggattgaagaattacaagaagacgtggaaggtattgtatatctagaagcaattacacaatccattacacaaacaggattttttaatgattatcattcaaatatttcttttagaacccaaaaacaagaaagagaatctattcttgaagctatctggaatattttcattcctttatctactggaggaatacagattgatgaatcattacttgaaacattacctgacaatagaattaatgtattgtccatccatcagtcaaaaggattagaatttccattagttattgtagatgtgggttctagatttaagcaaaatgacataaggactcagaaattaagattcccaaaatcaattaaagaagaaacaacacttgaggatagaataagacgatacagcaagattggacaaagtaaaagaggagaaaaagacaaatcatttgatgatttaacaagactttactttgttgcattttcaagagctgaaaaagtattattgctaattggcctaaaccctgctattgaaggatataacaaaaagaataatcattttaatatcccaaatgttgctcttggatggagtagagatgaaaaatatattggatttaatgaaatttatttaatttag

SEQ ID NO: 7663 - DNA, 2871 bp, Methanobrevibacter gottschalkii
  source 1..2871: mol_type = genomic DNA
atgtctgaagtaaacaatatagatatgttcaaaaatgatgtgaggtatagggaaaacattgcccatattgaaacaataccggctaaaaaggctagttttaaaaaagttgataatttaaatgaaaatattgtcaattacttatattcaaaagatgtgaaattatacaaacatcaggcagagacatatgaagctattaaaaatggtgaaaatgtaattattacaacaccgacagcatctggaaaaactttagcttttaatctacccataatggaaactatgattgaagatgataatgctacagctctttatatttatcctgcaaaagcattatctaatgatcagttacatgttctagaaaatcttgaaaaggaattggatataactatcaatccgagaacttacgatggagacactccaagaaatgaaaaaagaggaattcgtgaaaaatcaaggattgttctaacaaatccatatcaattacatttaattttatcctggcatcatcaatggacaagattttataaaaatctcagatatattgtaattgatgaatcacattattataaaggagtatttggttctaatgtttcatttttaattaaaaggttaaaaagaatagctaacttttatggttcttatcctcaatttattttatcatctgcaactcttgctaatccattggaattagctaatagattgactgggcaggattttgtattggttgataatgatacatctcccagtggcgagaaagacttcattttatataatccttttcaaaactatgttagaaataaggtttatgctcaaaatgcaccttctgtgcatatggaaactgaaaatattttcatgtatctgatgttaaaaaatatccaaacattgtgctttacagtttcaaggaaaaccacagaattaattgcaatgtgggctaaaaaagatatgactcaagtaaaaggaaaactggcccatagaattgcagcatatagggcaggatatcaacctcaggagaggcgtgaaattgaagaaggtcttaaaagtggaaaatatcttggagttacatgcacaaatgctttagaacttggaatcaatattggttctcttgatgcagtcattatttctggttatcctggaactatgatttctacttggcaacaatctggaagggcaggtagaagtaatcaaaaatcaatcgcgatattaatagcatttgaaaatcagttggaccagtatttcatgaataatccaaagtttttctttgacaaacctcatgaaaatgctattattgacttgacaaatccaatattgcaggaagcccatttactgtgtgctgcaaaggaattgcctcttaaacgtggtgaagcagaaaaatactttgacatatctcaggatgttatagatgagcttgtctctaaaaaggatttatatgaaaatcatcgtggagactttatgtatccttatgatgacaatcctgcaatggatcattctttagatcagatttcatcagaagaatttaaagtaatggttaatggaaggcttttagagactatggaacgttcccaagtttatagggaagctcatgaaggagctattctgattaataagggagatacttacgtagttaatagtgttaatctaaaaaaaggttatgtgaatgtgtcaaaagaagttgtagattatcatacaatggttttaaataaaactgagaccaatattaaaaagaaattatcaaaaacaaaatatggtgatttgacaattcatttcggtgaacttactgtaagtgaagattattttaaatataaaaaaatgcacttttcaaaacctattggaacatttttacttgatttgcctcctttaacatttaatacaaaaggattatggtttacaattccaaaagaagttaaagatgctgtggaagacatgtttccaaatgatgaagaagtttttgctggcggtcttcatggtgcagaacatgctttaattggtctatttccacttcatacaatgtgtgatagatttgatattggtggactttcaacaaattatcatgaagacacccaagaggctacaatttttatctatgatggttatgaaggcggaattggaattaccgaaaaagcagtagatgtttttgttgaccttttaaattccacaattgatttattaaacaattgcaaatgtaagaaaggttgtcctgcatgcatttattctccaaaatgtggaaatgataataagccactccataaaggtgcaactaaatatatacttgaatacatgaaaaaattaatttctgatgaggttgatggtcaaaaagaggatattattgatgttcagtccactgttgatgattcaaaggaatttgaagaagcttatcaattatatgaaaatggggattattctgcttcaaaagatattttaaataatatcttagcaaatgataaaaaacatgtaagatcattggctttaatggctcaaatattatatgatcaagatcaaaaagatattgcattactatttactaaaaaagcgctggcaattgacaggtcaaatgaaatggctaacaatttggaagtgttattgaccaataaatctaaaactaaagaaaatcattctgatttatcttcacttgatgatgttgatacattgtttgaggaagcatatgacatgtacagtcaaggtgatttggatgcttctttgaacattttagaaaaattacttgattttgacagtaaaaatgcagaaacgttggccttaatgggattaatacattatcattcaggttttttccctaaagctgttgaatattatagaaaagcaacaaaaataaataaaaatggcgaaatggttaaagaattaaaaatacgggtgtcttaa

SEQ ID NO: 7664 - DNA, 1140 bp, Methanobrevibacter gottschalkii
  source 1..1140: mol_type = genomic DNA
atgaattttaaatctaaatttggttttggatgtatgagacttccaacaaccgatgaaaacgatccatcatcaatcgaccaggatttatttaataaaatggttgatatttacatggaaaaaggatataactacttcgatacatcttacgcttatcataatggtaaaagcgaagtagctatcagaaaagcactagtcgaaagatatccccgtgaaacattcaagatttgcgataaaatgcctacttgggcattaactaacagtgaagacaacgaaaaatttgttaatgaaatgcttgaaagacttggaattgattattttgatgtatttttcatacacaatatcaacggaccatggcttaaaaatgcaaaaaatgcagatacctttgaatatgttaaaaaaatgaaagaaaatggcattgcacgtgaaattggatttagttttcacgacaaatcagatttattaaaagaggtccttgatgaatatggagatatctttgatattgttcaattagaactcaattaccttgattgggaagatccggccattgaagctcataaatgttatgatttatgtgtagaacatgggcttgacgtttatgtaatggaacctctaaaaggtggggttattgtaaatccaaacgatgaaattaaaaatgattttaaagagttcaatccaaataaatcaatagccagttttgcaataagattctgcgcatcacttgaacatgttaaaatggtattaagtggcatgagcaaaatggaagatttacttgataattgcgatacctatgagaatttcaaaccgttgaatagagaagaaaacgaatttttagaaaaaatggctcagaaactttcagacaatcttgcagtatcatgcagcgaatgcggatattgtgttgatgcatgtccagaaatgatccctattccggaatatttcaatctatacaatacaagtaagaaccaaccggaatccaatatttacagattatatttcgataaattaggggatgaaaaagttcctgcagatgaatgcacatattgtggaacttgtcttgattattgtactcaaaaaatagacattccagaagaattggaaaaagtagtggaacatttccaagagggattctcaccttatgaataa

SEQ ID NO: 7665 - DNA, 378 bp, Methanobrevibacter gottschalkii
  source 1..378: mol_type = genomic DNA
atgcatgaattatctatggctcaaggtattataaatgcagtgttagatactgcaaaagaaaataatgctactgaagttaacaaagttacaattgaagttgggagattagctatgattaatccggaacaactgcaatttatcttaggtgttttaattgaaaacaccataatggaggatgcagaaattaattttgaggaagttcccgttgaaatgaaatgttttgattgtgatttccacggtaatgctgtacttgatgatagtgatcactatgcaccacttgttaaatgtcctaaatgcaatagtcttaaaattgatatattgaatggaaaagatatcattgttaaaaatattgttattgaaaaacctgatgatgcttaa

SEQ ID NO: 7666 - DNA, 651 bp, Methanobrevibacter gottschalkii
  source 1..651: mol_type = genomic DNA
atgcaccaagttgctgatgtagaagttgcaaaaaatattatggatgctaataaaagattagctgataaaaacttaaaaaatttagaagataaaaacatattctgtgttgattttgtcggagcaattggttctggtaaaacaactcttgtggaagatattattgataatactgattataagattggcgttcttgcaggagatgttatctcaaaatttgatgcaggacgtatagaaaaacacaatgtacctgtagttggattaaacactggtaaagaatgtcatttggatgcacatttggtaggtcacggacttgcagatttgccgttagatgatttggatatggttattattgaaaatgtgggtaatttgatttgtcctgttgactttgaattaggttcccatttaagaattgttgttgttagtgttactgaaggtgacgatactgtagaaaaacatccaattattttccaaacttcagatgttgttgttatcaataaaattgatttagcggatgcagttggtgctgatgctgataaaatggttgctgatgctcaaaaattgaatcctaaaattaaaataatcaaatctagcttaaaagaaggtaaaggattagacgaaatcatttcaactattgaagaagctatgaactaa

SEQ ID NO: 7667 - DNA, 1032 bp, Methanobrevibacter gottschalkii
  source 1..1032: mol_type = genomic DNA
atgaaagtatggatagatatttcaaatgcacctcatgttaggttttttaagaatgttattaagtatctagaagctgaaggtgaggatgtaatcgttacagcaaggcaatttggtgatatccataaattaatggaaatgtatgatattgatttcatttctgttggtaaacatggtgtaagcttatatgataagcttaaagaaagcacttcaagagtttataatcttgttgatgtgattcatgatgaaaatgtggatgttgcacttagcaagcattcaattgaacttccaagaatcagttttggtttaggaattccaagtttatatgtgcttgataatgaacatgctttagctgctaataaattaactcttcctttgtgtgatagaattattacaccaaaaattattgacatgtggaaattaatgaaatttggtgcggatccaaacaccattatttcttatgacggaacttctgaactaatgcattttaaagattttaagtataatgataatatattcgatgatttaaatctaaatttaactcatcctaaaactattttgatgaggccagaaccttcccttgcatcctatttggatgctgattgtagaaaatcagttttatctccaatagttgatgaactgaaaaatgtagcaaatattttaattcttccaagatttaaagaacaagctgaaatttttgaaggaattgaaggggtttctattttaaaacctcctgtcgacacttcaaatatcattaaaaaatgtgatttggttattggtgctggaggtacaatgaatagggaagctgcaatattgcaaactccggttatttcctgttatcccggtaaaacattatctgttgaccaatattacattaataaaggtttaatgtatagatctcaggatactgatgaagttatccataaagctttggaatttatcgttaatcctcatgaaaggattgatgttaaaactgatgatttattccaaattattatagataacttatatgatttagctaaaaatggtaaatag

SEQ ID NO: 7668 - DNA, 1083 bp, Methanobrevibacter gottschalkii
  source 1..1083: mol_type = genomic DNA
atgttgttgattgctcaaaaccatttacaattaattttagaagttggattaatgttgtttgtaacattagtcttttgtcttaacttgattccattgtcacttagtattgtaaccttcttatcattattcataatgggaggattaacacttctttttggtgcggatattgcacttcttgtgttattttcaagtcaagcggaatttactcacccatttggaccaattgcattacttggtgctgtaactgcacttgcttcgttaaaagtaatgtcggaatctggtgttgatattagaccacttagaagatttgtaattttattcttagctggaattacagtattcggtggattaatgcacagatctttcttaattttatggttacttggtttattcttaggatacttaatgatttccaaatctttcagagaaaaatctgtatttacattaaagagaatcatgatgtttttcggtgcagctggagcaggttttatttttttagaagttcttgctcgtgtatctggcatgacaattttctctccacttttaagattaggtagaattgaacaatactctttatcaagtattaaaatggtattaaacaacattcaattaatagggcataatgcaaatgcttcttattggggagcagatggaacagcatttgctgaaggatatattactttgccaatgcaattaattttattttttggattgcctttcccactattctttggtgtgcttgtaaaccaaaaagatacaattgattatatgcttccaggtatatttggatggggattcgactttggaatattgggtctcattggtctgatgatatttgtacttggaacaatcatcattggatttaaagtattaaatatgtacagagaaaaaagagagaaaaataataaaaaatacttgggaagggaagtattattaacaggtgcattagcagcattctgtgcacaatcattaattggattatttatatttaacagatccatcaatggtatggcattgttaacattcttatttgtaggtgcattaattttagctaatgtagtctcgttaaaatcaagatcataa

SEQ ID NO: 7669 - DNA, 459 bp, Methanobrevibacter gottschalkii
  source 1..459: mol_type = genomic DNA
atgaaagctttaatattgcttggatgtccagaaactcctgcacaaaccccaatggcagtttatgtatttaataagttaactaaaatgggttatgatactacaattgcagctaatcctgcagcatccaaattagtaaaaatatctgaccctgaaggattatataatcttaatttaattgatttggaaagaacattaggtgaaattaacgaaggagattatgatttacttgttggatttgtacataaagatgcggcagcttccttttttgtaacatttgatcaaattttaaataccaaatccattgcgttagtattttcaagagatgctgatgaagtggcagaatttgttaatatgattgaagaaagtggaagcaaggctttaatttctgctgttcgagcattccataatccttcaccgattaaagttaaatttgataaagctattaaggagtttgaataa

SEQ ID NO: 7670 - DNA, 315 bp, Methanobrevibacter gottschalkii
  source 1..315: mol_type = genomic DNA
atgtcattctgtttagatacttaccttcaacaatctgatgattatgaaattcatgcttcaaaagctggttttaaagattgtgccatgattatcagattcaaagctgatgatttagtgtatgttaagccgggagatgaagttttaggtgttagagtaattggtattcctccaattccaattggatttgaccataataaaggaactgtattcattccatataccaaaccttgtcatggaacttctgttgtcgaacttccgataaatgaagaagaaattgaaaaaatcagaaaacttgatactggtaataaaaaatga

SEQ ID NO: 7671 - DNA, 945 bp, Methanobrevibacter gottschalkii
  source 1..945: mol_type = genomic DNA
atgaaatcaactgttgtaggcagttttccagctaaggaaagctccccatctaattttaaagataaaatattaaatactttaggattatatgatccttttagagaggcaatcagaagtagtgtaattgctcagcttgatgctggagtagatataatttccgacggtcaagttaggggagatatggtttctatttttacaaaatatattccaggaatgaaaattgaggatggaaatacagtaatcgtttctaaaataagaaatccaattaaggaaatctctattaaagatatgcaatatgcaaaaaaggtcatgaaagagtattataatggcaacattccggatggtaaaggaattaaaggaattattaccggaccaaatactatagtccactcttcaagaattgaatctttttataaaaacaaagaagatgcaatcattgatttagcacatagtctaaaatttgaagtagattcaatagctaaaaaagtagaacctgtttatattcagatagatgaaccatttttatccactggaatggtggatatgaatacagctcgtgaagctattgatataattcatgatggtttggatatacctttgggaatgcatgtatgcggtattttatctaatgcattcaaagaccttgcaaaatttaacattgatattttagatatggaattcgcaggaaataacataaatcttggggttttagagaaaaatgcatcattgcttactaataaaaaagtgggatttggatgtattgattcatcggtgcatactgttgatgatattggtgacattgacatgttagtaagtagagctattgaaattgttgggaaggacaatttgcttttagatccggattgcggtcttagaaggtcaccaaaagatgttgcttttgaaaaattaaagttgatgaatgaaattaaagataaatatgcatag

SEQ ID NO: 7672 - DNA, 432 bp, Methanobrevibacter gottschalkii
  source 1..432: mol_type = genomic DNA
atgtatttcggattttcatttatcggattactatttttaataatgttgtttattccaaatgtgttgtggaataaatttcaaccaacggattatgaaaagtactctaaaagagaaaatatcattctattggcttttgaacgtgttggacaagtattggtatgcatattttctttattttgcggtgttaattttaatttgtctatttgtgttgcaattccttttattatattgatattatatgaattttattggattaaatattttaaaagcaataagacaatgggagatatgtatagtgactttttaaaaattccactccccggtgctacattgcctgttttggcatttgtctttttagggatttgttcagataatatacttttaatattttccactataatttgggaactggtcatattggtattcatttag

SEQ ID NO: 7673 - DNA, 732 bp, Methanobrevibacter gottschalkii
  source 1..732: mol_type = genomic DNA
atgaaatttttagttattaatggatctcctagaaaacagaatacttataatgttattaaacaagcaaaagttaatttaaatggtgattttgaagaaataaatttaattaaggaaaatatccccatgtgtaacggatgttttaagtgtattcttgaaagtgagacagaatgccctcattatgataaaatcgatccaataatcgagaagttgcacgaatgtgatggtttaattattggttcgccagtctatgcgatgaatgttacaggacttttgaaaaacttctttgatcatactgcttatttgtatcataggcctgaattttttactaaaaaagcattggttgttgttacaactgctggtgcaggtcataaaaaagtagctaagtacattgatgaaacattaaggcattggggagtaaataaagtttataaaatatcatttgcttgtggtgggaatgattcattggataatgataaagttaataaagtgtctcaaaaatttgcatttgatttaatatcgaacaaattacattctcctaagtttacagatattatattttataatgtatggagagctatggcattatcaaaagatcctataaaggcagataaggaatattggtttaatactggtttagttaatcatgatttttcaccggaagtcaaattgaatattccaaaaattgtatttgcaaaaattgtatttaatgttttaaaaaaagcaattaaataa

SEQ ID NO: 7674 - DNA, 1029 bp, Methanobrevibacter gottschalkii
  source 1..1029: mol_type = genomic DNA
atggttttaagggaaaacagaattttttatttagatgaattaagagctattgcaattttatgcgtaatatttgctcatacaattcaaaattttcccactaatatggattatttaacatctcccactcttctttcttatcttacagttgctagaatgggtgttattctttttttcatgattagtggggcattgctgattggcagggaatataatttatctgattttttaaaaagaagatttgccagagtattaattccaacaattttttggcagattattggatatttatcagttctaatttttataggttttacttatgataatttagttcaagcaagtgttcaagttggttttccatggtttgtatgtgcaattttagggatttattttgttattcccatatttaattcctttattaaagaatatgggattaaaggtgcagaatatttcttgattatatgggtatttttagttatattaacaaatatgcagctaaatgaaacttattatattgatttcatattcaacaatgtaggaatatatattggatatgcagttttaggttattatttagcaaataaagagtttaatatatactcttttcctatggttgtaatatgcagtgttctttttattatttctcttgctttaaatagttattatgcatttaattttagtcatgtattttacatagagtcctattcaattattgttcaatgtgctttgttatttttgattttaaggtatatgagtaaattagctaaatttagaccaaagtttgttttatcaaaactacattcatttgttcaaaattcatttattggtagctttatttactatttaagtatttttagttttacgatttacttaatgcacggttttattgtaaatgcaattattaaatacatgccagttactcaatttagtatgattccagcaatatttctattaatagctgtaatttctattgttattgctgcagttttgtctaaaatgcctattatcagcaagttgtgcggtatttattga

SEQ ID NO: 7675 - DNA, 753 bp, Methanobrevibacter gottschalkii
  source 1..753: mol_type = genomic DNA
atgaaaggaaaagttatattcattggtgcgggtcctggagatcctgaattaataactgttaaaggaaggaatgtcatagaaaaagctgatgtaattatttatgcaggttcacttgtaaatcctgatgttttatctcctgctcgtgaagactgtgagattcataatagtgcctatttaaatttagatgaaacagatgcaatcattacaaaagcagttgatgaaggaaaactagtcgctcgtgttcatacaggcgatccatcaatttatggagcaattgctgaacagatccgtgaacttaaaaaacatgatatcgaatatgaaattattcctggagtaagttcattatttggtactgcaagtgtactcgaagcagaattaaccttaccggaaatttcacaaagtgtaattattacccgtccagaaggtaggactccaaaaccagatggtgaaagtttagcaagtttttccaaacatcatgcaacaatgtgcatttttttaggtattggtatgattgataaagtggttgatgaattacttgtaggttatgaaaaaactacacctattgctgttgttaaaaaagcaacttggccagaccaacaaataatcaaaggaaccctcgaggatattgcacaaaaagtaaaagatgccaatataacaaagactgcaatgattatagttggagatgttttagaccctggagattttaatgcatctaagctatatgacaaaaactttaaacatgaatatagataa

SEQ ID NO: 7676 - DNA, 396 bp, Methanobrevibacter gottschalkii
  source 1..396: mol_type = genomic DNA
atgaatgatagaggttttgtttcagttgaatacatttttacattatttatactctttacaattggatgtggtttattgttttattcctcatcacttattaactcaagtattaatattgaagattctgtatctcatagaatcattttaaatgatgtttcttgtgtaattagccaagttaattcaaatggtgttggttattcaaaatacattaaactgccatcggataaaggttattttgaaattactgttgataaatccaaactgacaatagaatatgataataagaaaggtgaaactatgcttcctcttttgaatatggattctaaatataaattaatcagcgggagaggatattatatttcaaaatctgatgatggaaaaattgtgataacatga

SEQ ID NO: 7677 - DNA, 498 bp, Methanobrevibacter gottschalkii
  source 1..498: mol_type = genomic DNA
atgacaggtgacaatggacagatttcagcagagttattatttctgtttggaacactaataatcgttttaatgatttctattgtgtttatttcagatgaaaatgaactaaatattgcaatggcagcagcacacagcggtgttatagaagggcttgctacatcatcaagcggaatttatcctgcagatgcttacagtgattattcaaattctaaaatgaatgtattggaaccatattctgttgagatagttaatatttcatatactgagcttggaggagataataattatgataaaaaacaaatccagtttaaagtttatgcaaaaacatctgacagattcaataataaagaattaacttcaattggggataggataaattataacttaagaaaatccattgcagttagttttaattcaataaatgccaccaataaactttataatccagttttttcacctcattatgtttacacgaccgctaatgttaaatgggtataa

SEQ ID NO: 7678 - DNA, 396 bp, Methanobrevibacter gottschalkii
  source 1..396: mol_type = genomic DNA
atgggtataaatacatatattgatttcatgtatagtgaagatgaaaaaaagcagttgatggaagatttaaaagaaatggaaacttttaaagtggatactggggatgaaggtaaaatattgcagaacgatttggaggaatatttcatcaatggaaatggggatagggaagatttaactttcagaattgaattatacttctatgcttttaaaatattctgtagaaaaccagttgttattgatagaaaccaattcacaatatttttcaatgattcattgcttgattggaatttaataaaactgattatggatgatttatcagactttgaacttgaaattgaagcagttaaagaagaaagagatgtgcttattaatttaaatttcacacttcattactaa

SEQ ID NO: 7679 - DNA, 762 bp, Methanobrevibacter gottschalkii
  source 1..762: mol_type = genomic DNA
atgattgatacacattgccatattgattttgaagattttgatgatgatagggatgaagttatcaaaagagccaaagataaattagataatgtaattgtttcagggtacagtaatgacagcaatatggacgttttgaaactttcaaaagattatgaaggttttatttatccaactttcggttttcaccctgtaagttcacaaaatgcaactgatgatgaaataaaaactgctcatgaaaacattgttgaacatttagatgacattgtagccattggtgaagttggaatggactacttttatgtaaccgataactcattacgcaaaagacagcagaaaatattcaccggttttttagaattagctaatgaatacaaaaaaccaattgtaatgcatgtaagggattgtgaaaaaaaagctgttaatatcatctatgaatatgaagatattccttattttgtttttcattgctatggtggtagcttaaaaactgcaaaaagaataatgaatatggacaatgcatatatgagcttttctactatgctctgctattctaaacagcaccaggatttgattgaaaaaatagacttggactatattttaactgaaacggacagtccttatttggcaatgacaaaagaagagagaaatgaacctgcaaatgttgtaaatgcagtttataaaatagctgaaattaagaatatggatatcggcacagttgatgaaattaccacaagcaacgcttgtaatattttcaaaatttag

SEQ ID NO: 7680 - DNA, 765 bp, Methanobrevibacter gottschalkii
  source 1..765: mol_type = genomic DNA
atggcagaaaatatactttacagattatatgaatggtacatctcaaggaatttagttcctgaaaaaatgccaaaacatgttgcttttattatggacggcaacagaagatactcaaaattacaaggaaacattgatgttgttaaaggacatgaaatgggtgtgaatattttagaaaaagtaatggattggagtattgaacttggaatagagattattactgcttatgctttctcaacagaaaatttcaatagatcaaaacatgaaatagatggattaatgaacttatttgtcattaacttcaaaagattagtggacaatccgaaaatacataaatatgaagtaaaagttaaagtagtaggcagaactgaattacttccggataatgtgaaagaagcaataaaagaagcagaagatgcaacagcacaatataataaaagattcctcaacttagctattggatacgatggacgtttagaaattattgattcgtttaaaaagattattaaagatgtgcaagatggaaaaatatctattgatgatgtggatgaagaacttgtaagtaaaaatctttatacagcaggacttgatgatcctaatctaatcattagaaccagcggggaggaacgtttaagtggatttttactttggcaatcttcatactcagaattatatttctgtgaaactttatggccggaacttagaaaagttgattttataagggcaatcagatcatatcaggcaagagaaagaaggtttggtgcataa

SEQ ID NO: 7681 - DNA, 717 bp, Methanobrevibacter gottschalkii
  source 1..717: mol_type = genomic DNA
atgaaaacaatagctattggtgttggaaaaaatgaaaatataatacaagcttgtcatatttttaaagaaaaacacccaaaaacggatttaaaactaatatatcgtgatgaagacttagtgcgtgcagttttagataataaaatacatggtgtggttcgcgggtcacttccagcttctaatattatgagggaattaaaggaaatctacccagagattacccgagcaacttatgttaatggagacgaatatgaatttctattaacacctgttggaatcgatgaaggcaacagtgtagaagataaattaaatattgtcaaaaactgcattgctttttataaaagacttggaaaaactccaaaaatagcagttcttgcagaaggaagaaaagatgattttggaagaggcgaagaagtgtcaaaatctattacagacagcgagaaactaacaaaacttatccaagaaactactggagaagaagttaaaaactattatattctagttgaaaaagcaattaaagatgattgcaatattattgttgccccaaacggaagagtgggaaatatcatatttaggacattagttttacttaattcctggccaagttatggtgcaataacctttggaatggataaaatatacattgatacaagcagagatcaaagtattgaagggtatgttcgtagtttaatattagcaaatactctagataacttttaa

SEQ ID NO: 7682 - DNA, 1380 bp, Methanobrevibacter gottschalkii
  source 1..1380: mol_type = genomic DNA
atgaaagctattaacaagatgctatgtttggttgatggtgaacactacttacctgttacacaacaagcaatagatactttaaacaacttggagcatattgatgttgctggtgctgtttttattggaggaactgaaaagcttagagatgattcggaagaaacatactcacaaaaactaggagttccagttcaatttgcagaagataaagatattccatatgatattatcgtcagtatgattagacaatataatattgatacagtcatggatttaagtgatgaaccaatattggattatcctaaacggtttaaaatagcttgtagtgtacttaatgaaggaataagttatgaaggtccggattttaaatttgaacctgtatcacaatatgacattatgaaaaaaccatcaattacaattctcggaactggcaaacgtattggcaaaactgcagtatccggatttgtatctagattaattgacaaaaataattatgaaccttgtgtaatagctatgggtagaggcggacctagcgaacctgaaatagtccatggtgaagaattagaaataacctcaaaatttctcctagaacaatctgaaaaaggaattcatgcagcaagtgatcattgggaagatgctttaatgagtaggatattaaccataggttgtagacgttgcggcggtggaatggctggcgaagtatttttgaccaatatgaaaaagggagcaaagttagccaatgaagttgattcaaaattagcaatttttgaaggtagcggagctgcaataccccctatcaaaactgataaaaaaatcacacttgttggtgcaaatcaaccaattgaaacagtaacaggttactttggaccttacaggatttcacttggagatttaattatcttaacaatgtgtgaagaacctatggcatcaaaggataaaatagctaaaattgaagaattcatacaagaaattaatccagatgctccaattatttcaacagtatttaggcctaaaccattagaggacatttctggtaaaaatgttttatttgcaactaccgcacctgaaggtgttaaagacaaactagttcagtatttagagaaaaattacaaatgcaaaatcattggtacaacatcccatttatctaataggccgcttttacgtgaagatatgaaaaaatatatggataatgccgatgtgatgctcagtgaacttaaagctgccgcagttgatgttgcaacaaaagatgcaataaatgctggtcttgatgtcgtttactgtgacaatattccaattccaattaatgatacatatccagatttatcaaaaacaatcattaatttagtaaatagcgcaattgacaattttgataatcaaatataa

SEQ ID NO: 7683 - DNA, 717 bp, Methanobrevibacter gottschalkii
  source 1..717: mol_type = genomic DNA
atggatatttctgaaattaatttagatgaaacgcatatcagattaacaactgatcttagttgtcatgatttaaaaagatacatattttctattagaagggatttaaaaaattatatttttaaaaatcaggaatttgcattgtcattagaaccgattaaatctgaagataatcttccattaattgtaaaaacaatgattgatgcatccaatattgctgatgttggtccaatggcttgtgttgcaggtgcaatatctcaattgtcgcttaattatttaattgaacaggattctaaatattccattgtggaaaatggtggagatattgcccttataaatgattcatcattattgtgcggaatttattccaataatcaagttctgggaaatgatattgcttttaaaattaaacctagaaaaaaacctttagggatttgcacttcatcaggaaaaattgggcactccataagttttggcaaatcagacagtgttactgttatttcaaaatcatctgccatctcagatggaattgcaacccgagttgctaatgaagttaatggtagtaatagtgaagaaaaagtttcaaagggtttggaatgcggggaggattatagtgaattttttgacggtctattaataatttcagaaaataatgtgggaactgttggcagattaccaaaaattattgagactaaagagtttgatgtaaaaattgtttaa

SEQ ID NO: 7684 - DNA, 288 bp, Methanobrevibacter gottschalkii
  source 1..288: mol_type = genomic DNA
atgtataaagatgaaatgatacaattacaccaatttttagtatatgttttaaaatatttagcagaagatgaccaaattacaaatgattgtagtgaatatatatccctaaaaataagccctcatcatattcataaaactaaagcagaacataaacatgctatttttgtcctttgtaaaattattgcgcaagttgttgcagataaagagaataattcaattccagacaatgttcgcaactcacttggagatttagtaactaggtctcaagttgaacttagtgcaaaataa

SEQ ID NO: 7685 - DNA, 771 bp, Methanobrevibacter gottschalkii
  source 1..771: mol_type = genomic DNA
ttgaaatcttttgaatttttatcaataaaaagggaaaaaaagcctagaacatccggtttaacaatggttttagataagggattaggtcttgaaactgcaagcagcttaatggatatttcaggtgaatacgtagactatttaaagtttggatggggaacatccattgttcatgaacaggacatcattaaatctaaagttgaaatgtataaatctcataatattactccctatactggaggaacactttttgaacttgcttatacaaaagataaacttgaagaattctttgatgaagcacataatttaggttttccagctattgaagtatcagatggatcaacagatatccctcatgaaaacaaattggaatgcattgaaaaagcaaaagaatcaggttttgaagtgttatctgaaattggtaaaaaaaatccaattttagataaggaattgtctattgacgagagaatttctaatatggctgatgaacttaatgcaggttcctcattaataattgtagaagctcgcgagggcggaaagaatattggaatatttgatagtaaaggaaatgctaaagaagatgaaattgatacaatcctaaacagcatcaaaggagaaaaaatcctttgggaagcaccaaataaaaatcagcaagtgtttttcattttaaaacttggaaatactgttaatttaggaaatatttctagtgatgaaatcacatctcttgaaacactaagaagaggtttaagaggagataccttcggaaaattataa

SEQ ID NO: 7686 - DNA, 1254 bp, Methanobrevibacter gottschalkii
  source 1..1254: mol_type = genomic DNA
ttgaagaataatagaacaattggtgaaattaacgaaaaaatcaccaatggcgaagcgaatatttacactgcagaagaatttaaaaaactcataaaaaatgatgaaacaccaagttttaatgaagttgatgtcgttacatgcggaacatgtggtgtaatgagtgggacagcagctattttaaattttgtagtatctgaaccgggtaaatttataagagcaaatgaagtttatttaaacggagttccagcatatgcaggcccgtgtccaaatgagtggttaggttctgttgatgtaattattcatggaactgcacattccattcataatgaaaattatggtggaggattcttatttaaagacatacttgaaggaaaagaaattgatgtaagggttgaaagtgcagatggcaaaacaatcaataatacaataactaaagaggatattataagagcgcaaattattggaactcgtatggcatttaaaaattacactgcttttacaaacccaaataaagaagatatttcatcaatatttgctgcaaaacctcttggaggaaacttgagtggattaaccttctcaggatgcggtgatttgaatccgcttcagaatgatgttcctcaaaacgttataaaagagggaactaaaattcttataaatggaacacaaggttatgtacttggtaatggaacaagatcaagtgctgaaaaaccaaatttaatgttgactgcagatttgatgcaaatggattcatattatattggcggttttaaaacaggccagggcggggaagtttatgatacagtagccattccaataccagtattaaatgaagaaatttataataatttactaataactgatgataaaattagcattactgtatccgatatcaaaggacgtcatctgccgctaactgaaaccaattatgctaaactttggggtgaatatagtttaagaccacaatacgacagggctaattgttataaatgtgattcatgcactgtggaagaggtctgtccaacaaatgcatttgcaaatgaaagattggatctcacacattgttttggatgtggaatgtgtgctaattattgtcgccatgatgcatttgatatgaatatgggaagtgtagatttaacaattgataatgaagatgtaaatattccaattatctgcagacaatctgataggttaaggggaaataaattatccttaaagttaaaaaaattgattcaaaatcaggaatttaaattatag

SEQ ID NO: 7687 - DNA, 609 bp, Methanobrevibacter gottschalkii
  source 1..609: mol_type = genomic DNA
atgcaaaaaattacggattcaccgattgattttgctgaagagattattgaagatgtaaaaaactctaaagaagaaggtgttttaaaatgtgttcaatgtggaatgtgtacttcaacatgtcctgcagcattacattctgattataatcctcgtgatattattgaaagagtattggatggtgatgtatcaattattgaagatgattgtatctggaattgtttttattgttatacatgtcatagtgtatgtcctgttggaaatagtgtatgtgaagtaaatcaaattttaaagcagtttgcaattaaaaacgaaattggacatgataaactttatgaatacatgggttttgcagattcttattttactgcagctattggagcaattcctgaaatatttttcaaagatattgatcgtgatgtgccgggatggtgggattttagattacatttagatgaaattagaaaagaattagatttaaatcctcctttaatgccgtcaaaagaagttattgatgaagtaagtaaaattttgaccattaccggttttaaagataaaattgaaacaataaggtcaacacaggaggataaaaatgaaagtaattccagatag

SEQ ID NO: 7688 - DNA, 942 bp, Methanobrevibacter gottschalkii
  source 1..942: mol_type = genomic DNA
atgaaagtaattccagatagtgatattcttttatttagaagctgtcttgttagtgttgaatatccaggtattgaatcatcaacaaagtttgtttttgataaattgggaattgattatgcaatttcagaaaatcaaacctgttgtactgggcttggtcattattctgatgtgtttgatcagattgatacaacagctattggagcacgtaattttaaaatagcaggtaatttaggtcgtaaaaatttagttatgatgtgtgcaacatgttatgcaattaataaaaaatcagtaaaattactcaacaaaaaagatgatttgagaaatcatattaacaagctatttgatgataatgacttgtctcacttaaaatatgaaaaagatgatttaaatccaacagaaaatatttttcatgttgtggatattttgtatggtaaaaaagatgaaattaaagataatattaaatatgatttaagtgattatgcaatagcaacacaccatggatgtcattactgtaaagtacactatgaggatactattggtggtgtgagggatcctaatattcttgatgaattgattgaagcatgtggttgtaatactattggttggtatgattacaaacgtgcaacatgtgggactggatttaggcagaggtattctaatcctgatttgtcatttacagcaactgctgacaaaatgaattcaatagatgatgaaaatgttgatattttagttcatctatgtccgaattgccatattcaatttgataggtatcaacatttaatcggagaacgtgaaggcagaaaattcagagcaatacatctaaatatagctcagtttattgcattggctatgggaggagattttgataaggtaataggtgttaaagctcacacagtaccgatagattcagtaattaaagagttaaaggaggtcaacaaatga

SEQ ID NO: 7689 - DNA, 2310 bp, Methanobrevibacter gottschalkii
  source 1..2310: mol_type = genomic DNA
atgagggataatttgaaaattggtgtgtttttatgtgaatgtgggggaaatattgcagatactattgatttagatgaagtaagggatgcattggatgtagaattcatcggacagtttgaaaatttatgttcacttaatggacgtaaaataattcgtgatgcaatttttgaccatgatcttgatcgtgttgtagttgcagcatgttcgccgataagccatgaaaaaacttttcaggattatatcaaaccattaaatccctatttgatggatatggcaaatataagagaacagtgttcttgggtacattcggataatgaaaaagcaactcacaaagctattactttaataaatgcttctattgagaaagttaaacaatctgatgcagtagatccgatttattgccaaactcctgatgaagttgctgttatcggtggtggaatagctggaatgaatgcaacgttatctcttgccaagcagggaacaaaagttaccttaattgaacaatccccttcgattggagggcatatggctaaaattggtaaggtattttcacctgttaaaattgcagaagaatgtggtatgtgtcttttaaatccgattttaaatgaacttgtttggaatgaaaatattgaagttttgacaaatactaaggttattgaagctgaaagacgtgctggaacttataatctaatactggagagatctccaagatatgttgatactgaaaaatgtattgcttgtggtaattgtgcggaagtgtgtgaagttgaagttccaaatgattggaatgataatttatctttaagaaaagcaatttacaggccttttggacaatcctatcctgaagcttatgtaattgacatggaaaactgttctaaatgtggagattgttttagagagtgcactatgaaagctattagacttaaaggaaaacctgaaaggattccgcttcaagtaggttctgttattgtagcaacaggccataagttatttgacatggaaaaaagaccggaatatggatacacccgttatgatgatgtaataacacaatctgaattaggtcgtattactggtgttaacggaccaaccaaaggtaaactcttaaaatctaatggtgaagttccaaaacgtgttgttatgattcaatgtgttggttcaagagatgaaaaaccagaaggacatagatattgttctaaaatctgctgtacaatagcactaaaaaatgccaatatcattaagcataaatatccggatactgatgttttaatttgttatactgatgttagaactcctggaatgtttgaaaaatattataagcacactcaggaaaatgaagttaggtttattagaggacgtcctggtgaagtagttaaaaaaggagataacttcattgtaagaacagaagatacaattaaaggtgaatttgtagaaattgaagctgatatggtagttttatcaactgcaatggaaccatctgagggcacaatagaaattgctgaaattttaaatgttggtactactgaggatggatttattaaagaatcacaccctaaaatcaaaccggtagcgactgatgttcaaggaatatttgtatgtggaaccgcacaagatccgaaagatatcactgattcaattatgcaggcaactgcagcagcatcaaaagtaaatgaatacaattatggtggagtggaaattgaaccgttcattgcagaaattgacactgaaaaatgtatagtctgtggtgactgtatagagagatgtaaatataagtctatgagcatacaaaatgatgagatttatatcgatccgatgagttgcactggttgcggaaagtgccttgttggatgtaatcaaagagcaattacagttaatggtaacattgatgagaaaatcatgtccacaataaaaggagtattgtctaaaaaacaagagggtcaacgtacaatattggtatttttagataacattggttatactgctgctgataatattggtgtaaatagattgtcttaccctgaatctatccatattattaaagtgatttcagtaaatcgtgtaaggccaagacatattcaatatgctcttgaaaatggtgctgatggtgtatttattggcgaattccctggagatttaatgtatgatgaagtggaacgtaaaatccaaagggtaaaagatagaatttatgaaatgggtgaaaatccggaaagagtaacattttcgaaggtatatattccatacttctcaggattagctcgcaaattcgttgatttcgataaaaaaattgaagaattagatgaagctgaattatga

SEQ ID NO: 7690 - DNA, 570 bp, Methanobrevibacter gottschalkii
  source 1..570: mol_type = genomic DNA
gtgtattacttgaaattaagtattggtgataatatggcaagaagagaagctattgaaaacataattaactgtattgacgatgaattagtcgtttgcaatattggatttccatcaagagaattatatgatatcaaagataggaaagaaaacttttatatgattggatcaatgggacttgcatcttcaattggacttggtcttgcattagcacagcctaacaggaacattgttgtaattgatggggatggagcacttttaatgaatatgggatcacttgtaaccatatttgcaaataatccgaaaaacttaacttggattgtaatagataatggtgcatacggatcaactggtaatcaagatacttatgctcaaaaacttgatttagtggatgttgcaagaggagttggatttaaaaatagttatgattttgaagatattaatctaaaggaatttataaaaagtgatgatgcaagttttattgtatatcacacagaacccggaaactcaaaagctccaattattgatttaagtccagtagaaattaaaaatagattcatggatattgtttaa

SEQ ID NO: 7691 - DNA, 492 bp, Methanobrevibacter gottschalkii
  source 1..492: mol_type = genomic DNA
atggatagtagtgaagctatatttgatggacttaaagatgcaggaattaactttattgttagtgttccatgtgttaacttatcaaaattattaaatatgattgataaagatccggatattattcatattccagttactcgtgaagaagaaggaataggaatatgtgccggagcatatctcggaggtaaaaaagcagcaattttaatgcagaattcagggcttggaaattcaattaatgcattaaaatccctaacagaactatatgaatttcctttacttatggtaatgagccatagaggtactgaaggagaaaatatttgtggacaggtcccaatgggtgagtcaacaccattaatattggaagcaatgaattataaattcttcaagccaggaactcctgaaggagcatatgaagatgtaaaagaagcttgggaattatcagttgaagaaggaaaacctgtaagtgtattacttgaaattaagtattggtga

SEQ ID NO: 7692 - DNA, 1119 bp, Methanobrevibacter gottschalkii
  source 1..1119: mol_type = genomic DNA
atgtttgatagactaccaatttcttctaaaacagagaagattttaactaaatctttagatgaacaaataactgttggggaagcaaattacttaatgaatattaaaggtgctgatttatacccattacttgcaactgctgactatttaaggcaaaaaatcgttggagataatgtaacattcattaataattgtaatattaactttacaaacatttgtacagttagatgtggattttgtgcatttggaaaagatgcagataatcctgatgcgtatattctggatgatgaagcaatccttaaaaaagctcaaagcgctattaaaaaaggcgcccatgaattctgtgtaatgggaggggtacttcctgatgctgatattgaatattatgaacatttaatgcacttattaaaagacgaatatccgaatgtaatgattcatggattttcaccaactatgattgctgatgcatgtaaagtatccggaatcagtattgctgaaggttgtgaaagattaaaggatgctggtcttgatacattaccaggaactgccgctgaaattttaacagatcgttcaagagcattgatatgtcctgaaaaagtaagtgttgatgagtggataaatattattaaaacagcccatgaagttggaattccaggttctgcaactattatgtatgggcatgttgaaactttagaagaaagagtggaacatattgatattattagaaggatacaagaagaaacccatggatttacggaatttattccaatgactttcatgcatgaatattctccaatctttttagaaggtcagtcaaaccttggagctagtggaacacaggatttaaagttatatgctgtttcaagattaatgcttagggatttaattccgaatattcaagtatcttgggtgaaaatgggttatagatttgctcaagtagctttaactgcaggaactaatgatttaggtggtactttaggtggagatgaattatctgaagcttctggcgcaccagatggagttgaagcatctattgatacattaagtaggatggttaaagatttaggtagaaatccaattgaaagaaactctaaatatagcgagttttatccaattgaataa

SEQ ID NO: 7693 - DNA, 585 bp, Methanobrevibacter gottschalkii
  source 1..585: mol_type = genomic DNA
atgaagaagtttattgtcattgacggattagatggatctggtaaagatacgcaagtgaaattaatagccgaaatgtatgaaaaacaaggacgtaatgttgttattaggtcacatccatgttttgacaataggtatggtagaaaatcaaaagaagcactattaaaaacaggtaaaattaatcatttgcttgcaactgtttattttgggcttgatgcaatcagatctgttgttaaatacacacatgatgataatgttgatgtattaatattctccagatacattttagcagtgatgtatcttccaaacggaataaatactattgtttataaaattgtggcatttattcttccaacatcagattgtatgttctttttagatgtaagtccagaagaatctcttagaagaattggttctcgaaatgaaaacactgaaatgtttgagaatattgaatgtctgagaaaaaaccgtctaaaatcacaaaaatttacatataactggaatgtaattccaggcgatgattcggctgaggtaatttctgaaaaaataaaaatgaaatgcattgaaacagacaagttacttaattaa

SEQ ID NO: 7694 - DNA, 258 bp, Methanobrevibacter gottschalkii
  source 1..258: mol_type = genomic DNA
atggataaggttttaagagatatattaagaaataatcagtattttgaagaaataaatcctgacagatatgttcctgaatttttaggattaattgtgaatggtgttgttgtatatcacgttaactggattgacataattgaaaatgagatagtattcatgcataaagatattcaaactcatccaattgtttcacttgttctagaaaatcttaattcattaatgattataacaaatgaaggaataaaggaagtattataa

SEQ ID NO: 7695 - DNA, 978 bp, Methanobrevibacter gottschalkii
  source 1..978: mol_type = genomic DNA
atgttttctaaagctacacttaaagaaagaagacaatattatcgtgaagaatggtcagtaaaagacttgccagaattcattgctactgatttaaaaaaaagggaattcggttttgaccataatgggagaggacctaatgatagatacaaagtatttagaggacccgaatctttaggaaaatttttaaaattcaaatccccatttgcagcatatatttcagtagcattttataataatcctagaagaagggaggactggttgaaagcagaatatatttttgatgtagatgcaaaagacattccaattaggacttgccaatgcaatggagtttgtgaggtttgtcttggtgaagctttagaaattgttaactcattaattgacacattacagtcagatttaggattaaaaaatattcatttaatttattcaggaagaggatatcatattagaattttagatgaagaaatgatgagtgctaatagcgaactcagatctgaagttttaaaatatgctgcaggagcagaagttccgaaatctcaatttattaatcctgaaatttcaaataaaagttttaactttgagcattttacaatccctgttggatactctaaaatattcactgataaagtgaaatttaatattcagcatttagttggaaatgagaaaattgatggcattaatccaaaattgatgaaagatatcctgtcatcaagacatcacttagataatgataattggggttattttaaaagagatattggccctagaagatataaaaatcttgttgctgctatggctcgtgttaatctatcaactattgatgcaaaagtttcaattgatttaaaaagaattttaagactcccatcatcacttcactcaaaagtaagtatgaaatgtatggaagttaaaaacagagaaaattttgatcctctagacaaggcagtccctaaatttgtttatgaaagaaaaggtgtataa

SEQ ID NO: 7696 - DNA, 516 bp, Methanobrevibacter gottschalkii
  source 1..516: mol_type = genomic DNA
atggaagaagtagttaaagtaattgggattgaacatttaaaagttatattatctagccttacacctgaagatattgtaaaacccgcttatgaaaattggcaaacaggtatgaaaacaggttatactagactaaacttagaaactggtgagatttatgggataggggttgaattaaataatcttccacttccaaataatattttcattgatttgtttaaaatagattcatatgatgatccaattgatgaagaggaatttttctcttcttcggaatataatgaattcttagagtttagcagcagtgaacctagtgaatatattccggatattatcacagagttttgtgagctaaaaggtattgatgagatgaaacgtaaaataggccttttagcatataattttgaaaaaaatgaaagatctaattataatatgtgggaatcatccattttaaataagtattatgatgcaatttatgaagaccataatccattcatgttttcacaaaacagtttgtag

SEQ ID NO: 7697 - DNA, 1326 bp, Methanobrevibacter gottschalkii
  source 1..1326: mol_type = genomic DNA
atgactgaagtttcttatattaacccattatcaaacgaaggaagaggaatcattcgaaattatggtgatttaaatcagatttttaaagaggatgattccttaattgaaatttgtactcatactgcaaatcagaaactttcagatgattatattccaaaatcataccatgatctggctcttaagcgtatccaatgggcaatagaaaaaaagaataacaaaaacttcactcaagcggaattcgaatttttaacaaatgatgagttatacttacaagatgtagtaactttccatatattatgtcaggcaattgctgttcagtttaacacaggttcacgtgaaacaagattatttgtccaatcacaaggaacactcatcctagaacgtctcgctaaaataccaccaatgtcaagagctgaaattattgatgatgtacttgatgaagttaaaattgatggcagcattaaatggaaatcacttaaagatattgttgcaagcaaaaggctaaaattaactgatttattaatagatcgtggagatattgttcttcagcaagacgattttttaaatagatttgccgatagattccatgacagaagtccggatagaatgtatagcatattgattggagatagtgttaaagaacaaatattatcaagattagtcatgcaaaaaaccgaagaatacattaaaagaattaaagagatgtcttctagaattgaaattcatcctgcaattattaaaattggagaggagttaaaagaattcattcccgatgaaactggaaaatataatcaatattatgcaggcaatggaggaatctatggtagtgttcaagctggaaaattaaatccagatgcttttccaccttgtattcaagaaacagttaatggagtatcttcaggtggtcgtaatgatgctattgtattattattaacatcatttgcatcctatgctagattgtatccaagaatttttgcatcagaggaaaatgttaaagtttcagatatggatcctgatttaacaattacagaaaatgagattttacctttaatttttgatgcagcagataactgtacaccaccattattcgaagatcaaccacaagaaaaaataaatattatatcaaaattaggttttggaatgcatgatagactagacattaatcatgaaggggaaactaaatggtacactccaatgagttgcgagaaaataaaaatacatctgcctaatctatgtcatccagacaagtcctgtaaaggtattaataaccctttgtcatgttatggacgtaaaaaattccagcttgataatgcacagaaagaataa

SEQ ID NO: 7698 - DNA, 804 bp, Methanobrevibacter gottschalkii
  source 1..804: mol_type = genomic DNA
atgtttaatgagcatgttataaaaattaaggaggtttttagaataccaaaagttttgattagtggaaggggaggttgtggaaaaagcactatcgtttcacttcttgctcgaaaactaaagaataatggaaatagaattttagttgtcgattgtgatgagtctaattttggcttaaataaaattttaggtatagaaaaaccaaaaaaaacattaatgaataatcttggaggtaaattagctgtcagggataaattgcttgaaattgttcagaaagatgaaaatcatcttaatatttttgatgtaatgtcattagatgatttatctaacgattatgttacttgggatgataatttaggatttcttgagattggtaaaattgaacattcaatggaaggttgtgcatgtccaatgggggctttatcacgagattttttaaatcatctcacaatcaatgaaaatgaatggattttagttgatactgaagccggaattgaacattttggaaggggtgttttggaaggagcagattttataattgctattgttgatccttctgaagatgcaatattgctggcaaataaagcatataaattatctttcgaaaataataaaaatttcggtgttattctaaacaaaattgatgataatctagaagaaatattaaaaagtaaattagattccaatattgctattttaggaatcattaattattcttcagatatagctatgttaaatcttcaaggaaattcagtagaatctgtttctatcggtgtattggatgacattataacatgcattaattaa

SEQ ID NO: 7699 - DNA, 630 bp, Methanobrevibacter gottschalkii
  source 1..630: mol_type = genomic DNA
atgaaattaaaaaattttaaaagagaaaacatgattcctcttcctgtgactttaatatctacagcaaataaagaaggaattagaaatattgctccttattcatgtgtagtgactatattgagaccaacaaatcttgtttgcatagcttctgcaatgatgagggatacatatgtaaatattgaagaaaccggtgaatttgttattaacatgatatctgcagatatggtggatgcagttataccaacttcatctcatgtgtcttttgaggtggatgagtatgaactggcaggtttggaagctactgaatcaaaaaaagtaagtgcaccaggtattaaaggagcttattcgcaaatggagtgtaaactaacaaaaatttataaagacaaagatccaattggaattccatatttgctaataataggggaagtagttcatcttgaagttgatgacgattgcttggatgaggaatatggtgttttggatttaaataaagtgaaaccgttaatgatgctggaatctgataaaggaatgcatttctgtacaattgaagatcttaataaattcgaaacttttggagcgatgttttcagatggaaaagatcctttggaatggatgtatgaaggagattaa

SEQ ID NO: 7700 - DNA, 546 bp, Methanobrevibacter gottschalkii
  source 1..546: mol_type = genomic DNA
atgaaaattgaaagtataactgattttgaaaatttagatagtcctcgtgttcaaagaatacccggattttatggtgaaaaacttatagatggtgttgttattagaaaacttccaatgtttagtgatgaaagaggatttttatgtgaatttatcagattaaatgatgaagaactaaaagctagcaatataaaacaaatgattgcttcatattcttatccaggcatgataaaaggatggcaccttcattctaaacaagaagaccatttattttgtgtaaaaggaatggttaaagttgttctttacgactttaggaaagattctcaaacttatggtatgataaatgaaattttcatgggagataaatctcctataattgtatatattccaccggggatatttcatggaacaaaaaatattggaattgatatgtcgatagttattggtatgccttctttgttttatgatattgatgatgtagatgaaagaagagttaatccaatcgataatgatattatcccctatgagtgggattgtaaaatggaataa

SEQ ID NO: 7701 - DNA, 2727 bp, Methanobrevibacter gottschalkii
  source 1..2727: mol_type = genomic DNA
atgaataaaaaactgttgattataagtgttttagtaatatttatattcattaatgcggtatcagctgaaaattcgacagatattaatttagaactcaatcataacaatgatgaatgcattaaggaaatatctgatgaaagttcaacagatattgatttaaaaatcaattacgaatatggggatgaaatcaatccggaaatttccatatctcattgcaataataatatgaactatacaaaaaatataattcattcaaacaattacagaattaccatgaataaattgaatgacggagcagaatgttctgtttcagtttcagctctagggtacataactcagattcaaaatataaccataaattcccaatcaaacaaaactactatttttaatctaaaagctacggatatttacaaaatgggatatgatatgacaaaatctgcagatagattacttaatttttcatctgctgatgatgttctggttattaccactgctggaatgacaaggattaatgatattactacagaaaatgcattggatggaatttataatgctgctgatggccatataacttatggaaaaggtaatcttttaacattacatgccataagaacagatccaactaattttgcattttttattaaaaaaggaaacaggttgacaatggcattctatcaaaatgcttctacaactccagtatatactggaattggaggtgttggattaactacaaatcaatggaaaaaattaaaaggattaataggtgctgatgatgcttatacttatgtaagtattgctaatgcatggaatgctgggttatattcagatattctgactttagcttcgtatcatggacatgtatgtactggtttaattagtggtcaggctatggttactactttaattaaatattatccgccacgtggtgaaactggcgcccagcctcttgaaaatactgcttattatgtgttgggagttccgggtggttctgatgacgatgcatttacatggacacttgatattactcagggcaaaatgtcatacattgggtttgacactatggaaaataaaaatatgaatggtttcattagatggaattcctcatcaaatactggacttttaattataatgtcttatgatgaagcaaaaataaaaaatacatttaaaagtttatatccaaatattaatccagacaatagtgttactgaagatttaatatatcaaaattggttgatttcaactttgatgagtaatcctgaatcattagtcacaattgaagcagcttataaagatcttacattggaacaaaaaaatcagttaataggaaatcaattatggagtgcgtcgaatattactgctcggggattggatttggattacattaacagtttaaatttgccagatgctgaaatggaaactggaatctttaataatgtacatttatctgattcacagttaaaacaaattggtgttgatgcttctttaaaagctgtagattactttaaaaatatcaatgttactatagaaaaagacatgtctaacttttatgttttgactggtgcgggatttgtacgtattaatgatactgcaacatctatggtatttgatggtattgaagatatttttggtgctagattaagtagaggtaatctattaccagttcatactgcattgtggaaagatttgataattgaattttattggttgaatacttctgatatttataattcagttacttatagtctaaaatataattcaacaactggtcaattatatgaatgttcacagcaatataatattcaggatcgtagtttaaggtatgaccctccttatgatgctttaatgggctggttattccataatcatgtttgtactggtagttctcccggcgtattgttggcggataaaatatttgatgatttgcctttaggtgaaaatgaaagttatgttttggtttcaacttatacttattgtaaggatgatatgttatccagattgcttggcgtgtctccgggtatgggtaattattataacctggcttattccaatagtgatgtaaatgcaggagcattatggactgctgattctgatataattatcagatggaattcagagactaataccggaactgctacaattattaagtttggttatccgatctttaaagatggtgctgatgaatatgcggaatggatgagatttgtaaaaggcgattattcttctgaaaatattgtctctttaccaactttaagttttgaagttactaaaccaattaccagagatgattataataagattatttccggcaaatccgatgatgaaggaattaatgtattaagttatattagagctctgccagataaaattcctgctgttctaattgataacaatggaatttctaatggaaatgatggtaattccattaataaatatccaaaaaaatctaataacaatagtgcaaacaccaatagtattttttcatcttcaaataattataattccccgagcaagggattaaatcctaatgttggggtttcttcctattctctttcaggcgatagtgatgttgaagataaaggtgaagcaagtagtaatggaaaatcctatgaagtatccaagactcctgcaactaaatccattgattctaatagtttaatttacgcattagttggtgttttggctattggtattttaatcggtttaggttttatgaaacgtagaaaataa

SEQ ID NO: 7702 - DNA, 1989 bp, Methanobrevibacter gottschalkii
  source 1..1989: mol_type = genomic DNA
atgtcaaaaatatttatttcatgtgcacttccttatgcaaatgggccatgtcatttaggtcacatccgttcgacatatctgcctgcagatatctatgcaagatataatcgtatggctggaaatgatgtgctgatggtttgcgctactgatgaacatggaacacctattgctgttaaagcagataaggaaaataaaaaaccaattgaaatttctaaaagatatcatgatatgattgttcgtgatgttgaatcaatgaacatatctttggataatttttcaagaactactgatgaaaaacattatgaaattgctcaaaatttctttaaagaattatatgaaaaaggattaatttacagacaggatttagagcagctgtactgtccaaattgtaaaaaattcctcccggacagatatgttgaagggttatgccctgtttgtggagcagaagctcgtggagatcattgtgaaaaatgcggtagggctctagatccaacagaacttgatgaaccgcattgcattacctgtggaactactcctgttattaaagatacttatcaatatgcattcaaattgtccgaatttgaagatgaacttaaagaatatattgataataatgaaaaccttccttctaatgttaagaactatgcatcaaactggttaaaagaaggattgaaagattggattttaacaagagatatggattggggtattccagtaccgttggatgaagcaaaaggcaaagtgttatatgtatggattgaagcattcttgggttatatttcttctgcatcacaatggtcagctcagtctggcaaaaaatgggaagaatactggaatgactttgtagttcatttcattggaaaagatattatttatcatcattcaattttctggccaggattattgaaggctgcaggatgtaaattacctgatatgatttatgcaggcgaatttttatctcttgaaggagaaaaaatgtctacaagtaaaaattgggttatttggattgatgattttgtaaaagaatatgatcctgatattcttaggtactttttaacaattaatgctccattaaataaagattcagacttttcatgggatgacttccaaaaaagaaacaatgatgaacttgctgatgtgattggaaacttcttacatagaacattcacattcacacgtaaattctttgataataaaattccggaatatgcaaatccatctcgggaagatgaggaattcagaaaatctattgaaagcttaccgaaagttgctggtgaatttatagctaactttgaatttagggaaggtttacttgaaatatttaaagtagctaagaaaggaaataaatatttcaatgatcaggaaccctggaaagctgtaaaagaagacatgcaaaaagcagctaactgtttatacttatctaaccagttagctaaaacattagcttacaccttaaaaccttatctgccaactaaagctgatgcaatagctaaaatattaaatattgatgagttatctaactgggcagatgcagcagtattcctcccgtcaggatatgaaatcaataaagcaaaacctctatttaaaaagattgaagatgaagaaatagaagctcaaaaagaaaaattacaaaaaaacttaaaaaacaatgaggatgagaatatgagtgacttaattactattgatcaatttgatgaagttataattaaaattggacagatcaaagaagcagaaaaaattgaaaaatctgacaaattattaaaattacaagttgaaatcggtgaagacaaacccagacaaattgttgcaggtcttgcaaaattctattctccagaagaattaatcagcagaaaagtatgtgttgttgcaaacttacagtctgcaaaattattcggaacattatctgaaggtatgattcttgctactggagaatctggtgcattattaactccagatgtaaaagcggaagttggggaaagaattcaataa

SEQ ID NO: 7703 - DNA, 1578 bp, Methanobrevibacter gottschalkii
  source 1..1578: mol_type = genomic DNA
atgcctgaatctgtcctagtaaacaaagccgaaaactacttaaaagcaatagcaaatgatgctattagtcttgataatatcgaagatttcgagtatttcaaagacctgtactttaaactagatgacagattaaactttttacaagaattaaaagaggatatggatgcacaaggttacactacaccttttacatccctaaataaatatggatcaaaagcagtagctgatattgatgttgaagaaatgggtgaaaacagccgacacaacaaaatatttagaatgaaagccaatgctaagaaaaacattctggatagagttaaatcagctattgattcacataaaattgcaattggtaacttggaacaatttggatatgtgaaatgtgattcatgctataaaaaatattctatgagcgaatataagcaaatagaaggtaaatgcagttgtggatgcactattttttcatttaaaatccgaaaagatgcaacccatagaatagaaataattccctacttgccattgtctggcaattatatggttttgcgaaaccagcttaatacatttggtcgtgaatctcttaaacaagttttaaacatacttaaacaggaacgtagaggtgttgttaaaacaatagctctcgttatacgttttagagataaaaacaatcgtttagttagaaaaaacatcactttagattctgaatatattaataactatgaagaagaagtgagaagaatatatggtaaacgtgtaagaattgaagcattaagatttcatagaacaaaacctgccattatcgatgataaacatgccagaactgccctggctattggttatgtcagatatagcgagcaaataatcgatgatattaaggatgaaatattaaaaagaaaactatctgattttaaaagaattaatacttatgatgaaatctttgctgaatatgaaaataaaactcccaacttcattgacaaatatgatttggaagcaattgataaatggagaaaatctcagattaaagagaatttcaaacatttgggtttttatgataaatatgggaatataaataggtctcttagccgtgatttaaagaaaagggaaaatatttataaaaacattcttagaaacatagcatctgcattgattatttgggatatcttcaggtattatattacaacatcaaataattcacgtaaaattgacatcagcccatttccctatatcagagtggaacttgaccgtgaacaaagaaaagtattccaaacaacccacaaaaaagtaatcgaaactttaaatacctatacgaatattaaaattattcctgtttgtgaaatggatttgttgttgcatgataaatttaaatttgaaaagcaaatcaaaaattccaatattaaattcaatcatgttgcattgggggctgctttaattcatgagaattcagacattgaacttgaagacattagtaatgcgttaaatattaatgaatctaaaattaaaaaagaaattaaaaatattgaaaatattaaaaatccaaaaagtgacaagtcaaagaaattcttagatttaattaaaaaatag

SEQ ID NO: 7704 - DNA, 465 bp, Methanobrevibacter gottschalkii
  source 1..465: mol_type = genomic DNA
atggatgaagatgtaaaaacagttcatataacaaaagccttaagttctgcagttattgtgaatctgattgaaaattatcccaatcttgaagtaattacttgttctcctagtgtgtatgatagaacttcaagcaaatatattgacgcactttcccagcttgatattgaagttaaaaaaaaatataattggggagctaaaagccaaactaatggtgctgagtttgaagttttagaattatcagataacggtttaaaaccaaaagaaatagctcaaaaattagatttaaaacttaatcgcgtatattatcttttaaaaaaaagtaatgcaaaatatgacaatagaaaaaggaaacatgatcatgaagagattaaagaacttaaaaatgagggattatctgcaaaagaaatttcccaaaaattaaatattccattaaggagtgtttattatattctaaataaaaaataa

SEQ ID NO: 7705 - DNA, 1014 bp, Methanobrevibacter gottschalkii
  source 1..1014: mol_type = genomic DNA
atgatgattttaccacaaattcctttgtatggaatagccataatctgtggattactatctttttttgtaagcagattaactatgccgaggattataagaaaacttgaagcggctgatattgttgggaaagatattcataaatcctggaaacccgttgttgctgagatgggtggattcggtattctttttggatttattataggaatattttccggaatatatatgcatgacattcttacatttaatttagttgttgttcttgtagtaatattgcttgttggaataattggtattgtggatgatttacttgccttatcttcaaaggaaaagttctttttacttttccttgcaggtcttcctttaatctgggtggcacctcccaatgtaggattattatatctgattacaattcctattgcattatctgtcggatctaatctaacaaacatgcttgcaggtttaaatggaattgaatccggtctgggcattatttcaatggcatcacttacaatagcctgtattattttaggcaaatatgatgtaacaattatttccatgagtatgcttggtgcattaattgcatttttatattataacagatatcccgctaaaattttccctggagacaccggtacattaattatcggtgctgcaattgtttgcattgcattcattggccgtgtgaaattaattgcatttattgtattaatgcccaatattattgatgcagctttaaaattctattctgcaggttttatgaatcgtcagcagcaaaaaccaacacaattaaacgatgaaggtaaattggtaaggcctgatgttggttttaaatcattgatcagattaattttaagaaaaccgattgcagaaaaagatgccgttagattaatctgggctattggctttgtatttggcatattgggtattgctgtggctctaacaatgccgggggtacttgaaagcaaaacattaatgaacttcttacaaatcaaggaaatgttgtatcatatttag

SEQ ID NO: 7706 - DNA, 669 bp, Methanobrevibacter gottschalkii
  source 1..669: mol_type = genomic DNA
atgatgccctatgtaattttaagtgcagctatgacattggatggtaaaatcgcaacaaaaaccggaagctcaaatatttcaggaaaaaaagatcttttaagagttcatgagcttagaaaagaatgtgatgcgattatggttggaatcggaactgtaattgctgatgatccgagattgactgttcacaaagttgatgcaaaaccggatgataatcctgtacgtgtggttgttgatagtaaatttagaacccctgctgatgctagaattacaaattctgatgctgaaacaattattgcctgtgcaagagaatataaagatgaattgattgcatctgataaatacgaaacatttaaaaaaagaggagttaaatttttctactccggaagtaaaagagtggatttaaagtcattgatgagttaccttcatgaagaggggattgataagctaatgcttgaaggcggttctactttaaacttttccatgataaaagcaggccttattgatgagataagaatttgtgttgccccaatgatagttggtggctgtgattctaaaacattttttgatggtgaaggttttgatctgatgggtgaagcagttaagcttgagttaactgactcatatcaattagataaggatctgattctaacttataaagttttaaaataa

SEQ ID NO: 7707 - DNA, 465 bp, Methanobrevibacter gottschalkii
  source 1..465: mol_type = genomic DNA
atgaaggcatctgaacttttagaggctataaaggaaaatattaggtattatcccattgaatatttgaaaaataaagtagccgatgataggtacaaagatcctttaactaaaaagcttgctgaatataactcaaatgcatatgatgatatatatgagacagtcataatagatgattttgatataaatgataaggtagttaaaaaaataagggaagacattgcattttattttgataagtatggcggaggtgaagatgaacataagatatttgctgagaacatttcactctacctggcactaatagctaaaaagccacttcatccctatggtgaaaataaaaaagatgaagtctactattcaaatggctcttactactgcagaggccgcataaaatatattcatgatgaaaaatcattgtgcagatactgtgtctgcaaaaatgtcggattcatggatttattttaa

SEQ ID NO: 7708 - DNA, 666 bp, Methanobrevibacter gottschalkii
  source 1..666: mol_type = genomic DNA
ttgaacaaaagaatcgatttacatatgcacagcttatttagtgatggggaattattaccttccgaacttgcaagaagagctttgaaattaaaccatgaagcaatagctattactgaccatgttgactggtcaaatgttgaagcaataccaacaatccaggatgcaattgacgacattaatgctaactgggacataactgttgtacttggagctgaagtaacacatgcaccagtagaatccattgacggaatagctgaaagggcaaaagagttaggagccgaaattgttgttgtccatggcgaaacattaaatgaacctgtaactcccggaacaaaccgtgccgctgttgaatcaaaacatgttgatattttaggacatcccggattaatcactaaaaaggaagcggaaattgcccttaaaaatgatatttatcttgaaatttcagctcgtaaaggacactgcctcggaaatggtcatgtagcaaacattgcctgtgaagttggaaataaactgcttgttgataccgatacccatgcacctgatgacatcattacctttgaaaaatcatatgaaattgcattaggtgcaggtttaaaccatgacgatgcaatgaaagccattgttgacaatccccgcagattacttaaaagtaaaggaatattatga

SEQ ID NO: 7709 - DNA, 1224 bp, Methanobrevibacter gottschalkii
  source 1..1224: mol_type = genomic DNA
atgaaagcaaaagcatttaaaatagctgacggtgtttactgggttggtgtaatccattggaatagtagaactttccatggttatggaattcccggtaccacttacaatgcatatttggtatttggtgaggaaaaaaatgtattgattgataatgtttacaggggattattcgatcagtttgatgcaagagtaaaagacgcattcgaacaagaaggaaaagaattcaaaatcgatgtattcgttcaaaatcattcagaaatggatcattcaacatttttaagagatacaatcgctaaatataatccagatgcggaaatttatgcatcacaaaattgtattaacttcttggaagctcaatatcataacttctctgatttagaactcaatgctgtaaatactggtgacgagttagatattggtggtagaactctaaaattcatatctgcaccaatgcttcactggcctgacagtatgtttacttttttagctgaagatggaatattattctcaaatgatgcattcggccagcatttatgtcattcaaaaagatttgacagggattatccgttggaatatgttttaggggaagcacaaaaatactatgctaatcttgtaactttaggctctccaatgttcagaatgaaattgcaagagttaactgacaatggtattttagatgaaattaaaatgattgctccatgccatggtcagatctggactaatccggcaccgattgtggaaaaatactctgaatgggcatccggtgtatgtaaagataagattactgttatatatgataccatgcatcactcaactgagaaattagcattccaaattgctgaaggtattatgagtgaaggtgtcgaagtcaaaatgtactttatgcaagaagatggtcctgatgatgtaattacagacattttagactctaaagctattgcaatcggcgctcctacaatgatgaacaaaccattcccgagaatcggaaacatgatgtactggttagattgtgttaacttcaaaggaactggtagtgaaaaaaatgcattgatcttctcatctaaaggatggggtggaggagctgtagataaacttcaaaaagatttggaaagtgcaggatttaatgtaactgacacaatggatattttatttgtacctgatgaagatatgcttgctgaagcattcgaaaaaggtgcagaacttgctcgctctattaaagaataa

SEQ ID NO: 7710 - DNA, 507 bp, Methanobrevibacter gottschalkii
  source 1..507: mol_type = genomic DNA
atgtccgatttaattatttatttttcaagagatggtgaaaattacttcagtggagaaattaaaagcattgaaaaaggaaacaccgaagtaattgccgagtatattcaagagtttactggtgctgatatatttaaagtaattccaaaaaaggattatcctagcgattacatgaaatgcattgacattgctaaaaaggaattgaaagcaaatgcaagacctgaaattaaagaagaattgagtgacatttcagattatgatattatatacattggatttccgaactggtggggaacgcttccaatgcctatgtggacccagttagaaaagctagattttacaggaaaagtcataaaaccatttgttacccatgaaggatcaagattcggtaaaagcggtaaggatttgaagagactatgcaaagatgccataatcaaaaaaggtttatcaataagcggcagtgatgtttatgatttagcagatattgtaaaaatctggctagaggaataa

SEQ ID NO: 7711 - DNA, 4047 bp, Methanobrevibacter gottschalkii
  source 1..4047: mol_type = genomic DNA
atgaagattaaaagtatatataaaatattgatattttcaatagttttacttatttcattgtctgcagttgcagccgaagagagtatggataataccacatcaaatgatgatgttctaacttcagattcacatgatgatgttttaactctgaattcaaatgatgatattttgacttctagtgaaaaaacatggtatgttggaaaaaatacgactgttggaggtagcggaacacaagaagacccatttaataatattgaattggctttaaatcattcatcaagtaatgatacaatatatattaatccgggtgtttatgatggtccgcataatactaatttaaaaattgatattgataatctaactattaaagcaaaaccaaattccgtattattaaatgcaaatattaataatacaagagtttttgaggttactggtaatgatgtttcaatttcaggtttaaacttctccaatgtgtatatggaatatggtggtgttattaaatgggatggtaatggaggatcattaactgattccactattaaaaattccaagtcccgtgttggttctattcgttgggaaggcaataatgcaataattaataacataactattctcaattctacttccgaaaatggtatacttgtcatatcaggtacttcttccaatataacaaattccactattagagatactaaaggttattatggtgcagttatgtttggtggtaaattcaatataattgataactgtacttttataaacaacactgcatggatgaatggtggtggagtttatgattggggtgcaaataacactgtaagtaattctttatttatagctaacaatggaactcgtggtggagcaattctgacttatgaaaatcagccaaataggatgaacataatcaacaatacttttattaacaatattggtggacaagcaggtgcaattgtagtaagaagagcaggtgcaaacattgataactgtacttttatcaataattcagccggatctgctggagctgttttaatattgtctgaagcaaatatcaccaattccatttttgagaataacagtgcttcaactgttggtggtgctgtatatattacaggtgatggttccactattgataattcaatatttattaacaatactgcaaataacgatggtggtgcaatttactggagtggtgaaaacggtactgttaccaatacaattttcattaataacacagtaaataatgggactggtgaagcaattggttatattaataatgttactttaaataatgttactttggtaaataataatattgaacaagtaattgttaacgaatcaacaccaacatttgaatatgtgtttaaacttactgaaggatacagtaatgttaaattaactgataattatactgcattttgtactgaaaagactaaatggtcctcaagtcctagaactccattaatacctcataatgatttatccatattaaaaaatcatataactggtgaatcagtagcggagtatttgaaaatactgatatacaaatatctgaaagatccagacagaataagaaatttacaacaaaaaatctggatattcactgatgacaattatattgatagtactgattctataatcaaagaggttatttctgattataattctggtttccgtattcctaatcagggattttctgaaattataaatgatacaaccgtacttagaattgattttaaatcatataatattactaaacaaatccaaaacatgataggatttaaaagtagtattgaaaatattacttataatatgagtgttgttaaaaatacattaactccagctgttattttaggtaatcaaacaacttttgaaatcaaagttactaatactggtagttactatttgactaatgttagtgttattgaagatggctatgatggtttaatctacaacagtttttcagatcctagcggaaaatggatattttcaagaaatagtgatggaaaaccaatgtggacatataatggtactctttatgttggtatttcatatagttttaatgtaacattcaatactacaaaaactggtaatttcactaattttgtagttgtcacatctaatgaaactgacaataaaaccactaacaatactactaaggtttataagccggatatgactgttgagaagctttctttgaataggactgtttatgttggtaatcagactgtctttactattgttgtccgtaatactggtgattgtgatttaggtgatgtctttgttgttgaaaaagctccagaaggacttgtttacaactcatttaaaggcaccgactggtcatacaacaatggcaaatttacttatggtaaagttttaaaagtcaatgagtctgttagttttgagattgtattcgatgctgttagtcctggtaattggactaatgttgttgttgcaggttccaatgaaactgataacaaaacaggtaataatactactaaagtttataagccggacatgactgttgagaagctttctttgaataggactgtttatgttggtaatcagactgtctttactattgttgttcgcaatactggtgattgtgatttaggtgaggttttcgttgttgaaaaagctccggaaggacttgtttacaactcatttaaaggcacagactggtcatatgatggcaataaattcatgtatggtaaaaccttaaaggttggtgagtctgctagctttgatatagtatttgatacaattagtcctggtaattggactaatgttgttgttgcaggttccaatgtaaccgataacaaaacaggtaataatactactaaagtttataagccggatatgactgttgagaagctttctttgaataggactgtttatgttggtaatcagactgtctttactattgttgtccgtaatactggtgattgtgatttaggtgaggttttcattgttgaaaaagctccagaaggacttgtttacaactcatttaaaggcacagactggtcatatgatggcaataaattcacatatgctaaggttttaaaagtcaatgagtctgttagttttgagattgtattcgatgctgttagtcctggtaattggactaatgttgttgttgcaggttccaatgaaactgataacaaaacaggtaataatactactaaagtttataagccggatatgactgttgagaagctttctttgaataggactgtttatgttggtaatcagactgtctttactattgttgttcgcaatactggtgattgtgatttaggtgaggttttcattgttgaaaaagctccagaaggacttgtttacaactcatttaaaggcacagactggtcatatgatggcaataaattcacatatgctaaggttttaaaagtcaatgagtctgttagttttgagattgtattcgatgctgttagtcctggtaattggactaatgttgttgttgcaggttcaaatttaacaggtaataagactggtaataatactactaaggtttataatcctggtttgaaggttgaaaaaatcactttggatcctgttgtgtctgttggtgagattacatcttttgagattgttgtccgtaatactggtgattgtaaacttggtgatgtttttgttcatgaagatagttatgaaggtttaaggttccatagtttcaggggtgatatgtggaaacagaaaggtgatactttctattatcagggtgttttaaatcctggtgagtcagtgtcatttgtaattttatttactactttaaaacctggaaatttcactaatattgttactgctggttccaatgttactaacaatactactactgaaaacaaaaccaaagtaatagaaaatcacactaacaacaatactaatggtactaataaaacagttaataatgaaaccaaagaggttaatgttcataaggttgatacttcaagagcaactggtaatccgttactcgcattactcatggttcttttaatgattagtgtgacttctgttagaaaattcaaaaaataa

SEQ ID NO: 7712 - DNA, 789 bp, Methanobrevibacter gottschalkii
  source 1..789: mol_type = genomic DNA
atggataataggaaagtgattataattgcactaatagcagttattgttgttttaggaggtttaattgcatattcactttttactcaaaaccaagtccaatatcagacaatagctgttagcaatgcaacaacaatggaagtgccggtctctaaaaattcaacatttttcaatgacgcactaggaatcaaatactatcaggatgacaaaagcggcgttcaggtgattagctggaacggccaggaacaagcatcagctaaaggagcagtcaatattgcctctcaatttgaaaaacaaaaggcaggaacaacacagtcaattgaaaacggagtgccagtttatgaaaataaaaaattgcgttgctttataattgaagttaaaaatgcaacaacaaatgacaacattataatcgttgcaaaagataagaacgtggctttgcacatgcttaaaagcatcaaattcggcgtaagcaacattacaaatgcagctcaagtcgaaccttatgctgaatctggtggaaaccatttaaatgacaataatgacactgtctttgtcttttatccatggtatgtatatgatgaaggtgattatgatgcatatgatgactattcttcaagggattcagaatatgcagatgacagttattatgactattcttcaagtgattcagaatatgcagatgacagttattatgactattcttcaagtgattcagaatatgcagatgacagttatgatgaggaatatgacgagtcagatgaagattatgaaagttcagaggactttaattaa

SEQ ID NO: 7713 - DNA, 315 bp, Methanobrevibacter gottschalkii
  source 1..315: mol_type = genomic DNA
atggatgaattaaaatctgaaattattaaatttcaaaaagaaagggattggaaaaagtttcacacacctgaaaacttggcaaaatcaatatcaatcgaagcagctgaacttctagaacatttccaatggggcaaagattacagcataaatgaggttgccgatgaacttgcagatgtattgaattattgtattttaatggctgatgcacttgatttagatattaaagaaattgttttaaataaaatgaaaaagaatgctgttaaatatcctgttgataaagcccgaggcaatgcagcaaagtatacggagttatag

SEQ ID NO: 7714 - DNA, 1869 bp, Methanobrevibacter gottschalkii
  source 1..1869: mol_type = genomic DNA
atgattgtttatgaagcaaccaaagcagaattcattgactctgtattttccggttcgattacagatgaaatttatgaaatttatcaacagaaaataggaaaatctggaaaatcacagatcatgtcctgggaaaactcaatgcaatatatgtacagggtgttagaagatccggaaattcctgatgattcaggtgttgctatcgagtttacaattccaacaacatcaaaaagaattgatttcatattaacaggtcttaatcagtttcatgaggattctgttgttattattgaacttaagcagtggatggaagctcagaaagttgaaggcaaggatggtgttgtaaaaaccattcttggaggaggacttcgagaaacaactcacccatcttatcaggtttggtcatatgcatcattaattaagaactttaatcaaacagttgatgaagatgaaattggactttatccatgtgcatatctgcataactatgattttacagatgctgatgatcttagcgatgaaatttataaaccatactatgataaagctccattatatggaaaaagagatgcgttaaaacttagaaatttcattaaaaaatacataaggcatggagataattcagatattctgtatcgcattgataatggaaaaatcaggccttccaggaaacttcaggattcactttcaagcatgcttgaaggcaacaaggaatttgtcatgattgatgaacagaaaatagcatatgaaatggctattaaaatggctcgtgaatcatatttagatgataaaaaacgagttttaatcattgaaggaggaccggggactggtaaatcggtagtggctattaatttgctagttgatattattgccgatgatatgctatctttatacgttacaaaaaactccgctccaagaaatgtattttttgaaaagttgcgaggagacaaatactctttaagctatttaaaaaatttatttaaaggttccggatcctttacaaaatctaaatcaaatgaattcgatgcaattattgttgatgaggcacacagactgaatgaaaagtcaggactatttggcaatttaggtgaaaaccaggtaaaagaaataatgaatgcatctaaattttcagcattttttatagataaacatcaaaagatttcattaaaagattatggcagtgttgaagctataaggaaatttgcccaagaatttgatgctgaagttgagcaaattaaattaacttcccaatttagatgcaatgggtcagatggatacttatcatggcttaataatgtcttggagattgaagaaactgcaaattttgatggatttgactttgactatgattttagagttgtagattctcccaatgaactgaaaaatctgatttttgaaaaaaacaaagaaaacaataatgcacgcctgcttgcaggatactgctggaactggataaaagaaggaaaaaacaattcagatgtacatgatattgaaattgatgacttttcaatgagctggaacttgggaaactcagatacatgggcaattgatgataattcagtaaatgaagtgggatgtatccacacatcacaaggtcttgaatttgattatgttggtgtaatcattggaaatgatatgagattcgatggtgaacacatcataactgattttaatcaacgtgcaaagacagataaatctttatttggaataaaaaagaaacataaagaaaatccagatgaagccttaaaagttgcagatgaaataattaaaaatacttatcgcacactgatgacacgtggaatgaaaggatgttatatttactgtgaggatatgctgcttcaagcttattttaaagaaagatttggtaattaa

SEQ ID NO: 7715 - DNA, 1209 bp, Methanobrevibacter gottschalkii
  source 1..1209: mol_type = genomic DNA
atgattaaaaggaaattgtacttaaaccaaattgaaaggttaatggataaagaacctatcaaaattataactggagttagaagaagtggtaaaacatatttattaaaaagcattcaagaagaactaaaaaacaggggaataaacgaagagaacatattcataatttcatttgaatccatgaaatacaacaaaatagaaaacttcagagagcttgatgaatgcatcatcaacctgaccagaaatacaaaaggcaaaatctacttattatttgacgaaatacaaaatgtaaaaaactgggaaaaaagcataaatgcatgcagagtagacctcgactgcgacatatacatcacaggatccaactcagaactgctatccggtgaaatggcaacactgatatctggaagatactatcaaataaatatttacccattttcattttcagaattcatacaatacaaaaaggaaatagaaaaaacagatattgatgacttggaagaactatttaaagagtatgtggaatatggtggaatgcctccaatacaacaggtagcaacagaagacaagtattcctatctgggagacatatacaatacaatacttctaaaagacattattgcacggcacaacatcagaaacacagacatgttaaaccgtatacttgactatgtaataatgaaccttggaaaaaacttctcagcaaccaatattgtcaaatacatgaaatacgagagaagaaagatatcaaaagatactatactcgattacatactatactccaaaaatgcatgcttcatacatcaagcaccaagggaggacataaaaggaaagaaagtactgaagcacaatgagaaatatttcctggtcgatcacggattctaccaagcaaaatacggcgaaattgaaaatatgggttccatccttgaaaacatagtctacatagaactacttagaagaggatacgatgtaaaagtgggaataatcaataaaaaagaaatagatttcgtctgcactaaagataaaaaaagaatatatattcaggtaacatataaattggaaaatgatgaaacaattgaaagggaattttcagggcttgtaaaaatcaacgacaactttgacaaatacgttttaagcatggataaactagatttctccggaagcggattaaagcacagaaacatcatagactttttaacatcagactatatttaa

SEQ ID NO: 7716 - DNA, 2946 bp, Methanobrevibacter gottschalkii
  source 1..2946: mol_type = genomic DNA
atggagttcaatgaaaaccaaaaaagagtaattgcacatgaaaaaggtcctcttcttgttgaggcgggtccgggttctggaaaaactactgttattgttgaaagaattaaatatctacttaacaatttaaacattgcccctgagtctattttggtcattacttttacaagaaaggccactgaaaatctgagaaatagattgaacgactatatttcaaaagatgatttgtccaaaatgcatatttccactattcattccttttgtcttgaatatttaaagtcaaaagaggggtttttaaagcttttagatgatgataattcagaaaaaaaggagttatttattcaaaaacataaaagagcattgggatttgttggttctgcaactttatttgattatcaaattccagctattatcgataaatttggtgaatacacttcatttaatgtgaatacagataaattaatcaattatattaaagagacaaaaccaatttctaaggattatttggatttcattgaatctgaaatctatttttctaaaaagagaattgaagataatgactttaaggatgattggtataatgcaagatatctgcaaactccaaaggcatatcttaaataccttgaagttttagataacaacagttatgttgattatgatactttgcagcttaaaactctaaaacacttaacaagagatccgaaaacacaattcaatgctgttttgattgatgagtttcaagacactgaccctttgcaaattagaatttttgagattctcttaaagcaaagcgattattttacagctgtgggggatgttgatcaacatatttacgcttttagaagttcatttagagattattttaaagacatgaaagaaagatttgatgctgagattataagtttggatgtaaactacaggtcaaccgccaatatagttcgtgttactgattcatttatcaagcatcagagaagtgattacacccaaaaacatctggtcagtaataatgacaattatgataatgatacgttcttaattgaaagtgaagattcacaagatgaagctagtaaaattttcaacatcatcgcagagttaaaaagactaaataagatagaggattatggtgaagttgcggttttatatagaaaacataatacaaggactattgctaatttaattgaacttttagatgagaacaatattgaatttgtaattcgtgggcaaaatgatttggcagatcaaaacgaaatcagatccatccttttgttgttgtggtatcttactagaaacatggatgaaggccatgttttatctggtgatgaattagatgaattgaacctaaaagcattttgtggagagtactttgaacctacattctggtcacttgaagatgaaactaaaacataccttacaactcttcaagatttattctatgagaatatactaaaagttgaaaatgaaattagatctcttcaaggaaaacgtccagtcaaatcatataaacgtgtaagggttaatgaaagctatgaaaacttaattaggatatttaataaggtaactccaccggttattgacttaagacatgttcacgaggcagatagggaattcttcaataatcttaataatttaagaaaaagaattttaaataatgaattaacaatattggatgtttattatgaattgatatcccttaatttcaataaattaagtcaggataaagttagaaatctttccatgttaactcgaactatttataattatgagtcttttatctcacagactgatgttaagggcctattttactttttaaataggataatcaaaaattatggttcaaattattcatcacaaaatggtgttcagctaatgactgttcatgcagcaaaaggattggagtttccagtagcaattgttgcatcacttgaaaaagacaagtttccaatgaaaataaaagatcctaaaagagaaaaaagaacaatatttatgaaagacactttctacactccaaatgagtttttaaaatataaagaagtgacacttgatgaggaaaatgaactagacagacaagaagaagagcgaatcatttatgttgcaatgacacgggctgcagatttattaatattatcttgtgttggaaaaactcctgatgtgataaataacatcaaaaattatctaaaaaaacctaatttaaataatgtgataatcaataggcattttacaaataatgatacagaaaaactcaaattaaactattcaagtttttcaacatataatttatgcccatatatgtatgatttagtttataattatggttttaaagtttcaagtgaaaaagtaacaaattttggaacagtattccacgaagtaatggagacagtaaacttaaaacttaaagatggtgaaaaaatatcaaaagaagaactgattttgattactcaagatatttataagtcaatgtttgatattaaagagacagaagatgaatttaacatgctgatagattccattttaaattattataacacatattcacttaatcaagaagtagtggaatgtgaacttccttttgagttagaacatgaaaattatattttaaatggtgaaattgatttaatatataaaattaaagattctgaaattgcaattttggattataaaaatgcagagcatgatgataataaaatagcccactatgaaaaacagttgtatatttatgcttcagctttaaaagaaatgactgaatttgataaatatgaaatcaaaaaaggaataacacattttgttaaaacggattaccgtcatgaagttgatataacagatgaaaagatcaataagcagttatataaattaaatgaagtagctttaaaaatacaaaataacgagtatcctaaaagagaaagcggattctgtaatgtttgtaagtttcaggttatttgtcaaaattaa

SEQ ID NO: 7717 - DNA, 507 bp, Methanobrevibacter gottschalkii
  source 1..507: mol_type = genomic DNA
atgaataccacaaaaaaccaatccattgtatatgatgaaaaaacaatatttaaagttaaagaaatgatagtggcaggattaaataaacttaaactgtttaaatgcaaaaaatcagggaatttagacttttacaatgatttaaaagaaacgtttactgaaattgcattaaatctaaaagaactgaaattgtggaatgaattagattattttctttcaatttcactttatattgaatatattgtctataaaaattccattgactcctcttttgggcactgctcttttgcaattgagttgttaaatttttacattaatctaattaaaactagttctgattattatctaaatttaaccgaaatgtccataaaagattttggaatatatcaaaatgaaacaaaaactagatacaggcaatataggcgcaaatttcatactgatgtttatgtgttaagtggaaatttcactgaagatcaaatgtatgaaattcatgcaagtttaagggagtga

SEQ ID NO: 7718 - DNA, 666 bp, Methanobrevibacter gottschalkii
  source 1..666: mol_type = genomic DNA
gtgtatttcttggatacaaatgtgcctattggatatacaattatccatgatagatggcatgaaaactcaaaaaatttcattgacaataataaaaattctatcttctggtctaattttgttaaaagtgagtattataataaattagataatatacttgattatattgtaaaatttttaaaatcaattgtctgtattttaaaagttaatgaaatggatttttatagttataatagttttgaagagcatatattgaacgaaactagattttgcaaactagattattttaaaaaacaaaagattttggaaaatttttggaatgaatatgactttattgttggtatttccactaagctatatgattgtttttataattatgcttttgattttgtaaataattataataatagagatttaagattaaatgaaatcatgagattgcatgactgtggtttagataactatttaaaatactatgattatgctttaaaattatataaaaatggaattcaccctcctgattgtaaaattatcattgatgcacatgactgtggtttaactcatgatgatttaaaattcatttcaaatgataataaattaattgatgctttatctaaaatagatacttctaatttaagaattattgagtttggattatgtaattcatga

SEQ ID NO: 7719 - DNA, 1008 bp, Methanobrevibacter gottschalkii
  source 1..1008: mol_type = genomic DNA
atgtcagtaaaggaattattaaaggaatgtggttttttatatttcaaggaagactataaaaatttacttataaaatgtgaagaagtgttaaaaatagatgaaaaaaatcccattgccttaaactataaagcaattgctttttactactttgatatggatgatatagctttaaaaatactaaatgatactcaaaaactatatcctaaaaactactacacactaagcattaaatcattagtatatattgcattaaaagaatacagaaaagctcttgattgttgtaatgaaggtttaaaaattaaaaatttcgatttgcttgaaataaataaaattaaagcattaatttatctagataaaattgatgatgcatacaatttctataatactattgaatgtcctaactttaaattcgaagaaatattgatagaatgtgaaaagtacagtgaagctttaaattcttacaatagcaagttaaaagaaaattcacaagatttggagttaattgataatgtcaaaacattaatggtgaaatatgacctaaatgtcaagccaaactgggatgaagagttttatatttcatggatatatcacatcaaacataatgacaacaaaaattgtcctaaatgtggatctaaattaattccaattgtttatggttatccacttgaagaggcattaaaacaagaaaaaaacggtgaaataatacttggaggatgttgcatcaatgatgaaatgggtaacctccattgtccaaattgtaaaaatgatttttacatagatgcactgcatattgatgcaaaaggcccattatatgattatattgtcttaaaaatcaataatctggatgaattgttattcgatgagatatgctgttccatttacaaaataagagaggatattgaatactttgatgatgatgagtttaaagcgttcataaatcatttaatatcgattggctacctatatgagcctgttaaaggttatattaagctggttgatattcattaa

SEQ ID NO: 7720 - DNA, 1893 bp, Methanobrevibacter gottschalkii
  source 1..1893: mol_type = genomic DNA
atggactggcaatatagtgattactcaaaaattaaccctaatgcaaaaaagcattttccctttgacaatcctcgtgataatcaattagaaactgtttctgagattgctgatgctattaatcatggttataaatatattgtacttgaagccggaactggtacgggcaaatcagcaattgcagctacactatccaatatgtcagactcatcatacattttaaccatcaccaaacaactccaggaccagtatttaagagattttaaagatttcaaagtagttaaaggaagatcaaacttcagatgtcaaaattatattaataaatcttgcagtgaaggcaaatgccttactgaaggttttgaatgcagattctctttgaaaaatagggaaaatgaaattaggaaggacaatacctgcccgtattattatcagaaatatttggctttacatgcaaaaactgttgtttctaattattattacatgtttttggagcttaattatgttaaggactttcaaaaaagggatttattaatttttgatgaagcccataacttagagtcgactttaatggatgagttaaccctagaattttctaaaagtgatcttgaagaataccttgattataatttaagatgtgaaaagattgaagaattaaacagtaataattatttaaattggattgaatttatcaatgagattaaggaaggttacttggaggagctgaataaacttgaaagattagacaaattggaacttgctgagaaaatagctttcatcaaacatcaaattaacgattgcagccgttttattgaacatttaactcatgatccgaaaatttggatttttgattgggatgatgattatcaaacagcccaatttaaacctctaaaagttgataattatgctaaaaatacattgtttgattatgctgatgtttgtatattcatgagtgcaacaatccttgactggaaattgttttctaaatggttaggaataccggaagatgaaatatatgcaataagacataaaagtccattcgatattaataataatccaataactgcatatgatgaatataatttatcaaggaaattcattaaagttaatgcgcaaaaaagcattggttcaataaatgagatcttagataaacataaaaatgaaaaaggaataattcatacagtaagcggaaaatgcagagattttttaattgacaatattgccgatgaaagattgattgctcatgacagacataacagatcagaaatgcttgaggaattcatctcctcagatgaaccgttagttttgatttcaccatctatgagtgaaggtgttgatcttccgggggatttatgtcgttttcaagtaatatacaagttaccatttccagactggggtgataagcagataaatcaaagagcaggtattgatagggaatggtatgattatagaacatgcctcaaccttgttcaaacacacgggcggggtgtgagatacgatggggattactgccatacttacgttattgacagccgttttagatcatatatccgagaagcgtttccatctaaatttttaccggatacatttaaagagtcaattgaaggcagggagtttgatttaaaagaaaagaaaaggttaatggaaattggtgattttcatattgaaaataatgattatgaatctgcaattatattctttaaggagttgttgaataatgaattattcaaaaatgatatatatccctaccttaaattatcaaatctttatcatgaaactgggttgtttgaatgcgaggttcaagttatcatgcgatttttaagttctggtgctgaatataatcactttgaaaaacgactaaaggagcttgcagatatgggttattttgattttaattaa

SEQ ID NO: 7721 - DNA, 1452 bp, Methanobrevibacter gottschalkii
  source 1..1452: mol_type = genomic DNA
atgttggagtggaatatttgtaaaaattgtggtgcaattctggataattctcaaaatacttgcctgaattgccaaggggatgttgaaaaagtaaacattgattatttaaaaaaatatttggataatttaaactttgttgttaaaacgctgaacatcttcaccccatattgtacgttaacaaaagatatgggcaatattgctttggaaagtctgataatggatgatttatttaagtatttctcatatcttggccttggagataacgaaattactgacaatgaggttgaatttatcaattcacttctcgataccaatttttcaaaagaagacattcaaaccctaacagatgccgaacttgacaaatcacttccagcatcatttaaatgcctgcaggaaatagacgaatatggtcaaaactttgatatgtatcagttaaactcctgcagcgaattattcaactgttttaaattattcggaaaattttttatcactgctgacaatgaacttgatggcgatgtcctgaagatatattcacaatacatcaattatctggaaagttctcttaaaagtaaaaacactgctctaaaaccgattgatcatctgaattataaaccatcaaaaaaggaagaaacacattcacttgatgaatatttaaatgaattaaataaacttgtcggtcttgaaaaagtcaaaaaagacgttaattcacttattaatcttgtacagattagaaaactaagagaaaaaagaggcataaagcagcctccaatgagccttcatttagttttctcaggcaatcccggaactggcaaaactacagttgcaagattgctatcgaaaatttatcatgaaattgggttgttatcagaagggcatttaattgaaactgacagatcgggtcttgttggcggttatgttggtcaaactgcaatcaagacccaggaagtaatacaatctgccctcggtggaatattgtttattgatgaagcatattcactgacatccaaaagtgaaaatgactatggtctggaagctgttgacacattacttaaggcaatggaggatcatcgggacaatctgattgttattgttgccggttatcctgcattaatggaaaaatttttatactcaaatccaggtttggagtcaaggtttaataagttcatatactttgaagattataatgaggaggaattatataatatattctggttaatgtgtgaggagtcaaatctcacattggatgaggcgggagataattatataaaagaatatttcaaaagaatatatgacaacaggtcaaataattttgctaatggaagagctgttaggaatctgtttgaagaagtaataactaatcaggcaaaccgtttagctccaaaaaaagaaataagtgatgtggaattgaatacattaacataccaggattttttagttgatgaaaatgagtga

SEQ ID NO: 7722 - DNA, 1059 bp, Methanobrevibacter gottschalkii
  source 1..1059: mol_type = genomic DNA
atgagtgagaaaatctgtagtaactgtggaaataaagtggatggcagtgcaaacttctgtccaaagtgcaaatcacaatcatttagaaatattaatgaggttgcaaaacctaaaagtggtgttgttcataagttattttataaatatcagggaggttactttgcagtatccaagtcaaagatagctgcaatcactacatttattttatttgcttcattaggctttgaatccccaaacctaatcatatcctcagtgataattgcatttttggtttatattataggatttgctataagaaggatcaatattattaaccaaaattcaaaaatgttttttaggaataataatttaggtttaatcaccgatctgatgcatctgtttgctttttggcaggacagggaaaccggtaaatttgcattgtcaaaaacaaaactaatttccattttaatattttttgtttttgcaacatccggactttcactgcctaatgctacacctattttagcagcagtatttggtttgatatttgccctgcctgtatttgtagtcggatatggaattcacagacttacaacttcaagacctgttaaaaagatagtcaaacaagctgaaccagataccggaaaaaaacatgatgatgccagcaatgcaaaaaaagacattcatatacatgaatttgacaagtatagggcaaaattaaatgaattaaaagtaaggtatgagattaaggaaaaaaatgcccgtaatctgattgcaaaacgttttactccgccccaattgacttatgataagtttattgcatctgttgacaagtccactatgatgtttaacagtcatgctgaggtaatttcaaatattcttgatttggcttcccaggacagcaagaagattgatgatgaactcaatgaccgattcgatattctggaagctcttgttgagaaaattgatgagttgattgatgagctagtattaagcttaaacgatgatgaaaaagagggaaatccctcaaatctattaaatgacttagatgatttaattgattctgtaaaaaattactga

SEQ ID NO: 7723 - DNA, 519 bp, Methanobrevibacter gottschalkii
  source 1..519: mol_type = genomic DNA
atgaatggtgctggtgctattgactctgctaattggactagtgctgatgtaggttatgaaacatttaaaatacctccccaatatgaaaatccatacagcagtgactttgacatgtatgaatttgatgaagacattgatgtttttacaatcagatatgtaaatccgaatctgatggatttatatggtcattttctaaatgaataccatggaaaaaaggttaatgttgcaggccatgatgctgtacacttcacatattatgataggcatgacaagaccaacaattcagtattatggttttcagcaggtgaggaattctattatatcaattggattggcagcaatattacaccggcaattaaggaagttgttaaaagttccttaaaatcaaactacactcataaggagttttacagtatattaaatgataatataaaaattacaatactgtcaattccattgaatctcaaaggtttgattatcctactgagttctactcatacaacttcagaaatggtttaa

SEQ ID NO: 7724 - DNA, 891 bp, Methanobrevibacter gottschalkii
  source 1..891: mol_type = genomic DNA
atgactaatcacaaacacctgcgcactgttattgaagatatatattcgaatggaaataagctaactgaagaactcactgcccgcctaatacatgaattcagatactccaatttgtatattccctctaaaaaagaggacaataagctgaattttattatttatgaggatgatgattccaaacttactccattatttactgatttggatgaatttagaaaattctataaggatgaggatgttcgggcattgcaaaatccatttgaattgtatcagaatgtcttaaagacaacggatattgaaggttacatcttaaatcctgcttctgaaaagtatttgtttaaaaaagaatttattttagctattaacaatattccaaagactgatttttacactaccaatccctactcggaagaggaattattaaatatgaaaaggtcagttgataataaaaatttggaaagatttattgaaaatagagcaaatattggggattttgagggtttatttgaacagatggcaaattcacagttatttgctttaatgttgtctgatttaaaacttaataaggagatgatttcacttaaaaaaagtggtcctgttgcggcaatgtatactgataatgtaggtggcatctatgcaactttatttacatctgagagaaaaatggatgcagtaaagacaaaaaaatacaaatattcccaattagttaatcttgcaacacttgttaattttatcctgactgaggatatggacggccttattgtaaatccggaaagtgacaatgtgttagttccaagaaccactcttcttagatactctcttggttttgagatgtatgcaaatgatgaaagactatcagaatcaatgttttatctctttaggattgaatga

SEQ ID NO: 7725 - DNA, 606 bp, Methanobrevibacter gottschalkii
  source 1..606: mol_type = genomic DNA
atgtccgaattatcacaattaattcaaatcaataaaaatattgaaaaacagaatgaggaaataattcgtcttttaaaagtaattgcttgcgaaaaacaagaaggagaaaattcagataaatcagttattgatttaggcgagctgtatttggaagatgatgcaagttttgaagcagagccaaaagaaggggaaattgaaaacctttggagagttggatctcttctggataattcaattgatgttggtgaagtctattttattgaaggtactgacatcttcaggttatcagttaaaaataatgaaacaagcattgataatttaacaggtgatggtcaggcaaatatatttgcattagaagaaacaattgcaaatgaatccgtcaaaaacaataaaagtttagaagacagtacagtaatactgagcagcgaacattcacaaaatttacctgaaactttaaagatttgtgtagaacaaggtgctaaaaaagtatatatgcatttatttgcatcatcccaattagtaggagcaccacaatcattaatggaactgattaaatttgatttttataaaaataatgaacatttagttgaaaaattgtttaaatag

SEQ ID NO: 7726 - DNA, 306 bp, Methanobrevibacter gottschalkii
  source 1..306: mol_type = genomic DNA
atgtctaaattttgtccgaaatgcggtgaagagttagtagatgatgcgaaattctgtaaaaactgtggtgaaactataaaaacagaacaggaaacacaaaacaatgaagttcaaaatgttgaaaatgaccataaaatagctttaattttaggatatgtctgtgctattttaattccattatttggattaatatttggtatttatttagtgacccgtaaagactcctccaaagctaattatcatgggaaaatcatcattggaatagctattgtaatatggatcatttcatttttattgatgatgtga

SEQ ID NO: 7727 - DNA, 267 bp, Methanobrevibacter gottschalkii
  source 1..267: mol_type = genomic DNA
atgagagaaatatccatagattctgattttgacgtaggtgaaattacatctaaaatcaataaattaatgtcagaatggcctattcagcttttagatatcattggacctaattggattgtgtttggctatgacatgaaagttaaattcgttttaatattcgatgctgactttaatgatttggaaacccaaataaaattagaagatttaagattaaatgttatccatcatattgaaagtttaaaaggactgcatatagggataacctga

SEQ ID NO: 7728 - DNA, 339 bp, Methanobrevibacter gottschalkii
  source 1..339: mol_type = genomic DNA
atgaaaaataaaaatatattgctcattgcaatagcagttcttgttgttgcattaatagcagtgggagcttacacaatgtttaatggcaatactcatttaaacgttacagacaacaccactggaatagacaatagcaccggcattgataataatacgactgttgtcggagataattctccacttgagaatttaaccaacaataatacaacatataaagtatacaatccccagtctgattcatatgtaccggttattggtgaaaaattcgatgaagaagtaaacagatggtatacttacgatgatcagggtgtcagatactacaatacaagaattaattaa

SEQ ID NO: 7729 - DNA, 1092 bp, Methanobrevibacter gottschalkii
  source 1..1092: mol_type = genomic DNA
atgactagacaagaaaaaatcattaaaacaagtgtgatagggattgttgttaacctgatccttgttgcatttaaagcaacaattggaatgcttgttaattcaattgccattacattggatgctgttaataatttaactgatgcgttatcttccattattacgattattgggacaaagcttgcaggtaaagcgccggataagaatcatccttatggatatggtcgtgttgaatattttgcttcggtaatcattgcagctattgtgctttgggcgggtattactgcatttatggaatcatggcctaaaatacttaatccggatgcaacttcatatactgctgtttcacttgtcataattgctgttgccgttttagttaagtttgctcttggaaaatatgttaagaatgtaggtgaggatattaattcacaggctcttgttgcatctggaagcgatgcatttttcgatgcagtgctgtctctttcaacattaatagctgctgtcatttcagtatttttccatgtttctcttgaaggaattctgggagtggtcatttctatcgtgattatcaaggcaagtgttgacatgcttagagaaacaattgacagcatgattggttcaagagttgactcagagctttcccgtaaactgaaagagtatatctgtgaaattcccgaagtgtatggggcatatgatttgagtttacataattatggtcctgaagatatgcgcgggtctgtgcatattgaagtggatgacgatctgacagcttttgatatacacagcttaactagaaatattgtatataaggtatatgacgagttctcaatagttttaactattggaatttatgcaagaaacaatgattataaggatgtccgtgaagatttatataatatagcttcaaaatatgaggaaatcattgaaattcacggttttattgtaaataaagatgaggactatgcaacatttgacattatcgttgattttgatgctgaccgtgagaaggtaaaagaaaggatttacagtgaaatcaaatccaaacatcccgaacttgactattatattattgatgactatgacatatcagattaa

SEQ ID NO: 7730 - DNA, 540 bp, Methanobrevibacter gottschalkii
  source 1..540: mol_type = genomic DNA
atgtcaatatatgattttgaagttaaagatggtgaaggcaatactatttcactctcacaatataaagataaagtacttttaattgtaaactcagcaacagaatgtggatttacaccacaatatacacagttaaatgaaatttattcagaattcaatgaagatggttttgaaattctagatttcccatgcaatcaatttggaggacaggcaccaggaacaacagaagaaatcacagaagtctgccgttcaaaatggttagtcccatatgctatctttgataaaattgaagtgaacggggaaaatgaatcaccattatatacatatcttaaaaaagaacagccatttaaagatattactggtgaaggctcagaagaattcaaaaagattttagaatcaattaatccaaattatatggataatgatgatattaaatggaatttcactaagtttctggtagatagaaaaggcaatgcaattcaaagatttgaaccaactgaagatttaaatgatgtaaaggaagctattaaagctcttttataa

SEQ ID NO: 7731 - DNA, 2688 bp, Methanobrevibacter gottschalkii
  source 1..2688: mol_type = genomic DNA
ttggaatcagataatgtaagtaagaatatttctacttcattaaataaaacacaaaataaaacattaattaataatgaaacatacaaaaaaacaacattagaattttcccctattataactgaatatacttcaggaaacataatttatacagttaaagcttattcattattgaattataatggaatgaaatataaagatcctaaatacaattcccttattaagataaaactatatacaggtaattcttttaaaagttattcatcacatatagacaataatggcattgcttctatcaaagtacctgatttatctattggctatcataaggttgagatttttattgataatgtgcaaggagcaacatcatacataaaagtaattaaatctactactaaagtatatgctccaactacaattataaaatttaagaaaaatatgaattataaaattaaagtcgtagatagtcataataatcctgtaaaaaatattatacttaaagttaaagtttatactgatagcaaatataatatttatagcattaaaacaaattctaaagggttagcaacacttaaaattaataaattatctttaaagactcataaaattgttattacaactaataataaaaattataaaattaataaaaattcaaaaattttaattaaaaaaacaattcctaaaaaaattgaaacattaacagtatcctctccaaataaaacaatacaaagaggtacttctttcacgattaaacttacagatgattataatgatattgtgaaaaaagtttcaattaaagtcaatatatacacaggtaaaaaatttaaaacttttaaaattacaacaaataataacggtgtggcaaaacttaaaacagataaactctcattaggaactcataacttaaaaattgcatccaataataaaaattacaaatttcataaaacttttaaaataacactcgttaaaacaattattcatgatgatattaaaactttagtgttaaaaaatattacttactaccaaacaaaagatggaaaattcaatgctaaattaggttggtattctaaagttggaagttcatatcaaattttaagaaaaacaaatgaaaattataacataatttctacagtcaaatcaaattcatcatttacaacattctatgataaaattgatggaaatgcttcatacacatattctgttagagagattattgtgaaaaataatgatattatattagggccatatgataaagaaggtttaaaattattgaagagtcctaatattactgctgattttcagaatttaaaagctgaaattacttggaataaagttgaaggtgcaacaaagtatattatatttagaaaaattggtcgtgatgctaattttaaagctattggtattgttaatagcaatgtattaaattacactgatttttattataaaaccccaaaacaattaagaagtattcttaatagtaatacttttgtagatccaagttttaataacttgttttatacagtacgtgcatgtactgtcaaaaatacatctggaatcaatcaaataagttatggatcctatttaattgatggagatttccatttagaagcaccaagtattatttcccttaaagataatgaaattaaatggggtaaagttccaaatgctgatggttatttaattcttaaaaagaatagtgatgatgatgaatggaccattattaatcaagttgcacaaaatgaatccaatactattacattgaagttaaataatattgaaaatagttcttattattctgttaaagcatttgctaaaaaaaatggtgaaatcatttacagtaaatttgattctggatttagtctaaaaaattactcaaaagataattctaaatataaaattttatattttggagatagtattacatatggttcaccttacaaatcaaattcaaacaaacacattttttctattccctatagagtaggagaattacttggatgtgtttactataatccttctattccaggttccacttatcatgatttagggcaaaaagatggaaagaatattgaaaatacaaaatattatagatatcgtatttgtagagaggttgttgaccaaatatctattggtgaacttcctggaaattggaaagaacttgataatttaaaaaatagtgaaggtataacaaatacatatattgatgactataatattgttgtattagccgcaggaaccaatgattatcttgataattccatattaggctctataaattctgttgatacacatacattcaatggtgcacttaatcatattcttaataaaatagaaactgcgagcaaaacacgtgttgaaagaggtgaatcccctattaaagtaatatttgtagatttatgttattcagatcgtgcatatgataaaacaataaaagaaaatagagatgtaaccaaaaataaaattggtttaacattgaatgattatcaaaatgcattaaataaacagtacaataaatggaaaaataataactttttaacattatataattttaaaacaagagattataatattgttaatcaagaaaactgtccatatactacatcagataatttacatttttcaaaattcacttatggccaatatggtaatgcatttgcaagttttcttaaagaaaatattttttataattag

SEQ ID NO: 7732 - DNA, 1317 bp, Methanobrevibacter gottschalkii
  source 1..1317: mol_type = genomic DNA
atgaagaaaattattacatatggaacatttgatttattccataaaggacattataacatattaaaaagagctaagatgtacggtgattacttaattgtaggagtcactggagaaaattatgatataggtcgtggaaaattaaatgttaatgattctcttgcaacaagaattgaaaatgttcaaaaaactggttttgcagatgaaataattgttgaagaatatcttggacaaaaaattggcgatataataaaatatgatattgattcttttgtaattggtgatgattggaaaggaaaatttgatcatttatctaaatattgtaatatgatttatcttgagcgaactaaaggtatctcaagtacacaaatccgtgaagaaacatttaatcaatatactataggtattgtttgtgattttgttgacgataatcaaattatcaatgaagcaaaattggttaatggatttgaagtaaaaaatattttttgtgaagatgaagaaattaaaaataaatttcaagagaaatatcatttagaaaattcatgtgaagaattttcagaattgttagaattatccgatattatttatgttcgttgcaatatctccaaaagattcaattatattcaaaaagctttaaatgcaggtaaacatgtgatatatgacccacctgcaacatttaattataatgaattagatgaactaatacacttagcagaacaaaaaaatgtaattttaatggaaaatattaaaatggtgcatatttatgtatttaatcaattgttatggatgacacaaggtggactaattggagatatattaagttttaactgttcaatttctaaaattgatataaatcgtcctaatttattttatgatttaagtgtttatacattattacctatgttaaaaatcatgggtcaagattatgaaaagtatgatttcattgtaaaaaaagatggagaagatattgaatttgcatcaatgaattttgtttattctaatggaagatcaattattaatgttggaaataaaattcgtgttgataatcaattagagattatcgggactgaaggaactattaggatgaaaggcgaatggtggagaagtaggaactttgaaattcattatccagagtcacaggaaatacagttatataatacaaattttgaaggaaatggatttaaatatctattacgtgagttatccagaatgttagataataatcgtattgatactagaagtatttttaaagatgaatctttaaaaattgttaaaattttagaacaagttaaaaaaattgagaacaataatggagattga

SEQ ID NO: 7733 - DNA, 1068 bp, Methanobrevibacter gottschalkii
  source 1..1068: mol_type = genomic DNA
atgaaacatttatttactattggaccagttgaaatgtatccggaaacattaaaaattggtggaaaacaagtaccttattttagaaatgatgaattttctaatatcatattatctattaataaaggattaaaaaaattattatttaataaaaatggtgaaataatcttactaacatcttcaggaacaggtgctatggaagcaacaattatgaactgctttacaaaagaagataatttaataattattaatggaggttcatttggtcatcgttttactcaaatatgtgatgtacatgggattccatatgaatctgttaatattatttttggtgaaacattaactagagaaatgattgaagataaattaaataatggtaaatttactggtttgcttgtaaatttagatgaaacatcaaatggtcaattatatgatataaaaatgttatctgatgtttgtaaaaaaaataatttagtttttgttgttgatgccattagtgcttttttagccgatgaagtaaatatggataaatattctattgatgctgttattttaagttctcaaaaagctttatcattagctccaggtttatcaatagtagctttaagtgaaaaaatgttaaaaagagtagaagttattgattcagaatccatctattttgattttaaagattatttaaaaaatgctgaacgtggacaaacaccttttactccagctgtacgagttattattgagcttgaagatatgattaaacgcttagaaaaaaaaggcatatataacattataaaacatacaaatgatattgcttcttactttagaaaaagagttaatgaaattggacttgaatatccttcatatccactgtctaatgcagttacacctataattttcccaaaaaataatgctgacttagtatataaaagattaattgaagattatggatttgttgttaatccaagtggtggtaactttgctaaatcaatgtttcgtgtttcacatgttggaaaccaatctattgaagattgtgaagaattaattttagcaatatctgaaataatcaaaaaattataa

SEQ ID NO: 7734 - DNA, 1659 bp, Methanobrevibacter gottschalkii
  source 1..1659: mol_type = genomic DNA
ttgagtaatatgaactccatacagaaaaatttatttcaattacttgttgaatttgatgaaatttgtaaaaagtatgatatcaaatatcttttagcagctggtgcttcattaggtgcagttagaaatcatagatttatgccatgggatgatgatattgatttatatattacaagggagaattggaataaattaagacatattttagaaacagaaaaagatgttcttcctaatggccgttcttttgtttataaagaaaatactccatattattccaatccacttccaagatatatcaatgataccacaacaacaatgtacagaaaccaagcattagctggaaaagcatgtggacaacatttagaaatatttatttttgatcctattcctcgtggcgagaaagaaaaacaaaaataccttgatttattacatgtttatacagaattactttcaccttattttatagtaaataaacatgctacttatgaagattgggaaaaacattacaagctctataaaaagtattgtgatagaatagataaagaaggtgaagaaaaagtattgaacgaacttgaaaatacattgcagcaatactcaattgaagattgtgatgaatattgtatgtgttggggaacaaaagattatatttatgataaagaacttttccaggaaggacaaatgggactgtttgaaggtaaagaatttccgattggtaaacatccagaaggtattcttagaattgcttatggtgatagttggatgtatattcctgaaattgatgaacaaattgttcatggtggaataaaatatgataatatctctttcaaagaatatactgataaatatcttcataaaataaatcgtgattctgcatttgaaaaatttaagattaataaacgaaataatgtagatttatataatgttcgtgaaaaagtacgaatgttaattgcaaaagaaaaagtccaagttggatgcatgcatttcaaaaataatttaaaagaaaatgaagagttattgcgttcattattagaaaatggagattatttagaattatctgaacgatttgaggaatattcaattttgcaatcaatgaatgaagtgcaaaaatttaaaatttttgttccaattacagataaaaatcttgcaacatttttattaaatttattgaaacaaggaaaatattatcaaataaataaatatttaaatattcgtaaattaaatgaatctccacttactaaagagttaataactattgaaaatgaagttgaattttgtaggaaattatcaatagctcgatatgataataaagatgaagaattagttcaaagtatcattgataaatatgacggcatattctcagatttattagatatttatagagcaaaattatggattaaagaaattaatgcaaaatctagtaaagattataaagatattaataatttatgtaatgaaatattaaaaaaatatccatttgatggagagacaatggctatacaagcaaaagctaaatctgaattaggccaggaaaatgaatcattagaactttataaaaaatctattttaaatactagaaatggattaatatggcaaaaagttgaagacgaaagtggaattagccgtatggaaatggaacgtgaattaattgaggaggaaaattaa

SEQ ID NO: 7735 - DNA, 1203 bp, Methanobrevibacter gottschalkii
  source 1..1203: mol_type = genomic DNA
atgaaatcaaaacaagatattcaattagaattacttcaagaaattgatgatatatgttctaaaaatgatttaaaatatatatttgtcggaaaaaatgcttttaatgcttatgttaatcatacaataaaaaataataatgctcacgtttcagttgctatgacattaggggatattaatcgtttttgcaatattattgaaaaacaaaataatcctaatcgttatgttgaaagtatgtttaccaatccaaaatatattccattgtatatatcttatggtaatgaaaatacaactgattaccatatgattatcttaaataataatctccatcatggaatcaatattcgtatttatccaatcatcaaatccgttacattagatgatgaaaaaattaagataatggattctaaaatatataaagaatataaatttcgtaaatttttaaataagaagattataaacaaaaaattcttgcctataaaaataggtatctcattattaaataatatctacaatatttctggttttagaaaaaaatatcctgataaaatttttaataaaatatacattgataattgggatgatattcaaaactattccaaagtaagaattggaaaaaaaataattaattcagaatattttaaagaacttacaagatacaaagtggacaatatagaattaaattatcctaaagatacagataactattttaaacaaatttacggtagaaatatagaaaatgtaaatgttgtgcttaaaccagaaagaaaaaatgcaattgttgatactgaaataggttacaaaaagattattaatgaaacaaaagatttattagatgaaattcggtctactcatgaagaattggtttgggggagatttaaagttcgcagagaaaaaaaatgtgttgatgatgtttggaaattagttaaaatgactaattctcaaattaaatatattgacttttttgaagaaaatatcgattatttattaagtttggatttaaatgataaatctcaatttgaagaaatggaaattattttaaatccaattattaaaaaattacaaaagtatgctaataaaggtatgaccttttctattgatgaaaaaactgattcattaattagaaaatttttattattaaaaaacaatgaaaaattaattaataaaatagacgaaattaacaaacttaaatatttcgttgaataa

SEQ ID NO: 7736 - DNA, 792 bp, Methanobrevibacter gottschalkii
  source 1..792: mol_type = genomic DNA
atgataatcgaatgtacaaatgacaatattaaaactgtatttaattatattggggaagattatggaaaatgtttatatattttcatcgatttaaaaaaatatggtttggatgatgataattttaatgtttggattcagtataataatgataaaatttgtgccataattagtgaatactataatggaatccagatttatagtaaatttgaagatctcataattgaagaaatcgtcaaatttattaaacaaaaagatgttaaaacattattttcaattaaaccaattattaataaaattaatgaatttttacccaattataaacaagaaactggaatagttggtgagttaaaaaaattgatttttgaaccaaatgtccatgcatattcagcaccaatatctgaattagaagaaattgtcaaattagtttcagaagatgaaaatattggaaaaccctatggatatgattcattattttcacagtattatgaaagaaaaaccagtaattttggtcgtaattttgttttacgtgataaaattaataatgaaattatctgtcatgctggtacctatgctgaacttccagaatttgcagtgataggtggtgtgattacttcaaaacaataccgaggaaaaggattttctaaaggaacattatctgctctttgtcatcaattaaaatctgaaaataaacgtgttttttcatactattacattccatctgcaacaaaaatgcacacttctgttggatttaaaaaaatagaagaatggtctaaattatcaaaaattgattaa

SEQ ID NO: 7737 - DNA, 426 bp, Methanobrevibacter gottschalkii
  source 1..426: mol_type = genomic DNA
atgtataaaaaaattctattgccaactgacggatcagggtatgcagatcaggaaattgacagagtaaccagattaataaatgaagatggtgaaataataattttatctgttgctcccaaattatcaaccagcgcttttcaaagaagaaaagacattgaacaacttaataagacattttttgaagaagcggaagatgttgttgaaaaaatgaaaaataagtttcctgaaaattacaatattaaaaccattacaaaatatggttttccagctgaaacaattaccaatactgctaaagaagaaggtgctgagttaattgtaatttctgcttcaggaaaaagtggaattcatcaatttgtaatcggaagtgtagctgaaaaagttcttaaactttcagaaattgatgtattattagttcacaacaaataa

SEQ ID NO: 7738 - DNA, 387 bp, Methanobrevibacter gottschalkii
  source 1..387: mol_type = genomic DNA
atggatttaaaaaagattgcaattgtagttagcatacttcttataatagctattggatcttttgcatacatctctttaaacacacaagaaacaaaagttgacataattactcaaaacactatacacaatggagacattattacagttcaacttaaagatttatatagaaacggaattccaaatcaggctattgatttgaaaattttagatgactccggatgggctcataactataatgcaactacagatgaacttggaatcggtcaaatacaaatactaggccttgaaaatggaaattatactgctcatgcaaaattcaatggaactttatttttaaaagaatctgcaaatcatgtttcattcgaagtgacagacggatatttctga

SEQ ID NO: 7739 - DNA, 2610 bp, Methanobrevibacter gottschalkii
  source 1..2610: mol_type = genomic DNA
atgaatattataaacagtactagtgatttagattatgattttacaattgtattatataatatcgagaattgtattgaagattcaattaaatccgtaataaatcaaaaatatgattttaaaaaagttgaaataatttttatcaatgacggatccgataaaaatcataaaatagctttaaactatcagaaaaaatatcccaaaaactttttcatagtagaaaatgatgaaaaagatatggctgaatcactaaatttaggtctgaatcattcaaaaggagaatatattaattttttaaatagtggagacatattatccaatgatacattaagtgaagtaaattcattttttagtaaagttacttcatcagatgttgttggcattcgtgtagatgaaggtagggaaaaattttcaattgactatagctttataaaatcaaatcagattattgatatatcccaatatcctgaagttattaattctattttaagttcattttttattaaaaaagagagcgttaatgttaattttgatataaatccatatgaaaaatctgatttattatttattgatgaactactaattaattccaaaataggatttgttatacaaccaaaagttcaaaaatcaagttccaattatttaattaaaaataaaagtacattaaatcaatttaaacactattatgattccatttacactttctgtaatgaacagctaggctatattccgaattacatccaatataaaatagctattgaacttgcaagcattgttgaaattgaagacattgacgatatcttaattgacaatatgactgctagtgatgcatacagttacataaataaagttctgaatcatatcagtttaagcaatattaaaggaaatatttttattaatcagcatacacaaaatttcttattatatctgaaaaataaggattttcatattgatgtggatggaaatgaagttatattttactgcggcagttatgttttaaatgtattgacaagacagaacctttggttggatattattgaaatcaaggaagattacattaatttttccggaagtattaccagttactgtgaatatgatcatatcagtattgaagctataaaagaagcaaatggtgaaactgaaatcattcccgttaaatttattgactacagtacaactgaacgtaaagttaaaaagtttttatccgttccatgggtatatagctataattttgatgcccatattcaaatttctgactgtgaaaattgtaaaatatcatttagatatacttactccgagaaagaaactggaattactgtaatgccaaatattaaatttagaaaatttgctagtttatctaaatttagccattattttattaaagattctagaattgtattatttacacaaaattcatttttagtaatgccttattcattaaagaaagtttttaaatttgagtttagttcaattaaaaaaatacttcaaagtacagcgaaaaataaaattaaaactattggttataaagcaatatatttagcgctatttcattatatgaaaaataagaaaatttggctcatgggagatagaaaagagtttgcagatgataatgcagagtatttattcaaatattgcataaaacagaaggatgatgttaataagtattttgttgtaaataaaaactcgccggattataaacgattaaatagagaatgtgggaatattgttgctttcggatccctaaaacataagttattattcacattttcagataagttaatctcatcacaagtaaataagtttattttaaatccctttttaagaagtaatcagtttctatataatggtgtgctattgcatgatgagtgtttcatccagcatggaattatcttacatgatttatcaagctggattagaaaatatatttataatttatcattatttgttacaagcgctgaagcagagtgggagtcaattgcaaatactaactataattttgatactgaacgaatacaacttttaggtcttccaagatacgataatttagttaataatgctgataaacaaatattatttgttcccacatggagacgtgatctggatgatccccaattactcgttaattccgagtattttaataatatcaatagcattttaaataatgaaaaattaattaaactagcacgtgattacggatattctttagtttttagaccacatccagaattatggagatatctggatttatttgatatttcagatgaatttagaatttctaatgaatcatattcaacattgttaagtgaatcatcagtcatgattacagattattcatcaattgcttttgattttgcatatttaaaaaaaccgctgatttactatcagactcaggactttgaaaatttccattatgaaaagggatatttcgattatgaaacaatgggatttggtgaaattataaaaacacaagaagagttgattaataagattgaattctatatgaaaaatggttctgttcttgaagacaagtacaagcaaagatcagctaagtttttcagattccatgatagaaataactctaaaagaatatatgactggttaattaagcattaa

SEQ ID NO: 7740 - DNA, 2604 bp, Methanobrevibacter gottschalkii
  source 1..2604: mol_type = genomic DNA
atggcggataatttcaagttttcaattattgtttcaaacctatcgggatataaagattctattgattcaattatttcacaagaattggatttcaggcaaaatgttcaattgataattattaaagatagtaatatacttacatcagacattgatgaatatataactgaatatccaaacaacattttagttttggaaaataaggataatttaaattcaaggaattttgcacttagacatgctagtggtgaatttattaattttatgaaagcaggagatacctttgataaatcttgcttaaaaacagttaatgatttatttaacagcaatacggatattaatttagtttccatagctttatttgatccgatttataaaaacattatatacaaaacaccattatccgaaaatcgattaattgatatcaataaagtaaataacaaagaattcaattattattttcacctgccgatttatgcttcttttattcgtggaactgactattattttgaagataaaaatattgatgaaaacggaatcagcgtaacttctaaaatattaatcgacgatgataaatttggatttgttaaggatattttctgttatcataatcctgaaagtgagtttagtgaaaatataaactatagaaatgtaatgggaaaattaaaactattgaataatataatgcaatatgctgatgataatttgaataaaaatcctgagtttttacagcacattgttgcaaaagagctggaatatattgttagaattgaggatttaagtcaaatcagtactgatttgaataaattaaatgagttttggaatttgatggatgcagtcttaaagaatgtttctaaaaaagctataaaatcaaacaacttcttggacaattttgtaatttcatttttattatttattaaaaataaatcatttgctattgattgtagtcagcataaagtgttttttaaaactgaaaattattcaatgcttaatttgcataaccagaaattgcattttgatgttattgagataaaaaaaggaattttaaatttatccggttatctgaaaagcatttgttattccgacaatatttctgttgaagcacttttaaaagatgaaaatggtgatgtaaaatattataaaggtaaattcgtggaatatccaacaaccaatcgtaaaactgttacttttttatcccatccatggatatttagttacaattttgactttaaaattcctataaacgaaaaaaaaatagaaaaaatttcatttagaacagtatatcacgaaaattcagaatatgtaatttggaataataagatttctccaaggaaatattcaaacttatctaaattctcgcattattcagttaaagagaacatgttggttttacttaaagacaactcattttattccatgccattaaatgcaaaaagcaaatacaaatttgacctaagagccatttttcaaatacttaaagagaggccgcaatattatagaggaggcatattttacaggactttgataatgcttttatatccattttggaaaaacaggaaaatctggatgtttatggataggcaggactttgcagatgataatggggaacatttatttaaatatgctctaaaccaaaaagatgatgtggataagtattatgtcttagataaaaatgcttctgactttaaaagattgtccaaaagctttaagaatgtcattgcatttggatcatttaaacataagctgctatttttattttcccaaaagattatcacatctcaacctgctgtttcattatataatccattttttagtaaaaatattacaatgtttgcaggtttttatccgaatgtttacttcctgcagcatggggttacaaaagataatgtgtcctcttggctgcataaatttaatagaaatttatcattaatctcaacaacctcagatttagaaaagaaatcatttttagatgtcggttataattatgatgaagatattattcaaaccttaggtttcacacgttatgataatttaaatggtgagaatgcgaaaaaacagattgttataatgccaacttggagaaattacattaaaaatgaagaggatttgaaaaattcagaatattttaaaagatggaattcattaatcaacaataatgaatttatagaatatgctggaaaaaaaggttatgagattatattcaaacctcacccaaacctatacaaatttattgatttgtttgataagaataatcatgttattatagattatgttaaaaagtatcaggaaatattcaatgaatcagcattgttaattacagattattcctccattttctttgattttgcatatattaaaaaacccttgatattttaccaatatgcaaatgattatcattttgattctgaaaatggttatttcaattatgagtccatgggttttggtgaagtaattaaaaatgaggatgatattgttaataaaattaaatattatttggataatgattgtgttatggaagatttatacaggaaacgggtggatgatttcttcaaatacacagatagaaataattgtatgagaacttatgagtggatttataaaaattag

SEQ ID NO: 7741 - DNA, 1071 bp, Methanobrevibacter gottschalkii
  source 1..1071: mol_type = genomic DNA
atgtataaagtggttaatggtagaaaaagaattttttatttagactttatcagagcattggctattattttagttgttttggctcatgttacaagagcattttttcaaaattcccctgccggcagctttaatatgtgctttgtttcgcagtttattgattttggtgttattggtgttccattatttctgatgataagtggtgcattacttttaaataaggattatgaacttggagatttcttaaaacgaagatattctagagttctggttccattcttattttgggcgatgatatttccgattagcaaaattctatttgaaggtcaggttgcaactgttgctaattttataaaaatgtactttgattctaacttttggtttgtttggatgattttaggtgtttatctgttcattccgattataaattcgtttattaaagaatatgatatgagaggtgtagaatactttttattgatctggggaggagtgatgtttttaaacacaatcgggcagtatccttttcatcaacttgaattaagctattttgcaggatatttaggttattttgtactgggttactatttagccaataagaaattcagattgtccgattcaaagttattagtgatttcattgctgatatttctaacattcacattcattaacattgattatacaattacaatgtgcatcttaaaaaataagttactctattataaatatgaaactattgttactgtagtgcagtctgcaggattattcatgtttataagatattttgcattggttagtagcaataaacctgaatcgattaaaaacagaatttatttattctttaaagattcattcatgtttaaaataatattttcaattagcactttcagctacggtatttatttagcccattataatccgttgtttttccttaaatatgaatataaaatattattcacatttaatccgattatatggttaccaataatgatgattgcaataataggtagttcatggtttattttatggatttttgataagatacctggtttaagaaatataaatggtgcacattaa

SEQ ID NO: 7742 - DNA, 819 bp, Methanobrevibacter gottschalkii
  source 1..819: mol_type = genomic DNA
atgaataaaaagataggttttattttagctttagtagttatatctttaatgatgtgttctactgtaagcgcaggtttatttgattttatgggaggaagtgattcatcaaatgatgataatactttcgttgttggttttgatgcagaattcccaccatatggatacaaagacgatagtggaaactacactggtttcgacttagatttagcaaaagaagtttgtgaaagaaacaactggacattcaaagcccagccaattgactgggatgctaaagatgtagaattagattctggttctattgactgcatctggaatggatttactatggatggaagagaagacaactacacttggtctaacccttactttgacaacaaacaaataattgttgttaaatccaactccggaatcaacactccggctgatttgaaaggtaaaatagttgaaacacaaaaagattcctcagctttagctgctcttcaaggagataacaaaactttagctgatacttttggaactttaactgaagttgctgattacaatactgcattcatggatttagaatccggtgcttgtgatgcaattgctatggatattggtgttgcagaatacgatattaaaaataaaaacgctactagtgattaccaaatcctaaaagaatccattaccagtgaaaaatatggtattggattcaaacaaggaaacactgatttaaaagacaaagtacaatctaccttagacgatatgtttaaagatggtactgttgctaaaatcgcacaaaagtatggtatctctgaagatgctttaatccaaccataa

SEQ ID NO: 7743 - DNA, 651 bp, Methanobrevibacter gottschalkii
  source 1..651: mol_type = genomic DNA
atgatattaagtaacgtgattggacaattgctcggaggtatggttacttcggttgaaatatttttacttacattattattctctcttcctctcggtttagttgtagccggaggaagaatgagtaaatttgcaccattaagatggctaatgaagatttatatttcaataatgagaggtacaccattaatgttacaattaattattgtatttttcgcaccgtattatgtgtttggtatgagtctatctgcagattatagatttatagcagtcattattgcatttacaattaactatgctgcgtattttgctgaaatctatagaggtggaattgaagctattccaaaaggacaatacgaagcggctcaggtattaggatataataaatttgaaacatttttcataatcgtattaccacaagtatttaaaatagttcttccttcaataactaatgaggtaattactcttgtaaaggatacttccctctcatttgttattgcaattccagaaatgtttactgttgcaaaacagattgcagctgcagatgcatcaattgctgcattactcgttgccggtatattctactatgtatttaatgtaatagttgcatttgtaatggaacacttagaaaatagattagattattatgactag

SEQ ID NO: 7744 - DNA, 684 bp, Methanobrevibacter gottschalkii
  source 1..684: mol_type = genomic DNA
atgagtttacttgaaataaaaaaccttaaaaaaagctttggagataatgttgttttaaaggatatttcccttaatgtagacaaaggtgaggtattgtccattattggtccatccggatcaggtaaatcaacattgcttagatgcattaccgatcttgaacaggaagacagtggaattatcaattttgatggcgcattcggattggttttccaagattttaatttatttccacatcattcagttattaaaaatattacgaatgctcctctaagagttcaaaaaagggataggactgaagttttcaatcatgcacgtcatttgcttaaaaaaatgggtcttgaagataaggaagatgcatatccttgtgaattatccggcggtcagcagcaaagagtatcaattgcaagagcacttgcaatgaatccggatatcttattttttgatgaaccaacttccgcacttgatcctgagttgactggagaaattttagctgtaataaaacagttagctgcagataatatgacaatggtcattgttactcatgagatgaattttgcccgtaaagtctctgattcaattattttcatggaaaatggagtaatcgttgaagaaggttcacctgaagaagtattcacatccaataataaaagaatgcaagaattccttggaaaatttaatgattaa

SEQ ID NO: 7745 - DNA, 1512 bp, Methanobrevibacter gottschalkii
  source 1..1512: mol_type = genomic DNA
atggaaaataatgatgtggactatcttgttatttcttactattttcctccacgtttagaaaccagtggtttagtagttgcaagaaaaattatggaaaaaaatcttaatgttgatgttattcaaagtgcttatgatgaatcttctgattttaatgaaataataaataaacatatcaataacagatttccaatagacattaaaactaaaccggattatattccatttatttttaaatatattgatttaggactaaaagccattaaaaaaaactataaaaaagtttatagcagatcttatatttattcaaaccattttttagctttggaatataaatttaaaaatccgaatgctgaatggacagcggaattctcagacccattacttttaaatctctacaccggtgcgattaaaaattatccaagagctattcttgataattcggattatataaataagcttaatgagaaaatagaaaagttcaatgaagtcagtgatactgattttaaagctttggacaatccaaacaatacattttttatggctgaatatctgacattcatatttgctgataaaatcatatttacaaacgaaaatcaaagagaagtaatgttatcagtttatgataatgagttaagagaatttgtaatgaataaatcaaagttagaagctcacccaactattgataaaaaattttataattttaaagattgtgaaatcagattagacaataacaatatcaatatagcttattttggtacttattattacattagacattttgaatcactgttttatgcatttgaagcacttaatcacaaatataaagataaaattaaactttactttttcacgtcacgtgctgaattactaaaagtcgcaacaggcagtttaaaaatttcaaataatattatcattgaaaaaccattaaaatactttgaatttctaaatgcaactacaaaattcgacattttacttataaatgatacaattaccaaaggtcattttaaagtgaatccatatttaccttcaaaatattctgattacatcggttcgggatcagatatttggggaatatgtgaagaagacagcatattgtctaaaaaagaattaatgtataaatcttcaatgactgattatcagagttcatgtgacgttttaattgatattctaaatgattatggatatgaagatcaggattactattttgaagataatatatatgaaaaaagaataaatgaacttaactggagatttggttttgaatttgacgagcgaaaaaaatacctttcccgatataacaatttaaaagaaaaaaacatgaccttaaatggtgaactgcaaactttaatgaataaaaacaagaaacttaaagctgaaaatgatgttttaagaaagaaaaataagaatctcaaaaaagaaaatgaaacacttgaatccaaatacaacgaaattgttaattcaaatagctggaaaataacagaacctttaagaaaacttaaaaacagtaaatag

SEQ ID NO: 7746 - DNA, 723 bp, Methanobrevibacter gottschalkii
  source 1..723: mol_type = genomic DNA
atggtaaaggtttcagtaatattaactgcattcaatgaagagaaatatattgggaaagctattgacagcatattaaaacagaccttaactgattttgaattaattatcgttaatgatgggtcaacagacaatacgctaaacattatcaacagctttgaagatgaacgaattaaattaatcagtcacgacaacataggacctggagcaagtagaaataaagcactgaatattgcaaagggagaatatataatgtatcttgatggtgatgattggtatcgagtcgacggcttggaaatagcttacagtgaagcaaaagataaagatactgactttacattctatcaaatgatcaattatgatgaaaaaactggaaaaacatatgaaaatgattggtttaacttaaatatctttgatgaatcatttgaaaatactgttttcaacattaatgattttaaaggttcaatttttgacttgtctgttggtgtttgtcaaaaaatatataatacatcattcctaaaacgtattgatgctaaatttccagaaggaatcttatttgaggatatgccctttttttattatgtattattaaaagcagacaaaatttccattattaaacagcagttatactacagaagaaaacatgatggatccatcacacatgtagttgatgagaaattcttagatactgttcctgcaggccaggaactaattttccattattaa

SEQ ID NO: 7747 - DNA, 273 bp, Methanobrevibacter gottschalkii
  source 1..273: mol_type = genomic DNA
atggaaaatggatggtatgatacatacaaatttgacttacttgcctataaaattaatggacctcgttttgctttaagagacattgaagaaaattataagattccgctttacatgttaattaaaaaagactaccattcaattaaacaaagcaaatattatcaggactatttggacaatcttggtccggtaaagaaaaaattctttttagacataataaaatcaaaaaattataatgactatttggcacttaactcagacaaagacaattattaa

SEQ ID NO: 7748 - DNA, 972 bp, Methanobrevibacter gottschalkii
  source 1..972: mol_type = genomic DNA
atgaatataacagtcggtgttattggagcaggtgccctcggtactgcaatatcccaaaatattagtggaaatgtagctgagataatattacttttaagaaataaagaactttgcgatgaaattaataattgcagatacaattctcagtattatccaaattataagttaaaggataatattaaagctactttggaaacaggtgatttatcaaattgtgatattatttttttagcaattccctcttctgcttttagaaaaacattaaaagatttacaggatattgtaaaaaaagatgttattattgtcactacagctaaaggaattgaatatccatcattaaaaacaatgggtaatttaattgaagaatattttgatgaaaattatgttgcactgtcaggccctaattttgcatctgaaataatgttaaatctgccaacagtaacaaatattgcttctaaaagttatgaaaactcagttaaggtaaaaaaagtgttatcaactaagcaatttaaagtgaaaattattgaggatatttatggaatcgaactttgcggaatattaaaaaatattaatgcaatagccaatggtatttgcgaaggtatcaatattaatgaaaatgcaagatttgctgttttaactaaaggttttaacgatacaatcaccatcataaaagcaatcggaggtaaatctgaaacggttcatgaatattgcggatttggagatttgatattgacttcaacttcacgtgaaagcagaaatcataccctgggaatattatacggtcaaagattgatcatcaatgagaatgctaacggagttgtatttgaaggaaaaaattcgattaaagccatcagagatatctgtttaaaaaataatatccatagtgatattgtaaactttgtatatgatgtaatgattagaaaagtaacacctacaatagcgttcaacaatttatgggaaaacatggaataa

SEQ ID NO: 7749 - DNA, 768 bp, Methanobrevibacter gottschalkii
  source 1..768: mol_type = genomic DNA
atgatgattggtgtaattttatcagccggaatgggaacaagattaagaccattaacagacgaaattccaaaaccgttactggaaatcaacaatacaactttgcttgagagaatgattagaaactgtataaatgcaggaatccgtgaatttatattaattgtcggatatgaaaaagaaaaagtttttgaaattgctccgaaacttgaggaaaaattagacatatccatcagaataattgaaaatatggaatatgatgcaactaacacttctgtgtcagcttatcttgcaagttcttacattgaaaaagagaatttagatgattttatactaattaacggagataatgtggtagatcctgaaattatcacaagaattgcaaaaacagacaatactagtttaattgtagataactttaaagacttgaatggagaatcatttaaattgattttaaaggatgtaaaaaaagcagataacagcattgcaaatggtattatatctgaaatcggaaaagaaattgatataccctcatcaactggtgaatttattggtgtttcaaaagttattaaagaggatgtaagtcgttttaatgaaattttaatcagattaattgatgaagacaggcaaaattattatgattttgcatataaacctctctcaagagatagaaaaattgattttgtgttaacaaatggtcttaaatggactgaaattgatgattataatgactggaaaaccgcaaatggattaattaaagaatttgagaactaa

SEQ ID NO: 7750 - DNA, 1698 bp, Methanobrevibacter gottschalkii
  source 1..1698: mol_type = genomic DNA
atggctttaataggaaaaattaataacttaaaagaatgcttggataacaccaaaatttatgacagttattacagtgccgaaattgatgaaagcattatttatctggagtcaagaaacggcatggattttactggaaatatttttagaataactgaagagttatccacaggcaaatatggtaattttaagatatatgtttatgcagcaaaaagtattaaagctaaaattgagttatttaaacggaattataatttaaaaataactaaaatcataactgatgaagatgaagcaactaaaatcttacataaagctaaatatatcttcacagattcaggcattagatataaatatgttaaaaaaccggggcaaattttcgtcaatacctggcacggcactccattaaaattaatgggattcgacaacccatcagaaaaacataatgttggaatcatacagagatcttttcttttcagtgattatattttatttccaaatgaatatatgttagatagaatgtctcatgcgtatatgattgataaagtttatggagggacatttttattagagggatatcctagaaatagtgtttttttaaaggataactccaattataaggaaaaattaaatttaaaagataaagaagtttttgtatatatgcctacatttaaaggaattgtgaataatagaaaagatgaaaaacagaaaaatgatgtcaataagtttttgaataaattaaattcaaaattaaatgacaatcagatattgtttgttaaatttcatccgtacaatcagtccaaaatcgatttttctaaatttaatcatattaaagagtatccaaaaaactttgaaaattatgatatattaaatgctgctgatgttctcattactgattattctagtgtattttttgattttgcaagtactagaagaaaaattattatttttaactatgatcaggatgaatatctcaaagataggggattatattttcctcttgaagatttaccattccctaaagtccagaatattaatgatctggtatgtgagttaaattctccgaaaaattatgacgatacaaagtttaccgaggaatactgcaaatatgattcaaccaatagtgcagaacatatatgtgaaactgtaattaatggtaaaatcgaatgcgattacaagataatcagtaatgcaaataagaatatattaatttatctgggatctatggagaataatcaggcaaaaagtcagcttattcaaatccttgaaaatacggatgataatatcaatattttcctgtcatttaaaccttggaataaaaatattaaagaaaaccatttaaatttattaaaggatattccaaatactattgaatttttaccgttaagttataatttaaccccaacattcaaagaaaaagtggaattgaacagatttataaaaaaaggcactgatttgaatttggaactaacagaaatgtttaataggaattataaaagacaatacggtgattttaaattcgatttaataattgattttataagtaatgatccggaacagtcattaacatatgcatgttctaattcaaaaaatgcgattatcataaatgaagaaacacaaccgaaagtttacaatcaatttaataaaatttacagattatccgagttcaatataaaaaatatatgtgatgaaataatcagataa

SEQ ID NO: 7751 - DNA, 855 bp, Methanobrevibacter gottschalkii
  source 1..855: mol_type = genomic DNA
atgaacagactaaaagcagctaaaacaatatcggcaatcacaaatcccccaatcatatgcattccattatttcttataatatgtataattctatcaaatggaaatttcaatagcttcatagttttggagtcaatttcactggttttcacatcaattctaccaatgattattattgtttattgggctaaaagacttgatactgatagagatatttcaaatcgcaaagaccgcttcactcccctaattgttggaataatatcatatttcatcggttttctggtctccttaatattggggactaatgattttctaacagctcttcttttatgctactcaataaatacaggagtggtactgctgataactgtaaaatggaaaataagtgtccatacaactggactttcaggtcccgttggtgcattaattctacttttaggaccaactggtgcattatttgggataatttatccaattttgatatggtcaagagtgacacttgaaaaacatacatcggcacaggctattgcaggtggagttcagggattctttttaacagttctagagatgtatatgttcatttcattgttcaacttcaatgttggcaatttagtgcccttgactgattgcatatggtatattttggctataatatctgcaccagtgattttaggcatactctcatatgctcatatgaataaaatagtttttagtgcagcggtgataattggatttacagtctttttagaatatgcgccattaagtgcatctgtaatatatattcttgtctgtttaactagctgtctgattagcttatatgctggtgaggattatgagtggtctgatgttttaatttaa

SEQ ID NO: 7752 - DNA, 579 bp, Methanobrevibacter gottschalkii
  source 1..579: mol_type = genomic DNA
atgaaagttaatttaaaaccccatgcaatgatgtatccttcacctgctgttgttgcaagtgcttatgataatgatggaaaagttgacgcctgcactcttgcttttgcagcaatgtgttcccacaggcctcctgccgtaatgatagcaatcaattccactttaaagagaaaaacattagcaagtatcctaaagacaaaggagttttgtttaggttttccaagtattgaacatgtcagggaagttgattatttaggaattgaatccggatataatctagataaaatagacaagatccgttttacagctaaaaagggagagtttgtcaatgcacctataattaatgagtttaaagtatctattgaatgtagggtaatggacattaaagaagttggaagccatactcaaataacaggtgaaattttaaatattcaggctgaggaaagcgtattggacgataggaataaagttgttttaggcctgttaaatcctatagcttatgatgacataagccattcatattttaaaatgggtggaaaaatagctgatgggtttaaggttggtttaaagtttagggaatga

SEQ ID NO: 7753 - DNA, 450 bp, Methanobrevibacter gottschalkii
  source 1..450: mol_type = genomic DNA
atgaaatcattagtgacatattattcaagatcagatataacaaaaaaattagccgaagacattgctaaccaattaaactgtgacattgaagaaatcaaacctaaagtagattatcatggaaaattaggttatgcacgtggaattaaagatggtagagcaggtaaaattgtggaattggaatcattaaaatacaatccgcaggattatgatgtagtatatgttggagggccagtatgggccgctaaagctgcaaatcctgtgatttcatatttaaaagaaaatgaaggcaaatttaataatgttaaattcttcataacagccggaagcaaaggctttgaatccagcttggaacaaatggaaaacacctcaatgaaaccacttaaaactttacagttgagagctaaagaagttaaaaacgaagattatgatttaacatcctttttagaataa

SEQ ID NO: 7754 - DNA, 471 bp, Methanobrevibacter gottschalkii
  source 1..471: mol_type = genomic DNA
atgattaatgaagaatttagactcattgatgcttcagaacttccgatcagtaaactgataacgatcattgcaaaatgccagtcattttacttgaacaatatgttaaatgaatcgggcattaattcaacacaactgcacattctctttgaaatatcccatcagaacaacattaatcaggaaaaaatagctgctagatgcagcatcaacaaaggtgctgttgcaagatccattaaaaagttggaggatatgggattagtcataagggaaatcgatgaaaacaataggcggcaaaataaagtttccctaacacaaaaaggagaggagctattgaacaaaagtattaaaatcctcaatgatctggaacaggaagtatttgatgatgaaacaataaataaagaagaattgcagaatgttttaaaggaaattacaataaagattatggaaataactgaaagggaggtaaaaaattga

SEQ ID NO: 7755 - DNA, 1386 bp, Methanobrevibacter gottschalkii
  source 1..1386: mol_type = genomic DNA
ttgagcaaaaatgataatatcaaaataataactggtgatcctaaaaaagctattgttaaattagccatccctatgatgatttcaatgttactcatcatgatgtataatattgcagatagtatctgggtagcgggactcggtgcagatgctcttgctgcaatcggatttattacaccgctgtttatggttttagttggacttggaaacggtataggtgccggggcaaattctttaattgcaagaaacattggtgctaaaaattacaaacaagcaaacaactccggattacatgccatcttattgtctgtaattgtatcagtaatatttaccattttaattgaaggatttatggtgcctatattgcagtttatgggagccggagatacaatccaatatgcaatggactacagttatatcatattcggattcctgttcatatttgtatactcaggagttgcatctgccatatttagatcagaaggagacatgaaacgttcaacaattgcgattgcaatcactgccgttttaaatattattttggatccgatattcatttacatattaaaccttggaattgcaggtgccgcctgggcaacagtaatatctgcaacaatgtcctgtgttattatgagttattggatatggggtaaaaaagacttataccttgatttgtcccttaagaactttgattatcaaacaagtttaatggtggataccctgcaggttgccataccttcaacattagaaaatatagtattttccgcccttgcaatcattattaacagcatgctagttcttgcagcaggaaccaccgcagtagcagtatataccgcatcaatgagaattgtgcaattagcgatgattcccctaatcggtcttggaacagcggttcttacagttgcaggtgttgcatatggtgcacataactacaagaatttaaaaaccgcacattcctactcaataaaagttggttttttaatctcaatcatacttggagcaatcatgtttgtattttcaagcccaattgcaacaatattttcatatactgcagccagtgcaagcctgtcacctcaaatcgcaactgcaatatctgtattaagcctctttgtccttgcaattcctcatggaataatgtcttccatgatgtttcagggagttggaaagggaacatattccctattgatcacacttcttagatctttaatcttagaaacagtctttgcatatctattctgtttcacttttggatggggattaactggaatttatgcaggtgttgtatttggttgttttgttggaggaacaatcggatatgtctgggcaaaattattcatcagaagattcaaacagattgctattagaaaatatgctccgcaagaaaactag

SEQ ID NO: 7756 - DNA, 441 bp, Methanobrevibacter gottschalkii
  source 1..441: mol_type = genomic DNA
atggaatttattttaaataataaaaaatattcaatattaaaccatgagctatttatcaattatttaatggttgacaactattttagaaatcattattccaaatatgattatgaaattagatttgattttataacacccctattaaataaagaaaaaattaaatttgaagacatattggctggtacaaaaaatttagaagaattgattgaaagggaagagattaatttcatccccccaggtcttaaaataaatcagcatactaatggaaactttaagatcacctatcaggatttggattttaacaacatcaccgtaggtgaagctattccttttttaattgcattaaattctcttttaacttacaaaccaattgttacactgtcacagattgaagaagaacttgagaatttcattgaaaaattcaggtcatacaataaataa

SEQ ID NO: 7757 - DNA, 651 bp, Methanobrevibacter gottschalkii
  source 1..651: mol_type = genomic DNA
atgtactgtccgaattgtaatagtgaaaataatgattctgcaaaattctgcaagaaatgtggaacaccgttaaagaaagaggttagtcataaaaaaataattaattccattaatgatgaaaaatcaagtaaagatgatattaccaagtacataatcattgcattaattataattgcaattgcccttgctggagcatttgcttatatcggatttggaaatcataatgatgatgggcaaacacaagttcaaaataatgcatcatccagtcccaatcccgttcagtcaacacaatcaagccagcctcagcaatcaagttcagcacaaagtgctgctatggatatacttggaggtagtttttcaactggcagcagcttgtctgcaaaaacatatgccagcatctatgttggttcacaacattccggtgaaaaagtaataatacaaattaaatattcaagagacggatctagtttaaataatgggaatatggttccaaaaacagttgactcatcaggatacattaatgtaaaaagtgctgattcattcaaatattatcctgattttgctgaaatcaacttatttgacactaataaaaaccttttagatacacaaagtgtttcattaagtccagatagtagtactcaaacattctag

SEQ ID NO: 7758 - DNA, 480 bp, Methanobrevibacter gottschalkii
  source 1..480: mol_type = genomic DNA
gattctgatttggatgatttaaatgatgattctgatttggatgagtttgatgatgattctgatttggatgagtttgatgatgattctgatttggaagatgtggatgattctgattttgaggattatgatatggaaaattatgattttaaacataatctacttaatttaaatataacatataaagcctgtagttccagattaggcgctacttctaatctaaataatcattcagtcaatgaaacaaaaaaagattcaaatcccaatactgaatcaattgaacacgctaaaaaggcaaaatctgttttgaaaagtataaatttacctagtgaaaatcaaagcaattatgataagaacattagtgggaataataatgaaaaatcaaataatgaggaaaacaaacaaggaaacaattatttaactatcatatcaattattttggttttgatattagtaattattgcatgtaaaaagttatattaa

SEQ ID NO: 7759 - DNA, 498 bp, Methanobrevibacter gottschalkii
  source 1..498: mol_type = genomic DNA
atgtctggaattcctaaaaaagaaataaaaaaacacattcctgttaaagatttggataaaagaattaaaaagttagaaaaagatgtaaaagtattaaataggcttcattttataaaagcatgttattctggaatgagtattaaagaagcagctgaattaaatggaatatcttattcaaatgcatatgtttggtttaatagatggaacgaagaaggtcctgagggcataattccaaaatacgctggaggacgtccatcatatctgacttcagatgaaaaaatagaattagaaaaattactccaacaagaagaagttataacaacagaaatcgttcataaaattattaaagataatttcggtgttgattatagtcataaacaagtaagaatcattgttaaaagtttgggttattcatattcaaaaccatatccaataaatattgaaactgattctcaaaaagttgaaatctttaaaaaaaactctcacaattcaatttaa

SEQ ID NO: 7760 - DNA, 165 bp, Methanobrevibacter gottschalkii
  source 1..165: mol_type = genomic DNA
gtgattattggggaagggcatattttctcagataatgatttcaaagaggatttgttaaatgttggttttaaaattgtaaaatttaataggggtgaagcaacatatgatttcgcatttatcaaatctgattatttcaattattggccattacttaaaagagaataa

SEQ ID NO: 7761 - DNA, 1380 bp, Methanobrevibacter gottschalkii
  source 1..1380: mol_type = genomic DNA
gtgcagattattgataaaatcaaactaaagttattaaattcaagtaattcttataatttttataaaaataattatttagctcaaaatattcaattaaaattacttaatgaggaattggaggataagaattctgaaattaataaatttaatgagattgtgttagaacaaggtaataatttaaaattacttaatgaggaattggaggataagaattctgaaattaataaatttaatgagattgtgttaggacaaggtaataatttaaaattacttaatgaggaattggaggataagaattctgaaattaatagagttaattatagaattgataaaatgttatcatttgacttgctttttaaagaaaatttaacaatgtttaatactcatattaaagagatttttgataatcaacgagattttgcatcgaatttaaatgaatactatgaaaaattaagttataggagcaatgaagttaatgaatcattaattaagtttgaaacaatgttatctaaaagtaataggggaatggatgagaagtctgatgttattcttgattttattaaaaatgagaatattagaataaacaatcatgttgaaatgttatttaatcatcatgtgaaagaattcaataaatttaacaaaaatataaagaactctatggattttattgaaaataattataagaactgtagaaaatatttttttaagggtaatgaatcacttttagagccttatttggatacggatttcatgttcaacttttgttattttaataatatagaattactttcttattctcctaaagagaatttgatattgctaaaaaataaagatgggattgttattgggacaaataatcacctttggacaattatggaaatttatggtttaaatgaatatatgattccaattttattttattttgatgattttgttgtgtttgatattggtatgaatagagcatatgctagtttgagttttgcaaatatgcaaaattgttcttcagtttttggatttgaaattgatgaatttgtatattctaaagcaatagataatatttctttaaatccaaatttagctaataaaataacaacttataattttggactttcggatgaagatggcattgttgaattatattgttatgaaggtttcgatggtcttaatacgatgatgtatgattttttagaggctaatccttcattaaatttatataaagataaacttgatgtgaaaaaagttcatgtgaaaaaagctagtgaggtaatattagacattatttcaaaaaataatattacatctaatattgtactaaaaattgatactgaaggtgcagaatataagattgtctatgatttaattaaaatccgatttaattaa

SEQ ID NO: 7762 - DNA, 1395 bp, Methanobrevibacter gottschalkii
  source 1..1395: mol_type = genomic DNA
gtggttcctattaaagagtttacacaacctaaaatttcaataatattaaatttaaatgatgtaacagaaaaatattttgaaaaatgttttgattcaatatgtaatcaagaattagattatgttgaaatcatttgtgttgaaaatgaaaactataaatttgataaatttcaaaaatatttattagaatatgagtttattaaaattttcgatgaatattatcttcaaaataattttaatttaataataaattctgattacattttatttttaaacgcaaaagattggttattatttgttggtttgaaacatgcatataatttggccattgaaaatgatatggatattttgattaattcttataatatatttcatgaattttctggtgaaattgaagatccttaccaagaagaatatgctcaattaaataatttaaatagtttttctggtaatgattttaaaaacattttatttaacatgccgaaatattctttcaatctttataaaactgactttattaaaaaattgaatttaaaaatcccattagacttaactagtcagatctctttttttattaactcatcaatgatgacttcacgcattgggtataataataaaccattattatataatagacttaatgaggaaaatgataatttaaattattataatttgatttgtaatgattttaattttggaatttgtgaaaataatttagaaattaatatggattctattattgatacttattttaatatattatattttttagaaaaagagggaatttacaattgtaataaatattatttgtggaattatatttttagagtatttagacgcatatatttacaaaattttaaaaataatattgttatttttaagaatattcatgatttttgtacaaatgttttttctaagtatcataatgatttagttttaaatttaaaaatagaaaacttaactttttataggtctattttaaaatcaaattccatttatgaattagaattattatatgaaaataataggttagttttacaaaatgaaggaaaagataagattattaatgaaaaaaataatttaatatctaatttaaataatgatttggctaattcttcaaaaaaattggatgttgaaattaaaaagtatttaaatatattggatgataaagataatcgaattaatattttagaagagaaatattcttatcaggttcatgaaaataatctattaattgcgaaacttagtgaagttgaaacatctcgttcatggagattaactaaaatttttagaaaaatagggatgtttaaatcaataatcgttttagttactgttgggtttataatttttttagtaatgtatatattaattattatgttgatgttaattattaaatag

SEQ ID NO: 7763 - DNA, 2571 bp, Methanobrevibacter gottschalkii
  source 1..2571: mol_type = genomic DNA
atgggatttaaggtcagtattataataccagtatttaatgttgaattttatattgagtcctgtatattatcattacaaaatcaaactattggttttgaaaatttagaaattatttttattgatgattgttctacggataatacttcaataatcatagaatactatgcaaaaaaatataaaaatattagggcaatttattgtaatgaaaatagtggagttgcaggtaaaccccgtaatattggtatggttaatgccacatcagattatataatgtttattgatcctgatgatactttttctaaagatgcatgtgaagttttatatgataaaatctctaaatcgaaggtggatgttgttagtgggttacattccaaaaaaattcatggtgatactgatattatttttccaggtttgttaataagtactttcacaaatcccaatgatagttggcaaattaggaaaaaacaattggctgaatacttaaaagattttgatgagctttattttgaatctttggatgaaatgccttatttattaggtaattttgccataatgagcaaaatttatcgtaaaagttttttattttctaataatattaattttcctgaagaaatacccggtgaagattcagtatttttattaaatgtatttctaaatgctaaaggaattatttttattaataaaataatcttttcttattatacttcacgtgatgatgaggataatgcatcgttaacacatcaaagtgatttgtcaagaaatttaggtagattaaaagcatataaaatgatgttaaaattatcaaaagatcatgataaattagatgagtttgttaattatcttctttgtggtaagatgaattatttcttaaatcaatatgttaataataaaaatttatctaaaaaggagattagtataattattaatgaaagttatgatttatttactttgattaataattctaattgtaaatttgattctgattataaaaaattagttgaacttattattgataaaaatgtggatgagctttataaatactcagaaaatgatgtttttcatattgtgacaaataatcatgaaactaaatatattaaagatataaaagtagcagttataatggatccctttacttacacttcatatagcaatgagtttgaagatattataattgaaccatcatcttggttagaaacttttgaaaatgaaaaacctgatttatttttttgtgaatccgcatattctggagttaacaaaaaaagtgtgataaatggggttgcaattgaagataatattactccttggcagggaaaaattgggttaaatttaattagtggcaatgataataggaaaattctctttgatatattaaattattgtaataatcataatattcctacaatattttggaataaagaagatcctacatctttcgatataaaacaatataattttattgatacttcattacattttgattatatttttacaactgatgaagaaactattcctcgatataatgcaagaggacatgataatgtttatcctttattgtttgcatcacaaattaaattgttcaatcctatagagtataaaaaacgtactaacgatattatttttgcaggtagttggtataatcaatttagtgaaagaagtaacgttatgagagaattttttaataaaataattaatagtgattataatttgaaaatatatgatcgtgcttcagagattaattctattaataggaagtttcctaaggaatattctcgatatgttttccccaaagtacattttgataaaatgcctagtgtatacaaagagagcaagatatccttaaatattaacactgtaacaaattcttacacaatgtttgctagaagagtgtttgaattaatgtcatctaatacattggtgttatctaattattctaaaggtatttttgatttatttaaagataatgttatttatttagataaactcagttctttaaatttagataaaattgatattgaaaatatttgtgaaaataatttatatgatgttcttgaaaatcatacttattataataggtttaaatatattttaaatattatcggatttaaatttaaagaagaaaataataatcttattataatttatggtttaaataataaaaatgaactggaaattattttaaatgactttgaatctattaagtatgttaataaaacttgcttaatctatgtaaaagataataatttattgaatagtttaaatgaaaggtttattgaagatgttaaatttattggtataaaagaattaatcatgatttcagaagaatttaatcagagttatttttttattattagggatttatttcatccacttgaaaaagattttattagaagggcttttttgcattataattatcttgataagaacattggtgtcaaacagggaaatcctaaatataatttagctaaaactatagaatataaaaatattttatttaatattgaactgttagataaagtattagaaggtttattaaaatatcgattaaataaattaacaattcttaatatctaa

SEQ ID NO: 7764 - DNA, 1236 bp, Methanobrevibacter gottschalkii
  source 1..1236: mol_type = genomic DNA
atgaagatatgtattttgggtcaaggatacattgggcttccaactgcagcactatttagtcttaatcattgtgaagttattggagtggatatctttgaagatatgataaataatttgaataaaggtattattcatatagaagaaccaggaatttcgaaaattattaaaaaagcgattgaatcaaatgtttatagagctagtttaatccctgaaaaagctgatgcatttataattactgtaccaacaccgtatattgttgaaaattatagttgtgatttaagttatgttacaactgcatgtaaatcaattttaccttatattgaaaaaggtaatactgttatcattgaatctactattgctcctatgtctactgatgatgtgattaaacctatatttgaaaatgctggttttattattggtgaggatttattccttgcacattgtcctgaaagagtaatccctggcaaaattattgatgaattaattcataatgatagaatcattgggggagtaacaccaaaatgtgcagtaaaagctagtgaagtttatgatcagtttgttgaaggagagctaatacttactgaggcaaaaaccgcagaattatctaaatgtatggaaaatacatttagggatgttaatattgcacttgcaaatgaacttactaaaatttgtactgaaattggtgttaatgtattagatgttattgaaatggctaataaacatccaagggttaatttacattcacctggtccaggtgttggagggcattgccttgcaattgatccttactttatttatgctaaagcacctaaaactgcccatattattaaattagcacgtgatacaaacaaatccatgccagattttgtatgtgaaaatgttgaaaaaattatttcgaaaggtaaaattgcaattttgggtgtttcttataaaggtaatattggggatgatagggaaagcccatcatatgaaataatcgctaagttatgttcaaagtatgaaatttctatacatgatcctcacattgataatcctaattttgtaagtttaggtactgcagttaatggtgcggatttaattttagtattatgtgatcataatgaatttaaaaacatggattatgatttaattaaagataaaatggaaaaagcaataatttttgatactaaaaatataataaaagaagttccagatgatatcaagttatttaactatggaaatttatactctatttaa

SEQ ID NO: 7765 - DNA, 438 bp, Methanobrevibacter gottschalkii
  source 1..438: mol_type = genomic DNA
atggataaaaaatggatagtattaacgatatttttggtaatttttggctttttaatattaaatggattaaataatagtatacatgttggagattcctatttttctctacctgaaggatatgtggaaggaaatattgttaaatataatgatgtgaatataactaatggaactacttcattaagaattatagaatacaatgataacaatattcaagagcatattgataaatatgtgaactatagcactaatcataattattctacaaaaattaataattttaatgttgatggtatgaatgtatataaatctgaaattatacaaaataataaaacattccattattggtttattaaaaaagataaagtttatgaaattgtaacatgggatggaaatagttacactgataatactgtatttaatttaattaaatcaaattaa

SEQ ID NO: 7766 - DNA, 867 bp, Methanobrevibacter gottschalkii
  source 1..867: mol_type = genomic DNA
atgaaaaatttaattaaaattaatgttgattttgaggaattagataattataaatttataatggatgaacctttttctttagaagttaattataatcatgttaaatataattttattataaaattttcaagtaataataataatttaatttgttgtgctcctggtgcacaagataggaacaaaagaacaagtcaaggggaattaattaaacctccgtattttgacagatggtcatggtttaaatattttgaggaatcattcattgctttttcagatcctattttttattatgataaagaaataacattaggttggtgtgtaggtgataaaaatcagtggtatgctgaaaatatatccttaattattcaaaaattagctaaaaatcaggaaataattaatgagaatattctattttttgcaagttcaggaggtggatttgtatctataatattagctactttaataaaaggttcaaaatgtgtagttaataactctcaattttctatatttaatttttatgaaacacacataaatagactttttaaatttttagaaaattcatttagactaaataaatctgaaataactgataaaatagattataggttagatttaataaaattattcaaaaaagaaaattatatgccttctattacatattatgttaatgcatgttcaaagtatgatattaaatatcatgcaatgccatttatagaaaatgtcatgtttattcctcaatttaaagataatttaaatgtacattattatcatgagtataaagactttcctcataatccaatgagtactgataaaattttagttattctcaaaaattttattaaaataaatttatataataatttttag

SEQ ID NO: 7767 - DNA, 534 bp, Methanobrevibacter gottschalkii
  source 1..534: mol_type = genomic DNA
atgcctacttggagattacaattggaaagtgaagatcttttcttaaattctaaatattatgaaactttgaataattttttaaataataaagaattattggagttattaaataaaaatgactataaattagtattcaaacctcatgccgaattaatggaatatcttgatttattaaatgttgataatgatgtttatatatctattaatgaatcttatcaagatttgtttaatgaatctgcaatacttatcacagattattcatcagtattttttgattttgcttatttaaaaaagccagttatttattaccaagataataatgattatcattatgatgagggttattttgattatgaaacaatgggatttggtgaagtaatttctgatgaaaatctgttgattgaaaaaattaagttttatttagaaaataattgccaaatggaatataaatataaatgtaatgttgaaaatttttttaaatttaatgataaaaagaattgtgaaagagtttataattggattttaaataattga

SEQ ID NO: 7768 - DNA, 1926 bp, Methanobrevibacter gottschalkii
  source 1..1926: mol_type = genomic DNA
atgaaatataattttaaattttctataattattgcagtttataatgcggaaaaatacttaaatgaagctattgattcaattattgatcaatcttttgattttgaaaaaaatactcagttaattcttgttgatgatggtagttcagataattcattagaaattgctttgcagtatcaaaaagactttccagataatattttagtattgtctaaagagaatggtggccaagctagtgcacgtaatttaggattaaaatatgccactgggaaatatgtgaattttttagatagtgatgattatttatctaataatactttagaagaagtttataatttttttgaaaatcattttgatgaaattgatatacttgcaatacctatgattttatttgaaagagttaataagcctcatagattaaattataaatttaatgaaaataaaataattgatttaattgaagatccaaataatcctttgttgtcttcatcttcttcatttattaaatctgatgcaatcagagattataaatttgacattaaccttgttaatttagaagatgctttagtaattaataaaatattgttagataaaaagaagtatgctattttaaatacatgtaaatattattataggcagaggaatttaagaaattctacagttgacacaataaattctaaaaaagagtattttacagatagattaaaaagtttttattgcaatataatagattactgtttatctaaagaaggcaacattcctaaatttatccaatatttaatggcttatgatttacaatggttattgaaattacctaatttagatgttttggaaactgaaattgaagttcaagaattttgggattgtttatattatgttttaggttttataagtactaatgttgtctatggaaataaaaatattcttaatgatgttaaaccattctttctgtatttgcttggtgaagaaaaatatatctctttagatgatgatggttctgtgttattgaatgtgggcacacataatgttgataaattaagtagacataaaatttggttagatataattgatataaaaaaggatatattaaatatttctgggatttttttaactaattttccaaatcagaatatttcgataaaagttattaaagaaagtgaaaagcatgataaagaatatttttgccaatataaaaaatataattcttttgaacgtaaaaataggacatttttaggatttgattggatatttccatataattttgatgtaaaaattccattagttaaaaatgaaagttctaagttaagatttgttgtaaattatcaggatgatgaacatttattttcttttgaatccagtctgggtttaaattatggtgtaagactgtctgattttagtgcatgtattagtaaaaaacattatattgttctttttaaatattctaaactttttattttaccttataaatattcttcaatgttacgttatgagtttagtaatattaaaaaaactattaaggataaaccaaatttctttttaagttctatttttataagattagcatattacattttatatcctttattttctaataagaaaatttggattttttctgatcgtccagattttgcagatgataatgcaaaacatctttttaaatatgcaattaatcaagatgatgatgttaaaaaattttttgtattaaataaggatagtaattcatttaatgatatgaaaaatgagaataagaatgtaatatctttttctagcttaaaacatagatttttatatttgtatgctgaaaaaattatttcatcttatgttaatgaagattttataaatcctttttttaactataataaagatttatttgatggtttaattacttcgcaaagagttttttttacagcatggagtaaccaaagataa

SEQ ID NO: 7769 - DNA, 807 bp, Methanobrevibacter gottschalkii
  source 1..807: mol_type = genomic DNA
gtggaattagttaaaaaattggatgatgttaaaaatttaactaataacaaattgattggtgctccagatttgattaattctgaaattcagtttcatgggagaaataatattttagtatgtgagggcactattaatctggtaaattctaatattgtttttcaaggaaataattcaataatttatctttcctatacaaaacatgattataaattgatggtatttgttcgcagtgattctactatttttttaggaaaaaataatgaaattggttctaaatttaatattaatattcaagaacatcaaaatttaattattggtgatgattgtattataggtaatgatgtaactattagaacttgtgatacacgtgcaatttatgattttaatactaagaaaagaattaatttttcagaaagtattttcataggcgaccatgtctggatagatcatttttcgtatatctctcggggtgttcatgtgggttcaggagccattgttgctgttcatagttttttatcaccatattgtaaggttcattcaaataattatgttatgggtaatccaattaaggtgtttaatgacaatgttttctttacaaaagagttcacaggtagttataatgttgaggatacaatgaatttttcatcatataaaagtgatattttccattatgattttgtgcttaatgaaaccttggcaatggacaatatagataaaattctaaaagatttaactgtagatgaaaggttagattttctcgaaaaactgtttattaaaaacaaacgtaaaaatagattttattattag

SEQ ID NO: 7770 - DNA, 1068 bp, Methanobrevibacter gottschalkii
  source 1..1068: mol_type = genomic DNA
atgggtgtaaatatggttagtgaatttacagtatttggttcatgtacttgcagagatatctttaatagtacgattaataaaaactataaagattatttccatataaatccctcaggaattagagtatcatacattagtttaatgcatccaccagttgactacacagaagaatcattgataatacatcctgaaacaaaaaaaaacattaacttcagcaattggattaaacaagatttagataaaagttttttaaatgaacttaaaaaaaataaatcagaatatcttattatagatacttattacgatgttaatttcggcattattgaatttgaaaataaaaattatattacaaacaatttacatattgataaaactgaattctataaaaacctaaattataaaaaagtaatgacaattcaatctaataaaaatgaatatttaaaattatggaaggaaaattgtaatctattttttaattttttagaaaaatattgtcctgatactaaaatcatattaaatcccaccagacatgttactaatttaatcagagcagatggaacaatatctgaaatgggcatatataaaaagataagtgaaaaatataacccatatagagatttattagacagtcatattattgaaaatttcaatgttgatgtattatattttgatgaaaacactcttgcatccgaaaatagtatttggggtgcttcatcattacattataatacctcatattttatggatgttacaaaacaattgaatgaatttataaaaagaaacaaaatattagataatgcaaatgaaaaaagattaaataatttatttaaaaaacaaaacagaaatttgttaacatttaaaatccaattaaataacaatgagaaaattaacaaaatagtgcataaattcaaacaaaacaatacctataaaaaccttctgaaaaataataatgaaataacaaataatatcacagaattaaaagacatattaacttcgaatgaatatgcatttttaaattctataaataacagtaaattatcacaaatcaaacaattaaaattgaaataa

SEQ ID NO: 7771 - DNA, 771 bp, Methanobrevibacter gottschalkii
  source 1..771: mol_type = genomic DNA
atgagtttaatcaaagaaaatgaaatttttttatttgaagagattgttaaaaaaaattttgcttcaaaatataaaggttcagtattaggaatattatggagtgtattaaaaccattactcatcatgattttgttaacaataatcttttctactctatttggaggcagtattaagaattatcctgtttattttttgtctgcaaaatgtatttttgatttttttactgctggaactaatagtgctatgaatgcgatcaaaggaaataagaatatattgaaaagaactgctgctcctaaacatgcttttgtattaggaagcattatcgcagagtttatcaactttttaatcacattagttattttagtggcagtcatgattgtaacaaaagcaccatttaatattaatacaatccctttcacaatattgccgattatatcattattaatgatgattacaggcattggatttatattatccatattatgtgtttattatacagatatacaacatttatggagtgttgtaacattaatggccatgtatgcatctgcaatattttatccaatggatattattccagaaccctaccatcaatatatgattttaaatcctattttttggattattgatcaatttagacatatgacactatggcaaagtatgccatctacattaaatttaataaattcattagttttatcaacaataatattagtgattggaataattgtatatatagtgtacgaaaaaaaggttgcaatgagattctag

SEQ ID NO: 7772 - DNA, 1110 bp, Methanobrevibacter gottschalkii
  source 1..1110: mol_type = genomic DNA
atgaataaaagagataaaataaaaacaaatctaattaaaaaatataatatttccccagaagaatctgaaattctattaactaaaattgagaaacgaattgcaaaagaaaatgctcgaaaaagagaaatactctctaaaaacatgttcaatgaatctaaagaagaatttaatcaacctgaacataaaataaggaatattaattcagaaacgaataaatataatgactttgaaactataactcaaaacatttcatcaaaagaaagtgaaaagttaaaaaaagaagaaaataataatgttgatacaatcctatcaaatattattcccaattatgatcaagagatttcaattgaattaaataatgtcgatttaatctttgaagttgaaacagataaaattgacaatataaaagaaaatataataagaactttgaaaagaaacaagtctaaaaaaactaaatttcaagcattaaacaatatttccttcaaaatcaacaaaggagaaaaagtaggaattattggatacaatggagcgggaaaatctactttattaaatgttattactggaatttaccctataaataatggtactgtaactacacatggaaagatatcaccattactttcattgggagctggttttgaccataattattctggaagaaaaaatatttatttaaatggagcagtattaggttacagtaaaaaatttttagaagaaaaagaagaagaaataattgagttttcagaattaggagaatttattgatttccctattaaaaattattcatcaggtatgctcgccaaactaggtttctctatagcaacaattgttgaaccagatattctaataatcgatgaaattttaggagttggagatgttaatttccaaagaaaaagttctgataaaattaaatcattaatggatggtggtactactgtacttttagtatctcactccatacctcaaatcagagaaatatgtgacaaagctatttggatagacaaaggaaaagtacgagaaataggtgaagtaaataaagtctgtgatcattatcttaaagatgctgaaaaagccagtaataaacaattagcaaatattaaatttagataa

SEQ ID NO: 7773 - DNA, 1194 bp, Methanobrevibacter gottschalkii
  source 1..1194: mol_type = genomic DNA
atggatttgatagtagcaaagtttggtggcacttctgttggaaacggtaaaagaattagaaaagccgccgaatcagtggcaagggaatataaaaaaggcagcgaaattgttgttgtagtatcggcagttaataaaaccactgatgatttaataaacattacaaacgatgcgattacatgtaatcttacagaaaaacaacatgctgaaattgttggtatgggtgagagaactagtgttagactattttcagctactcttgaatctttaggcatcaaatccttattcatcgatccgtattctgaattatggcccattattactgattccaattatatggaagccaggattgatcttgataaaaccaaagagaaagttaacaatctcaaaagtttgcttgatcagggaatcgttccggttgtctgtggatttttaggcaaatgcaaaaatcaggttaccactttaggccgtgggggaagtgacatcaccgcatttttaattggtgaatgtttgaatgcaactgaagtgattattgtaactgatgtagacggagtcctatcaactgatcctcaaaagattagtgaggccgaacttttagaaagcattactgttgatgagatgaaaacacttgcaacccatggtgcccaggttctacatcctcatgcacttgattataaacaccccaaaattgatgctaaaatcatcaattacaacaaagaggatctgaaagcggaaggaacttatattaccggtcctaaggattataagcctattgacttatatgagaatcctgttgcgtcaataactattgtcggtaaaagcttgttgaacaaagtgggaattgtatctgcactttcaaatattcttttagaaaatggaatcaatctttttaagatgaatcctcatcacaattcaataactgtttttattgacagtgaagatgcggataaagcttatgagttataccatgatcatgttgttaaaagtgaagatttaagttccatttcacgtgacaaggacactgcaatgtttagtattacatctcccgagattagtgagattacattagctaatcttttaactgaaaatgacattgatgctgttttaatcaattatacgaaaactgaaattttattatttgttgaatgggagtttaagtatgaagtttccaaattgctcaacacttataaaaattaa

SEQ ID NO: 7774 - DNA, 783 bp, Methanobrevibacter gottschalkii
  source 1..783: mol_type = genomic DNA
atggaaaacatgataaattcactaaaaaagttaggattaaaccgttacgaagcactagcttatataggacttaacaaaataaaaaccggacaggccgatgaaatttcagaagtttcaaaattaccacgctcaagaatatatgatgttttaaaagaattgaatagaaagggatttgttgaaattgaaggtggaaaaccattaaaatataaaataatccctccgagcaagatatttaaagaagaaaaaaataaattgattgaggaacttgaaaatactgaaaaaaagttggaaaagttatacaatgatgaattagatgaaatccaagctccaatatggttaattcattccagtgaaaatattattgaaaaagaagtaggcattatcagaaaagctagaaagacaatcacatgcagcatcggctttttacttgaaggtgaaggaaaagctatgattaaagcatttaatgaaattccaagaaacgttgaaatcaaaattcttgctaatcagttctgttatgtgaataatcacaaaatagacatcatcaaaatatttaaagacacaaaattagacaatctggaaattatcccctcagatttgccaatgatgaaattattaattgttgatgaaaaagagctcattagaacatttacacgttttacaggtgaaaataatgagatattgccccaaacagcaattggagttcacaatacatacgaagacatttgcaaaaatttcagcagacacattctaaaagagtttgataaaaacagacaagagaattaa

SEQ ID NO: 7775 - DNA, 420 bp, Methanobrevibacter gottschalkii
  source 1..420: mol_type = genomic DNA
atggctaatttcaattcactaaaggaagcacgtgaatttttttacaaggataagtttgcaataaatacaggagttacattagatgaattaacagaagacaaagctatttgttctttaatgttaaatgatgagcatagaaatgcttatggtggggtaatgggaggcgtaatatttacattggccgattttgcttttgcagtattgtctaatcagatccatcagttaactgttgctcagcaggtaagtattaattatttgtccgctccaaagggggacatgctgatagccgaggcagcttgccgtaaaagtggcagaacatcatccattgttattgtagatatttcggatgatttgggttgtgatgttgctcagtttgtaggtaccgggtttaaactgaaaaatagcaaaataagagattaa

SEQ ID NO: 7776 - DNA, 477 bp, Methanobrevibacter gottschalkii
  source 1..477: mol_type = genomic DNA
atgtccgagttaacatttaaaatagccgaaagaaaagattcccgattaatcttagaatatattaaaaaacttgcagattatgaaaaaagatcagatgaggtcattgcaactgaaaaatcaattgaaaaatggatattcgatgaaaaacaagcagaagtcctatttgctcttgaagataggcatatagtcggatttgcactttatttcttaagcttttcaacatatattggaaatgtgaatatgcatttagaagatttattcattgaccccgaatatcggagaagaggatacggtaaagcattgcttaaagagcttggaaaaatagtaatagatagggattacggcaggtttgaatggacttgcctttcatggaaccggccgagcattgatttttacctctcaattggtgcagaacagaaagattgggatgtattccattttacaggagatgcgctaaaagactttgtaaaagaatga

SEQ ID NO: 7777 - DNA, 735 bp, Methanobrevibacter gottschalkii
  source 1..735: mol_type = genomic DNA
ttgtatttactttcaaatattgatgcagttgactggagtattgatgacgggtatgatgctgtggatgtatgtcctttttgtgaaatgcccgttccggattatgtcaggtcatgtgttgtgtgtggtttaagtataagggatattgattttgaagagaattctattaataaatacactgatttcagggaaagttttgataaattgtttgatgatatggactctaaattgggtaatatgatttttattaaggatgatgatgagttatttgaatttaaaacattttataacagtttcatgttgaattatgattatcatgagtttttagaattttacaatcgggcggataaaaatcttgaaatgcagcaaatagcagaattgttcattaatgataaattaaataaatccttaggcactgaaagtgaatttgatgattatgctaagtatttgatatattattgcaattattatattgctaatgatgacttggatgatgcttttatatattatgcacaaatgctcctgttaatgtccaattattctggagacaacaacggtgaattattgattagtgtttatctgtttgattcattttcatgttataactgtttatatggttcccaacattcatttgacatttccaaattatttgatgaagcaataaatacttttagaatagaggaatataataaaaatcataaatttattttagagaaattagaagccatgtttggttga

SEQ ID NO: 7778 - DNA, 450 bp, Methanobrevibacter gottschalkii
  source 1..450: mol_type = genomic DNA
ttgaaaaatgattatgcaatcaagttaacgtctaattttattttaagctatttgaagtttatagtagatactgatgagatttataaaaatccgaaaatcaaaaaattttataaaaaatcagagcataccatcccctataaggctaatttatttgatatggatctgtgtggcgtaatgtttagagatcctgcaggtaatttcattaaatacactgatttttttgcagtaactatacctagaaagtacgatctgaaaaaatataaatgccgtaaaaaactaaaaaaagtgaccgaatcatatcttgacgataaatattctgtctggacagatagtgttgatataatcaacgaattcgttgacctgaaagatagggaatttgatgaaatgttaaatattgaaaatatgattgggatgaggaggagttatgccaggactttattgatagtttag

SEQ ID NO: 7779 - DNA, 336 bp, Methanobrevibacter gottschalkii
  source 1..336: mol_type = genomic DNA
atggatgaaggattgtttcaagataaaaatcttaaagataagttattcaacgaatatcctcatattcttaaagctatcgagaaggaaggttatattttagattacttgtcttttgatgtatttaccgaaattcgttttgaagacgatgttgttggttttatttcattttcgagatttgacattgttgagaattattttgctattgatgaagcatatataatacctgaatatcggggaaataatctactttttgaacatttaaataatctgtttcttttggacaatttcagatattttccaagaaaaccaacaaaagcttttatcaatgtttgttga

SEQ ID NO: 7780 - DNA, 1335 bp, Methanobrevibacter gottschalkii
  source 1..1335: mol_type = genomic DNA
ttgtcatacgtagatgaagtaattgaaactattattgaacaaaaccctggcgaagcagaattccaccaagctttacgcgaagtaatggaatctattagggtcgtagttgaagaaaacgaagaagaatacaaaaaaaatgcacttcttgaaagattagcaaatcctgaaagacaaatcaaattccgtgttccttgggtagatgacaacggtcaggtacaggtaaacacaggataccgtgtacagttcaacagtgcaatcggaccttacaaaggaggattacgtttccactcttcggtaaacataggtattattaaattcttagggtttgaacaaatcttcaaaaactctttaaccggtcttcctattggtggaggaaaaggaggatctaactttgatcctaaaggaaaatctgacagggaagtcatggcattttgtcaaagtttcatgactgaattatacagacacattggcgctgatactgatgtgcctgctggagatattggtgtaggcgctcgtgaagttggtttcctattcggccaatacaaaagactctctaacttatatgaaggagtattgactggtaaaggattaaccttcggaggatccctcacaagaaccgaagctaccggttacggattattatacttcactaacgcaatgttaaaagcaaatgatattgacattgctggtaaaaccatcgcagtatctggagctggaaatgtagcaatttatgctattgaaaaagctcaacaattaggcggtaaaccagtaacctgttctgattcaactggttggatttacgattctgaaggaatcgatgtggaattactcaaagaaataaaagaagtaaaacgtgaaagattaactgcatatgcgaaagcaagagaaagtgcagaataccacgaaggtaaaggtgtatggactgtaaaatgtgacattgcattgccatgcgctacccaaaacgaattgcaattggaagatgctaaatcattagtggaaaatggggtacttgcagttgctgaaggggcaaacatgccgaccactattgaagctaccgaatacttgcaagaaaatgatgtattattcgcaccgggaaaagcatccaacgctggtggagtagctacttccgctttagaaatggctcaaaactcccaaagattatcctggacctttgaagaagttgatgcaaaactccaaaatattatggaaaacatctttgcaaatgctgcagctgctgctgaagaatatggtttagataaaaactatgttgcaggagcaaacattgcaggattcaaaaaagtagttgaagcaatgaacgcacaaggaatcgtatag

SEQ ID NO: 7781 - DNA, 252 bp, Methanobrevibacter gottschalkii
  source 1..252: mol_type = genomic DNA
atgagtgtggaaaaattaactaaatcccaatataatgatttgaaaaatagctatcttacaaaaaacagaacaatgcattcactatatgctgaaatcaataaagaaaacaaagtcgacaaacatttatttttcaaattaataaataaaatcagacaagaggaaggattaaatgatttttatacaatgaaaaaagaaaaaaagagaaataacattatagaaaatttggacaaatctccaaaatactataactaa

SEQ ID NO: 7782 - DNA, 1245 bp, Methanobrevibacter gottschalkii
  source 1..1245: mol_type = genomic DNA
atggctgaagtatcatcaaaagagttatatgaatttaaaaaaactttaaaagaactatctggaaaaagaggtagaggtacagagcttgtttccgtttacattccacatgataagcaattaagtgatgttggtaagcacatgagagatgaactcggacaaagtgctaacattaagagtaaacaaacaagaaaaaatgtacaatccgcaatcgaagtaattttacaaagtatacgcttatataaacaacctccagaaaatggtctggttttgtttgtgggcatgattcctaaaggaggtccgggcactgaaaaaatggaaaaatatattttagaacctcctgaaccaatcactacttactggtataaatgcaataatgaatttttcattgaacctttggaagaaatcattgaagagagagacacctatggtcttgcagtagttgacagaaaagaagctactgtcgctactttaaagggtaaaaaggtcaatattctaactcacctgacaagtggtgttccaggtaagcacaaagcaggagggcaatcacaaagaaggtttgaccgtgtaattgaccttgcggctcacgagttcaaaaaacgtattggggaacatatgaatgatgacttcttggagcttaaagatgatttgaaaggaatcatcgttggcggaccaggtttcaccaaagaggaatttatccagggggactatcttcaatatgagcttaaggataaaataatagcaactgttgatacatcatacactggagaaccgggtattcgtgaagtcattgataaatctgcagatattttggataatttggatgttatgcatgagaaaaaacaggttcaaagattcctgaaagaattaactaaagataaaggtttatgttcttatggtgaaaatcaggttagaaataatttgattatgggtgctgttgacactctgctgttatcagaagatttgtcaagtatgcgtaaaacatttgaatgtaccaattgcggaactcaaattgaagtcactgttaaaactcaggctgaagcggataaattcaatgaaagatgtcctaattgtaacgatacttttaaagaagtggcttcaaaagatttgactgatgaatttgttgaaaaagcagaagagatgaatacaaatgttgaattcatttccactgaaactgaagagggcatgcagcttttcagagcattcggtggtattgctgctattttaaggtattatgtagaatattag

SEQ ID NO: 7783 - DNA, 1068 bp, Methanobrevibacter gottschalkii
  source 1..1068: mol_type = genomic DNA
ttgaaagcggcaaaaaacataaaaataattaaaagaaataaaaatgtaatgaaatggaaaattggtaatgtcaaaatatcaaatcagatagtcttagcacccatggcagggatatgtgactatgcattcagaagcataatcaaatccatgggttgcggtttgattgaaacagaaatggtttcagataaagctataatgtataacaattttaaaacacaagaaatgctatttatgaaagacgaagaaaggcctatctcacagcagattttcggttgcggcactgactcttttaaaattgcttccaaatacatctatgaaaatatgaaacctgacattatcgacattaatatgggatgtcccgttaaaaaagtagccattaaatcaaaagctggaagtgcgcttttaaagaatcctgaaaaagcaagaagcattgtggaaaccgttgttgatagtgttccaataccggtcactgttaaaattaggagcgggtgggataaaagtagcattaatgcagttgaaatggcgcaaataatcgaagaggcgggggcttcagcaattactgtccatccccgtacaagacatcaaaggtacgacattcctgcagactggtcaataatcaaggatgttaaaaaccatgtatccataccagttatcggaaacggagatattaaatcatgttatgatgctaaaagaatgcttgatgaaactggctgtgatgcaataatgatcggcagagcaacgcttggaaatccctggcttgtaaaacaatgcattgactacatagattatggcatggaacctgaaaaaatttcagttgaagaaaaaataaatatggccaaaaggcatgctgatataattgagaaaactcaagcggaaaaattagcaatttccagaatgagaacacagactgcatactacatgaaaggaatgtataacactgcagatatcaaaccaaaattgtttaaaatgaattcaaaagaggaaatattcagtcttttagatgagtatttggcttcacataagcagcatcttagagaatttgtcaaacaaaaccaaatcctctcctga

SEQ ID NO: 7784 - DNA, 969 bp, Methanobrevibacter gottschalkii
  source 1..969: mol_type = genomic DNA
atgattgaaaaaatagagattacgcaaagatttaatttcaaacgtcttaatcgccattatgaatgtttcacaattgatttttcaaataattcggcatactataaaatctctgagaggggcagcggtgataagtttttaagtgaaagtgatctttgtgacgattcctggattgaaatcttgagcgggctgcgtcgtaacatgacaagtgaaatctgccatttcaatcttaaacaagctgataaattcttgaatgattttaataagctaaatctttttaaagatttcaggtctgaaaatttttcttattttgaaaaaatagagttgatttattcatgcaatattattatctattcaactgataactatgaggaatatgcttttaagaataactttccgataaattggattaagtttggtgaaatcttaaaagaactattaaattttgatgtcctccatcttgattatcaaaaacagatggtcaccccattattctatgacgtatgtttggatggtgtttattatgatggggagctattgaaacttaaagctattgaatttggacattacaggacttatccctatgatattccaaaaccaagattaatcatcgattttaataaaaagaggattgacggttatattgataaaaatttgtcttctggcgatgagaatgcaattttaagtttacttgaaaagtatcatgtttataactggatttttgatgaatatcacaacaaatctaatactcgggatcctgatgatttggaaggatatgactggtatctggaaatggtttttgaagaggggattatttggcatttgtttggatataatgactatccggatacatatgtctgtttagctcgtgaggttgaaaaactcactggtatggatcttttggaaataaacacaatttcaggagaggatttggttttgtttgacaaattctctaagatgctgcttatgtga

SEQ ID NO: 7785 - DNA, 519 bp, Methanobrevibacter gottschalkii
  source 1..519: mol_type = genomic DNA
atggtttttagaagatgcccgcaatgtggttcgacaagtgatgatcaatatggtttttgtataaaatgtgggtgggaatttgcaaaaatagacgccacaaagaatttatgtcctttatgcggacatgaaaatccgaatgaagcagatttctgtgttaaatgtggtgcgccactcgtttttaagaatcatccgaatgaagagcaaaggaatataaccccaatagtaataaacaaagaagttgctggaacacctattcaaaaaaacagcggcggatggattaaatggattataatactgggatatatcttttcaattttaggcggtcttttaggattgatcattgcagtttatttagttacaagaaaagaagcgactgttagaaaacatggaatcatacaacttgcaatatttgcattctatatcgtattaattgccgcattatatgcaaccggaatgattcctgcagatgcaattaccaactatcaacaattaattgctggaaatatgacccttccttaa

SEQ ID NO: 7786 - DNA, 456 bp, Methanobrevibacter gottschalkii
  source 1..456: mol_type = genomic DNA
atgattatacgaaaattcaatccaaatgatttaaaaagagtttttgaaatagaaaacatgtcttttgaccagtcttacggaataaaaatgtttcagcagttatatgaaatgggtattggatttttagttgcagaacatgaaggtcatgtgattggttatgtgatgttttggattaaatacgaatttaatggacatatcatatcaatagctgttgatgaaaattacaggcgtttaggtgctggaactaaacttttagttaaagctatttctattttgtccatgcttaatattgataatatttacttggaagtaaatgaacataatgatggagctattgaattttataggagatttaattttcagatagatagaactgttccgaattattatgcaagtggtgatggtgcagttattatgtatctgccgttaaggaagggtcatatttccagcaattaa

SEQ ID NO: 7787 - DNA, 390 bp, Methanobrevibacter gottschalkii
  source 1..390: mol_type = genomic DNA
atgtggcaagattttggagattacattttaagcgaagccggagatgatccggttaaaattgcagagattggtgttggaaaattcgacaaaatatcagaaatattatccgaaaagaagaacataaccgttcttaaaacagatattcacccaaaagattcaacagtgataaaagacgacgttacaaatcccaatcttgaattatacaaagatgttgatattatctactcaatcagaccgccaagtgaacttcagcctcatctaattaatcttgctgaaaagataaactcccagttaataataaaacctttgacaaatgaagatttaaatactggcagagttaaaatgaaactaaaaaactataagaaagctagtttttatatattgaggtaa

SEQ ID NO: 7788 - DNA, 2430 bp, Methanobrevibacter gottschalkii
  source 1..2430: mol_type = genomic DNA
atggaaaaacttctaaaaaaatataatacaacacctgatggattaagcgaaagtgaagttcttaaaaggcatgaaagatacggtttaaacgagcttgatgaaaaaaaaccaacaccaccaataatattatttttatcccagtttgcagatattttaatagctcttttaattattgcagccattgcatcttttgcaattggtgatacaatagatgcaggagtgattttacttgcagtgcttttaaatgtaataatcggattcattcaggaatatcggtcaataagagcagtcaatagccttaaagatttaatggtcaaaaaagccattgttaaaaggaataatgaagtccttgaagttgatgctagattcttgaccattggtgatattgtaattcttgaagaaggaaataaatcacctgccgatttaatactaattgaaagcaatgatataaactgtgatgaatcattcctaacaggagaatctgaagcggttataaaagaagaaaaagatgctgtttttatggattccaatattatttcaggccatgggcttggaattgttacagatatcggaatggatacggaaatcgggaaaatcgcagaaattgttcatgaagaagatgagaagacaccgcttgcagtgaaagttggaaaacttggaaaaatcttatcagcaattgcgattttggtttgtacagttatttttattttagaattaatccagggagcaggtattgtggaaacgtttatgactgctgtttcactagcagttgcagcaattcctgaaggtcttcctgcagttttaacattaacacttgcacttggaatgtctgagatggcatcatcagatgctcttgttaaaagattattatctgttgaaacattaggttcatgtaccatcatctgcagtgacaagacaggaacattaactgataataaaatgagtgttgttgagagttatttattaaacaaagacaaattattgttaatttcaaaattatgcaacaatgcgataattaaagataatgcccttatcggaaatcagactgacggagctattttaagatttgcacaaaattatgaaacttcccttgagcgcattgatgaaatccctcttgacagcaaccgtaaaatgatgaccacaatacataggttagacagtgaaaataaaattgttttatcaaaaggtgcaccagaaataattctaaataactgcaaatatatagataacaacggaagtatagaaatacttgatgaagaaataaaggaaactgtagttaaaagaattgatgaaatgagtgatgaagcattaagagtaatcggatttgcatacaaaatcaatgatgatgaacgacctgaagaaaatctcatttttacaggactgcttggattaattgatcccccaaagaaaaatgccaaaaaagcagtgaaggaatgcattaatgctggaattaaagtaagaatgattaccggagaccatgaaaaaacggcaagtgcaatagcaaagcagcttggaatattaactgacggccgtgtaattacaggcaaagaattagaaaaaatcagtgatgaggaatatctggccattgcagatgatattcaggtttatgcaagggtaaaacctgctcaaaaaatgagaatagttgaagctttaaaagatttaggaaacatagttgcaatgacaggagacggaattaacgatgcacctgctcttaaaaaagcatcaataggtattgcaatgggcgatggtactgatgtttctaaagagtcatcggacatgattttacaggacaatgatttttcaacaattgtaaaagcaataaaagaagggcgtaaaatttacgacaacattaaaagattcgtcaaattccaagtatcaacaaatgtgggtgctattctaacaatagtcggaacaagcctactcaatttacctctgccattcaatcctgcacaattattgtggttgaatatagttatggacggcccgccggcacaaacattaggtatggaaggtgctgaaaaagatacaatggcaagacctcctgaaaccggagacatcttaaccaaaaaaacattaactgaaatatttctattaggattagtgatggctaccggaacaattctagtatttagctgggagatatatagtggtgcaccaactgaaaaagcaatgagtgttgcatttacattatttgtagtttaccaattatttaatgcatttaacggaagatcaaactcgactaaatcaagcaaatatttatatattggacttgcattgtcattcatgctccaattgctaataatatacataccgcagctacaaataatatttagaacaactgcaatcggcattgcagaatggacaatcataattattgttgcatcaacaataatagctgctcagaaaataatgaataaagtgataaaatga

SEQ ID NO: 7789 - DNA, 786 bp, Methanobrevibacter gottschalkii
  source 1..786: mol_type = genomic DNA
atgaagattttcctattaggcggtacaaaagactcaataaatattatcaaatttataaaaaagaattatgatgcatatattctaacaaccacaacaacagaatatggcgctaaacttgcaaaggaaggcggaagcgatgatacaatagcccgaccgcttccaaaagaagaaataattgatatgataataagtaaaaattatgatattttaattgatgcaacccacccttttgcagagcacataacacagactagcgcaagcattgaaaatgaattgaaaataccatatttacgctttgaaagacctatcaccaaccttgaaaacattgacacatcaaatgtgtattatgtaaattcattcattgaagcgggaaaattaatagctagtgaattcagtaaaggaaatgtactgcattttgcaggtgctaacaccatggaagacatcctaaaaaatatcccaacagacaggttttatccaagaattttgaaagtggaaaaatctgttgaaaaatgtaatgaactaaatataaaccccaaccatattattccaatgaccggtgctgcaagcacaaaagaaaatatcgaactgattgaaaaatacaatgccagtgtaataattactaaagaaagtggtgaaataggaggagttattgataaaatagaagcagccaatgcgaaaaacattgcagtggttatgattcgaagaccacagataaaagaaataaataaaaaaaatattgtatccaatttagatgaattagatgttgaattaaaaaactttttttaa

SEQ ID NO: 7790 - DNA, 309 bp, Methanobrevibacter gottschalkii
  source 1..309: mol_type = genomic DNA
atgaatcaagcaagaattaagcttacaggaacagatccggaaaaattagcatatgtttgcgatcaactcaaaaaaattgctgaaagaactggtgtcgacttatctggtcctattccattacctactaaaaaattagtagtgcctacaagaaaatctccagatggagaaggtaaagcttcttgggaaaaatgggaactcaggatccataaacgtttaatcggtattggagctgatgaacgtgctatgagacaagtcatgaaaattaatgttcctgataatgtaagtatcgaaattgaacttaaaggatag

SEQ ID NO: 7791 - DNA, 1242 bp, Methanobrevibacter gottschalkii
  source 1..1242: mol_type = genomic DNA
atggcaaaagaaaaagaacatcttaacttagcatttattggacacgttgaccacggaaaatccactttagttggacatttattattgaaagctggtgcaatcgcagaacaacaattagatgacggtgaaaacaaattcagatttgttatggacaaattaggagaagaaagggaaagaggagtaactattgatttagctcaccaaaaattctccaccaaaaaatacgactatactgttgtagattgtcctggacacagagacttcgttaaaaacatgattaccggtgcttcccaagcagacgctggtgttttagtagttgcagctgacgacggtgtaatgcctcaaactaaagaacacgttttcttatccagaactttaggtattggtcaattaatcgttgcaatcaacaaaatcgatgttgttgactactctgaagacaaatacaatgaattaaaagaagaagttgctaacttaatcaaaaccgtaggattcaacccagcagacgtacctttcatcccattatctgcatttgaaggggacaacattaaagaagcaagtgaaaacactccttggtataaaggcgactctttaatggatgctttagacaaattaactccacctgaaaaacctaccgacttacctttaagaattcctattcaagacgtttactccattactggtgtaggaactgtacctgtgggaagagttgaaaccggtatcatgaaaaaaggtgaaaatgttatttttgaacctgctggagcttctggagaagttaaatctattgaaatgcaccacgaagtatttgatgtagctgaacctggtgacaacatcggattcaacgtaagaggtgtaggtaaaaacgatatcagaagaggagacgtagctggacacactgacaatgctcctactgttgctaaagaattcgatgcacaagttgttgttttacaacaccctggtgtaatcaccgttggatacactcctgtattccactgccacacttctcaagtagcatgtactttcttggaattatctaaaaaattaaaccctgctactggtgctgttgatgaagaaaatcctgatttcttaaaaactggtaatgcggcaattgttaaaattaaacctaccaaaccaatgtgtctcgaaaacgcaaaagaaatccctcaaatgggtagatttgctatcagagatatgggtcaaactgttgcagctggtttatgtcttaatgttaccccagcgaaataa

SEQ ID NO: 7792 - DNA, 2184 bp, Methanobrevibacter gottschalkii
  source 1..2184: mol_type = genomic DNA
atgattgcgaaaatcaaagaattaatgtataaacctgatcaaatcagaaacattggtatctgcgctcacattgatcatggtaaaaccactttatctgataacttgcttgcaggtgcaggaatgatttccgaggaacttgccggtgatcaaagattcttagattttgatgaacaggaacaagcacgtggtattactattgatgcagctaacgtatccatggtacacgattacaaagatgatgaatatttaatcaacttaattgatacacctggtcacgttgactttggtggggatgttacccgtgctatgagggctgtagatggagcagtagttgtagtttgtgctgtagaaggtattatgcctcaaactgaaactgtattcagacaagcattaaaagaaaacgtaaaaccagttttattcattaacaaagttgacagattaatcaacgagttaaaattagaacctgaagagttacaaaaaaggttcatcaatatctacatggaagctaataaattaatcaaaaacatggctcctgaagataaaaaagatgattggtcattagatttcactgatggtagtgtagcatttggttctgcatatcacaactgggctattaacgtaccaactatgcaagaaactggagttaactttaatgatattatccaatattgtaatgaggataagcaaaaagagttagcacaaaaagtacctttatctgatgtgttgttaggtatggtagttgaacacttgccttcccctaaagaagcacaagtttacagagtacctaacatatgggatggagacattgaatctcctgctggagaatgtatggtcaccacttcccctgatggacctttagcagtaatggttaccaatgtatctgttgataaacacgctggtgaaattgcaactggtagggtttacggaggcgctattgaaaaaggtactgaagtatatctcgttggttctcatggtaaatccagagttcaacaagtaggtgtctactttggacctgaaagagttaacactgataaagttcctgcaggtaacattgtatatgttgctggtgcaaaaggtgctattgctggtgaaactttatgtgatcccgaacataaaattgttgaatttgaaggattggaacacatatccgaacctgtagttactgttgctgtggaagctaagaatactaaggatttaccaaaattaattgaagtattaagacaagtaggtaaagaagaccctaccgttaaaatagatattaacgaagaaacaggtgaacacttagtatcaggtatgggagaacttcacttggaagttatcggttacagaattggagaaaaaggtgtggatattactacttctgaacctattgttgtatacagagaaactgtaagacagttatctccacaagttgaaggtaaatctcctaacaaacacaacagattctacatcactgttgaacctattgaacctgaactttatactgctattcaggatggtgacattaaagagggtaaagttaaaggtaaagaaggagctaatgacttcatggaacacggtttggaaaaagaagaggctagaagagtatgggctgttcataacagaagtatcttccttaacatgactcgtggtatccaatacttagatgaagttaaagaactcttgattgaaggatttgaatctgcattggaaaatggtcctttaggtaatgaaattgctatgggattaaaattcaaactccatgatgcaaaacttcacgaagatgcagttcacagaggacctgctcaagtattgcctgctatcagaaatgcaatcttaggttctatgatgcttgctgaaccagcattactcgaaccaatgcaaaaagtagttattgacactcctaatgattacatgggttcatgtactcgtgaaatccaaaatagaagaggtcaaattgtaaacatgggtcaggaaactggagatatggcaagaattgaatctaaagttcctgtagctgaaatgtttggtttcgctggtgatatcagatccgctgctgaaggaagatgtttatggtctactgaaattgccggatttgaaccacttccacgtgagatgcaaaatcagatcgtaaaagaaatcagacaaagaaaaggattatctgcagaaccattccctgcaagccactacttaggagatttataa

SEQ ID NO: 7793 - DNA, 561 bp, Methanobrevibacter gottschalkii
  source 1..561: mol_type = genomic DNA
atgagtaaattattcgataaatgggatctcaatgaagtaaaagttgaggacttaggtttggtaaaatatatctgcttagatgaaactttagttccacatacttctggtagacatgtaaaaagacaatttgcaaaatctaaagtatcaattgttgaaagattaatgaacaaaatcatgagaacccatctcaactctggtaagaaaaataaagcttacaacattgttaaagaatctttagaaattattaataaaagaactaaacagaatcctgttcaaattttagttaaagcagttgaaaatactgcacctcgtgaagagactacccgtattaaatacggtggtattggataccaagttgctgtagatatctctccacaaagaagagttgacctttcattaggtttcttaactagaggtactttacaatcttcattcaaaaacaggaaatctgttgctgaatgtttagctgatgaattaattcttgcatctgaagaagattcaagaagcttcgctttaagaaaagctgaagagaaagaaagagttgctaaagcagcacactaa

SEQ ID NO: 7794 - DNA, 426 bp, Methanobrevibacter gottschalkii
  source 1..426: mol_type = genomic DNA
atgccaggactttttgctgcaaaaaaacttaaaaaaaatagacaaaattttaagtggaaagatgtagattacaaaagaagagctttaagattagatgttaaagcagatcctcttgaaggagctcctcaggctagaggtattgtaatcgaaaaggtagggatagaagcaaaacaacctaactctgctattcgtaaatgtgtacgtgttcaattgattaaaaacggtaaacaattaactgctttcgcaccaggtgacggagctattggatttattgatgaacacgatgaagtgatgattgaaggaattggtggaccgtctggaagatccatgggggatattcctggggttcgttggaaagtttccaaagttaataacgtagctttatcagaaatggtaagtggaaaaatagaaaaacctgtaagataa

SEQ ID NO: 7795 - DNA, 432 bp, Methanobrevibacter gottschalkii
  source 1..432: mol_type = genomic DNA
gtgtctattaaacttagtgcaaatgaaattagattcatagctcttttcgaaagtatgactggagcaatggttaaagattgcattatcgatgatgaacatggaaaagtcactttcattgttaagaaaggtgatatggggcttgctattggtaaaggtggaagttctgtttctaaagttcaaagagcagtagataaaagtgttgaaatcattgaattagatgatgatccaataatttttatcaaaaatgttttatcccctgcaaagttacagtctgttaaaataagtcaaaaacagtcaggtgaaaaaatagctattgtcacagcagacaataccaacaaacgtattgctatcggtaaaaatggaattaatattgaaagagctaaattattagctaatagacaacataatattgataatattattttaaaatag

SEQ ID NO: 7796 - DNA, 297 bp, Methanobrevibacter gottschalkii
  source 1..297: mol_type = genomic DNA
atggacgtagatagaggaatcagagtagctgtcgatactggtgatgtaactttaggctctgaaaaatcaattcaatctttaaaattaggaaaaggtcaactcgttgttgttgctgctaacgctcctaaagaacttattgaagatgttgaatattatgcaaatctttccgaaattccatttgttgtatatgatggaactagtgtagatttagggtctgtttgtggtaaacctttcacagttgctacattaatcgttaacgatccaggagattctacaatattagatgatttgaggtag

SEQ ID NO: 7797 - DNA, 1179 bp, Methanobrevibacter gottschalkii
  source 1..1179: mol_type = genomic DNA
atggatgaaattataactaaaattaggggcatgattactgagatcaacgaaactgaaaatcttggtattgattttgcagatagttatatcaaagatttagctgaacattatatcagtaaaaatttaactgatgatgaattacgcaaactcataattaaacttaaacaggcctatgaccgagctcatgttgaagctggagaggctgttggaacagtagctgcacaatctgtaggtgaaccgggtactcagatgactatgcgtacttttcactatgcaggggtaactgagttaaacgtaacattaggtcttccaaggcttattgaaattgtagatgctagagaaaaaatcaaaactccaactatggatatttatttcactgaagataaacgggatgatgaagaatttgttagaactttagctaataaaattggtaaaagcactattaacgatattctttcagatttcaatttaaattatggaaccatggaagttgaagctgttttggataataagaaaattgaagaaaaaagactcaacagggaagagattgatgcaaaaatcttaaaaacatttaaaaaagctacaattaatggggataatattgttttatccagcaacaagacagattctgatttcattattagagaacttcgtcttttagcagataaattccgtgatttgcaaattagtggtattaaaaatattggaagagtcattattcgtcgtgatgaagaatggattattcacactgaaggatccaatcttaaagaagttctcactatggatggtattgaccaagtaagaactaccactaacaatattcatgaaattggtcaaattttgggtattgaagcagctcgcaggtcaattattaacgaagctcaaaaaaccctttcagaacaaggtcttagtgttgatgtaagacacattatgctggttgcagatattatgacttccgaaggtgttgttaaatctattggaagacatggtattagtggtgaaaaatcaagtgttttggctcgtgcagcttttgaagaaactggtaaacatttactacatgcaagtattcgtggtgaagtggatgatttaacaggtatcatcgaaaatattattattggacaaccaatacctcttggtaccggttctgtcggtgtcaaaatggattataaaaaagaatag

SEQ ID NO: 7798 - DNA, 3006 bp, Methanobrevibacter gottschalkii
  source 1..3006: mol_type = genomic DNA
atgaaagcatttattaaaaaaattcagagaattaattttggtttaatgtctcctgaagatattcgtaagatgtctgttgtcactgtcgagtatcccgatacttatggtgatgacggttttcctattgataaaggtttaatggatcctcatttaggtattattgatcctagtcttgtttgtaggacttgtgggtctaaagggggagtttgtcaaggacactttggtagtattgaattagctaggccagttattcatgttggttttggggatgttattcataaaattttacgttctacctgtaatgagtgtggccgtactcttttaactgatgaagagattgaagagtatactcagaaaatcttagaactcaaagctcaaaatgagagcattagcagtattctcaaagagatttatgatgctgctaaaaaggatggggaagaatgtcctcattgcggtactatccaggataaaattgttttagataaacctgtttctattgttcaacgcattgatccacttttcgaatttaaaaaagtattttatgaaactgcatcttctgattctattactattgaagagattgggccaatggctagggaaattgttgaaaacaaagaagaactcttccagaataaattgttgattaacagtaatcttttagaaaggttatgtgaaagattgcatgatgttgattacattattaatattttagatttggaagatgaagatggttcttatgaagtgaataatactcgtctgaataatattttcaaaacagctatcagtgataataatttaactgaggattataagttaactgcttctgaagttcgtgaaagacttgaaagaatttctgatgaagattcttttgttttaggtgttaatcctgaggttgcaagacctgaatggttagttttaactgttcttcctgttcctccggtaactgtaagaccatctattatcctggatactggtgagagatctgaggatgatttaactcataaacttgttgatattttacgtattaatcagcgtttacttgagaatatggaggcaggtgctccacaattaatcgttgaagatttatgggaattattacagtaccatgtaaccacttactttgataatgaagctagcggagttccacctgcaaggcacagatcaggcaggccacttaaaacattaacccaaaggttaaaaggtaaagaaggaagattcagatccaatctttccggtaaaagggttaatttctctgcccgtactgtaatctcaccggatcctaatatcagtattaatgaagttggtgttcctgaaatgattgcaaaagaagtaactgtgcctgttcatgtaaacgaatggaacatggatgaaatgagaacatacattgaaaatggtccggatgtacatcctggtgcaaactatgtaatcaatggagataggaaaagaagggttactgatgaaactaaggagtacattcttgaaacattagaacctggtgtcatcattgaaaggcacttaaaagatggggatatggttttattcaatcgtcagccttctcttcacagaatgagtatgatggcgcatgaagtaagagttttaccttacaaaactttcagattaaacttatgcgtatgtcctccatacaatgcggatttcgatggggacgaaatgaacatgcatgtattccaaactgatgagtcccgtgctgaagcaaaatcattaatgcgtgtacaagaacatattttgtctccaaggtttggaggaccaattattggagctattcacgaccatatttccggtgcatatcttttaactcgtgatggggttgaattcagtgaagagcaagctttacaaattatcagaaagtctcaccttaaaattcctgagttcaaatcaaatcagtggattttaaaatatgattctaatggaaatgaagattcattcatctacaaagaaaaaggtgaaaaatggactggtaaagaattgttctctttattattgcctaacgatttaaacttatcttacagtgctgaaatttccaaatgtcctgttgtttaccctcctgaagatgcggaagttgtcattaaaaacggtattctcatacaaggagtaatagatgaaagtgcatacggatcattctcaggtaaaatattagataaaattgttaaagaatatggtcctggaagagctaaagaattcttagatagatccactgaccttgctatctgtggaatcatgaaaactggaattaccacttccttaaacgatgaagaaattcctgaagaagctcaagaccgtattaatgagcatttacaaaataagatggatgaagtagataagcttgttgaggcttatgaagaaggttaccttgaagctctgcctggtagaagtcttgaagaaacattagagatgaaaatcatgcaagttcttggggaagctagggatatgtctggtcagatcgcagaacattatcttaacatgggtaaacaatatcctgatgatccttatgaccatgtaatggctgttgaaaatcactctgttgtaatggcacgtactggtgcaagagcatcaatgctgaaccttactcagattactgcttgtgtaggacaacaagcagttaggggtggacgtattgaaagaggatacattaacagaactttacctcacttcaaaaaaggtgagttaggggcaaaggcaaaaggatttgttcactcaagttataaatccggacttgatccaatcgaattcttcttccatgcaatgggtggaagagaaggtcttgtagatacagcaatccgtaccgctcagtctggttacatgcaaagaaggcttgttaatgcactacaggatttacaagttaagtctactggacttgttactgataaccaaggaaatgttattcagaccatgttcggtgaagatggtgtggatccggcgaaatctgactttggtaagccggcaaacttggataaacttattgatgaaattaggatggaaggtaaatag

SEQ ID NO: 7799 - DNA, 2226 bp, Methanobrevibacter gottschalkii
  source 1..2226: mol_type = genomic DNA
atgttgtctgaagattataaaaaacccgaaactgatgaaaaaaaggcgttttattattttggttttgaaagattagctccttttaatgaagttgatgtaattattacccaattaaaagaaaaattgggggatgatgaagaagcactggaaaaaattaataaacatgttgaattcattgaatcatattttgacagtgatgaattgaaagctgatgatagtttaaacgttccatttaaaaaagataaacgtagagctaaatgggaatcatataagaaagacttccctgaaatagatttaactgaggaagtagacactgaagattcaattgaacctgcagaagaagaaactgttgaagaagctattgtaagtgacgatgagatagaaactgttggggaacagcctaacgtatttaataaaaaacatcctcaaactaaaatctatattaatggagaacttttaggttattgtgatgatccaattaatttcactcaggaaatgagggaaaaaaggagaaatggggaaatatctcatgaaatgaatattacttattatgctgataatcaggagatatatatcttcaatgatcctggaagagcaagaaggcctctaatcatagttaaagatggtgttcctctgttaaaagaagagcatataaataaaattgctaacggtaaattaaactgggataatttaattaatgatggtcttattgagtatttggatgctgaagaagaagaaaatgcatatatcgcaatgaatttagctgatttaagtgaagatcatactcatttagaaatcgatccggctacaatgttaggtatttgcgccggtattattccattctctgatcacaattcatctccaaggaacacaatggaagcaggtatgacaaaacaagctttaggattatatgtgtcaaattatgcattacgtactgatactagagctcacttattacatcatcctcaaactcctattgttaaaacacgtattattgattcaaccaattatgatttaagaccgtccggtcaaaactttgttgttgcattaatgtcttatgaaggatataatatggaagatgcaatggttatcaacaaggcggctttagaaagaggtcttgcaagatcttcattcttcagagcatatgacacatcagaaaagaaatatgctggtggtcaggtagataaatttgaagtgcctgataaaaacattaaaggttacagatctgaggaagcttacagaaacttagataatgacggtgttgtaaatcccgaatcctacgtaaaatctggggatgtattgattggtaaaacttcacctccaagatttttagaagaaaacttcggcagtgttgcggatagaagaagagaaacttctgttactgtaagacatggtgaaaaaggtattgttgatgcagttcttttatctgaaactgttgaaggttctaaactggctaaaattagagtaagggatacaagacaaccggaatttggtgataaattcgcatcaagacacggtcagaaaggggttattggtttaatattatctccggaagatgtgccgttcactgaatttggtgttgttccagatttaatagttaatcctcacgcgattccatccaggatgtctattggacaagtacttgagatggttgcaggtaaagctggatgtcttgaaggtgaaagggttgatgcaactccgttcaatcaaactcttgaagatgaaattcagcaattgcttgttgataacggatttgagtctgcaggatgtgaatctttatacagcggagtaactggtgaaagattggatgcggaaatttttgttggtgttgcatattaccaaaaactacaccatatgaccactgataaagtttatgctcgttctagaggtcctgtccaagttttaacacgtcaacctacagaaggtagagctcgtgaaggtggtttaagatttggagaaatggaaagggattgtcttattgcacatggtgccgcattaactttaaaagaaagattgcttgatgaatctgacaaatatgaagctgttgtctgtgaaaactgtggtatgttagctgtagaggatacaagcaaacataaaaaatactgcccgatctgtggagatgtggaaacatatcctgttgagatttcatacgcattcaaattattattagatgaacttaaaagtttatgtattttccctaaactggttttaggagacaaagcataa

SEQ ID NO: 7800 - DNA, 1551 bp, Methanobrevibacter gottschalkii
  source 1..1551: mol_type = genomic DNA
atgacagtgaataattggaaattagttgatgcatttttcgataaatatgatttagtcgaccatcatataaaatcctacaatgattttgtaaataataggattcagaatattattgatattactgaccctatttctttagatgatggtaaatacactttaaaaactggtaaaatacgcattgaaaaaccatctaataaagaagcggatggttctagaagcattattgacccaactgaagctagacttaggaatttaaactattctgcagatatgtatcttgaaatggcattaaatgaagaaggcgaagacaatccattggaggaagtatatattggtgaattaccggttatgcttaaatctgacatttgtcatcttaatggtctaagtgatgaagaattaattgcaaaacacgaagaccctcaagatttaggaggatatttcattgtaaatggttctgaaagagctgttgttactatggaagagattgcaccgaataagattattcttgaacgtataggtgaagttgaagaaaggcatgccaaagctgtcgtaacttcaatcaaaagtgggttcagagctagaattactttagaatataaaaaaccacgtaaaaataaagcatttttaagaatatctttcccatatcttcctggggaaattccattagtcgtgttattaagagctcttggtttatccactgatcaggaaatcattactgctatttctgatgataataacttccagatgatgattgcggatgatattcaggtttctgcagaagaattggataaattcatagatcaaaatgtcattaaaaatggtgacaaggatgaagtaaagcagcatttacaagatgctgctattaagtacattggtaatagggtagctaaaaacatgcctaaagattatcgttataaacgtgctaaggatgttattaaccgttatttattacctcacatgggtattgaagaagaaagatgttatgataaagcaatttatcttgcggaaatgactgaaatgttattggaggttattgaagaaaaaagagaacctcacgataaggaccactacactaacaaaagacttagagtatccggtgacttaatggaagatttatttagagttgcttttactaatttgacaagagacatgagttatcagcttgaaagaagtctttctcgtggtaaagagctttcaattaagcaggcagtgcgtagcgatgtcttaactgaaaacatcaagcatgcaattgctaccggaaactgggttggtggaagagcaggtgtaagtcagcttttagatagaacaagttatatgggaactctttctcacttaagacgtgttgtatctcctttaactagaagtcaacctcattttgaagcaagagatttgcatccgactcaatttggtaaaatatgtccaaatgaaaccccagagggacctaactgtggtttggtaaagaatttagctttactgtgtaatatttcagaaggttctgatgaacaagagattattgatgttattggacagatggatgttgaattgatttaa

SEQ ID NO: 7801 - DNA, 240 bp, Methanobrevibacter gottschalkii
  source 1..240: mol_type = genomic DNA
ttgaaaagtgaatttgatattcaaaagcatatgctggtaccaaagcatgaaatcatgactgatgaagaaatttcaaacgaatttagtaatttggattatagttttaagaatcttcctaaaattaaagttgatgatcctgttgcagaatctattggtgcaaaaccaggtgatgttttaagaataactcgtgaaagtcaaactgctggtgtttttgttacttatagaatcgttgaagaataa

SEQ ID NO: 7802 - DNA, 867 bp, Methanobrevibacter gottschalkii
  source 1..867: mol_type = genomic DNA
atgacaaataataaaattgaaatcttagataaaattgaagaaaatttaattaaaattagagaaaaaaacgcattgacccattgcattacaaattcagtgacaataaatgactgtgcgaatgctgttcttgcaataggtggatcaccattcatggctgaagatgcagaagaacttgaagaagttgtagcaatagctgatgtattagtaataaatatcgggaaattaagtaaaaaccaaattaaagctatggaaattagttgtaaaaaagctgatgaaacaaacactccaattatattagatccggtaggcgtaggagtaaccgaacttagaaacaaaataaccatgaatttaattgataaccacaacattactgcaatcagaggaaacataagtgaggtcaaatccattgcaaaattatctggagttctggatgagagcaacactgcaaaaggtgttgatgttaatgtagatgacattataactaaacaaaacttaaaaacaaatggagaattaatatcaactttagcttcaaaattaaatacagtaatattagccagtggccctatcgatattttaactgatggaaaaacaacaatagccattgacaatggagatgatatgatgccgttgataactggtagcggttgcatgttatcatcagttgtaggaagttgtattggtggttcaaatccattagaaggaagtcttattgcaattttagcaatgaacattgctggtgaaaaagcaagagcaaaagtggatgaaaaagatgaaggtaccggttcatttagaacttacttaattgactatttatacaaaaccaatagtgaaagcctaattaacgaatcaaacattatgatattatga

SEQ ID NO: 7803 - DNA, 621 bp, Methanobrevibacter gottschalkii
  source 1..621: mol_type = genomic DNA
atgaaaaatatagatttatccctttaccttgtaactgacaaaagtgaagatatcgaaaaattcttaaaaacaattgaagaatccataaaaggcggagtcagtatagttcaaatcagagaaaaaactgctgaaactttagacttttataatttggctttgaaagttaaaaaaattacaacaaaatacaatgtgccattaataattaatgatagaattgatgtagcgttggctattgatgctgacggagttcatgtcggtcaaagtgacatgccttgtgatgttacaagaaaattaattggaaaagataaaatattaggtgtttcagcatctacaatatccgaagcgaaaaaagcacaggaagatggtgcggactacataggaactggtgctgtatttccaactgcaaccaaagatgatgcaccttcaattacaaagcaagatctaaaaaaaattgttgatgcaattgatattccagtagttgcaattggtggaattaatcatgaaaatgcatctgaattaatcgaaaccggaatttccggattatccgtagtgagtgcaataatgaatgctgaaaatcctaaaaaggcatccgaagagttattaaatgttttcaatgcctaa

SEQ ID NO: 7804 - DNA, 777 bp, Methanobrevibacter gottschalkii
  source 1..777: mol_type = genomic DNA
atgaataaacaaaggagaatgcctgttatttttgtaggtcatggggcaccgactaatgcaattggtgacaatatctacattcctgaatggaaaaaagtaggggaatacttgggtaaacctaatgtaataatagcggtttctgctcattggtatagtgaaaaattatatgttagaactgctaagaaaaataagcaaattcatgacatgtatggatttccagatgagttgtatcaggtaaaatatgaacctaaggggtctccgagacatgctgaaaaagtattggaattattggatattgcagaggaaaataatgattggggaattgaccatggggtctggtcagttttatcaaatatgtatccagaagctgatgttccggtagttatggtgagtgttaatggaaatttaactcctgttgaacaatttgaaattggtagaaaattagaaccattaaggcatgaaggagcattagttttaggaagtggaaatattgttcataatttgggaatggttgactggagaatgaatggcggatataaatgggcttatgcatttgataatgatgttaaaaaggctgttttaaatggcgattttgaaagaattgttaattttagaaatataaaattcaatgaaattgcaataccggctcctgatcatttttatccttttttaaatgtcttgggagctgcatcaaaagaggataatgtaaaaatattcaatgatgtctgtgaactgggttcaatatctatgacatcttacatattcgaagatatttaa

SEQ ID NO: 7805 - DNA, 291 bp, Methanobrevibacter gottschalkii
  source 1..291: mol_type = genomic DNA
atgttattatatattaattttttgactcaagttcattttcaatttaacaataatataaatgttcaagctgatattcaagaaggtaaatcagaaagtaaattggaagatggagatttaacttggatattcactgatgaaaatactaagcaggttgagttaaactccaagagtttaattttagcttatcgtaaaggagattatgaaggttttaaagaatttttaaatgatgtttctttaatattggctgccttaagatggtgcacgccatttaatttaacatttttaggataa

SEQ ID NO: 7806 - DNA, 276 bp, Methanobrevibacter gottschalkii
  source 1..276: mol_type = genomic DNA
ttgttaaaggacgattatcaattaacattccaatatggatttttcaatcctgaatatcctagtgctaatgctaaaaaagattttatattagattatgattgtaaattaataaaggttgattcagctaattcgcaatttgaagttgaagaagaattgaaaaagatgaataaaattatttatgataaatcaatattaaaatcaaatttgatgaggattttaaaaaaacttttaagaaaatcgataattcttataatattaaagttaaaagcagattaa

SEQ ID NO: 7807 - DNA, 1215 bp, Methanobrevibacter gottschalkii
  source 1..1215: mol_type = genomic DNA
atggcgaaatttaatacaattgatgattttgatgttgaaaataaaactgttcttgtaagagttgatattaactcacctgtggatccgggttctggaattattttggatgatactagattgaaattacattctaaaactattaaagagttgtctaaaaaaggtgctaaagtagtacttcttgcacaccaaagccgtccgggcaaaaaagatttcacaactttatctcagcatgccgatgctttatcagatattttaaatttaagagtaaaatatgttgattcattattttcaaatgttgcaaaggaagctattcgtgatttaaaacctcatgaaattcttttacttgaaaatgcacgtttcttttctgaagaatccctttcaagaactccagtggaacagtcaaaaacattgcttgtgagacatttatctccattgattgattattttgtaaatgatgcatttgcagcggctcatagatcacaagcttctttagttggatttactgttaatactccttcagctgcaggtcgtgtaatggaaaaagaattgactgtgattcaagatgcactggataatgtgcagcatccctgtgtttttctgctgggtggaatgaaacctgacgattcaattgatgttatggaaaatgtattgaataatgggacagcagatgctattctaacaactggtattgttggaaatattgtattatgggcgtctggagtagatattggtcaggtgaataaagatttcattactaataggggatatgaagacatggttgaaaaatccagggttctaattgaaaaatttggagataaagtaaaatatcctattgatgttgcttgtgaaattgatggggaaagagttgacattgatattggagaaattccggatgaatctatttttgacattggtgtaaaaacaattgcattttatgcaaaagaaattagggatgctaaaacaatattcgctaatggtcctgcaggtgtatttgaagatcctaaatttgcaatgggaactgaagatttaattaatgcaattgcaaactctgatggtttttcaattattggtggaggacatattgctgcagctactgctggacttggttgtgaagatcaaatgagccatgtaagcagtggtggtggagcttgcattagtatgctagctggtaaaaaactagcggttgtggaagctttgaaaaacaacaaaaaataa

SEQ ID NO: 7808 - DNA, 669 bp, Methanobrevibacter gottschalkii
  source 1..669: mol_type = genomic DNA
atggatacaccaattgtaatattaaattataaaacttatttggaatcaagtggtataaaagctttagaacttgcaaacgatttggaaagtgctgctagtgagtctggaattactatggtagcagttcctcaagctgctgatatttatagagtaagtcaagaaacttcactccctatttttgctcaacacgttgattcaatttctcctggcggacacaccggttctaatttgattaacacattaattgatgcaggaattagtggaactttaattaatcattctgaaaataggatgaaattggctgacattgcagaagttataaaatcatgtagggattatgaaatagaatcctgtgtatgcactaataacattgaaacttcaaaagctgttgcagctctcaatccagttgctgttgctgttgaacctccggaacttattggaactggaattccagtatctcaggcccaacctgaaattgttgaagacactgtaaaagaggttaaatcaattaataaaaaaattaaagttttatgtggtgcaggaatcacaactggcgatgatatgaaatcggccatggatttaggtgcggatggtgttttacttgcatcaggcatcattaaagcagaaagtccaaaagatgctttgcttgatttggtaagtaaattatag

SEQ ID NO: 7809 - DNA, 879 bp, Methanobrevibacter gottschalkii
  source 1..879: mol_type = genomic DNA
atggtaaaaaaaactcaaactgcatctttcggatcagttttaagacaatcccataattcaagaaaattttacaattcaaaattgtatgaaaatcttaaaattcccgaaaatattgattttaaggaatttaaaattaaaaaagaagatttaaataaactttattgtaaatctagtgaaaatatggatgaaattccagataatagcattcacttaatgattacatctcctccttacaatgttggaaaagaatatgatgatgatttaactttagatgaatatttggaactattgacttctgtttttgctcaaacttacaaaaaattagtgagtgggggtagggcatgtattaatatagcaaacattggaagaaaaccatacattccacttcatgcaatggttattgaaataatgttaaatctgggatttctgatgcgtggagaaatcatatgggataaatctgcaagtgctggtggatcatgtgcatggggaagttggatgtctgcttcaaatcctgttcttagagattttcatgagtatattttaattttttcaaaggaatcttattctaaaaacaaatctcaagaaaagaaagacaccattagccatgacgaattcattcagtggacaaaaagtatttggacatttccagcagtaaatgcaaaaaaaattggacatcctgcaccgtttccaactgaattgccacatagacttataaatctttatagttatgaaggggatgttgttctagatcctttctgcggtagtggaacgacttgcattgccgctactaaaaataaaagaaattatattgggtatgatattgaagaaaagtatattcaattgtccaaaagcagactttctaatcaaaaatttatttaa

SEQ ID NO: 7810 - DNA, 933 bp, Methanobrevibacter gottschalkii
  source 1..933: mol_type = genomic DNA
atgaacaatattgtaatatattttttaaaactatttatatgtttaataattatagttgttattatgagattatggagtaaaaatcaggaaaaaatattttttattaattcaagaaaagttgcatttccatctcagttattctataaaacagatgatggcaggtatttggcatattggccgaaagattataggggcagaaaatcaacattacagtcaagaaattcattgattggcaaattcacagaagaatgggtttgcaagctatttggaagactgatcgttgatgatgatttgtatttagttaaacaagcaataattccttcactaggtattacatcccgttctccagtagacttggttatttcaactgctaatagaaaaattttaaaggcaagtgaggtaaaagttatttttgaggttaagatgtctattgtctggaattggcaatatttcgatgattccaataatgttgtggaaatcggagattttagaactcatcagggaaagcccagtttcacacgttcagactctattttaaaagctattggtaaatgtattggtattagagtttcaagcttcgaatcatcaaagattccaatcgttgttataggtaatgctccattatctaatggtttctgtaaaaaagcagatcacttaaaaagagttggtgtaattcaaggtttttggtctttaaatccgtttcctctaaaccatggaaatactcgaaaaacaacaccttatggaggttatatcagatttaataatacttctgaattaaaaagaaatcttgataatttattctctcaggatttaaactttttttcaggaatggaaaatcctaagacattaggtaaatacattgaaattgctaataatgaaaataattatgaagataaaggtttaaaatttttgaagttaataagaaggtattga

SEQ ID NO: 7811 - DNA, 918 bp, Methanobrevibacter gottschalkii
  source 1..918: mol_type = genomic DNA
atgtcatttaatgaaaaccaaattcaaaaattagaaaaaagcggatatagatttgtaggtaaacatagacatgctgccgttaaaacttgccattggacccgtcagagtattgttgagaaaggagtttgctataaagaaaaattttatggaatacaatcacacagatgtcttcaaatgtctcctgcagttccaaattgccaacaagaatgtgaattttgttggagagatttgactcatactcaaaccgaatgggaagacaatgagtacgatgatcccaaaacaatcgttgatgaagctattgaagcacagaataatttattatgtggttattacggaaatgacaaagcaaataaaaagaaattagaagaacttaaaaagccaaccaatgctgcaatctcccttgcaggagaaccaactctttatccgaaaattgatgaattgataggtgaatttaatcatagagattttacaacatttgtagttagtaatggtcaatgtgttgacagattaagaaatctggaaaatgatccatatcaattatacctttccttagatgcacctaacgagaaaatatttaatgaaatatgtaggccaagaataaatgatgcttggaataatttaaatgaatcacttgaaacattatccagttttaactcccgtacatgtataaggaatacatgcgttaaaggaagaaacatggaacaaccagaaaaatatgccgaactaataaaaaaagcagatcctgattatgtagaagtaaaagcatatatgtgtgttggttcatcacgtgaccgattaacccttgataatatgccaacatttgatgaagttaaatcatttgcaaaaagaataggtgatgaatgcggtaaagaattagtaaatgaatctgaaattagccgtgttgttttactagaataa

SEQ ID NO: 7812 - DNA, 1119 bp, Methanobrevibacter gottschalkii
  source 1..1119: mol_type = genomic DNA
atgaaattttttgaaaatgtggcaaaacaaatttttaataaggaaggcattccaattttggaagggcatgttgcttattctccagaggaagccatgtccatatcatcggagatgggtgttccagttgttattaaagcacaagttttaactggtggaagaggtaaagttggtggagttaaatttgccaataatcctggtgaagcattaaaagtagctgatgagattttaggaatgcaaattaaaggtgaaacagtaaaacatttattaattgaggaaaaagctgaaattcttaatgagttttttgttactgtgtctatagatagaggtgctagaagaccagttattatagcaagtaaagaagggggtgttgaaattgaaaatttagctaaaacaaaccctgaaaaacttattaaatattatccaaatcctttaatcgaatttttaccttatgaagcacgtgaaatcgcacgtaaaatgggtgtttcttctgatttgatttctccattaggttctataatctggaagttgtacaatgtatttacaaaatatgattgtgatactgctgaaattaacccattaatcacaactcctaacggattaatagctgcggatgctaaaatggttgttgaaaatgattcattattcagacatcaaaatttagttaaaagattacattataaaaggaaagctgttgattttgttaagttaaatggtaatattgcagttattggtaatggtgcaggtttaactttaactgctatggacatgataaaacttaatggtggtgaaccagcaactttcttagatattggtggtggagcttcagaacaagtcattaaccaagctttaaacattgtattgaactatgaaccagttaaggtaatatttttaaatgttttaggaggtattactaaagcagatgatgttgctcgtggtgtgattaaagctttaaaacaatctgaacgtcatgttcctattgtaatcagattaaccggcacaaacgaagaagaaggtcaaaaacttttagaggaagctgggattccctatgaaacttcaatggaaaaagcagctaaaaaagcagttgatctttgtaatgagttaaaacaggaaatgaaatag

SEQ ID NO: 7813 - DNA, 549 bp, Methanobrevibacter gottschalkii
  source 1..549: mol_type = genomic DNA
atgagaactgaaattagaatttgtggttttggaggtcaaggaattattcttgcaggtattattttaggtaaatctgcatgtctttttgatggtaaagaagctgttcaaactcaatcttatggtccggaagctcgtggaggagcttctaaatgtgaagttgtaattagtgatactgaagttgactatcctaaagttcaaagtccagatattttagttgcaatgtctaacgaagctttaattaaatatattgtggatttaaaagataatggaactttaattgttgatcctggaacaactgatattgaagatgttagggactatattgaagaacataatattaaagtttatgaagctcctgctactaaaacagctactgatgacataggacttaaaatagtggcaaatattgttatggttggatctattacaaaaattactggagtcatatccaaagaagcagctattaaagcaattgaagttagtgttcctaaaggaactgaaaagaaaaatatcagtgcttttgaagcgggatatgctttagtggaatag

SEQ ID NO: 7814 - DNA, 864 bp, Methanobrevibacter gottschalkii
  source 1..864: mol_type = genomic DNA
atgaatgaaggaaaacaaaatagatttctcccttacttaagagatgacagattacctcatattttctgtccaggttgtgggaatggagcaattattaatgcattcttagcagctatggaaaaagcagaaatggattttgataatatagctatggtttctggaattggatgttcttcaagaattccgggatacttaaaatgtgattctctacacactactcatggaagagcattaagttttgcaaccggtctgaaaacagctaataaaaatttggatgttgttgtatttactggtgatggtgatgctgcttctattggtggtaatcatttaattcatgcagcaagaagaaatattaatttaactgtaatttgcatcaataataatatttatggtatgactggtggtcagataagccctacatctcctaaaggtagttttggaactactgcaccatatgggaatctagattctccatttaaattagcagaactcgttgcagctgcaggcgcaacatattctgcaagatggactactgttcaaattgagaatttagtaacttccattaaagatggattaaaaaatcccggattttcatttattgaagttgcaactcaatgtccaacctatttcggtcgtaaaaataaacttaaaactcctactgccatggcagctgtcatgaaagctaatactgtattcaaatctgctgcagacaggatgagaccaaaagaattagaaggaaagattgtcgtcggggaattcgctaattctcaaagaagtgaattcactgaaaatattgaaaagttaagtgtagaaaaatcaggtaataaaactagtatcaattctgcatatgaaacagagttatag

SEQ ID NO: 7815 - DNA, 1176 bp, Methanobrevibacter gottschalkii
  source 1..1176: mol_type = genomic DNA
atggcaataatattaactttaatcctagattcacaaaaggaaaaagtgggtgttaaaatggctgaagaattttttattcaaggaaatgaagcatgtgctaaaggagcattagctgcaggttgtagattctttgcagggtatccaattactccatctacagaaattgcagaaactttatctcgtgatttgcctaaagtgggggggtcatttgttcaaatggaagatgaaattgcctctgcaggagcgattatcggcgcttcttggggtggagctaaagcaatgactgctacttcaggtccaggtatttcattaatgcaagagaatataggctatgcattcatgactgaaacacctattgtattcgttaatgttcaaagaggttctccatccactgctcaaccaaccatggcagcacaggctgatatgatgcaggcacgttggggttcacatggggattatgaacctattgcattatctccttcaagtgttcaagaattctttgattttacaatcaaagcttttaatttagctgaagaatacagagttcctgtatttgtcatggcagatgaaatcattggacacatgagagaaaaaattactgttccggagaatattgaaatcgtggctagaaaaagaccagaaaaaactgatgattatttgccattcgaaaatattgaaaatggaaccacacctatgcctgcatttggggacggattcaatgtgcatgtgactggacttactcatgatgaacgaggatatcctgatacaaacactcctgaaactcatgaaaaactcattaagaggatttgtaataaagttttaatgaatagggataaaatttgttctgtaagaagtgaaaactgtgaagatgcagatattgtcattgtttcatatggtgctcctgttagatctgttgtagaggcagttaataaaacagataaaaaagtaggttatattaaaatagatactccatggcctttccctgatgaacaaattaaagaattaactgcaactgcaagtgatgttctagttgtggaaatgaatttaggtcaaatgtattatgaagtggatcgtgttgttaaagataaaaatgttcatttgcttggtaaaatagggggagcattaccaactcctgatgaaatattagacgaaattaataaaataggaggaaactaa

SEQ ID NO: 7816 - DNA, 273 bp, Methanobrevibacter gottschalkii
  source 1..273: mol_type = genomic DNA
ttgattattattgatgaaaacttatgtaaaggatgtcatctctgcttattcatgtgtcatgaaaatgtatatgcaatatcctctgaagttaataaaaaaggagtacaattgcctttcgttaaatttgaggaaagatgcattaaatgcggcacctgtgaaattgcatgtccggaccaagcaataacagtagatttgcctgaaaattggtggatgaaagatggcaataatattaactttaatcctagattcacaaaaggaaaaagtgggtgttaa

SEQ ID NO: 7817 - DNA, 492 bp, Methanobrevibacter gottschalkii
  source 1..492: mol_type = genomic DNA
atgaaagacttaaatacaccaattaccgatgaagatttattaaacctcaatataggagatcaaatcactatttctggaacaatatatactggccgtgatgcagcccttccacaattagttgagttaattaaagaaaaaaaagtgccatttgatttaaatggaagtgttataatgcatactgcatttagtaatgcaggaattgcgccaacaactagcagcaaagtggaaatcgaatcgacaatcccctatttaagtgaaaatggcattaaaattcatattggaaaaggaatgttaagcgatgaaacaattaaagaactagataaaaataattccatttttgtaataacaccccctgttgcagcattacttacaagcaaagtcttagataaaaaatgtgtcttatttgaaagtgaaggaatggaagctatgttcaaattaaaagtggaaagaattccgggaattgtagctattcataatggtttaagaatttaa

SEQ ID NO: 7818 - DNA, 735 bp, Methanobrevibacter gottschalkii
  source 1..735: mol_type = genomic DNA
atggctgtagacaacggagattttgtaagagtaaattttacaggtaaagttaaagaaactgatgaagtatttgatactacttatgatgaaattgcacaagaagctggactttttgatgaaaacaaaacttataaaccaattcctattgttgtaggtggaaaccacttattgcccgctattgaagaagcaatcattggattagaagaaggagaaacaaaacacattgaagtagattctgacaatgcatttggtcctagagatcctaaaatggttcaattagtgcctatgaaagagttcaaaaaacaaggcatgactcctttcccaggtatgaggattcaatctgaaggttcaaatggaaaaatcttaaccgtaaatggtggaagggtaaaagttgattttaaccatgaattggcaggaaaagatttagtttatgatgttgaagtaactgaaatcattgctgatgaagaagacaaaatcaaaagtatgattgaattacattatgctaatcctaatgtggatattgacaaaactgaaatcgacattgttgatggtgttgcaaacattaaattagatgaaatggctaaattcgatcaaaaatcttacatggatgttactttcgcaagattcagaatagctaaagatatctgggataatgttgaaggtatcaccaaagttaatttcgttgatgaattcgagaaaaaagaagaatctgacgacgaagttgaagaagaataa

SEQ ID NO: 7819 - DNA, 1095 bp, Methanobrevibacter gottschalkii
  source 1..1095: mol_type = genomic DNA
atgaaaagacgaggagtagctaatttaccacttcatggaggacatcccccaaaatggttattcacaagaatggtggatttatcaggagctctagcttcagttattattgaagaatatagtttaaatgagtttttaaataggatttccaacccatattggtttcaggcattctcatgtgttttaggttttgactggcactcttcaggaacaacaactacaacattgggagctctaaaagcatcacttagtcctgaagaacatggaatctatttgagtggtggcaaaggtgcaaaatctagaaaaacaccgcaaggaattgaacatgccggagaaatctttaatttaaaaacagaaactactgaaaaattagttgaaactagtaaactgtctgccaagattgacaattcatgcattcaagatggctacacattataccagcatgatttctttattactgaaaaaggagattgggctgttgttcaacaaggactaaacacctatactaaatatgctagacgttatcattggttaggttctgaagttgaagaattattaaatgacccccatagtggaatttcatgtgataagaaaacaccagatacactaaacatgtcttcaaaagacagtgcaaatgctcaaaaagtaagtgttgatttaataaatgacaatcctaatcatttaagacaatattttaaaagaaaaaatagtcaaatgcttttagacgattttacaatgccttcacatcatcctattcttgatatggatatttcagataaagagtttgaagttttaacaagagcttatgaaatacaacctgaaaattacgaagaattaatattacttcagggaatgggacctaaaaaaataagagcattagctctaatatcagatttggtttatggtgaacctgcaagctggaaagatcccgtaaaatacagttttacacatggcggaaaagatggttttccatatcccgttgatagagatgtttatgataactctattcaaacaataagagatgcgcttgaccaagcacatataaaaaaagatgaaaaattaaaggcaattaaaagattggatgactttatcctctaa

SEQ ID NO: 7820 - DNA, 540 bp, Methanobrevibacter gottschalkii
  source 1..540: mol_type = genomic DNA
atgaatgttaatgttttaagattagatcatagattaaaaagggatacccgtattactactcatgtttgtttgactgctcgtgcatttggagcaagtaaaatttacctttctggtgaaagagatgctaaattaatggaaaatgtaagggatactgcttcaagatttggtggaaattttgagatagaatacagtgaaagttacatgggtgtaattaaaaaatggaaatctgatgggggtaaagttgtccatttgactatgtatggatcacaggctcatgaaattgctcctgaagtacgagaagatggttctgatattttgattgtggttgggggctctaaagttcctggaagtgtttataaggctgctgactggaatgtgtctgttacaactcaacctcactctgaagtatcttcacttgcagtatttcaacatttgttaatgaatggtaaggaatttgatttaaagttcgaaaatcctgtattggaagttattccaactgctcatgggaagaatgttaatattcacaatgaaaatcgttag

SEQ ID NO: 7821 - DNA, 783 bp, Methanobrevibacter gottschalkii
  source 1..783: mol_type = genomic DNA
atggaagacgatagctattttgaaaatgaagaattttccccaataaaatcacttttagggcttttaactttttcgacaattttaccaatcaatgtttacacctcaattgagtacatgactaaattaacttggtgttggccattcttgcatgttttagtaggtattttagctgctgtttgtggatatgtatcttttgaagtcctacatttaaatgcgttattcaccgcagttattgtttatgcgtttttaatgttaatcacgggttataatcatttggatggtgtaatggacatggctgatggtgtgatggttcatggtgatcctgaacgtaaaatcagtgtaatgaaagattcttctgtaggtgcaggtggtgttgcaactttatttttagttgcaagtcttactattgcaggattatataatattttagattattattttatacttgggattatagtttgtgaaatggccgctaaaacttctttaataactaccgcacttttatcaaagcctttaattccgggaattggaagttattttattaaagaaactacaattgttaattatttagtttcaacaattcttgtaatttgtattgcgtttttattaggtaatctaattggtgttgttggtgttttaggagctattgttgggggtattattatagcaactatttcaaaacgtaatttcattttagctaacggcgatgtccttggaatgagtaatgaaactggacgtttatttgcattactgtttatggcaattgctttatatttcatttaa

SEQ ID NO: 7822 - DNA, 2115 bp, Methanobrevibacter gottschalkii
  source 1..2115: mol_type = genomic DNA
atgacgacagaatttattattagaatggatgatatgcctaaaattatacataatgatttatcagattctttggatgttgagtctattttgaaaaaggattataaatatatttatgaggctattcaaaatgaaggattcataatagaaaataattcaggagatctttttaaagagatattgtttgatagtaaagttgttggatttgctttttatgaattaaatgcattgactagttttgttttaaatgaggtttatatcttacctgaatttaggggtaattctttatttttattagaaattaatgtactcctttcagcaggcaatacattgagtattttacagccaacaaagaatcttgtagagattttaattcattatggatttgcatctaaattaagtgaaaatattgtagccagtgccattggctttgattttaaaagtgaaaatattttgtctaattccagtgaggaatttgataatgatgatcaaatattgtcttccaatatatatgatttggatattcgttcctgtctatttcttaaggatatctcaactcctggtaaaaatattatttattatcatgaagagcttaaaaatgattttaaagaatatggggaacgtaaatccttaaataagaattattttaatgaaatcaaagatttatttttacaaaattctgatgaatttactcaaatactgtttgatttaaaagaagaattgccaaaatctcaattgggatttgatgtagtcataggaaatgatgatggattttcagagtatatgcaggacattattgatgatggcattatttcagaagataaagcaaaaaaaattaataatatattaaaagaagaatatgaacgaggtgaagttactgatgatggaattataacccgtttaaacttttttattaatgatttggattcgcaaatcgatccattcaatatatttgaaatcggtgctaatttatgtccatattgttgtaactttataaatttaacagatgaatcatgtccaatctgtggttataatctattttatgaaaatgattttgattttgaagatgatgataattttgaagatggaatatttatcaataaagacaatgtgttatctgttatgtccggattatatgaaagatttggcagaaaatataaacttgaagatattaattatggaaaacaatatcctacaagttatgatttagatcaatatagaattttaaaatttattgatgaatatcataatctggaagtggcattttattttttaaataatttaaaattgcctcaagagatattcaatgatttattatttgaagaggaatatgttacttatgaaattactgaagaaacatggtctgattttgctaattatagtttaacagtaaatgatttgaaagatattttaagagataatgggctaagggtttcaggaagaaaacaagaactcatcgatagaattggtaaaagtgatatttctgttagtgaatttagctccgataaattatttttaaccagaaaaggtaaagattatttaaatgagtattcttggattggcctatacaatgaatttttaaaaaattttgattttgatgatttttacagattttatgagtctaacgatggaaatttcaatgaaattgtttccaaatatcttgatgaacatataaaaatagctaaaaataataaagattttgattatttaataaattgtttttcatctaaagcaatattttcaggattagataaaaatccaaatgatgcattaaaatgggaaatgagaaggttctgtttaacaattaatccgatctactcacggggggtttatcatgatttttatttacatttgaattctgaaaatataaataatctaagatcattgaaagacgaattttcaagtgaagagatgttggattcatttgaagaatcttgggattattttgaatttaataagtccattgtttcaaaaaaagatgctaaaattatttttgaaagattactgattaataatgaggatttgaaattaattaacatggagcttaaggacaggtactctggaagagatgctattgataatactttttcagccgatttaaatgattattttaaataa

SEQ ID NO: 7823 - DNA, 1083 bp, Methanobrevibacter gottschalkii
  source 1..1083: mol_type = genomic DNA
atggagttaaatatcactaaaaaggattatggaatttgtataaataatccgaatcatttcttagcattaagtgattttacagtaagtgatgggattgatattgtagaaaatgtcaatgttgtaaaagcaaaagatgagtttaaagccactgcaaaaaaagctgaggcatttaatcaatccaaaggttcttatattgctcaggcttcagattctattgattattttcaaaataattatgatgatttaactatttttacattcatggcaaatgatgttgttattgaagatttcactgaatatttaaaagtagcaaattctccaaaaggtttttttgatgcaagaattaatttaagtcatataatttacattgatagtgtagtttctccaaaagatttgcttaaaatatttaaaatagtgactaatactaaagcaaaggtactggctaatatgtgtttaccggcacatattcaaaatataatcaatacaaatgactttttagcagttttatccaacattaatgtatctgaaagtcaagatttagatattaataatgcagaatatgaagaaatagattgggatgatttaaaaataaaaatggaagatgcagttgaaataagtttggaagatgcatttagttatcttgaattaacatttggaattcttgattatttggtatctgaaggaattttaattggagatttagtggatactggtatggaacttgcaaatggggtgaagataactcaggaacttagagataaaatggaaacacaaattcttaaatcactgactgatattaatgttgtttcactaattattgctggaatgaggatggaacaggatttaactggaaatcacataagggaatttgatgtacatgatgattcagattacttgtatactgatgaagtattgggtcttgctatttcaaatcagattgcaggaacaaaagcaacttttaattttaagagatatcatgaagcaaaacctggaattattgcaggattgcctcccatactcgatgatatttttgcaggtctgattgcgggatgcatgtctaaaatatttgaggaattgttatga

SEQ ID NO: 7824 - DNA, 1170 bp, Methanobrevibacter gottschalkii
  source 1..1170: mol_type = genomic DNA
atggcaattattattgatcctcaagtaagcggaattgcaggaaacatgttaataggagcgtttgtggatttaggtgcagatgcaaacaaactaaaagaagttatggaaaaatccgcagaatgttttggaaaagttgaagttacatttaaaaaaataaataaaaaaggaatttcatctacatattgtcatgttgaaatgcttgaacataaacattccatttgttatccgaagtttattgaaaaaattaaaaaattagacttagataaaaaagttaaagaaacctcaatcaaagtatttgaaagaatagctattgcagaaagtaaaattcatggaaaaactttagatagtgtccattttcatgaagtaggtgcaagtgatgcagtagccgatgttataggatccatttatgcatattatagtttaaatttagataatcaaaaaataatcggcctcccaatagctgttggagggggaagagttgaaactgcacatggaattataccagttccagcacctgcagtagtggaggtcttaaaaaatgcaaaaatgattggtggaccagttgacagtgaacttgcaacaccaacaggagctgcagtttatatggagatttgtgatgaaataaaagaattcataccattaattaaagctaaaaaaacaggttatggagctggaaagaaagattttgaccaccctaatgttttaagaatcattgaaagttcagatattgctgaaagtgataaaattgatgttattgaaacaaatatggatcatttgaccggtgaagaaattggatacttatttgataaactcctagacattggtgcaagagatgtttcagttactccaataataatgaaaaagaacagacccggcaatttacttaaagtgatttctagaaaagaaaatagggaaaaagttattgaagcaatatttaaagaaactggaagtttaggtatccgaatagctccaaatatgcacagaggaatttcaaaaagagaatttagcaaacaaatattcaacataaatgataaagattatgaagtgacatttaaaataggttatttaaacggtgaaataatctctaaacggccagaatatgaagacctgaaaaagatagctcaggatagcggattaccgcttaaaaaaataagtgagatgattagatga

SEQ ID NO: 7825 - DNA, 678 bp, Methanobrevibacter gottschalkii
  source 1..678: mol_type = genomic DNA
atgaaaaaggctatttcaattttttccgggggccttgactgtactgttgcaacaagcgtttttagtaaaagccataaaattcatgcaataacttttaattatggtcaaaaagcattcaaaagagaattaaaagcatcaaaagaaatttgcaagaagatggattggactcatgaagtaattgacctcccatggctagcaaatatcagtaattctagcctgaataccaatgaaaaaatcccagaactttctgctgaagatttagataacttaaaaataagtcaagaaagtgccagtagtgtttgggttccagcaagaaacactgtttttacatcaattgcattgtcttatgctgaaagtattggtgcaagttcaataattgttggttggaatggtgaagagggagcaacatttccagataactcaaaaggatatatgaaaaaatttaatgaactgatcaaagaaggttcacctgaaaatattagaattgaagcaccattaattgatttagataaagaagaaattgttaaattaggagttgaatatgatgctccaatggaattaagttattcttgctacaaaggcaagaaaaagcaatgcggtatttgcgaaagttgcatgagacggaaacgagcattcaaaaatttaggtataaaagataaaagtgaatatgaaaattaa

SEQ ID NO: 7826 - DNA, 999 bp, Methanobrevibacter gottschalkii
  source 1..999: mol_type = genomic DNA
atggcaaaagaggatagaagtgaaataaatccattcactggtagaaaacattatgataaaattaatgatgataaattcctcaaggaatcatacaaggaatattattcaatgattgatcaagtacaactcttggataatactcaaaatggtcaaattgtcattaatgttgctttaaatttaatcaatgcagtcaacagttatttgtctgaaattggtaggcttgattatgttgaagattactatgattgggatgttcatttggttggagataatgctgtaaatgctttttgcatgcctgggggtaaaattgtaatgttttcaggtattctttcagttgcaaatactgaagaaaaaattgcttttattctgggtcatgaaatggctcatgcacttcttgatcatgctagaaccagaatcagtgctcaaaatactcaaaatgcaataacttctgcagcatggattggtagtattgcaatggatttttttggtttaggtgaacttggcagtctaacaagagcagccactaatgttgcaagcattgggtctcagtttctcttaatgaattcttggggaagggaccaggaacttgaagctgacagattgggcatgatgattattcattgggcaggttatgatgtctctcgcattcctgcattttggagggatatgtcaatgcaaaattctaatgaacatgatttcttttcaacacatcctgcagattcaaaaagaatagctactatgcagcaattgattgtagaaatagcaaacgataatgatttttattcaaaaccagtaattggtgatgttaatcaaactaatgttaaatctgtttcttctgaggggggtttttgttcaaattgcggaaatcctgttgatattgatgctaaattttgcacatcttctggaaccaagcttgatgttggattaagatgtccaaattgcggatcagcagttggaaataatgatgtattttgtattaattgcggatttaaactttga

SEQ ID NO: 7827 - DNA, 999 bp, Methanobrevibacter gottschalkii
  source 1..999: mol_type = genomic DNA
atgaaagatattttcgataatgttcaatttggagatttaaaacttaacagtcgtatagttagaacaggtacttgggaaactgaaacttccgaaggaggatttttaacacctgatatttatgatagatatgaaaagattgcaagtagtggtacagggttaattgtctctgaaatgttcgcacttgaccataaagatagattttacccttattcaaccaatatgaactacagggggttcattaaggattatcaaatggtcactgatattgctcataaatatgatgttccaatttttggtcaacttgcattcttttattatgatgacggtgaaaatcaaaaggtagaagctaatgatattgctcaagagggcattaggaaattgcaggctgaagtaattatggcagctaaaaaattctcatttgcaggatttgatggaatccaaattaacatggggaataatttttatctttcaagatttatgaacccttatttcaatcaaagagatgataaatatggtgggaatactgaaaatcgtgtcagaatttctgctgaaataattaaagttattaaaaagaccatggatatccatgttagttgtaggattaatccgtgggatgcaagaaaagatggaatgactgccgatgaaagtattgcaattgcaaaagaacttgaaaaagcaggtgctgatagtattcaacttactgcacgtacaatttcacaaatttatgataaaggtgaaaaacatccttttttagtttatgttgaaaaattaattgatgcagttgatattcctgttgttttagggggatctcttagagatatgaaaacaataaatgatgttttaaatagttcgactgttgagtatatttcaatgtccaaaccctttgttgctcaagcagactttttagcagactggaaagctaatggtgagggagtatcagtttgtcaaagttgtaacaattgctattctaaaaaaactagtacttgttttaaattttaa

SEQ ID NO: 7828 - DNA, 216 bp, Methanobrevibacter gottschalkii
  source 1..216: mol_type = genomic DNA
atggtgaatccaattattgcagcaattatctcctttttcttaccaggtattggtcagataatacaaggtgcagatgttaaaaaaggaataataatgtttgttattgctatcattttaggttggttattagtaaacttccttggtagtttaggaaacattatatattgtatttatgcactttatgcagcatacgatgcatataaaatagaagcataa

SEQ ID NO: 7829 - DNA, 1716 bp, Methanobrevibacter gottschalkii
  source 1..1716: mol_type = genomic DNA
atgatggcaaaagtaagatttacagaaacagcacttcgtgatgctcaccaatctctgcttgcaactagaatgagaaccagagacatgattcctgttgctaaagaaatggataaagtaggttatttttcagtagaagcttggggtggggctacttttgatacttgtattagatatttaaatgaagatccatgggaaagattgagacaactaaaatctgaatttaagaaaactcctattcaaatgctgttaagagggcaaaatttagtgggttataagcattatcctgatgatattgtaacaaaatttgtagaaaaatcctacgaaaatggtgtagatatttttagagtatttgatgctttaaacgatgttagaaacatggaaaaagcgataactgttgctaaagatcaaggtgcgcatgtacagggtacaattagttatactataagtccagttcacactatagatggttttgtagatttggctaaacatcttgaagctcttgattgtgattctgttgcagttaaagatatggctggtttgataactcctgcagctgcttatgaattggtatcaaagttaaaagaagaaactgatttgcttgttgatttgcattgtcattgtactagtggtatgactccaattagttattatgcagcatgccaagcgggtgttgatattttagacactgccatttcacctctcgcatggggaacaagtcaaccaccaacagaaagtatggttgcagctttacaaggaaccgaatttgatactgggcttgatttaaaattattggcttctattaaagaatactttgaagacattaaagaaaaatatttaggaattttagatcctatctctacaagtattgatgctgatgtattattatatcaaattccgggaggaatgctttcaaatcttatttcccaacttaaagaacaaaatgcacttgacaggtataatgatgtattggatgaaatgcctcgtgttagaaaagatatgggatatcctcctcttgtaactccaacaagtcaaattgttggtattcaatctgtaatgaatgttttaggtggggaaagatacaaaacagtatctaatgaagttaaagattacatgaaaggaatgtacggtaaaccaccagcacctgttgatgaaaaattatctaaaaagattttaggggatgaagagattatttcatgcagacctgctgatttacttgagccggaatttgataaaatcaaagcagacggtaaagaaaaaggatttgttaaatccgatgaagatgcattaacttatgcattatatccaccaatagctccgaaattccttaaaggagagactgtagaagaagaacttaaagcacctcatgcattcagtgaagatgaggctattggaattccaacccaatataatgttgaagttgatggagatatgtatgaagtcaaaatcatgcctacaggatttatggaaattgaagaggcagataatggtaatttccatccggttgaaggaggagttacttcatcaatgaatggtatggtaattaaacttaaagttaatgttggggataaggtaacaaaaggatccaccatatgtgttattgaagctatgaagatggagaacgacattcaatctgaagttgatggtgttgtggaagaaatctttgtagaacctggtgatgcagttaatgccggtgacactttaatggtaatcaaatag

SEQ ID NO: 7830 - DNA, 1095 bp, Methanobrevibacter gottschalkii
  source 1..1095: mol_type = genomic DNA
ttgaataaaattaaaatagcaattgttggaataggaaactgtgctagttctcttattcaaggaatacattattatgatggtaagaaccctgaagatgcaatagggcttatgcattgggatattggaggatatgaacctagtgatattgaagttgttgcagcttttgatgtggatgcaagaaaagttggaaaaactattgatgaagctattttcgcaaaaccaaactgcacaactgtttttcaagaagatattcctaaatatgatgctaaagtaagtatgggtcatgttttagatggtgttgcagaacacatgtctaactatgatgatgaatacacatttgttgtaagtgatgaagatcctgttgatgttgttgaagttttaaaagaaagtggagcagaaattttagttaattacttgcctgtgggttcagaaaaagcagcaagatattatgctcaatgtgctcttgatgcaggtgttgcatatgtaaattgtatgccggtatttattgtaagtgatgatgaatgggatgttaaatttaaagcaaaaggaattcctattgtaggtgatgatattaaagctcaaatcggtgccactatcactcatagaacactagctagtttatttatggataggggtgtaaaattagataaaacctatcaaatcaacactggtggtaacactgactttttaaacatgcttaatcgtgaaagattggactctaaaaaagaatctaaaactgaagcagttcaatcagttttaaaagaaagaatggatgatagggatattcatattggtcctagtgattatgttccatggcaaaatgataataaattatgtttccttagaatggaaggtcgtacatttggggatgttccaatgaacattgaacttagattaagtgtagaggattctccaaactctgcaggatgtgtaattgatgctgttagatgttgtaaaattggtttagaaaggggtattggtggacaattaacttctatttcttcttacactatgaaacatcctccaattcaatacactgatgatgaagcatttgaaaatgttgaaaaattcatttctggtgatttggaaagataa

SEQ ID NO: 7831 - DNA, 846 bp, Methanobrevibacter gottschalkii
  source 1..846: mol_type = genomic DNA
atgaatccatatatagaaattttgagacccggaaatgcattaatgggtgcaatatccataattttggttgcacttattgataaaacaatttcaattccagtaattcttgcaatgattgctgtattttttgaaacatcagcaggaaatgtgattaatgattattttgattataaaattgatttaatcaataaacctgaacgaccaataccttctggaagaatttcactaaagaatgggagaaactacggttattcattatttgcagctggaaccgtatgtggttttttaattagctatattacaaataattggataccatttggaattgtattatttgcagacatcatcctttatttatatgcatatacattaaaaacaacacctttaattggtaatttaactgttggtttcatgactggtttcggatttgtatttggaggattttccatcaataatccaaatattataataacttcgttatttttaggattttttgcatttgtaatgacaacagcacgggaaattgtaaaagacattgaagatattgaaggagataaaacagatggtgcaaaaactttacctattctgattggtgagaaaaaaccagcaatacttgcagctattttaataataattgacagtgcattgtgtcctttattgtattattaccatatttttggaatattatatctagtagtgatagcatttgcagtcatgctgttcatttactccgcaatattaatattaaaatcacaaaaaagagagattgcagcaaaagtttctaaaaatttaaaaattggaatgctaatagctttcgtagcatttatattcggatctttaatataa

SEQ ID NO: 7832 - DNA, 1578 bp, Methanobrevibacter gottschalkii
  source 1..1578: mol_type = genomic DNA
atgtttaaagagtttaacataaacagaaaggacaaatattatttaatagctattttaatattcagtgcaattctagtcggatattatattaattttaataatgcaataggcatttcatgttcagatgtttatatttatcttataaattctctttattatactggagaaaaagtaaatataacaaattttatccatatatctccggttgtctgttttttgacttctcttttttttagagtgggttttgttgataaattggctatttatgttgttactggtttttttgcgattatcggcaatattggtttttacttactgttaaaaaaattttttaacgaagaattgagcttgaccggtacaatactgtactcctcattttcactttatttaatttggcttgcaaacggaacattagacattcctgcaacaggagtgataatctggatagcattatttacaatgattgcagttcgagaaaacccaaaatactaccaatacctaatcccattaatggtaatcggactttatacaagatacacagtaatattaacccttccagcatttttcttattctatgttctcgaaaacggattcaaaataaaaccagaagactggaaatacataaaaagaggaatcatcatcgcaacaatcatagcaataacagtattcctaatagtttttactatgggaaatggcagatttgatgcagctagtcaaatggcgaatggtgtaaaaggaacaaatggagaactcacagatcctgcatacaatccagattcaagttattattttatgaattatataaattacatatcaaattcacatactgtatttgaaataaaccctacattatactcccctacaattttagcatatgcaatatatgcattgctgtttattggggcagggttctggttatatgaccataaaaaagtaaattttagaaaaacagatgcaatttcaattataataatcctaatgggaattataagttttacaagagttacctcagtgattacatccatattaatttatattggaatttatttacttgccagagatagagaatataatgatggagtattcatgttaggctggattttagcaaatgcaattttccttagtttcaacatagttaaagttaacagatacataattcccacatttccaccatttatattctttgtattaacggcaatagaaactattcatgcgcatgtcaaaattaataaaaacatgatacccctagcattaatagtattatttgttattcaggcttttgcattcacagcaacagttgaaccaacagacaaatacatgagtcccgaagaaatttcaaattacataatcgacagcaatccggactatgaaaatatgaccattggagtttacaacataagaccatacagctggtgggttggatcaaataccataggaatcccttcaagccatcaaagtgaaatagagcaaagcaatataagttattacatcgtgaataagcctatggacaatttaacaaattttactgaaataaaaaatattaatgaattatatttatataaaaataataatttttaa

SEQ ID NO: 7833 - DNA, 1575 bp, Methanobrevibacter gottschalkii
  source 1..1575: mol_type = genomic DNA
atgttcaacgaattcaacataaataaaaaagataaaatttacttaatagctattttaatattcagtgcaattctagtcggatattatattaattttaataatgcaataggtatttcatgttcagatgtttatgtatatctcttaaatgcactttattataccggaacaaatgtacactcaattgacaacattttcttgtctccggttgtctgttttttgacttctcttttttttagagcgggttttgttgataaattggctatttatgttgttactggtttttttgcgattatcggcaatattggtttttacttactgttaaaaaaattttttaacgaagaattgagcttgaccggtacaatactgtactcctcattttcactttatttaatttggcttgcaaacggaacattagacattcctgcaacaggagtgataatctggatagcattatttacaatgattgcagttcgagaaaacccaaaatactaccaatacctaatcccattaatggtaatcggactttatacaagatacacagtaatattaacccttccagcatttttcttattctatgttctcgaaaacggattcaaaataaaaccagaagactggaaatacataaaaagaggaatcatcatcgcaacaatcatagcaataacagtattcctaagagtatatgggatgggtaacgggcaattcgaagcaggcagtcaaatcgcaaatggtgtgaaaggaacaaatggagaactcacagatcccgcatacaatccagatataagttattatttgacaaacttccccaactttatatcaaactcacatacaatatttgaatcaaatcctgtcttagaataccctaccccattatcatttgcagtattcgcattattatttataggaatcggattttggttatatgacaataaattaaaagctgaaaaaagagatgtgattcctgttatactaattttaattggcattataagttttacaagagttacctccgtagctacaaccttattaattctaattgctttttatttaattggtaaaaatagtgaacataaaaatgaattatttatgttaatatggatactggcaaatgcaatattttttagctatcacattattaaagttaaccgatacattcttccaatagttccaccattcatatttttcatattgctcgcaataaacaccattcctgaacatatcaacattaataaaaatgtaattccgattgtcctaatcgcattattcgcaattcaagcttttgcattcacagcaacagttgaaccaacaaacaaatatcttgcaacagaagagatatcaaattatataattgacagtaatccggactatgaaaatatgaccattggagtttacaacataagaccatacagctggtggattggtccaaatacgataattcttcatgcagatgcccctggagaaatagaccaaagtaatgttagctactacatctcacaaagcagaatagataacctaaaaaattttactgaagtaaaaaatagtggtggtttacatttatatgaaaacaataatttttaa

SEQ ID NO: 7834 - DNA, 1545 bp, Methanobrevibacter gottschalkii
  source 1..1545: mol_type = genomic DNA
atgaaagttgtatgctgtaagaactgtggtgcaaaataccaactcgatgatgatgatgacatatcaacattcgagtgttcttcatgtgcaggtgacttagaatacttagaaaactattctaatggaaaagaatctaatcaatcattcgttagttcaacaaaatataatgattcatacattgtacaatgtcaagaatgtggactgaaatacaaaattaaaagtagtgacagcatacttgattatgaatgcgacagttgtggtggatctttaagatatttagatgatgagatgaataaagaattagattcataccttgaagagagacatgcagagcttcaaaacattagaaaagaatcaaaacctaaagaaccaacatctgaagaaataaacacagaagataacactccctcaataaaatcgattactgataaacttgaaaatttcttttcagaagagcatatgttgcaaatagcagatattgagaaaaaagaagaggaagaaatacaagaacaggtaatctcaaaaacagcaagaactaccataccacaatccgttttatcaagatttggaaaagagtttgcaactcccaaaactgaagattatgacatcctaaaaaatttccttaaaacagaatttttcaaaggaatggatgaatactatccaaaagataataaactaaaatcaaacaaaagttttcttgataaaattagcttaaaagaacctgataacggtgaatcaaaacctgtcaaaagttcaattataaataataactcaaaatttaaccttgaaaattttaatgttgaaaacatagaaagtaacaatacaatcataataataggtgtagttatttttattttaagcataattgaagttttaactataaatagtggtataggaattattgcgttatttattggagtaattattttatgttatggaatttataaaactagagatgtaaaacaagatgaagaaagaacaagaataatcagagaacacttgttaagtcttccagaagagttttatgtattctacaatgttaaaatcccaacttccacttcaggcattaatcatgttgttgtaggtccaactggaatttatgcattactttcacaaaaatataatccaaaacttagattggaatcagaaaacgaaaatctaaatttaattggaagcagtgaatctgaagaaaataaacttgaagaattttcaagttatgggaatatgagaaaatttagatacactacaaaacaagcaaaattttcacaagataacaaagttaaacagaaagcattgagtttaggtgaagatttaataaacttcctcaatgaaaataacattaaaaattgctttgttgaaccattagttggattcataaacaatgaggtcgttgttataaatatgcctttaactgatgaagatttatttattgaagaattattaaataaaatccaaaatactaccattaaattagattctgaaacaatcgacaaatgtgctgttttaattaacaaatattctgcagactgttcctcagaattttaa

SEQ ID NO: 7835 - DNA, 1002 bp, Methanobrevibacter gottschalkii
  source 1..1002: mol_type = genomic DNA
atgaaactatttaataaatatccttttttaattggtgaaattagttttaattactatgatctggctaaaaaagaggagttatcttattttcgagttgcaaaacttttaattgaaaaatgtagtgaatgtggaattaatggagttaatttccatgttggagattctgaatatttgcattgtaaatatgaagaagattcaaatcaaactgatcaattaagttttgatgagtataaagagctggcggagtattgtaagaaattaggtttggtttttattataactcctgcaaatattgaaattgtggataagttaaatgatgtagttgatgtttataaaatctcttcttctgatttaactaatcttccacttattgattatatttcaaataaacacaaacctatattattgtcaactgcagcttctaatttaagggagattaaatctgctgttaaatgtatagaagataattctaattttaaaattattataatgcattctgttttatcatatcctacaaaactagaagatgctaatcttttaatgataaaagatctttcagaacaattcaaggattatgatgttggttactcggattatacagtttctgataattttatgtttatcttaacaactgcataccagtatggtgctgttgtgctggaaaaatatttcacattggataagtcatttgaaggacacgaattcgctatggatgaagaagatgcacgtattgttagattaagtgctaatgtattgtctaagattaatggttataaaaataaacaacctttaatttgtgagtctttttcaaaaaggaatgttagaaaatctattgttgcaaaaagggatattaaatctggtgaaataattgataattcaaatattgattttaaaaggccgggagtgggtatttctccatcaaaagtagatgatattattggtaaaaatgctaatagggatatttctaaaggttctttaatagaatatgatatgttatcataa

SEQ ID NO: 7836 - DNA, 1665 bp, Methanobrevibacter gottschalkii
  source 1..1665: mol_type = genomic DNA
atgttcaataataataaaattttagtagttattccagctaaaggggtttcaaaagggattcctcgcaaatatgttcgtttattgaataataaaccgttgatttattatgcaataaacattgctaaatcatctcaatatgttgatgatgttgttgtaactactgatgattctgaaattgcatcaatttctgaaaaatttggtgtaagtgttattagacgttcaaaagaattatccggagaggatattcctttggatgctgttgtgtttaatgctatggttcaaaaagaaaaatctgcatttgatgaatatgatattgtaattacaatgttgcctacatcccctttacttaaaacacagactttagataatgctattgaaaattttgatgatttttctcttgaaagtgtaatttctgttgtagaagataaacagttgttttggggttatgatgatgataataaaatatattttcccaagtatattgaaagatgtaatagaaaagatttacccagttcttttagagaaactggtgcaatcatagctactcgtagaggttttatcaacgaaatttcttgtattggggaaaatattgatgttattgaattatctgatgaggaagccattacagttgatgattttaaagactggtggattgttgaaacaattcttcagaggaaaagaataggaattgttgtaaacgccaataatgaaataggaactagaagaattgacaattgtttagcatttgcatcaaaacttgtttctcatgaatttctatttattttagatgaaaaacataaattaggacaaaatttagttgaaaaatttggctttaattttaaaatttataatggtcatgatgcaatttataatatattggaggaatttgcccctcagatcataattaatgatgtatcagacactacggaggagtatatgtctgatttaaaagaaagagggtattttgttgctaattttgatgatttaggtgttgggtcaaatttggctgatgttgtatttgattcattatatgagcatgatttgagtgatacaaatgtttatactggtcaaaaattccatattcttaaagatgaattttatttccagcctcataaagtaattactcaggatgtagataatattttgattatggttgatggcaatgatcctaaacatttgtctgaaaagtttttagaagcaattttatccactacatatgaaatgaaaataaatattatagtaggtaggggatatgagaatattgaacagtttatatctaactatgaatccaatcctttagttcaaatttatcaaaatgttccaaatgtcagcgattttatgtttaaagcagatatattagttacttctgcaagtaaaatcatgtatgatgcttgcgcattaggtgttcctacaatttgtgtttatcaaaatgatttagaaacttctcatgtttttgcaaatagtgctaatggaattttaaatcttggtgatgttgaatcattaacaaaacaggaatttgttaatcaattcttggaattagttaataatcatgatcttaggttgaacatgcataataaaatgaaatctattgatttgcaacatggttatgaaaatatttgtgctgttgtaacagaagagtataggaagtttgcaatgaataaatga

SEQ ID NO: 7837 - DNA, 1050 bp, Methanobrevibacter gottschalkii
  source 1..1050: mol_type = genomic DNA
atgaatatgaaaagtatgtcagataaattattaaaaaaaataaatgaattatccacacctgttaaaataatgcacgtttgtggttcccatgaacatacaataatggagaatggaattagaagtttacttccagatgaaatagaaatcattgcaggacccggatgtcctgtttgtgtagttccctctcgtgaaattgatgaagctttagaattaattgatagaggagttacaattacaaccttcggagatatgttaagagttccgggttctgaaagatcacttgcagatgcgaaagctgaaggaggagatgttagagtagtttatggaataaatagagctattgaaatatctgaaaaagaagataatgatgttgcattcatatctgcaggttttgaaacaactgcaccaaccactgctgccgaactattagcaacacctcctgaaaatttctcagtactatcatgtcacagattaataccaccagctattgattttttaattaattctggagagacaagtctaaatgcattaattgaacctgggcatgtttgtacaattattggaactagaccgtttgaatatttctcaaaagagtttggaattcctcaagctgtagcgggttttaatccattagacatattaatgtctgtatatatgattttaagacaaattcataatgaaacaccaaaaatagaaaatgaatacacaagagcagttagagaagaaggaaatacgattgcgcaagaaaaaatgaatcaggtatttgaagtgacctccagggaatggagaggatttccaaaaataccaaattccatcttagaaattaaagatgaattcagtgaatataatgctcgtgaaaaatacgatattgaagttaaagatgttaatgaagcacctaaaggatgtatttgcggacctattttaagaggacttgcaagaccagaagactgtaagctatttagaaaaacatgcaatccattacatccaatcggagcttgtatggtaagtaaagaaggaacatgcaacatcgcccacagatactcaagatga

SEQ ID NO: 7838 - DNA, 705 bp, Methanobrevibacter gottschalkii
  source 1..705: mol_type = genomic DNA
atgacaattgaagcaattgcagttgatattgatggaactataactgatgaaaaaagacaaatctgtatttctgctattgaagcattaagaaaagcagaatcaaaaggaataccaaccattattgtaacaggcaatgttgttaactatgcttatgctacagaagtccttattgggtgtagcggcggacttgtagcagaaaatggtggtgttgtctttaaagaaggtgaaaacaataatgctgttgaaacattagttgaaagagctttcgtgacatctgctgaagagcacttaaaagataaattaggcgacaaatttgataaacatgcatcccacgacaatatgtacagattaaccgaaactgtattctataaaacattagatataaaagaattagaagatgcattaaaagattttaaatacttagacgaacttgaaatttatgatagtggttttgcactacacattaccgacaaacgtgtgaataaaggaacttcactaaaatatttatgtgaaagaaatggaataaatatggaaaatgttatggctattggagatagtcaaaatgatgaagatttcttaaaacaagcaggatacaaaatagctgtggcaaatgctgaagacaaattaaaagatattagtacatacacttgtgagaatatgttcggcgatggtgtagcagaagctattgaaaaatttgtattatag

SEQ ID NO: 7839 - DNA, 1314 bp, Methanobrevibacter gottschalkii
  source 1..1314: mol_type = genomic DNA
atgatatacgaaatagcacaagaagcaaaaaaagcaatagaaaataattgtgatgcctatgaaatatacattgatgaatcaaaatccatccaacttgactcccgaaaagaggaattaaattttgcaaaagaagaaattgaccgtggagtaggcattagagtaattaaagacaataaaataggttttgcattcacttcaaacatggataaaattgctgaaacagcaaaacattcaattgaaaacactaaattaaataaaactgatgaaaattatgcatttgctgaagtcgaagaaatcccaagtgttaaaaaagtatatgataaaaaatttaatgaattagatcttgatgaatccattgaatttttaaaaaacacaatagatacaacaattgaccaaggatgtgacataactggttctggattttcagcaagtgaaggaaaatcccttattttaaactcgaatggggtttccattgaagatgaaggtaccggatttagtattggattatctgtaaatatacaaaaagatggaaaaattgcaacagcgtataactcacaatcttcaagattctttgatttggatggtgaaaaattagctatcgaagtgtgcaatcttgctaaaagttctcttgatacaaaaccaattgaaacaaataattatgatgttgttcttgattattatgctgcaaccggtcttctgcaaacatttatgaatgcattcaatggtgaaaatgttatgagaggaagatctatcttaaaagataaaataaatttccaaatagctaatcctaatttaagcataattgacaatcctcttttagaaaaaggaatgtatacttcaaaatgtgatggggaaggcattgtaagtcaaaaaactgatttgataaaagatggaattctaaattcatttatttatgatatttatactgcaaacaaatcaggcgttaaaacaacatctaatggtcttagagggtcttatttaacaacacctatgatttcccccacaaaccttgagtttaaatttagtgatatgaaagatttatcagaaattaaaaatggtgttttaacaactagtgttttaggagcccatactgcaaatccaatttcaggagatttttcagttgaagcaagtaatgcatttaaaatagaaaatggtgaattaagcgagcctattaataaagcaatgatttcaggaaatatatttgaaattatggaaaaagtagaaggattgcaatccgaaataaaacaatatggcccatttattattcctaaattattagttcacgatttaagagttgttggacaaaatcaataa

SEQ ID NO: 7840 - DNA, 252 bp, Methanobrevibacter gottschalkii
  source 1..252: mol_type = genomic DNA
atgcctaaaaatgaagagtttgatctggataaagaaattgaaagaatttctcgcaaaactaatattaatatgagaaattcagaattttcttttgaaaatcaaataagaaaattagataaagaaattgataagattatggaagataaattaaaagaatttgatgataacaaaaagttaacttcagattatttttctattgattataatgaatctacaataagcagatatagggaaaaattaaaaaagatttaa

SEQ ID NO: 7841 - DNA, 462 bp, Methanobrevibacter gottschalkii
  source 1..462: mol_type = genomic DNA
atggaaagtgaagttaaagtaattccagaacaaaaattagctgttattaattgtaaaactccaattactgatttagaaattttcctttcaatgttaatgggttgggttgatgctgaagagatcgaaactgctggtgaaccattcattgtttatttctcaccaagacatcaagtcaataagggggatgcagtatttgatgtaagcattccaattaaagaagatgctaatgaaacagatagaattcgtgttgttgacatgatttcaaacaaagttttatccggtattcattatggctctgcagatagtataatggaaacttatgaaaaattagttgatattgctcaggaaaatcactatgatattatcggatcacctaaagaagttttaataaaaaatgttcataattgtgatgatgaaaaagaatacataactgagattcaattgcctattattgaaatgtag

SEQ ID NO: 7842 - DNA, 1224 bp, Methanobrevibacter gottschalkii
  source 1..1224: mol_type = genomic DNA
atgggtaccgaatttttaaaaattaaagaatgtgatgaagctactgaaattattcaaaaattatttgatgaaaaattaaatcaacaaagtgaagaaattcttgttacagaatcatacggaagaattttatttgaggatgtttattcaaaaatggattttccaccctttgataaagctttaaaagatggatttgcaatacttgctgaagatagttttggagcatctgaagaatctcctaaaacattggatgtaattgattttttagaggcaggtgcaactactgataaaaaggttgaaaaaggaaaatgtattgagattagtactggtgcagcaatgccggaaggtgcagagtctgttgtaatggtggagtatgctgaaaaatcagatggtaaagttaatttattaactactgctactcctacacaggatgttgctcgtaaaggatctgatattgaggaaggtaaattaattcttaaaaaaggagatttcttaaatcccggtaaaattggagtattgctttcacaaggttttgaaactattgaggtgtataaaaaacctattttgggagtgatatcttctggaaatgaaatttctcttcaaggagaaggattaacctacggtaaaatatatgatgttaacggaggcatgattaaaaacgccgctatttcttgtggtgcagacgctcattttttaggcattatgagggataattatgatgaagttaaacataaaataactgatgctttaaaagaagcggacattataatttgttctggtggaacttctgcaggtcttggagatgttttaaacagcgttttagaagaattgggtgaagtttatattcatggtatttcagttcaaccaggtaaaccaactatcattggagtaattgaagataaattggtcattggtcttccgggaaatcctgtttctgctttaatgatatttaatgcatttattgcagaaccgttaactaaattggctggtattgataaggattttgaacttgacactgttaaaggcaaaatgactagaagaattcattctcctgttggaagaatgcaatatcaacttgttaaagtagatggaaaggatatccatccaatatttaaagattcaggtgcaatattttcactttcaactgctgatggttatgtaaaagttccaaaatctgttgaacttttagatgaaggtgaagaagtagaagtttatttatttaattaa

SEQ ID NO: 7843 - DNA, 306 bp, Methanobrevibacter gottschalkii
  source 1..306: mol_type = genomic DNA
ttgtctaaacctaatcaaaatcaacaacaagaatatagaagagtgagaactcctaaaaaaggtgaaattcctggagtagttgaacaaattatgggacacggaaaattaaaagttcgttgtgctgatggaaatatgagaatgactagaatccctggaaaaatgaaaaaacgtatttggattcgtgaaggagacgtgatccttgtaaagccatgggatttccaatctgatgaaaaagctgatgtaatttggagatacaccaaaaccgaatcaaattggcttgaaagaaaaggctacttaaaaatgtag

SEQ ID NO: 7844 - DNA, 771 bp, Methanobrevibacter gottschalkii
  source 1..771: mol_type = genomic DNA
atggattcgaaaatagctaaagcagatgcaaaacatgaaaaattacattcccagaaaagaaagaaagatagttctgataggaaagtggggaatgaaattttcgataaaataacattagaaacactatataaattagctaaccaaggacatatcgatattttaaatggtgctattagcaccggtaaagaagccaatgtacttacaggcattactgatgatggaaaatttatagcagtcaaagtttatagaattgctacatctgattttaaaaaaatggattattaccttaaaggagatcctagatttaatcttaaaaccaaaaataagagaaaaattatttattcatgggttacaaaagaatttaaaaatttaacccgccttgaatctgcaggagttaaagtacctcacccaattacaagtgcaaataatgtattattaattgaatttattggagatgaaaatggaaatcctgcacaacctgttaagaatcaaccacctaaaaattctgaagaatttttcaagaagttacttataaatctaaaattatttgtaaatgaagcaaaattagtgcatggcgatttgtcaaattataatatattaaataaagatgaagagcctgtaattattgatgtttcacaatctgttgttttagataatccgatttcaagagaacttcttgaaagagacattaacacacttgttcgtgaatatactaaacttggtgttaaaactagttttgaagaaatttgggaatatgtgaatccccggtaa

SEQ ID NO: 7845 - DNA, 249 bp, Methanobrevibacter gottschalkii
  source 1..249: mol_type = genomic DNA
atggaaacaccaccgtgtaaaagcaaaattaacagaataccgaaaccaccttctgcaaaaatatgcgttaaacacagtcaaaaaaaaaaacacatgactggcatgactaaattttacagatcctatgactttgaaatacagaaattgcctatgataaatgaaaatacaatgcaaaaaccacagcagatttattttaaggacttgccggacaaggaaattataaaagaggatgtaattttatttttttaa

SEQ ID NO: 7846 - DNA, 1317 bp, Methanobrevibacter gottschalkii
  source 1..1317: mol_type = genomic DNA
atgggtgaaaaatataaaaaagtgattaatatgaaaaaatatttaccaagatatactgaccaggaactgaaagaatctctagaatacatgggtgctgttctaataactggtccgaagtggtgtggtaagactacaacagcaaaacagcaatgcaaaagcctaaaagaactacaacatcccgttcatggaaaatcttacttaaaacttgcagataccaatcccatagaacttctgaaaggtgaaaagccaatgctgattgacgaatggcagatggcaccagaactgtggggtactgttagatatttggtagatgaatcagatgaagacggactgtatattttaacaggatcgacaatagttgatgaaagtaaaattgtgcactcgggagcaggcagaataaaaaggatagtgatgcgcccaatgagtctgtatgaaagtggtgaatccacaggtgaaatctcattaatcgatttgtttgataatgatgatttaaacattgatggtgtaacttcaaacttaacaatacctgatttgatatttgccgcatgcagagggggatggccagaatcactaaacaaaaaaaccaaaaaacagcaattggcaattgtatcaaattatatcgatataatatgcaatagtgatgtttcagaagtggatggggttaaacgcagtcctcaaagagtaaaaactattctaaaatcctacgctagaaacatatctacacttgcaactaaaaaaacattaatgaaagatataaaaacagaatatgctgatatttcattgcctacattcaattcctatattgatgctcttgaaaggttatatgtaatccaaaacattcctgcatggtcaccaaacatcagatccgcaaacaccatcagaaaatcctacaaaaaagaattcattgacccatcaatagcagtggcaagtcttaacctaacacctgaaaaattattgaaagatttcgaaacattcggattcatatttgaaaatctatgcatacgtgacctgcttgtttactcaagttcagtcaatggtaaagtattatattacaatgacgacagcgggcttgaagcggattgtgtcatatatctaaatgatggcagatatgcattgatagaatttaaattgggcaaccgagaaatcgataatggagcaggaaatttacttaaactaaaagatttgattaaaaaaagtgttgaaaacaaaaagattgatttagaagagccaagttttctagcggtgattactggtggtgaactggcttatacaagagctgatggagtgaaagttattccaataggatgtttgcgataa

SEQ ID NO: 7847 - DNA, 939 bp, Methanobrevibacter gottschalkii
  source 1..939: mol_type = genomic DNA
atgtttaaatttgataaagaacaagaagtttttgacttcgctggagtcaaaatgggtggacaacctggagaataccctactgtattagcaggaactattttctacggtggacacaacattcttaatgatgaattaaccggtgacttcgacaaagataaagctgaaacattagttaacgatatggcatccatttctgatgtaactggaaacccatacatcgtacaagttttcggacaaactgttgaagcacttccaaaatacatcgaatacattggtgaaatttgtgatgctcctttccttatagattccacttccggagatgcaagagttgctggtgcacagtacgctgacgaagttggattaaccgaaagggcaatttataactcaattaacatggcagcagacaaatctgaattagatgctctcgcttcaactgacatttctgcatccattatcttaggattcaacccaatgaatgctaccgttgaaggtaaaatgaacatgtgggaaaatggagacgatggtgcttacgaaaaaggtttgcttgaagtagcagcagattgtggtattgacaaatttatgatggatactgctgtaactcctttaggacaaggtgcaggtattgctgctagaacttcctttgcagaaaaagctaaatggggatatccggttggatctggtattcacaacgttccttctgcatgggactggttaagagactacaaaaaagaaggtaataaaactgcattcacagtttgtgatattggtgcaaacattgtgcaagtaatgtgtggaggagacttcgttctctttggacctattgaaaacgcaaaaattgcattccctgcagtagcacaaactgatatgttcatttccgaagctgcaaagcctttaggaactgaacctgtagattaccatccaatgaacaaattattataa

SEQ ID NO: 7848 - DNA, 621 bp, Methanobrevibacter gottschalkii
  source 1..621: mol_type = genomic DNA
atgccggaaacagattatttaaaaataccacaaaatagaataggggcattaattggaagcaatggaggagttaaaaaatccatcgaaaaagcgactggaactattttagacatagatagtgatgagggcactgtttacatcacccctggtgaaaatatggaggatccattaggagtatggaatgcgaatcatattgtaaaagcagtagctcgtggatttaatcccgaagttgcattaaaattagtaagtgacgattattatttagaagtaattagcttgccattatacatcggaaaatccaaaaaagcccttgcaagacataaaggtagaatcatcggaaaagacgggaaaacacgtgaaataatcatggaaatggctgaagtgaatatggcaatctatggtaaaactgtttcattaattggggaaatggacaatataatggttgctaaagaagctattgaaatgattttaaaaggttctagacacaaatcagtttatggattcttagaacacaaaaaagaagatttaaaaatgaaagaattcaaagatcttgtcggaattgaagatgataaaatagaattcaaggatggaatcgaatttgatgaaaaaacattgcagtaa

SEQ ID NO: 7849 - DNA, 1704 bp, Methanobrevibacter gottschalkii
  source 1..1704: mol_type = genomic DNA
ttgcaagagcaagatgttggaaccgattggagaaatgattttaaaaacttgactccatctgagttctttaggaaaaacaagcaaatgttaggatttactggtaagattcgttcattaaccattgtattccacgaattgattacaaacagtttcgatgcagctgaagaagcaggaattttaccggaaatcgatattgaattaaaaagagttgaaaaagaacattatatactcaaactcaaagataatggtccgggcattcctgaagattatgtaatgagagtgtattgtagtatgtttgcaggatctaaattcagaaacatacaatctagagggcagcaaggattaggttgtagtggttgtgtgttactttcacaaatgaccacaggtaagcctgctcgtgtaatttcatgttataaagaaaatggagacatcaaaggagtgaaaatgaaattccaaatggatgtaaaaaacaaccgtggaattttaatggaaagagaagattatcctgcagaaagcacaggagtatgtatcgaattacaatttaaagaagtttcatattctcttgcagaacaaggtgcatttgaatacatcagaagaaccatgattggaaacccacatgctaaaattacattcagagatccatctggacacaaatacatattcaaaagagcggcagacattgttccaatccttccaaaagaagtattacctcatccaaagggtgtaagcgctgacgacttaatgacaatggcacaaaatacagacagtagaagatataaaagcatgttaacatcatcattatcaagaatgtccaataaaagagtggatgaaatttctgaacttactggaatcgacatgaacaaacgtccaaaagaccttacattccctgaagcagaaactattgtacattgctttaagaaaatgaaattcatggcacctccaacagatggacttatacctattggatctgaacaaatcgaaaaaggtatgaaacaaattcttaaacctgaatttgtaacaacaattaccagaaaacctgtaacatatcaaggcggtgtttcattcattattgaagcaggacttgcatatggcggagactctggaagagtcgtaaaagaacaaagaaaatctgaaattatgagatttgcaaacagagttccattgacttttgatgcaggaagctgtgctattactgaagctcttaaaagtattgattggaaacgttacggccttaaagacttagataatactccattgaccttgtttgtaaatatcatttcaacacaagtaccgtatctttcaactggtaaacaaagtgtatctccagaacctgaaatcgttcacgaaatcagacaatccactatgaaactagcccgtaaacttcaaaaacaccttagagctaaaaaagcagctaaagaaaaagagaaacgttcaaaagtattcgaggattatatgcctgtgattattgaagaagctgcaaaacttggagaaaccggagttccagaatatcaggaagttttagcaaaagttactaaaagggctcttgccgaattacttggtgaaaaagttgaagaagaagaggaagaagaagaacttgacgcaatcatcatggaagaagttgatgaaagaggatatgctgttgatggaaacagtacactagatagcttcgaagaagatgatgttgatgacgaatttgaagattga

SEQ ID NO: 7850 - DNA, 1095 bp, Methanobrevibacter gottschalkii
  source 1..1095: mol_type = genomic DNA
atgactgaaataaaagaaaatcaaaaagcccatagagagaaaaggaaagaatacacctacaataaattaaaaggattaggtcaagaaatcattgaagatattgaaaaacaaaaagttccttcagttaaagttccttctagaggtactggaaacattgtttatgataatgctaaaagatactatgtgttaggggacagatacggaagaagatcattaggtaatgtaaagcagattagaaaactaggtcagatggtttatgttgctaatttctgtaaagatttagttgctcgtgaaaaaacagctacaatcagggaaatgtattatgtttcagaaggttggggaataagttttaaaacacagcaagaatccaacattgttggagaggatttggaagtaacacttggaaccacacgtgaagatttaggtttaatgcccgaagaagatggtgcatcagtatatggagacattacactattagatgatggcgttgaaattaatgctgcaaaagctggaaaatccggttatacaatttcaccaactattgaccaagtagaattcttagactgtggtgttgaaagagttattgcagtagaaaccatgggaatgttccacaggatggttcaggaaaatgctaacaaaagattcaacactttaattgttggacttaaaggacaagctgcacgtgctacaagaagattcattaaaagagttaatgaagaaattggattgcctgtttacatctgtaacgacggagacccttggggattccacattgcacaagtaattatttccggaagtgcaaaattagctcatgttaaccatgacttagcaactcctgacgctaaatttatgggagtaaccgcatccgacatcatcaattatgatttacctactgataaactcaaagatgttgatgtaatgagactcaaagagctttctaaagaccctagatataaaagcgatttctggcaaactgaaatcaaaaaaatgcttaaaattggtaaaaaagcagaacagcaatccttctccaaatatggtcttgagtatgtagtggatacatacttcccgcaaaaacttgaagaattggaaaattaa

SEQ ID NO: 7851 - DNA, 273 bp, Methanobrevibacter gottschalkii
  source 1..273: mol_type = genomic DNA
atgaaacaatgcatggatacagaaaatttacacagaagacttaaaaaaatcatagggcagttaaatgcaattgatcgtatgattgaagaagatattccctgtgaacaaatattaatgcaggtgaatgcatcaaaatcagcactacataaagttggacacattatcgttgaaggacatttagaacattgtgttaaacaagctatggaagaagatgatgtagatgaagctttagtggacatttcatcaattttagaatattactctagactttaa

SEQ ID NO: 7852 - DNA, 1869 bp, Methanobrevibacter gottschalkii
  source 1..1869: mol_type = genomic DNA
atgaatctaaaatttaaaaatgaagaaaaacttgaaatcatatttataatagtatcatcaatcagtttagttttaggatttttattatctattgactatctttcttggatttcaataataatatgtgggattccaatattcaaggaatgtattgaaggattaatcacagaatttgatattaaagcggatttactcgtgtcaatagcaatcattgcatccattattatcggtgaaatatttgctgcaggggaaattgcaacaataatggcaattggaggatttttagaagaatataccgtagcaaaagcacaaaatcaaatcaaagaactcgctaaaatgactcccaaaacagcaacaagaataaaaaatggaacagaagaaaaggtacctattgaagaagttaaaattggagatattttaaaaatacttcccggtgaaagcataccaaatgatggaattataatcaatggagaaacatcaattaatcaagctactcttacaggagaatcaataccggtagataaaacaagaaatgacgaagtatatagtggaactattaacctttacggatcatttacaatgaaaacaacaaaaataagtgaagatagttcccttcaaaaattaattaaacttgttgaatcatcaaaaccagaaaatgccaatattgttagagcagctgataaatgggcaacaatgattgttgtaatagcatttacagccgcaatattaacatatttatttacatttgaaataacaagatcagttacaatactcgtagtattctgtccttgtgcattagttcttgcaactccaacagcactaatggcagcagtaagtaatttaactaaatatggaatcctagtaaaaaatggagaatctttagaagaattagcccatattgatgaagtaatttttgataaaaccggaacattaacttacggcaatccaactgtaataagagttatctccgaaaatccacaagaaatgatgtatcttgcagcatcacttgaatctaaatctgaacatcctctagcaaaagctattgttaaatattataataacaacgatttagcagctgttaatgaattcaaaatacatataggtaaaggaattactggatatataaatggagtgcaaataatagctggaaataaaaaattcttagaatctaaaaatatacctctaggttccaatgaaaatagcagtaatggagaaatagaaatttttgttgcaaaaggaaataaaataataggaaaaatattccttgcagataccatacgcagtaatgctaaagcaacaattaaaaatctaaaaaaattaagaattaaaacaacattgcttacaggagataatgaaaatactgcaaaatcaattgcaaatcaagttagaatacataatattaaatttaattgcttacctgaagataaaatccaatacattaaagacgagcaaataagaaaccatagagttgcaatgattggagatgggataaatgatgctccatcactaagaaaatccaatgttggaatatcaatgggaaatattggaagcgatctttcgattgaatcatcaaatatcactttaatcaaagacaacatagaaaatattcctcatttaattgaggtatcgaaaaaaacaataaaaacgatcaacataagcatcggatttgcattaacactgaatataattgcaatggcactagctattttaggaatattgaatccaattgaaggagcattaatacacaacatcggatcagtgattgtaattatttactcttcaatattggttaactacaaaagttcaaaaatagattatagaacccaacagttcgatgtaaacaaagctttaaatataacaatgttctaa

SEQ ID NO: 7853 - DNA, 204 bp, Methanobrevibacter gottschalkii
  source 1..204: mol_type = genomic DNA
atggctgaaaaagaaattaaagtagtgggtatgcactgttcttcctgtgtaaatgctgttgaattatgtttaaaagatgttgatggaattgatgatgctaaagcagaccttgattctggaattacaaccttaacattatctggcaatgtaagtgatgaagacattaatgaagctgtaaaagaagcaggatttgaagttgaataa

SEQ ID NO: 7854 - DNA, 1017 bp, Methanobrevibacter gottschalkii
  source 1..1017: mol_type = genomic DNA
atgaaaactgttgcaattaatggttatggaaccatcggtaaaagagtggctgatgcggtagctgctcaagatgacatgaaagttattggtgtaagtaaaactagaccaaactatgaagcaagaactgcagttgaagaaaaaggctatcctttatacattggaattccagaaagagaacaaatgtttaaagatgctgaaattgaaatatccggtactgttgaagatatgattcaggaagcagatatagtcgttgactgtactcccggaactatcggaccacagaatcttgaaatgtataaaaaggcaggagttaaagcgatttatcaaggaggagaagaccatgatttaactggtctttcatttaatgccatgtctaattatgatgaatcatatggtgcagattacacaagagtcgtatcctgtaacactactggattaacccgtacattatctacaattgatccaattgcaaatattaaaaaagttagagcagtaatggtaagaagaggatctgacccatctgagattaaaaaaggcccgatcaatgcaattgtaccaaatcctccaaaagtaccttctcaccacggccccgatgtaaaaactgttatgaaagatattgatgtgacaacaatggcattactcgtgcctaccacattaatgcaccagcacaacatcatggtggaaattaataacgaagtggaaactgaagacattgttgaatcattagaaaaacgttctagagtaatggttgtttctgcagaagatggtttaggatctactgcagaactaatggaatacgctaaagaacttggaagaaacagaaatgatttatatgaaatcccagtttggagagaatcaataaatgttgtaggaaatgaattattctatatgcaagcagttcatcaagaatctgatgttgttccagaaaatattgatgctattcgtgcacttttagaaatggaaagtgacaacgaaaaatccattgcaaaaactaacaaagctatgggaatattataa

SEQ ID NO: 7855 - DNA, 834 bp, Methanobrevibacter gottschalkii
  source 1..834: mol_type = genomic DNA
atgaaacaaaaagtgatttttggacctgcaggaagccccgttgattataaaggtgcagcatataaagctccaaaatatatttcagaagaaggtcttgactcttatgaataccaatcaccttatggagtaagaattggagaatcatctgcaagtacattaaaagaagaatctgaaaaacatgatgttttaatttcaatgcatgccccatattatattaatctatgtgcaaaagaagaatcaaaacttgataaaagcattgaccatttaatagctgccgcacgtgcaggtgaatggatgggcgcctatagattagtattccaccctggcgcttatttaaatagaaaacctgaaaaagcaatggaaatatcacgaaataccatcaatagattatttgaagaacttgaatctgaaggaattgaagagtttacatttgcaccagaaacaacaggtaaaagaacacaacttggaaatataagggaagttgttgaattatgtgctagctttgaccattttgaaccaacaatcgattttgcacatattcatgcaagaggcagaggttttttgaacaaaaaagaagattataattgtattttttcaacaattgaaaaccaattaaatattgatatcctacattgtcattttacaaccattgaatacggcaaaggtggggagataaaacatcatacattagatgaaaatgattacgggccaaacatagacgatttactctccaatttaattgataatggctggaatgcaaatatcatatgtgaaactccacttagagatattgattcacttaaaatgaaaaaaaaatatgaagaaatgatttaa

SEQ ID NO: 7856 - DNA, 510 bp, Methanobrevibacter gottschalkii
  source 1..510: mol_type = genomic DNA
atgactattaacgataatcataatcatttttgtatttattgtggggctaaactagatttcggtcaacacttttgcactaaatgtggaaaagaagttgttcatgctgaaccaacttatgagattgtttccagatattatgacttattatatgatattgagcaggaatatgatgctaaacaagaaagggcaaaggaattagtcaataaactcttcgatcctgcccacatgtcttataataaatttttatcttccatcaataaatctaatgggttatttaataatcaattggatgttgcaaaaaggatgattgaagtatatgatggaactaaagattttattgagcatgaaattgacaataaaatcagaacattacaaacatttgttgataagatgaatgatttaattgatgaaatggttattcatttaagttctaataagcaagatacaggggatataaataatctttttgaggatatggatgatttaatagattctgtaaaagattattaa

SEQ ID NO: 7857 - DNA, 1068 bp, Methanobrevibacter gottschalkii
  source 1..1068: mol_type = genomic DNA
atgagttttagaactagaagaatattaatcatgactcctttttatatgatatttcagttctttttactaaaatatttattattgctgtttggtgggcttgatgatggctatctaattattattgcaataatcgttgggttattgcattgtatgccaatgttttttgaatctaaaaaatcaactgttgcagggcgatttctgacaacaattggaggtgtatggatgtggatgtcgctaatgtttttatttgatctcatgtttatttatttaattaagatgtttgtaatattgccttttgagataatagttgatttggttttgattgtgccgtttttaggtatttataatttttataaatctcataaattagttattaatgagaaaatattggaattaaataatttatcaagagatattaatattgttcatttatctgatgttcattttggatctgtacgtcataaaaaaattatcaatttattggtcaataagttaaaagaacttgaagatacatgtgagttagctattatttctggtgatttagcagatggttcttctgctgttggaactgatgatttcttggcatttaaagatgttgatatgccaataattttcactcctggaaatcatgatttctatccaggtattgataatgttataaatgcttgtaaaaacgctggaattattgttttagataatgaaaaaaaggaatttggtgatttaagtatttttggtttaacatttagttttgaagataggtgtgttccaaaaattgatgaaagttggataaatccgaatttaatcaatattataaattatcatgttccttattattgggatgaattttctaagttaggatttgatattcaactttcaggccatacacatggcggacaattttatccagctatttggtttgcaaatatattattcaaatataataagggattatttaaaaataatttaggaaaatatttgcatgttacaactggtgtaggttcaatggatactccaatgagatggggaactgattcagaaattgttattttaaaattgaaaaaagcatag

SEQ ID NO: 7858 - DNA, 1125 bp, Methanobrevibacter gottschalkii
  source 1..1125: mol_type = genomic DNA
ttgaaaaatgataacaaaaaagcagaaattaagacaactaatcaaaaacaaaaattgaaaaaagctgaaagtaaagaatgtgctgaatgtgtcattttaaaacctgttggatatccatttgaatttaatttaatggatgaacatattgaaattaccaacaaaaagctatttgaagaatatgctcgtgaacaatggttaggattagttgtaaaagaaaactcacatttatttgatcaaaagataattcctgattatggttttgaagtcataaaagcaaagcctaataactcaataatctctgaaacaactagaatccaactaattaccagcgatttagaaaataaaaatgacaaacttacatttaaatcaaacatatctatttcggatattgttggacaaacaaatgctaaaaataaagttaaagttataatgaaatatttagaacatcctggaaaatttggaccctgggcacctaaaaacatactgttttacggacttccaggtaccggtaaaaccatgctcgttaaagctcttgctaacgaacttgaagttcctttgtatttaattaaagcaacatcattaattggagatcatgttggtgatggtgcatctaaaatccatgatttattcaaaaaagctagtgaaaattcaccatccataatttttatagatgaaatggatgcagttgctcttcatagatcatttcaatccttaagaggagatgtttcagaaattgtaaactcttttttaactgaaatggatggaataagtgaaaacgaacatgtaataaccattggtgccactaatagccctaatagtttagattatgctattagaagtagatttgaagaagaaattgaatttaaattacctgacgatgaagaaagattaacaattctgaaaaataacttaaaaagcatgccattagattatgaacttgatttggaaaaaattgttaaacttactaaaggattatctggaagagacataaaagaaaaaatattaaaaacagctcttcataatgcaatcgctaatgattccgactcaatcacaatgaaaaatattgattactcaattgaatctagtaaaattaaaaataaagatattaaaggaatgtttgagtaa

SEQ ID NO: 7859 - DNA, 1191 bp, Methanobrevibacter gottschalkii
  source 1..1191: mol_type = genomic DNA
ttgatactaaatttaagagttgatcataagattgcggatattcagtcaatggaggttattgcaaaagacattgatgatttatttgcagagttacaagaaaaatattctattggggaatatatagaaatcagtacatgtaataggaaagaatattatattcataataacaatattcctgaagatgatgagttattgtcacatgaaaatgtgagtattgtaattgattatggtcaatcagctgttatgcatttattacgtttgacttctggtctggaatctatgattattggtgaggatcagattttaggtcaggtgaaggatgcaaaaaacaatgctattaaaaatcaccactgcggtaaagttttagacacaatatttacaaaagctattcatgttggtcaagttgttagaaataaaactagaattaataaaggttctgtttctattggatcagcagcaattgatttggctgaaaaacatataggttctttagtggacaaatcagttttggtaattggggcaggaaaaatgggtaaactggttgctaaagctcttgctgaaaaagatttaaaagctatttttgttgcaaataggacttattatgttgcggttaatcttgctgaagatttgggtggggaagctattttattcaatgatttggaaaaatatttaactactgctgatttggttattagtgcaacaagtgctccacatccagtaattactaaagatcgtcttttaaaatgcggtaggaattatgaaacattaatgatggttgatatcgctaatcctcgcgatatatctgaagatgtttgtgaattaggtgtcaaatcatttaacattgatgatttaagagaaattgctgaaatcaatactaatcttagaaggaaggaatttgttgaagcggaatctatcatcaatgaagaattcattttacttaaagaatcctttaagataatggaatttgataaattacttggtaatttaagggcatctatggaggatataagacaacgtgaaactcaaaaagctaatgttaagttagctgtagatggtagtgtaaaaatattggataatttaacaaattctattgttaataaaatattttatgatatttccaaaaaagttaaaaaagctgctaaagatgaaaatgaggatatacttgcagcttgtgaatatatttttaattaa

SEQ ID NO: 7860 - DNA, 621 bp, Methanobrevibacter gottschalkii
  source 1..621: mol_type = genomic DNA
atggactggacatctctttacttaaaaacatttgattttaatgtttttattttaggtactggcgaagttgcaactaggcgagcaaataaatttttagatcatggggctaatgttaaattagttggagatagtttacctaaggaattgaaatataaaggagctagtttatgctctgttagtgatgttgatgatttaattgattggtctgatttggttgttatagctagtggtgatagggagttatctgattatgttagtggaattgctaaaaataaacttattaatcgtgcagattttccacaagaagggaatgtaattgttccaacaagttttaatattggtgaaattgagatttctatttttacaggaggtaaaagtccattaatggctcgccaacttagaaagaagatacaatcaataatcactgaagaagatattttggaaatcgaacttcaggattatgctcgcaaaaacttaaagaaacttgttgaaaatcaaaaagatagaaaaaagtatctttatgaaatttttgaagatgaaaaagttaatgttttgattaaaaatagaaagattgatgaagctaaattgtatattgataatttaataaggggattaatttga

SEQ ID NO: 7861 - DNA, 483 bp, Methanobrevibacter gottschalkii
  source 1..483: mol_type = genomic DNA
atgacttgggaagatgcaccatctcatatttgtaggggaggagacattagggggcttgctttttgttgtcctccagttaaaccatgcccaattttaaatgcattgcaggaagttaatttaactcctaaggaatatattgaaattaaaactcaatttgctaaagaaaccaggttaggtgagggagcaggaacttgtttcggatcacttgtatggtgttgcaaaccatccaaaccctgcccattaagagacatgactttaaaaaatatgggaatgagtcatgatgaatatttggacttaaaaaaagaattatctgaacggttggtaggtgttaaaaaaccagatcctgatgaaaaagccgaagcattggctgaaacatttaatgttacaaaacttgaagctatgaatattttaaatgaatgtaatgatgatttaagggcggctgtaaaagttttacatgcaagatctcttgagaattctgattaa

SEQ ID NO: 7862 - DNA, 687 bp, Methanobrevibacter gottschalkii
  source 1..687: mol_type = genomic DNA
atgaaagaaaaattaatagtcgaagacataaccatcacattagagagaaaaaatattaaaaatatgtatcttcgagtcctacctccaaaaggtgatgtaaaactatctgtcccattatttttaccaaataatgaagtaattatgtttatcaaatctcgaaaaaattggattttaaaaaaacaagaatttattttaaataataatattcaacctcctttaaaatttattagtggtgaaaaacatcaattatggggcagagaatacacactacaattaattaaaaatgacaacatagaacatgttctaattgatgaagacaccagtattatgtacttgccactacctaaaaaaagtacaataaaggcaagagaggaaatattaattgatttttatagaaaagaacttcagaatgcaatacctcaagtgttagaaaaatgtagtctcattgttggacaaaaaccatccgaagttaaagttaggaaaatgaaaaattggggaaattgtagacaagatagaagaataaccttaaatttaaatttagcaaaaaaagacccaaaatgcctagaatatgtaatgatacatgaattatgtcatttaatagaattcaatcacggtgaaaaatttaaaaaattaatagacaaattctgtccggactggaaaaaaataaaaaaagaattgaatgaataa

SEQ ID NO: 7863 - DNA, 1602 bp, Methanobrevibacter gottschalkii
  source 1..1602: mol_type = genomic DNA
atggattttataacacttaaaaatattactaaaacttttgatggtgttgatgttcttaaaaatataaatttgaaaattaatgaaggggaaaccttaggtattttaggtcgtagtggaagtggaaagtctgttttaattaatatgcttagaggtacatcagactataaacctgatgcaggtcaaatattagttaatgtagcagtttgtcctgattgtttagcagtagattcaccatctcatgttggtgaaaaatgtagttgtggagctactttagaagcgaaagaagtagatttctttaattctgagagaaaattatttgcaagtattaaaagaagaatttccatcatgttacaacgtaactttgcattatatgatgaagaaactgtaattgaaaatgtaatgagggcaatgcccgagggcaaagattatgatgagaaaatctacgaagcattggaattattagaaatggttcaaatgaatcataggattactcatatcgctcgtgatttaagtggaggggaaaaacaaagagtcgtacttgcaaggcaattagctaagtctccaatgatgtttttagctgatgaacctacaggaactttagatcctcaaactgcaattaaacttcataataccttgaaagaaggcgttaaagataaaggaatcaccatgttaatcacttctcattggccagaagtaatgattgaattagcagatagtgtaatctggttggaagagggtcaaatcaaagaggaaggcgaaccggagaaagtggtaaatgaatttgtagctacaatccctattcctgaaaaaccagaaattcctgaatttggagaaccagaagttgttcttgaagatgttaagaagcattattactctattgaacgtggggttgttaaagcagtagatggtgtgagtttaaatatcaataaagaagaaatttttggtattgtgggcttaagtggttctggaaaaaccactacaactagaatgttaatgggattaactgaaccaagcagtggtaatattcaaattaaacttggtgatgaatggattgacatgactaaagttggacctcttaaccgtggtcgtatcatgccttatattggtttattacatcaagaatattctttatatcctcataggactgttcttggtaacttgaccgatgcaatcagtttaaatttacctgcagaatttggtaaaatcaaagctattcatgcattgactactgtaggttttgcagatgatgtcgctgcaagcattcttgataaatatcctgatcaattgagtgtaggtgaaaagcatagggttgctttagctcaggttttaattaaagaacctaatttaattgttttagatgaaccgacaggtactatggatccaattactcgtgtcattgtatcagattcaattctaaaagcacgtactgaattagaacaaacattcattatcatttctcacgatatggattttgttttagatgtctgtgatagggctgctttaatgagaggaggtaaacttttggatattggtactcctgaagaaatagttgataaattgactgctgatgaaaaagaggatatgcttaaagaaaatagataa

SEQ ID NO: 7864 - DNA, 732 bp, Methanobrevibacter gottschalkii
  source 1..732: mol_type = genomic DNA
atgcttaaggtagttgctccaatggcaggtataactaatgctgcttttttaaataaagttattccttatggatttaatgtagctactttgggaggatacagtttagattccccaactattgaagcaagtaaaaaaattattcagcgaggaaggaaagaatttgattttcctttggatgtgatttttaatcatattgaaaatgaagtggatttaattaaaaaatatcataagaatgtaaaagtttcggcgaatgtacgtgcatcaaatcctcaaccgataattcatgttggaaatattaaaaagttggatattgtagaaattaattgtcattgtcgtcaaaaagaaattttagatgttggttgtggacaggaaatgttaaaacgggatgatttaaaaaaattcatctctcaaattgttgataatgttgatagtgaagtttctgttaaaattagggctaatgttgacggtattgatacattagaaatagctaatattattgcagatgccggagcagattatttgcatgttgatgcaatgaaaaaaggtgtttttgaagccgattgggaacttttacgaagtatttgtaatgatgttgatattaatgtcattggaaataattctgtaaattctgagattaatgttagaaaaatgattggcactggtgttgatggtttttcaatagctcgttcagttatttctggaaatttggaatttgatatctctgatttttaa

SEQ ID NO: 7865 - DNA, 780 bp, Methanobrevibacter gottschalkii
  source 1..780: mol_type = genomic DNA
atggaaagaggttattcaatgatacaaatgacattaatacaaattgataattacggtccttggactgttactccaagaccaagaactgaatctgacttacaaattcttcaagcaagattattcgctgatttaaatagttattttggatctaaaaaaggtttagttttctttactcgatttgataacttacttgcaatttcaaatggtatagatgaagaagaccatttaagaattcaaagatctattagaaataaatatcctattactgtaagtatgggtgtgggtgctgctgaaactccacatgaagctcaaaaattagctactattgctcttcagaaagcaggtagtgctcaatctggagaaagaaaagaaattttggctattgatagtttagttgatgaggaaaatagctttgttcaggcagcgcatattgatattaacagtgtcacagaaactttcactgatattgaatctgcttttgatacaagttttagtgttaataaggctcaacattacttaatgactaaattgattaaaaagggatcattgctattctttattggtggggacaattttatggctccatgtaatggattatctgaaaaagagattgaaaatttaatgattgaaattgatgaagagattggtattaaacttaaagccggtattggaagagctaaaaatgctgaagatgctgcatatatggcagatattggattagaagaaattcgtgcacacaataatggaatgtggacttgggttgttgaaaaagaagattga

SEQ ID NO: 7866 - DNA, 906 bp, Methanobrevibacter gottschalkii
  source 1..906: mol_type = genomic DNA
atgattactgttttatctggtggaacaggtactccaaaattattacaaggattaaaagaagttgttgaccctaaagatttgacaattattgttaacacactagaaaatgattatttttctggtgtttatgtctctgcagatattgatactgtattatatactatggcagatataattaatgatgaattttggtatggtgttaaaaatgacacttttatcactcataatcgtcttgaagaacttggatgttctgaactgcttagaattggggacattgatcgtgcaactaaaatacaaaagactcaattgatggaaaaatatggtcttggcaaggcatgtgaaattcaggcaaaaaatatgaatattcaatcaaaaattattccaatgagtgaagaggattctgatattaagattattactgatattggagaattggaattccatgattttttaattaaacatcaatctgaacctgaagtgtcggatcttaaattttctaaagtttctccaactgaaggagtcattgaggcgattgaaaattcggaagcagtaattattggtccgtcaaatccaattacttcaatttcaccaatattgtctttagatggtgtttgtgatgctttaaaagatacttacgttgtagctgtatctccaattgttggttcagactctgtttctggacctgcaaataaattcatgaaggcattaaatattgatgtttcatcttatggtgttgcatcaatatatgaagattttttagatacaattgtaattgatgtacaagataatgataaaaaagatgaaataaatcaaatagttaataaggtgataattacaaatacaattatgaataatttagatgctaaaaaaaatttggctgaaattattattgatagtattccttaa

SEQ ID NO: 7867 - DNA, 765 bp, Methanobrevibacter gottschalkii
  source 1..765: mol_type = genomic DNA
atgagtattgaattatttggtttagagaatattcctattattgacggcaatagtgatatttcaaaaattattaaagaagctattgaaaaacagggctgtaatctttgtcatggagacattatattaattgcagagactttaatttcaaaagctgaagagaattttataaaattagatgaattaactccatcaactcaagctattgaattggctaagaaagctaaaaaagatccaaaattagttgaatctataattcaacaatctaatgaaattgttgctgtcggtccaaagttcatcataactgagactgttcatggttttgtttgtgctaatgcaggtattgatgaatcaaatgtaggtgatggtttagttactctaatgcctaatgatgctgatatttctgctttaaatattcgtaaatatttggaaaatgaatttgatgaagaaattgcagttattataactgatactcaaggaagagcatttaggtttggtgctgttggtactgcaattggatgttctggtatttcgccgatatggaaaagagttggtgaaaaagatttgtatggtagggaattggaaactactgaaattgcaacatgtgatgaattggcttcagcagcatctcttataatgggtcaagctgatgaaggtcttccagttgttgttattcgcggttttgatggttttgataaattaagagatgttgattcaaatatcaaatcagtacttatgccaaaagaatttgatgtatttagaaactaa

SEQ ID NO: 7868 - DNA, 627 bp, Methanobrevibacter gottschalkii
  source 1..627: mol_type = genomic DNA
atgtatacaggtagaattttatcaactggaatgaactgtgaaggtaaaccttttatagcatatagggtatcaagcagatcatttccaaataggcaatgtcttaaatttgaaaatcgtgcagctattgttccaaaagaaggatttgaaaaagatatttttgaaaatccttatattacatacaattgtattcgtattgtagatgatgttgcaattgtatctaatggatctcaaactgatgttatatcagataaaatttctttgggaatgaatttgagagatgcaatggcatattcattacttactatggattatgaaaaagatagttataatactccaagaattgcagcagtcgttacagccagtactgatgaagatggatacggatgttatattgggatagttaatgataataaaattttagttgaacaagttccacatggtaaagcagcattcatttcaacatatggcagtcaagttccagatacagttgatttcgatgcaaaaactgctaatgaatgtgccaaatttatttttgatgaaggtgcttttgcagattacgaaaaaccggtaacttcttctgctgcgatttttgatggggaatgggcaattgatgtctataatccataa

SEQ ID NO: 7869 - DNA, 411 bp, Methanobrevibacter gottschalkii
  source 1..411: mol_type = genomic DNA
atggcaattgatgttggaaagcataaaaagaaaatttcggacagcaaaccaagtatcaatttagttccgtttattgatattttattcacaataatgatttttttagtagtaacaagtaatttttcagctgatgttcaaacggatgattcggatgttacagatggtggaagtggaaaacctaatgttacttctgtttcaggtgattctgaatactatgtaatgcctgtagctaatttacataaagttacagttaatggtgttgataagtcagacacgattctgaatagtgctgttggtgttcaagcaaatgtaattgataatggtaaaattacaattaaacctggcgaaattgatattacaactcctgatggagtttcaccggataaagctgttcagcgtccacaactttaa

SEQ ID NO: 7870 - DNA, 840 bp, Methanobrevibacter gottschalkii
  source 1..840: mol_type = genomic DNA
atgattattgagagtattatgccatttgttgatgggatagtggatatttttactcaagggggatttattacatatataattcttttcattgggatttatggtcttattattggattaagaaagatagcatatcttagaaaaattagtaaagtggacacaactgaaatatttggggttgtaactgcatctatggaaagaggaggggctgtagaggctttaaaacagataaatggttttaaaaatcctatttctagaattatttctgaaactttaaaaattggttataaaaataagactgaagttgaagaaagtatggagcaaatattcattgttgaagttggaaaaatgactaaaggattaagtactattaaaacacttacggaactagcaccatttttaggattaatcggtactgttatcggtatttggttgacttttaaatcattaggtgtccatccggattctgctgcaatggcagaaggtatttatgttgcattgactacaacaatcatgggtcttttagttgcaattgttttattgcctattcatacttatatccaaggtcttattgaagtggaaatggataaaattgaactggctacgaaaatgaccaattggggttatgctgtagttaaagttagagttgattcaaatgttgaatgtgcacttgaagcattacaggaagcggaaggtgttgttaatacaagattgatttctgatccatacgccaatatcaaggtttcttttaaaccaagcatgttggataaaagtatttctaatattatattggaaaaatgtaatgttaatgctgaaattactgaaagtaaactaaaacaatag

SEQ ID NO: 7871 - DNA, 615 bp, Methanobrevibacter gottschalkii
  source 1..615: mol_type = genomic DNA
atggatattttaggaattgatgaagcgggtagagggtctgttttaggtccaatggttattgcaggagttattgttcctgaaaaaatggataaagttcttgaaagaatgggtgttaaagattctaaaagacttactcctaacagacgtactattctatctagaaaattaagaaagatgtttgaatatgaaattgtagtaatttctgctcgtgaaattgatgaattaagggcgaatggtattaatcttaatgaaattgaaaaaaatgctatggaaagcattattttaaaattaaaacctgaaaaaactattgttgatgcagtagatgttaaagctgaacgtttccaagagaatttgtgcaatgacacatgttgcaatgttgttgccgaacataaagctgatgataagtatattgaagttagtgcagcatctattattgctaaagctgaaagggatgcccatattaatgagattaatatggattatgttaattttggaggtattggttcaggttatccttcagatccaactacaaaaaaatttttaactaattatacttatgatgaaatgcctgattttgttagaaaatcatgggctactgttgcaaaaatgaagtaa

SEQ ID NO: 7872 - DNA, 1074 bp, Methanobrevibacter gottschalkii
  source 1..1074: mol_type = genomic DNA
atgaacatttttggaaaagaagaagaagaaccacagattaatgataccaaagtgattagcaatagtttaggaattgatttaggaacattaaacactgtaattgcaaaaccttcaggtgataaatttgacttatatcagataccatctgttgttgctgttaaaaaagatgacccttcagaagttttggctgttggggaggaagctaaaaaaatgctaggaagaactcctgaagatattctcgctgtaagacctttgaaaaaaggagtaattgagaatgttgttcaagctcaggcattattaattaaagcaatgcaaattggtattaatgaaggggaaagtgttggaagaattgttattggtattcctggagatgcttctgaagtagaaaaaaatgctgctgaagaaataggtaggaaagctggggctcaaaatattctagttattagtgaaggattagctgctgctattggtgcaggattacctattgctgaaccaaatggaactatggttgttgatattggtgcaggatcaactgatattgttatcatttctcttggtggtattaatgatattgaaactgttagatgtggtggagatgacattgataacaaaattgttgaacttgtagctgaaaaatatgatgtagctattggtattcatgatgcggaatctgctaaaattgaagtaggtatggttcactgttctgagcaattagaaaatctcagtgttgaaattattggtaaatctttagaaactaataggcctaaaaaagtcatcattgattctatgcttgttgcagaggcagttgaaccttatatgcaacaaataattagtggattaaatattgtcttggaaagattatcccctgagttgatgatgggggtttacaataattctgttgcggttggtggaacttcaagacttcgtggtatgaaggaaagaatttttgatgaaatatctattccaatagaagtttctgatgatcctatgactgttgtagcaaaaggtactgcaattgttgctgctgaacctcttgcattagaacctgaagtacgtcttagagctatgaaataa

SEQ ID NO: 7873 - DNA, 645 bp, Methanobrevibacter gottschalkii
  source 1..645: mol_type = genomic DNA
atgatagaagataatatacgtgttcttagacaagcagcaaaagtttcttccaatagtggctatgaaattgaaaaaaattggtgcgttattgcaggaaatgctgaaataattgataaaatagcttataaagctattgcatctaatcatcgtgttaaaataatatttagggaacatgtaatgttaaatgatggtaaattggataaaaaatttgattttatcatgctttatggcaattctattgttattgatgaatttaaaaaacttgcagatcaatatggtggagcttatgtgaggatattgcataagtatttgattgaagagccgaatctaatggtatttgttgctccggataatgttattaagaaaacggtttctgtaattgaaaaatcaaaaatatcctttgcaattttacaagattcacagactactgcatttattgatgttgacttaagtaatgaagttaaattacccaattttattaaatctgcattgaaaccattttataatgcgaatgaagttgttttatcaacaattttaatttccgtcgataaaaaagaagaaattaaaaaagttcaaagtatagctacatctaacagaattttcgtcattgactttaaagatattgtaacggaggattattcatga

SEQ ID NO: 7874 - DNA, 696 bp, Methanobrevibacter gottschalkii
  source 1..696: mol_type = genomic DNA
atgaaaattgaaaacacaaatatgaaaaggtttattgcattatcagatatcatatctttactaaatatgacatctggatttttatccataatcttttcatttaatcatgaattcaatatagctgcaatccttcttattattgcaatcatgttcgactcagcagatggttgggtagcgcgtaaaataaataggcaagacgaattaggttttgggaaaaatattgattcattatctgatatcgtctcatttggagttgcaccagcaatatttctttacagttgcattaacaccaccccgggcatttttcaaataatagtaacaattgtttgcttattaattgttgtttgtggagttttaagattaacaagatataatgtaattgcaggcaaaataaacactaatgattttattggatttccaattccaggaatgtcattaatgataggttcattttatctaagtggaatattcaatccccatattgcaattttattgagtataatagtttcattacttatgataagtaatataaaatatcctaaattcgataacatggcattaattggaatatcctgcatattaataataatattaattcttccaattgacatgattttatttaatataaatattcccgcaatactattactattcttctgcttatactacctaataatcaatttaattaaaaaatga

SEQ ID NO: 7875 - DNA, 1170 bp, Methanobrevibacter gottschalkii
  source 1..1170: mol_type = genomic DNA
atgaatgataaaaaaccaagagatccattatatccaaaaggttttgaagagacaagaaaattaaaaaatcaactaacaaaagaatactcaaaaccaaataaaaaagaagatgaactaacaccacttaaaaaactaaatcataaacttggagtttatttaagcccaaattctgttgaaatatcaaatgatgaaaaaaagaagaaaataggcataataataactacattaatattaattacattaatttcatcagcatattatttcttaatctatgaacccgctcaagaagaattaacccttgcaaaaacaacaaaactaaatgaattacatgaaatatataatggaccattaacaacctcccagaattccattttattagaaaaccaaattaatgatggaaaaactcccgaagaaattgagcgaataaacatattaacaccagcaacaaaagactggcaatcatttcacaaaaaatcgatttacacaaataaagataaatataatcgaactatggcaatatattcaaatgaaagtaaaaacataattctttcaacaacaaaagccataaaaattgtaaatgagaataatgcagaagttttatcaaaaattaaatttgaagaaccaaatacagtatcagttcccattttaatctcaagacttcaggcaggagcaggccttgtaaatgttggaagcgtggtggacatttacacaaacaacaataatacaaatgaaaattatactccaaataatacaagtccaaatataagtggatgtacagttttagccataatgagatatgaagacaatggagaaattgattccaaatattctaaatcaaatacaataataaagggaaaccataccaatccaaaagaaaatacgaaagaattttcctcagatgttcttgaattaataaaaggatcgataattaatggttatgatgaagaaaaaaccattgaaatacttaaaaattatggaataaaactatcaaattacgaaagacaaataaatttaggtgatttaaatgcacagtatatgcttttaattgaaacaccacaagataaagtggaatatgtaataaataatatggaaaatatcatattaacaatccccacaacaaaagctcctaattggatggtaaatgaaataagttcaacataccaagattaa

SEQ ID NO: 7876 - DNA, 720 bp, Methanobrevibacter gottschalkii
  source 1..720: mol_type = genomic DNA
atgaataaaccaactatttcaactatagtcattattatttgtatattaataattggattatatgcaatgggagaagtgaactacttttcatctaaaatagctgtggaaagaaacatagattcaccaactattctgatacctagcattggagtgaatgaaaaaatcaataatgtatcattaaatcaaggagtattaagtgatcctggagaaaacatccccactaaagattatgtagcattatatgggcatagaactcttcaaggttcaccatttttcagattaaatgaactttcaattggagattcaatactattagaatggccaggagttggagaattaaattacacaataacaaatacaacaattgtgcctggaactgctgatgtacctataggtggaaacgattcattgttcctaataacatgtgatccaattgggtctactgcaaatagaataataattgaaggaacattagaaaaacaaaatcctattaataatgaaattattaaagaaaatccacaagaatcaaatgcaataataataacagctatattctttatagttggatgtatattcagctatttctatccaaaagacaatagaatatatatcttagcagttattttaataatttcggcattattattctattcctgcataaatccaatcccttctgaaataatttacgaaaaaataatatttttaaatggaggattataa

SEQ ID NO: 7877 - DNA, 375 bp, Methanobrevibacter gottschalkii
  source 1..375: mol_type = genomic DNA
atggatgttgataaaaaatatttctcaaacataacaacaagagaacgagcaatttttgaaggtgcaattagtatgggtgcactattccatcaatttgtaggaaccccagtgaataaatataccaaaaatggcttagagaaaagtatggaggattctttaagattacaaccagcaatcgaagatgttaatgttaaaatcagatttgataaacttaaagaatcaatgactgaatttgattatacttctcttaacggtgatatgttagatgttaaaatatatgcaaaagtagataatgttaaagctataattaggatagaattcattgaagaactcaattatcctttaatgtatgtagaaaacataacagaagattaa

SEQ ID NO: 7878 - DNA, 1158 bp, Methanobrevibacter gottschalkii
  source 1..1158: mol_type = genomic DNA
atggatgaaaaatcaatagataaagatgttattttaaaagaattggatgaactccacaatttggatcataattatgcagatggtaggattttaggatctatgtgtactgaagcacatccttttgcaaaagaaatttattataagtttttagatacaaatttgggtgatccgggtctttttaaaggtacaaaattaatagaaaataaagttatagaatctatgggtgaaattttatctattgaaaaaccgtatggtcatgttgtaactggaggtactgaagctaatcttatggcaatacgtgctgctagaaatcatgcaaggaaatataaaggaattgtggatggggagataatcatccctgaatctgctcatttttcatttaaaaaagctgctgatatgttaaatttaaagattgttgaagcagatcttgatgataattataaaattaatgttggatcagttaaacgtttaatttctgataaaacagttgctattgttgctattgcaggcactactgaattaggtttaattgatccaattgaagaaatctcaaaaattgcttatgaaaataatatatattttcatgttgatgcagcttttggaggattttctattccatttttaagagatatgggttatgatttacctgtttttgatttttcattagatggggtttgttctataactattgatcctcataagatgggtttggcaccgattcctgcaggtggtattctttttagaaaagaagaatacttggatgttatggctgtggattctccttatttgactgttaaaactcagtcaacaattgttggaacacgttccggtgctgcttctgcagctacttatgcagttatgaaatattttggaaaaaagggatactctaaattaattaaagaattgatggacaatactcaattcttaaaagaaaatcttgaaaaaattggttatgagattgtttgtgaaccagaattgaatctcattgcttttaatcaccctaatatggaaactaatgaatttgcagaaaaattagaaggatttggttggaaagtttctgttgctaagtgccctgtagctattagggttgtattaatgaatcatattaaattaaatcatttaaaagaattggtggaagatttaaaagaaatattttaa

SEQ ID NO: 7879 - DNA, 2277 bp, Methanobrevibacter gottschalkii
  source 1..2277: mol_type = genomic DNA
atgtatgttaaaaaatttgaggatttaaataaatccgatattccaattgctggaggaaaaggagctaatttgggtgaattaactcaagcaggcattccagtacctccgggttttgttgtaactgcacaaacttatgaaaaattcatggtggaaacaggaattaatgatcaagttttaagtattcttgatgaaattgatatcaatgatactaaggctcttcaagcagctgctgaagaaattaaagctattattaatgaagttcctattccagaagatatgattttaattattactgaagcttacaatcagctttgtcaaagatgtggcgaagaggatgttgaagtagctattagatcttctgctactgcagaagatttaccggaagcttcatttgcaggtcaacaagacacttatttatatgtttctggcactgattcagtattagaatatgtgagaaaatgttgggcttcattatttgaagcaagagctatattttatagggaagagaataactttgaacattcaaaagttttaattgctgtcgttgttcagaaaatggcaaatgctgacaaagcaggtgtaatgtttactgtaaatccctctactggtgaagacatcgctttaattgaaggatcttggggtcttggagaatctgttgtatctggtgatgtgactcctgataattatcaagttgctaaaaaagataatgatattatcaatgttactgtaagtgacaaaaaagtcatgtatgttaatgatgaaaacgaaacaagtgtgaaagttgatgttccagaagacatgagaaatgaaagagtattgtctgatgaggaactcattgaattaacagaaatgggtaaacgagttcaggctcattacggtgagccaatggatactgaatgggcatttgaaaaaggagaattattcttattacaagcaaggccgatcactacattaggggatgttactggagaaagtgttgaaacttcttctgatactggtgaagttttagtaagaggtcttggtgcaagtccgggtatggcttctggtaatgttaaaattattttggacattgatgaattagataaaattaaagatggggacataatggttactacgatgactactccagacatggttccagctatgaaaagatcaagtggaattgtaactgatgaaggtggagtaacatgccatgcatctattatttcccgtgaacttggaattccttgtgttgtaggtactggtgatgctacaactattttaaaagaaaatactggtgtaactattgacggtaaaaaaggattagtatttgatggaatttcagaaattaaagaagaagcagtacaggtaaaagttagtgctgaagcagctccagttataactgtcactgaagtaaaagctaatgtgagtatgcctgaagcagcagcaaaagcagctgcaactggtgcagatggtgttggattgcttagaactgaacacttaatgttgactgctggtattcaccctggaaaattcatcgctgatgggagggaagatgaattgattgatactattgctgagaatgttatgatagtggcagatgaattctatccaaaacctgtatggtatagaacattagatgcacctactgatgaatttatcacattggaaggtggagaaaatgaacctgaagaacacaatccaatgctcggttggagaggaatcagaagagaattggatcagcctgaaattcttaaatgtgaattcaaggctattaaaaaattacatgaaaaaggatacactaacattggaatcatgattccattatcacagagtcctgaagaacttaaacaagctaaatcactttgttctgaaattggtttagaacctcataaagatgttgattttggtatgatggttgaaattccagctgcagcattaactattgaagattatattgatgtaggaattgactttgtaagtttaggaaccaatgatttaactcaatatactcttgctgttgacaggaacaatgaatatgttgcaaagcattattctgaagaacatcctgcagtaatgaaattgattgagatgacaatcaaaaaatgtgttgaagcaggtgttaaatgcagtatttgtggccaagcgggtagtgtaccgcgtattgttgaaaaacttgttgaatttggtatcacaagtgtatcttcaaatactgatgcaatagctgaagtcagaaaaactgttgctagggcggaacaaaaaattattcttgatgctgcccgtaaacgtttagaataa

SEQ ID NO: 7880 - DNA, 483 bp, Methanobrevibacter gottschalkii
  source 1..483: mol_type = genomic DNA
atggttcgtgcttatacaagaagagattatattagaaaaaccccaaattcaagaattgtacaatatgatatgggtaatttaaaagacgaattcccagtatctgtaagtttagttgttaaaaaaccagcccatattagacacaactctttagaagctgcaaggattgcttctaacagattaatgcaaagggctgcaggtaggttgggctaccacttaaaattaagagtttatcctcaccaaatcgtaagggaaaacccaatggcaactggtgcaggtgcggatagggtacaaagcggtatgagaaatgctttcggtaaacctatcagtgttgaagctattgttaaaaaaggtcaaagaattgttactattgattgtaatgagaaaaactttgaacaagctaaagttgcattaaaaagagcaggcatgaaattgccagttccatgcagaatcgttgttgataaaggtgcagatttagttaaatag

SEQ ID NO: 7881 - DNA, 228 bp, Methanobrevibacter gottschalkii
  source 1..228: mol_type = genomic DNA
atgaatgttaaaggaaaaatatacttagattacaataataaagaatctgcagaattaatatttaattcattggaaatagataataaaaattatttaaaatcaaaattaaaagaagataaaataatttatgagattaatagtgaaacattaggtagctttttagcaacagcagatgatttaattgcatctgagattgttattgaaaaaatattagatgcaacacaataa

SEQ ID NO: 7882 - DNA, 1137 bp, Methanobrevibacter gottschalkii
  source 1..1137: mol_type = genomic DNA
atggaatgttattatcatcctgaaaaagaaagtacagctaattgtgcaatatgtggaaaatctgtttgtggagaatgtagtttagaaattgcaggtaaagtttactgtaaagaatgtttagagaaaattgtaggtcttggaattcaaaataatattccggaagaaaataaatctgatgaacaaaacccaatcgtaacagaatcacctgaagttaatgctcaaagtgtagatgataatatataccaaccacaagaggaaacagattttgagataccatatactcctcaagaggaagttccttcaaaggaatttaaaggaataagtgatgattcaccatacaatataaaagaaaatatcgaatatactggaggacttgaatcatcttacacaatagattccgatatttatcaaaaacctcaagtagaacaacaaccacaagttgctcaaaatgaattagacataaaacaaccaacattgaattcaatgaacaaggatgattttatatatcctgatcatgattatgaaccaccaacaactagtgccagacaagaattagaagataaatatgaaaaatatcttgatgatttgtacttcgatgaaaatgaagttccattaggcgaacaattagcaaaagatgaagcccaatacggatcattaactagaaaagaatatgcttctaaacctaaaaacattgttgaaccacaaataccaactcaaaaagatgaaccaataatagaaacccccgaagaaatggaagcaagaattagagctgaaattttaaaagaacaaggattaatgacagatacacaaagcattgattcaactcttaaagaagaattagaatccagtaaaggtaaaaaactctttggtttaagaaggaacaaaaataatgaagaggaattaataactgcaagtgaagataaaaacatccataatttaaattataaagacgaaaaagaaccaatgggtgttgtcgacatattattaacaataattttagttattgtaatattaattgtaatatactacatcgtttacttattcttattaagttcaacttatccaacatttatggatgcagtatttgcgattagaaatccgcaaaatgtaattaatagtattttaacacaattataa

SEQ ID NO: 7883 - DNA, 1083 bp, Methanobrevibacter gottschalkii
  source 1..1083: mol_type = genomic DNA
atgtcccaagttttagatattctcaaaagagataaggaattatttttcagtgatgttgagatggaatgtaataattcagatacttcttcagatatgaatttgatagcagatttcactgaatataatcctttacataatggtcattttcattgtatgaaaactgcaaaacatatgtttcctgattcattatttgttgctattgtacctggactatttgaaagaagtggtagaggtattccatatatattaccaagagaaattagggcagagatcgcaatttcagttggagcggatattgttgttgaaggtccaccaatgggtattatggggtctggtcagtattcattatgtctttgtaagatgtttaaatcattaaacacagattatattccaagaggatacaaaccaaaagaaggttttgatgaaattttaaaaaggataaatttaggacatcatatagctccaaaaccttataaaattgtagacaaaacggctcatgagactattttaaatgataaacttgaagaggataattatgttataacatcattttcaaattctttaagtaaaataggatttgattatacaaataaatttatttttgttaaaagaattgaaggtgtaagcggaactttaattcgtgaaagtattcaaaaagataattttgataatgttttaaatatgatgccttcagaaactattgaagttttaaaaagagaaatcaaaaataattcaataatttatggaattcgtgatgttgaatcaatcttggatactgccaatacatttaattttgaagaattatctgcattaaacttatttaatgaaaaactggctaaaaatattgttaataataaaccttatgagaatttggatgaattggaaaaagtgattttacatggattttcatctcattttcaccaaagagttttaagtattttagaaaatcccattcctaaaaaaattatttctaaatatattgaaaaatatccatcaaatattagggttttaggttatagaaataaagaaattctggaaaaattcataaaaaaagtaaataatgaaaatatttcattattataa

SEQ ID NO: 7884 - DNA, 1257 bp, Methanobrevibacter gottschalkii
  source 1..1257: mol_type = genomic DNA
atggatttagtaattaaaaattgtaaactagttaataaaattggagagtattcaattaaagtagaaaatggtaaaataacaaaaatatcaaaaacaccactaaaagcagataaagtaattgatattaaaagcaactatataatgcctggttttattgacccccatatccattttagagatcccggattaactcaaaaagaagactttaaaacaggaagcaaaagtgctgcaaatggaggatttacaactgtgattgatatgccaaacaccatccctaaaacaaacacctatgaagcacttaaagaaaaaattgaaattgcaaaaaagaaatccgttgttaattttgagcttcaagcaggacctaataatcttgaagaaatgaaaaagatgataaaattgaatcctatttctttcaagatatttatggatttagaaaacgatgaaagtttagaagagatatttaaaaatttatcaatattaaaagaaaatacaaaatataatggtcttgttgcagtacattgtgaaaaaaaatccattgttgaaaatgaaactgcaaaattaaaagaaaagaaagaaaatattcctattgattatacttatgctagacctacaacaagtgaagacgcatctgtaatacaatctattgaacttgcaaaaaaaaatgatttaaaattacacatatgccatttaagttcagctaaatcattgcatatagcaaaaaatgcaagtaaaaatatggatgtaacatgggaattcacaccacatcatttattattagataacaccgcctacaatacatatggaacattcataaaaacaaatcctccattaagaccaaaaaatgaaagcgtaaggatagaggatttagatgaaacttcaataataggaactgatcatgcaccacataaaatcgaagataaaacaaaaggagtttggaattcatcaccaggaataccaaatttagaaactgttgtaccattaatattaactgaagtaaataaaggaaatattaagttagatataattccaaaaatattttctaaaaatgctgcaatggcctatggacttaaaaataaaggggaaatagctattggaaaagatgctgattttacagtaattgatttgagacaagaaggtaaattcaatatagatgaattcaaaacaaaagcaacatattctccatttgacggttggaattatattggaaaaccagtaatgacaatagtaaacggaaacccagtaatggataaattataa

SEQ ID NO: 7885 - DNA, 1236 bp, Methanobrevibacter gottschalkii
  source 1..1236: mol_type = genomic DNA
atgattgtatttaatgatgatggctgtattaaatgtggggcatgtcaaggtacttgccctacttcagctattgaagtaacacctaatgctattgtacattgtgacacttgtggtgaagaaccaaaatgtgctgatgtttgtcctaatggtgcattaaaagtagaagaatatgaaattgctgaaggtatttcccaagcaagattagtgtttaactctattttatgtgaccaatgtggtaaatgtgaagaagtttgtccacaagaaactattaaagtcactggtacaaaattaaaagaagttgaaggtttctgtgtaatgtgccaaaaatgtgttgacatttgtccagttgatgtaattggtgttcctggtgttaaagaacctgcagaatatgacttagatctcaaaggaaaaggtccagtatacattaaagattgtgttggatgtggaacctgtgttgatccatgtcctgtaggagctatcactcttgatgaagtaggaagtccagttactgtaaatgatgattgtattagatgtggattatgttcccaaacttgtccatggaatgcaatattcattgctgagaaaaaacctatcaaacgtacaaaagaaattaaatcatttactttcgattcagctaaatgtattggatgtaatacttgtgtagaagcatgtcctggtgatttcattgctgctaacagttctagtttaactgttgctattcctagtgtatgtgcagcatgtagtttatgtgtaaacctttgtcctgttaatgcattagaaattgatgttgaatggggtgaaggttcacctgtggatgcggaaggtattggaagagatgtagaaaaatgtgactttattggagcatgtgctaacaaatgtcctactgaagctattcgtgtagttaccaaaactggtatgtcctgtccagctttagtagaaactgatgctgaaccatctttcactagttgtattagatgtggagcttgtgcttctgtatgttctaatgatgcattaaaagttgaacaatacgaagtaaccattaatggtgaagctgttgctagggatagaattgcattcaacccatctaaatgtaatcaatgtggtgactgtatcgaagcatgtccttatgatatgattcacaaaacagaaaatcctaaattaccaattgcaggattctgtactttatgtggtcaatgtcttgaagcatgtcctgaagatgcattatgctacaaatag

SEQ ID NO: 7886 - DNA, 1428 bp, Methanobrevibacter gottschalkii
  source 1..1428: mol_type = genomic DNA
atggttaaacttactatggaacctgttactcgtatcgaaggacacgctaaaattaccgtgcatcttgatgatgctggaaacgttgaagaaacaagattacatgttatggaattcagaggattcgaaaaattcttacaaggtcgtcctgtagaagaattagcaagaatcgtaccaagaatctgtggtatttgtgatgtacaacaccacttagcagcagctaaagcagttgaccaaatttttggatttgatgattatgacattttacctgctgcatacagaatgagagaaattatgaactggggttcatacatgcactcccatgctcttcatttctacttcttagctgcaccagatttaattattcctaacggaaccagaaaaactagaaatgttttccaagttattaaagacatgcctgaagttgcacttcaagctattaatatcagaagaaacggtttagaaatggttagaaaaataggtggtcgtccaattcaccctacttcttctactcctggtggtatttctaccgaattagatgatgaaactcaaaaagatttactcaacagagctaaacaaaatgttgaattagcacaagctactttagatttagctattcctgtatttgaagaaaatattgacttaatttcttcattaggtaattttggagatactagacactgtggtcttgtaaaacctgatggaacttgggatgtatacaatggtaatgtaaaaatcaaagataaagatggaagtgatctcttagaatacagaaatgaagagtacactgacattgttgctgagcatgtaaaaccttactcctggttaaaattcccatacattaaagaattaggttatccagaaggtatttacagagttgcaccattatcaagaattaatgtttgtgatgacatgcctaaagaagcacctcttgcaagagatgctcttaaagacttccgttcagctttcggatatgcacaagcaccattattattcaactatgctagactcattgaattattagcatctgctgaatgtgctgctgctgcattagaggaagatttatctggtcaaaaattcccagaagaattagaaagaactgaaggtaaaggtgtaggtattgtagaagctcctcgtggtactttaatccaccattacgaatctgatgaaaatggattaaccactaaagctaacattgttgttgctacaatccaaaacaaccctgctatggaaatgggtattcaccaagttgctaaagattacatcaaacctggtgttgaagtagatgacaaaatcttcaacttgatggaaatggttatcagagcttacgacccatgtttatcttgtgctactcactcaatggatagtcaaatgagattagctgaagtagatattgtagacagtgaaggaaacctcattaaaaaattctaa

SEQ ID NO: 7887 - DNA, 927 bp, Methanobrevibacter gottschalkii
  source 1..927: mol_type = genomic DNA
atggcagataaagtaaaaataggaactatgtggtttggcggatgttccggttgccacttatccattgcagatttccacgaatctttaattgatgttatggaattcgctgacttcgaattctctcctgtactcatggatactaaatatgatgaagtaccagaattggacattattattgtcgaaggtggaatcagaaatgatgaaaacagagaattatcagaaatgttaaatgaaaaatcaaacatggttattgcttatggaacttgttcttgctacggtggtattccaggtcttggaaacttatggactgttgaagaattagaagaagaagcatacattaattctgtatctactgtaaaccctgaaggaattattcctcatgaagatgtacctcatctcgaaagcagagtaagacctattggtgaaactatggatattgatttaatgattccaggttgtccacctcgttcagatgttgtagctgaagctattctaacattattaaaaggggaaacaattgaactaccatctactaacctttgtgaagtatgtcctagagaaaaaccacctgctggtttagctatggacttcattaaaagacaatttgaattaggtgctcctgaacctgatttatgtttaattagtcaaggattagtatgtatgggtcctgcaacagtatctttatgtggagcagaatgtcctgcaattggtatccaatgtagaggatgttatggtcctactgcaaaagtattggatcaaggagcaaaaatgatcagtgcaattgcatctgattatggtgtacaagaagataaaactgttgatcctgaaactgttgctgaccaattagatgatattgtaggtactttctacacttatacattacctgcagcattagttccaatgaaaatgcagaaaggaggagaataa

SEQ ID NO: 7888 - DNA, 426 bp, Methanobrevibacter gottschalkii
  source 1..426: mol_type = genomic DNA
atggctgatgatgtaaaaattgtaatgttttgttgcaactggtgttcctatggaggagcagacacagcaggtactgcacgtatgcaatacccaccgaatatcagagttattcgtgtaatgtgttctggaagaattgacccacaatttattttaaaagcatttaaagaaggtgctgatggtgtatttgtagctggatgtcacatgggtgactgccactatgatgctggtaactataaattagatcgtagaatgagattagtttataaattagtcgaagatatgggaattggaaaagaaagacttcaccacgattggatttccgcatctgaaggtgaaaaattctctgaagctgttaaaatgatggttagcagaatcaaaggattaggtccagctccattgaaaaaacaattaaatgctgaaggataa

SEQ ID NO: 7889 - DNA, 1236 bp, Methanobrevibacter gottschalkii
  source 1..1236: mol_type = genomic DNA
gtgcgcaatgtttatgaagatgctgaaagggcaaaagataaaaaagcagcaattggtgctgatatcactattgaaaattttactgatgaaacaatcaatgcaattgatatgattgatgatttagatgatttaagtaaacagactaaaaaagatttattaaaagttggtgttgacactaatgaagaaaatagggcgggttcatttttacaagttgatcaaagtaatatttttaccaacaattccatttcagattcaattgaagtaatgaatatgggtatagcattggaaaaatattcctggttagaagattatatgtggaatgttgttaagccagatgctgataaatacactgctaaaactgcattaagagaaaaagaagaaggtgttacaagcggttattttgttagatctcttccaagcactaaagaagtaatgcctgttcaagcttgcatgtttattagtgatgcagatattatgcaaactgctcataatgtaataattgccgaagaaaactctgaattacatttaatcaccggttgtgctactggtgatgacatttcatctgcaatgcatgttggtgtttctgaaatgtatttaaaaccaggttcaaaaattacttttacaatggttcacaattgggcagaagaagtagaagtacgtccaagaactggtattaaattagaggataattcaacttacattaataattatattttaacaagtcctgttagcactattcaatctttccctactgcatactgtgatggtaaaaattctcgtgctattttccaaagtattcaaggtggtaaaaaagattccatcattgatgtaggatctagagcattattaaatgctgaaggtgctaaagcagaagttatttcaagagcagttgctcaagatgaatctaaaatatatgctagaggacatttagcaggtattgttcctaatgttaaaggacacttagaatgtcatggtttagttttatcagatgacagttttatttatgcagttcctgaacttgaagctagttccaccaatttggaaatgtctcatgaagctgctgtgggtaaaatttctgaagatgaaattaattatttaacatctcgtggaatacctgaagaggaagccgaatccatgattgttagaggatttttaaacatggacatcactggccttcctgatgaattagcacaacaaactcaaaacatgattgacatgagtcttgatggaatgtaa

SEQ ID NO: 7890 - DNA, 756 bp, Methanobrevibacter gottschalkii
  source 1..756: mol_type = genomic DNA
atgttacttgaaatagaaaatttggctgttgaagtagccggaaaaagagttttaaaaggtgttaacctttcaattgctgaaggcgaaactcatgttcttttaggaccgaatggtgctggtaaaagtacattattcttaactattttaggttttccacaatatgatgttgtagaaggatctattaaatttaaaggtcaagatataactaacttaactactgctgaaagagttcaattaggcattggtgtgagttttcaaactcctcctgcaattaggggaatttctgttggagatttattaaagattatatctaatcaagatgttagagaagaattaaacccaagaatgaaagaattagctaatcagcttaaatttagtgatgaatttttagatcgtgatgttaatttaggattttcaggcggtgaagtaaaacgttctgaaatattacaattacttgctcaaatgcctgatttcaccatgtttgatgaacctgattctggtgtggatattgaaaatgtagagttattagcttctgaaattggaactttattagataaggataaaccacaacgtattagacaaagaagtggtcttttaattactcatttaggttatattttaaactttgttagtgcagataaagcgcatgttttaattgatggagtaatttcctgttctggaaaccctaatgaaattctcgaagatattagaaaaagcggttttaacggatgtgttgagtgtgcgcaatgtttatga

SEQ ID NO: 7891 - DNA, 267 bp, Methanobrevibacter gottschalkii
  source 1..267: mol_type = genomic DNA
atggaaaataaacaaattcctagaagagaagagaaattatggagcgaaattaaaaactatcaagtagctaccaacaatgcacgtattcttggtgttcttgatgaattaattattaatgaaaaaactggtaaaatcgtggatattgctattagagttgaaagtgatcgtaatattcatgttaaaggtgctaaaagaaacggtgatttgttattagttcctttcgctaaagttgaaaaagttggcgaatttatcattgtaactgaataa

SEQ ID NO: 7892 - DNA, 609 bp, Methanobrevibacter gottschalkii
  source 1..609: mol_type = genomic DNA
atgatttatgcaattttgatggctggaggtaaaggaactagacttgagactccatgtgaaaagccactttttagattacatgataagcctttaataaaatatgtgcttgataatttaaaggaatccaaattaattgataagattgtcatagctgttagtccccattcttgtgaaactactaaatatttaaaatcattaaatgacgattttgaaattttagatacttcaggtaaagattatctggttgatttatcatatattttagattactttgagcaaagatctaaagaagatattttactttttattaatgcagatttaccatttatttctgctgaaacagtggatattgttttggagtattatttaaaatcagataaagatgcactttctgttttggtgccagtagaaatttttaatgatttggggttggattattcttatgaatttgatggtaatgttccctcaggattaaatgttttgaaaagtatgaatataattcaggatgaaaatcaaattgttattccaaaagtggaattggcattaaatattaatactcttttggatagtaaagttgcagaagaattatacaaagaatattatatttaa

SEQ ID NO: 7893 - DNA, 1470 bp, Methanobrevibacter gottschalkii
  source 1..1470: mol_type = genomic DNA
atgtcttttttaagtaaaatttttaacaaaggtcctaaacctgttattgctaaatcccgagaaggcaatttagctacattaactgctcaaaaagcaggtcctgcaagtccaggtgttgttaaaaaacctgacactttttatgtaactgcttctgttgaattgggtaacactaccactaagtgtattgtcatggcaacaaatttgaacactagtgagtcttatttacttaataaaactgttaaaatgacaagggatattagacaacctaaacctggtgaaaaagtatttggtaaaactgtttggggtattgaactttccaaagaagctgtaacagagttggttaaagatactgtattggaatctttaagaaaatgcaatgttgataaagataaggatttggattttgttgtaagatcaactggagtaacagctggttttgcaactgctgaggaagctggtcaacttattattgcacttgcagacggatgtcttgaagcagacattcctccgcgtaaaatgtcccctgctatgagtatttctcaacttcctgaaagattacaaaagcattcccttttagagaatatcatgtttgatggggcagttgtaagtgtagttcctcctgaaggaaaagaaactgttgcaaatgagatggagggagaacttgttactgcaggtattaagttaggtgctaaatggactgatgtggattataggaatccttgtgtttcccttgatttcggttctacgttagcaggtcgtattgtaaatgatcatgaaccatatgctaatactatcggaaactttttaggtttagcaggggttgttagtgattcattagctaagggctctggtttaattgataaaaaaaatggtgctgcacttgatttatattctgataaagcaatgaaaaaagctaatcataaaaaagcccaagtcaatgccttagaagcacataaattaattaatatccgtaaagttccaatggatgttgaacggttcggaactgttccattaaatcctgaagctgctgaaaaagcaggaactactttaataggttgtgatgttggttttaatggtgataagttagatgaattaatggaattgggtgcgcaattctatgattctgatggtcttccaacattactatctactttggattatgtaagtactaatattgttacaagattattggatgttgcatttgaagaagatgtaattgttccaggttcttctttaggaattacaggaagggcagggattactggtcgcaaacctcagcttattttggaatctgtccaagataaatttgagaatgttgtatttgttgaagatggtcttgctttgggttctgcaattatggctcgttgtatgaattctatgggcactccaaaagttcctattggtggaaaacagggtggtagatgtattcttaaagaccgtatgaaaatgaatggtggcaaattcgcttaa

SEQ ID NO: 7894 - DNA, 933 bp, Methanobrevibacter gottschalkii
  source 1..933: mol_type = genomic DNA
atgtttagatttgataaagaacaactcgtagttgatgttgctggtatgaaaatggggggtcaacctggtgaataccctactgtgttagcaggaactatcttctatggtggacacaatattattagtgatgaaaaagctggggtcttcgataaagatgcagctgaagaaagaattaaaacaatggaagaaatgtctgatgtaactggaaacccttgtgttgtacaaactttcggtgctactgcagaagctatggtaaaatacttagaatttgtaggagacgtctgtgacaaacctttccttatagactcaactgcagctgcagcgaaaattgcaggtgtagaatacgtacaagaagtcggattaactgaaagagctgtttacaactctttaagtatggctgctgaacctgcagaaattgaagcagttaaaaactctgacatcgatgcatccattctcttaggtttcaacccaatgaatcctggtgttgcaggtaaaattgaaatctgggaaactggtggagatgttatcgacaaaggtattctcgaaatggctgaagaatgtggaattactaaaccattcatggatgtagcagtaactcctttaggtcaaggtgctggacctgctgtaagaacttctttcgcagttaaatccaaatggggttacccagtaggatcaggtatccataacgttccatctgcatgggattggttaagaggatacaaaaaagaacacaaagaagcatggcctgtttgtgatatcggttctaacatcgttcaacaaatggctggtggagacttcgtactcttcggacctatcgaaaatgcaagacttgcattccctgcttgtggtatggcagatattatgattgcagaagctgctaaagatattggtactgaaccagtggaagaccacccaattaacaaattattataa

SEQ ID NO: 7895 - DNA, 240 bp, Methanobrevibacter gottschalkii
  source 1..240: mol_type = genomic DNA
atgagtgaagaaaattcaatacctcaagtaatggtttcctcagatgaatttaacgatgttgtagctaaattagatgcagcagaagaaaaagttgatttcactgttggagaatattatcaacgtttaggccaacaaactggtagagatgttggtatattatatggtattatacttggattaatgattttaattgtagctattaaattcggtgtagcttcaatgttatctaccttattatag

SEQ ID NO: 7896 - DNA, 207 bp, Methanobrevibacter gottschalkii
  source 1..207: mol_type = genomic DNA
atggtacaaatttctaataaaccaaatataggtggaatgaaaactgcagcagatgatgctgaatacagttcaaaactccttgcaagagaaggtaaattattcgctggtttactcgcaaccagatttaaaggatttgctattggtatttgtattgcaactcttttaatcgtaattattcctttcattgcaaaagcagcaggattatag

SEQ ID NO: 7897 - DNA, 717 bp, Methanobrevibacter gottschalkii
  source 1..717: mol_type = genomic DNA
atggctgataaaaaagctcctgcagatggctggccggttattagtggggattacatagtaggtgatcctgaaagccctgttgcagtaacaactttagcttctcatattgaagctgaactttctggagcagctattgcaggtccatgtaaaacagaaaacttaggaattgaaaaagttgttgcaaatattatttctaaccctaatattcgtttcttaatattagctggtgctgaagtacaaggtcacatcactggtcaaagttttaaagctttacacgaaaatggtgctgatcctgacaaaaagaaaattgttggagcaactggagctattcctttcgtagaaaatgttccacttgaaggtgttgaaagattccaacaacaattagaaattgttgatttaatcgacactgaagatataggagcaattcaatcaaaaattaatgaatgtgtagaaaaagatccaggtgcttttgaagaagaagctatggttatttctgtagaaggcgacgacgctgatgaagaagaaggagaagcaattagggttgtttctgctgaaactggtctcatcgaagcaagaattagggatattaacactaaaatcgatatggtcggtgctgttcaaagaaatatggctggtaattatgctggtaaagttcaaggtataatgatcggattagctttcactttaatcattggagttttattcttgttattctaa

SEQ ID NO: 7898 - DNA, 330 bp, Methanobrevibacter gottschalkii
  source 1..330: mol_type = genomic DNA
atggctcaaatgttacctatggtacaagttgtacctgaaatgaatttcgcatatgaccctgtctctggggttatcggatcatctttaggttcaggagttgttctcctatctatggatgaagtaaacgaacaagtagcaaaagtagaattggctgctgatgaattaatggcttctttagacccatacacaagtcctgttggatcttatcctggaagggaaggttcctatgttactgcaggattattaactaacattgtatatggtttcttattagcatcattcattatatttgctgcattaccaatcttacaagcaatgggggttttatag

SEQ ID NO: 7899 - DNA, 816 bp, Methanobrevibacter gottschalkii
  source 1..816: mol_type = genomic DNA
atgtctgctggtggaagtgcagatggtgcagctgcaggtgcagttgactcaatgcatttattagttttaggtatagttggtggattactcggtatttacttaactgctttcttaggagaaactatcggatcattattcgcaggtcttggtgctgtatgtgctattgtctggggtgctgatgctatccgtagagtagcaagttacggtttaggtactggtgtaccatctattggatatatgtctttatctgttggtgttatttctgcttttgcaggtatcagtttagctgctatcttaaaaatgccaatggtaggacctatcgcagctttattagttgctgtaattattggtgcggttattgctcttgttgcaactaaaattgtaggtatgaaaatccctattatgcttcaatgtaccatcgaaatcgctggtgctgctgcattatctatcttaggattctctgctgcaattgctggtagtttcgatatggctgcagtttatgaaaatgttgttgcaactggatttattgctgtattatttattttatgtactatggctatccaacacccattcaatgcatgtttaggacctaacgaagatcaattaagaacactcaaatgtgcagcatctactgcatttttatccatgactattgttggtctcatgtccatcactactggtggattaggttggtttattgtattcatcgttggtttaattggttggattatctcattcaaagcatttgttgttgcttctatgaatgatgctgcatcaaccaaatgggctggattatggcctaaagttgagaactag

SEQ ID NO: 7900 - DNA, 702 bp, Methanobrevibacter gottschalkii
  source 1..702: mol_type = genomic DNA
atggatccaattagtttaattttattcatcgcaataggcggtattatgattggtgcaggtgtgcactttattcctgtaggaggagctcctgcagctatggctacagctactggtgtaggtactggtactgctatgttagctgctggtgctggtttaacaggtcttattactgctgcaactatgacaggtgaaccattttatataatcggtatcggtggtgcaataggtgctatgattatgatgggtattactatgctcattgctaacataatttatatatttggtgtaggtattgttcctgcagcatctaaggtacctgttgactggattacaaaacgtaaccaagaagcttacaaaactcctggtactgaaggtcacggtgtaccagttacttcctttgtaagtggtcttatcggaggtcttcttggtggttttggtggtggattagtatactatggtattgacactgctattaaccaaagtagttttgtatctgaccctgctgtaagtattggtttagctgctattattggtgtaggtgtattctttattaactctgtaattgcttcttacaatatcggaggtactattgaaggtatgcacgatccaaaattcaaaagaattggaactggagctattgcatgtgcaattgcatctattgttgtagcaatcttttgtattattttaactggaggtatctaa

SEQ ID NO: 7901 - DNA, 879 bp, Methanobrevibacter gottschalkii
  source 1..879: mol_type = genomic DNA
atggaccctgtaacattaggtgttgttgcattaatgggtgcagttgctactatcggaggggctgctgaggatttggaatctgatattggttctcaaagtaaccctaactctcaagttcaacttgctccacaaatgggacatttacaccgtatgataaacaaggcggcttctggtgaaccagtcgcttatggtgtttggtgtggtgttgctggtgctattgcatatattgtaatgtctttaggtatgttacctatcgttgctatcgcaatgggtgcttgtgtcgctgcttttgttcacgctatttatactgttacatcccacatgggaaggattgttggacaatctcaatttgaacaaccattgtttatggatgtattaactcaatctttaggacctatcgttggtcacggatttataactagtttttgtattgttggaatttcatacttaatgactattccaattaatggtactgcattacatgtattcccattaccactcttagcaatgctttggggtattgctcttggtgctatcggttcttctactggggatgttcactatggtgcagaaagtgaatatcaaaaattcgaatttggtggaggtactcctgtagctattcaaggagatattgttactaaagctcctatgggtgctaaaaactctatggatgtagtaaacttctgtgctaaattcggtggaccattaactggtttctgtttcggtctcgttgtattctttagtttctggaatacagtagtatttggagtatatggtggtattattgtaggtattatcattgttatcctattagttattatggataattatttagaagtatttgcaagaaaccaatatggaccatatgaggaagaataa

SEQ ID NO: 7902 - DNA, 1668 bp, Methanobrevibacter gottschalkii
  source 1..1668: mol_type = genomic DNA
atggtaattaatatggctgataaaaaattcttaaatgcaatgaaacaaaaattcagtgaagatccaactgaaaagtcaacccaattttataacatgggtggttggactcaatctgaaagaaaaactgcatttgtaaacgaaggtaaagaaattgctgagaaaagaggaattccaatgtataacccagacattggtactcctttaggtcaaagagctttaatgtcttaccaattatccactactgatactttcgttgaaggtgatgatttacacttcatcaacaacgcagctatccaacaagcttgggatgacattagaagaacagtaattgtaggtttaaacactgctcacaatgttcttgaaaaaagattaggtattgaagtaactcctgaaacaattaccaattacttggaaactgtaaaccacgctatgcctggtgcagcagtagttcaagaacacatggtagaaactgacccattacttgtagctgattcttacgtaaaagttttcactggtgacgatgaattagctgatgaaattgattctgcatttgtattagacattaataaagaattcaatgaagaacaagctgaagctttaaaagctgaagtaggtagtgcggtatggcaagctgtaagaatcccttccattgtaggaagagtttgtgacggaggtacaacctccagatggtctgctatgcaaattggtatgtctatgatttctgcatacaaccaatgtgctggtgaaggagctactggtgacttcgcatatgcatctaaacacgcagaagttgttcaaatgggtacttacttacctgtaagaagagcaagagcagcaaacgaacttggtggagttccattcggattcatggcagatatctgtcaaggttctagagtttacgctgatgaccctgtaagacaaaccttagaagtagtagctttaggtgctgctttatacgaccaaatttggttaggttcttacatgtctggtggtgtaggattcactcaatatgctaccgctgcatacacagataatgtattagatgacttcacctactatggtaaagattatgtcgaagacaaatatggtgatttatgtgctgcacctaataacatggacactgttcttgatgtaggttctgaagtagcattctatgcattagatcaatacgaagaatacccagctttacttgaaactcacttcggtggatctcaaagagcttcagttatttctgcagctgctggttgttccactgcattcgctactggtaatgcacaaactggtttaagcggatggtacttatccatgtacttacacaaagaacaacattccagattaggtttctacggtttcgatttacaagatcaatgtggtgctgctaacgtattctccatcagaaatgatgaaggtttaccactcgaaatgagaggaccaaactaccctaactacgctatgaacgtaggtcaccaaggtgaatacgcaggtattgcacaagctcctcacgcagctcgtggagacgcttttgctttcaacccattaatcaaaatcgcatttgctgataaaaacttatcattcgacttcagtaaagtacgtgcagaattcgctaaaggtgctttaagagaattcgaaccagctggtgaaagaactgttattaccccagcaaaatag

SEQ ID NO: 7903 - DNA, 759 bp, Methanobrevibacter gottschalkii
  source 1..759: mol_type = genomic DNA
atggtacaattttatccaggtacttctcaggttgctcaaaacagaagaaacttctgtaatccagaacatgaattagaaaagttaagagaaatctctgatgaagacgtagtaaaaatattaggtcacagagctccaggtgaagaatataaatctgttcacccaccattagatgaaatggatgagcctgacgacattgtaagagaattagtaacccctattgatggtgcaaaagcaggagacagaattagatatattcaattcgtagattccatgtacttcgctccagctcaaccttacttaagagctagatcttacttaaacagatacaggggaattgataccggtactttatccggaagacaagtaatcgaagcaagagaaagagatattgaaaaattatccaaaatcctcttagaaaccgaatacttcgataccgcaagaaccggtattagaggtgcaggtgtacacggtcactctttaagattagatgaaaacggtttaatgtttgatatgctcagaagacaagtattcaacaaagaaaccggtaacgttgaaatggttaaagaccaaattggtaaagaattagatgaacctgttgtattaggtgaaccattagacgaagaaactttaaaagcaaaaaccactatttacagagtagatggtgaagcatacagagaggatgtagaagctgttgaagtatgtcaaagaatacatgtttccagatcctttggtgcatatgatccaaacgcaggatggtaa

SEQ ID NO: 7904 - DNA, 600 bp, Methanobrevibacter gottschalkii
  source 1..600: mol_type = genomic DNA
atgataggacgctgtactcacgtagtagattgtagggaaacaagtggtatgggaaaaggtggaagccttgctcaaagaggaactttcgctgaatgtggcactgatgtatgtgcagtagctatgtcccctggacgtagacacattactaaaccagtttgtgagattactttcgggttacgtgaatcaaatgttttaactagtaccgttgttttaaatgcaggtgctggtgttcctcatgatgctcctgctagtggaggaacattatttggaattacagaaaaggagattgaccaattaaataattttaaattgcttgttattcacttaggtggagttgcaaatcatattatttataaagcaagattaatcttaaggaatgtcaataaaccttgtgtgattatttgcgaatcaccagttgactgtgaagattttgctaaaattggagtaaaaacttcaaaagtcatgccagcagatgaagatattaaaactcaaggaactattaaagatatcgtaacaggagttattcgtggtgaaacaatttcacaagaaaaattagatgaaattattagaaaagttaaattagcattaggagatgcataa

SEQ ID NO: 7905 - DNA, 456 bp, Methanobrevibacter gottschalkii
  source 1..456: mol_type = genomic DNA
atggatattgaaatatttcctcatagaattcttggaagtgacacaactgaattattattaaatgaattagaatctattgatgatgttcaaagaactgtcattcatggtccaagatttccaaaaggcgaagctactttgcctgataaatataaagaacgtagagtcattaatattaatggtgaagatgtagttttacaagttaaaactgctagaattttcattgaattaactatggaatctacaatcaaggaaattgaagaagtctgtaaaaagcatattccgtttggttttgatattaatcaagatagagcgaattatattagaaaacataaaactgttactgatagaatcaaatatggttctgcagatttacctgatgatttagtaggtatgactgatcaatattcagattttgaaagccatgtgaatattatcaaaagagataacttagattaa

SEQ ID NO: 7906 - DNA, 1332 bp, Methanobrevibacter gottschalkii
  source 1..1332: mol_type = genomic DNA
atggcaaagtttgatgataaagtcgatttatacgacgatagaggatccttaattgcatctgacgtaccaatcgaagctattagtcctttaagaaacccagcaattcaaagcatcgttaaaggtgtaaaaagaactgttgcagtaaacttagaaggagtagaaaaatccgttaaaaccggatctgttggtggagacaaatctaaaattttaggaagagaattagatttagacattgtttctaatgcagaagcaatttctgaaaaaattaaaggaactatccaagtttctgaagatgacgatactaaagtagaacctatttctggtggtaaaaggttattagtacaagtaccatctcaaagaattgatgtttctgctgagtactctgtagctcctttagctactgctactgctttagtacaagctatcattgatgtttgtgacgtagatatttacgatgcaaacttcgtaaaagctgctgtattaggtagatacccacaatctgttgaatacaaaggatctaacattgcaaccatgttagatattccacaaaaactcgaaggaccaggttacgcattaagaggagtaaaagcaaacgatttcgctgctgctactttgaaaaatactttccaagctactgctttagcatctattttcgaacaaactgctatgtttgaaatgggtgatgcaattggtacttacgaaagattacacttattaggtttagcttaccaaggtttaaacgctgataatatggttatggacttagtaaaagacaatgcggctgaaggtactgttggttctattgtacaagctaccattgctcgtgcagaagctgacggggtaattgctccacaaaaagacttaaccgacttctctatctacaacactgatgatgcagctaaatggaacgcatatgctgctgctggtgctgtagctgcaactatggttaacattggtgctgctcgtgctgctcaaggtgtaccatctactttattatacttcaacgataacattgaattcgctactggtttaccaagtattgactatggtagagcagaaggtgtagctgtaggattctcattcttcagtcactccatctacggtggtggaggtcctggtttattcaacggtaaccacgttgtaactagacacagtaaaggattctgtataccttgtgtagctgctgctatgtccttagatgcaggaacacaactcttttcaccagaagcaacttctggtttaattaaagaagtatacagtcaaattgatgaattcagagaacctattaatgctgttgcaattgcagctgaagaaattaaaggtgacatctaa

SEQ ID NO: 7907 - DNA, 1245 bp, Methanobrevibacter gottschalkii
  source 1..1245: mol_type = genomic DNA
atgcaaattgtagcagatgttgggggaatacctggtaaggattgtaatggtttttgtaaatactgttactttagaaaagtaaaaaaagtcaaaagctttgggtgtgcatattgtccacctaataaaataggttgtgaaaggtgcagcaaaggagttagtgaaacacaaagcgaatttaaatcaccattacaagttatgaatgaagtgcgaaattcgttaatgatgaatatgcatggaggcaaagtaactgcaaatataagtggtggtggagatattagttgttatccccaccttgaaacattaacctcaaatttaaatcaaatatcaatcccatctgttttaagttatacttgtggaaagggtataacaaatagtgaaattgcttcaaaattaataaataatggagttgaagaagtttcatttactattttctcatcagaccctaaacttagaaaagaatgggttaaagatcagcaccctgaagaagctcttaaagcatgcaagatcttttgtgaaaatattaaattaactggtgctgccgtaataatcccaggtgttaatgatggcgaaatattacgtcaaacatgcaatatattagaagaatggggtgcaaaaggaatgcttttaatgagatttgcaaatacattcaacgaaggattaattcttggaaatgaaccaattcttaaaggaattgaatcgcaacctgttgaagactttgcagagcttgttagacaaattaatagcgaatatagttttagagtgagtggaaccccattgtgtgaccctgaaaccggtgggccatttgcaatagccaaagatgaaaatgaaatattcttacaatttatcaaaccaattacaggtgaagcaactataattacatcaaaaattgccgcaccatttatttccaaaatattcaataaactagaagtggatagtgttaatgtagtggcagttgaaaaagaaatagcttgtttgattacaaaagaagacctggaaaaacttgatttgaatgaaataaaagatgttgcaatcattcctggaagatcttttgttcatcaacttgatgcagaaagaatcttaagtgctgatggtattgaaagacttgttggtcgtggcccagacacattaagtgttgatggggaattaagtattgatatgactgatgaaaatgtcatagaaacagaactagaacaatttaacgatttagcagatgccattaatttctttggaatgagaagaatttga

SEQ ID NO: 7908 - DNA, 924 bp, Methanobrevibacter gottschalkii
  source 1..924: mol_type = genomic DNA
atgtatgaaacattaacatttactggtggagttcacaaaagcgaagaatttaaagaattaattgaagatttaggaggatttattcttcaggaaaatattcaacaaatggaattagttttaaacatggctgttcctttagaagatgtggataaagttgaagaaaaagctaatgaacttttagcaaaaatttcaatcgctccaatggcaggttctgaaatagcaattgtttcaccaacacttgcaagacaccatttacctcatgctgcatgtgacatttcagaatatttgcgtgaatttggtgcaaaggataacatgttaggccttgcaagaggtgatggtaaaggtacttctggaatcaccgaagaagaaaaagatttaattaatgaacatgatattgctattttttcgttaggcagttttgaaaattgtattaaagaaaaagcattcttatatgatgatattgatataccggtgattgtaactggcgctccggatattcctgtcgaagagcttcccggtgcagatgcatatgtgggtggtttaggtagaattcctagaagattgagaagaggaccggatgttcgtgcattggataaattagtcgaaacatgtgaaaaaattttaaatgataaaaaacgtgaaatggctcttgatccaccattagttccatctattgttgtaaaaaatgcaattgaaaatcaggttagagaaattaaagatgttttctctccagctccagtaacttcacaattagatggtgttcgtgtaaaattgaattatgatgattatgcagatgtaataagtaatgttattattgatgataaaaaattatctgaacttgctgagataaaaaaatcattcatgtatgattatattttagtaaaaattaatagtgaaagttctcttgttgagaattctaactaa

SEQ ID NO: 7909 - DNA, 519 bp, Methanobrevibacter gottschalkii
  source 1..519: mol_type = genomic DNA
atgaaaatagttacaacacctatgtgtgaggaaattgttaaattagcaggtatttctgattattctataaataaaaatcctgatgatgaaaaaggggatttggctatcttattatcagaaagtaatgttaaaatggatagtttaactattaaaatcaatactccttcacaagtttttgaaagtatcaaaaaagtttctaaaatcactaaaaatgaactatctgatgaagaggtgctggtcttttttgaagattatagattatgtaaaaaatacttaacttctaattttaaaagagatatcaatgttaaagtctattccaattttttaaaggatatccttttagatatgggatttaatattgtattcactgattttaaatatgtagtttatccggattatttaaaagataaagttgttgaaagtgaaaatttagttgaaattcagtctcatgataatatttctaaaaatccttttgagaaaattgagattagatattccatattagaaaatttaatataa

SEQ ID NO: 7910 - DNA, 684 bp, Methanobrevibacter gottschalkii
  source 1..684: mol_type = genomic DNA
atgaaagttacattaagttttgaaaaaagtgaaagttcagatgtctcaataatggttgatgcactaagagctagttctacaataacattagctttaaataacttcgagaaagtgattccatgttttacaccagaagaagcatttaaactaaaagaaaaacttggtgggattgttgcaggtgaacgtgatggtaaaaaaatcaatggatttgaccttggaaattcaccagccgatataaaagattatactagtgatcacctcattttaacaacaagcaacggtactagaatacttgaaaacatgaaatctactgttcttataggatcaattataaatgcttgtgaagtagctaataaaagtattgaaatcgcaaataaccacattgatgttgtgatggcaggagttaaaggagaatttgcaatagaagactttttagcagcaggtgaaatattatactggattttacaggaattaccagattgtaatttaagtgaatatgcaaaagcggcagtattggcaagtagaaattatgaatccttaaaagaatcattttttaattctaggtctggtaaacgattaatcgaactgggctatgaaagtgatgtggaactttgcagtttgaaaaatatctccaacaatgtcgccatatatgaaaatcaagagttaacattattaaaagattaa

SEQ ID NO: 7911 - DNA, 1173 bp, Methanobrevibacter gottschalkii
  source 1..1173: mol_type = genomic DNA
atgaaaagagaattattaacaataattggtactgctcatgtatctgaagaaagtgttaatgaagtaaaggatgcaatttatgaacaacacccagatattgttgctatcgaactggataggggaagatatgcaaaaataagaaataaaatgcatggtatcgaagaagatgacaatatttctgttactagaataattaaagaaaataaagttggattatttttagtaagtactcttcttggatatttccaatcaaaaattggagcagaagtcgatgtagacccaggttccgaaatgattggtgctattgaagcaagcaaagatttaggtattccaattgctcttattgatcgtgaaataaataccaccttgcaaagagcattgaataagatgggatttatggaaaaagctaaatttgcatatgggctaatcgcttcaatattaggttttgataatgacgaagaggaaatagatattgaagagctaaaaaactccgaaaatattgatgacatgatggaaatgtttaaagatgaagcccctagtgtttatgaagttcttgtacacgaaagagatgcataccttgcagggaaaataatgcaaataccttatgataaagttattgcagtcgttggagcaggacataaacctggaattgaaaaatacttggataacccagaaacattgcctgatttaaaggaactagaaatcataaatgataaaaaaggaatcccttggcttaaaatatttctggcattgatacctatattatttgttgtgatattttttctggcatattttaatgggataaatattactggaaatatttatgaatttatagtcattagtgtaataatgggttttattggatcaattctttcaggttccaaaatacaatcagcaattgttggtggtatcgtggcgccattaactattatccacccattacttgccgcaggatggttttcagggctaactgaagcaaaatacagaaaagtaaaacaaagtgatattaaaaatctagttaaaattgaagggtttaaagatttatggaacaataatatatttagaatattgcttgtagttattggaacaaatttgggagttagtatagctacattagtaattttaccatcaaaagttttcattccattattcatgaaaatatttggtggatga

SEQ ID NO: 7912 - DNA, 213 bp, Methanobrevibacter gottschalkii
  source 1..213: mol_type = genomic DNA
atgtattttatatttcgttgtgactgtggacgtgcactttatgcaaaagaaggagtagcaacacgcaaatgtgtttgtggtaaaactataaaagtaaaatccagacgcatatttcaaaaagtagctacaagagaagaagcatcacttgccgttcaagaaatgcaagataaaatatatggaaacactggatttatgaaagccagtgatttataa

SEQ ID NO: 7913 - DNA, 1320 bp, Methanobrevibacter gottschalkii
  source 1..1320: mol_type = genomic DNA
atgattggaacgacactcaaaatagttataattataatactaattattcttactggatatttatcaatggccgaacttgctgttgtatctataagaaaagcaaaaatgcaaaaatacttagaagatggaaataaaaatgcacaaattgtttttgatttattagaagatccaaatgaatttttatccacagttcaaattggaatttcacttattggtgttttaactggtgcatttggtggaataacacttgcagaacctttagctaaaataatctatttcataccatatagtgacatgattagtgtggtgttggttgttcttgtaactacatacttaacattagtaataggggaaattgtacctaaagtcattgctctaaacgaccctgaaaaagtttctcttaaagttgctaaaagcatggtaattctttctaaaatttcaaaacccgctagttttgttcttgcaaagtcaagtagttttcttctatgggtattgagaatcgaaaacaaaaatgatgaaatagttaccgaagaagaaatagaattaatgattaaagaaggaagggaagacggaactattgaaaaagaagaagaagacattataaaaagagttttcaaacttgacgataaaaaagttgaaagcataatgactccacgtaatgagattatttggattaaccttgaagatagtagggacatcaacaaaataaaaattgttgaaagtaaaagatctatttttccaatagcaaaaggagaattagatgattttattggagttgtgcaagcaaaagacattctttcagtgatgtttagtgaagaagaatttgatatcaatactataataaaagaacctttggttgtatccgaacacctagaaaccttagaattattaaaagaattcaaagaaaaccaaggatatgtacatatgtctcttgtaatcgatgaattcggaagtgttgaaggtttaataacattaaacgatttgcttgaaggtattgtaggagatattcctggaattgatgaagaagatgaacctgaagcaattaaaagagaagatggaacttggttaattgatggaagataccctattgataaatttaaaaaactatttaaatttgaagatccattacctgatgaagaggaagacaattatactactcttgcaggatttatcctcagcatcagtggaacaatccctgatgaagaagataaatatgaatgtggaagattcatatttgaaattattgatattgatggccaccaaattgataaagttcttgtaactgatttaggaccacaagaagatattgaagaggaataa

SEQ ID NO: 7914 - DNA, 945 bp, Methanobrevibacter gottschalkii
  source 1..945: mol_type = genomic DNA
atggatagcggaataattattcaagttgtattattaattgtagggtttgtatttttaattaaaggatcggatatttttgttgatggttcaagcagcattgcatcacttctaaaagtaccgacaataattgttggtttaactattgtggcatttggaacaagtgctcccgaagcagccgtttcaataatatcttcaattaatggaaataatgcaatggcagttagcaatatcattggaagtaacatattcaatatattaatcatcataggtgttggtacattacttggcgatttattaatggaaaaaaatgttttaaacagagatttgcctatcctaataggagttacattgctattaactgcatttatcattattggatggaacatatccactattgaaggaataattttacttgcaattattgttgtttatgtattttcacttattcattcttcaaaaaaagatagtcatgcacatgatgtagataaaccaaaattaagcactaaaaagagcatatcctttatcattatcggactggtgggaattattcttggtggagatttagttgtaaaaagtgcttcaactattgcaatctcctttggaatgagtgaaacattagtaggattgaccattgtagcaatcggtacatcattacctgaacttgtaacttcacttactgctttaaaaaaaggagaaaatcaattagttataggtaatgtaattggatcaaatattttcaacatgttatttgttttaggtgcaagtagtgcaataagtgaaataccactcgattcaagtttacttgttgatgtcatgtttatgatatttattacattattatgtttcatatttggtaaaacacaagaaaaatatgacaaaaaagaaggtattatattcatagcattatttattgcatatatggctttcgcaatcctgagaaattaa

SEQ ID NO: 7915 - DNA, 876 bp, Methanobrevibacter gottschalkii
  source 1..876: mol_type = genomic DNA
atgtctaaattaaacaaagatgaatttaatgattatatttttacaaggattaatacattaattcatgactatgaattgattagggaaggggaattaattgctgttgcattgtccggtggtaaggatagtgtattaactttacatgcactaaaaaattatcaaaatcaattggattttgatttagtagctattagtgtggatgaaggaattgaaggttacaggcaacatggcattgattctgctgttagtaatgctaatgagttgggcattgaattaattcaaaaatcatttaaagaggaagagggattcgcattagatgatatctatcaagactttaaaagtgcatgcattccatgtggcgtttttagaagaaatattttaaataaaactgcatatgagataggtgcagttaaaatagctactgggcacaatttagatgatgaaatacaatcttttttaatgagttttgcacgaggggatacaattaaattctcaaaatttgggcctgaacttgatgttatacatccaaaattggttccgagaataaaaccattatggaacacacctgaaaaagaagttggaatgtgggctataattaatgatattaatatacatttagatgaatgtccgtattctcatttgtctctaagagctaaaattaaagaatttttaaatgttagtgaagataaatatcctggtgttaaaaataatgtgatggaatctttccaaaagatattaacttttgaaaatgatatatctgcaaaccttaatgaatgtgaattatgtggtgagccaacttcatctaatatttgcaaggcttgcgaactaaaagaattaatttctcaggattgcgaaagccatatatgcaataaataa

SEQ ID NO: 7916 - DNA, 306 bp, Methanobrevibacter gottschalkii
  source 1..306: mol_type = genomic DNA
atgataacatgtgattttgcaatattgcctgtcggaaccgaaactactgaatgtaaagagtatgtgactgcagcagtccaatctataaaagattctggacttagctaccaattaaccggaatgggaacacaaattgaagcagatgatttagaagaactttacactgcaatagctaaagcacaggaagcaattttcaaacttggaattggtagagtgtatacagttataaaagtagatgatagaagagaccttgaaaatagaactttagatgctaaagtaagtacagtagaggaaatgttaaaataa

SEQ ID NO: 7917 - DNA, 1107 bp, Methanobrevibacter gottschalkii
  source 1..1107: mol_type = genomic DNA
atggtgtcaaacattaaagttcctattgcaaaaccaataattggagaagaagaaatagaaaatgtggttgaagttttaaaatctggaatgattgctcaaggaccaagagttgctgaatttgagcaaaaatttgctgattgggttggagctaagtatggtattgctgttaactccggaactgctgcattgcatgttgcattgctctcttgtggtattggtgaaggggatgaagtaattacaactccatttacatttattgcaaccggaaattcaattttatacactggtgcaaaaccggtttttgcagacattgacttaaaaacatatactatgaatcctgagtctattgaagcattaataactgaacatacaaaggctattttaccagttcagttatatggacaatctgcaaatatggataaaatcaatgatattgcagaaaaacatggtttaatggtcattgaggatgccgcacaagctcatggtgcaacctgtaatggtaggaaggtgggcagtttaggggatatgtcatgttttagtttttaccctactaaaaatatgacaacttctgaaggtggaataataacaactgatgatgaagaattggctgaaaatgctaaaatattcagagctcatggtgcaagcgtaagatatcatcacgatgaagtaggttataacttcagaatgactgatatttccgcagctattggtcttgctcaattagataaaattgatggatttaatgataaaagaattaaaaatgcagcatatctaaatgaaggtttaaaagatgttgatggaattatcactccgtattgtgcatatgactcaaaacatgtatatcatcaatacactatcagagttgaaggaaatagggatgattgggtagatattattaatgaatgtggtgttggaactggaatccattatccaattccattatataatcaaccaatttataaatcattaggaatcactggcaattgtccaagagcagaacttgctgcaaatagtgttatttctcttccagttcatccatctttaacaaaagaagatttagatttagttattgaagctgttaaaatggcttcagaaaaattagcttaa

SEQ ID NO: 7918 - DNA, 1167 bp, Methanobrevibacter gottschalkii
  source 1..1167: mol_type = genomic DNA
atggaagaatataaaatcaaaactattgaagaaggattaacaaaaattgaatttccagaatttgataaggtatcttctgatgctccagttttttacaatccccatatggaattaaatagggatttatcaatacttgcaatacaagtattccaaaaagaacaaaaaagagaaataaatatttgtgatttatttggaggaagtggaatacgaggcatccgttataagaatgaaattgacggagtaggtgaaatttccattaatgatataagtgagacagcaaatcattacgaaaaacacaacataaaattaaacaatttagaagatattgaagtataccaacatgatgcaagtatgtttttaagaatgaaacgtggagaatttgatgtaattgatattgatccgtttggaacaccatccccatttcttgattcatccggttattgtgctaaaagaaattccctattatgtgttacagcaacagatacatctgccctatgtggaacctataaagaaccgtgtatacgtaaatataatgcaaaaccctacaaaagtgaatactgtcatgaaacaggaattagaatattagcaggttttgttgcactaactctttcaaaatatgcaaaatgcattgatgtaaaaatgtctcatagtactgaacattacatgagattataccttgaaattaaaaaaggttcaaaaagaacagatgaaacattgaacaatattggttatattagccattgtaaaaattgtcttcacagacaaacaagtaatggcctagctagttctattgatgcaatttgtccagtttgtggtgaaaaactaattcatgcaggccctttatggttaggccctatccaaaatggagaatttattcaaaaaatgattgaagaaactgaaaataaaaaaatcaatagtgaaaaagaagctttgaaattattaaataaatgtcatgatgaagctaatgctccggcaacattctttgatattcacctcatctgcaaaacattaaagattagtgctccaaagttcgacttgattttagatgaacttaaaaaagaaggatttatagcagtgaaaacccattttaaaccattaggtatgaaaacagatgcatctattgagaatattaaaaacattcttatccaattacaaagtaaaatttaa

SEQ ID NO: 7919 - DNA, 477 bp, Methanobrevibacter gottschalkii
  source 1..477: mol_type = genomic DNA
atggtaaaaacaaaggataatgttatcaagttagatgatactgatatcaaaattttaaaaataatcaatgaggatgtgagaacttcatatagacaaatttcacgtagcttagatgtatcagtaggaacagttcataaccgtattgataaaatggtaaaatctggagttattaaaaaattctcaccagttattgatcatgaaaaattaggtttcgttttaaccaccattatcggagtaagagtaaaaggtggaaaactcaaaaattgggaagaaaaaaccttttttaacaaaaatgtagttggaatctatgacgttactggagaatacgatgcattcttaattgcaaaattcagaaacacaaacgaattaaacggatttattaaagaattgctaaaagatccgatcatagaaagaacttatacacaaactgttttagatgttattaaagaagatatgggatcttcaaacattttataa

SEQ ID NO: 7920 - DNA, 939 bp, Methanobrevibacter gottschalkii
  source 1..939: mol_type = genomic DNA
ttggcagtatgcttacccgatactcaagacgatgctccaagtatacctataaaattaactagagtaggtgttacaggagttaaaaaattattacaattagatagaacaaataaaagaccaataattttattacctacatttgatgcatttgtagacttgccaaatgatcaaaaaggagtacacatgtctagaaacccggaagctattagtgaagtacttgaaagtgttgctaaagatccaactgtagacattgaatcattatgtgcaaaaattgttgaaaaaatgatgaccaaacatgaatatgcaaaacgtgttgaaatttcaatgacaacagactacatgtttatgaaagagtcacctgttaccaaaaataaaactcaggaaatgagtaaattaatagcaaaagctattggatttagagatgaaaagggaaacattaaaatcagaaaaagcgttggtgcagaagttattggaatgactgtttgtccatgtgcacaagaatctgtaagagaatctgataaaaataaattattagaattcttagatgaagagactacacaaaaagttttagatactgttacttttgcttcacataaccaaagaggcattggaacattattaattgaagttccagaagataaaaaagttaaagcggaagaccttatagacattatcgaaagttcaatgagttcgcctgtttgtgaattactcaaaagacctgatgaaaatgcaactgttatgaatgcacatagaaaacctgtttttgttgaagattgtgttagaaatatgatggaaaaaattgctaataaatatgctaatttgccagatgacacattaatcacagcacgtcaggaaaatcaagaaagtatccatagacataatgcatatgctgaaaaagtaactacaatgggcgaattaaaatctgaactagatatctaa

SEQ ID NO: 7921 - DNA, 441 bp, Methanobrevibacter gottschalkii
  source 1..441: mol_type = genomic DNA
atgaaaaaaagttatgaaattgcaggacaagtaatgggattttttgaatcatttaaaggttcaagacctgcaattaacaatgatagaatactcattgttagaggaagatcaaggaaaatcattccaataaatgaatttgactccaaacttagtgaaatcggagaaattcttggagggaccgaattaaatgcaagctctgaaaagatttctgaaatattgcagtatggagacaaaaacatccaaaaaagtgaaggaaatactacctctattgatgaacatggatttaccagaatgaaagatgaacttgaatcaatggggcttgtagttgcatataaagtgtttgaactcttaggctttgatgtggtaattgccatatgggaagatagaaacgaactacctccattatatgtggaagtgactgtttcagaacatgaagattaa

SEQ ID NO: 7922 - DNA, 1113 bp, Methanobrevibacter gottschalkii
  source 1..1113: mol_type = genomic DNA
atgaagattaaaatgcaaaataaattaaacaaagaagatattctccatattttaaatgcaacagataatgaaataatcaattatatgttaaaaactgttcaatatagggagaatcaccttattacttattctaaaaatgtattcataccattaactgaaatttgcagaaatgactgtggatactgtaattttaaaaaaaaatctgacgatcctgaagctataattcttaaaacaaaacaggaagttttggaaagtttgaaagaagctgagaaatatggttgtaaagaagctctttttacttttggtgaagatgctgataaagaagaagttgttaaactcaaattagccgagtatggctatgaaaaaatgatagactacatcatagacatatgtcaaatgactttagatgaaacaagtctactgccacatacaaatggtggaaactttagttttgatgatttgaaaagattaaaagaagtcaatgcatctctaggattaatgcttgagaacacatcaaatagattaatggaattgcctgcacataataaaagtcctggaaaaaatccgaaattaagacttgaaaccatatcaaatgctggaaaacttaaaattccatatactacgggaatattaattggaattggagaaacaaaagaagaaattgccgaatcgttaattgcaattagagatttgtatgacaaatatggacatattcaagaagtaattatccaaaatttcacaccaatacctggaattgaaatggaaaattggccagaaccaagttttttagatatgattaagactgtaattgcaggaactcttttatttggagatactgatgtaagtattcaagttccccctaacttaaacaatgaaactgcacaaatattcttattatgtggtgctgatgattggggtggagtttcaccagtaagtcgggattatgtgaatatcacatctccatggccagggattaatgaacttaaaaaattaacaattgatgcaggttttaaattaactgaaagattatgtatttatgaaaaatacattaatagcgaatggttaaatgataatttattaaaaaaagcatctaatttatcaaagcatcaataa

SEQ ID NO: 7923 - DNA, 729 bp, Methanobrevibacter gottschalkii
  source 1..729: mol_type = genomic DNA
atgaaatataaaaaaattggtgatattttaattttagataataaatactcagataataattttgatgaattatctaggaagcataatgtaaaaactataatgaaaattgaccatattcaaggaactaaaagagaaccaatttataaaattctttatggggaagaaactgaaacaatacacagggaaaatggttgtttatttaaattagatttaagtaaagtaatgtggtctaaaggtaataataatgaaagattaagaattgctaagttagttgatgatgatgaaaccgtacttgacatgtttgcaggtattggctatttctccattcccattggtgttcactcaaatccaaaaaaaattattccaattgaaataaatccaaattcttatcattttttatgtgaaaatattagattaaataaattaactaatgtaactcctattttaggagattgtatgatgaaaactcctaaatttaaggcggataggattttaatgggatatgtaaaaacaactcatcattatttaaaaatagctattgatagtctaaataaaggaggaattcttcattatcatgaaacagttccagaaaaattaataaatacccggcccatagaaagaattaaagctcaagccggaaatagggatgttgaattattaaaaataaataaaataaaaagatatgctcctggagtagagcatgttgttattgatgctttgataaattag

SEQ ID NO: 7924 - DNA, 615 bp, Methanobrevibacter gottschalkii
  source 1..615: mol_type = genomic DNA
atgaaagataaaatcgtagaaggtacaacaaccgtcggaattacttgtaaagatgggattgtattcgcaactgaaagaagagcaactatgggaaatttagtagctcacaaagtagcagaaaaaatatttaaaattgatgatcacattgcaacaaccattgcaggttctgttggagatgcgcaaagtttaatgaaagtaattggtgcagaaacctcattatatcaaatgagaaacaatgatgagattagtgttaaagccgcagcatcattaactgcaaacattttacgttcaggaccaatgtatgttcaaatattacttggaggtatggatgaagatgaaccatccatttattcattagatcctgctggcggtatgattaaagataattacatttcaactggatcaggatccatcgtggcttacggtgttcttgaagacagatttagagatgatttatcagttgatgaaggacttgaattagctataagagctatcagagctgctgccgaacgtgacacttattctggaaacggatttttagtcgctaaagtagataaagacggctttgaaatgttagataatgaaaaagtaaaagagattttggataaaatataa

SEQ ID NO: 7925 - DNA, 1914 bp, Methanobrevibacter gottschalkii
  source 1..1914: mol_type = genomic DNA
atggcttcagatattttagaagatattaaaaaagagattttgcaaaaactacctaataagattcaggtttcaaaagtagaattcgaaggacctgaagtagtagtttataccaaaaatccagaaataataacagaaaatggtgacttaataagatcacttgcaaaagaacttagaaaaagaataattatcagatcagataaaagcgcattacttgataatgaatcaacaataaataaaattcatgaaattgttccagacggagctgaaattactgatatttattttgatactgtaactggagaagtagttattactgctaaaaaaccaggcctcgttattggaaaatatggtgtcacttctagaaatattgttaaaaataccggatgggctcctaaaatattaagaaccccaccaataagttcagacattattggaaaaattagaactattcaaaaaaatagtagtaaagacagaaaaaaattattacaacgtcttggacgtcaaattcaccaaggaagcaaatacccaaatgactgggcacgagttacttcaatgggcggatttaaagaagttggacgttcatccatgctcttacaaacaccaaacagtcgtgttctattagattgtggagtaaacgttgctgcatcagataataaaaatgcattcccttatttgaatgcgccagaattttcaattgaagaattagatgcagtcatcatatctcatgctcacttagaccattgcggatttgtaccttacttattccattacggatatgatggaccagtgtactgtacaaccccaactagagatttaaccactcttttacaatttgatcatctggatattgctcacagagaaggtaaccctttaccatttacatcaaagcatgtaaaacaagcaattaaaaatacaataacattagattatggtgaagtgactgacatctcaccagacataagattaacattgcataatgcaggacatatcttaggttcagcaatctcccatatgcacattggagacggagctcataatttagtatatactggagattttaaatacgaaccatccagattacttgaacctgcaaccatacgtttcccacgtgctgaaacagtaattatggaaagcacatatggtggaaaagaagatattcaaccttccagaaataatgctgaaaaagaaatgatgaaaacaatctataaaactcttaaacgtggtggaaaagtattagttccagtatttgccgtaggaagagcacaggaacttatggtagttttagaagaatacatgagacatggattaatcgaagaagtgccgatttacattgacggaatgatttgggaagcaacagcaattcacacagcaagaccagaatacttaagtaaagacttaagagaccaaattttccatatgggcagaaatccatttgtttcagacatgtttaataaagttcaaaaccatgaccaaagaaaagaaattgttgaaagtcaagaccccgcaattatcttatccacatcaggtatgttaactggaggtaattcagtagaatacttcaaatggttatgtgaagatgaaagaaacactttaatctttgtaggatatcagtccgaaggttcaatgggtaggagagttcaaaaaggttggaaagaaattccacttgaagatgatgatgggaaaactagaattttcaatgttgaaatggaaattaaaacaattaacggattcagtggtcattctaacagaagacaattaatggaatacgttaaaagacttaatccaagacctgaaaaggttatcacttgtcatggagatccatataaaactgtggatcttgcatcttcaatacatagaagttacaagattgagacaaaaactccaattaacttagattgtgtaagaatacattaa

SEQ ID NO: 7926 - DNA, 1020 bp, Methanobrevibacter gottschalkii
  source 1..1020: mol_type = genomic DNA
atggttacatattcagaatcaggtgttgatattgatttagaagcaattactgtttcaaaattagcagataaactcaaatcaacattagaatgtagagatattattacagacagtggtcattatgcagctttagtaaaattaggagataaagctattgcaatgagtactgatggtgttggaagtaaaattttaatcgcagaaatgatgaacaaatatgataccgtaggtattgattgtattgctatggttgttaatgacattttatgtgttggggcagaaccaatagctttagtagattatcttgctgttgaaaaaccagatcctgaaagagcagcagaaattgctgaaggtcttgttaaaggtgctaatgaatcaaaaattgcaattattggtggagaaacagcatctcttccaggaatcattaaagactttgatttggcaggaactggtattggatttgtagacattgataaaattattactggtgaaagtatacagccaggaaatgttttaattggtatcaacagtaatggtattcattctaacggatacagtttagctagaaatgcaatttttgataaagggggattttctgttgatgacaaaatgcctaatggtgaaacaaccattggtgaagaattaattaggccgactgaattatatgtaaaacctattgttgctctattcaaaaaagaatacaatattaatggtcttgctcatattactggagggggtttcactaaccttagacgtttgaaaaaaggtgtaggatatgagatcaacagccttccagaagttccagaaatattcaaacttatttacgaacaaggagtagacatcaaagagatgtataaagttttcaacatgggtgtcggttttgttgttatctgtgatgaagaagaagcgggaaaaattatgagtactttagatgaatattgtaactgtcaaatcattggtaaagtgactgatgatgaaacaatcaaagttaaatcatttgaaggcagtgaacttgaatactaa

SEQ ID NO: 7927 - DNA, 1032 bp, Methanobrevibacter gottschalkii
  source 1..1032: mol_type = genomic DNA
atgatgaaaataatgatggataatgagacagctcttgtaaaagaaatattaaaggaattaggagctagtaaagaagatcaggaattagttgcagaagctacagttgatgcagatttaaaaggattcacatcacacggactcggcagattcccacaataccttattagtattaaagccggaacaattaacctagatgaaaatattacaatcgaaaaagaaactcctgcaatggcattgattaacggtaacagcggatttggacaagcagtatcctacaaagccatgcaaatcgcaattaaaaaagcaaaagaaatgggtattgcatgtgttggtgtccacaatactaaccactttggagttactggattttacagtgacttggctttaagagaaaactgtattggacttgtaatcgcaaacactgatccggctattgctcctataggaggtaaagtaccattaataggaactaaccctattgctttaggtattccatctgacagttacattactgtagatatggcaacatcagttactgcacgtggaaaaatacttgaatccaaaagaaaaggattggatttgccagatggatgggcattagatgcaaatggaaatccaactaatgaccccgaagaagcattgaaaggatcaattttaccattcggtggatttaaaggatatgcattatccttattgattgaaatattaaccggaccattagtacaggcaggatatggtcatgaagtaactggtaccgcatcacctgataaaaattgtacaaaaggagacttatatattgtaatcgatccttccaaatttggtgactttgatgagtttaaagcaaacaccgaagactttatatctcaagtaagatctactggtgaaaatatcccagtgcccggtgatttagaagttaaaagagtcaaagaagccgaaactaatggaatatccattgatgaaaaattatacgaacaattaaaaagaatttgtgacgatttgaatatcgatttagattcttacctagaagaatag

SEQ ID NO: 7928 - DNA, 2370 bp, Methanobrevibacter gottschalkii
  source 1..2370: mol_type = genomic DNA
atgtacaaatgtataagtgcatataaaattaaaattattaatattaaaaatatgactaattttacgaaaaatgattcatttaaggaggaaaataaagttatgaaacttaaagactcttatatcttattaatagcaatggcaatattcctattaatgagtataggatctgtttgtgctagtgaaatatctgcagatgataccataggactagctgatgacggatctgatgtggttatggatgacaaaccaattgaaccgtccaatccaacaacaccacataaagtggatacaatgattgtttctagcgatactgtatcaataaatgaaaaagaaaaaataaaatcaattgatttaactgtaaacgataccaataaatctaaagtcattgctggaattacagttaaaaatttaacagttaaagaaggaacaaaaacaataaaatttgattataataattcgaaagtcattattaaagacgcattagttcttggtaaacatgatttacttgttagctatttaggtaatgaaaattacactaattcttcaaaaaacattgttttaacaatttttggaaattatacaatccaagcaccaacttcagttgatgtaaacagtaccaaaattgttgaagtgcctatcaatgttacaaatggtatcgatccaaaagaacttgtaaaagatgattttaatgttacattaacatataaagatggaaatatcactaaagcaattaatataactgattttagaattataaataatacaataatattcaattatccattatcaaggaatattactacctcaacaataacccttgtttatactgctaatgaaactgttaaatcaaaaaatgttacaataaacagaatttacaatgttaaaattgaagggattaatactaaaaatcaatacaaaaatggtaattttacatttagattaaccgatattgataatgcaactgaaaatttaactggttttaaattaaacttacttattggtaaaaatgttataaaccagattacaggaactgctgacaaaaatggtattgtaaactttaaaacaagcaagatattcggatatgatttcaataacaatacaattgtaattaaatacttaaatgttggcaataacactgttgaattgaaaagtggcgacaatgtgaaattaacaacaaataaagttaatttaactattgaaaaagcaaaaatcaacattactattgataaatacaacgaacaatatggaagtaacaaaaatttaaccattactgttataaatgcagataatggggaacctgtgccaggaatcattctacatttaaacatgcctcaaaccgccggcaaaaactattacattcagactgacacaaatggaataggcataatatctgttaaaggattaattcctggaaagtacaatttaactgtaagcaacaatgacactgtaaatattataaataataaggcaagcagtaaaattattattacaccaaaaccagttacaataaagattacatctggtttaactattaattataacactggaaatactgcagccatcaaagttactgataaaaaaggtaaaggagtgtctggagcatatgttcttgtccaattatatactggttcaaaatcagcaaattatcttttccaaactgacaaatatggaaatattaaatttaaagcaccgctttcagttgggaaacataaaattgttgtgagtggtgcagtaggatacagttcaagcaaagttaccaaatatattaaagttaaaaaagctactgcaaaaatcagtgcgccaaaagtaaccgcatactacaaacaaggaaaatactttacaataaagttaattaacactaaaaaaagcaatgcaccgatttatgctgcaaaagttgacatccgagtatacatttcaaattacaaatactacaaatttaatggaaaaaccggagtggacggtaaattaaaattatcaattgatttaaaaccgaaaacttataaagttgaagttagaggtgcagattccaaaaattatgctgcttcaaaagtagtatccaaaatagtagttgttaaagctccaactaaattatatcctgcaaaattaactgctaaaaaaggaacaaataaatactttaaagttactgtaaaaaacacaaaaaccaaaaaagttattcctggcgttaaagtaaagatcaaagtttatactggtaaaaaattcaaaacttatactgtaaaaactaattcaaaaggaattgcacaatttaatgtaaaatcattgagtgttggaaaacataaagctattgtaagttctgcaaacaaatattgcattgctaaatcagctaaaaactacataaaaataactaaataa

SEQ ID NO: 7929 - DNA, 1797 bp, Methanobrevibacter gottschalkii
  source 1..1797: mol_type = genomic DNA
atgcagagaaatgttgttattttagatattgattatgtcacctatgaaaataagccagttattaggttattttcaaaagatggtgataaaaacattatattacttgatgatacctttgaaccatatttatatgttatggctgatgatttagataagtgcattgatgaaattcaaaataattttgatgttgtttgcattgaaaaagtaaataaaaaagacttccaaattgaaaaggaatttttaaaagttacatttaatcatcctcaagaacttgcaaaaaacagggatgctttaagagatttggaaagtgtggtccagattagagaattcgatattccattttatagaagatatttaatggatcgggatgttattcccatgactgaagtagttgcaattggtgataaaattgattcatttcttgatttagattcaaataaacaggacattgaaattattaaacttacagatgaattaaaacgttcccccgattatccgcgagagtttcgtattttgagctttgacttggaagttagaaatcctcatggaatgccaaactctgaaattgatgaaatcataatgattggtgtttcaagtaactttgggattaatcaagttatttcaactaaaacaaattctgattgccgtgatgattttgtaaatcaaatgaactctgaaaaagaaatgattgaagaatttgtcaaaatcattaaagaaaataatattgatattattgtgggatataattcagacaactttgatttcccatatcttaaagacagggctaaaatattgggaattgatttagatattggaatggacggatcagatattagatttattagaagaggatatgctaatgcggcatcttttaaaggtttaattcatgttgatttatatttggtcatgagaagatacatgactcttgagagatatactcttgaaagagtttattatgaattatttggtgaggaaaaaattgatgttccgggggataggatttgggagttctgggataatggaggtgaagaattagataatctgtttgattattctcttgatgatgttgtatcaacattaaaaattgccgaacaaaccttgccccttaatttagagctcactcgtattattggtcagcctttgtttgatgtttctcgtatggcaacgggtcaacaagcagaatggttcttagtaaaacaagcttattttgataatgaggtagttccaaataaacagggagctaattttgcaaatagggcggcggctgaagataatgaagggggttatgtaagggaacctgagaaagggttacatgaaaatcttgttcaatttgattttagaagcctatatccaagtattattatctcaaagaacatatctccagatgtaatgtatttgggggatgtggataatgaagaagattataatatatctcctgagcatggtctcaaatttaaaaaagaaccacaaggttttattccttcagtcattgataaaatattgcaggaacgttttagaatcaaacgtgaaatgaaagcatctgatgatgataccgagaaaaaagcattaaatgtacaacaacaagctattaaaagattagcaaatactatgtatggtatttatggttttccaagatttaggtggtattcattcgagtgtgcaaaagccattacttcttggggaagacaatacattaaatcatcaataaaaaaagctgaagaatatggtttttatgcaatatatgctgatactgatggtttttatgctaaatataaaaaaaaggataagagaaattaa

SEQ ID NO: 7930 - DNA, 1023 bp, Methanobrevibacter gottschalkii
  source 1..1023: mol_type = genomic DNA
atgggaattgaaattgagaaatatttaaattttccagttcttttaatttgttttttattaataacctcattaatattcatatttcctgctttaaaaatgattgttttgggagctattttggcttatttagttagaccagtagcttttaagattcaatcaaaattaaaattttcttctgtttctatattgattgcaatggttattgttttgattccattaattgctcttgtagggtatatttcatatgaactttcttcagttgcatcaactatgcttgcatctagttctactgcagatattaatgaatctattttaaaattaataacctatttgcatattgatgttaatccaaatgagatttctcaatctattatttcttcatttgaaacaattgcaagctatgttatgaattatggtgtaagttttttaggtaaatttgctaatcttactttggatttatttattttggtttgttcggtattttattttgttagggatggagataattgtttaaattttattaaaagttttgttccagagggttctgttgaattttttgataaaactgttgataatataaaagatgtgttgaaaagcatattttatggtcactttttaactgcagtaataattggaatcttcggatgcattggctattctattttgggttatccatttggaatatttctaggtgttttaactggtattttacaattaattccaatattcggaccatggccaatctattggactttgtttttcattgatgcgttaagtggaaattatccaagggcaataatggtcttattattcggttttttcttaagtactattgatatgtatataagaccagctctttcaagccattatgcagatattcatcctttaattttacttgtagggttcttagcaggacctttagtatatgggattgttggttttattgtgggacctttaattttaggaataacatatacagttttggatagttatagaaaagaatatcttatgagggtggaataa

SEQ ID NO: 7931 - DNA, 801 bp, Methanobrevibacter gottschalkii
  source 1..801: mol_type = genomic DNA
atgattaatgaaccaaaaattgttgaaataactgatattattgatgaaactcctacaattaaaactttcaaatttgattggaatatgaaatcattaggaaaaccgaatcctggggaatttgtaatgatttggaactttaaaaatgaaaaaccaatgtctattgctcagattaatgataatgaattggcaattactgttaaaaatattggtgaatttacctctcaattacatgatttaaaaattgggaatcaaattggtgttagaggtagttatggtaatggatttaataattcatttgaaggcaaaaaaatcttagcaattggtggaggagttggaatggctcctattaatgcaattgtttctgacttaatcaaaaaaggaaataaaattgatgttgttgcagcagcagtcactaaaaatgaattattatatgctacttcacttgaagaattgggtgctaatgttcatcattgtactgatgatggcagtttcggatttaaaggttttgcaacagattgtactcgtaatttacttcaagattcaacttatgattatgcatttgtttgcggacctgaaataatgatgaaaggaatatttgatattcttgaagaagcaggaatatctgcacaatattctcttgaaagatacatgaaatgtgcaatcggcatatgcggtcaatgttgtgtggatagtgaaggttggagaatatgtgttgaggggcccgtttttgaaaatgataagataaataaaatcactgaatttggaaaatacagaagagatgcatctggtgttaaatattaa

SEQ ID NO: 7932 - DNA, 912 bp, Methanobrevibacter gottschalkii
  source 1..912: mol_type = genomic DNA
atgttaaaaactaatatttgtggagttgaatttagaaatcctttgatgttggctgcaggaatcatgggaagtaatgcctcatcaatgaactggattttaaaatcaggtgctggtggggttgtttcaaaatcattttctttaaattctcatccgggatatgttaatccaacaactgttgcagttgaagggggcattattaatgcaatcggactttcaaatccgggggttgctaattttaaagaggaattggaaaaaattgaaaggaaaaatagtgttgttattgcttcaatttatggggcaacacctgatgaattttcatcattggtttgtgaggttcaagaattagttgacatgattgaattgaatatttcttgtcctcatgcaatggatggttatggtgcttctattggacaggattgtaatttaagtcatacaattgtttcagcagcaaaagatgcttctgatgtgccgattattgctaagttaacacctaatgtaactgatattactgaaattgcaaaaacctgtgaagatgcaggtgctgactgtttatctttaatcaatacattaggtccgggaatgaagatcaatattgatgttgctcgtccagttttatctaataaatttggaggtatgagtggtcgttcaattaagccaatagctattagtaatgtttattccgtttatgaatcagttgatattccgttaattggtgttggcggaatttataattgggaagatgttgtggaatttatttatgcgggtgcaagagcagttcaaataggtactgctataatggatgaaggtgttgaagtatttgaccatattaatgaaggtttggaaagattcatgactgaaaaaggattttcatctattgatgatatggttggacttgcacatagggagttgtaa

SEQ ID NO: 7933 - DNA, 615 bp, Methanobrevibacter gottschalkii
  source 1..615: mol_type = genomic DNA
atggtatacgaagatttaatttatttaaagataatagaattagtatattgttgttgtctttttggatttgagattatgtcagatggaagttataaagatttaaaatatgaattggaacttaaaaatgccgaaattgatgagctcaatattgagttggaaaataaaaaagaagaaattaataaactgaggttatatgcaactaaattaaaatatgaaaagaaaaatttggaggataaacttgatacaaagatagattatgataaagccacaatgagtgaattggatgatttatctgataaaattaaagaaaaagaagtaatcattgaggataaacaggatcaagttaggtatctcagatctttaattgatgattataaaattcaagtaagtaacaatactgaaaatcttgaaattcaacttagaaagatatctaaaacatatggtgagttattaaaacaaaaggattccattatcgaaaaacaagatgaacaaatttcaaatttacttaaatccaaagaagaaataattaaatctaataaaaccaatataattggtttaaaattacaaaatgaaaaatatcaagaaataattgataaattaacaaaaactaattaa

SEQ ID NO: 7934 - DNA, 1152 bp, Methanobrevibacter gottschalkii
  source 1..1152: mol_type = genomic DNA
atggaatgttatataacttactcagttaaaggatttttagcatttaatagtgaaaatgaattaatatccgaaaaattatttccagaagataaaataattgacagattagctgaaattgatgacaaaaaaatagttgaagaagaattagaaataattgaagaagtttcaagtgattatgatgaaattatcattgagtcaaacaaaagacgttctgattatgataatgaaaaaataattgtaaaaacaccaaatcaaggtggggaatatttaagaaacaattatgaaaaatttaaattagattcagaggaaataacttcaatttatagaaatttagcaatttataaaatcaaaaaagaatcagcttcagaagataaacatctaatccaagctattaattccattgatgaaattgatgaaagcatttctaaactaattgaaagaattagagaatggtatgctctttatttcccagaaatggatgtcattcataataatgagacatacataaaattaatatcacaaaataagacaaaagaaaagattattgaagcaaagcctgatgcgtttccaaatgatattattgaccttgaagaggatataaatcctttagatttagaaattatgaataattatgctaattctatttatgaactccaaaaatcaagaaaaaatattgaagattatattgataaaaaaatggaatcaattgcacctaatttaaaacttttagttggatcatcccttggtgcaaagctaatttcacatgccggaggcattaaaagacttgcagtttatccatcaagtactgttcaaataatgggtgctgaaaaagcattatttagacatttgaaaagtggagacagacctcccaaatatggattaatttatcaacacccacaagtaagaggtgcaaaatggtggaatcgtgggaaaattgcaagaatgcttgctggaatgatctcattagctgttagaagagacgtgtttacgaaaacttttgatgaaaatgttgctgatgaattaacatcaaaaattgaagaaatagaaaaaaataacccatttccaacaaaaacaacaaaaagaagaaatgaagaacgctccaaatctaaaaaaagtaagaaaaaagggaagaaaaggaaaaaaaggagataa

SEQ ID NO: 7935 - DNA, 642 bp, Methanobrevibacter gottschalkii
  source 1..642: mol_type = genomic DNA
atgaatgtatattttaaagatggaaatgtagcaactaagaatttaaatcctggaacttcagtttatggggaagaattaattcaagaagatgttgaatatagaatatggaatcctagacgttcaaaattatcagcagcactattaaatggactggagaatttaaagcttgaagatacttcaaaagtattatatctgggtgcttcaactggaacaacagtttcacacatttcagatgtcttaattaacggaagaatatatgccgttgaattttcaccaacaacagctaaaaaattagttcaactttcacgtaagagatttaatattgctccgattttaggagatgcaacaaaacctaaagaataccttaacattgtcgaaaaggtagacttagtatactgtgatgttgctcaaccaacacaaagtgaattgtttatgaaaaatatcaacatgttcgcaaaagataatgcacagggacttataacaattaaagctagaagtattgatgtagtacaaaaaccaaaaaagattttcaaggaacaagagaagaaattgaaagaaaaaggttttaaaattattgaaaaagtgaaactggaaccttacgaaaaagaccatattgcattattagtagagaaaaatttttaa

SEQ ID NO: 7936 - DNA, 549 bp, Methanobrevibacter gottschalkii
  source 1..549: mol_type = genomic DNA
atgaaaaataatgttttaaaaagaagtctaataatcatttcatttatatttttaattatttgcgcattttcatgtgttaatgctcaggaagataactcagatatcactatgatgactttatctaaaggaggtattgttattcattacccttctaattggggttattctcagtccgattctaattattcaataatgtcaatatctaaactggattcagttgattccgctggtgtaggtcaagttaatattaattttgagaaaaaagctattgaaggagatttttatacttatttgaataacacctataggtcaatgcaaagagattcttctttcaatttaacctcttcaggtgaagtcatggtaagtaatattcatgcatatgaatatatgtattcttctaatcaaaatggcactgtaaaagagcacaaggctgtttggtttgaaaaaggtggacaggcttatgttatgttgtatagcgcaccggtaaatgattttgaagataacttatatgtatttgattatatactatctgatattcaaattacataa

SEQ ID NO: 7937 - DNA, 726 bp, Methanobrevibacter gottschalkii
  source 1..726: mol_type = genomic DNA
atgccaaatgatagagataaacttctaaaaattatggatagtttggaagttgattaccgttctggaaagatttctccagagaaatatagttattttcgttctaaatatgaagataaattaaattctattgatgcaaaagaagctactcaaagaattagatctatgcagggtaaatcaaatcaaactacttcaattaaaagaagtagaaaacctaccaaaaataaaaaagaaaaagaacaggatttagttcaaaaatatattatcaaccctaaaaagggtgatgctaagtataacaaaaaagaaaaaaaatcaatgagtagtggaacatttaaattagtgttgttattggtgttggttgtagctttcactgttggtgtaggttatggtgtctttaatttagatttcaacaatatttctgaaacatctaccgtagctatggttcatgatactgcattccctgatattactgaagatattaaaaatactacaaaaactacttcttcatctaatactaattattcatctactagttataatgtaaaaactactgaagattcttcaagtgattctgattactctgatgggggtagaaattctggttcaagtgattctacttattcaggtagtgattcgggttccggatcttcaggtagtgattctggatcaggtagtgggtcatcaagtaatagtggtggttccgaatctaatggaagaagtgatgaataa

SEQ ID NO: 7938 - DNA, 801 bp, Methanobrevibacter gottschalkii
  source 1..801: mol_type = genomic DNA
atgcaaattaagaatttgatgtctgaaaatttaatcacaatagacaaagatcaaaatctttctgatgcattaaaattattacgcaaacacaatatctctcgtttgcctgtaacaaataataaagaacttgttggtattgtttctgaaagggatatcgctaacaagcttggatcttcaaaatctgaaggcatgcctgcatcaaggtttcatatttcatctgtaatggttaaagatgtaatcacagttttagaaaccatgcaattaggtgatgtagcggaattaatgttggagaatggtattggatcagtccctgtcgtatctggtgagggtatgataggaattgtttctaaagcagattttgtaactcttgctgttggaattgcatttgataagataactgtaaaagaaataatgactggtgatgtagttgcagtttccccaactgataggctaattcatgcaagaagattaatgattgatgcccatattggaagggtgcctgttattgaagaagatgaacttaaaggaataatcacatctaaagatttgatgagggcattcattgactttagaaaaaatgttcctgaaaaacatcaaaaatctcaaattaaagaagttcttgttgaagatatcatgtcttcaaatccatcttctgtatctaaaaaaatgtcaatcagtgatgtttctaaaatcatgattgaaacaggattcaatggtttgcctgttgttgaagacggtaaggtcattggtattataacacaaacagatatattaagattaattgcaaaattagaatcttaa

SEQ ID NO: 7939 - DNA, 936 bp, Methanobrevibacter gottschalkii
  source 1..936: mol_type = genomic DNA
atgaaagataaaacatccattaatagaaaatcaaatactggtgcagttgaacatgtgactaaagttcacgatagggaaggggacataatggctcttgcaactaaagaagttatttctattcctccaactaaatctattaaagatactgctaaagtaatgatggaacatgaatttagaagattaccaattaccgatcctggttctggtaaattgttaggtattgtaacagtaatggatatattagatttctttggtggaggaaaaaaattcaacattattgagaaaaaatatgaagataactttttagcagcaattaatgaacctgttaaagaaattatgactcgtgatttaattacattatctacaaaagtttcaattggtgatactctcaaaacaatgctggacaatcaattaggggctattcctcttgttgatgcggatggaaaacttgcaggaattgtaactgaaagagatattgcattatctttagcaggcatggcaggtaaagaaactgtgcatgaatatatgagtcctaaagtattcaccactacccctggaacaccattagaaagtgcatgtaaaataatggttaggaatggattaagaagaattccaattgttggtggagaagcagacatttctaaagcaaataaaaaattattaggtattttaacatcaactgatgttattaggttcttaaatgcaaaagagttgttcgataatttaaattcaaatttagcttctgatgttttaaaaattactgtatcagaaattatggttaaagacccaattacagtagaacaaacaatgactattggtgaattatgccaattattcgctgaaaaaaatataggtggcgtaccaattattaaagatgatgaaatagttggtattattactgaaagagatgttttaaactcagttagaagagcataa

SEQ ID NO: 7940 - DNA, 699 bp, Methanobrevibacter gottschalkii
  source 1..699: mol_type = genomic DNA
atgaaagctccagttattgaaatcttttcaagttttcaaggcgaaggtcttttaattggtgaaaggcaaatttttgtcagattcgctggatgtaatcttaattgtaagtactgtgatactgaagatagcaaatctgaaaaatcaggaaaattaatgacggttgatgaagtctgcagagaaattaataaaattttaactcctgattgtaacactatttcattcacaggtggtgaaccgagtttatatcctgagtttatttcagaggttagcaaaaattttaatttaaatataatgcttgaaactaatggtacattaccagataatattaataaaattgaacaattagatgttgtttctttagatattaagttgcctgaacattttaatggcaattttaatgaggatattttattaaatgagattaaatcagtaaatttattaagggagaagtccataagtgtatattgtaaagtggtcatattgccttcaacaaaaatagaatcatttaaagaggtaattgaaaaattatcaaaaaatatttcaaacaaaagtaaccttaaaataattatccagccttctagtcctttgaaagattggaaagatattaattttagattatttgaatattctgaagttgttggacaatattttgatgtttccaccattcctcaaatccataaaattttggatattgaatga

SEQ ID NO: 7941 - DNA, 516 bp, Methanobrevibacter gottschalkii
  source 1..516: mol_type = genomic DNA
atgaaaattttagttaatggaattcaatcaaatttaaggttctcatctgctcatgtaattcctggccatgaatcttgcggatttattcatggtcattcttactttgtagatgttgaaattgaaggtgaaagaacaggaaaattcgaatttgttgttgattttaaagatgtaaaaggatttacaaaagaattttgcaatgaacttgatcacagattattgattcctgttttcaatgaattaattgaattcaaagattttgataaaaaaactgattcaattgatggattaaaggaaaataaaacaattcaatttaaaattgacggtaaaggatattcaattccttctgtggattgtgtattgttgcctcttccgtatacttctgctgaagaattgtcaaaatattttgctgaaggtttggcagaaaaattatctgagtcttatgataacttaaaatatgttgcagtttgtgttaatgaaggtattggtcaaggtgcagaatataggaaagagttataa

SEQ ID NO: 7942 - DNA, 597 bp, Methanobrevibacter gottschalkii
  source 1..597: mol_type = genomic DNA
atgtctattattcataaacatattgatgaaatatttgaatatgatggaagccaaatcaatccatcttgggcttttcaggaatttggagtttatggttcttcgattataacttggattggtccggttaatatcactcccgataacttaaaagattttgctgatgttggacttgagataaaatctaactatatggttaattttatttgtgaattctttgatcaacaacctccaaatatgaggattgcttatttaagacaaagacttattgtaatgatttttagagaaatccttactgagtatggaattaaaactaaaagggaaggtgatgatatttttgtggatgatgggaaattatctatttcaatagctagtatttcattaagctctgcaaaaatacactttgcacttaacttggaagataagggaactccggatgatgttgaaacaattgggttatttgatattaaagatgaaaatggaactcaaatatttaataaagataatttgtcagatttaatcaatgaaactgcatccagattcattgatgagttacaaacaattgaaaatgatataagtaaaacaaaggtgttaggatga

SEQ ID NO: 7943 - DNA, 1074 bp, Methanobrevibacter gottschalkii
  source 1..1074: mol_type = genomic DNA
atggaacaagtaagaacaagagactttatttacacaagtgacgatttatattttgcatcaacaaattatatacatccagaagacagagtgatttcatttttaagatacattccagatccagaaggagatagggaaaaagatggtaaaaaatacagaaaagtgggatctgcagaagcttatgaatacttaagagaaaatcatcctgattatttatatttctgtgatgttacaaatgttgaaatgatgggagttccattagataaagttaaaagaataataaaacctgaaaaaagacttttaggtcttaaagatacttttgacaatggaggggaagttaaaaatccagaacttattgcaaaattaatggatgttgctgactttttccatttcatggcaaatattccttatgatcacttaggaatctcaggttccattttaccgggacttcaaaaaagtgatgtttctgatttggattttgtcgtatatggtcttgacaaccatagaagggcaatttctgcttttaaaaaacatagaggaaaagaagtatatatcaaagaagttgacaaacacatcacggttgaaggcattacaaatgattattgggattttgtatacaataaaagaatgagtgatgaaagtttaactaaagaagaattcagatggtatgaaaatagaaaagcaaataggggaacaataaatggaactttatttgatattctagctactagagactatgatgaaattgaaggaacttggggagacactgtttatgaacctcaaggcattgctcaaattgaatgtgatatcgtaagttctcttggtgcattcgataacccttcatcttacactattgaaaatttaaaaatattggagggtgttgaagcacctatcaaagaaattgtttcatttacacacacttatgcaggtgaagtaattgatggagaacatataatagcaaaaggaaaagtagaaaaggtaactatccaaggaaaagaagattattacagaatagttgttggaaccacacgtgaatcaattgatgaatatttaaagcttaaagaaagtcctgcttaa

SEQ ID NO: 7944 - DNA, 1479 bp, Methanobrevibacter gottschalkii
  source 1..1479: mol_type = genomic DNA
atgagtgagaaaagaatagaatggaatagtaattttgcattcatgatggctatgatcggttcagctgtcggacttggaaatatttggcgtttcccaaatgttttatattccaacggtggaggatctttcatgatcccttacatcgtttcattattcttattaggaatatcatttgttctagtagaatatgcagttggatttagatttaaaaaatcaattggaagaatactattctcaattagtaaaaaattagaaccaatagcatggtttattgtattaatcgtatttttaatcacaacatactatgtttgtgttgttggatgggatttaatttatgttgttttaagtttcacaaaagcatggggtgcaaacccagatacattctttgcaagcaacgtattgcaagcaacagattcaatatctggaatattccaaattgtaccaattgtgcttgcatcagtatttgctatttggtttatgatatggtttattgttaaaagagacttgaatgatggaattggaaacgtaagtaaaattttattaccaacactttgtttaatggtagtgataattgttgtattttcattaaccttaccaggagcatcaattggatacacacagatatttacccctgattggaatgcactaactaacttaaatgtatggttagcagcatttggacaaattgtattctcccttagtttaggtatggcaattgcaatgacctatgcaagttacttgccggaaaaatcaaggttaattgacagtgcagtaacagttgcattctcaaattccgctttcgaagtatttaactcaattggaatattctccattttaggattcatggccttatctacaaaaattccatttgatcaactagtaactgaaggaacaggacttgcatttgtagtattcccacaagtattcaacactatgggaccaatgggatcaattattggaccattattcttcatatgcatattatttgcaggaattacatcagctatagctcttcttgaagtagtcacatatgcaatttctgaaaaatttaatattgaacgaaaaagaacagttacagtgatttgtattgtaggatttttaatctcaaccatgtttgcaaccggaattggaagtacaatacttggagcattcgatgcattcttaaacaactttgcattattactcggaatccttattgaatgcataatcttcggttggatttacgactttaacaagttaatagaaacattaaacaaagattcaagaatcaaagtaggtaaaacttggaaagcagtaattaaatacattttaccaatttgtattgctgttttatggatacaaggagtttactccacaattacaagctcagataatttaagtttaacaattatgggaatactaactgtaatattaattgtattgccaatcgttttcgccaaattacctgcaaaaaatgaagattactacaaagtagactaa

SEQ ID NO: 7945 - DNA, 744 bp, Methanobrevibacter gottschalkii
  source 1..744: mol_type = genomic DNA
atgggaaaactagatggtaaagtagcaattgttaccggttcaacctcaggtatgggtcgtgattccgcaaaactctttgctgaagaaggtgcaaaagttgttgtaactggaagaaacgaagaaagagctaaagctgttgttgatgatattaaatcagagggaaatgaagcaatttatgttattgctgacatggccaatgttgatgatatcaaaaaagttttcgatactactatggaagaatatggtactgttgatattttattcaacaatgcaggtttattaagtgtcactcctcttttagaaatgactaaagaagaatgggataaagtatttgatgtagatgtttatgctgcattatatttaactcaattagtagctcctgtaatgaaagaaaaaggaaaaggtactattattaacacttgttcagtcgcatcttatgctgctcactttggttttgtgggttacattagctctaaacatgctattgcaggtcttacaaaatcaatggcatttgaacttggtccagaaataagatgtaatggtatcgcaccgggtgctatccacactgcaatggttgatagtattggtggagttgaagcattacaaatgatggttgacggtgcaccaatgaaacgcgtaggtcaaggagaagatattgcagcacttgcattgttccttgcttctgatgagtctgaatttgttgatggtcaaatcatcagatgtgatggtggatttgagtgttaa

SEQ ID NO: 7946 - DNA, 795 bp, Methanobrevibacter gottschalkii
  source 1..795: mol_type = genomic DNA
atgataaatttatcttcaataaaaatgcacatgtattgtccaatgagtttatatctaaaaacacatgttgatattgatgaaaatgacatgtacaattgttatttggaaattaaaaacttaaaaatagatattcaagatttaatgcaaaaaaatattcgtaaaatcaaaagaacaatgagtttagaagaaattgaaaaaatattatctcaaaatatttatgaatacatagaaaacacaactaaatcaatgaaatcttcaaatattgaaatcacttcagaacagattagcgagataaatgatgaaacatacttcaacataaaaatattaagcattaaatcaaaaaaagcaatgacaatattaaataaagatggatttggcattacagaaatgtttttcccaaattgcctttattcatatttaattaaagatacacaacttgaattaatcggaatatgtgataaaatagagataattgacggtcgatattatccaataagcattaaaagctcaaatccaccaataaaaggagtttgggatcaggatgcaatagaacttgttgctaatgcaatacttcttgaagaagaatttgatacagaaatatttgtaggatttgtcgattataaaaaaattggtgacagacgacctgtaataatggatgtgaatcttagaaaatcattatttagtgtgataagggaagttaaagaaataattgagaataaaaaacttccaaacattaaaagaaattctaaaaaatgtagaaactgtgaatatgaaaatatttgtatgaaaaaataa

SEQ ID NO: 7947 - DNA, 660 bp, Methanobrevibacter gottschalkii
  source 1..660: mol_type = genomic DNA
atgaatgattatacattaacgattaaatctgatgagaaaaaaggtgtattatatgatattactgatgttatcactgcatatggtgctaatattagttatgttcatctttttgttgaaaaaaataacatgggttccattaatcttgaacttgaacatgttgaaaatattgaagatttaataaaggatttagaaaaaatcaaagaaattaaatccgttgaattgcatggttctcagttagatatttatggtaaacgtataattattattggtggtggtgcacaagtatctcaagtagctatgggtgcaatcacggaggcagataggcataatatacgtggtgaacgtattagtattgatactattccattagttggtgaaaaatcattagctgaagctattgaggctatttcaagacttcctcgtgttagtgctttagttttagcaggttcgcttatgggtggtgaaattactcgtgcggttaaaaaagttaaagaagagagtaatttaattgtaatttcacttaatatgcctggtagtgttactgattatgctgatttaattatcactgatccaattcaggctggtgttttggcggtaatgtctattgcagatactgcagtatttaatattaaacgtttagatggcaatattcgtttttaa

SEQ ID NO: 7948 - DNA, 264 bp, Methanobrevibacter gottschalkii
  source 1..264: mol_type = genomic DNA
atgaaatttgttatgaggccgtatcacataataagtcttggaggatacattgttgaatgggatttcccttatagaaatcttattgttgttaataaaacctctgaaccaattaaaattgaaattcctgtttttaatgaagaatggattcaagaacatagggatttaggactggatatcattccagttaataaatatgataattatttgagtatgtggaaaaaagcacatgctgaattagataagataaggccaaaaaatgaatga

SEQ ID NO: 7949 - DNA, 999 bp, Methanobrevibacter gottschalkii
  source 1..999: mol_type = genomic DNA
atgtattcaaatatacttacaaactcaatagttgcagtaattcttacagttattgtttgttttgtaatttcgacattgcttccaggcattgaaagaaaatatgttcatgcaagaatccaacaaagagtgggaccattggtatttgctccgggtattatggctccattaaaattcttatttaaggaaaatgttgaagtttcatctcctgttccaaagttatataaaatcttgccgattttatgtttcattgtgattttatgtgtattcattgcattaactcctcaagcttacaaaattccagcactttcaagtttagtggccattgttggttttttaaaagtagaagaaatatgctatgttttaatgggagcattatctaaatctgtaatgtcagttagaatgccgtttccggatcgtataaaaggagcagcacatattaaagctccattgtcatttattgaagatataagtgcaaaaagatctttaagaatgattacttatggatcgttcccattgtatttagcattgtttgctccggtaactgctgctagaagtattttcttaaaggatatagttgcatttcaacaagttcatgggccatttttatttactgtagctggtggaatcgcagctattgtattttttataggatatatgataattttgaatgaatatccattttcaattattaaagctaaatcggatgttattgaaggaccatatatggaatatgctgctaaatacaggtctattgtctttataacaagaggatttttcatgtttgtattgggttctgtattttccgtattgttcattggagttccaccaagtatattttcattaggaattcttgttaatattgctgttgctttaatatttgtatttatgatgggtattttctcagcatttgcaccagtatttacaaacaaacagttattgccaacaattttgggaacaactctgcttggtatattggctattgcacttgggttattatag

SEQ ID NO: 7950 - DNA, 1131 bp, Methanobrevibacter gottschalkii
  source 1..1131: mol_type = genomic DNA
atggatgaaaaattaccaacaaataatataattgaaacagaaattccaatgggtacagttcaccctgctgcattggaaccatataaagtaaggttttttgttgaagatgagataattcaagaagccgaaattacaattggtgttaatcataggggaatagaaagaattatggaaggccttcctgttcagaaggcaaattcactcactgaaaaaatttgtggaatttgttctaattcacatatatggaattcatgcagaactgcagaaataggtttagacattgaaattccagagagagctacttatattcgtgtaattatgggggaacttgaaagattacattcacactttttgtatttggctcatggttgtgaggtactagctcatgaaacattttcaatgagagtgttttatttaagagaaattgtcatggaattacttgcaatgattggaggaaacagagttcaatatggttgttctgttttaggaggagtaagacctagatgtgaattagatgctaacaaaatacaaaggcttaaagatgatatggataaactagaagggggtctttcagattttgctgatagatttgttgcagatcctattgtgttatcaagaattacgggtgtgggagtattaccacaaaaacaagctattaaattagctgtaaccggaccatctcttagagctacaggcatcgcaagagatttaaggactactatgtttgaatatgataattttgattataatattgtaacacaacaagatggtgatgtaaaatctaatttattaatgagggttttagaatcttttgaatcaattaagattataagacaggctattgcaaatattcctgatggtaaattagttaacaatgattgggatatggttgatactgaggatattgctgaaagttatattgaagttccaagaggaacattgtatcattcttatgcattggaaacaggtagaataagacattgtattatcagaaccccatcaatggcaaacattggtgcaatgcaatatgcctgcattggaaaccatcttacagatggtcaattatgtattgtgcaatgtgacccatgtttcacttgtactgatagggcaattgaagtaattaggagatag

SEQ ID NO: 7951 - DNA, 447 bp, Methanobrevibacter gottschalkii
  source 1..447: mol_type = genomic DNA
atgggaatcaaatcattttcaagagcaagggcaatacatgtcatgttggtttatactggtggatgtaatggatgcgatattgaaattgttaattcaatattatcaccaagatttgatgctgaacaatataatgtgtttttaacttggaatcctcgtgaagctgatgttttagttgtgactgggcctgtcacacatttaaataggaaaccattggaggcaatttatgatgctattcctaatccaaaattagttgtagctgcaggaagttgtgctttaatgggtggtgtttataagaattgccatggagatattccttctgaagaaattgaaggtcctgttgataaaattatacctgttgatgcaaaagttccaggttgtgctgtaaggccacaagatgttttagctggtgttgtgtcacttttacctacattattggatgcggattag

SEQ ID NO: 7952 - DNA, 492 bp, Methanobrevibacter gottschalkii
  source 1..492: mol_type = genomic DNA
atgagaaatttaattaaaatagctttagaaggagcatttactaactttaaaagaatcttttttgcagctgatagagttacagatatggatatgaaaaagcaaattgcaactctttcagtagaagtagatgatagagttgatgaaagtgcatgtattggatgttctggttgtgctaatgtatgtccaactaatgcgattgtaatgaaaccattagcccatccagttaaattgactgagggttgggttaaagatcaagtacctgaaattatccttgaaaaatgtgttgtatgttattattgtcatgatttttgtccaatattttcactttatggacaaaaaggcgctattcatccatcttgtgttggtgatcaggaagtcgatgtttcagaattccttgaacagccatttaaaatatccgatgataaacttaaaattattgcacagtatctgtcagataaaacagtattaaaaaataaagaggatggtgattaa

SEQ ID NO: 7953 - DNA, 1407 bp, Methanobrevibacter gottschalkii
  source 1..1407: mol_type = genomic DNA
atgtttttaacaactagtacatgtgaaggaaaaagagaatgtattaatcagtgtcctacaaaagctattaaatttataaatgggagggcatttagttgccttacttgtggaatatgttataaaaactgtccaaatgatgcaatattccaaaatagctatggggggtatgttgtagacagggctaaatgtaatggctgcggaatgtgtatgtacaattgtcctacaaacaatattactattgaagatggaattgtatatggtatttgttcccgttgtggagtttgtcatgaagtttgttcaaatcgtgttgatgggtatgaacttgaaaaagataaacaattaaatttaattagatcattacaaattctcaatcctccattaaatgacgttccatacaaaaaagaaagcgaaactaaggtagtcacaagaaattacttcggaactgatgtggagaattgtattttatgtggaagatgtcaggagtattgtcctactggagctattcatgttaaaatagattgggatgaaggaatttgtagtggatgcaggttatgtgaagatgtttgtcctaatgattcaatgaataaacatcaaattgttaataaaaaatcttgtactctctgccttaattgtatgaaggcttgtcctcataatgcaatttctgttgaggattcatcaattgttgtcaataaattgaaccaaaaacctaatggttcgattatttcatgtttaaattgcggattatgtgctgatttatgtgaaaatgaatctcataaaaaggttgatggtaaattaaggtatgatccaacattggatatggagaatgtgaatcatgatgtggctattagtcattgtcctgttcacaccttaactgaagatgatgaaatgttcatttatgatgaatttaatgatgaggagttacctatattgtccggattctgtgtatcttgtggaaattgtgttcaggtgtgtaatgaatatggtgcacgtcaatctatgacccagtcatgggatgggaaagtttcagaggattgtatatcttgtggaatttgtgctgaagtatgtcaggaagaagcaatcacacttcacaggggaagtatttctgttgatttggacaagtgtatattatgtgaaaattgtgctgtgcattgtccagttgatgtgattcctaaatctacaatgtataaaaatgaaatcaaagatggattcaatttcattgaacaaaaattatgcatgcattgtggtttatgttataaaacctgttcatatgatgcaattgaaaaaattaatgatgaatttgttgttaatgaagaaaattgtacatactgtggtgcatgtaaaaatgcatgtcctgcaagagcatttttatttgaaagaaattttaaagattcactagagggtatttaa

SEQ ID NO: 7954 - DNA, 252 bp, Methanobrevibacter gottschalkii
  source 1..252: mol_type = genomic DNA
atgatgttaagtttaggaccaatcatattcggaataatattgggtgtaattattggatcccaaatcaaacttaaatgttgcgattcaaattttacttggacatcatttgtaataatcattattgcaggaatcattattgcatggcaatctggcaattatccgttttatacagatttaccaatttcaactgcatttgtatctgcattaataggaatttttgtaggcaaactactatttgcaaggagtaaataa

SEQ ID NO: 7955 - DNA, 477 bp, Methanobrevibacter gottschalkii
  source 1..477: mol_type = genomic DNA
atgagtcaaagtagtattattttaaaattagtttctttaccaatttcaatgatattgatttgtttaggtattatgactattcttggcggtcatattactcctgggggaggtttccaaggtggtgctatgatagcaggcggtgttatattatctgtccttgtgtatggattagataattctccgttggaattctcacatttatacattgaagttcttgaatctatcggggcattaggatttattattttaggattaattggattgtttgtaagtggatttttcttatacaatgtgggtaccgatttattgaatgtggtgccgcctacaattcaaaacgtattacattatcccgatgttactaatgcaggtattattccatacctcaatatatttgttggattaaaagtatttgtaggattatctgcaattgttatcgcatttgcaggatttaaaaaaattacagaggagagtaaatga

SEQ ID NO: 7956 - DNA, 282 bp, Methanobrevibacter gottschalkii
  source 1..282: mol_type = genomic DNA
ttgtctagtcacacaactgttcgtaatttaatcgcatcagtaatggcagcaatattttcagttactttacttgatgctgtatttcatttaagtagcatgattaatgcaggtgtaagtaatatttacaatgttttaggaactaaaatagctccaaatatggtcactgttgttatttttgatttcagagcttatgataccttgggtgaatcaattattttattaactgctggtttagttgttttacttatatttggtagaggattattgggggacaaacaatga

SEQ ID NO: 7957 - DNA, 336 bp, Methanobrevibacter gottschalkii
  source 1..336: mol_type = genomic DNA
atgagcttatatgacaaaatatttgatgttgtgaaacaattcagaaaattgttttcaccggggcctgtaactaatgcagatgtttctggtagtattacggcggaaatatttttaatcgtttcattagttctagcaactatattattgaggcatattagtgttttacttgcaggattagttattttatttgttgctgttgttttaattataaatattccacttattcctaagtttaaaattgaacaagaagattctctagataaaatgttattttatgcaattgtaacacttgcaattataggcgtagtcatgtattggggtggtaatcttgtctag

SEQ ID NO: 7958 - DNA, 1455 bp, Methanobrevibacter gottschalkii
  source 1..1455: mol_type = genomic DNA
atgaatgaattaattccacttatggttattgttccattaatggcagcattaattattagtgccttttcaaaattcaataaagcaactaagatttttgcatttgtcattgcgatttgccttccattaattccattattgtcaaattatggcctccattactttggaggatatgaaccaattttggataatgtgacaaatgttgtgtatcatcctgcaattacatattcattcacattcttccaacagatattcattgcaatgattggtcttttaacatttttagttgtatttgtctatttaactaaatataaagagatttctggaccttatttattcttgttgttcttaggtactgcagcggttactgcaatgattttaactgatgacatatttcacatgtttgtatttttcgaaatcttggcacttgcacaagttggtatagttgcagcatcatcaattgattacagttatgaaatggctttaaagtatatgattttgggatcaattggaagtccgataatgcttttaggaattggattcttacttgcattaacgggtagtgtaaatataactgatattgttactgcagttcataatggtttagttaatgccaaatctccagtatttttattatcactcggattaatcttctttggttggttatacgcatctggtttaccaccattccatactataaaatctggaatttattcaaaagcagaacctcatggagcagctttacttcaatcatttactgttatttccatgatttcaatcgtattgatcatgtacagaatctattctgtattgccaatattcgaagttctcatagtatttttctctatcttagctatggtattgggtgtttcactcgcattaactcaaacagacttcagaagaatgattggatttttagctgttggtgaattaggtttcattggtttaggtattggtcttggaactaattttgcaattactgcaggacttttccaagcattaaatgaaatcataattactgcattattatttattggatttggtgcaatagttgaagcaacaaatgaagttgatacacgtaaacttgggggtcttttagcttaccatccaaaagtaagtatcatgcttttaattggtggtttggcaatggcaggagttccaccattaagtggttttcaatctaaattaatgcttgttcaagcttctttaagttgcggattccctgaattatctatattggccattatggtaagcatagctacatttgtagtgttcgtaaaaacattctatacaatgtttttaaaaccaaaaccagttgaattggatgttgaaaataaagaggttcctcgtgctatggtatttgtaatgggaatattattaattataatcgtgctcttaggtttattcccaaatcttattatacatggaatttctagctttgtaggaggaatattatga

SEQ ID NO: 7959 - DNA, 387 bp, Methanobrevibacter gottschalkii
  source 1..387: mol_type = genomic DNA
atggcacaaactcaacttgcgatattgttgacttcagttgcattggtcattgtcggactttattctgcaatttttattgataatatcataaaaaaaataattggtattagtttcattgaagaaggggctaatttattcattgttgctattggttataaagcaggtggtgttgtacctattataatgccgggtatggacacatcatggtttgcttcaaatgcggcatatccattaccttttggtttagtacttactagtattgtaattggtgcaagtacattagctgtaatgcttgctttagtaatggttctttacaaaaggtatggtactttaagcactagtgtaatgttagcagatacatcaaaacaggaggaatatgatgaatga

SEQ ID NO: 7960 - DNA, 234 bp, Methanobrevibacter gottschalkii
  source 1..234: mol_type = genomic DNA
atgattgaattcatattatgtttaataacagttttaagtgctattcttgctctcatccaaaaagatttattaaaagcagcaattttaacaggattttcaggaggagctcttgcagttcttttccaaatattattggcacctgatgttgctttaactcaagctattgtgggtgctgcaattgtaccggtatttattgctttagctgttaagaaaactcagagggtggataactaa

SEQ ID NO: 7961 - DNA, 423 bp, Methanobrevibacter gottschalkii
  source 1..423: mol_type = genomic DNA
atgatggagtatattcaatcagctcttctcatcatatctgctattttaaccataatttctgcaataggccttattagtttggataagaatacaaaggatgttgtttatgcaagaattcatattgtaggtgttttcgatattgcttgtgttattgcaatgattgcaataggtcagtatttacttgctggaatttactttattctagcaccttttatagcacatgcaatcgctaatgcttattggaaaaaagaagatagagagaataatttagatttacaaaatattggagaagatgtaggtgaagatcatccatttttacatcctaaagaaaaaattcaagctttagaatgtgaggattcagaaaaatttaaggtggacgaaaggttttcagtaactacattggaaattgaagaggatgagtaa

SEQ ID NO: 7962 - DNA, 267 bp, Methanobrevibacter gottschalkii
  source 1..267: mol_type = genomic DNA
atggatatattatttgtttcaaattatattgtggttattgcattgatgataatgatgttggctgcattaagggcaagtgcatatgaatccacatctatggggcttttaggaagttcaattgtggtaaacgcatttgcagttgcattattaatcatcggtggattatacaaccttgaattctttagagatatatcattagctttaatattctttggttttgtgggcactgttgctttcgctgtagttttaggaggtgatgatgaatga

SEQ ID NO: 7963 - DNA, 315 bp, Methanobrevibacter gottschalkii
  source 1..315: mol_type = genomic DNA
atgtttttgactagaattggttatggaattatttatttcttggaccttatttatgaaatccttaaatcaacatttgatgttgcatttaatggaattatgagaagaaatattaatcctgttgtctttgacattgaaacggttttggagagacctgtttcacagacaatattggcaaatagtatttctttaactcctggtactttgtctgttgatttagacagtgaaaataacattatcaaagtagctactatttctccacgaaaaaaagaggatgttattccttttgagcagtatataaagaaaatgttagagtaa

SEQ ID NO: 7964 - DNA, 966 bp, Methanobrevibacter gottschalkii
  source 1..966: mol_type = genomic DNA
atgaatttagttgaaaaattagaaccgataataatcttttctgcagtattaattggaattcttgcaagtaatataaatatagctcagcataccaattatttaataaatatattcttatgtttaatgatatacggattattcttagaggttaatcttaatgaattaaaaaatagttttaggaatattaaattcacattaaccagcctaataattaacttcatatggactccattattcggatattggattggttcaatatttctaaatggaaatctagacattttaattggattttttatgttaattataactccatgtactgattggtatttagtatttacaaagcttgcaaaaggagatttgaatttaaatttatcaatactgccattaaacttaattttacaaataatattactcccaatttatctaataatcttcttttcaagtaaaaattcaatagactacacacaaatcatttattcaattttaataataatcataataccatttattacagcacaaattacaaaatttgttttgataacatcattaaaagaaagagcgataaatataatctccgatttagaaatttggtttttatcacttgcagttttttgcatattttcaagtcaaggaaaacaattatttgaaaatctaaacttcttaattacaatattcctgccattaatcatattttttattgtaaattctctggtggacttattaatatctaaaaaaataaacttcacatatcccgaatatgttagtttaacaatgacaacattagcacgaaattcaccattagcgttagctattgcaataatttcattccaaaatcatgaattagtatccattgcacttgtaattgggcctttgatagaattacctattttatatattatctctaaattctgtttatggatcaaaaacaccaaattattttcatttcatgattatactatctaa

SEQ ID NO: 7965 - DNA, 705 bp, Methanobrevibacter gottschalkii
  source 1..705: mol_type = genomic DNA
ttgtcgtcttataaggggcattctatatttgcatttttacttgcgtgcatgttttttcacaatcctctgttaatttctttgacattaataggtgcaaatattccagattttgatcataaattcaaaaaggataatgtatataagatgattatcttggggttaataatttttatatcactttatattcttaaattaccttattatattggtctgattattgtatttttaggtataacattttatttctctgaacatcgtagttttacacattcactttttggagtattgacattaactgctgctgttagtttaatattgatttgggcattacaattaataacaatagttactacattaaataatcattatctgattttagcaatattgatttctttattgagctttttattcttaaataaaaaattattgatggtttttttaccaatatttttcatttctttgtttgtaattaaaacaggagatattgcatatactgaaatagttttaagtttattgttaggcatattttcacatattgttcttgattcatttactccatcgggaattaaactttttgctccattgtcttcaaaaaaagtttataaaaattttggactaacagtaatttttattttggcaattttatctatattttatcatgcatcatctttatttaaattgtttgaaatgtatattaaatattag

SEQ ID NO: 7966 - DNA, 741 bp, Methanobrevibacter gottschalkii
  source 1..741: mol_type = genomic DNA
atgcatttaaaaaagataggtcaatttgaaaatttaaaaatgggttatatctcagatttttccggtggttatatttcaagaaataaagatattttaaatcatttggaattatcgtctcttaatcagtttattttagaaaaatctgtttatggtactccaatttttaaattaggtaatggtggaaagaaaatactggttctatctggaatccatgggaatgaattacctcctcaaattgctaatgtatatttgataaatgaattgttaaataaaaaattaactaatactgtttatttaatcccttttgcagctccaaaatcttccatgaataatgaaagaacttttaatgaacttgatttaaatagagcatctcacattaaaaattcagtaagtaatttaatcatgcaggctattgaacaattaggcattgtcgctgttggtgattttcattcaacttcttttaattcaaatcctggttgcgagtctattttttcatctaaatctccttctcctgaaagttttttaatggcaaattatatttcaaggaatgttggttctgaattgatttcttttgattttgcaggttctatgtataaaggagctattgaagatgtttgtaatttaaatggaattccatctgttacttgtgaagttttatctccatttggcaatgttggtaggggtactgttgagacatcttttaatcaaatgataagttttttatcttattttggaatttaa

SEQ ID NO: 7967 - DNA, 1923 bp, Methanobrevibacter gottschalkii
  source 1..1923: mol_type = genomic DNA
ttgaagaaatatattaagagattaatcagacttgttaactatgaaagagatgctgaaatagacttaatgacacatgaaataagtacaatgtctggtaaaaaacgagaagaattaggaagggcaataaataaagttaaaggaaaaattataggcaaagaattaggtttacaaatcgttcaattcggaagatctgagagaattgaaactgaaatatctgtgggagacatggttttgattagtaccgataatccccttaaaagcgatttaactggaactgttaccgaaaagggagccagatttataaaaattgcatttgataaaaaaatccccaaatgggcgatgaaaaagaaagttcgtatagatttatatgctaatgatgttacttttaaaagaatggaagataatttaagacatttaaatttaaggggaaaagatgcgctagaatatattttaactgaaagagatccaagaaaaaataaacaaattccttatattgattatattgataaatctcttaatgattcacaaaaacaagctattaaaaatgctctgtcttgtgaaaatttctttttaatacacggaccctttggaactggaaaaacaagaactctagttgaattaatatcacaggaaacaagacaaaaacacaaagtattagctacagccgaaagtaatgctgcagtagacaatatcttagaaagattaatgaataataaacaattaaatctaacaagacttggacatccgcaaagagtatcagaacataatattactcaaactttagcatacaaagttgagaaacatgaattaaataaaaaaattaaaaaaattcacagaaaaattgagaaattaatagaaaccagaaatacccatacaagaccaacaccccaattccgtagaggctatggagactatgacatattacataatgcttcaaaaggaaaaggcggtcgtggaattagtcctgaaaaaatgaaatctatggccagttggattgaatgcaatcaagaaattaatgaatcatatgacgatataaagagagtagagaataaaatgattcgcgatattatcgaatgcagcgatgttattctatcaacaaactcatcagctgctcttgattcaatagctaaaactaaatttgatgttgcaattattgatgaatcatctcaagccacaatacctagtatattaatcccaatagctaaagctaagagattcatactcgcaggagaccataaacaactccctccaacaattataagtgctaaatctagagatttagaaaaaacattgtttgaagagttaattaaactttatccatacaaatctcaactattaaatgtccaatatagaatgaacaaagcacttatgaaattcccaaacaaagaattttacaataatggattgaaaagtgatccaagtgttgaggaaataaaaatagatgacctactcgaccataatcatcatgaagaagccttgcttttcatcaatacatcaaatgtatataataataaagaaaaacgtttaaaagattcaaaatcaataataaatccagtagaatccgaaattacaattaatattgttaaaaattacttagaatctggaattgataacgaagatatcgggataattagtccatatgccgaccaggttaaagtaatacaggataatactccagttgaagtaaaaactgttgatggatttcagggaagagaaaaagaaatcattatcatatcaaccgttagaagcaataataatggaaatataggatttttaaaagatttaagacgattaaatgttgcaataacacgagcaaagagaaaattaataatagttggaaacaaagaaactttaaaaaatagtcccacatataaaagacttattgaatttattgaaaatgaaaatttactaattgatttatag

SEQ ID NO: 7968 - DNA, 1179 bp, Methanobrevibacter gottschalkii
  source 1..1179: mol_type = genomic DNA
atgactgaaaaagtagttttagcattcagtggaggattagatacctctgtttgtgttaaattattagaagaaaaatacgatgtggaagtaataactgcatgcgtagatgttggacaaggtgaagaagaaatggaaagagcaaaaaccatggcttctaaaattggtggactaaaacactacaacattgatgcaaaagatgaatttgcaaatgaatacatcgcacgtgcaattaaagcaaatgcagaatatgaaggatatccattaagtactgcacttgcaagaccacttatcgctcaaaaaattatcgatgtagctgaaaaagaaggtgcaactgcaattgcacacggctgtactggaaaaggaaacgatcaattcagatttgaagcagttatccttgcaatgtctgatttagatattattgctccaatcagagaattaaacttaacaagaactgaagaacaagaatatgctgcatctaaaggaattgaattaagctccgataaactttacagtattgatgaaaacatttggggaagatctattgaaggagatattttagaagacccatcaaatgaacctcctgaagaaatctatgcatggaccaaatcttggaaagattcaaatgatgaacctgaaaaagtaacaattgagtttgaagaaggtgttccagtagcaattaatggagaaatgatgcctttaatagaccttattagaaaagcaaatgaaattgctggaaacaatagtgttggaagagtggatactattgaaaacagaatgattggtcttaaaagtagagaaaactatgaagttcccggtgctaaattattaattgcagcccatcaagctttagaagaactagttttaactacagatgaattaaggtttgccgaatatatgtctacactttatgctgacttagtctacagagcattatggcaagaaccattaagagaagatttagatcaagcatttgataaaatgcaagaaagagtaagtggagaagttgtaatgaaactcttcaaaggttccatccaacctttagtaagaaaatcccctttcagcctacatagtattgaacaaattacttttgaagacaaagaaactgaccaaagagaagttgaaggtatgattaaataccatggtcttcaagcagcaaattatcagaaattaaacagatag

SEQ ID NO: 7969 - DNA, 726 bp, Methanobrevibacter gottschalkii
  source 1..726: mol_type = genomic DNA
atgtccaaacttaaccaattacaagaaattattgattcatctgacaatatagtatttttcggaggggcaggcgtttcaacagaaagcggaattccagatttcagatctgaaaacggaatatttgaaagtttaaataaatatggcaaaacacccgaaaatattgtttcacatagctattacatagaccatactgccgaatttttcaaatattataaagacaatcttgtttttaaagatgctaaacctaatcctgcacatattgcactagctaaattagaagaaattggaaaattaaaagctgtagtgacacaaaacatcgatggacttcatcaaaaagcaggaagtaaaactgttttagaacttcatggaagtattcacagaaattattgtcaaatatgcggaaaacaatatgaattaaattccgttttagaaagtgatggaataccaaaatgtgaatgtggaggaactataaaaccggatgttgttttatacgaagaacctctaaacagtgcagttttaaatttttcaatagattacatctcaaatgcagatacattaatcgttggaggtacttctcttgttgtttatcctgcagcaagccttataaattattttaatggaaaaaatcttgttttaattaataaaagtgaaacacaatatgataatcttgcatcacttgtcattaacgatgccatcggtgaaactttttcccagatcaaaatctaa

SEQ ID NO: 7970 - DNA, 717 bp, Methanobrevibacter gottschalkii
  source 1..717: mol_type = genomic DNA
atggattatgttaagggaatttttaaaaatcgtcctaataggttcatagccgaggttgaagttgggggtaatttggaaatagctcatgtgccaaatactggtaggtgtaaggagcttttagttgatgatgctgttgtttggcttaaagttgctgataatccaaaaagaaaaactagattttcacttcattttgtagaaaacaaaaatgtgttagtatcactttactctcaacaagcgaatacaattgtgtatgatgcagttattgagggtaaaataaaagaacttaatggttactctatttatcaaagagaaaaaactattgataattcaagaattgatatatatcttgaaaatgaaaccgaagaatgttatgttgaagtaaaaggagtaacattaattgttgatggggaagctagatttcctgatgcaccaactgagagaggttcaaaacacttaaaagagttaataaaacttaaaaaagaagggaatcgttgtgttgtattctttttaattcaacatcctgttggaaaattttttagaccaaattgggaaaatgatcctaaattttcacaaactctaaatgaagcatatgaaaagggtgttgaaattcttgtttatagatgtgataatcagttagatggtataaatttaattccagaagctttagattttgatctgggaaaaagtttcaccgatggcatcgttaatgacaagtga

SEQ ID NO: 7971 - DNA, 1527 bp, Methanobrevibacter gottschalkii
  source 1..1527: mol_type = genomic DNA
atgatggttacggattataattgtgaatatttaggattgtctagattatgtttgatggaatctgcagggaagtctctagcagaagaagttggtaaaattgcagtatacacatttgcaaagcctataaaagttgttattttcactggttctggtggaaatggtggagatggttttgtagcagcaagatacttactaaataggggttatgatgttgatatttacatgttaaaagataacattcgctctgaagatgcaaaaactaatcttgaaatcttaaagaatatgaagccacgtttgtctcgtttgaatatttttaatttaaaaacattggatgatattaataattgtgaagttgttagtgatgaaactagtgatttcataatagttgattgtcttttgggaactggaattgatgggaatttacaaactaatattaaaagagccattgaagtaattaatgaatctaatgggcttaaaataagtgttgatgttccttccggaatgaatccattaacaggtgtggtggatgatttggcggttattccagattatactattagttttcataaaatcaaaacaggagttaggaatgctgatgaagaagcggttggcggtataataactgcagacattggaattccatttgaagcggaatattttgttaattatggggattttttaagacttaaaaatagggattctgattcacataaaggaaataatggtcgtttacttattgtaggaggatctgctaattattctggtgctcctgcaattgcaggaatggctgcaattggtgcaggcgcagatttggttcatgttgcagcacctgaaaaagctgctgaagctataaaggcgacatctcctgatttaatagttaactctcttgaaggggatgaattatctctggaacatggtgaagagataatcagattatctgaaaatgttgatgcaattttaattggtcctggagcaggaatatctgatagtacttctaaattatttaatctgcttgtagcaaaaattaaaaagccaattgttttggatgctgatgcattaaaacaagttgaactgtctttaattaggaatcgtgaagatattattttaactccacatatttttgagtttaaatcatttttcaaggttaaaaatgatttgaaattagatattgattcatatgattttaaaaaagttgatgagaatatcactgaaatccaatttatcactaaccaaattaaaggaacagtcattgttaaaggaaaatatgatttaattttatctgaaaataattttaaaattaataaaagtggaaattctggaatgactgttggaggtactggtgatgcactctctggtattgtggttagtttatctgctcagggtttaaatgcttttgatgccgcttcgttagctgtttttattaatggtcttgcaggtgacagggcatttgatgagaaaggaaatgggttttcagccactgatttagtgtcttttgttggtaatgtgattaaagatggattatgttaa

SEQ ID NO: 7972 - DNA, 1134 bp, Methanobrevibacter gottschalkii
  source 1..1134: mol_type = genomic DNA
atgagaaaaataacaataagacttttaaccagattacccacaaaatatgtgacaatcggactactattaattatcgcattatttgtttatggaatattaggttcatattttataatgcacctgaatattattgattctatttattattctattattaccatggcaactgtaggttatggagattatacaccacatacaggaattcagaagatttttgcaacaacattagctctttcaggtgttgcattactcgcttatgtatttaatatcatgttaacaagtttccaggaaaaaatgagcacatattcaaaaggagcaagaaaaatgaaaacaatcgaggatatggatgattattatattatttgtggatttggcagagttggaaaagtagtatttgatgaattaaataaaagaaaacagaacattattgtaattgaaaaaaaagaagaaatttgtaataatatcgaagagagtagttctgtagttagtattcataaagatgcaagtgaagacaatttaatatcaaaattagctggtgaaagatgcaatagtgtgattgtaagtactggagatgatgtaaacaacttatttattgtattaacaatccgtgaaacaaaccctgatgcttggattgtaacaagagccagtaaagttgaaaacattcctcgtcttaaaaaagcaggtgcagataaagttgtatcccctgaaataagcggaggacaagatatgtttttcgaatctacaaacccttatcttttaagaataacagtaaaacacactgtagaccaaatatatgatgaatttaaagttattaacaaatatgattgcagtttagaaaccattgattaccacattccaggagttgaaaccccactcacccgtgaaatatatgtaactagacttgcagatggcaaaaaatattataactacctacaaacacatgatgatcaaagacaagcattagacacattatacagaactacaaataatatacattcacatttaatcctaggtcaagataaagagtctttcgagaatttaataaaagatttaaaagaaatagaagaaattattggaattaacttaactaatgaagaaatagctaaaataactagaaaagaagattctaattaa

SEQ ID NO: 7973 - DNA, 891 bp, Methanobrevibacter gottschalkii
  source 1..891: mol_type = genomic DNA
atggaaattaatggtgtagaaattaaagatacatatgcagaaggtttcggaattaaagtaactagaattttagttactgcagcaactgaagaattggcaaaaatcgcagcaactgaagcaacaggttatggaacttctgttattggatgtcctgcagaagctggtattgattgctttgtaccggcagaaaatactcctgatggaagaccgggttatgttattatgatctgtcaaggtggtaaaaaagcacttgatcatgaattaatggaaagagttggaatgtgtattttaacagctcctactgcagctgcattcaactgtcttgaatcagaaactaccttaaaaaccggtaacaaattaaagttcttcggtgacggttttgaaaaagaatgtgaaattgatggaagaaaaattcactctattccaattatgtctggggatttcttagtagaatctgaatttggttataaggatggtgtggcaggtggaaacttcttcattttagcaaaagatcaaatgactggagtagaagcagcacaagctgctgttgaagctatttctaaagttgaaggtgtaattactccattccctggtggtatggttgcttctggttctaaagtaggatccaacaaatactcaaaattcttaaatgcgtccactaatgaaaaaatgtgtgtaacattaaaaggtgaagtggattctgatatcagggatgatgctgatggtgtatttgaaattgttattgatggtgtagatgaagaatctgtcaaagcagctatgaaagcgggtattgaagcagcttgtgaagttgatggtgtacttgaaattagtgcaggtaactttgacggtaaattaggtgcctacatcatgaacttacaagaattattctag

SEQ ID NO: 7974 - DNA, 1062 bp, Methanobrevibacter gottschalkii
  source 1..1062: mol_type = genomic DNA
atggataaaaaatcagtattttttcttggaataagtgtctttatattaatcataatgttgtggttggttgggatagaagatattattgatgctcttaatgtagctaaattagaattaatagcgttagctattggtgtacaaatatttacatatgctttgtacacattacgttggcaaatacttaataatctagcagatattaataccagttttaaaaaattacttccgatgattttggtaggtcttgccgtaaataatataactccatctggacgtggtgggggagagcctgttagagcatatattttatctaaagaagaagattatccgatgagggagacatttgctactgttgttgctgatagagctttagatacttttccatttgttgtgctgacagttataacaattattggtatgactttttattttaattttgatttatggttacttattgtaatgatttcagctgtaatatgtattgttgcttttttactgatgattatatacatgtctattaaccctaattttggtaaacgtgtagatggatggataattaagttagttagaaggttttataagaagaattctgaggaattggaaaataaaattcatgctgtaattttagatttccaaagtacaatgaaaattgttatttcaagtaaaaaagtcacatattatgcattgccattatcatttatcatctggatttttgaaattttaagggtttatattgtatttttagcttttggagcggatattagtcctattgttattggggaagtatttattattgcttcactggttggtatgataccacttcttccgggtggactgggtgctgttgatggaattatggttgtattttattctgttgcaggaatatctgcttcaataagtgctgctgcaactgttattgagagattaatttcattttggatggccactattttaggaatgattattttacctcattatggatcttcaattttggataaaatttcattcggttcatcaaatgatgaaattgaagaagctcttgaaaatgaaattgataattaa

SEQ ID NO: 7975 - DNA, 1434 bp, Methanobrevibacter gottschalkii
  source 1..1434: mol_type = genomic DNA
atgagatatataacaaaaactgacttattggttattggattaaattccggatatttattaataggaattggaataatgtgtttaattccattaatatttgatttaatatattttgaatttgatttaattagctttattctgcctggagcaatatcaatatgtcttggattctttttaacaaaatatctcgatgaatattcaaataaaaatgttcgacttaaacatggtatgattatttcatctcttggatggatatgggcagctcttattggcggattagtttttatgcttgcaaccaatatgcccccaattgatgctatctttgaaagcatgtctgctctaacagggactggagtgacaatgtatacaaatttagaaatattacctcatagcatactcttttttagagcttttgaacaatggattggaggtttaggagttgtagtcatggtaattagtgttttagcaaaaccgggtactgcaacctcaacgttatatcattcagaagcacatgatgagcgtataaaaccaagtactaaagcaacccttgaaaaaacaatagaaatttatataatttatactgttgtaggaattgtattatatgcaatagctggaatgccactttttgattccctatgcaatacattttgcataatttcaactggaggtatgaatgttaaaaatgcaaacatgggctattaccataacgacttaatttatttcatatccattgttttaatgatacttggtgctacaagttttttagtacattataaagttataaaaacaaaaggaaaatcattgttggaagatttgcaatttaaaataattatctgtgtgattgcaattgtaacattgatgctttattatgtatcaaatattgtcccgatggaattattattcacagttgtatcagcaattacaacaacaggggccagcatctcctcatctttaacaatggcgagttggccatcttttgtaataatctgtttaatctgtttaatgttatctggaggttctaatggatctactgtaggagctattaaacttatcagattaataacatttttcaagggaatctacagaaatatacgtgaaatcttatcaccgagtggtagagttgttcccataaaattacaaggcagaccattacctgaaaatgcatcagaacaatctggaaattatatcacattatatctaatgtttataatgtttacatgggcattattctgtttcttcggccatgacccatttgacagtttatttgcaactgtatcacttcaaggcaacaatggtttagacctggggattattaccaatcaaatacatcctgtcttaaaaatagtaagtatgctcaatatgtggattggaagattagaaatatacccagttttaatcacattaagaactgtttttgaaattttcaaaagataa

SEQ ID NO: 7976 - DNA, 660 bp, Methanobrevibacter gottschalkii
  source 1..660: mol_type = genomic DNA
atggattatgtagtaattatgggaggaggtcgtgtagggcttgctcttgcaaacttattaattaatgaaggatatgacattacattaattgaaagtgatacaaagttatgtgatgaagttgcatcagaactcgatgcattagttatttgtggaaatggaactaattctaaaatacttgaagaagtgaacattgaagatgcaaaatatttcattgcaacaactggaaatgatgaagcaaacttactttcatgcatacttgttagaaaatataatgttgaacatattattgcacgcgtaagtaatccggatcacgaagaagcgtttaaagaagttggaatcgaacaagtaataagtccagaaagagctgctgcatcatatctgcaaaaaattgttacaagacctaacacagcggaattaatgacaatagggcaaggagatggagaaattttagatatgaccataaccaataacaaaattgttggtaaaaaatttaaagatgtttcaccaacaaaagattttatgattatagctacttatcaaaatggaacactaatcatcccccaacctgacaacattattagccgtggagaaaaggtttctgttcttgttaaaagaggatcatttagtaaagtatccaaaaaattagaaaataaatcataa

SEQ ID NO: 7977 - DNA, 612 bp, Methanobrevibacter gottschalkii
  source 1..612: mol_type = genomic DNA
atgtcaaaaattgtttttattttaggatataattatgattcaaattgttatttaatcgatgataaaattttagttgatactggcgcgggtgaaaacagagattatctattttctaaactgcgtgaaaatggtgttgaaccggatgatattgagttagtagttaatactcattgtcattttgatcatattggaggtaattatctttttccaaatgctaaaattgctgttcataaattggatgcaactccaattagaaatgaggatacattaggcactgccggcactgcttttggttttgataatataaataattcccgtgttgatattgaattagaagaaggggataaaatagcagattttgaagtaattcatactccaggacacacaagtggaggaatttctctttgggatggtgaaaacctaatttgtggagataccatttttgctggtggaggtgttggtcgaatggatattggaggaaattatgatgatatgaaaaatagtgttgaaaaattaatggcgttaaatgtcaaaagaatttttccaggtcatggaccaatcgttgaaaataatggaaaagaacacattaaattatcatattcatatttatga

SEQ ID NO: 7978 - DNA, 411 bp, Methanobrevibacter gottschalkii
  source 1..411: mol_type = genomic DNA
atggctaaaaaaggatcggctgaagaaagagagttagtacataaactttgggaaaggaattttgcagctatgagggctccagcatctggaggggctactaaaaagtccttacctgatgttgttgctggaaatggtaaattatatttagctattgaagttaaaacaactacaaaagataaaatatatattgattctattcaaattgaggagttatgcgaattctcaaatatttttggagctaaaccgtatatcggtgttagatttaaatatactaaatggttatttttagagcctgataatactccccgtactaaaaaaggcaattatcgtgttgaaaaagattatgcacttgaaaaaggtttggaaattgatgaaataactggtattgatagacaaatgaaatttgaataa

SEQ ID NO: 7979 - DNA, 981 bp, Methanobrevibacter gottschalkii
  source 1..981: mol_type = genomic DNA
atggattctaacatatttgatttaataaaaaaagctaatgaagtcacattaaacaaacatggcgatttaattacattagagcgagcagtatttttatcttggtggtgcgataaaggagattgtgccttttgttatatgtccacacaaaaagataaaattagagatccgaccaaagcgagacgaaacattaataacatctatgctgaagctgaaatgtgtaaacgtcttgattggaacattgaatttttatctggaggatacgaatcttatacaacacaagaaataaaagaaatagccacaacaataaaagatataactggagatggtgtatggttaaatactggaataacagatgaattagaagaatatggttctgaaataaaaggaataaccggcgctgttgaagtagcaaatccaaaaatccatgaaaaggtatgcccttcaaaaaaattaagtgatataagtaatatgttagataccgcaaacgatttaggatttaaaaaagcaatcacaattatattgggacttggtgaaacactatctgatgtggactacataataaattatattcaagcccacaaaatcgatagagtaatcttttattcattaaatccccacaaagaaacaatatatgcaaattcttcacagcccgcttctctttattatgcgcaaatagtagctcaagttagattagcattcccagatattgaaataatctgtggaacttggattgataatcttgcaaatataggcatattaatattaagtggagcaaatggaattacaaaattcccactattcaaaatgtttggaacaaaatatggaaaaagggttgaagaagaagtaaaatggaccggtagaaaattaaagggaacatttacagataaaaatcagttaggtcctaaaaaaagtgaaatttcaccagaattagataaatttattaaaagatatgtgaaagaatctcttaaaaataaatattaa

SEQ ID NO: 7980 - DNA, 1353 bp, Methanobrevibacter gottschalkii
  source 1..1353: mol_type = genomic DNA
atgatgtgtggacttgaaatccacgtacagctagaaactgaatcaaaattattctgtgattgtcctacaaattatcaggatgctccagcaaatacaaatatctgtccagtttgtcttaaccaacccggagcaaaaccacatcccaccaataaaaaagcattagaaaatgctttaatgattgctttgatgcttaactgtgaaattgatcaagatgtaatctattttatgagaaaacattacgattacccagatttatcttctggatatcagagaacttctgtcccaattggaattaaaggtgaattaaacggaattagaattagggaaattcacgcagaagaagacccgggtcaatacaaaccggatagaggtattgttaacttcaaccgttcaggaattccactggttgaaattgttacagaaccggatataaaatctcctgaagaagcaagaaacttcttaaaagaattaattcgtgttttacaatacagtggaggggctcgtggagaaggaaccatgagagcagatgtaaatatttctatcaatggtggaaacagagtagaaatgaaaaacgttaactccattaaaggagcttacaaagcattgaaatttgaacttgtaagacaaaaaaaccttatgaaaagaggagtggaagttaaacaggaaactcgtgcttatttagaatcccaaatgattactgtgggaatgaggatgaaagaagatgcagatgattacagattcatcacagaccctgatttaccaccaatgcaaatttctgatgaaacaattcaaagaattttagatacaatgcctgaagcaccccacaacaaagtaaagcgatttgttgaagattatggtattgatgcggaatctgcaaaagttttaacttcagaacttgatttggctattgcatacgaagaagttgtaaaagaaattgaaccaatatttgcatccaaatggatgagagatgaacttaaaagagttttatcttataataaattagattttgcagatagtggaattagtgttgcaaatttaattgaattcttaaatatgattcaaacaaaagaaattacacaaaaagcagctaaaaaaatcattgaacaaatgccaaataatgaaaaaacacctaaggcaattgctgaagaattaggattactaggtgttgtaaaagatgacgaagtgcttgcagctgtaaaacaggcaatcgaagaaaatccaaaagctgttgaagattacctggctggtcaaaaagcttcaattaattttttaatgggacaagtaatgaaattaacacgtggaaaagctgatcctggagaaactgttaaattattaagagagaatatagaatag

SEQ ID NO: 7981 - DNA, 807 bp, Methanobrevibacter gottschalkii
  source 1..807: mol_type = genomic DNA
atggtggaaaaaaaatcttttgttaaagattatatgacaaaaaatgttatctgcgtttccccaaatactcctactgaagaaattattgaattaatgagaacaagtcggcacaacagttatcctgttgttgtaaatgatagacttgttggaatggtaactgcatttgatgttgtatctaaaaaatggtcagacacggttgaagggttgatgagcactaaattagttgttgctaaccctgaattatccataaatgatgcatctagagtaatgtttagaagaggaatctccagaatgcctgttgttgatgaaaatagaaaaattgttggaattataacaaatacggatatggttagatcacatatcgaaaggtcaacaccaaataaagttgaatatttcaaaaaaactctagaacaattatacgatatcaaagctacattaagacacatgcctgttgaaactaataaattacgcccaacacaagatagagtctatgcggatgagcttgaaggaagaacttatgaattaaaaagaggattagcagaacctgcaattgttgtaaaaactggaaatagatggattctggttgatgggcatcacagagctgtagcttcatcacagcaaggttatgaaacagttgattcatatgttattgatttaggacaagacataaaattaggtatggagaaaactgcagataaagcgggaattaaaacattttcagatattgaaattattgatgatgataaacatcctctgatagcacttacagaaagccttcaagatcaagaacgtaaaagtgatgattaa

SEQ ID NO: 7982 - DNA, 288 bp, Methanobrevibacter gottschalkii
  source 1..288: mol_type = genomic DNA
atgaatgataaaattataagagaagtatatgaagttttagaatcacgccgtgacaatcctattgattcatacacctcaaaaatcatgcaaaatagtgataaaaaagcagaagacaaaatacttgaaaaaattgccgaagaagcaggagaagtattaatagcttctaagaatgatgaaaatttagtttatgaatccgttgatttgattttccatacattattgcttcttgcatacaaaggcatagaccttgatgatgtgtttgatgaatttgcaagaagaagaaaataa

SEQ ID NO: 7983 - DNA, 768 bp, Methanobrevibacter gottschalkii
  source 1..768: mol_type = genomic DNA
atgtttgacacattcacagaaaagaaatttttattaaaagaattggttaaaaaagatttgacttcaaaatataaagattctgtactaggaatactttggagttttttcaatccccttttaataatgttagtatttacagcaattttttcaatgctattcggacgtcaaattgagaattatccagtttatttcttatccggaagaattatttttgatttttataacagtgggacaaaaggtgctatgaaatcaataaaaagaaatgcaaacttattaaaaaagatttatgttcccaaatacatgttttcagtaagtacaatttgctatgaatttgttaactttttaatttcatttgtgatattattcattgtaatgatacttacaggagctacattccattggactatagttttatcaatcattccaatgtttttcttagtttgcttaatattcggagttgggttaattttagctgtatgtaacacttattttagtgatatcggacacttatacaatgtattcactctcgtattaatgtatgcatccgcattattctatcctatggagatagttccagcaatagtgcaaagaatatttacattaaatccagtttattcagcaatttcttgtttcagagagtgtattagctatggaatttttccgaatacttctactttagcttatctagccatattttcatttacaacattaggaattggattatatctcttcaaaatttatgaaaagaaattagtattagaaatatag

SEQ ID NO: 7984 - DNA, 1425 bp, Methanobrevibacter gottschalkii
  source 1..1425: mol_type = genomic DNA
atgaatttaattaataaaataaggaatttatttaatgataatactaaacaagaaaaaaacaaacatattcctcttgatgctaaatttcagagcagtagatttaagaatatcaaaatccatgcaccggattatgtaatgagtactgaaaacagataccatatgcaaatattggataattctaacaaccctattaaaaatgaagcaataactttggttattaatggaaaatgttatgaaaaaataaccaataaagacggatatgcatcagccaaaatttcacccaataaaaagaaaaaggaaatgaaaatatattatctatcaaatgaagagtattgtccttgcataattgccaaattgatacacccagataacataaatcctgaagaaaataatgaaaacccaaaattatatgctccagatatgagcatctattcaaaagatgaaccagaatacaatgctagattgcttgatagtgaagataatccaatgattggtgaaacactaatattcaattttaataaccagacatatgaaaaaataactgatgaagaaggatttgctagcatagatttaaaattagatgaaggaacatattcaattgaaacaatatttaaaggtgaaaaagactcaaatcctattactaaaacatcaacaataaatgttaaaaccagaaatatcgatcggaaaataatgatcgaagtcaaacatcttgcaatggaatttaaaatttcaaaagacaagatagatacattaaaagaatatgttattcgaactattaaaagaaccaaaaaagaacatgagaaaattagaatattagatgacatttcctttaacatttaccaaggagaaagagtgggcatattaggatttaatggtgctggaaaaagtactcttttaagaataatagcaggaatatatgaacctactgaaggagaagtaataatcaatgggagaattgcaccattacttgaattaagtgcaggatttgataagaattatactggaaagaataatatctttttgaatggtgctcttttaagcatggaagaagacttcatcaaagagaaatatgatgaaatagttgaattttctgaacttggagaacatattaattatccagttaagaattattcaaaaggtatgagggcgaaattaggtttttcaattgctactcttgtaaatccggaaattttaattattgatgagattttagctgttggagacattaaattcagaaaaaaaagttctgaaaaaattaaatcaatgatgaaagaaggtgttacagtacttcttgtatcccattctataagtcaaataagaaacatttgcgatagatgcatttggattgaaaatggccatgtttacatggaaggtccagctaaaaaggtttgtgatgcatatgttaaaagtgctaagaagaagtag

SEQ ID NO: 7985 - DNA, 501 bp, Methanobrevibacter gottschalkii
  source 1..501: mol_type = genomic DNA
atgatattaatatttttaattatagggtgctgttgcctattttatgttgttgaaacatcaaccactgttgggaatgcgattactgtagtaaataaaactgttgtcacattaccaaacgaattctcaattgaaagtagagaaactggctatggaacattaattaataaaaatacaaaggaaaaaattaccattaaagatttaggtaaaggaaatttagcattaactaagtttaaaaatgcattaacagatttaactaaaaatcccgatatcgatcatgttaaaaattcaacatcaaacattaataatatcactgcatataaaattgattatcaggatattacaaaagagaataattcggatttgagtaatgtttatgtatttacttgcaatcacacattcttaattaaattagaaaattataataataacgttaagtcagataatgatttggattatgtaattacacatatgacccctgactttaaacaatctcaagattaa

SEQ ID NO: 7986 - DNA, 2544 bp, Methanobrevibacter gottschalkii
  source 1..2544: mol_type = genomic DNA
gtgataaaattggatgaaattgaattttcagttataataccaactcataattcagaattgggaataaaaaaatcaatcaaatccatacttaatcaaacactaaactttgagaataatattgaaataattattgtggacaacaatagtgaagataaaactcaagacatttgctacgattatatttccaaatacccgaagaacatatcttatatccaattagacacagttaatctgcataaatcaaaaaatacagcaatgaaacatgcttatgggaaattcattacatttttaaaacctcatgactatttatcaaaagattcattatcacatcttttaaaatttatcaacactcatgaaaacattgatttagcaatacttccgattttttattataaaaataacagaaaagaacgttacataaattataaaattaaaaacaataaaaaaatcaatttaatagaacaaccacaatattcccaattaattggtttatccacattctttaaaaaagagtctattaaaaacattgagtttttagatactactaatgaaaatattacttttttcagcgaaatgttgataaataatccttatttaggtatttgcagcaaaggagcatattttgcaaagaatattgaagaaagaatttatccttcagacactaccatttattcaacaaaagaatatgaaaaatttatcaaatataattttaataatctgaaaaataaatgtttcaacaaattttctaaaatacccgaattcatacaatttagctttataaatcatttaagatggttattatctataaaaaaaacagaagaaaagattgatttgaaaagtttaattgatactatatcatatataaacaatgatattcttttagaaaacagattacttaaacaggaactaacgattaccacttttttattaaaatacaacaatgacttaagcaatgatttaatggaaaaattagatttgaatacactttttattgacatatatgatattatcgacaataagatccacattttagcaaatatcaaaaatatcacaacaggagatattaatatattagtcaataacaaaaagattaaatttaaaaaattaacatttcctcacaaatatgctcctagtttaggttataatctattacaagattattcaatagaatgtattattccaattaaaacaaatgaaaaattcaaacttgaatttaaacaaaaagacaaattgttacatattgatttttcaagaccttgtaatttctcaaaaagtgtcggttatgcaaaaactaaacattacttaagtattttaaaagatgaccacatatctattgagaaaaaaacaacattaaaatggataaaacaagaattaaaaagtttaaagactatgtttaaaaatcatgaaactggatttataaaagcagttccctttagagtagcttatatgataagttatccatttttaagaaataaaaaaatatggttttttatggatcgccccgatgaagcagatgataatggattagcattatttaaatatgctgtcaaacaagaggatgatatatctaaatactttattttaagctcaaaaaataatgatttcaataatataaaaaagatagggaaagttattaactataaatccctcaaacatagatttttaggaatgtttgttgaaaatattatcacatcacatcctgacaatggaattatttatccattttggggaggttatccattttttgcaggccttttaagatcaagcactatgtttttacaacatggtgttgcaaaggacgatatttcctattgggcgaataaagcaaacatgaatttatctttatttttaacatcgactattcaagagtatgagtcaatattagaaaaccattataactatgatgattatgttgttcaattgctggggttgcccagatttgataatcttaaaaatcaagaagaaaaaagacaaatccttattatgccttcttggagacgggatttgaattataaatcaaaagagtatattaaaaagaatggatttttcaaaaaattcaattcattaataaataataaaagattaatagaaacggcacgtgaaaataactatgagataatctttaaaccacatcccaatgtttataaattcattgatttgtttgataaaaataattatattgaaattgattatggtaaaacaaaatatcaagaattattcaatagcggatctttagtaattacagattactcgtctgtagcctttgattttgcatatctctacaaaccagtcctatactaccactatgataatgattatcattttaatttagaagaaggatattttaattatgaaactatgggatttggagaagttgttaaaaaagaagatgaattggttgatttggtcattgaatatattaaaaatgattgtaaaatcaaagaaaaatattccaatagaattaaaaatactttcaaatttaatgataaaaaaaattgtaaaagaacatatgatagaattaaagagattacattaaaggattaa

SEQ ID NO: 7987 - DNA, 570 bp, Methanobrevibacter gottschalkii
  source 1..570: mol_type = genomic DNA
gtgattaacttgagatacgtaaattttaatcctcacattcatgatacttataaagtcgccgaattggtttatgatgttgattttagaacttttgatttgttatttaaaactccaaaagaagctatttcaacaattgagaacgatttaaggaaacatggacctgaaaatacttttaaagtaattttaaatgatgaaatgcaaataattggtgttttaataatgtatatttctgaaaaatcatttgatttaaggttaaaatcattaagattaatcctcgttgacatattggattattttgtattgtgtgatgttaaaaaagatgatctgtatcttgcagaacttgcaattgatgaatcattaagaggccagggattaggccgtaaagttgtacttgatgttattgattatgctcgctctaaaaatttaaatcgtgtaattatcgatgctgattttagaaatgttggagctcgaaaactttatgaaagaattggttttactatttttaataaaaaaagagttaaaattggaaattttgaaagaggaatgtataatatggaattaatcctttaa

SEQ ID NO: 7988 - DNA, 762 bp, Methanobrevibacter gottschalkii
  source 1..762: mol_type = genomic DNA
atgaaagatattcttgaaagattggttgatggcgaaattaatattgatgaagctgaaagattgattaatgcggataatattttagaatttaatgaagttgctaaatttgattctaaaagaaagaatagggctggttttccagaggctgtctttgcacaaagtaaagaatatgaagatttacttttaataataaaaaaatacatgcaatctaataatgataatttgattgttacaagattatctaaagaaagatatgaaaatattctaaatgatttgggtgaaaactcatttgtttttgaatataatagaagggctcaaattttaattataagaaaagagattgtagaaaaaccagccattgcaaaagttggcattatgactgctggaacttcagatgtcaatattgctgaagaggctcgtgtgattgtagaagaaggtggttgtgaagctatcacttcatatgatgttggtgtggccggaattcataggctatttcctcaaattgctcggatggttgaagaaaatgttcgtgcaattattgtttgtgccggaatggaaggaactcttccttctgttgttgcaggtttggtggatgttccggtcattgctgttcctacttctgtaggttacggtgttggtgaaggtggaagagttgctcttgatgcaatgcttcaatcatgcgctcctggaattgcagttgtaaatattgataatggttttggtgctggtgtatttgcacttactattgtaaatagtgattaa

SEQ ID NO: 7989 - DNA, 2241 bp, Methanobrevibacter gottschalkii
  source 1..2241: mol_type = genomic DNA
atgaaagctttaaagattttaacacaaggaatagtgcaaggcgtaggattcaggccatatgtttatagactagcagttgacctgaatcttaaaggatatgttagaaaccttggaaatgtagttgaaatcattattgaaggtcagaatactgaattatttgttgacagactcccaaaagaattaccgccaatagcaaaaattaattcaatgaacgtagaggaaattgagaaaacaaattatactgattttaaaataatcgaaagtggaaattcatattctggaattagcgtagttccaccagacattgcaatatgcgataaatgtcttgaagaaatacgcaatcctactgatagacgttataaatatgcatttaatgcatgtactgattgtggtccaagatttacagtgattgaaagtgttccctatgacaggataagaacttcaatggatgaatttccattatgtgacgattgttcagtagaatacgaagaaccattaaacagacgttaccatggtgaagcaatatgctgtagtgaatgtggaccccaaatggaaatatatgaaggtaaacataaaataaatacagataatccaataaaagtaggtgcaaataaattaaaagatggtaaaatattagccattaaaggaattggtggaacacaccttgttgttgatgcttataataataaagcaattaaagaattaagaaaacgtcttaatcgtccaaatcaagctttcgcagtaatgtgtaaagatttagaaagccttcaaaattatgcagaattaagcaagaaagaaattgatacaatatcatcaaataaaagacccattgttattttaaagaaaaaaaacaattatcctttccctgaaagtttatcccctagacttcacaatattggtgtgatgcttccttactctccaatgcattatttactatttgacgaaggggatattgacacatatgttatgacttctgcaaacattcctggagaacctatgatgattgaaaatgaagatatcatcaatggaattaatgattactcattaatccataatcgccgaatactaaaccgatgcgatgattcggtgattcgatttagaaacaatgaattgtcatttattagaagatcacgcggatacacaccagaaccctatacaataaattacgaagtgaacgatttgaatatacttgcattaggtccagaacttgatgttacattctcaattgcaaaagacaatattgcatatccctcccaacacattggaaatacaaataaaccaaaaacattagcatttttaagagaagctattgaaaatatgcagagaattacaaaaataaacgaatatgatataatcgcttgtgatatgcatcctcattttttcacaacaaagcttgcttatgaacttgctgaaaaatatgatgctgaagttcagccaatccaacaccaccatgcgcattctgtcgctctttcaaacgataatgcaattgacgaaatgattgtgattgctgctgatggagtaggttatggaagtgacggaactagttggggtggtgaaattctctacaccgatataaaaaatttcgaaagactaggacacttacaaacccagctaatgccgggtggtgatattgctacaaaatatcctgccagaatgcttgcaagtatattgaatgatgaaaatttaattaaaaattattcagattacttcaaatatggagaaatagaaataaagaacattttcaaacagatggatgcgggaataaatgttggtaaaacaacaagtaccggaagagttcttgattcaatggctgttgctcttgaaatatgtaatgaacgcacctacgaaggagaatgttcaatgaagcttgaatcagcagcatactattcaaataagaatatagaaatcccattgaacattgaaaataatattttaaatacaagtgaaatattaaaagaagttgtaaaattatatcaggatggtgaaaagaaagcagatgttgctgctgctggtcaaaatgctatcgcacgtggtttaagccaacttgcaataaatgctgcaagtaaaaaaagtattcaggaaattggtgctacgggaggagtattttacaatgaagctattacaaacacagttaaaaattacgtagaaaataatggattcaattttattcagcataaaaatacttgtgctggagatggatctgtatcattaggccaagccataattgctaaaaaagtataa

SEQ ID NO: 7990 - DNA, 576 bp, Methanobrevibacter gottschalkii
  source 1..576: mol_type = genomic DNA
atgattagaaatgatgacattgataatattaaaaaaaatcgtaaaaatgtcaattcttctaatggccacatagaaattagaggaaactataatgaccaattaggagggattgataaagaggacatccttgatgtaatgggttgtaagactagaagagatattataaatcttttaagggaagagcctatgtttgttagtgaaatatcaaatgaactggatattggtcaaaaagcaattatagctcatttacgtgcaatggaggatataggtatattgaattcttcttataaaaagattttaagaggacgcccacgtaaatattatgatttacaaaatgaagttaatattcatattactattaataggaatacttttgatgttaacttgtctgaggatatgctcaatacattacaacttccatcaggtgacgaatggtctagattattggatattgaaaaaagaatagatgatggacaactggaggctattgatgagttgaaaaatcaaataagattatatggcaatcttaaagaaagagcagaatatattcttgaaagaactttaaaaaatagatga

SEQ ID NO: 7991 - DNA, 552 bp, Methanobrevibacter gottschalkii
  source 1..552: mol_type = genomic DNA
atgactgacgaaaataaaagcgaaactgaagctgaaactcaagactttcaagaaaaatatgatgaacttcttgaaaaattagctcttaaggaagaagagctgaaagaagtcaaagaaaatcttgaaaagcaagaagcagaaactcaagagtacatttcactttcacaaagacttcaagcagatttcgaaaatttcaaaaaaattactgataaaagaaacaaagagtttattaaattcgcaaatgaagatattataaaagattttcttgattgctacgaagatttcggtagagctttagaaattaagaataatgatgacttaaaagaaggtgtagaactcatatataataaattcaaagatattttaacaaaagaaggaattaaggaaattcctacaaaaggagaaaaatttgacttgaacaaacatgaagcaatgatggttcaagaatctgaagatgttgaaaacgattatattatagaagagttaatgaaaggctacatgtacaaagataaagtccttaaatactcaaaagttattgtttgtaaaaaataa

SEQ ID NO: 7992 - DNA, 1872 bp, Methanobrevibacter gottschalkii
  source 1..1872: mol_type = genomic DNA
atgtctgatactaaaaaagaaaaaattattggaattgatttaggaacaagtaactctgctgcatctgtgcttgtagggggtaaaccaactacaatcccatctgcagaaggagcaagtcaatatggtaaatctttcccaagttatgttgcatttactccagaaggtcaaatgttagtaggtgaaccggcaagaagacaagctgtaaccaacccagaaaatactattagtgcaattaaaagaagtatgggtactgatcacaaagttacagtaaatggaaaacaatactcccctcaagaaatctctgcattcatcttacaaaaaattaaaaaagatgcagaaaccttcctaggagaacctatcgaaaaagctgtaattactgtacctgcttactttgatgataaccaaaggaccgcaactaaagatgcaggaacaattgcaggacttgatgttgtaagactcgtaaacgaaccaacagctgcaagtctcgcatatggtcttgataaatcagaagatgatgacatgaacattatggtttacgatttaggtggaggtaccttagatgtaaccattatggaattcggtggaggagtatttgaagtaaaatcaaccagtggggatacccaacttggtggtactgatatggataatgtattaatcaaatacttagccagtgaattcaaaacccaagaaggtattgatttaatggataacgatcaagcagtgcaaagattaagagaagctgctgaaaaagcaaaaatagaattatccaccactacaactacccaagtcaatttgccattcattgcaatggggtctgatggaacacctaaaaacttaattattgatcttacaagagcaaaattagaagaattggtcgacagtattgtagaaaaatctggtaaacctatgcaacaagcattagatgatgctaaaatgaataaatctgagattgataagattattttagttggtggacctaccagaatgccaattgtacagaaattcgttgaaaaattcataggtaaaccagttgaacgtggtatcgatccgatggaatgtgtatccatgggtgctgctatccaaggaggagtattggctggtgaaattaaagacatcgttcttttagatgtaactccattatctttaggtattgaaaccttgggtggagtgtcaactactttaattgaaagaaacacaactattcctactaaaaaaagtcaagtattctccacagctgcagataaccaaccatctgtagacattaatgtattgcaaggagaaagaaaaatggcggcggacaacacttcacttggacgtttccaacttgtaggtattccacctgcaccaagaggtgttccgcaaattgaagtaacttttgatattgatgcaaacggtattattaatgtaactgctaaagacaaaggaactggtaaagaacaagcaatcactattacttcctcaaccaaattatctgatgaagaaatcgaacaaaaaatcaaagaagcagaaatgaatgctgaagctgatgctaaaagacaagaagaaatcgaaatcagaaacaatgcagactcattaatctacacttcagaaaaaactttagatgacctcaaagatcaagtatctgaagatgaaaaaacaaaagtcgaagaccttgttaaagaattaagagaacttatagccggcgatgacgttgatgccattaaagcaaaatctgatgaactatctaatgtagttcaagagattggtgcaaaaatctaccaacaagcacaagctgaagcacaagcacaacaacaagcaggtgctgaccctaatgctggtgctcaagacaaagatgatgacacaattgatgcagactatgaagtaaaagactag

SEQ ID NO: 7993 - DNA, 1146 bp, Methanobrevibacter gottschalkii
  source 1..1146: mol_type = genomic DNA
atggcagacaagcgtgattattatgaagttcttggagtagataaatctgctgatgaaaagacaattaaaaaagcttatcgtaaattagctagaaaataccatccggatgtttgtgacgagccggatgctgaagataagttcaaagaagtaagtgaagcttacgctgtcttgtccgatgatgataaacgccaaagatacgatcaatttggtcatgcaggaatggatggatttagtgctgaagatttctatcaaaatgtaaactttgaagatatattccaaggatttgatataggaaatatctttgatatgttcggttttggtggaggagcacgttctagaggtggaagaactggtcctcaaagaggttcagatatttacacagaaataccaattactttagaagaagcattcaacggatgcgaaaaagaaataaaaattactagaagtgaattatgtcctacctgtaaaggatctaaatcaaaaccgggttctaatccagaaacatgtaaaacatgtggaggaacaggacaaattaaagaagtcagtaacactttccttggacagatggttaatgtaagaccatgcagagagtgtggaggtacgggtaagattattacagatccttgtgatgaatgtcacggaagaggtagtgtgagaaaaactaaaacaattaaaatcgaaattccagaaggtgttgacgaaggaaaccacttaagagtttcacgcgaaggaaactgtggtgataaagaaggtcttgaaggagatttaattgttacagtacatgttaaaaaacataaaaaattcaaacgtgaaggagatcacttatacttggaacagcaaatcagcttccctcaagcagcacttggtgatgtgctcagcatccctactattgaagggaaagaaattgaattcaaagtcactccaggtacacaaagcgaaactgtttacaaattaagaggacaaggtatgaactctgttagacataacagcagaggaaatctttatgtgaatgttacagttgttgttcctaaaaaattaagttcaaaacaaaaagaattgcttaaagaattcgccgaggtcagcggagatgaaattaagcatgttgaaaaaggactctttgatagagttaaagatgcaatgaagtaa

SEQ ID NO: 7994 - DNA, 3489 bp, Methanobrevibacter gottschalkii
  source 1..3489: mol_type = genomic DNA
gtggttttattatctactggtgttgcttttgctatttctgaaaatgatgttgctgtaagtaatgatgtgggtattgttaatgagactgttctagaagtaagttctgatgattcggatttatcagaagctgatgttttagaaacacaaactaatgttgtaactaaagatactttccataattattttggaaatgatggtacattattagataatgtttctagtgatgagttaatatttaaaggagattttactggaatcgatgtcagttatatgacaattggtaaatctgttaagttatctggtggtaatactactcttaataatgttactttcattattggtgcagataatgtggtgattgatgggtttgttcttgatcattctgatgtttatttatttgatatagaaaatgtaaatggtgtaactttatctaataatataattaatttcaaaacacttgaagggacagagggttatgctatttttgccaatactgtaaatgattttaaaattatcaataatactataaattatgttggtaatactaaaggtacgatggttaataatgctattcgtgtaactggtgatgaagattctgcaattgcttcaaaaaagattattgttgaaggtaatgtaattaatataaaaatcccttctgtggatgtgggttatgatcctgttacttgggaatcaaaagttttttctgaaggtattgttttctattattgtgaggatgtaaaatttatagataatcgtgttgatttaaaatataataattttagtggtggtttcgatactatttatgcattaagtgtaagaggaaatccttataactttgagaatacaattgtttcttctgacattgaaattattaataatacaataaatgctaatggacataattatatttacactattttcctgtctgctaatgattttaaactttttaataatgtaattaattcaacagctgatttttattatgctaatggtattaatattgatggtcctgcatctgaaggtattgtaagtaataatttgataagtgttgaatcaccatatgatgtttatggtatttattcttaccaaatgaatggtcccattgaatatatttcatatgtaaataatacaattataggtaaatcttatgttggttgcggtatggaaattgttgaatgcaatccatacattgcagataacctcataatcatgaatggtaattatacttttggtgttgttgcaagtattagggataatggtactatttctaataattcaatatcttctttaggaaataataatggtactgatggtactggtgatcctttattgcctttaaattcattaggtattagtgtaaagggtagtgtattaattgaaaaaaataaaattaactctgggggtattggtttaaaccttgtcgaaaaaggcaatattactattaatgataataatattaatgttaatacgactggtggtgttgaaagttatgcaatttactctgataaattaagtaacttagttatttctaataataatatcttatttactggaaataccaatggaactatggttaataatgctattcgtgtaaatggtgatgaaaataaaaaaataattgctaaaaacattattgttgacaataataatatcaatattaatattccttctattgatgtgagttataatcctgtaacttatgaggcaactgtttattctgaaggtattgttttctattattgtgaggatgtaaaatttatagataatcgtgttgatttaaaatataataattttagtggcagtttcgatactatttatgttgttagtgtaagaagtaatccttataattatgtttttgatgaagaagacaatataatttattcaattgtcagttctgatattttaatttctaataacacggtcaatgctctgggtaataattatacttatggtatttatatttctgcggagaattttactgttggtgataattttgtaaatatttcttctgatggtaaatatgctaatggtgttaatgttgatgcattgtcaagtaatggtgttataaaaaataataatgttattgtgaatgctgatattattgtttatggtgtttattctgcaaattttatgggtcctattgaaaatattacttatgataataatacaattagagtaaatgcttatgctgcttgtgctatggaattaatggagccaaatccttatgtttttgataacacaataattgctgctggtaattatacttttggtgttgttgcaagtattagggataatggtactatttctaataattcaatatcttctttaggaaataataatggtactaatggtactggagattcaattttacctttaaattctttagctatcagcactaaaggtgatgtgataattaaagataatgagattgttacatcagggattggtgttaaaacattaaaaggaaatgttgatattctaggtaatgacattagaactactggtaatcacactattgaggctataaattctaatttaactgtaaaaaataattatttggtatctaaaaaagccgtaggtactgattccattgtttcagataaggaagttatatctgctaataatactcctgcattaaaaactattatatctgcaccaaatatatttactgaatatattaaaggtgctgtattcccagttgctgcattagatgaaaatggagatccaatttcagatattgttctctttttaacaatggacggtattgtttataatgtaactactgatgcaaacggctatgcagcatttttacttaatcctgattcaggtattcataatgttgtggtctcatttaatggtaatgaggtatatggtcctaaatcagtaaatagtattatttctgttgatgcatctgcaagtaaaatcgttgcaaaaacatctacaactgtttatttaacttcagttaaatctggttcatactttaatatagctgtaaaggatgtgaacggtaaaggtttagcaaataaaaaagtttctatttacttcaatggtaagactaagagttacacaacaaattcattaggagtaatcaaattcaaactttctgctaataaaataggtaattaccaattaaaaatgaaatttgctggggataagaactatactgcatctactgcaattgcaaaaatcaaagtcattaaacaagcaactaaattaactgttgctaaaaagacttttaaagctaaaactaaagttaaaaagtacactattactttaaaagacaataaaggtaaggcaattaaaaaagccaaagttactattaaagttaaaggtaaagtatacaaagcagttaccaattctaaaggtaaagctacttttaaaattaccaaattagctaaaaaaggtacttataaagcttatgttaaatttgcaggtaataaatattataaagtatcttcaaaatctgttaaaatttcagttaaacgatag

SEQ ID NO: 7995 - DNA, 4065 bp, Methanobrevibacter gottschalkii
  source 1..4065: mol_type = genomic DNA
atggttaaaaaatttaatatttcattattattattcctcatttttatatcaatggctactgtttgtgctagtgataatatggaggatactttaaataataatggttctattctgagtaatccatcggatgaaagtattttgctttctaatgatgatgttctagctgaatttacaacacatgaaataaatgtagaaaagtattctatttattttaataataatggtgatctaatttcttctaaggttaaatctggggacacacttaattttactggagattggaatgaagttagttctaaaacttttaattttaataaaactttaaatattgtttattctggatcaaaaccaatgaaaaacggtgttttcacattttataatggtgcaacaggaagttccattattggcttgaatattgctaatactgaggattataattatggaattttcttaaatggtgcaagtaactgcattgtaaaagattgttttattaacaatacaggaatgtcctcttatgcaatttgcatagccaataatgcaaattacaataatgtatcaaataattttttctgtgattatggtatgaattatgggggtcaaggaactagatcaacaccacctgtacttctttctggtgctcatcataactatattgcaaacaatcatattgaatgtgatgatgcaaacgggatatatttgtcttactatgatgggggtcctttgcatggtggtgtttctaattataatttaatttacaacaacactgtaaaatataatgttttgccaacttcatggggttatggtattcagataatgggtggatacaataaaatttattccaataggataattggtgcattcagaggcatttcaacttcaaatggtgcatttaatgagatatttaataataggattattaatattactggtgcggattttaatcatcctgttgttgaagttggaggggagtatggaattgttggttcagcaaatgcgataataataaacaattctattgaaaatgcaagaatacttccaggttctggtgcgatttatgctattgataatgcaattattgaaaataatactattgatgttgtgtcatcaggatatggtattcaggcaagtggaagtaatatttctatcaaaaacaatagtataattactgaatctggtgctggtgtcttttggaaaggcgaatattttgatttggttgtagttggtaataatattacaagtggaaatggtgttggtgttttagttaaaaaagaaagtgttaaaaaaatgccagggaatataactattgttgataactatatttctactggaaataagtatgcaattgatgcaattgaggttaatgcagatactagttatgttattgaaaataatactattcctaagggtaaaggtattgttgcaactcctgaagggtcatatgatccatcaaaaccacgttatatctttaagggaacaacttatagtattactcctgaaaattatgatgattattttgatgtgggaggtactttaaattcagttgttaaaaatggagatattttatatttcgatggtaattttgagaataagggtgtaatatatattaattctgcagtcaaaattactggtaaaaatccgaatttttataatgctacttttaggatatctgaaggtgtctggattgaaaatttaacaattaaaaataaagattctgaaagaataaatgcatggggaatccttgtatataatactggtggagcgataatttctaattgcaatattgaagtaacagatccaaacgcagcatatgcaatttatgttgtagaatcaagcgatattgatgttttgaataataaccttacatctaatggtaattatttaacttatacattacttgctataagtgtctatgattgtaattttatcaataatagtattcataccattggaactggtattgagcatgtatttgaaaatagtcattgtgttgatggcaattctaattgtatagatggttctacttgtgttggtggagatactgtttgtacaagtgggaatactataactggaaatcatgttttaaatgaggtttataggacttatggtattttgatggcttattcttctggttgcaatatttctggaaataaagtaaatgcaacttctaagcttaataaaacatctaatacatttaattcaagttggggaaataattatcataataatatatctacaaattctattgttggtatagatttatattttaatagtcataataataccttttcaaataataatatttatgtaaagtctaatgataattatatttatggtatgggtgtattaggttctaatactgggcatgatgctcctgaaggaaaagatgcatctaataatcaatttattaacaataatattgttttggaaggagattattttgttcaaggtttagttattggccatgaatcaaaaaacacaactctcatttcaaatactgttaatgctaaatctaataatttttcatatggtattaatttagaagggtctcaaaaatcaattattaaagataataatctaaaattaacttcagatattgtttatggacttgaagtttttaggtcgaatggtaattttattaaagggaataatcttgatataaaagctaagcaggcatatgctattgcactttcaaatgctgagaataatattatccttaataatattgtaatgaataatgttactggtgaggaaataacttataatgtgtgtgattcattaggtgttggggttgctggaatctgtcttaaatttaattcttctagtaataatatatctggcaataatataacttctaaaaaaggttatgcaattgttattgataaattagcaattaaaaataatttattttacaattatttaaattctgaaatgggtattggtgataaagctattaataacacaaataataattttgttaaaggtaattacatctatattttaaatggattaattccggaagtaacgattaattatttgggtactgcagatattgttttgaatgttggtgttgatggggtattggttaaattttatatttgtggggaagaaattggtaatgcaacttcttcaaatggtgtagcaaaattaagatataaatttgatgatagttatactcctgcgggttattcgattaaagctattgcatctaaaaaggattacttaactaaagagttcatttcttatttaactattgaaaaaggtcttcttaatattaattataatgatgtaactgcaattccaacatctaagggaaaatttgtagttgttgtagaagatatttttggaaattctgtatctggaattactgttaaattttatagacttcaaggaagggatgttttcataggtaaagtaaaaactgataaaaatggtgtagctactcttgttgctgaagtaccttcacttggtaattataaattacgtgcagatgttgttgaaaatgacaattttaagtcaaacagtggtaaagctaatttgattgtggcttataaaccttcaatttatcaatataaaactaaagctgtttattatggtaatactataaaatatacggttcgtgttaagggtattgatggtaaatatgttgctgggggtaaaattgtaactattaaagttaacggaaaaacctacagggttaaaactgataaatatggtaaggcatataaatccattaaattaaaagcaggttcttataaagtaactgctcaatatggggttactaaagtttcaagtaaaattaaatttaagccaattttaatagctaaaaacattgttaaaaagaaatctaaaaaaattaagttctcggttaagttagttaataagcatggtaaaatattaaaatacaaaaaaattatttttaagattaaaaataaaaaatatagtgcaaaaacaaacagtcatggtgttgctatattatctattaaaaacttaaaaataggtaaaaatactattacatcattttatggtggttgcacaatatcaaatacaataactattaggagataa

SEQ ID NO: 7996 - DNA, 4815 bp, Methanobrevibacter gottschalkii
  source 1..4815: mol_type = genomic DNA
atgtatattgatgtaaagggggtgaaaataacgaaaagattagataataagttgttatttacattatttgcagttatgtttatattgttttcattaaactgcgtttttgcacagaataacactacagtaactgatgttttatccactgttgaagatgatgttggtattcaacaaatacagagttttcaagtagatgaacctctattggctgcgactaataataatattcagattaatgttaaacatcattataatgaaacggctaatacatgggatgaggatggttataatttagctaatgcaacagttaaattatatggtgctaatgataaattaatttcaacacataagacagattcaaaaggttcagttttaattaaaaatttaaaatcaaccaaatattatgttgaagttagttatgcagattatgaaccaaaaaaatctaaagtattggattttactaaaaaatccggaactttaaaaggatcatttgactttattcctgatattctattatttgtagattataaatcccataatgaaaagttaaatgttttaatgaatatgtctaagagagtggctttcattagcactgggcaagattatgatgtgtctcgtgaatggttagttgggtatgcacgtttcattcatattgatatgttttccgaaggagcatatgccatattcactgctgaaaaattaaaaaaattgcttgctatctctccagctaatgcaaattataatgttgcatatacattcggtgtttatagtaattcaattttaaacgctactggtttacacattgttggtgcaaactcgaagaataatactttcaatactattgaaaacacttatattggttcttatttccaagccaaagacattaacttatcagatgttttgtatcataatatggaaaactatttgaaatatgtgtattatttaattaatccgtcaaaatatgaaaatcccacacttaatgattctaatgctcctcaaatgggtccagaatgtggattttatcatccagatttaggtattttcaccatatatcctgaaggtagtttaataaataattggattaaaactaatcctggatatggtgttgatggaattggtagtttaaattggatgatacaggattatccaaagtggtttgtagatctattggatcctactactttatttgaacagtttgaaaatcaatttattgatagatttaatcctaataagaaattcatagctattgtttcttactattgtggtggggaagttgttgattctttaattagaggttatgaagaaattggaaggcctgcattcaatgtttttaaattttctacagatccttcaatgtcttcaatattaaataaaattaataatgtctcaaaaataggaatttcttctattacttcattatatagttggtctttaagttatgctaatggttctgctgaaaaagatttatctgatattgatgttgaaatccttaaaggtgtaaatgaaatttcaaaatacagttatgaaagtgaacttggacctcaagttgagtggacttactctgtgacttatccgagttttgaaggggtgtttagtcctgttattttatcgtatctagatgaggataaggttcatgtaattcaatcaggtgttgataagatggttcagctcagtagtaggtgggctgatttgaaagatttaaataactctgaaaaaacaatagctattgttctttataattatcctcctggtaaagccgaaattggcgcatcttatttggatgtaatgcaaagtacttatgatttacttattaaattgtatgaaaatggttatgctattggggatattaggaaaatgatgaatattacagaattcactaatttattaattgatagtggtaacaaaggatcctgggctgggggtttgttaaaaaaatatgttgaaaagaattgggatgaattagttaaacataaccaattaatctcaatggatgagttcattgatttaacttcagatcttccagatgagttatatgaggaaatggttactcaatggggtgctggtttaggtaaatcaatggtttatacagctagtgatggtaaacagtatttggttattcctggtgtttggtttggcaatatttttattacttatcaaccaagcagaggttgggaagaagcagatattggtgaagttattcaaaattaccatgatttgaaattacctcctcatcagcaatatgttgcattttatgagtggatggataaagtaacaaaggctaatgcaattgttagtatgggaacacacggaacattagaatggttacctggtaaaaatatcggtgttggttctggagattggtcctatgaattaacaagaattccaacaatatatccatatattgtatctaatcctggtgaagctatggttgcaagggatagaggtttagcaatgcttattactcacatgactcctgctatagtatcatctgagttatatggtaattattcgattttaaataattatattaatagttataataatcagattaaactcaatgttacttctaatgctaatatatataaagaaaaaattcttaaattagctcctaatttaggtttcagaaagatgtctaaaggtgagtcttttaatcactggcttgaggaattgcacctttatcttgaaagtatgggtgatgacctaatgacttatggattacataatttgggtaaagttttaacaggtaatgaactatctgaagaagttgttacaatcgtaacttctcaaactaagatttataatcaaataatggaatttttatatcctaatttaaaaggcaaagatttttataaagatattcaaggagatgtaaaataccttaatgaacgtcatactattcaggcattcttaagaaactatgttgatggcttagttaacggatcttctgttttggatttggttaataagttaggtgtaaataaagatagttcattattctcatcaatgaaatatgctcaagatgtaattataaatatccaaaataacaatgaatggaatgcaattctcactgcattatctggtggatatgttaaagcaggtttatttgcggatcctgcatatggtgattcaattccaacaggatatgatggatatgcatccgatcctactagaatgccatctgaagcagcatatgaatctgcagtcaatatagtgaatttattgcttgcggattattatgaaaaacatggtaaatggcctgaaatgactgcattaatcttatggggtacagaaatatcaagaactgaaggaattggtgttgcagaatttttatacttcttaggatgtaaaccgaaatgggcagaaaatggtaaagtaattggcgttgaactacttcctttaaaggacttaaaagttaaattacacaatggttctgttgttaacagacctaggattgatgtatatgcaagtttagttacaagtaataaagattggattacttggatggtaactgccactaggttagcggcaaatgctggtgaaagtgaaaatgataattatgttataaaacattataatgaatatcctactcttgatagattatttggtcttccgggcaatattcttgagggtactggtatgagtactcttattccaaatactgctaattggaatatttccacagttaatgtggaaggtatgaatgtttatttggatactgtttcattttcatggactattgatgagaagggtaatatcaatatcactaaacaaaaagatacttacaaatatctccttacaaaaacagagttaataacacaaaacctagatagtacttggagaattttagattctgatgattactatgattggtttgggggattatataatgctgcttcaattttaaggcaaaaagcaggtttaagcagacctgatacttcatttgttgatatccgtgataagaataaatatgttactagaacttatgaggaagagatggagtttgaaatcagaaccactcttttgaatccaaaatatcttaaacctcttaaaggaactgctgcaggtatgaactggattgcttcaagaatgcagaatacattcggtattttgactattagtggtaataagttgaataaggaattaggtaatcaaatgtccaatacccttttagacttagctagtggtgttagagatgcaagtacttcttacggtattcaatctgctattgcgcacatgatttacttagcaactcaaggtacttgggatgcagatagtgaaacccttcagaaactcgctgatgaatatatgagacaagttttaaaatatggtgttgcatgttgtcaccacacttgtaaaaacttggattttaataacaaggtcattcaagtaagttcattaactcctgctcaaaaagcagaatttgcaaaaatattggcacaagctactaatactgatcctttgtatgaggtggaaaaagattccgctaataatgataataatgcacaaggaattgttaatggaactactaaagataaacaatcagattcagaatctggggataaaacatcttttggaggagattcctctcaagcaggtgatgcaaaatctgcttcacaatctcaagattctagtgattcatcaggtgattcaggtgctgatgcatatgagttgtcccaacaatccgcttctaaatctactagtggcgctgaatctagcatgccaatatttgttataattgctattattattttaattgtaattttcttagttggatatgttagaaatcaaaaagatgaagatttcgatgattattaa

SEQ ID NO: 7997 - DNA, 843 bp, Methanobrevibacter gottschalkii
  source 1..843: mol_type = genomic DNA
atgcataaaaatagcatcatcataattattttatcaataacaattataggaatgcttattccagcgggtttttcagcaaatgattaccaaattgttataacatacggtgaaactacaaaaaacaatgctgaatataagaacactgttgattcattctttgaaaatcaagcacatatggatttaaaaggagtaaattccaaaataatcactgccaatgaagtgaataaaatttcaagtacaataactggaaaaagttataattcaaatcagattttctcatcagcactagttgatttaggagataatgataaccttaaagttagcgtagacaaatcaaaaattaccacaataactggagatatgtatctctccgcattaaaatcagcaggaattacaaatggccatgtatatataacaagtcccgttactgcgactggtgaatctgctttagcgggaattatgaattcatatgaagtagctactgatgttgaaattcccgcaccggttaaagaagctgcaaacaaagagatttatacacaagcggaaattgtaaaagagtcaaatgttagtgccgatgacttatcaaacttggttgatgatgtaaaagaaaccgttaaagaagaaaacattacagattaccagacaatagtaaatataatcaataacactaccattaattacaatatcaatttaacatacaatgatattgaaaaccttgctgaaagtattgaacaaatacaaaatgttcagggagatattaacagttaccagacagaagtaaatgatgtgctaaatactaccgatacatcaaatactggatttttagacgggctattcaactaa

SEQ ID NO: 7998 - DNA, 324 bp, Methanobrevibacter gottschalkii
  source 1..324: mol_type = genomic DNA
atggaacatattacgtatgatgatgttgttgagtataatcatttatttactctagtgccttcttttgtattggaaaaaatggccaaaaagaattccaatttagttgataagtttgaatcagcaattcagtcccatataaatgatttaactgttgaacaaagaatcaaattaaatattatccttgatagtgatgtttcagaattgcaagatttaatgtataatgcatatatgaggacaaataaaaaacaatatcagatattggctaatcctaagtataaacagttcattgagttaaatttaggggaattgcggaaaataatataa

SEQ ID NO: 7999 - DNA, 531 bp, Methanobrevibacter gottschalkii
  source 1..531: mol_type = genomic DNA
atggatgctattgaagcagttgcaatcttaattttagttgttgctatttttattttagtttattattatttgctaaatagtccatcttctatggataaattaaaaaacattgtacctgaaagtgcagatgcgcacatggacgaagttttaggtaaaaataatgttgattcaagttatgatttatctaaagaagatgttttaggtgataaagaggaatctgaatcaatgggtaaaagaataaaagttaaattaagtgatattgatggttctactattaacactagcgcattttcccataaacttgatgcatttttagatcaaaaaagtgatcaattaattaaagactggtctttagccactacaaacgatttggataatcttcaagctaaatttgatgaaactactaataatgtagatactttagaaaaaaatttcaatgagtttaaacaatcatctgaagaattccaaaaaatcactggggaaagattggatgatttggataaaagaatagaatctttagaaaataaataa

SEQ ID NO: 8000 - DNA, 411 bp, Methanobrevibacter gottschalkii
  source 1..411: mol_type = genomic DNA
atggaagctattcctacaatacctgatcaaattttttatttgataattctggtaattgttgctattgtattgatagttattgtttttcaatggaaaaaagttgcacaatcaaaaaattcaattttaattcttgaaaaagaaattgaacttaaaaaaatgtctatggtggaaaaagacattgaatctaaaaggttaatggacaatccaattccattacctcaagagcaacaggacagtctttcagctattaggcaatctacaactgaagtgagaagtaatgttggttatcttcactctgagattaatgaaagattagccagactcgaagctgaaaccgaacaaagaaagttagaaaaaatgcttaaagaaattgaagcaaaagagaaaaaacttagtaaaatgaataaatag

SEQ ID NO: 8001 - DNA, 918 bp, Methanobrevibacter gottschalkii
  source 1..918: mol_type = genomic DNA
atgatggaatcttatataaaagctggaaaaattgtttcaaaaatacgtagtgaagcttcaaaaatgattgtagatggagcattagttatagaccttgtaaactacgtggaaagtgaaatattaaaaactggtgctgaaattgcattcccatgtaatgtatcaataaatgaaattgcagctcattatacttcccctattagagatgaaactgcatttaaagcaggtgacatggtgaaattagatttaggtgcaatggtagatggatgtattgcagattcagcagttacaatcatagctaatgggaatattgatgaaaattacagtcaagatgaaattaatctacatgaggaaatccaagaagcatctgcagcaggtcttgaagctgcaatcgctacagcaagagcaggaattgaagtttcgaaaataggtgctgcagtccatgaagcaattgcggaataccatttaaatccgatattcaatttaactggacatagcttagaacagtacaatttacatgcaggcatttccattccaaattatgacaaccacgacaattatattttagaggaaggtcaagccattgcaattgaaccttttgcaaccaatggagaaggtattgtaaatgatgcgccagggcattatatattttcatacatggcaaataaaccattcagaatgaaaagcactcaaaaagttttaaaatatattcaacacaaccacagagatgttccattttctggaagatggataaccaatgaatttggagaaagaaaaggatcaatcgctttaaagcaactatcagaatccatggcaatttatccatatgcccctcttcgtgaaaaagagaattgttttgtaagtcaaaaagagcatacagtaattattgaaaaagaaggttgtactgttacaactatatag

SEQ ID NO: 8002 - DNA, 852 bp, Methanobrevibacter gottschalkii
  source 1..852: mol_type = genomic DNA
atgccattaggtaattataaagaagcaatctcagcaagagctactgagaaaaaaatcctagatgtatcacaagatggaggaattgtatctgcattgctttgttatgcacttgatgaaggaaaaattgaaggtgctgttgtagctggaactcctgatgatgattggagacctgttcctactgttgtaacttcatctgatgaagtaattgcaaatgctggaactaaatattcaatgtctcctactttagctgtattaaaagaagcaactcgtcaatacggtcttgaaaaaattggagttgtagcaacaccatgtcaaatccaagggttaagaaaagcacaagcttatccattcacaagatttgtcgttaataaaattaatttaatcattggtatttattgtatggaaaacttccctatggcttctcttgacacttttgctactgcaaaattaggatttgataagttaactgatgctactaaaatggacattggtaaaggaaaattctggttaacaaaagatggagaagattctggtttaaaacttaaagaaactcatggttatgaacaatcaggatgtaacatttgtactgattatgttgctgaatgggctgacatatctactggttctgtaggatctccagatggatggtctaccgttttaactagaaccgatgatggtaatagtatatttaaagaagcagtttctgctggtttaattgaaacaaaacctgttgacgatggaaaattcggtcttcctttacttgaaaaattagctaaaggtaaaaaagacaaaaacggtgcagaatttgaaagaagagcaaaaatgggagttagagttcctactatatattaa

SEQ ID NO: 8003 - DNA, 843 bp, Methanobrevibacter gottschalkii
  source 1..843: mol_type = genomic DNA
atgtttgataaattaaaaaaagcttttggcggttcagctgaacctgctccaaaagtagatgaaaaagttgaagaggttgctcctgtagaaacaaaagcacctgcagaagaacctaaagcagcttcatcaaaaccacgtattggttacatacacttaagtggttgtactggagatgcaatgtctttaaccgaaaattatgatatcttatccactgttttgactgatatggttgatattgtatatggacaaactttagttgataaatggattcacggaacttatgctgaagaaatgcctgaaatggacttatgtttaattgaaggttctgtatgtttacaagatgaacatagtgtacatgaacttttagaagcaaggaaaaaagctggtttaattgcagcattcgggtcttgtgctattactggttgtttcactacttattcacgtggaggacaacaagctcaacctagccatgaatctttcttaccaattggttctttagttaaagtggatgtagcacttcctggttgtcctgttgcacctgaaatgattgcaaaaactatagttgcattatgtgaaggcgacttagactatttaaaacctgcaatggattgggctgcatgtgataaaggatgtggttgtgacgtattaaccaatgtagttcgccaaggattatgtactggttgtggaacttgtgctcttgcttgtccaactagagcaatgggcttctcagaaggtagacctagctgtgataaagacagatgtattaaatgtggatcttgttatatgatgtgtccaaggtcatggttgcctgaaggaagaattaaaaaggaaacaggactttag

SEQ ID NO: 8004 - DNA, 570 bp, Methanobrevibacter gottschalkii
  source 1..570: mol_type = genomic DNA
atgccttatgattcggatataatcgttattggatgtggaaatatattatttaaagatgatggctacggtccaatagttattaatcttttacaaaaatattttaatgataaaaatgattattatgatccggcggttacttcgtatgttgaagatgaatttgataagaatgttttaaatcaaatcaaagaaaaatttgaaggtgtaactttaccagatagtgtgcagtttattgatggaggaactgcagcaccaatgaacttctttccgttatacaaagagtatgactggaaaaaattgattgttattgatgtagttgaatcaaatgccgaacctggaactgtgggcatatttgatcctaatgctatgcaagtaggaaaatatgataatcctcatggtatgactgttgaagagccacttcaaaagatttctgaaaaatgtgaagttgtaattgttggttgtaaacctgcttctatcccaatacctgacatcgatgtgggtttgtctgaatctgtagaaaaggcaattcctgaagctattgatattattttaaaagaaatcggggtaaaataa

SEQ ID NO: 8005 - DNA, 1215 bp, Methanobrevibacter gottschalkii
  source 1..1215: mol_type = genomic DNA
ttgaaagatagagtagttatatctcctacaactcgtcaagaaggccatgccgaattagtcatggaagttgatgatgaggggatagttacaaaaggtatgtatttaagtataactccggttaggggtttagaaaagatggttcttgacaaagctcctgaatctgctgttgttttatgtcaaagaatttgtggtgtttgtccaattccacatactttggcttctgcagaagcaatggatatggctttaggaatcgaaattcctaaaaatgctaaattgttaagaaaagctactttagcagcacacaacattaacagtgcagctattcaccagtttttaattgcaactgattttgtacctgaaaatttattcgctacagctgttgacagtgtaagtgaagtaagaaaaacagtacaatatgttgtagacatgattgctggtgaaggtatccacccatctgatgtaagagttggtggaatggctagaaacattactccattcactaaagaaagattaatcgaaagaatgactgcactcagaccaaaactcgaagaacacattgaactaatcaaaaactgtgttgttgaaaaaggtttacctgatgatttaggtgtaataaacagaccattaatggcaactgatgcaacttatggaaccaacgatttcgatatggacgttttctcagaagttttacctgaagcttggtatgatgaccctgaaattggtaaaaaggcttgttctgtaattccattaattaatggtgaaaatgttgaaactggtcctagagcaagaatggaaaaatttgctggatttaaaggtaaaggtgtaaatgcacaacatgtggctcgtgcagatgaaatgttaaaaaactacgatgcatgtatggaagctttggatgcaattgatcctgctgctcctgcaaaagtaagttatgataaaagaggaactggagaacttggttttggtgtaattgaaggtcctaggggaaccaatgtacatatggctaaggttgtcgaaggaaaaactaaattctactctgctattgtaccaactacttggaacattcctacaatgggaccagctactgaaggattccatcacgagtatggaccacatgttatcagagcatatgatccttgtttatcatgtgctactcacgtaatggttgttgacgatgaagataaatccattctcaagaatgaaatggtgagaatataa

SEQ ID NO: 8006 - DNA, 528 bp, Methanobrevibacter gottschalkii
  source 1..528: mol_type = genomic DNA
ttggataaagcaaacataattatttcaatcattatcgttttatgtgttgcagcagcagttgcggcatatggtattacaaatagcgataatccaatcttttctgacttatccagtatgtcagcaaatgataatgatgctggaaatggaataggaaataatacagttacaggaaatggaagtggaaatacaatagcaaccacatccggttcaggaagtggatccagcagtagttcaagctccggaagcggatcaggttcaggatctggaagtggatccagcagtagttcaagctccggaagcggatcaggttcgggatctggaggaggatccaatagtaactcaagaacacatttatcatattcagaagcaaaaagtattgcaaatgatgctattgaagaagctggatgttatgcaggaagtggatcatattctggaggatactggtactttactgtatatgatgcaaatggtaataatgtagacaccataagtgttaatgacaacactggtgctaccggaagaggataa

SEQ ID NO: 8007 - DNA, 1179 bp, Methanobrevibacter gottschalkii
  source 1..1179: mol_type = genomic DNA
atgttagtaaatgctgattttcatgttcatagttgtttttcaatggcatcatcaaaagacatgttaataaagaacatggctgctaaatctaagttaaaaggtttaaatcttttaggaactggtgatgcgtttcatcctaattggttagatatgattgaggaaagtacagtatattgtggggatggaatttataatagtgatgatatgaattttgttttaacaacagaagttgaaggaagaaatagaattcatcatttaattattattccaaatattgatattgctcgtgaactgtcatataagcttccatctaaaaataaaaaaatcgatggtagaccaaaaaccaatttatctggaattgaactgttagagttggttcgggattatgattgtttgattggtcctgcccatgcatttactccgtggactggaatgtataaatcgtatgatagtatttatgattgttatgaaaaaagagtggattttgtagaattaggtttatctgccgatacgttcatggcggatagaatttcagaacttaaagattttccttttctcactaattcggatgcacattctccatggcctcatagattgggcagggaatttaatcaaatagagcttaaagatatttctttttcttcaataaaaaatgcatttaaacataacaagattaaagctaattatggtttggtgccgaacttaggaaaatatcacatgactgcatgtactaaatgttataatttgattgatcctatgattgctcatgaaaataaaatgaaatgtagctgtggcggaaccattaaaaaaggagttgactttagaatttctgaaattgctgactatgataaacctaaacacccggcgttcagaccaaaatatgttcatttgatgcctttggcagaaataatctcttctgtttatgagaaaggcgtcactacaaaaacagttcaaggtaaatggcagaagctgattgataattttggcacagaaattgatgttttaattaatgtcagcttggatgatatagaaaaaattgatttaaatattgctccagctattaatgcatttagaaatggtgaaataaatgttattcctggtggtgggggtaaatatggtcagatttcttttgataaaataaaaaaacaagataaaattgttactttagataatttttaa

SEQ ID NO: 8008 - DNA, 771 bp, Methanobrevibacter gottschalkii
  source 1..771: mol_type = genomic DNA
gtgaacactgctgaaataaatattttaaaagaaatcgaacttgaaaatcctattttcattgaagcattgccgggtcttggacatgttggtaaattggctgcagatcatatgattgatgaattgaatgcaaccaaatttgctgaaatttattccccagcttttccacctcaagttcttattaaagaggatgggattataggtaatatgcttaatgagttatattatttaaaagatgttggtgaagacaatttggatttaatcgttcttgttggtaacactcaagctttatctcctgaaggacaatatttggtctgtaaagatattttagattttgttaaaggttatggaataactagaatgttcactatgggtggaatggctatacctcagcctgttgaaaatcctaaagtttatggtgcggctagtgatgaagctactattgaattattaaaagaagccggaattgaaatcagatctaatgatgggggtattgttggcgcttctggtttatttttaggtttaggaattcgtcagggaattcagggggcttgtcttatgggtgaaactccaggatatttcattgatgccgaatctgctgaagctattttgaaaaaattatcattattacttaattttgaaatcaatactgataaattagatgaaagagctgaagaaaccagacaaatgattgctaaagctcaacaaatggaacaagatttgattaataaggctaatactggaaatgccgatgatttaagatatattggataa

SEQ ID NO: 8009 - DNA, 162 bp, Methanobrevibacter gottschalkii
  source 1..162: mol_type = genomic DNA
atgaaaatgaataaatgtcctgaatgtggaatttatactttaaaagattcctgccctaaatgcggcgggaaacttaaagttatttatcctcctaaattttctgttgaggataaatatggaaaatatcgtcgtattttgaaaaaagaatcaatgaaggagtaa

SEQ ID NO: 8010 - DNA, 801 bp, Methanobrevibacter gottschalkii
  source 1..801: mol_type = genomic DNA
atggtaagaaaaagtcaagaatggcctgatgaaggggaacttattgttggtactgtttataaagttcttaattatggggcttttgctaaattagaagaatatcagggcaaagaagcttttattcatatttctgaagtgtcttctggttgggttaaaaacatcagagatcatgtaagggaaaatcaaaaaattgtttgtcgtgttctcagagtcaatcctaaaaaggggcatgttgatgcttctttaaaaagaattcgtgaagaccaaagaactaaaaaaatccaacattggaaaatagagcaaaaagctgaaaaattcttagaattatctgcaaaatcattggataaaagtttggatgatgcttatgatgaagtaggttatgaactcatggatatctttggagatgtttatggtgcttttgaaactgcttctgaagaaggtgcgggttcacttactgaagaaggaattccgcaagattgggctgatgctattactgaagtagcgcagagaaatatcactcctcctgaagttcacattagtggttatgtcgatattgaaactttcgtacctaatggtgttgaaattatcattgatgcacttaaagctgctgaagataatggtgatgaagaggaagaaattaaagtccaatgtgttggtgcaccaagatacaggattactgtaaaatctactgattacatattggctgaaaaagctcttaaagccgcagctgatagatgtattgcagttattgaagaatctgaaggtaacggttcttttctaagagagttagataataattag

SEQ ID NO: 8011 - DNA, 180 bp, Methanobrevibacter gottschalkii
  source 1..180: mol_type = genomic DNA
atggttagtaaaggtagaggaaactttttaaaagttaaatgtttggattgtgacaatgaacaagtaatatttgatcgtgcagcatctgatgttaaatgtattatttgtggtaaaactcttgtcaaatctcgcggtgctaaagctaaaatcactgcacatattgaaaaagttttaaactag

SEQ ID NO: 8012 - DNA, 279 bp, Methanobrevibacter gottschalkii
  source 1..279: mol_type = genomic DNA
atgaaaataccaaaagaaaaaagaacttactgtccgcactgtaaaaaacacacaatgcatgaagttcacactgctaaaaaaagaaaagctagtgaattaacttggggacaaagacaattcagacgtgtaactgctggttacagaggttatccaagacctttacctgctggaaataaacctgttaaaaaattagatttaagactcaaatgtaaagaatgcggtaaatctcatattaaacaatctttcagaacaggaaaacctgaatttgtagctaaatag

SEQ ID NO: 8013 - DNA, 876 bp, Methanobrevibacter gottschalkii
  source 1..876: mol_type = genomic DNA
gtggatcaattttatcaagaattgcgtaaaattcaaaaaaaagagcgtaataatggtactttagctcgtgtagatgaaaatttttatgcaagtattcatgaatatttggatgagttaaggcaagaagcaatcagagatccattttctaatattcatggaatgcttaaagaagctcaaattattgcaactgagatttgtgaaagaagagaacataaaataactgatgctgcagttgtaaatatccatagatcttatcggctgttcactggaaaacctaaatttgatttagttgatactactcctcttaatttaactcctgaagaggaaaaattttatttttctttattggataccttaaaaaatcataggggaaatatttctttagaaaaattatccgatgatgatgaatttgttaaacctaaagaaactcaaactaacacattggtgccaaaacatgatgaaattaagcctaaagttagtaatttaacacatgataatgaatctgaagatgaagttttaaatcgtttagatgagattagtagggcaaaaccactaaaaaaagaaccgttagaacctaaaatcgaatctaaaacaatgtccattccaaaaactcaggctggaaatattcctgagaaaagtattgagataaatcctaatgcttttgataaacaagatgaattttatgatttggagtctaaaaagttagctagggatacagaacttgttactatgttggtttttgatgagattaatccgattgtgggtgttgatgaaaaagtctatggtccattcagacctcaagacttggtgactttgcctttgataaatgcaaaagtatttttcaaaaatagaaaaggtcgtcaaattaaaatttaa

SEQ ID NO: 8014 - DNA, 735 bp, Methanobrevibacter gottschalkii
  source 1..735: mol_type = genomic DNA
atgtttaaagcagaattaagtgattctagtatactaaaaaccagttttgatgctatttcatctattgttgatgaagtacaaattcaaactgatagtgaaggcatgagattagatgccttagatcgtagtcacataactttcgtacatttggagcttaaatcaagtttatttgatgaatatgtttgtgatgttcctgaaaaaattaatattgatactgatgaattcatgagaattcttaaaagagctaaatcacaagacagagtattgatgtctttagatgaaggtaatttcattatcacttttgaaggcgatgctacaagaactttcaaaattagattaattgatatggaatatgataatcctgttccgcctcaaattgatcacccaacaaaatttaaagtacgcttttcaattttaaaggattgtattaatgatattgatattttttcagataaaatagctttacaagttgatgaagattactttatggcatctgctgatggtgaatttggtgatgcaagtattaaatatcttcacggcgaaaatattcaagaacatgcaaaatctttattctcattagataagattagagaaatgctcaaagcagataaattttcagaggaagctgaaattagtttaggcaatgacatgccattaagtttaactcttaatatggttactggtgatggtaaacttagtttcttgcttgctcctagattagaaacagatgattaa

SEQ ID NO: 8015 - DNA, 774 bp, Methanobrevibacter gottschalkii
  source 1..774: mol_type = genomic DNA
atgagtaaaatagctgatgcatttaaaaatggaactgcattcattggttttttaactgcaggggacccgacaattgataaaactgttgaatatattctggcaatggaagaagcaggttgtgatttgatagaaattggaattccattttctgatccaatggctgaaggtgttgtaattcaagatgcaaatgtacgtgccttaaagcataatacaacagcagatgatgtatttggtattgtaaagagagtccgtgagaaaactgacattcctttagtatttttaacttatattaatcctgttttcttttatgggtatgaagagttttttaagaaatgtggagaattaggagtcgatggcatcatatctccagacttgccttatgaggaaaaaggtgagattaaagatattgctcttgaaaatggtgtagatgttatttcattaattgctcccacttcaagtgaaagaattaagatgattgcgggtgatgctactggatttatttatgtggtgtcttcattaggggttactggaatgcgtagtgaaatcaaaacagacttaaattctatattgaaagatattcgtgaagtaactgatttaccattagcagttggttttggtattaacacgcctaaacaagctgaagatatttctaaaattgctgatggtgttatagtgggaagtgcgattgtaaaaataattgaagaacatggagaaaatgctacaaaatatttaaaagaatatgtttcttgcatgaaaaaggcctgcaataaataa

SEQ ID NO: 8016 - DNA, 1185 bp, Methanobrevibacter gottschalkii
  source 1..1185: mol_type = genomic DNA
ttgagtaaaggaagatatggagaatatggtgggcagtacatatctgaaacattaatgaatgaattgatttatttggaggaacaatacaaccattacatgagtgatcctggttttgtagaagagcttgacatgttattaaaagagtatgcaggacgtccttctttattatattatgctgaaagaatgacaaaagatcttggtggggctaaaatttatttaaaacgtgaagatttaaaccacacaggagctcataaaattaataatgttttaggtcaggttctgcttgctaaaaaaatgggaaaaacaagagttattgctgaaactggtgctggtcaacatggtgtggctactgcaactgctgctgcacttttggatatggaatgtgaagtatttatgggtgaactggatactaaacgacaagctttaaatgtttataggatggaacttttaggggcaaaagttcattcagtaaaatccggaactaaaactttaaaagatgcagtaaatgatgcatttagagattggattgctcgtgttcatgataccaattatgtaattggttcaacaatgggtccccatccatttccaatgatagttcgtgattttcaagcagtaattagtgctgaagcacgtgaacaatttttagaaaaagaaggaaggctccctgctgctgttgttgcatgtgttggtggtggaagtaatgctatgggtgctttttataattttattgatgacgatgaagttaagctaataggatgtgaagctggtggaaaaggtattgatacaccttacaatgcagcagcattaaccaaaggtaaaattgggattttccatgggatgaaatcaatatttaatcaaagtaattatggtcagattgcgccagtacattcggtttctgcagggcttgattatccgggtgttggtccggagcatgcttatttaagggatattggtagggcagaatatgttcctgtaactgatgaagaagcagttaccgcatttgaatatttatcaaaaatggaaggtattattcctgctattgaaagtgcacatgccgttgcccatgtcatgaaaatagcaccattaatggacaaagaagatattataatgatttgtctttcaggaagaggggacaaggatgtcagatcaattgcggaatataggggagttgaattaaatgagtaa

SEQ ID NO: 8017 - DNA, 600 bp, Methanobrevibacter gottschalkii
  source 1..600: mol_type = genomic DNA
atggttaaaatcaaaatttgtggaattaaaagattagaagatattgaaattgtaaataagtataatcccgattatattggatttgtttttgcagattcaaaaagaaagatttcgcatgatttggctaaaagattaaaagataatttgaattcaaatatcctttctgttggtgtttttgtcaattcatcaaaagatgaaatactgggtttatttaatgagggcataattgaaattgcacaacttcatggtaatgaaagtgaagaatatataattgatataaaagaaaggactaattatgaactaaaaattataaatgctattgaaatgtcgcaggatattgatttattgaaatatgataaatctttagcagattatttattgctggacagtggtaaaggaagtggaaaaacttttgactggcaattgataagaaatgatttaaaaaagaacttttttttagctggtggattaaatatccaaaatgttcgtgaagctattcatgaatgtaatccgtatgcaatagatttaagttctggtcttgaaactgatggatttaaagatgaaatgaagattaaggaaattatggaggttataaattga

SEQ ID NO: 8018 - DNA, 777 bp, Methanobrevibacter gottschalkii
  source 1..777: mol_type = genomic DNA
atgttatgtgaaattgtcgaaaaaactaaagaaagggttgaacaagctaaaaaatcaattcctcttgatgaaattaaaaaagaagtttcttcaatggaaatgacagatgagtttccttttaaaaaagcattaatggaggatggaatttcaattattgctgaagttaaaaaagcatctccttctaaaggtttaattgctgagaattttgatcatgtgaatattgcaaaagattatgaacaggctggcgcttctgcaatttcagtcttaacagaacctttctttttcatgggatctaatgagtatttaagtgaaatttctgaaaatgtttccattccaattttaagaaaggattttgttgttgatgaatatatgatttgggaagctaaattgctaggtgcttctgccatattattaatagtttctatacttgatgttgttcaattaaagaaatatttgaatttggcacatgatttggggctttcggtcattgttgaaacacatgatgctgacgaaattagaatggcaatgattgttggggcggaaattattggtgtcaataatagaaatttaaaagatttcactgtaaatattgaaaatagtattaatctacgtagatgtgtaagtggcgatgttatatttgtttcagaaagcggtattaaaacaaaagatgatgtcactaaattaaaagaaaatgatgttgatgctgttttaattggcgaaactttaatgaaaagtaatgataaaaggtccatgatttcggagttaaaaaatggttaa

SEQ ID NO: 8019 - DNA, 1008 bp, Methanobrevibacter gottschalkii
  source 1..1008: mol_type = genomic DNA
atgattaaagaagctattttaaaagtatacaaaaatcaagatttaactcatgatgaggcatttcaaactatggatgaaattatgagtggtgaagcaagtgaagttcagatgagtgcttatttaactgccatgtctatgaaaggagagactataactgaaattactgcttctgctgaagctatgagggctcattgtgtaaggttattaaatgacagggaagttttagaaattgttggaaccggtggggatggttcaaatacattcaatatttctactacttcttcaattgttatatctgcagcgggggttcctgttgcaaaacatgggaacagatccgcttcaagcaaatgtggtgcagcggatgttttggaacagttaggtgtaaacatttatattgaacctgaaaaaagtataaaatgtttagaaaaaataaatctatgtttcttgtttgctcaaaattatcatttatcaatgaaatatgtggctaatgttcgtaaagaactttcaattaggacaatatttaatatcttaggtcctttgactaatcctgctggggctacaatgcaggtattgggggtttatgaaaaagaacttgccgaacctttaattgatgtattaaaaaatttaggagtttcatcggctgtgtctgtttatggaatggatggaatggatgagatttcagctagtgataaaacttttgtgtgtgaacttaaagatggcaaaacaatgtcttatgaaatttcaccagaattatttggcatggaattagcatcaaaagatgatcttgttggtggaaatgctcgtgaaaatgcagaaattacattatctatcttaaaaggtgaaaaaggaccaagaagaaatgcagttttattaaattctgctgcaggtttatatgttgcaggtaaagttgaatccttaagagatggtgttgaccttgcagctgaggtaattgattctggaaaagcattaaaacaacttgaaaactttattgaatttacaaacagctga

SEQ ID NO: 8020 - DNA, 585 bp, Methanobrevibacter gottschalkii
  source 1..585: mol_type = genomic DNA
atgattcttttaatagataattacgatagtttttcatacaatttataccaactaattggagaagtcatgaaggatattcaggtttatagaaatgacaaaataacagtcgaagagataaaagatttagctccggaggcaattgttttatctccgggtcccggaaaacctgaaaatgcaggaatctgtattgatgtagttaaagaatttcatgataaaatacctattgttggtgtttgcttaggtcatcaagcaatctgtgcagcttttggaggtaatatttctcatgctaaacgattgatgcatggcaaatcttcaaaaatctctctccattatgatttcatatttaaaggattgccaagtgagataagtgtcggaagatatcattctttaagtctaattgaagacacgcttccagattgcttagaaattatttcaaaggctaaagatgatggtgaaatcatggcagttaaacataaggaatttaatgtttacggacttcaatttcacccggaatcaatactaactccagacggtttgactattatagaaaattttgcagaaaaagttgaaagagggatattatga

SEQ ID NO: 8021 - DNA, 1524 bp, Methanobrevibacter gottschalkii
  source 1..1524: mol_type = genomic DNA
atgatgatgaaaatattaagtgatactatgttttccccaagtttagaagaagtaatagaaataggaaaaaacgaagaatataaaaggattccaatatcttatgaactattttcagatattgccactcctattgaagttttaagaattctgaaaggtataagtaatcatacttacatgttagaaagcgttgaagattcaaaaaaatggggaagatacagttttttaggttttgatccactactggaagtcacttgtcatgacaatatggttcatatcagaggggataaggagttcaatgaattaactgatgaggaaacaataattgaaactaatgttccaagtgatgtgattaaagatttagttagtaaaaataaatctccaaaacttgagtacttgccaccatttactggaggttttgtcggatattttgcatatgactatattaaatatagtgagccttctcttaatttagatgccgagaatcaagatcaattcaaagacattgatctgatgttatttgataaggttattgcatttgataacttcaaacaaaagattattattataatcaacatgaaaactgatgatttagaatgtaattataaaaaagcatgtgagaatctaaaaaatatagcaaatttgatcagaactggtaaaaaagcagaaatacaaccacttaatttaaaatcagaatttacaccagttttttcacgtgaaaaatattgtgaaatggtcaaaaaagctaaggaatatatttatgagggggatatatttcaagttgttctctcaaatagaattgaagcagatatttctggaagcttgtttgatacatacagggttttaagaacaactaatccctctccttacatgttttatttttcaagtaatgatattgaaatagctggcgcttcacctgaaacattagttaaattaactgataatcaattatacacatttccgcttgccggaacaaggcctcgtggaaaaactgaagaagaagacttgatgttcgaaaaagaattacttgcagatgaaaaggaactggctgaacataatatgttagttgatttaggtcgtaatgatattggaaaaatatctgaaatcggctctgtaagtgttgataaatatttatctgttgagaaattttcacatgtgatgcatatcggatcaacggttagcggaacattaagaagcgatttggattcactttcagctattgattcgattctccctgcaggaactttatctggtgctccaaaattaagggcttgtgagataattaatgagcttgaaaataataagagaggaatatatggtggagctataggatatgtggatttaagtggaaatattgatacttgcatatcaattaggattgcatttgctcgtaataataaagttttcatccgttcaggtgcaggaattgttgcagatagcgttccagataatgaatttgatgaatgtttaaataaagcggccgctgtaattaatgctttgaaaattgctgatggaggtattttatga

SEQ ID NO: 8022 - DNA, 402 bp, Methanobrevibacter gottschalkii
  source 1..402: mol_type = genomic DNA
atggatttaagaaaaataggcattctattaatatttgttggaatttttgttacaattttttttataaatgatgataaactttttgttcctgcattgactgtgactgttttaggattttttgtaactgttgtaggttttgtcattgaaattagaaaacaaaaaattaaaaacgacagattggaaaaagatatagaatctattcttcaaccattgattactgaatattcaaatcttaacaaacagtatcgtatggattttcaaggggatgaatacactcaaaaaaggattcagttaaatcgtgatttggaaaaggaaatcacagataagattccatatttggaaagtagggaaattaaaaaaattgtaattcagtttagtcaagaacaggacaaaatgaattaa

SEQ ID NO: 8023 - DNA, 777 bp, Methanobrevibacter gottschalkii
  source 1..777: mol_type = genomic DNA
atgtcttcacttaacgaaaaacttaaattagttaccttaaagggtttattgatttttatttttttcatatttcttattaatgtgttgctgggttcattaaaccttattcaaattaataatgcttggatttatatttttgttattttttattttatttttaaacttagagagggattttcaagttttaagcatgattttttaaaagttttcacatttgaatcgttaaaaattatttcagcaatcgtaattttaaatgtttttatttcttatgggctgctttatttgtcagactttattttaaatgtttttcccaatttaaattcaattgttatgtcttctgaatatattaacaattctttatttgttttttacggggttataacaacagtttttatttcacctatttcagaagagttaatttttagaggagttttgttaaatagactaaatttaattattccattggatttttcaattgtaattacatctattttgtttgcatcgctacatagttttggaagcattactgcagcatttatttttgctgtttgtatggctgttttatatttaagaacagataatattttagttccaatttttgcacactttttaaataatttaattgctgaaattattgttattgctgatgtgggtaatatgttatttacaaataatgttgttatgctgataatgtcagttttagcaatcatttcaacttttttaatcttaattctgattaaaaagcaatggaatatattaaatattaataaattatag

SEQ ID NO: 8024 - DNA, 204 bp, Methanobrevibacter gottschalkii
  source 1..204: mol_type = genomic DNA
ttggaaacaagaatacgaaagtttcgccaagaaaagggcatgactcagcaacatcttgctgaattggttggtgtgactcgtcagacaataaatgctttagaaaatgctcgctataatccttccttattattatcctatcatattactaagatattggggaaagctgctattgaagatgtttttatattcaatgaagatgattga

SEQ ID NO: 8025 - DNA, 1350 bp, Methanobrevibacter gottschalkii
  source 1..1350: mol_type = genomic DNA
atggctatacatcctattgaattcagatatgggactcctgaaatgaaaaatatttgggaagaagaaaataaattacaaagaatgttagatgttgaatccgcattagctcaagctgaaggtaaacttggaattatccctcaagaagtggctgatgaaatttcatcaaaagctaacacaaaatatgttaaattaacaagaatgaaagaaattgaagctgcaactaatcatgatattgcagcattatcaaaatcaattacagaagtttgtgaaaatggcgcaggagaatatgtgcactttggagcaacatccaatgatattgttgacagttcaaattcattattaattaaagattcaattaatgtattaaaagaaaaattagaaaaattaactaaaatcatgctagacttagcaagtgaaaacaaaatgaaagtatgtattggacgaactcacggacaacatgctcttccaacaacttacggaatgaaatttgctctatgggcagatgaactccacaggcaatatgacagattagaacatgccgaatcaaatgtatgtgttggaatgatggatggtgcagtaggtacaactgcagcattaggagaacaaggttgggaaatccataaaactgttgcagaaattttaggtttgcctgcagcaacaattacgaatcaggttgtccaaagagacaatcatgttgaattcattagtgtattagctaatattgcaagtactttagataaaattggacttgaaattagaagtttacaaagaactgaaattatggaattaggcgagtacttcgatcctgaaaaacaagtaggaagtagcactatgcctcacaaaatgaatccaattacggctgaaagaatctgcggcgttgcaagaatcgttaaatcatatgtaaatgcggcattagacaacaatccactttggcacgaaagagatctgacaaattcatcttgtgaaagaataatgtttccagaaagttgtattttaactgattacattttaaacttaacaattaaattaatgagcaatctcgtattctacgatgaaaatatcgaaagaaacttaaatttcacccatggtttggttatggctgaaagattaatggcagaacttactcgtgcaggaatgggaaaacaaactgcttacggaattgtaagaaaaaatgctattaaagccaataaagaaaaattattacttggagagttaattttagaagatgaagaagttaaaaaataccttactaaagaagatgttgataaaataatggatcctcatacatataccggatctataccaaccattattgatgaattacttgaaaaatcaaaagagtggttttaa

SEQ ID NO: 8026 - DNA, 2493 bp, Methanobrevibacter gottschalkii
  source 1..2493: mol_type = genomic DNA
atggcttatctcaaaagaatggatttgccaattgaaggaatgcattgcgcttcttgtgtattaagtgttaataaaactttcggaaaaattgaaggtgtagaagaagttgatgctgatttagcggcaaataggttacatattacaataaatcctaaaaaaatttcttatgaagaaatggaaagattagttaaaaatttaggttttgaacttcactctgatgaaatgactttaagaattcagggtatgcattgcgcatcgtgtactatgaatgtcgaaaattttttaattagagtagatggtatttttgatgttaaagctgatttaacatctcagactgcaaaaataagatatgattcatctaaactggatatgaatgaggttgaaaaagtaattgaatccttaggttttgaacttttaggtattgagggtcaaactgaaattgatgaggaagcaatttatcaacaggatctaaaagataaactcactagaattatcgtaggcgtagtatttactgctattttgatgattttaatgtttagtggatgggatccattaatggggcctattgctagtttaaatcaagtcactggtcttcatatttctgcaatgggattactgtcattaattgtaagtatcggaccatttatttacatttcattaccaattttaaaagcaggatggaatggattaagccataaaaacttgaacatggatgtaatgtattcaatgggtattatggttgcttacgtttcaagtatttttggaacatttggtatagtattggatcacactttcatgttttatgattctgcggttatgcttcctgcatttttaatgattggaagatacttggaagcaagggctaaaaaaagaacttctgattcaattcgtgaattgattgggcttcaacctacagttgcaatttcaattgaagtcgatgaaaacggagaaattacatctcaaaaggaagtgtctattgcagatattgtattaaatgatttattgcttgtaaaacctggtgaaaagattcctgttgatggtgatgttgttggcggagaatcttgtgtggatgaatcaatgattaatggtgaaccaattcctaaagtaaaaaaagatggtgaagaggtgtttgcaggcactattaatcaggatggagtattatatattaaagctaaaaaaattggaaaagaaacggtactttcgaacattatccgtttggttgaaaaagcacaatcttcaagacctccagttcaaaaattcgcaaatactattgtatcatactttattccagttattttaacaatagctattgttgtattcttaatctggtactttgtacttggagaaacattgctattctcacttacctgcttaatttccattttagttgtggcatgtccatgtgcattaggtcttgcaactccaactgcagttactgtaggtgttggaagggctgctgaattcggaatcttaattaaaaatggtgatacattagaaaatgcaggacagcttgatgtagcagcatttgataaaactggaactataactgaaggaaaacctgaagtggatgatattattgcatatgctacttctgaagaagatttaattaaacttgtagcaagtgttgagcaaaattcaacccatccaattgcaaaagctattgttaataaagcaaaagagttgaatattgaattagatcagactactagttttgaaaatgtcactggtaaaggtttaaaagctgaaatcaattctaaagaaattcttgcaggtaatttagctttaatggaatcagaaaatgttgaagtttcttcaaaacttgctgataaatattatgaacttgagaaattatctaaaacaattattttccttgctgaagataaaactgttaaaggtattttaagtctatcagataagatcaaagaaaattctagaagaaccattgaagaattgcataaaatgggtgttcaaacatatatgctaactggagataacgaatctactgcattaaatgtggctcgtgaagttggtattgataatgtaaaagcgagtgttcttcctgaaaataaattggagattgttaaagatgctcaatcaaatcacactaagaaagttttatttgttggagatggaattaacgatgctcctgcacttacacaagcagatattggtgtagctatgggtaatggtactgatattgcaatggaaagtggagatgttgttgttatggaaggtgatttggaaaatgttgttgcagctattcaattctctaaaaaagtaatgcgcagaattaaagaaaatatattctgggcatttgcatataattcaattttaatccctattgcagcaggaattttatatcctgcatttggcataacatttgaacctgcattggcaggtcttgcaatggcaatgagttctgtaacagtcatatctctttcattaatgcttaaaagatatgttccagaaataaaaagaaaaagtaatatttaa

SEQ ID NO: 8027 - DNA, 792 bp, Methanobrevibacter gottschalkii
  source 1..792: mol_type = genomic DNA
atgaaattaattattgatactgaattatgtactgcctgtaaattatgctctcaagtatgtattcgtgataatatctatgtagatgattttgcagttgaaatgggtgataattgttttgagtgtggacattgtatggcagtatgtaaagttggtgcagtaactttaaaaagtttcataggtcatgaagatagaatccaagagtataattctcatgaaattcctgttaaatatgatgatctgcttcaacttttaaaacaaagaagatctattcgttggtttaaaaataaaaaagtggataaaaaaacttttgaaaaattatttgaaggggcatattattcaccatcagctcaaaacgaacaagatgttgaatttgttgttttagatgaaaaactcgatgaatttatggatgtcgtttatgatattattaaagttgatgaagataaatttttcagaattaaagaattcggcgattatttaaaagataattccaaaaagaaattccacccattgttatgggaaggaaaacaactcattttaacattttcaacagataaaaataatgcagttattgcaaatactcgtctagaattacttgcttattctttaggtcttggaggattttattctctttttattcttaaagctgatgaaattaatcatgataaattaatggaattttttccagatattgataaaaataaacatatgtattctacttttataattggatatcctaaaaaaagattcagaagaacaattcctcacagggatatcactgcaacctattactaa

SEQ ID NO: 8028 - DNA, 1215 bp, Methanobrevibacter gottschalkii
  source 1..1215: mol_type = genomic DNA
atgcaaactctaattgaaaatgtaaatattgttaatcctggtgatgatataaaaactcatcagaatatcttaattgaagatgctctgattaaggaaatctctcaggataagctatccactaaagataatgttaaaattattgatggtgaggataattatttacttccgggctttattgattgtcatactcatatttttgcaaaagggtttcataaagaagaaaacatgactaatcctttaggaattcatttttataatgcagttcctcattctttgcaaactattgatgcgggtgttacaacaattagagattgcggatctgctgatttaagttttaaattagctcaacaaagaaaattatttactgctcctaaaattcatttatctgttactcctcttgtcattactggaggacattttgatttacttttaccttctggttgggatatggagataatgtatcctgggtttccaaaaggaaggtgtgacggtgttgaagaagttttaaaaaagactcgtgaagtaaaaagagcaggtgctgattttattaaagtaatgtgtagtgggggagttttaacaactaacaattcaccagaattcgcacaatttaacaagaaagaattgaaaacaatcgcatgtgaagctaatgcaaataatatgagtgtttctgctcattgtcatagtttaaaaggaatgaataattgtattgatgttggattttcatcaattgaacatggaacattcattgataggaaaactgcttgtcgaatggctgaaaatgatgttagtttagtcccaacacttttagttcatcaatttttatataaaaacggttttccggcatgggataattatgctcgtgaaaaaacagcaaaattaaaagaaatagttaaagtccacaaggaaaatattgctgctgcttatgaagaaggggttaatattttaatgggaactgatagtggggttattcctcatggtcataatttagaagaattaattcatttaactgatattggaatgagtgaatcagaagcaattgccagcggaactgtgaatgcagctaaatttttaggcaatgatgacttaggcaaagttaggaaaaattgtattgcggatttggttctggtcaattctaatccttttgatgatatttctattttaagcgataatgataatatattaactgtcatacaagatggaattgtggttaaatga

SEQ ID NO: 8029 - DNA, 390 bp, Methanobrevibacter gottschalkii
  source 1..390: mol_type = genomic DNA
atgattacatgtagaaatattgcaaaaggaaaaggaaaaggtgaattaatagtctcatctgaaccaattagttttcttggtggtgttgatcctgaaactggtattgtaattgatcctactcatgaattaaaaggagaatgcattaaagataaagttttatttattcctggtggaaagggttctactgttggttcttatgttattttccaaatgatgaaaaataatactgctccaaatgccataatctgtcttaatgcagaaccaattattgcaacaggagctatcatgtccgatattccaatggttgactcaccagctcaaactaaagacttaacaaatgggactttagttgaagttgatggggataatggaacaattgaaattttataa

SEQ ID NO: 8030 - DNA, 1266 bp, Methanobrevibacter gottschalkii
  source 1..1266: mol_type = genomic DNA
gtgattattatgttaaatgctaatacttatgttacagctcaagaaggtattgggggaacaattagaaaccaatatgaagatttttacgtagaagaaattcctgaaattattcccgatggtgaagggcccaatgtttatgtatggattgaaaaattaggaagaactacattggatgttgttttagatattgctcgtgatttgcatatctcaagaaaaagaatgggctttgcaggaatgaaagataaaaaagctatcactcgtcaatggatttgcattgcaaatatggattctgaagaacagtttaagcaagtcgaagctttagatatttacaaaactgattttttaaaaaccgttcgtggtcgtaaaaaacttagaatgggtcaacttcgaggaaacaaattcagaattctagttaaagatttgaaggatattgaaaaaagtgctgatgttgcaaacgaagttttagatgaacttcagcatactggtgttccaaattactttggttggcaaagattcgggaaaccaagaacaattactcatttagttggggaagcattggttgaaaatgaccttgaaaaagctgttggagtttatattggtaatcctcaagaggatgaatctgagaaaaaccaaaaagcaagacaagcatatgatgatggaaatcttgaagaggcatttaatttaatgggtaaggggatgcgttatgaaaaaatgatgctaaaagaattagtcaaggcatctaaaaaaggagaattaactgataaagattatatgaatgcattgcatgcacttccaaaaccacttcaaagaatgtttgtccatgcttaccaatcttatttatttaatgaagctgtaagtaaaagagtagagatgggaattaacaaatatattgaaggagatattataattgacacagaagaacatattgttcgagataaaactcctgaagaatttcaagaattaattgataatttccaagcaagtccaacttgtcccttgtatggtacaaaggttccttttgcagaagatgctgttggaaaaatggaagaagatattttaacaaattataatattacaaaagccaattttgaagttccaaaaatgccacgcttaggaagtcatggtcttagaagatcaatgagattcaaagtatgggatgcttcagctactgcaactgatgagggggttttatgtgaattctcaattgataaaggctcttatgctactgctgttttaagagaaataatgaaaaaagatgttatttaa

SEQ ID NO: 8031 - DNA, 438 bp, Methanobrevibacter gottschalkii
  source 1..438: mol_type = genomic DNA
atgttagatgaaaaaggatatttttatatcattgatgctattcttgctgtaattcttgtttcaatagtatttttagttgtaaatactgcaatttccattccaagtccagattattcttatgattcatgtgaattcagaactgctcaagatgtcatggaaattctaagcggaaaagtgaattttacagataggacatttattggtgagatatctaaaatcttaaaagataataaaaattcaaaagaatctattaatttagtttcaaaaatttgtaaaaataaatttaaaagtttaaatcttacaaattatagatttactgagaataaaattttaaaagaaaaaatattggactcatcaggtgattattcaaaaagtaatatggtttcagttgctacacgtaattatgatgactattcttatactttatctgtatggtaa

SEQ ID NO: 8032 - DNA, 1365 bp, Methanobrevibacter gottschalkii
  source 1..1365: mol_type = genomic DNA
atggatattgaaggatttgtaagagcaagaattgatgattatgattataatgatttaacagagcttttagctgtaagaatcagggaatataaaaaaatttctgaaaaaaactctgttgaaatggcaaaagcggtaattgatgaagtttcaacaactcttaaattacaagagtgtggtgatgaatttttaaaagaaatagctaatgttaacaaagccgatgttttaatgggtgaaatgggagtaggttctcgcggagctggggatttctttgttcacagaaaaattgcagaaattgtcgcatcaacaaatacagcatcacttataaatccgtccgaacaagatgatggtggtgttgttaaagcaaaagcaaacaatgatgatgtttatattacaactgcagtagatggaattcattcacgtttaagcgaatatccatttttaggtggttttcatgtaaccagagcaacccttagggatgtttgtgtaatgggtgctgatcccgttgcaattttaagtgatgttcatttggcagatgatggtgatgttgctaaaatatttgactttactgctggtgttgctgctgtatctgaacttgttgatgttccaattgtagctggaagtacattgcgtgttggtggagacatggttttgggtgataggtttgtttctgctgttggaagtgttggtgtttcaaatcatcctccaacagcaagaaaaggagcaactgacggtgatgtaattcttttaacagaaggctcaggtggaggaacaataacaacaacagctttatataatggtttctttgatgttgtgtgggatacaatgaatgtaaactttgttcaagcatcccatgcattatttgaagcagatcttgtaaaagacattcatgcaatgactgatgtaacaaatggtggtcttaggggagatgctcatgaaatatctaatacaactggtgttggtttagaattttatgaaaaagaaatcagacaaatggttgctccaaatgtattaaacatgcttgaaacattaaatattgacccattgggagtttcaactgattcactaatgttgattgcacctcctgaaatcgttggagatattaaaaaagtggttggaaaatatgatgtttcaatatctgaaatcggtgaagttaatacttctggagaaccaatattaattaaagaagactcttctgaagaaaaacttgttccgttattcagagaagctgcttataccaaaattaaaaaattagttggtgaaacaactcctgaggactttgaagaaatgaaagaaaaagttcaaagagcttctgatgcagctattgctaaaaaagaaaaagtgatcaatcacattcgtgcaaattaa

SEQ ID NO: 8033 - DNA, 597 bp, Methanobrevibacter gottschalkii
  source 1..597: mol_type = genomic DNA
atgattacgattattgattataaaagtggaaatttaaaaagtatttcaaacggatttaaaaaaataggtgcagaatacaaaattagtgatgataaagaggtaattgctaatagtgattatcttgttttgccaggtgtgggtgcgtttggaagtgcaatggaaaatttaaaaccatttagagatgtaattcatgaacatgtttcagaagataaaccatttttaggaatttgtcttggccaacaggttttaatgagttcaagtgaagaagcagatggtgttaaaggattggacttatttaaaggacatgttgaactgttatcaggggatgttaaaatacctcatatgggctggaataaattaaaaatatgtaataattcacctattttagaaggaatagatggggaatttttctattttgttcattcatatcatgttgtccctgatgatgaaagcattattgcaggagtttgtgaatatggtgggaaaattgtagctagcttaagccaaaataatttattttcaacacaatttcaccctgaaaaaagcggtatagcaggacttaagattttaaagaattttactaatttggagttataa

SEQ ID NO: 8034 - DNA, 1074 bp, Methanobrevibacter gottschalkii
  source 1..1074: mol_type = genomic DNA
atgcatccaagaccaagtccaattgcagcgtctctttatactttaagagacatgaatgttgatgttattgttatgcacgggccaaatggttgttgttttagaactggaaggttattagaaagtgatggagtaagagtcttaacaactgcaatggccgaaaacgattttattttaggagctggtgaaaagttagaagaaactttaaaaaaagcttatgacatgtttaaaccagaattgatgggtgttgtaggtacttgtgcaagtatgattattggtgaagatttaaaagaagctattgctaatgctgatttgccgtgcactgtaatacctgttgagtctcatgggggatctggtgaaggtgacaatactgttggtgctattatggttttagaagcagcagtagaatgtggtgttatacctcaaggtgaagcggatagacaaattgaaatgcttgaaaaagcaactgaagttgaaaaaacccgtggaatggcacaaggaaaatacattaaacctaactttggtgattcaaaggaaaatgttgctaaacttgtagttcgcgctattaaagatggcaaaaaagtagcttttgttcataatgctaaaaaagaaactgcatatctgtttgcagatattattaattttgactataaagatattagaagagataataaacctatcattgtagcaaatcttgatggcagcactggtcttgaaagaattagatgtcatgcaaaaaatatcaaagaagaattgccgatggaaattgattttattacaggggggcttgatgaatatcctatcactgctgatgttgcagctgaatacttaaaaaatatggatttggatttaattgttgtatttggtgttccacatgctttcccaattgaagactttgatgtggagtctgttgcaataacagatgggcctcgtttagttgaacctttaagggatttaggttacaatcatgttgttgctgaattggatgctcattcaaaaactcttggaactgatgaaattgtattttcagactttggcggtatgattagatcagctattggatggttagatgaatga

SEQ ID NO: 8035 - DNA, 402 bp, Methanobrevibacter gottschalkii
  source 1..402: mol_type = genomic DNA
atgatgaaactagataaaaaaattttagaagaaaaaattagagagtatagggattttaaaagttgttccgaatcaacattaatggggctttgtgaagctgcagaatatcctatgagtaaagcagaaatgtgtaaaatagcatgcggatttgcaggaggaataggtggaacatttgatgaagggacatgcggtgctgtaactggtgctttaatagcgaatggattagtattagataatcctgttaaaatcaaagaaaatgcaaaagagatttttaattcttttaaagaaaaatatggaaccgtttgttgtggtaaaataaccaacaatggaaaagataaatccccatgtgtcgactgctgtgtatttattgcaaataaagttgctgatttatgggatgaatag

SEQ ID NO: 8036 - DNA, 486 bp, Methanobrevibacter gottschalkii
  source 1..486: mol_type = genomic DNA
atggatgaaaaacatttgccgctatttggtgtaggtccttatttaatgggattaataattataataacctttttatcaattgcagcctcaatttacaaaattataccagtatataatataaataaactaaatatcttccttattacattgggaataatttcaatcatttttgctatagtattatggttattggcaatacttaattcaaaattaatgaagaatattaaaaataataatctagtaacaactggagtttattcttttgtatctcatccaatatacgcctgttttcttttcatatcaattggattaattttaatttcacaaaatatattattattctttttaccatttctattctgggcttttttaacaattagtctaataaaaacagaagaaaaatggttatttgaaagatatggggatgaatacataaaatattcaaagaaagttaatcgattcattccatttaaaaaaatattttaa

SEQ ID NO: 8037 - DNA, 906 bp, Methanobrevibacter gottschalkii
  source 1..906: mol_type = genomic DNA
atgatagaaacaataataataattgtcatatttttagtttacattgctatgaaatatgttaaaattttaaggccatatgaaaaaggggttgttgaaagacttggaaaatataatagaactgtttcaagtgggatagttgtattaattccatttttagaaaatttagaaagggtggatttaagagaacaggttgtagatgttccgcctcaggaagtaattacaaaagacaatactgtggttgttgttgattgtgtaattttttatgaagttgtagacccatttaatgcaacatataatgtagttaacttttatcaagcaattacaaaacttgcacaaacaaatttaagaaatataattggggatctggaacttgatcaaacattaacttctcgtgaaatgattaatgcagaattacgtgaagtattggatgaagctacagataaatggggtagtaaagtagttcgtgttgaaatacaaaaaattgaacctccgaaggatatagtggaggcaatgagtaaacaaatgaaagctgaaagaatgaaaagagcatcaattcttgaagctgaaggttataaacaatcagaaattaaaaaatctgaaggggataaacaagcagcaattttagaagcagaaggtaaagctgaatctattaaaaaaatggcggaagcaaaaaagcaagctttaattttagaagcagaaggtgaatcaatggcaattgaaaaggtatatgctgcaattcacgaaggaaatcctgatgatggtcttatagctattaaatacttggaatcactggaaaaaatagctgatggaaaagcatctaaaatatttttaccgtttgaatcaagcggtgttttaagttcagttgcaggtatagctgagctgtttaaagaggataaaaaagaataa

SEQ ID NO: 8038 - DNA, 408 bp, Methanobrevibacter gottschalkii
  source 1..408: mol_type = genomic DNA
atggaaatttttatttggataatattggctatcctgttcttcttattggaaatacttacaggtagttttattttagtgtggtttggtataagttcaatagttgcagctgtattaaattattttaaatttgatttctacacacaatttggagcttttatagtaatatcaataattttattggtgtttactaaaaaatttgcaattaaagtcacacctgaaattaataaaaagactactgcagaaaggctgattggaagaaatgctaaagttgttcgaaaaattgatgataagaacattattgtaaaagtatgtggtgaagaatggtccgcttatgcaaaaaataatgttgacattggggacacggttaaagtatgtggaatagaaagtattaaattaatagttgagtaa

SEQ ID NO: 8039 - DNA, 216 bp, Methanobrevibacter gottschalkii
  source 1..216: mol_type = genomic DNA
ttgggtattattattaaatctttaaaatacttcatttatttacaaattgaggcatttaatcatgagtttttcagatggccgaaaagaatggagtactggaaaaaagcattatcaattatcatattcttttgtattggattaatattaatggatatgatagcttgtggagatttaccagataaaaatactgcttcttcatttatgttttatatttag

SEQ ID NO: 8040 - DNA, 315 bp, Methanobrevibacter gottschalkii
  source 1..315: mol_type = genomic DNA
atgaaaaaagtaaaaattactgtcatgagaaaagttaggcatgatgatttaattgaagaatatgaaaaccctttggagcatgaatgtagtgttgaagaaggtcaggttttcattgcaaatggctgggcaagacctgatgatttctgtgatagtgcttgggaaagtctttctccttttgtaatggctttagctaatggtgctagtgatttttatgatgggtggatgaaaaacaaaaaatctgcaatgatttcctgtaatgatggttttaggccagttagttttcttttggaaacactcgatgaagatgcagattaa

SEQ ID NO: 8041 - DNA, 1191 bp, Methanobrevibacter gottschalkii
  source 1..1191: mol_type = genomic DNA
atgcttcaaattgcagtttgtggaaaaccaaatgtggggaaatcctctttttttaattcagcaacagcatctactgtagaaatggcaaattacccatttacaacaattgatgcaaataaagctgttgctcatgtaattaaggattgtccatgtaaggagttggaagttacatgtaatcctcataattcaatttgtattgatggaaaaagattgcttccaattgaattgatagatgttgcaggtttagttcctggagcacatgaaggaaaaggattaggtaacaagtttttagatgatttaatgcaagctaaagtttttattcatgtcattgatgcttcaggttcaactgatattgagggaaatcctgtcgatcctggaagtcatgacccattagaagacattcaatttttagaagaagaaatagtaatgtggatgtacggaattttatcaagaaattgggtaagacttataagaaaagttggtgctgaacatttggatatttcaaaagtattgtttgatcaattgtccggtactggaataactatcgaggacattattgaagctaaaaggaatattgaaccagattataataaatgggaagaaaaggatttaatagaattaacaagaaatatcttaaggattgccaaaccaatgatgattattgcaaataaagcagatcttccaacttctgcagctaatattgaaagaattaaagaaaaatatccatatgtaattccaacttcagcggaatctgaaattgcacttgtaagagcagcagaagcaggtttaatttcatatatttcaggggatgatcattttgagattttacaagctgataagttaaatccaaatcaacttaaagcattggaatatattcaaactaatattttagacaaatatggcagtactggtgttcagaaggctttaaattatggaattttcgaattactggataggattgttgtctacccggttcaggatgaacacaaatatacagatcaaaaaggtaatgttttaccagatggatttttagttccaaatggtgcaactcctcgtgaattggcctacattgtacacacggatattggtgataaattcatgcatgctgttgatgcaagaagaaacatgcgtgtagctagcgattatgagttaaaggatggggacattattagtattgtaacaagaggttaa

SEQ ID NO: 8042 - DNA, 870 bp, Methanobrevibacter gottschalkii
  source 1..870: mol_type = genomic DNA
atgaaaaactatgatactgatcgtcctccagcaatgaagattcgacagggaattcaagatgcaatgacttattcacttccagacaagaagtttgaacccagtgaaattgatttggttgaagtagatattaaattaaataatcttggatggaactttcataattttaagatattaaatctaacagacattcatttaggtcaatggattaatccggaatacttagatgaacttatagattatgtcaatattttaaatgtcgatttaattaccttaactggagattatttttcatacataacagaaggttatgaaaaatccctaactgactcttttaaaaaattaaaatcaagatatggaaaatttggagttttaggaaatcatgatcactggatggatgcatcaaaaattagagacatatttaaatcatcaaagatcatagatttaagcaataaagtttatactcttgaaaaagaaggtgaatttttaaatatttgtggtgttgacagctgcactgtttgtgcagataatttagatgaagttttagttaaaattagagaagatactccaagtattttacttgcccatgagccagattttgcagaagaatcatctaaaacaaacaaatttgatttgcaaatttcaggacattcacatggcggacaattcataatcccaaaattcgaaacaacaccatttagaggtccgaactcaaaaaaataccccgttggcctttataaagttagaaatatgatacagtatacaagtaaaggacttggaacaaattcattcagaatgcgaattaattgtaaacctgaaattacaataattacccttaaaacaaatagaaaacaaaaaatcgatgtaaaatga

SEQ ID NO: 8043 - DNA, 2121 bp, Methanobrevibacter gottschalkii
  source 1..2121: mol_type = genomic DNA
atgaatactcataatatcataacttcaacaaaaaatataattaatttaattttacttgttttacttaatatactagttataatattaatgtcagatttatatggagatttttccataggaccgtggtataatgcatttttcatagtcctttcaataaccatagccaatacattactatggccaatttttaaaagattttttatgaagttcatgatacaaactttaggcattggtacaatatttattaatgcattaatcttttatattgcttgttactttattccgaatgttgatgttggtttttatgcatctattaaagttccgtttttcatgtcaattgccacaacagttgttacaaacatgacaaacactaattattacaatagacatcttaaaaatattgtaaaatacgcccttaataaaaaaatagattcaaaaagctatccgggaattataatgcttgaaattgatggattatcaataaatattctaaaaaaagcaattgacaataatataatgccaacaattaaagaatggattgattcaagtactcataatctaaaagaatgggaaacagatttatcttctcaaaccggagcaagccaggcgggaatattgcatggaaataatgaaaatattgtagcttatagatgggttgaaaaagaaaatgacaataagataattgtttctggaaaattaagccatgctccactaatagaaaaaagaataagtaatggggaaggattgcttgttgatggaataagcgttagcaatatgttttcaggagatagtaaaagtgcaccattaacttcttcaaaattagggacactaactagaattaaccataaaacattaaatacagtatttttagacacttacaactaccaaagaatatttacattatttttatgggacattttagttgaattaaaatcacaaattaaacatttaataaaaaatatccaaccaagacttagaagaacagttgtttatgctgctgtgagagctggtgctaatgtagtgcttagagaagttacaacagatattctgacaagtgaaatattaaaaggagaaattgatactgcatatgcaacatttatggggtatgatgaagtagcccatcactctggaacacaagatgaagatgtgtggccagtattaaaacaaattgatactcaaattcaaaggttaacaaatgcaattgatatgagcaacaggggctacaaacttgttattttatcagaccatggccaaagtaatggggcaacatttaaacaaaaatatggaataacactcggaaattatgttagaagatttcttccagatgatttaaaagtttatagaaatgaatttaatattgatcactttagagatgcagttttttctgaaaatataaaattaaaaattgtcaaagaaaaaataggtgattttcgtgacgatatatttgatgaaaatacatattttcaaaatattagagatgaacttgaaaataaaaaacctgcaattatttttgataatgaacaataccaaaatttaagaaaaaaatattcaaatagtttagaatacattaaaggccatgaaagtattgaacagagcactaaaaaagcaaaagattctgaattgattgttttaggttctggaaacctaggattaatatatttaacagaatggaaacaacgcttaacctatgaagaaatagttatgttatttcctgaattgatacccggccttgtaaaacatccaggaattggattcattttagttcattcaataaccaatggaggcatggtgattggagaagatggaatatactatttagatacagataaaataattggtgaaaaccccttaattaattatggaaaaaatgctgcaagacatttaaaacgacaaaacacatttaacaatatgcccgacataatggtcaatggtttttatgatgaaaaatatgatgaagtaaatgcatttgaagagttaattggaagtcatggaggtcttggaggagatcaaacaaaacctttcattttatatccttctgaatgggaagatcctggtaaattaattggagcttcctcaatttacgaattcttaaaaaaagaaattaatgaattaaaatcttga

SEQ ID NO: 8044 - DNA, 852 bp, Methanobrevibacter gottschalkii
  source 1..852: mol_type = genomic DNA
atggataatttcaaacaaagattaaataaatccaaagaagctattgataatgcagattatattattattggtgcaggagctggattttcagcagctgctggaatattatattctggaaaaagatttgaagataatttcaaggatttcattgaaaaatatgatatgaaggacatgtattcagcagggttttatccatttaaaactcaagaggaaaaatgggcttattggtgtcgtcatgtttatgtaaatagatattctgttggaaaaacagagttatataaaaaattatttaatttagttaaagataaagactattttgtattaacaacaaatgttgaacatcaattttggattaatgactttgaggataaaagaatattcgcaactcaaggggattatggttcaatgcaatgtgaaaaaggatgccatgataaattatattcaaacgaggattttgtttatgaatctttaggaaaaatagaaggttgcagaattccgtctaatctggttcctaagtgtccggtttgtggagggaatatggatcttaacctaagaaaagaccaattcttcattgaagataaaaaatggcatgaaatggccagtaattatcagaattttttatccagaattgatgaagataaaaacattgtacttttagaattgggagttggatttaacactccaacaattattagatatccatttgaacaaatgacatataataataaaaatatgactctaattagattaaatagggattatccagatgcaattgatcaaaataaagatagaacaataagttttgatgaagagatttatgaaatatttgattattggctttcaagattttaa

SEQ ID NO: 8045 - DNA, 642 bp, Methanobrevibacter gottschalkii
  source 1..642: mol_type = genomic DNA
atgcaaactggaaaaatttttattattgggattggtcctggtgcttccgaatatttaactaaaaaagcaattgatactgtaaaaacaagtgattataccattggaagtacaagagcaattgagttatttgatgatgttcaaaataaaattgcatttaatgtaaaagaacttttagagaaattaaatgaaggtgttcaacttgcatgtaatggaaataccgtatcaatattatcaacaggagatcctggtttttcaggtgttttaaatacagttttaagaatttcaaaagaaaaagaattcccaaatgaaaatattgaagttattccaggaattagttccctgcagcttgcagctgcaaaatgccatatccaatgggacaatgctaatgtaatgacatttcacggtagagaaaatatagaggacatcttacctgtcattaacaatggaaagacaacaatagcccttccttcaagaaaagtaaaagatatggcccagtttttacttgaccatggtgttgaagaaaataggaaagttgtggtatgtgagagattaagttatcctgatgaaaacattgttgaggctacattaaaagatattgcacaaagtgaatttacctatatgtgtattatgattatttattaa

SEQ ID NO: 8046 - DNA, 2811 bp, Methanobrevibacter gottschalkii
  source 1..2811: mol_type = genomic DNA
atgaatgcgaaactaaacaccacatgtttcattttattatttatttttttaattaccgcagtatcagcggcggataataaaaatgaaacattattaactcaaaaagaaacagattcaagtcaaaaattatgtaagtcaagtgttagtaaggaaacttctaaaaaagaaaaagtcactcttaaagcacctaatttaaaaatgtattataaggatggaagtaaattcaaagcaacagtgaaaaataaaaataaaaaagcaataacaaaagcaaaagtggattttactgttaatggcaaagtttataacaaaaaaactgacagtaaaggtgatgcttaccttacaattagcagtttaaaaagtggaaattatccaattaaaataagatttgctggaacaactaaatacactgcaatatcaaaaaagagcacaattacagttaaaagtacaataaaaagtaatgattttaagaaatactataaaaatacatcgccctacacttctaaattttataatcaaaaaggaaatatattaaaaaataaagccgttaaattcaagttaaataagaaacattacactgttaaaacagacaaaaagggtgttggaaaattaccgattaatttaaaacctggaacatacgccatatccattataaatccaaagacatctgaaactgtaaataaaaaaataactataaaaagtttaattaaaactaaagatttaagcattaatgggcaaaatgatggtaaatttaatgtaaaagtatttaataataaaggcgaagtttatccaaatcaaaaagttacatttaagattaacggaaaaacatattcaaaaaaaactaataaaaatggcattgcaacattagacatcaatttagatgttgggaaacactcaataacaaccgaatatatgggtcttaaaaatactaataaaatcaacataaataaaatagtgaaatcaaccaattatatccatacaacattaattccaaattatgttaatgttacagcaaaatatgtggttaataactctgtttactgtcttaaatctggaatcaacggcatcataaaaatgccaaaaaatgaaatatttaaaattcaagttgggggaaaaatttacacatttacaacaacttcaattaacggaataaattccataactcttagatacaataataattatctagtgccctttgatgggagtggagtaaaaagttatacaaaccgaaacaagttaacctcagatggaataattattagcaaagtaaatgattacacacaaattgactatcagagtaaaacaaaagataatacagctttatttggattttatgcaagtaaaggattagataaaagtgaaacattaacatatgtggaaaatgataaaataactgcaaaaattaacttcaacacattgagttttgatgaattcagcttacgatacagtttatctgcattgcatggaaaaacaatttataatttcaattatggaaattacaatgacacaattagatttgcaaacaccaacactcccgtaacatttagttattttggaaattcaatagtaggatatgcctcacaagaaaccattataactaaatttaaagttgatgaaattaaagaagtagaaaaagaagagaatataagttacggccttaataaaaaatatagaactgcaatgggatttgaagttctgcaatcatatactctgattaatgaaaaaataaatcaaaaaactttagagaattgggttttaaaaaatccggactatttaagtagatttggagtaatgaatatttatggaatgcatttagcatctcttgaagtagcttggattgcagatataatagcagataagagctccaaagaattaaatgtgaattggaaaagaaacaataccctaacaatattaggtggaataaacttagaagacacttatttaaatatactaaatgcagacatgggtatgaaagtaacaggcaaatttgacaatgcattcctattcaaattattaaattcaatgaatttaccaaatattgaggaatatgcattattgaaagttgcatatagatacttggataaaagttcaaactcattagataatgtatttttatccattctaaaaaacaactttagtattgcacaattagatgacatgatttacatattttcagaagcaaattcaaaatctgcaattatattaaatacaagcagcggagtttcaagtgtagttctagctcaaaactccgtttataaaggatcatcacttaaaaccacacatgactgttgcggtgttggaattataccaaaagacataataaaaggaattaaagaaacatttaacattattaataatggattatcaaacatataccccaataagacacatccaattagtaaattattttatatggctgcaaatttacttgccaaaccattaaatggggttggatcattaggtatgaatttaattacaacaatggcacttatacaaagtggaggaacaacatatagaaacgaaatggttgaaaaaagtgattggcatgaagttatggataaaattacttttacaagaccaggatatttacaatcaaaaaaaatttacaatattccgaatgaaaaaggaggatgtgattttattgaagtaaaaatcagagatgatatgacattagatcgcaataatgcaatctatataagtgatgggaaaacaagaaaattaagtaaaacagagacttacaaatatttcattgatgactactggacaccatttagtatgcctcaaaaatattgggataaaagttggaacaggtga

SEQ ID NO: 8047 - DNA, 330 bp, Methanobrevibacter gottschalkii
  source 1..330: mol_type = genomic DNA
gtgataaaaattaaaaaagaaagtaaatttacagtatcaataattataatattatgtgcattaatagctataacccttgtttatccaaaatatagtgctatatgggatgtggcatttctcattagtattttttacacaagtacacaaacaattcttgacacaagtaaaaaatctaaaagaaaattaaatattaacattgtgattataataatattcgcaacaataattgcattttatgaaatgtctattggaaatccattaattttttcaacggcattattaatacttgcaaatttgcttgatagcactttgaataaaaaaagtaattga

SEQ ID NO: 8048 - DNA, 1011 bp, Methanobrevibacter gottschalkii
  source 1..1011: mol_type = genomic DNA
ttgtcatttaaagattattttaaatttgataaagacaaaaccacatttatttttgttggtggtaaaggtggagtcggaaaaacttctgtttcttctgctactgcattatggttagctgaacaaggtaaaaaaacattgattgtatcaactgaccctgctcattcgttagcggactcattggaagtaccaattggaagttatcctcgtgaaattaaaactaatttgtttgctgttgaaattgatccggatgtagcaatggctcaaaaacaagcacaattggaagcccaaaaagcagcaaatcctgatgatggtgggttattgggtatggactttttgtctgaccaattggatatggcatctgcatcacccggcgctgatgaagcggctgcatttgaaatgtttatgggtgtaatgaattctgatgaatttgacgttgttgtatttgatactgcaccaacaggacacactttaagattattatctttccctgaagtaatggattcttgggtaggtaaaatgatgatgcttaaagcaaaattgggtggagtaactaactcattaaagaaaattatgccatttatggatgctgttgatgatcctcaaacttctgaagatttaaaaagaaccaaagaacaaattgacatggcaaaagaagttttatctgatcctgatagaaccactttcaaaatggttgtaattccagaggaaatgtctatttatgaatctgaaagggctttagaagctcttggtaaatatgatattactgttgatagtgttattgtaaatcaagtaatgcctgatatttgtgactgtgatttctgtcattctagacataaattacagcaaaaacgtttggctttaattgaccaaaaattcccaaatcaacacattgctgaagtgccattattcaaagatgaagttaaaggtcaggataaattgttaaagttagctcatattttatatgatgatgaagacaacgatgaagttgtccaggatgctattcagctttaa

SEQ ID NO: 8049 - DNA, 810 bp, Methanobrevibacter gottschalkii
  source 1..810: mol_type = genomic DNA
atgataaaggttggtgagaacattagtgaaattccaaaactaaactgtgaaaaaacaaaatgcaacattgttgacttcattaaatcaaaagtatctgaatctaaatctaaaggtattgtaattggtttgagtggaggaattgattcaacacttgcagcatatcttgcatgcgaagctgttggaaaagaaaatgtatttggagtaagtatgccatccactaccacaccaactgaagataaaattcatgctattgaaatagctcaagaattaggaattaaatataaagaaatagctattgacagtgttttaaatgaatatttatctgtaactcaattagacaattataatttagccataggtaatttaaaagctagaattagaatgtctatcatttattattatgctaaccataacaactacatcgtttgtggaactggtaatagaagcgaaatattaattggatactttacaaaacatggggatggtgcatgtgatattgaaccgattggaaacctgtataaaaccgatgtatttaaattaagtgaatttttaaatattccaaaggaaatcatcgaaaaacctccacgtgcaggattatgggataatcaaactgacgaggacgaaattggaatgagttatgatttacttgatcagattctttatttatctactgaaaaatatatgaaaaataatgaaatagctaatagattaaatatttcagcagaggaagttgacatgattattaataaaataatcaggagcaaacacaaaagtaaagttcctgaaagccctgcaaaaacaatattataa

SEQ ID NO: 8050 - DNA, 2856 bp, Methanobrevibacter gottschalkii
  source 1..2856: mol_type = genomic DNA
gtgagcgaaaatattgaaaagaaatggcagaaaaaatgggcagatgcaaaattatttgaatcaaacccagatgaacgagaaaaattataccttactgttgcttttccataccctagtggagcgatgcatataggtcacggacgtacttacacagtgcccgatgtttatgcaagattcaaaagaatggaaggatataatgtattatttccaatggcatggcatgtgactggtgcaccagttatcggaatagcggacagaattaaaagaaaagacaaatggacacttgatttataccacaatgttcatggagttcctaaagaaactttaccaaaattagaagaccctgaatacattgtaaaatacttttcaactgaataccatgaagtaatggaagaaatgggttattctattgattggagaagagaatttagaacaattgatccaacatacaggaaattcatcgaatggcaaattacccaattacacgaaaaaggtctagttgcaaaaggcgaacatccagtgaaatactgtcctaactgtgacaacccagttggagaccatgatttgcttgaaggagaaggagttggagttaatgaattaacattgcttaaattccctataggagataaaattcttgtaactgcaactttaagacctgaaactattgttggagcaaccaatatttggttaaacccggatgttgaatatgtcttagtcaatgctaacggtgaacgctgggtcattacaaaagaagctcactacaacttaaaaaatcaaattaaaaacttagatataatatctgaaattaatcctaacgatttaattggacaaatggctaaaaatccgtttactggggaagaattaccagttttcccagcaagttttgtaagtgaatcctacggaagtggagttgttttctctgaacctgcagatgcaccagcagattacattgcacttcaagacttaaaaaacaatgccgaattaatatctaagtacaatttagaaggcattattgaaaatgttcatccaattccagtatgtacgcttaaaggatatggagaaattccagcagcagacatcattgaaagacttggaattactgaccaaaacgatgaaaaattacatgaagccactaatgaattatacaaagcccagcacagcaaaggtaaaattattgattccatccctgatttcggtggtatgaaagttcgttttgctcgtgaagagttaaaagaaaaattaatcaatgacaacatggctacaatcatgtacgactttgctgaaagaccagtagtctgcagatgcggcaacaattgtgttgttaagattatggacgaccaatggttcatgaaatatggtaatgaagaatggactgaaaaaaccttagaagttcttgatggagaaaccataatcccaaaagaaattaaaaataattttgaatattatctcaactggttagatgattgggcttgttcaagaaaagtaggacttggaaccagacttccttgggacaatcagtggttaattgaacctttaaccgattcaacaatctacatgtcatattatactattgcaaaatacctaaaagacatgaaccctgatgatttaaaccttgctttctttgacaaagttcttttaaacaaagactccggggaaattacagtgccggcggaaaaagttaaagaaattcaagacgaattcaactactggtatcctcttgactggagattatccgcaaaagaccttgttggtaaccacttaagcttcttaatgttccaccacagtgcaatttatcctaaagataaatggccaagaggaactgtagtcttcggtatgggtcttctagaaggaaataaaatgtcttcatcaaaaggaaatgttatattacttaaagatgcaatcaaagactactccgctgatgttgtaaggctcttcctgatggcatctgctgaaccatggcaagattttgactggagagaaaaggaagttctcggaactaaaagaagacttgaatggtttagagaatttgcagcaagagttgaagaaatcaaaggttccccattagatttaagtaacattgaagaagttgaattaaaaagaactattgatttatggataatcagtcagcttaatcagcatattaaaaatgcaactgaagctttagaagtcttccaaacaagacaagcactgcaagattctttattcttacttaaaaaagatgtagatcattacttatacagagtaaaacacataattgatgcacaagattctgcagtaatctatgttttatccactgttcttgaagcatggattagactccttgctccattcactcctcacacttcagaagaattatggtcaacctatggcggagctggatttgcaagtgaagcagcatggccagaatacaatgaagagcttgtaagtgctgaaattgaaaaatcagaagatttagtggaaaacatcattaaagatattgcccacatcaaacagatggttggagaagatgttgaaaaagtccacatttatcttgcacctgactggaaatgggacttatacaaaatagctgacgaagtgggaaaaccagacatcggacagattatgggaagagccattggatctaaaattcatgatgataaaaaagaaattgcaatggtagctaaaaaaatcggtaaagagataactaaaacaagatatatcggcaaaatcaacgaagcagaaatcttatctgatgctcttgactacatcaaagaagaatgtggaaatgaagttatcatccatactgatgactcatacgatccacaaaataaggctaaaaatgcaatgccatataaacctgcaatatttatggaataa

SEQ ID NO: 8051 - DNA, 732 bp, Methanobrevibacter gottschalkii
  source 1..732: mol_type = genomic DNA
atgaaaatgattttagatgaacgtggtaagaagtatgttttaaaatctggagaagatttccaaagtgatttgggaattgtatctgctgatgtattaaatgatgcagatattggtgaagaggttaaaagtcacttaaaccacacatttaaaattataaaaccgaatatcaatgatttcattgatattatggatagaagatgttcaattctccttaaaaaagatattggattggtattggctcatactggtttgggatcaggctcacgtgtagtcgatgctggaacaggtgcaggagctattgcactaaacttcggaaatgttgttggatctgaaggtgatgtctttacctatgaaattagggaggactttgctgaagttgcccggaaaaacattgaaaaatttggaattactaatgttcatgttaaaaataagaatattaaagatgggattgatgaagataaaattgatttggtctttttagatttgccaaaacctttcgaggtatttgaagaagtaatggaatgtttgaatgttggcgggtggttaacagtttatgccccttacattgatcaagcagaaatttcttatcgcattgcaaaaaaattaggattttatgatattgagatttttgaaattttagaacgtggtcttgaagttaggcctcagggtgtcagaccaaaaacacgaatggttggtcacagcggatatatggtatttgcacgaaaattatag

SEQ ID NO: 8052 - DNA, 957 bp, Methanobrevibacter gottschalkii
  source 1..957: mol_type = genomic DNA
atgaaaaatacatggaaacttaagttaagaatgattcttacatcagttgtaatgtttactattgtatatttccttatcatgcttgtagggttgtaccttggtgtgagcagctggaaattatactttggagcaagcttagtaatcgtatttttacaatattggtttggaccatcattggtaaaacgttcaatgaatgtaaggcccttatcagaagctgaagcacctcatattcatcagatggttcaggaattagcagacgcagctggaattccaaaaccagaaattggtttatctgaaattaatattccaaatgcatttgcatatggcagatcaagcagaagtggacacattgcaattacccgtccaattttgggattacttgaccgtgatgaactgaaagccgttattggtcatgaaatggggcatattaaacataatgatatgattgttactgctgctgttagtgttattccaatgatttgttattatattgcattatctttcatgttttcaggagataatgacaatggtggcggaattataatcggaattcttggatatgtgttctatttgattggtcaattgctggtgctctttatttcaagaactcgtgaatactatgctgatgaagcaagtgttgattttggaaaccgtcctgcagcattggtgtctgcactttataaattatcttatggtgcagctagttgtgataagcagacaatttctgaagtaaatacaaacagggcattctttataaatgatgtaaacaatgcaaggcatgatgtttctgatttccaacaaattgactttgatggtgatggaaaaatatctaatgatgagttaagaagacttgcaaattccgatgttaaagtttcaaggaaaaatgggctcatggaattattatccacccatcctgattcattaaaaagagttaaaagattagcggagttagaataa

SEQ ID NO: 8053 - DNA, 948 bp, Methanobrevibacter gottschalkii
  source 1..948: mol_type = genomic DNA
atgagcggaccatgggtagaaaaatatagaccacaaaaattagaagacattgtaggacaaaaacagattgttgcaagattacaaaaatatgtaggcgaagaaagtatgcctaacttaatgtttacaggtcctgcaggtgttggtaaaacaaccacagccttagcattagtaaaatccattttaggagaatactggagacaaaactttttagaattaaatgcatctgatgcaagaggaattgaaactgtaagaaataatattaaaaatttctgtagattgaaacctgttggtgctccatttagaataatatttttagatgaagtggacaacatgacaaaagatgctcagcatgcccttcgtcgtgaaatggaaatgtatactaaaaccgcttcatttatactttcatgtaattactcatcaaaaatcattgatccgattcaatcaagatgtgcaatattcagatttgctccaattaaaggagaagaaattaaagaacgtttaaaatatatttgtgaaagtgaaggattccaagctgatgatgaaggtcttgaatcaattgtttattttgctgaaggagatatgagaaaagcagtaaatgtccttcaagccgcaacatccgaaggagaaacagtcacagaagattcagtttacgaagttgtttcaaaagctaaaccacaagacattgaaaatatgataaataaagcattaatgggtgactttatgggtgctcgcacacttcttagagaaactatagtacttcagggaacaagcggagaagatatggttactcaaatttaccaagatgtttctaaaagagttcttgaaggaaaaatggatgcgtcaatctacatggatttaattgaatctatcgctgaatgtgatttcagaataagggaaggagcaaatccaagaattcaactcgaagctttgttaacccaattcttataa

SEQ ID NO: 8054 - DNA, 1446 bp, Methanobrevibacter gottschalkii
  source 1..1446: mol_type = genomic DNA
atgttatggactgataaataccgaccacaagaattaagtgcagtggtaggtaataaaaaagagattaaaataattacagattgggttaatgcatggaaatcaaataacccccaaataccactacttttagttggtccgccaggcattggaaaaacaaccctatctcaaattatagcaaaacaattctcagaacatattgagcttaacgctagtgataaacgttcacaagagattatcaaaagtacaattggagagtcatcatcttccagatccctttttggagacgaatacaaattaataatccttgatgaagtagacggcattcacggaactaacgaccgtggaggagttaaagctattggagatataattaaaagttcaaaacatccaatgattttaatagctaacgatttttactcaaaaagattgcaatctataaaaccaaaatgccaagtaattaagatgaaaaagtcaagatggaattccatcacaaaacttttaagagaaattgctcaagcagaaaacgtggatgcaaatcctgcagcattaaaagagattgccttaaaatcacaaggagatgtaagatcagcaatcaacacattgcaagcattatccagtaaagattctacacttgaagtccaagatgtagaaaacatgaaaaccaaggatacccgttcagacatatttaatgcaattacaggtgttttaaaaagtaaaacaccagcacacgttaaagaagcgatgtggattgaagaagatccaacacttgtcatggaatatattgctgaaaacattccaagagaatacaagaaaaaagatgaaatcaaaaaagcttatgactacatttcaaaagcagacattttctttggaagaacacaacgcagcagaaattacggctattggaaatatgcaagcgactttatgggaattggagtaagtaactccaaacatgaaacatataaaaaattcacaaaaatacaaactccaaccatattcacattaatgagccgtaataggggcaaaagaaatcttagagatgaaattgctgaaaaaatgtctgtaaaattacacgtttcacattcaatagctatttcaatgttcccatatcttgagataatgtttaaaaacgatgaacttgcttgggagatttctgattatttggaacttgaagataatgaaatcaaaagatttagatctaaaaaaattcctaagaaagttattaataaaatggaaaaacagaaagctcaaatgagagttgaagaacgtgacaggcgtgctgaagaacttaaaaaccaaatgataacagctgcagttgaaattgaagattcatatgaaatttcaaaacctgatgaaactaaagctgaagatacagttaaaaaagaacccccaaaagagaaaaaggaaaaaaagaaaactgacaaacaggtttcattgttcagtttctaa

SEQ ID NO: 8055 - DNA, 690 bp, Methanobrevibacter gottschalkii
  source 1..690: mol_type = genomic DNA
atggatttaatgtttgatgtttcaggattggcaggtgaaaaagaagagttttcaacttcaaaaaaagatgtgttgaaatttctgaaaataattggagtagacagtcgttttgtatcttacacaccagataaaatttacattaataatttaagattttcaaagttttcaagaaaaagacaagctacctttaataagcaatatcctgaaattgaagttgtaagaagctcattattccaaaagatatgttctaagtcatcaaaacacttggctttggaaattaaaccaaattcacttgtcttaatgcctaaagataatttcatagttgagctaatcatggagccttatacacgtaagtacggtgctaggctagtttatgagggggattatgatttgatggttaatccattgattttagatgatcaagtaaatgatatatttgaaggtattttcaatggggaaggtttaaattttaatattaattctaatgagatttatccgttaattaatgtacctttaaactggattaattcctttttagaaatggatggtcaaaaatcaattgaaaataaaaataaaaacaggttagctgcctcattcagtgaatttttggaagatgtagctccgcaatataaagaaaatgttgttaaagcagctaaatatattgaaaaaaaattagaaactgaacaatga

SEQ ID NO: 8056 - DNA, 852 bp, Methanobrevibacter gottschalkii
  source 1..852: mol_type = genomic DNA
atgaaaattaaaggtagtacaaatattgtaggattaattggccatcctgttgaacacagtttctctccacctatgcacaatgctgcatttgataaattaaatatggattatgcatatgttgcttttgatgttgattctaataatctaaaatcagcaattgatggtgctaaatcattaaatattaaagggtttaatgttacaattcctcataaaattggaataatgcaatttttagatgaaattgatgaggttgctagtttaataggtgcagttaatacaattgactttaaaaatttaaaaggatataatactgatggaatcggtgctgtaagggcaattgaagaagttactaatattaaaaataaaaatgttgtagttgctggtgcaggcggtgcatcaagagccatttcattttatcttgctaggtatggtgcagacactataactctactaaataggaatgttgacagggcaatgaatcttgcagaagatattttggattccggattaattactgaaattaaatcagattccatctctgaaatcaacagctatttgtctgatgcagatattctagttgatacaacgcctaggggaatgcaccctcacacagatgatgagcctattgctcgagcggaaaatatgcaagaagatttagttgtatttgatgcagtttataatcctaatgaaactgttttaataaaagaagcaattaaagcaggtgcaaaaccagtttatggaattaaaatgttactttatcagggagcagaaagctttaaaatatggactggaagaaaagcaccaattgatgtaatggaaaaggctttaggggaaacacttaatttagagtga

SEQ ID NO: 8057 - DNA, 1296 bp, Methanobrevibacter gottschalkii
  source 1..1296: mol_type = genomic DNA
atggaatttacaagaccgagaggtacaagagattttttatttgaagaaatgagagaaagaaaacaagcagaaagtaccttaagaacagtatttgaaagttacggttatcaagagattcaaacaccattatttgaagaattgaaattattcacaaccaaatctggagaagaaattgtaaatcaattatacaattttaaagataaatctgatagagaattgactttaagacctgaaataacagcaccagttgctagattatatttgaatgaacttgaaaaaacatcgactaaaccaattaaactctattattatggaagctgttttagatatgaaagacctcagaaaggaagattcaggcaattttggcaatttggttgtgaattaataggtgctaaaacacctcaaggtgaagcagaagttattgcactttgttgtgatgcaattaaatcccttggaattacaacagctgatgtcaatcttaaccaccttggaattataagaggattattcaaacattttgacatttcagttgaaactcaaagggaaattatggtagttattgataagggagataaagatttgcttattgaatcattaagtggagacgaacctgtaatcaataatgaagaattaaaccagattttattaaaactgattgatcttgtaggagataaatcaattattcctgaagttgaagaattaatatccccttatgaagaatcgaaagcagcattagaagaatttaaagaattaatttcacttttagatgcttttaaagttgaaaattatacattaaatctaggtgttgcaagaggtcttgattattataccggaatcgtgtttgagatttatgttccagaacttggtgcccaaaaacaaatatgcggtggaggatcatacagcctcgttaaactttttggaggccaggaagtagaatccactggttttgctctaggttttgacagattaatgaatgcaattgaggaacttgcagataaagaggaattgccttcccacttagatgtttatgtagctcctatttctaacgatgttagactaaaagcatttgaaataacccaaattttaagaaaaaatggatttaaggcagatgtcgatttaaacggtaaaaaattcaagaaattaatgaattacgctgataaaatcaaagttgaaaaaatgattattatcggtgctaatgaccttaaatcagataaagtcactattaaaaatatgattaatggcgaacaagaattagttggtattaataatattgtagattatcttaaagaggaatag

SEQ ID NO: 8058 - DNA, 408 bp, Methanobrevibacter gottschalkii
  source 1..408: mol_type = genomic DNA
atgaaagtcaacttcaggcatgaaattaacggagttaaagtaattactgctattgcacaagacgcaaaaacaaatcaaatattaatgcttgcaaatatgaacaaagaagcactaatcaaaactattaaaacaggcaaagctcattattggagtacttcaagaaacaaattatggcttaaaggtgaaagttcaggccacatccaagaagttgaagaaatccttgttgattgtgatatggatgcaattatactaaaaatcaaccaaacaggcgctgcttgccatgaaggatatctttcatgtttttatagaaaaataaacacaaaaaatgaagttgatattgacgatttaaaagatgaagatttagaagttattttagaaagacttgtaaacccagaagacgtgtattaa

SEQ ID NO: 8059 - DNA, 1845 bp, Methanobrevibacter gottschalkii
  source 1..1845: mol_type = genomic DNA
atgaaatgtataataccagacacaagtgctgttattataggtgcaataactgaattaattgaaaaggagaatattgattatcctgaaattattgtacctgaagcagttgtttgtgaacttgaacaccaagccaatgctaacagatcagaaggtcaaaaaggattaaaagaattgcaaaaattacaagaactccaatacgatggagagctatccattagctttaaaggaagaagaccaaccaatcatgatatcaaatatgctaaaagtggtgaaattgatagcataataagagatttagcaagaagcgaaatgggaactcttcttacaaatgacaaagtacaggctgaaactgctaaagctcaaggaattcctgtttattattttgaacaggaatacaaagaaactccactttcaattgaaaaattttttgatgatgagaccatgtccattcatttaaaagaaaatgttgttccaatggctaaaaaaggaactccaggacatgttgattttaaaatattaaacgaaaaacgttatacttacaaagaactcaaaaaaattgttgatgaaattcttgataaagcaaaaagtgatcctaagacttatcttgaaagtgaaaaagagggttcttttgttgttcaatcaagagaatataggatttcaatagcttatcctccattttcagaggctttagaaattacagccgtaagacctgttgttagtataagtttaaatgaatacaacctatctgaaaaattattagataggattagaactagcgctgaaggaatattaatctctggttcacccggagcaggaaaatctacatttgtacaggctattgcaaaatattattcttcaaaattaaataaagttgtaaaaacaatggaatctccaagagatttgcaacttccagatgaaattacgcaatacagcccattagaagggagtatggaaaatactgcagatgttttattacttgtaagaccggattatactatttatgacgaacttagaaaaaatagtgactttaatatctttgcagatatgagattggccggcgttggaatgattggagtagtgcatgcaactcggccaatagatgcaatccaaagaatagcttcaagagttgaacttggagtaatcccctccattgttgatacaagtatttatattgaagacgggaaagttactcatgtttatgaaacaaaaatgactgtaaaagttcccaccggaatgaaagaagcagatcttgcaagacccgtaattgaagtaagagactttgaaactggtgagcttaaaaatgaaatctacacttatggtgagcagaccatagtcatggacatggatttagtcaatggttctcaaaatagtgaaagacaaaaaactgcagttgaaaaaattgcagaaaaagaaatcttaagaaaaattagaaaaattcttccgaaaaaagctaaagttgatgtggaagttacctctcctgagcgagcaaacatttacattccagaagattttattccaaaaatcattggaaaaaacggtaaaagaattgctgagattgaagaaagtattggaataagtcttggagttgaagtaatcgaatcaaaaccaataaataaacatccaattgaagttgatattatccacacaaaaaaacaattaattttagatttaggtcgtgacaaaggaaggaagaattttgatgtatttatagacggggaatatttacttacagctacaacttctaaaaaaggagaaataaaaattaaaagaggaatagaattatctgatttcattattgaagctattgaaatgggattagaaattactgcaattcaaaaaatgtga

SEQ ID NO: 8060 - DNA, 750 bp, Methanobrevibacter gottschalkii
  source 1..750: mol_type = genomic DNA
atgaaaattggagcatcaacacttgcaggaatagaatataaattagaaaatactttagaatttattgaagatttaggactgaattatgctgaattagtgcaccaatttcctaatgaaagtattgatgttgaattattagaaaattttaatctaaaatattcaattcacacaccttttatggatgttaatattgcaagtttacaaaatcagagcagaataaatgcaatcaatcaaattaaatcctcatttaaactcgcaaataaaattgactgcgaatcggttgtcatacatcctggaactattccctttttagcaaacaaatactttagaagcaaagttattgatgttgctaataaatcgatgatcgaacttggaggatatggagaagatttaggagtacaaactacttttgaaaatatgccccagtttgacaatatgatttacagcaatatcgaaaaattacatgaatttctaacagacaacaacctctcaatgactttagacattggtcatgctaaacatgcaggatattcgtcagaggaaatgtattttgattccattaaacacatacacatccatgataattttggtgatgatgacacacaccttgcattaggtgaggggtcaattgatttaaaccatatagtaaacactttagagaaaaataattacgatggcatctacatcattgaagtaaataactatgattccatcaaaaaaagttacgaatatatgaaaaagaacttttag

SEQ ID NO: 8061 - DNA, 2322 bp, Methanobrevibacter gottschalkii
  source 1..2322: mol_type = genomic DNA
atgactagttatatttctcatcctctattgaaagagaatgcaattgaatcaagattatatcagcaagtgcttgcaggggatgttttaaaaaaaggaaacactatggttgttgcacctactgctttaggtaaaacaattgtggcagttttagttgcagcagataggttgcagaaggttaaaaattctaaaatactgattttagctccttccaaaccattagcaattcaacatgaagctagttttaaagagtttattactctcccatgcgcttcaataactggtgctattaagccagaagagagagttaaaagatgggaagaatcaagaataatttctgcaacacctcaaactgttgagtctgacttattaaatggacgttatgatttgagtagtgtttctttaatggtatttgatgaatgtcatcatggtgtcggatcttattcttatgtatatctggcgtctcgatatgttcaggaatctaagtttaatctaattttagctcttactgcttctccaggttcagataaacttaaaatcaaagaagtttgtgagaatttatacattcaaaacattgttgttaaaacagaagaggatgctgatgtgaaaccttactttaatccagtagaactggattgggttagagtaaagatgagtagtgaaattgagaaaattaaaggatatgtagataaatctctaaaaataagactcaaagctttgaaaaatatgggaattattagaaccgtatctgttggaaaagttgatattttaaaagcaaggggaaaagttcaaggcgagattgcaagatccactaatcctgataaagatttatttcaggctatttctattttaagtgctgttattaatattcaacatgctcaggagttaatcgaaactcagggtgttcaaacatttaataaatatgttgcaaggctacgtaaaaagaaaactaaagccgctaaatcattaatgtgggatgataattttagccgtgctattaaattggcaagggaagctgaaaagcatgggtgggagcatccaaaattaggagaaattacaaaaatcatcaaaaaggaattgggagaaagtgatggtcaacttaaattgactactaatcgttttgatgataagaatgataagaatgcatctaaaattatggtatttactcaatatcgtgatactcttgagatgattcatcagaaacttgaaaaagaaggaattaaatcagttaaattctttggacaagcgtcaaaagatggtgaaaaaggtttaactcaaaaacagcaaaaagcgattatcaaatcatttaaaatgggggaatatgatgttttgatatctaccagtgtggctgaagagggcattgatattcctgctgtggatttggttatattatatgagccagttccctctgaagtacgtatgattcaaagacgtggaagaactggccgtaaaagaactggtcgtgtaaaagtattgatgactaatggaacaagggatgaagcttattactggaccagtgtcaataaagaaagccgtatgaaaaatcaattaatagatccggatgttttagaagagttaaatgcatctgcaattgaacgtatggaaaatcaaagaaatgtaaaagtcattgaaaagcctaaaaaagaaaacaattttccaattgtttatgcggattcccgtgaaggtaattcaaaagtaattaggcacttaactgaaatggaaattgatgttaaagttaattcaatggctgttgctgattatcaggtaagtgatgaagtggcaattgagagaaaaacagcaaaagattttgttgattcaattattgataaaagattatttaaacaagctcgtgaattatcagaggaatttaaacgtcctttattgattcttgaaggtgatgatttatatgctggtatggttaatccaaatgcaattcgcggatcattagcatcaattgcaattgattttggcattagcattattccaacaagaaatgctcaggatactgctgcaatgattaaaagaattgcagttcgtgaacaaaatggtgaaaggactcctattcagattagaacagataaaaaacctgtaagcatgttggaacaacaactgttcattgtcgagtctttaccgaatattggtcctgttaatgctaaaaatttgcttgctcatttcggtagtgttggaaaaataataaatgcaagtgaaagtgaccttcaggaagttgaaggtattggtaaaaaaacagcagaaaatattagaaaggtaattgattcaaaatacctttattttgaaaaggaaattaaagaaaaaaggcttctctaa

SEQ ID NO: 8062 - DNA, 1512 bp, Methanobrevibacter gottschalkii
  source 1..1512: mol_type = genomic DNA
atgaataaaaataaaaccttcggagttattggtgtttgtggagcaaacggaaatttaatagcaaggattcttaaacaaagaggatataatgttatcgggactgatctgtctttcaaaaaggattgccggtttgctaaagcattagaaggttatgatattgaagtattctacggaaatgctccggaagctttctttaaaaaggcagattatataattcctcctgctagtttatctaaagattctagtttatttaaacaaatgggggacaaacctatttttgaattatatgatgtaattgaaatgattcaatctgaaaaaccagtctttggaataactggtactaatggtaagacaaccaccactacattacttaaaaaaattgcttatgataatggaattaaaccatgtgaacatgatttggaaggcatgcaaggtaatgctgagtttattccaattttacaatctagattggatggagatgttggaattattgaagtgggaacttttggtgttccgggaactattggaagaatagttaaaaatactggaatgtccggcggtttaattacaaatattactcctgatcatttaaatgatcttggaagtttcatggattatgcaaaagttaaagcggaattcatttctgaactcggtcttggtcaattaattgtaaatggacaagatccaacaattatgggacttttaagagaacttgattttaaaggagaagtaattacctttggggttgatgaactcccggattcaattggaatgaaagaatgtgtatgcggaaatgaaattgctgttaaagaaataatttcgggctgcggatactacttctgtaaatgcggccttacaactcctcaagctgattatattgcaacaaatattgatttaaaaaatagaacttttgatttgcatactccaactgaaaaattaacagttaagatgggagttgatggacttcacaatgtatacaatttaactggagtcattattgcagctcataaattcttagacttaccttatgataaaattttacctacaattgcaagtttcactggtgtaagtggaagaatggaagaagttgcaaaagttaaagggaaagatatttttgttgattatgcacataatcctgcaggtgtagaaacagttttaaaagaatttaaaaagttatttggagactttacaactgtaattacagtttcatctgaatcaggatatgttggggatattgatatatttaacagtgctttgaaattttcaaaattcattgttccagcatcagttgcatcacaaaaaatagcaattgaaaaacttaaatcaaagcccgaattaaatgataggatatttttaaaccatattgataactttgagaaaactggaactcttggggcttctgaagatgaagttcgggatggtttaagaaaagctttaaatttggattgtgaaatggtaatagctattggagaagctgctactaaattcaagaatgctgtttttgatttataa

SEQ ID NO: 8063 - DNA, 1386 bp, Methanobrevibacter gottschalkii
  source 1..1386: mol_type = genomic DNA
atgaattatttagttgttggtgctggaaatgctagtaggcctgttgcaagattattaaattatttgggtcatgatgttgttgtaacagatttaaaagatatttctgaatttaaaatagaatttcaaagaagtttaattgaaatggaaaaagaaggggtaagattagatatggctaacaaaaatccttcagttgaaggttttgatgctgtttatatgcctcctactttgcccgaaacagctccaatcgctcaaaaaatttatgagtctgacttaaaaattttaactaatgaagaattctctaaaatcgtaaatgatttaattgatgtggatattattggaattactggaactatgggaaaaacaactactacttttattacaactagcttatttaaacaagcaggatataaagtgtggtcatgttcttctcttgtaaataatttagtttcagaagctattgttgacggtattgttaaaggtaaagtcaatgaatgtgatatagctatttttgaacttcctcatggtactattggtcttttaaacaaattaaatattaaaattggtcttttaactaatattgcagaggatcatttatcagagttcggtggttctcttgaaaagtatcagaaacgtaaactgttattgcaggcaatgagtgagattttcatatcaaataattcatgtcatgatataattgaaaaagtccgtgatgatgcaatattttatgctttagatgaagatgttgactttaaaggtactgttggtgataagtcattaactattgcctatggtgataatgaatttacaacaccgtttaatatgatgagttatttctttgaaaactctgttgcagcagcctctattgcattaacatatggagttaatgaaaaagatatcatcgatgctttaaaggcatttaaaggtttgcctgcgcatatggaagatgttggggagtataatggcagaaaagtaattttggattctgcgtttttatatgatggaatgaaaattacccttgattactttaaagatgatagtgttgtattgttcttagatcattttgataccttgtctgtaagggacaaggcagaagttggcaatctaataagtgaatataaccttaaagcagttatagctagcggatttaatgaggttacacaggctgttgaaatggatgctgcaaatgaaattttagatgctataactaatataaacattgaaaaagttgctgttgaaacaatagaaaaagcagctgaattaactttcaaatattccgagcctggagatgttattttacacatggggccacttatagcatatgatagattaactactgttgataaaattattaaaggacttgaaagaggaagtaaaaagtatgaataa

SEQ ID NO: 8064 - DNA, 1188 bp, Methanobrevibacter gottschalkii
  source 1..1188: mol_type = genomic DNA
atgtttttaacaaaaaaagaagaacaaatgtgtgatggggagtttggagaaactatcagaaaaagcatggatatcttagttgctttaggggatatctatggtgcttctaaattggttgatattacttccgcacaggtatctggtgtttcatataaaactattggagatgctggtttagaatatcttgaagatttggctcgtgacggatcaggtaaagctaccattaatgcttcattaaacccgccaggaactgatttggataactggaaagagttaggttttccagaagaatttgcaattaagcaaaatcaaattgtggatgcttatgcaaatctgggaatttataaaacttgtacttgtacaccctatttggtgggtaatgttccaagatttgcagatcatgtgtcctggtcagaatcatctgctgtggcatttgttaattctgttatcggagctaggactaatcgtgaaggtggtccggcggcattggcggcagctattgtcggtaaaactccattatatggattccacttggagcaaaataggaaagctaatttaattgtcaatgttgattgcaaaatcaatggtgcagattttggtgcattaggttatattattggtaaatttgttggtggtggagttccatacttcaatttaatgaattctcccaataataatgatttaaaaactttaggggcggcacttgcatcttcaggttcagttgctctttatcacatggaaaatataactcccgaacataaaaatgctggaaaagatgatgttgaagatatcatgtttgtttcaagagatcaaattaatgaaactcgccaaaaattatccactactgataaaaaaccagatttaatttgtttaggatgtcctcatgcatctcttgatgaaattaaacaagtagctagcattgttcaaggaaaaactattaaaaataaattatggatttgtacgtccgtaagtgtaaaggcaacatctgatagaatgggctatactaagattattgaacaagcaggtggaaatattgtatgtgatacttgtatggttgtagctcctattgaagatatgggctttgaagtaataggtgtgaactcagcaaaagcggcaaactatgttccgtcaatgtgcggacttgatgttgtatataatgatgtggaaaatttaatacagtttaaataa

SEQ ID NO: 8065 - DNA, 1335 bp, Methanobrevibacter gottschalkii
  source 1..1335: mol_type = genomic DNA
ttgttaaatagggctagtgaagcaacagatatgctcaaggagcatattgaaaatgatgacgttataagaataatttctcataacgatgcggatggaatatcctctgcagccgtattagcgaatgctcttgccgaagaggatgtacaattccatactacaattattcctcgtcttaaaggtgatattgtaaatcaattaaggcatgaaaaatatgatttattcatattctcagacatgggaagtccatttattaaagaattcaacacatataaacatgatgttattgttgcagatcatcatcaagtaaatgatactgaagcggaaagcaatgttgtacacttgaatcctcatttgtttggaatagatggtagtaaagatttatgtggtgcaggttcaagttatcttactattcgcgggcttgataaaaaacatttagcttattttgctttaatcggtgcatttggtgatatgcaaggacaaaatggatttactggagtaaacaaactaattgttgatgatgctattgaaagcggaactttagaaattcatgaagggttgaaaattgtttccaaatcatctgaaccaatttttaaatctttagcttatactttttcacctcctcttcctaagattagtggagattttgagggtgcacgtgaatttttagaacgtatgaacttgtcttatggaattaaattcacagatttggaagacgaagagaaagatttattaaaagaagcgttgatgtctattaatccggatatttttggagattgttatacagttccaaaagaagtaccattattgcgtgatctggaggagtattcttatattcttgatgcatgcggtaaaaacaaaaaacaaggccttggtttaagtattgcacttggcgaacgtgatcaagcacttgacactgctttaaaattacaaagtcaatatagggatcaaattgttaaaggtcttgaatggattaagaaacaaggtgctgaacagcttaatagtattcagtacttatattctgaagataaagtattaaagtctgtgatgggtactattgcaagtataggtttgtcagttgaattattggatgattcaaaaccagtgattggtctttcaaggcttcataaggatattaagatatctggcagaaccactcgtaatatggttgcaaagggagttaatttaggtaaagcattgcaagactcttcaaacaactttggtggtaccggaggaggtcatgacatcgcagcgggtgctatggttgcttatgaatttaaagataagttcctacacctagttgatgaaatggttgaatatcaattaacaaatgattaa

SEQ ID NO: 8066 - DNA, 399 bp, Methanobrevibacter gottschalkii
  source 1..399: mol_type = genomic DNA
atggcaagaccagaatgggtaacttatagtgatgaagaaattgaagaaatgattttaaaatttaacaaagaaggtaaaagcacttctgaaatcggtattgtattaagagatcaatatggaattccatctgttaaagatgttactggtgaaagaatcactcaaattttaaaaagaaatgatcaagctggacaatacccggaagatttattaaatttaatcaaaagagctgttaacatcagagatcacttatctgaaaatcctaaagatttacactctaaaagaggtttaactatcatcgaatcaagaatcagaagattagcatcttactatgtaagtgaaggtgcattacctgaaggatggagatataatccaaaagaagcagcactccttgttaaatag

SEQ ID NO: 8067 - DNA, 552 bp, Methanobrevibacter gottschalkii
  source 1..552: mol_type = genomic DNA
atgataacatttataactggtaatgaacataaagttaaagaagcagagaatattttcaaagattatgacattaatttagagcatattgatttaggttatgaagaacctcaaggaactcttgaggaagtagctatatcaggtgcagaatatgcctgtcgtaaacttgataaacctgtgattgttgaagatgctggtttattcattaaagctttaaaaggatttcctggaacatattcacattatgttcaagatacattgggaaatcagggaattttaaagttattagcagatactgatgaccgttatgccgaattcaggtcagttattgggtactgtgctcccaattctgagcccaagatctttttaggtaaggtatcaggtgaaatcgcagttgaagaaagaggagatttagggtttgcctttgatccacttttttatgttccaagtcttggtaaaacatttggtgaacttacaactgaggaaaaaaaccaattttcacatagaaaaaattctttagaacaatttattaaatggtattctagtcaagaataa

SEQ ID NO: 8068 - DNA, 1590 bp, Methanobrevibacter gottschalkii
  source 1..1590: mol_type = genomic DNA
ttgatatgtttaggaattgaaggaactgcagaaaaaacaggtgtaggtattgttgatggtgatggcaatatattggctatgactggaaatcaattatttccagaggaaggtggtattcatccaagaatggcggcagaacatcatgcagaatggattcctaaattaattcctcaggctattgaagaatctggactttcatatgaggatattgatatgatatctttttcacaaggccctggcttgggtccgggtttaagaattgttgcaacttcggcccgtagtctcgcattatctcttaaaaaaccaataattggtgtaaatcattgtattgctcatgttgaagttggaaaacttgatactggtgctgtaaatccggtttctctttatgtaagcggtggaaatagtcaagttattgctcatgaaagtggaagatataggatttttggtgaaaccttagacatagctattggtaattgccttgatcattttggccgtgaaactggtttgggtcatcccggtggtccagttattgaaaaattatctaaacaggggtcttatattgatttgccttatgttgtaaaaggaatggacttttcattttcaggattattgtctgctgcgttaagggaagctaaaaaaggaactcctattgaagacatttgtttttcacttcaggaaactgctttttcaatgcttgttgaagtaacagaacgtgctctttcccatactcagaaagatgaagtaatgttgtgtggtggtgttgcagctaattcaagactaagggaaatgcttaacacaatgtctgaggagcatggtgctaaattttatatgcctgagatgaaactttgtggtgataatggtgtaatgattgcatggttgggtcttttgatgtttcgtgagtttggatctatggacttatctcaaactggtattattcaaaagtttagaactgatgaagttgatattccgtgggttgataatgttaaaacctacttaaaattaagtgatgatttgattgctaaaggtgcagaatctaacattgttaaaagtaactatttgggtgaaaaagctgttctaaaagacagaattcctaaggggtatagaatcgccgaaattgatgataaaattagaagagcaagaacaaaagaggaagctaaacttttatctgatgcaaaatgtgctggtgttaaaactcctattttatatgatattaacttagaagaaaaatcaattttgatggaagaaattaaaggtaaaatggttaaagatgtcatggatgaggatttggcatttaaaataggtgtggaaattgccaaacttcatgctgctgatattattcatggggatattacttcatcaaatatgatgcttcaggatgggaaattggtttttatcgattttggtcttggaaaatattctaatttagatgaagataaagcagttgatttgcttgttttaaagaaatctcttcagagtattgattataatttagcatcgaaatattttgattgcgtattggtgggatatggtgatgaaaatatggttaataaaatatctgacatagagtcacgtgggagatatacccactaa

SEQ ID NO: 8069 - DNA, 501 bp, Methanobrevibacter gottschalkii
  source 1..501: mol_type = genomic DNA
atgggattttataacgctaatactccagaacagaaaagagttaaaaaattaacaggagatattaacatcagtgatctgtttaaaaacgaatgtaaaacccgtggaattgcaatttataatgcttataatattcaaaaaagattattgcacgaggtagaacaagaacaacttcatggtgttaaagaagtagatgatagattaatggaattacttgacgaaaggggaaaaaataaagtaacacatagatatgttgatttcatttccaatgaagatagtgcatcaaaaggaattataccccaaaaaacaaatgaacaaaatccacttcctccaaatcaaattagaattccaccaagagcaagagacggaaaacaattcttaaatgatgatgaattaccagaaatagaaatgttaaagaaaatcatgctacaaaataaaaagattattaatcaaaataaaataattttagaacagttgaggaaacttggtgaaaaagatgattga

SEQ ID NO: 8070 - DNA, 1071 bp, Methanobrevibacter gottschalkii
  source 1..1071: mol_type = genomic DNA
gtgaaaaagatgattgatggaataaaaacatatggatcaactgaacttattgaaaaactgcaggaatgtgatgacccagtattcttacttacaataggaacgactgatacttcaacaattccagatatttcaggagctggcgcaacacctgaattaacagtatttacaccagcagcagatgctgaatttttagttttaggagaagtccattgtacccgaactgcagccgaaacagttgttgatggtgcggcagcaccaacacctgcaagacttacaaaagcggcactccagctttcaaatatcccatttgttattattgatgcaggttcaaaagttaaagcagacgtatcatattacagttttggaaaagaacatgggagagatataagaactggagaaggtattttaaatccattagaaattattgaaaatggaaaagatttaggtaatgagctatctagaagacatgaaatgctcatcattggtgaaagcatacctgcaggaacaacaacagcactaggagttttaaaagccttaggttatgaagctaatgaaaaagttagtggaagtatgcctcacaatccacatgatttaaaatcaaaagttgttgatgaaggtttgagaaatgctggaataatacccggtgaagcagatgccatacaagtgattggtgctgtaggagatccgacaattcctgcaattgcaggtcttgtgttaggttctgatattccaattattttagcaggcgggacacaaatggcagcaacatgtgctgtaataaaatcaattcagccaaactttgatttttcaagaattaatttagctactacagtatttgttgcagctgatgaaactgcagatttattcggtattttaaatcagattgacagcagcattactgttcatgtagtagatcctaaatttgaagattcaaaacatgaaggattaaaaaattatttaactggatttgttaaagaaggtgcaggtgctggaggaatgatgtttacagcacttgttttaggaagttctgttgaagaattaagagaaaaaatagaaaaagtatgtaaatag

SEQ ID NO: 8071 - DNA, 834 bp, Methanobrevibacter gottschalkii
  source 1..834: mol_type = genomic DNA
atggatatattacaggctataataattggtattgttcaagggttaactgaatttttaccagttagtagctcagcacatttagtattcgctcaaaaattagtgggtgttgaaagttctcttacatttgatgttttacttcatttgggaacattgattgctgttctttggttcttccgttgggacataattaaaatgcttaaatcttggtggttgagtattggtgatttattgcaaggaagatttaaacaaggtttttatgatgatccttataagagacttgcatggtatgttattttagcaactattccagttggtattgttggagtcttatttgatgatgcaatagaatcattatttgcaggcgcactttatgttccggcattctttttatttgtaactggtactattctttatttgtctcaaagaatgaatagtggaaagattaacatgaataacatgtctaaggttgaggcattggtaatgggattaggtcaggcatgtgcaatattgccgggtctttcacgttcaggaactacaatcgcagcaggtttggtaatgggtcttgataaagagttcgctgctaaattcagttttattttatccattccagcaatttttggagcattcatttttaaattaaaagacataggttctgcaatggatgttaactttttaccggttttcataggttttattgtatctatacttgcaggatatctggctattaaatggatgttggatttaattaaaaacagaagcttggatatctttgcatattattgctggctgatgggtattatagtgtttatgggatcaatttcccatatattttaa

SEQ ID NO: 8072 - DNA, 924 bp, Methanobrevibacter gottschalkii
  source 1..924: mol_type = genomic DNA
atggcatgggatgacacagctagtaaaatttgggtagatggagacatggttgattggaaagatgcaaaaattcatgtactttctcatgtggtccactatggtacaagtgtttttgaaggaattcgtgcatataaaaatgaaaatggtgtagcggtattccgtttaaaagaacatgtacaacgtttatttgattccgcaaaaatatataaaatggaaattccatttacacaagaagaaattcaagaagcaattttagaagttgttcgtgtaaatgatttaaatggatgttatattcgtcctattgcatttaaaggatatggacaattaggtgtagatccttcaagctgtcctgttaatgtagttattgctgcttgggaatggggatcctatttgggtgaagaaggaatggcaaatggtgtggatattggagtatcttcttggagaaaaccggcacctgataccttcccagcacttgcaaaatgtggtgcaaattatatgaactcccaattagcaaaactcgaagctattgataatggatatgatgaggctatcatgcttgattatgaggggcatgtttccgaaggaagtggggaaaatatcttccttgttgaagatgaaaaactattcactccagcaatgtcatcatcaaaccttaaaggtattacaagagattctataatgactgttgcacgtgatttgggttatgaagttattgaagaagttatttcaagagaaagattatactctgctaatgaagtattttttacaggaactgcagctgaagtaactccgatccgttcaattgatcacagaactataggtataggtaaaaggggaccaatttctgaaaaactacaaactgctttcttcgagattgtggaagctaaagtagaagataaatatggttggttatcttacatctaa

SEQ ID NO: 8073 - DNA, 828 bp, Methanobrevibacter gottschalkii
  source 1..828: mol_type = genomic DNA
atggtagttaaaattgctattattaaaagtggtaatattggtacttcaccagtaattgacctattgttagatgaaagagcagacagaccaaatatcgatgtaagaacatttggatctggagcaaaaatgaaccctgaacaagtagaagacgttgtacctaaaatagatgcattcgaacctgattttgcaatctttatcagcccaaacccaggagcacctggtcctgctaaggcaagagaaatgttatctgaaaaagatattcctgcaattatcgttggtgacgcacctggtaaaggtaaaaaagatgaaatggatgaacaaggattaggttacatcatcgttatgtctgacccaatgattggtgcaaaaagagaatggttagacccaactgaaatggctatcttcaactccgacatcttaaaagtattagctgaaactggagcattaagattagtccaacaaactattgatactgtaatcgaacaagctgaagcaggtgaaatcgaattacctaaacttatagtaactgctgaaaaagctgctgaagcaggtggattcgcaaacccttacgcaaaagcaaaagctattgctgcatatgaaatggctggatccgttgcaaacttagacatgaaaggttgtttcatgaccaaaggtttcgaaaacttcatcccattagtagctgctgctcacgaaattgctgcatgtgctgctaaattagctcaagaagcaagagaaattgaaaaagctaatgatactgttttaagaacccctcacatgaaagaaggaaaccttggttctaaaactgacttaatctcaaaaccagaataa

SEQ ID NO: 8074 - DNA, 579 bp, Methanobrevibacter gottschalkii
  source 1..579: mol_type = genomic DNA
atgactaggaatataaatgtttcaagaaagacatctgaaactgacattaatattaaaatgaatcttgatggtacaggcaaatataatatttcaactggtgtgaacttctttaatcacatgttagaatcgttttcaaagcacagtatgattgatttggatgttcaagccagaggggatattgaaatcgatgaccaccacacaattgaagatgttggaatattacttggtgaagcatttaacaaggctattggtgataaaaagggaattaaaagaatggcacattctattgttccaatggatgaatcagtagcaacaatagcaatagatattagtggacgtagctattgtaatatggacttgaaatttaaaaatgaaaaaataggggatatgacctctgatgttgtaattcatttttttgaatcttttgccggttctgccaaattaaatatctatggtactgttgaaggtgcaaatgatcatcataaggctgaagctgtttttaaagcatttgcaaaatctattaaagaagcaatcaaaattgagcacaatcagattccatcgacaaaaggtgttttatag

SEQ ID NO: 8075 - DNA, 192 bp, Methanobrevibacter gottschalkii
  source 1..192: mol_type = genomic DNA
atgttacaaattttagttgatgaagaaaagtgtattggttgtggaaattgtgctgagatttgtccaaaatctgctaaaatttggaaagttaaggacgttgcacatatattggatttaagatattgtcatgtttgtactttatgtgcaatggaatgccctacacaatgcattaaaattgaacgtaatggttga

SEQ ID NO: 8076 - DNA, 693 bp, Methanobrevibacter gottschalkii
  source 1..693: mol_type = genomic DNA
atggcggatgtaaatgctggtgttgaatataaaattaatgttgatggtaatttatttttattggataataaaaaataccaattattacaatctatcttagatactggttctttaacaaatgcgtctaaggaaattaaagtttcttataggactgctttaagttatattgaaaaaatggaatctgcacttaatgtaaaaattgttaatactactaaaggtggtaaaggtggaggtggaggaacctctcttacagatgagggttactctatcttaaaggagtgtaaaaagattaatgcaatcatggaacttcataaggacgttaatgaaattgaagcggatattgttgacattaatgttgagaagggtgtaatgactattaaaatgaatcagtttgaaataaatgccccgttaaacaggaattatgatattggggataaaattttagctttaataagttatgataatatatttttaatgctggaacctcagtcttcaagtatccgtaatgttttaaaaggccagatcattgaaatgagtcttcaaaatgagataattcgtgttaaagtggatgttggcggagttgttttgtgttctgatattactgtttctgctgaaaaagagttaaatcttaatataggcaccgaagtttatgtaggttttaaagcaatgtctgttgcaacattaaaattatga

SEQ ID NO: 8077 - DNA, 1557 bp, Methanobrevibacter gottschalkii
  source 1..1557: mol_type = genomic DNA
atggcaaataagttaattcgtggtagtttaataattttaataggtaatgtaattttccgtattgggggttatatttaccgtttcttaatggcaattttacttggacctactgcatatggtattttaggaattactttaccatttcaaggaatttttcagactttatctgctggtgggctccctcccgctattgctaaatatgttgcagaatacgaagctattgatgaaaaggacatggctcggcaaacaatctacactgccttaaagattatggtttttctaggtttattctttggagtattgatgattttcattgttgctccatatttggcttatggttatttggggaaacctgaagctttaatccctttacagattgtagggcttattactccattcagtgttattgttggtgcatttagaggagcattccaaggggtatataaaatggagtatattgtatatactcgtgctgtagagcaacttggtatgattttatttgcaactgcatttgtattaataggtttatctacagttggagcgttatggggtactgttttaggatattctctttctgttgtagcggcggtttatattttcaaatatcatatgggaaatttaataccggaacctagtgatgattttgtttttacaagacgtgatgaattaaaacttgcaactgtcctggttaaattttctattcctgtaattattacagctattgctgaaatgcttatttataatatctgtacaattgttatgggtaaatttttaacatttgatgacattggatttttcgctgcggcagatcctattgcaaggcttcctttaattatttcaatttccatcgcaactacaattttaccggcttcttctgaggcattcaagttaaaagacattggcatgcttcaaaaatatgtttcagaagcttataagttttcattgttgtttgttgttccgatgtgtgttggtcttgcattatttgcagaacctactttaagagttctctactttaaaaatcctgcttatgtggctggagcaatggcattagcaattctatctattggaatgaccttttattcaatatttgctatttcaactagtattgttcaaggtattggaaatccaagaattcctatgtatattttagttggcggggctgttgttactggagttcttaattggataatggttccaactcttggaatcgctggtggtgcacttgctactagtgttgcttgttttttaatgatggttccatgtatatactttgtatttagattaacaaaaaccaaagctcctgttgttgcagtagctaaaatattggttgcttctgcagttatgggtatagttgcatactttatcccaaaaagtactttatttttattccctgggatagtattatgtatggttgtttacttttttgctttgattttagttaaatttttccaaaaagatgatattgaaagtttaaggaaattttcatctaaatttggcccgttttctaaacttattaataaaatgttaaattttgttgaaaggattgaatttagatag

SEQ ID NO: 8078 - DNA, 585 bp, Methanobrevibacter gottschalkii
  source 1..585: mol_type = genomic DNA
atgaagatttttggtatttgtgctagtcctagaaataatacaactgaatatgcgttatcaaaagctatgaggagactgaatgaagaaggttttgaaacggaaatgtttacttgccaatcaaaagatattaaaccgtgcatgcattgtgattattgtttggaacataaaaaatgcataatccaagatgacatgggggatgtttataaaggtcttttaactgctgatgggattattttagctactccagttcaaaatggtggtatcagtagttatctgtcagctattatggataggactagagcattagaagctatcgattataatattctaagaggtaaaatcggaatgagcatcactgttggcggcgatcgtacaggtggacaagattttgcccatttaaaaaatattacttatttcatgatacatggtattattccagtaagtggaggtccttttggttctaatttaggtgcttcattctggtcaaaagattctttagatgatattaaagaagattattatggtatggattcattaaacagaactttgcacgaatttgaaaattttctaaataaatatatttaa

SEQ ID NO: 8079 - DNA, 339 bp, Methanobrevibacter gottschalkii
  source 1..339: mol_type = genomic DNA
atgattcgtagaaaaaaaggaaaatttctcagtcaaggtgaagaagatcctatgagtggaacatcaaatttagttgatgtaatgttggttattgctgttggactgctgatatttttagttatttcttggaacatgcagaatattgtatttaatgaaaatatggatgaacaacaaaaagaaaaagtgaaaaatgcaataaaagaggtttcacaaattgaccagggcaatgaattaaatgatactccggatataagtaaatcttctggaaaaggttttactgaaatgggtaaagtttatcgagattctgacacgggtaaattaatcatggttgaaggttaa

SEQ ID NO: 8080 - DNA, 642 bp, Methanobrevibacter gottschalkii
  source 1..642: mol_type = genomic DNA
atggtggctattcctgggagtgagtttttaactgctgctttaaatgtagtttctcaaagtttacagattccagtaattattttcttattgatttttgcagtttttgcagtttttgcttttggaggtcttatttcagattataggactcgtataaaattaaatagggattataaagaaaagttaatattttctttagttaattctaaaacagtcgatgaacttaaacatgctgttgatggttcagagatttataattctcaaaaagaagttctattaaaaatagctgatgcacattcattatcttgtgaatctcgagaatcatgggctttaaatttaattgaggaagaagaggtcgtcatggccaaatctcttgaaaaaatagatattgttactcgtattggtccaactcttggattaatgggtactttaatcccaatgggtcccggtcttgcagcattaggtaatggggatgtttcaacattggctgctgctatcattgtagcattcgacacaacagtcgttggtatcgggtctggtgctgttgcttatgttatatcaaaaattagacgtagatggtatgaggaatattcatctaatcttcagttatttgtaaatgcagttttagagaatttaaacgattag

SEQ ID NO: 8081 - DNA, 684 bp, Methanobrevibacter gottschalkii
  source 1..684: mol_type = genomic DNA
atgagttttagtttgttatggtctgttggatttgctgtttcaatagtggtttttgcgatatctattggtttggttattaattctaaaattaattcgaataaaaatttagtcaaattagtttttgttttatttatatctactttaattcttatttattcgatttgcatttttaaaattcagttaaattcaattataggtagttataattatgttttattgtttttaattgcattcctattaatgtttataggatatattattatcaaagaaaatgggtgcggaagaacttttataaatgttcttttgttatcttacttaagttttatattggtgatgttaatttgtataggttctaaagaatctatttttggattggatgatttacaaattagtttattagcaacactattgtttaattcattgatccttgttgtattctttgcttgtagaaaattaaagttgattgataggtcttatagaagttttggaagcttgtatttaatattgggaatttattgtttaatgatttcattattgcttccaaatatcatctctttgaatatgggggatatgaaacctataaatattgtttcaattgattcaatagcttttatttttattttattgattgtgataatggttttaggtttgttgtattataaaagaaatactttattgaaatga

SEQ ID NO: 8082 - DNA, 516 bp, Methanobrevibacter gottschalkii
  source 1..516: mol_type = genomic DNA
atggaatgtaaaaaattagcattgttgatttcagttatttttattatgtcatttgcagcatctggagtattcgctcatcctggtcatggttctgagtatgtggaagaagtgacttctgatgatgttggttcatcaagtaattccggatcttcttcaggtagttctggttcttcaagtaactctggtggttctaccgttccagcttcatcttcttctagtagctctagttcttcacgtagttctagttattctagttctgacccttattctagtagctctagttcttcaggagctcatgattcaaaccatgattcatatcaaggttcatcatctaattctgttgtaaaagataattcttctcttaaagatgcaaataaaacaaatgaaaatttaactaatgattcaggtgaaattgataatgatgaattatttacagtaaacaatattctattattgattattgtattgttttgtgggtttttcataagtgttattctatttaaattattttcttaa

SEQ ID NO: 8083 - DNA, 2931 bp, Methanobrevibacter gottschalkii
  source 1..2931: mol_type = genomic DNA
atggggggtaaaaatattaacaaacatttaatttcacttttatttttttgcattttagttttgctaatggcaggtggagtttatgcagaagatatcggtaattcagatgtttttgaaaatccaatctctacggatattcagcaagatgatttatctgaagatgatttggatatatctaatttaaatgttaaagttaattatcaatatgctgatgataatggaaaaataaatcctactattaaagttaatgataaacatattatatcaaaagaatttaatagttcatatcaaaattataatgttataattaattctacaaatattgcagataaacttaatatttctatttctgcaccgggatatttgactcaatataaaatagtcactccaaacatgggtaaatctattttggctaatgtcacttttaatatggaatcttctgaaagttacaaattaggtagagatgtaactgcggaagcagataaattacttgattttaaaaatgctgatgatgttttagctattacaactgctggtgttgcaaaatataatggtaagactagtgaagatgcaatggaagcaatggttaattatggaaaaatatcttatagcaatatattaatgttacgtcaaagtgctattgatcctattgattttgcttttattgttaagaaaggaaatgagttaaaagctatcattttccaaaatgcatctactaaatattcatatttgggaactatttctgagaacatgacaaaagctcaatggaataaatattataagtcacttgttggtgaaaattcctgggcatttgctagcttggcaaatggttgggctgctggtgtttctagagaaattcttcaagaagccgcttttcatggccatatttgtgaaggtactttgggtggatatagtattattcaagctttgttgaaatactatccgcctgagcaagaaaataatcctggtggaattggttctcctgcagatattactgcttataaagtactcggagttcctggcggatcggatgatgatgcagcattattctttttagatgatacaattggtaaaactggttatgctggtatgaataccactaatactggggctactgagaatatgattggttttattaaatggaattccaaacaaaagactggtgatttaattatcatgtcatttaattccactaaacttaaaaaacttttcaaaaaagaaactaaaataaatgctgatgctggaagtttggaagaattaaaatactgctcttggtggattaataaaattaataataatcctgaaaaattagttgattttttatatgaatttacaggtttaaatcaagaacaatataattacttgatgggaactactgaaaatataacttatgatggtgaacctgcagagtatggtcttgatggtcatggtttagatttaaactatattttatctttaaatctccccactgctaaaagaacaatcaatagtgttgctcatgctaaattaactgatgctgaacttaaacaaattggtattgatgcagccaataaagctaaaaaaatattcaatgaagaattgggtgttgaaattgatagggatgatattgattttctagctttaactgatgcaggatatgcatttttaaatggccaagatactgtagttgttcgtgatggtcttcatgaagtccttggaggaacattatatagtcaaaatttattaagtcttcaccaagctgtatggaaaccgttgtggtttgcatttgcaattcgttatccggattctgatttagttgatatgatttatttaagatataatccagatactaaagatttctttgttggaactcttgatggtaatagagttgtggatattggttttgaaacattaaataatagtgataaattaaaagctattgcaaaatcttttgttcctgatggaaattggtttaatattcaaagtattgtaaacgcatggaatgaacatcctttatttgatcagatggctactttcttgtatcatgctcatgtatgtcctggcgttcaaccaggtttctttataactgattatattcaggaaaaatatccattaggtgaaaatgaatcttacacttacattgcatctagtatttattgtaaagatgacagtttaacttatctattggatttatctccaggtttaggtactttttatgtacaaaaattaccaaaaaatgaaactgaaaatggaatatctcaaggtgttcttgtcgtatgggataaaaatcttaaaataggtaaggcagtaattgttaattttgatgattggggtacaattgacacaagtatgtatgtaactagtgaagcaaaacgtgctagtcaaattaaagcttatattgacatatatggtaataggaacaatccaaatgttaaatctaaaccaattgtctcaaccgtaaatgaaaaatggattactgaagaacaatttaacatgttaaaacaaggtgctggtgatgattttaatgtactttcatacttgaaaagccttgatgatatcactaaagaagatttattaaaatcaataaatcaaaattccaatagtaattcaaattcaaactctaagcctaacattaaccctaatagtaattcaaattccaattctaacagtagttcaaatgctatagcatctcatacaaattccaatccttcatcttctggaagtgttggaacttctggtgcagtagtttctagtgcatatgttggcgagtttactaaagatgctgaatctgaagattcacaaaacggtcctgatgatgcaaaatcatatgaggtatctaaatctcctgcagcaaaatctgctgattcaaatagtttaatttatgctttaattggtgtattggctattggaattttgcttggtgtaggttatatgaaacgtgataaaaaatag

SEQ ID NO: 8084 - DNA, 624 bp, Methanobrevibacter gottschalkii
  source 1..624: mol_type = genomic DNA
atgcatttacctgatggaataataagtttcgaacaagcaataatctattggacaataacattgataattgtttcactattcttttacaaattttctaatgatgaaaataaagaaaaaagaataatatcaatagctttgtttagtgtttttacaataggcattacatcattatcaatcccatcaccgcttggagtgccaatccacttcttcataataccattaatagctatgttattaggtcccttttctagcacaatagtatcttttgtaactttgattatgcaagcattaactctgaatatgggtggtataacatcattaggtgctaatttcattgtaattggattcatattgtctgtagcaacatatgggttttataaactatttttaaatttaaataaaaaatttgcaatatttggatcaacagttattggaattattattgccacatttggacagataggcattttattaatttcaggagcaatgaaccttgatgtattattatcaacattattgccattttatgtattcatctcatttatagaaggttttgctaatgtgattataataacagctattgaaaaaataaaacccgaaataattgaaataaataaaatttag

SEQ ID NO: 8085 - DNA, 483 bp, Methanobrevibacter gottschalkii
  source 1..483: mol_type = genomic DNA
atgaaatatttaaaaatatcaatattgttattaatattacttttaggaataagtacggtgtcatcacatggagtagatgtaacagcagacaccatggttgttgctaatgacagcaatggaaaaatggtcaaaagtattgcagaatcaaataatattaacattagcgtttataaattcacatctgaagatgaagttacacatatccttgaacatagtataaacaacacaaacaaaagaatattgtttactgcatatcaagagactgctaatgattttttaaaaaagcatcctgacatgtccaatagaataattgtaatagacaatgtaaacgacaatacaactcttgaaggacttcaaaatattatgaatgtgcccgtagaaaatgtaaatagtgaaaataattttggattgccattaacaatcggtatcataataggtttattaattggtattggctgtggagcatatataatgaaaagatag

SEQ ID NO: 8086 - DNA, 840 bp, Methanobrevibacter gottschalkii
  source 1..840: mol_type = genomic DNA
atgaagattggaaaaggtatcgtgaaaaaatattctcggaagtataacagaacacttaaaaatggcgaacaaaagaaatatactaccgaacaaatacaaattaccatccctaaaaatgaagatatttattacaatcaagaagaagttttaattatcccaaatagtgaaattgaaaattttaagagtagagaagaagaaaatgaatttttaaaaatcgctaattatttttatgttgaggaagtgaaacaattgaatgaacagatggatgaaaatttaaactctacttcagaatatgaaaaagaaattgaagagttaaaagctaagattacttctttaaaagatattgaagacaaatataattcaattaaaaaagataatattgaccaactcaaacaagaaaacgagaatattcgagataaacactccaaattgattatcgagaatgaaaacttaaaaaataaatttgtcaatattaaaactgaaaatgaaaacttaaaaagcaaatattcaagtattaaagaagaaaataggaatcttaaaatcaaatgttccaatttaaaagatgaacattccactattaaagatagttacaatcaagtttcaacaaaatacgatcagttaaaacaagaaaacctcaatacaaaaacaggttatgctgaaatctatgaaatcaatgaagaattagaaaaagactatgacactcttcgtttagaatacaatgacctggtcgataaaattaacagtttagaagaagaattatataaaattaaagctatgaaagaccacgacacatatatagccaataaagttaaagaatttattttaaaaagtggaaattaa

SEQ ID NO: 8087 - DNA, 282 bp, Methanobrevibacter gottschalkii
  source 1..282: mol_type = genomic DNA
atgggattttgcaattcatgtggtagaccaattgtaaaagaagattatggaactaacaaggatggaagtttaaaccctgatttttgtaaagattgttatcaaaatggtgaatatacggaacctgatataactctagcagaaatgattacaagaaaaacaaaggaaatgatggaaaaaaatccgagattgcctgaaacacaagctacaggtattactgcagtgtttattccaggacttaagagatggaatccagagtttcaagatgattataaaactctttaa

SEQ ID NO: 8088 - DNA, 1251 bp, Methanobrevibacter gottschalkii
  source 1..1251: mol_type = genomic DNA
atggacccaatgtataaaataggagaagctcttattggagatggccctgaattagcacacattgatttattgattggtgataaattcggacctattggtcaggctttcgctaatggtttatcaaacttatctgtaggacacactcctttaacaagcgtaattagacctaacttaatgactaaaccagctactttaattattcctaaagtaacagttggtgatttagatgatgctggtaaaattttcggacctgcacaaactgctgttgcaagagcagtagctgatgcagtagaagacggatatattccaaaagaaattgtagaagatattgtaattaatgtaagtgtattcattgatccatctgctaaagattacagaaaaatttatcaatacaactacggagcaaccaaattagctatcagaagagcaatggaagattatccatcaattgaaaaagttttagcagaaaaagaccgtggaactcatccaattatgggattcaaagtcaaaaaactttggtcaccaccatacttacaagttgctcttgacttagataatgaagatgctatggaaagaataattaatgatttgcctgataatgacagaatattactcgaagctggcactccactcgttaaaaaattcggtgttggaatcattggcaaaatcagagctttacgtcctgatgcattcattattgctgacttaaaaactttagatgtgggtcgtgttgaagttaaaatggcggcagatgaaactgctgatgcagtagctatttctggtctcggtactgttgaatctattgctaaagctattcatgaaactcaaaaacaaggtatctattccattttagacatgatgaatgtcgcaggatttgaagaaaaattagccaaacttcctaaagacttaaaaccagatattgttttattacacagaaatgtagacatggaaacttacagagcagaacatggtgaagacactagtgacatgactgaatggggtaacattaaagatattaaatcaatgcttggtgataaaggtcttgttgctgttgcaggtggtattagacctaacaatgctgaagaagctattgaaaaaggtgctaacatcattatcgctggtagatacattattggttctaaagatgtaagaagagctgcacaagacttcttagaacattttgaaccagatccagacaacatgagacttgctatggatgaagatgaaaacattgaagtaaaagatgactag

SEQ ID NO: 8089 - DNA, 1827 bp, Methanobrevibacter gottschalkii
  source 1..1827: mol_type = genomic DNA
atgagaattttattaattcattctgattatttaaattataatgtaaaaaataaaacacctgtagctgaagatattgaggaagctaaaaaagaaggttcctttgatgattctttagttgtatttacagctgttgaaaaagatgatgaaaataatccagaaggtattgttaaaaatttagttagtgaagttaaaaaaactaatgatcaagttaaagctgaaaatattgtattatatccgtatgctcacttatcttcttcattaagctctccaaaagttgctatacaaatattaaaagatgtggaagaagctttacttgctgaagattttaatgtaaaaagagtgcctttcggatggtataaagcatttgaaatatcttgtaaaggtcatccattaagtgaactttcaagaactatcactgctgatgatgcagaaaaggctaaagttgaaagaaaaccttcaaaatggcaaattcttgaaggtaacaaaatcactcaaattgaagactttgaatttgataataaaactttcaaacaactagttgattatgaattgggacaaggcgcatctgatgaaggcgaacctcctcatgttaaattaatgagggagaaagaaatttgtgattatgaaccagcttctgatgttggaaaccttagatggtatccaaaaggtagattaataagagatttgctcgctgattatgtttacaaccttactgtagatcatggagcaatgccaattgaaactccaattttctatgatttagataatgaagccatatatcagcatgcttacaaatttggtgaaagacagtatagaactgatactaaaaagaatttaatgcttagatttgcctgttgttttggagcatttagggtaatgtctgattcatatttaacttggaaaaacttacctgctaaagtttatgaattgtctacttatagtttccgttttgagaaaaaaggagaagttgttggtcttaaaagattaagagcatttaccatgcctgatttccattcattctgtgctgatgttccggcatctcttgaagaattttcaaatcaaactgaaatgtgcatgcaaactggaaacgatttaaatttggactttgaagtaattttcagagcaacccaggacttctttgatgagcatgaggaatggatgtatgaagttgctgaaaaattcggaaaacctgtcttattagaaattttaccagaaagacaccattattgggtatgtaaaatagacttagcaaacatcgatgctttaggtcgtccaattgaaaatccaactgttcaaattgatgttgaaagtggtaaaagatttgatatttcttacttaggagaggatggtgaacagcataatccaactatattgcactgttctccaaccggaagtattgaaagagttttatgtgcaatgcttgaaaaaaccgcaattgaattaaacgaaaaatcaccaatgttgccaacttggttaagtccaatccaggcaagaattttaactgttggtgaatctcacaaagaatttgcagaagaattatattctaaaattaatgcttcaaacattcgtgtagatattgatgatagggatgaaagtgtaggtaaaaaaattagaaatgcatctaaagaatggattccatacatttttgtcgttggagataaagaagttgaatctggcaaattccaagtaactgtacgtgagactggtgaaaaagttgacatgacagttgatgagttaattaatgaaatcaacgaaaaatgtgaaggaaaaccttttagaagattacctttgcctaaagatatctcaagaaggattaacttccaataa

SEQ ID NO: 8090 - DNA, 1356 bp, Methanobrevibacter gottschalkii
  source 1..1356: mol_type = genomic DNA
atgagaattattttagcaggaaccggaagtgcagttggaaaaacaacaatagctaccggaataatgaaagcattaagtgaaaaatataatgttcaaccgtttaaggttggaccagattatattgatccatcttaccacacattagctactgaaaatatttcaagaaatttagattcgttttttatgaaagaaggtcaagttagggattcatatcttaagggaatggaaggaaaagatattgcaattattgaaggtgtaagaggactttttgaaggaatagattctgtaaatgacattggaagtacggcttcaatagcgaaatctctaaaagcaccagtaatattaattattaattctagaagcttggttaaaagtgcagcagctatagttttaggatttaaatcactagatcctgaaattaatattgcaggagttattttaaataaagttaaaaataaagcacattatctgaaaactaaaaaatcaattgaagagataacaaataccgaggttattggtggaataatccgtgatgacaatatttccattgaacaaagacatttaggccttgttcctgcccgtgaaagagaaagctcacttaaatttattgaattatggtccgaagttattaaaaattcaattgatttggatagattaattgaaattgcaaaaactgctccaagaattacatccaatattactcctatctggaataaattaaataaacagcaggtaaaaataggtgttgcttatgatgaagtattcaatttttattataaagaaaatattgaatcacttgaagcaaataatgctaaaataaaatatttttcaccattaaaggatgaagagctgcctgatgttgatggaatatacattggtggaggatatccagaactattttcaaaagaacttaatgcaaatcaaaatatgctatcacaaatcaagaacttccacatggaagacagacctatttttgccgaatgtggtggtttaatgtatcttatgaactcaatacatgaagatgcagtggtaaatatatacccttataagtcaattctaacagatagagtacaagcattaaaatacactatcgctgaagttaaagaagataacattatttctaaaaaaggtgaaaaattcaatggtcatgagtttcattactcaaaagttcttgtaaatgacaataatattaaaaacaaactagcatttgagatattaagagggaaaggatcttataataaccaagacggatttatggaaagaaatacgcttgcaagttatgttcacacccatgtagccgctatgccaaacttcggtggaaacttctgtatttcttctctagaaattggaggataa

SEQ ID NO: 8091 - DNA, 1062 bp, Methanobrevibacter gottschalkii
  source 1..1062: mol_type = genomic DNA
atgaatattagaaaaattgattttttcaatccattaattgttgtagttgcaattgtcgtttttttattaatggggtatgccggatcgtttgactacagatttgaagatcctctcaacatgaatgtatttttaacaattatttttgcatgcattgtttttgcaactggctttttagtcatggaaaataaaattattgttgataagactaaggaaatcaattttatttctgaaaggttattaataattcttgttttaatagctttgatattacagactctaaatataatcttaattggaggtattcctctttttaatagtgttttaaagtcaaattcaacaacaaatatttggagaatagcatatccgctatttttgataatgataaaccttttacttgcaaaatattataataaaaaatatttaattttagttgctcttggagctttaatatttggtcttaacggatatagaacatctgttttgggaattttaggaagttcttttattaccctatattatttgaatagaatatctaaaaaaataggaattttattcatagcaataatagctattggatttatggcaatcggatatattgcctcccaatcaatagctaatcagcattggacattgaatcctggtcaattagtactgtatagagcagcatttaccctagaagtttttgaaaaaataattccccttgccggttcaacaaatggacatattttaagtatgattttctcatctggaagccccagaacatttataggcgaatatgtcctgcactacaatgtttgccttacttcaacattattcggaccagttacccttgatttcggattaattggccttgcaattcaaatgttatttatgggagtatttattggaataatatataaattaaaagaaggaataggagttggagtttactccattattttaacacacacattaatttggatagaaacaggtcccacagacattatgatttggtttttatatttccttggattaatcttaataataattaatcataattatattaaattaaacaaaaattaa

SEQ ID NO: 8092 - DNA, 903 bp, Methanobrevibacter gottschalkii
  source 1..903: mol_type = genomic DNA
ttggaaaaaccacaattaattaattttatagctaaagtaatggaggactctggttttaaggtttataagaattttaaaacttctcagagagttatagatatatatgctattttacctactacaattggcgattttggtgttgttgtagcatgtaaaaactatgataaagattttaaaattggagtcgatgtattaagggaaatggaagaagttcaacagagtattaaagcatctaaggtaactattgtttcttcatcttatttttcagatcaagcaaagaactatgctcttagaaaaaacattaaattagtagatagggataatttacttgaacttgctaagaaatatcaggacaggacttcacaaactacattggataatactccttatgatggaggagcatcccaatatattgaagatgaatatcctgaatatacttatgatgcttctgatatggagtatttgatgagaagaagggagcaaaatcctgctgtttataaaaatacattgtataggcaaatcgatgaagataggcacactggattttcatcaattttaaataggggaagttcaagaaatagtagtttatccggtgtaactaatttatataattaccaatccagaaaaagtacttttggacaagattcattgttgtttaatttagttaaaaatccaattgttcttattattttagttgtagcagtttcatatatcatttcttatattgcaggtaatctattaaaagtagatgctggaataagtggattaattgagatgattgtggcattattcctttcatatggtttatcattgtatactgatagaaatagggattttattgttaaaggaacattcatattctttatttcattaattattttaattatattaatttttgtttaa

SEQ ID NO: 8093 - DNA, 777 bp, Methanobrevibacter gottschalkii
  source 1..777: mol_type = genomic DNA
atgaatgcattaataagtaacgatgatggaataaccgcttcaggaattctagcttcaaaaaaagccatggaaaatttatgtgatacatacgttgttgcacctgaaacacaacaaagtggaataggccatgcattaacattatttgaaccattgagagtaaatgaatatactttaagagatggaagcatgggttatggtgtgaatggaacaccaaccgatgctgtaacaattggattatttgaaatattagataaaaaaccagacataatgatttctggaataaatactggttttaatattggaaaagcagaattaacaacatccggaacattaggagcagcaatggaagctgcaagttttggaattcctacaatcgccatttctcaagaagtaacacaggacgatgttaaatttgaaaatggtaaagtagaagtagattttgattttgcagttaaaatgcttaataaattagcaaaaatagtattaaaaaaaggattacctgaaggaattgatttgctaaacgttaatattcctgtaaacccttcagatgatgaatttgaagttgtagaattaggaaataggatgtattcccctgtagtcgaacagcgcttagatccccgtggaaaaccatactactggattgatggcgaaccctatgagtttaatgaacctggaagcgatggttatgaattaaaaataaaacaaaaaactacaattacaccattaaaaattgatttaactggtgatatgagcttaataaaagaatggttaaagtaa

SEQ ID NO: 8094 - DNA, 144 bp, Methanobrevibacter gottschalkii
  source 1..144: mol_type = genomic DNA
atggcaattaatcaattagaaagtaatttagaagctattactcgtacaatagctcaattaaaaagagatggatgtactgatgaaaaaattttaaatgaacttagggaagaaagggataaaatacttaaagatttaaatttataa

SEQ ID NO: 8095 - DNA, 204 bp, Methanobrevibacter gottschalkii
  source 1..204: mol_type = genomic DNA
atgaatcaagataaagataatgtaaataaaatgtttaaacaatttaagaataaatatgtaactgttgatttaagaggaaactatcaaagcgaaggaaaaataatcgcaattgacaattacttaaacatcatccttgaaaatgaaaatggtttggaaactgtcaaaggtggaaatatcatttttattagtgtaaaagaagaataa

SEQ ID NO: 8096 - DNA, 1008 bp, Methanobrevibacter gottschalkii
  source 1..1008: mol_type = genomic DNA
atggtatttattggaatggaccatggaactactggaatctctttttgcataatgtctgatgatggcgaggtactcgatgtttttaaattaggaagagaagaaagtaaaaaaggtttagtttctgcaactgaagaaataacaaaacgtgttgatctggactctgtaaaattaatggctatcacttatgccatgggtgatggaataaaccagattttgcctacagacaaagttgaagatagaggtattttatctattgatggagctggaaaagtaactggaggtggaacttccgtattttccgaattagaatcattggatattgattcaatcatgattcctggtcttcataaagactctaattctttaaatgaattatttagagcagcttattctcatcaggctagtcctgaaaaagtaagtatttgttataatggattaaaggaaacaggatggtctaattttattgtagcagatatttcatctaatagtgtcgatatactgattgaaaacgggaaaattaaaggtgctatggatgcatgtcttggcgctatgggtgttgttcatggacctattgatttaaaaatgattagggatattgatgaaggaaaatcttcggctaatgattgtttttcacatgctggagcaattaaaattgcaggaattagtggtaaagtcgctaatgtgaaagatgtacttttagaaaagtatagaaatggggatgaaaaagcaaagttagctattgatactttaatcatgactgttgcaatggaaattgctggtttggatgtgatatgtgaaaatgaaattgagggaattgtacttactggatctattggaagtgcaattgaaccatttaattttgaagatgaaattaataaatatttcaaaaataagtatcatttaaaagtaatttctaaagaatctggagctattggtgctgctcaaattgcaatggatgtttataatggtaaagaagaaatattgggtattgaagttaatatttcctaa

SEQ ID NO: 8097 - DNA, 993 bp, Methanobrevibacter gottschalkii
  source 1..993: mol_type = genomic DNA
atgaaaatgtattacgatgctgatgtaaatacagatgctcttaaaggaaaaaccatagctgtaatcggttacggttcacaaggcagagcacaatctagaaatatggctgatagtggagctaatgtcattgttggtgtaagaaaaaatggaagttcttggaatttggttcaagaagatggcatgactgtaaaaactatcgaagatgcagcaaaagaagctgatattattcacattttactccctgatgaaattcaagaaaaggtttacaaagaacaaatagctccttatgtggaatctggtaacaccatttcattttctcatggttataacattcattttggtttaattgatcctgctgctgatgtaaatattgtaatgtttgcacctaaagggcctggatctatggtaaggagaacttacgaagaaggatttggtattcctggtttagttgcagtggaaagagatgctactggtgatgcattacaactcgcattaggtatggcaaaagcatgtggtttaactaaagcgggtgttttagaaactactttcaaagaagaaactgaaactgatttatttggtgagcaaacagtattatgtggtggtattactgaattgatcaatgctggatttacaactttagttgaagctggttatcaacctgaaatcgcttacttcgaaacttgccatgaagtaaaactcattgttgatttaatctatgaaaaaggttttgctggaatgtggaatgatgtaagtaacactgctgaatatggtggattaactagaggaaaaaccatcatcactgatgaagcaaaagaaggtatgaaagtcgctttaaaacaaatccaagatggaactttcaaaaaacaatttgctgatgaaaatgctactgatggagctaatttaaaagaaatgagagctgctgaaggtcaaaaagaaatcgaaattgttggtgaaagattaagaaaagcttgcggattacaaaaagatgattaa

SEQ ID NO: 8098 - DNA, 528 bp, Methanobrevibacter gottschalkii
  source 1..528: mol_type = genomic DNA
atgagtattttagaaaatgttttagaagataataagaaatttgttgaaaactttgaaggcgaagaaatgtcccaccatgcacaaaaaaatttagctatcttaacttgtatggattgtagattaattaacttttttgaacctgctttaggtcttaaaagaggggatgcaaaaatagtaagaaatgcaggaaattccatcgttggagaagatgcaatcagatcaattggagcggctttatacaacctcggagctgaagaagtgttagttgttggtcatactgaatgtggtatggcaggtgcagatgttgaagctctaaaagaaaaaatgcttgcaagaggaatcaaagaagaagacatcgctaaatatgatttgtctaaatggattggcggatttgacgacgaagaggaaaatattaagaatgttgttgaaaaaattaaaaaccacccattaatccctgatgtgcctgtacatggtcttattttggatgttgttactggtgaattaaaagttttagtagatggttactaa

SEQ ID NO: 8099 - DNA, 486 bp, Methanobrevibacter gottschalkii
  source 1..486: mol_type = genomic DNA
atgaataaagaatatcatgttatatccacattggtagaggataggccaggggttttacaaaaaattgcagggttatttaataggagaggctttaacattgacagtattactgttggagcatctgaagttgaaggattatctcgtatggtaattagtgtcaatgctgataaacaaggccttgaacaagttacaaaacaactaaataaattagttgatgttataaagattaaagatattacacaaaatgcagttaatagggagttatgccttattaaagtgcatattcctaatgaaaaagcaagagctgaaataatgcaatatacaaatatttttagagcaaaaatagtagatgtttctgaagaaaacttaattattgagcttactggagatataggaaaaattaatgcgtttatatctttaataaaaggttacggaatcaaaactatttcccgtaccggccttaccgctatggctagaggtgtataa

SEQ ID NO: 8100 - DNA, 1698 bp, Methanobrevibacter gottschalkii
  source 1..1698: mol_type = genomic DNA
atgagaggcggagaagcgataattcaatccctaaaaaacatgggggttaaaacaatatttggttatccgggtggacaaaccataccgttttatgacatgttatatgactcagacatggaacatatattagtaagacacgaacaatgcgcagctcatgcagcagatggatatgcaagagcttctggccgtgttggtgtgtgtttagcaacttctggtccaggtgcgactaaccttgttactggtattgctacagcatatatggattcttctccaattgtggctattacaggacaagttcctactcatttgattggaaatgatgcattccaagaagctgatattattggaattacaatgcctattactaaacatagttttcagcctaaaaatccaaattatattccttcaatgataaaatctggttttgaaattgctgcaagcggaagacctggacctgttgtaattgatgttccgaaagaagttcaagaaggtgaactaagtgattttgatgattcgttaattgatacaccgggttacaatcctaccactaaaggtaaccttagacaaataaggaaagcttgcaatttgattaaagatgctaaaaaaccaatgattttagctggtgcaggtgtcattatatctggtgcatgttgtgaactaaaaaaacttgcacatactattaatgctccggtcatgacttctcttttaggtaaaggagcaattgatgaaactgatgatttggcgttaggtatgcttgggatgcatggaagaaaagtttctaatgattatattaatgaatcagatttgttgatagctattggtgttagattttcagatagaactactggtagattagatagttttgctcctgatactaaagttattcatattgatattgatcctgctgaaattggtaagaatgttgatgttgatttaccaattgtaggggatgcacataatgttttaacttcattgaataattatctaaaagaatataaagtttccagggatgtaactgaatgggcaaacatgattaaagaaaaaaaacaaaaattacgtcctagagtttcttattctgatgttcccttaaaaccacaaactgttataaaagaaatagctgaggcattaacttcagattcaatattaacaacagatgttggtcagaatcagatgtgggcagcacatttcttcgaaactcaaaagccacgtaaatttatctcttcaggtggtcttggaactatgggatttggattcccggcagccattggtgctaaagtagcttgtcctgaatatcctgttgtatcacttaatggtgatggcggatttttaatggtttgtcaagaattagcaaccattcgtgaatatgatttgcctgttattgccattgttttggaaaatagaactttaggaatggtatatcaatggcaaagtttattgtataatggaagacactcacaaactttacttggtaatagtccggactttgttaaattagcagaaagctttggtgtaaatggtgttagaattaccgaacctggtgaaactaaaaaagaagtagcttccgcaattaaagataatgaaccagttttattaaatattgtaattgattctgaagaagcattacctatgcttcctcctggagccggaattagtgagatgattggtgaatacaaacttgagaaggatgtgattagatga

SEQ ID NO: 8101 - DNA, 333 bp, Methanobrevibacter gottschalkii
  source 1..333: mol_type = genomic DNA
atggaactaacaaaatatatttgtcacagaaaaccagagcgaagtttccacataaaaaatcatcaattcccagtctgtgcaagatgttgtggattttacacaggattaattgtttatttaatttgttatcaattttacaatcacaattatgatttaaatatgctattaatttctatgattcttatgattcccgttgcaattgatggtttcacacaatattttagtttaagagaaagtaagaacaacttaagatttataacaggtttaattggtgggattggtttaataatctttttaaaaataattataaggtggattttatatgtattgtag

SEQ ID NO: 8102 - DNA, 909 bp, Methanobrevibacter gottschalkii
  source 1..909: mol_type = genomic DNA
atgggtagtttattatcagttacagacattaaagatgatgttaaatatattttggagttagcctctaaaattaaagcaggtgaaattgaagaaaaaccactaaaagataaaacattagcaatgattttccaaaaatcatcaacaagaactagagtttcttttgatgttggaatgtatcagttaggtggaagagcaatttttttatcttctaatgatttgcaaatgggtaggggagaaccaatttctgatactgcaaaagttttaagccgttttgttgacgggataatgattcgtgctattgaacacgatgatgtaattgaattagctaaacactctgatgttcctgttattagtggattaactaatttagaacacccttgtcaggcattggctgacatgttaacaatcaaagaacattttggtgtttggaaaggtaaaaaaatctgttttgttggagatggaaacaatgtatgtaattcccttttattgattgctcctctccttggtatgaatatgtctgttgcttgtccaaaaggttatgaaccttctgaaactattttaaaaactgctaaagagtatgctatggaaaataatactgaaattattgtaagtgatgatattggtgttgcattggaaaatgttgatgtagtttatactgatgtttgggtaagtatgggtgatgaagctgaaacaaaacaaagagaaatagattttgctccatttcaggttaattctgatttaatgagtatagctaatgatgaagctatttttatgcactgtttgcccgcaattagaggtcaagaagtaactggtgatgttattgatggaccaaaatcagttatttttgatgaagctgaaaacagaatgcatgcccaaaaagctgttttatattattatatgaaggattaa

SEQ ID NO: 8103 - DNA, 834 bp, Methanobrevibacter gottschalkii
  source 1..834: mol_type = genomic DNA
atgaataatatgcctaaagatttagataaaataaaatttgagttatctgagaaacttgagtttttaaaagagaatgccgagtcggaagaagaaatagaaaaattaaataattttgcttcatatttggctgataaatattctcagattgatgatgaagatataaaaactgaaaaattaaacagaattaatacaggtctaagttattatcaacgttttaaaaaggctttagagaaaaatatagatattgatcctggaagattaatgggtcttacagacggaatctttggaatggtaatgactcttttggtatttggtattgcacttccagaattacagataacatattattccacatttttgtcatttttttcaagtttggctccaacaattggagttactgttgtcagttttgttttattaagttctttttggatttatcatcatgaatttattaaagtgaataatcttaatattccttacttatggttgaatgttttctttttaatttgtatatcatttgttccatttacaacttcattaattggacattactcacatttctttttatctgaagtcatttttggaattaatattctattaacaataatttccttcttattaatgtatcattatgcaaattcaatgcattttcttgaaaatgcgccttcaaaaaaagagcgaaattatgtttatcaaacttttggaatgataatgggattaaccattgttgtgaacctcttggatttccatgtttcaagttattttatttatttattcttactagttcctgtaatatctacaattagggatattagatttaaaatgaatgaatag

SEQ ID NO: 8104 - DNA, 1311 bp, Methanobrevibacter gottschalkii
  source 1..1311: mol_type = genomic DNA
atgaaggttttagttgttggaactggtgctcgtgaacatgctattgctgatgctttaaaagaggatgtggaattatactgttacatgagtaaagtaaaccctggaatgtctaaaattgctgaatttaaacaaggtgatgagggtgaagttgaaaaagtagcagaatatgctgttgaaaaggatattgatattgcatttattggtcctgaagctcctcttggaaaaggaattgtcgatgaacttcaaaaaaatgggatcagttgtgttggaccaactcaaagtgcagcaagaattgaaactgataaatcattcatgagaaaactttttgaagattataatattgatggatcacttgtttacaaagtatttgataactctgctgatgtttctgcatttttagatgaatttgagagggatgttgttgtaaaacctgttggattaactggaggtaagggagttaaaattgttggtgatcatttaaaagataatgaagaagcaaaagaatattcatgtgaagtaattgacaatgtaatgggtggatttgctcaagtaattattgaagaaagattaattggtgaggaatttacaattcaggcattttgtgatggtgaacacttagctccaatgcctgcagcacaagaccatcctcatgcatttgaaggggatgttggagcaattactggtggtatgggatcttattctgatgttggaggattactgccttttttaactcaaaatgattatgatgatgctgtaaaaattatggaatctactttaaaagctattgctaaagaagctgaaccatacaaaggtattttatatggccaattcatgttaactgctgacggtccaaaactaattgaatacaatgcaagatttggagatccagaagcaatgaatgttttaccattacttaaaactccattaattgatgtttgtcaagctattgttgatggtaacttagataaagtagaatttaaagataaagcaagtgtatgtaaatatgtagtgcctgacggatatcctgaaacagaattcgctggagatctggttgatgtagatgaagaatctatcgagaaattaggtgctaaagtattttatgcagcagtttctgcagaagatgatggtattcacttatctggctcaagggcattaggtattgtagctagtggtaattctattgaagaagctgaaaaaatagctgaaaaagcatgtgaattcgttaaaggtaatgtttaccatagaagagatgtcggtacaactgaacttgttaacaaacgtgttgaacacatgaaagaaattttaagctaa

SEQ ID NO: 8105 - DNA, 1365 bp, Methanobrevibacter gottschalkii
  source 1..1365: mol_type = genomic DNA
atggaaaaaaattcaaatatagaaatgattacaggagatcctaaaaaggcaattaataaattatcaataccaattatcgctagtatgtttttaattttcgccaacaatattattgacagtgtttgggtagcaggacttggtgcagatccattagctgcactaggatatgtaacaccattatttatggtgcttatcggaattggaaacggaataggtgctggcggtaactcattaatttcacgttatattggagctgaaaagagacagtcagccaataatgccgcaattcacaacttaattttaggaataattttatcaatagcagtctcaataattttacttacatttttaaaaccattattaattgttatgggagcatcagctgttttaaaatacgcaatggattacggaattgtaatttttgcattttcatttgctatgttacttccaccaatcttcggaggagcattcagagcagaaggagatgtaaaaagagcaacaataccccttgcaatttcagcaataaccaatatgattattgacccaattttcatttatacattcaatttaggggtcgcaggtgcagcatgggcaactgttattgcacatatattcgcagtagctgcaatgctttattggatgcttgttaaaaaagatacctatcttaaatataatcgtgaaagttttaaaaatgatttaacaatgtataaagatattttagttgtgggtatcccagccagtttagaacaattaatcttatctgcattaacaatagttgtaaatttcatgcttacaattgtatcaggacctgttgcagtagctgtttatacagcaggttggagaataataaacatcggaatgcttccggcaattggagttggaactgcagcaatatcagtttcaggagtagcatatggagctcgtaaatatgaaaatttaagaattacagcaagatatgcagttaaagttgcattaatagcttcaattattgtttgtattatattaaatatatttgcaaatcaaattgcattcatattttcatattctgaaagtagtgctcaattagaaccattaattgcaagtttcttacaaattatgtgtttatttatattatatgtaccatttggagcaagtgcaggaaatgtattccaaggagttggaaaaggatccatttcatttattttaacatcatttagggaatttgtattagtattaatctttgcatatgtacttggatttaccctcaatatgggggaattcggaatatactgtggaatgcttctaggtggaggaattggttcattaatatgttatatttgtattgaactatatatcaacagattaatgaggagtattgaatcatga

SEQ ID NO: 8106 - DNA, 417 bp, Methanobrevibacter gottschalkii
  source 1..417: mol_type = genomic DNA
atgaagtttaatgaaaataaacccagtgctgcatttatttcaataattcataaagaacatgctaaatacattaacgaaaatgtaaaggatgaagacttaagctttggcctccatccaattttaatcataatatatgaaaatgaaggaataaatcaggaaaaattagctgaagtattgcatttaaatgaaagtacaataacaagaaatcttaaaaaacttgaagataaaggatttattgaaagaattaaaaataaaagaaaaaaaattattaaattgacatctaaaggtagaaaaacagctcaaaaagttataaattacgattacaaatgggatgaaaaattaaaacaaaatttaacagaagaagaatatgcaaatttcttagaagcacttagaacaatttgtgaggaattactatga

SEQ ID NO: 8107 - DNA, 534 bp, Methanobrevibacter gottschalkii
  source 1..534: mol_type = genomic DNA
atgaatcaaacaataaatgacttaaaaagtagaagaagcatcagaaaatttaaagacaaacaaatcagtgacgaagatttaaaaactattttagaaactggaacttatgcaccaactgcaagaggaatgcaatcccctaaaattgttgtgattcaaaatccagaaactattaaagaattatcaaaatggaatagaagttatttcccagttgatgttcccgaagatatggatccattttatggagcaaaaacaatattaattgttttagcagatagcaaaatgccaacatttgttgaagatggtgctagcgtacttgcagttcttgtaaatgccgctcatgcaatcggtgttggatcctgctggattcacagagctcgtgatgagttttcatctgaaaaaggaaaagcattacttaaaaaatggggcattcctgaaagttacgaaggaattggccatgtagcccttggttatcctgacatggaatcacctaaaccattaccaagaaaagaagattacatccactatgtggactaa

SEQ ID NO: 8108 - DNA, 1701 bp, Methanobrevibacter gottschalkii
  source 1..1701: mol_type = genomic DNA
atgtattttgaaattgaaaaacaagctattgatgctattaataaagcattagatcaatatgatgtagaagttgatagaaattttaaattagaatttccacctaatccaaatttaggtgatttagcaagcacaattgcatttgcacttactaaaaaattaaaaacttcacctcctgaggttgcaaaaggtttagttgagaaaattgaagtgcctgaaattttttctaaagtacaaaattttggaccttatgttaattttttcattgattacagtaaattctctaaattattattggaaaaagttgatgaaaattatgggcaacttccagcatatggtgaaaagattgtattggaacacacttcagcaaatccaaatggaccattacacattgggcacattagaaattctatttttggggattctctttcaagattgctaaaattagctggaagagatgttataactcaatactatgtaaatgatatgggaagacaaatagctattattgtgtgtggtataactgaatgtggtttaaaaattgaagattatgatggggacaaaatagaccataaaattggaaaactatacttcgatgcaaacaaagctgttgaagaagatgaggctttaaatgataaagttgatgaattaatccgaaaatatgaagaaggctctgataaaaaattaaataaaatcttcgaagatgttgtagctaaatgtatttctggaatgaaagagtctcttttaagaatgaatattgtccatgatgattttgtatgggaaggtcaatttgtaagaagtggggaagtcaataatcttgtaaattacatccaaaaagaaggatttacaagagaagaagatgtactgttcattgatttaactgattttaatattgataaagagttcgtacttagaagatctaacggaacttctctttattctacaagggatttagcttatcacaaatacaaagctactttaggtgatactgtgcttgatattttaggttcagaccataaattagcagctaaacaaattaaagttatctttgaagaaattttaagacaaaaggctcctgaagtaatcttttatgaatttattacacttccggaggggtcaatgtctactagaaaaggtaaatttgtatctgttgatgaattaattaatgaggcagtttcaagagctcatgatgaaatcaaatctagaaaccctgaattaaatgaagaggaaattgcaccgatggctgaagatattggtgttggagcaattaggttctttattgctaaattgtctcctgaaaaacacctgacattcaaatgggatgaagctttaagctttgaaagaggctgtgcttctattcaatatgctcatgcaagggcatgcaaattacttgcaaaatcaggtaaagatattaattctttaactgttagtgatgattggattcctaatgaggatgaacaggaattagtaaggcaaatagctaaattcccacaagttgttgaagattgcgctaacaaacaaagagttcataatattactcagtactgtcaagatttagctggttcatttaataaattctacaaatcacaacaagttattgggtctgatttagaaaatacaagactaattttagttgatagggctaaaacaactattaaaaatgctttagatattttaggtgttgttgcacctgaaaaaatgtag

SEQ ID NO: 8109 - DNA, 426 bp, Methanobrevibacter gottschalkii
  source 1..426: mol_type = genomic DNA
atggaaattgattataaagaaattgcatcatatgtagttatcctcattattgttttaattgccgctcaacatcttaatgttgttgtatctggaagtatggaacctgccttttataggggtgacattgttttagttgaaaaagcagatttctttggtattcatgagtttaatgcaagtgatgtcaaagttggtgatgtagttgtttatgatgcagcttggtataaccagccagttatccatagaattattaatattacagatattaatggaactacgatgtatgtaattaaaggagataataataatgctcctgacccatattatgttacttcaagtcaaataaaagaaaaagtagtaacagttgatgataatttagtcgtaattccaaaaattggttatctttccctttggttaagagggttataa

SEQ ID NO: 8110 - DNA, 1275 bp, Methanobrevibacter gottschalkii
  source 1..1275: mol_type = genomic DNA
atgaattctgaagaattattcaatgaatctaaaaattattttccggggggagtaaattctcctgtacgtgcttttaaaccttatccattttttgttaaaaatgccggaggttcaaaacttactgatgaagatggaaaaagttacattgattattgtttagcatatggtccgttaattttagggcatgctaatcctaaagttgtaagggaggtttctaatcaattaactattggtactgcttatggtactccaactgaaaatgaaattactcttgcaaaagaggttattgatagaattccatctgctgaaatggtaagattctgtaatagtggtactgaagccactatgagtgcaattagattggcacgtggttttacgggtagagataaaattgttaaatttgaaggtgcttatcatggagcacatgattatgtattggttaaaggaggatctggtgctgcaactttgcctgatagtgcaggtattccagttgatactacaaaaaacactttatctgttccatttaatgatgaagagattttaacagatttaattgaaagagaaggtgacaatattgcttgcattataatggaagttgtcatgggtaatgttggttgtattgaaccaaaaccgggatttttagaatttgttagaaaaattacagaagaaaataacatagttctaatttttgatgaagttatcactggttttagagcttccagagggggagctcaagaatattatggagtcactcctgatttaactactcttggtaaaattgttggtggcggacttcctatgggagctttttgtggtaaaaaagaaatcatggaattaattgctccaaatggtcctgtttatcaggcaggtactttttcaggaaatcctatatctgtacaagcaggaatatctactttaactcaattaaataatgcattttacaaagaattagaaaggaaaggtaattttcttagaggcaatattcaatctataattgatgatgaagaatataatgttcaaccggttgggttttcatccatgtttcaaatttatttcaatccagcaccagtttataattatgctgatgctcaggaatctgacagaaaaaaattcttaagatactttaaatcattattaaaacaaggtgtattcattccaccttcccaatttgaatgtaattttatttcaaatgctcatagtatggaagatttacaaaaaacttcagatgctattgaaatttctttacatgaagcttttaaaaaaagaagaaggtag

SEQ ID NO: 8111 - DNA, 630 bp, Methanobrevibacter gottschalkii
  source 1..630: mol_type = genomic DNA
atgtcagacaaaatgttcatgggtgcatcaactaaacaaggtttggatattgctaataaaagtagggaaattatccgtaaccttattggagatgatgtcaaagatttaaatcctgctgaaagggatattgttgagaggattgtccactcaacagctgatcctgaatatgcaaaattagtaaaaattagtcctgattttgtagatgcagctatggcttccctaaaaaataaagaaaccattttaactgatattaatatggttaaatatggtattacaagatatgaaggggaagtagagtgttatataaaaaataaagaagttattaaaatagctaaagaaaatcaaattacaagagcagctgccgcaatgcgttatgctgctgataatggttttgagggtattgtggtttcgggcaatgcgccaactgctgtttttgaagctatggacttatatgaaaaaggtgaaatgaatcttaaagctattgttggagttcctgttggttttgttggagctgctgattcaaaagaagctctacataattctaatattcctaatattattgttgaaggacctaaaggtggaacaccgatagcagttgcttgtgtaaattcattaatacaacatttataa

SEQ ID NO: 8112 - DNA, 1206 bp, Methanobrevibacter gottschalkii
  source 1..1206: mol_type = genomic DNA
atggaagaatatgaaatagctgtaattggtggaggaccggcaggaataatggccgcaatagctgcaagtcaaaattcttcaagcgtaatattacttgaaaaaaatcctaaattgggtcgtaaactcctaactactggtggagggagatgtaatattacgaatgctaaaccaataagagagttattaaaattctatcctcaaaaaaattttttaaaacacgctttttatacactttcaaatgaaaaattactatctttttttgagaataaaggattaaaattcattgaagaagcaaataatagaatatttcctgaaactgaaaaatctattgatatcttaaaaattttaactgattacttagaagatataattataagttataacttcgaagttaaaagcatcgatgaggattttgttataaatgataagttaaaagcagataagataattattgctacaggtggtataacatatccgaaaactggttgcagcattaaaaactattctttaacaaaacagcctattactgatattaaatatggactatcaccattaattacaaaaaaagatttgtctgatattgctggtataacattatatgatgttattgtaagttataagaaaactaaagttaaaggtaatgttttaatttcccattttggtttaactggtccggcaattattgatttaagtaattttatatcagaaagtataagttataacttattggaaaatgataattgtgatattaattttgaaatagctattgacttatgccctgatttcagccgtgaaaaattacaagaaaaattcaatcaagactttcaagttaaaggaaaaacgatgattaaaaattatttaaaattatttttaactaacaacttcattgatttctttttagacgaaataaatcttgacagggaaactcaattatcaagaattaataaaaaaagtaaaaatcgtttaattaaaaatttaaaaagttttaattttaaaataaaaggttttaataatgatttggctaaaataacagttggtggtattgatttaaataatgttaatccaaaaacaatgcaatcaacaatcatacctaatttatactttgcaggtgaagttttagatttacatggacctacaggaggttataatttaaaaattgctttttcaacaggttatctggctgggttatctgcaagtgaaaaataa

SEQ ID NO: 8113 - DNA, 1320 bp, Methanobrevibacter gottschalkii
  source 1..1320: mol_type = genomic DNA
ttgcaaggtttattaaatgactggagaagaactcattatgctaaagaaactacccctgatattgcaggtagtgatgttaccatcatgggatgggtacatgaaatccgtgatttaggcggtattatttttgttgttatccgagatgttactggtagagttcaattaactgctccaagtaaaaaagtagaagcggaaatattagaagatattagaaaattcagaaaagagtcagttgttgctgttagaggattagttcaagaagctccaaaagcacctaatggtgttgaaataattcctaatgaaattaaagtattaaacttatctaatcaacctttaccaatggatcctactgaaaaagttcaggccggaattgataccagattagattcaagattcattgatttaagaaaagaaaatgtttcagcaattttcaaaattaaaggtcaaatgttccatactattagagattatttttataataatggatttcatgaaattaatactcctaaacttgtagcttccgctactgaaggaggtactgaattattcccaattacttactttgaaaaagaagcattcttaggtcaatctcctcaattatacaagcaaatgatgatgggtgctggaatggacaaagtctttgaaattggtcaaattttcagagctgaagaacatgatactttaagacacttgaatgaagctatttccatcgatgcagaagcttctttcatggacgatgttgatgtaatgaaagtattgaatgacatgcttatcaacgtattaactgatgtcaacgataaatgtagtgatgaattatctattttaggatatgaattagatgtgcctaaaggaaatttccctgttgtaacttatgatgaagctgttgatattgtaaattcacgtggagttgaaatggaatggggagaagatttatctcgtgaagctgaaaaagcattaggcgattcaatgggtggattttattttttaactgaatggccgtctgcaattaaaccattttatgtaatgcctcaagaaggagatgaaaaatactcccatgctttcgatttaatgtataataatttagagttatcttctggtgctactcgtgttcatcagcatgatttacttgtaaaacaaatagaagaaagaggattaaatcctgatggatttggaagttatcttaaagcatttgaatatggtatgcctcctcatgcaggttggggtttaggtgctgatagattaactatggtacttactggctctgaaaacatccgtgaatgtgtactattcccaagagacagacacagattaactccttaa

SEQ ID NO: 8114 - DNA, 1284 bp, Methanobrevibacter gottschalkii
  source 1..1284: mol_type = genomic DNA
atggaaatattaaaatattctgatattgatttagttgaaactataaaaagatcagaagaagatgtaaataaagttttaggtattgtttcagatattttggataatgttaaaaacaatcatgatttagctattcgtgagtatactgaaaaatttgatggagttacaatagaaaatttaaaagtatctgaagatgaaataaaggaagcttatgatactttagatgatagtttacttgttgctttaaaacaagcggcatcaaatattgaaaaatttcataaaaaacaaattcctcatgaatgggaaattgaagtaaatccgggtattgttgcaggtcagattgtaaggcctataaactctgctggctgttatattcctggtggaagagcagcatacccttcatcaattttaatgaccgtcattcctgctaaaattgcaggtgttaaaaaggttgtatgcgttactcctccgcaaaaagatggtaaaattttagatgctatactggttgcagcagacattgccggtgctaatgaaatatacaaagttggtggagcacaagctattgcaggtcttgcatatggaactgaatctattccgcaagtagaaaaaattgtgggcccgggaaatatattcgttactgcagctaaaaaattagtgtatggtcaagttgatattgaattccctgcaggaccatctgaagtgttaatattagcagatgaaactgcaaatccggaatttttagcaactgatatattagcacaagcagaacatgatcctaatgcatcttgttttttagttactgactctgaaaaattagctattgaagttgatgaatttgtaaaaaaattaactgaagttgctccaagacgtgaaattattgaaaaatcattatctaaaagtggaaaaattattatcactaacacttttgaagaggctatttatatcacaaatgaatatgctcctgaacatttaatcatatctactaaagatgatgatgatacattatcacacattaataatgctggttctatctttttaggttcttattcaccagtagcagcaggagattatggatccggaactaaccatgttcttccgaccggaggtggagctaagatgtattcaggattatctactgaagcatttattaaaaaacccactgttcagcgaattactaaagagggtcttaaagaattatcaaaaacttcggtacctattgctgagtatgaaggtttctttgaacatgcaaactcatttaaaacaagacttaaagatgattggaaatag

SEQ ID NO: 8115 - DNA, 1650 bp, Methanobrevibacter gottschalkii
  source 1..1650: mol_type = genomic DNA
atgaaaagtgatagtgtaaaaaaaggaattcaaagagctccacacagatctcttttaagagcttgtggtcttgatgatgatgattttaaaaaaccgttcattggtatagcaaatagttttacagatattgttccgggtcatatccatttaagagaacttgttgaatttgtaaaagaaggtattattgctgctggtggtattccatttgaatttgatactatggcaatttgcgatggaattagtatgaatcatgaaggcatgaaatattcacttccttcaagagaaattattgctgctacagttgaaagtatgactaagggtcatgctttcgatggacttgtattaattccaagctgtgataaagtagttcctggaatgattatgggtgcaactagagttaatgttccatctattgttgtaactggcggaccaatgatttcaggtgaatataaaggtaaaagtgctgatttaattactgtgttcgaagctgttggtgctcattctgcaggaaaaatgtctgaagaagaagtttatgaacttgaaaaatgtgcctgtcctggtgctggtagctgttctggattatttactgcaaatacaatggcatgtataactgaaactttaggtttatctcttccaacttgtgcaactactcatgcaagaacagaagagaacaatcaaattgcattagattctggtaaacaaattgttaaacttgttgaagagaatattaaaccatctgatattctgactcaagaatctttcaacaatgctatagctgttgacatggcattaggaggttcttctaatactgctcttcatattcctgctattgcaagtgaagtaaaagatttaaatgttaatttagagttatttgacgaaatttcaagaaatgttcctcatattgctcttatctctcccgctggtgaagattcaatgatggatttacatttagctggtggaattcaagcggtattgaaaacattaggtgataaaattgatattaatcaattaacagtaactggtaagacaattaaagaaaacttagaaactgttgaaaataaaaatactgatgttattcatactttggataatcccgtccatgaagatggtggaattgcaatcttaaaaggtaatcttgcaccaaatggaagtgttgttaaaaaaggtgcagttgctgatcatttaatgcatcttaagggacctgcaaaagtatatgattgtgaagaagatgttacaaaagcaatctttaatcatgaaattaaagaaggggatattgttgtaattagatatgaaggaccaaaaggaggtccgggtatgagggagatgttaaatccaacttcagctcttgctggtatgaacattaaagatgtaggtttaataacagatggaaggttctctggtggaacaagaggtccttgtattggacatgtatctcctgaagcaatggaaaatggtccaattgcagccatcgaaaatggagatattattgaaattgatattaataatagatctattaatgtagaactttcagatgacgaaatcgagaaaagattaaaatcagttaaacaccctgaaagggaattagatggctggttaagattatatcaaaaattagttcactctgctgacacaggtgctattttaaggtag

SEQ ID NO: 8116 - DNA, 1113 bp, Methanobrevibacter gottschalkii
  source 1..1113: mol_type = genomic DNA
atgagtacactagaaaaaatgaaaattttaactgattcggctcaatatgacttatgtgattatgttagtcatcataaaagttctcagataaatttacctggaatttatgaagcaataggtcataatggatgtaaaattccactttttaaaacactcatgaccaataaatgtaaaaatgattgcaaatattgtattaatcaatccaaaagaaattttacaagattagaactatcacctgaagaacttgcaagagcgtttcttggatattataatagaggattagttaatggtttatttttaagttcaggaatatctgatgatgtagactccactatggaaaaacaaatagaaaccgtgagtcttcttagaaaaaaatatggttatgatgattatattcatcttaaagttataccaggagcaagcagagactcgattaaaagagcaatggcattagctaatagagttagtatcaatattgaagctgcaacatcttcaggtcttgcagaattatcatcaacaaaggattataataaagatatattaaaaagattgtcatggataaattctctacagcataaaagtacaacatatccaaattctacacatacaacacaattaattattggagcaaacaatgaaactgataaagagatattaagtagaatggaaaaaatatacaaaaaatcagatctgaagagaacatatttctcagcatttactccaattgaagaaacagaatttaaaaataaggaagcttgttcaacagatagaacatcaaagttatataatgcagatactttaattaattcttacaaatataatgttaaagaattaatatttgatgaaagtgataagttatctcttacacaagatccgaagattctagctgcaaaaaatatgaatatttttccagtagaaataaatagtgcacctattagagaacttatcagggttccgggaattggggtaaaatctgctcatgaaattgtatctattcgtaagaaaaaaccatttacgcataaagaacaacttcaagaattaggtgttataacaaatagagcagatccatatattaaaattaatggagaatatcaaacaacttttaatttctag

SEQ ID NO: 8117 - DNA, 621 bp, Methanobrevibacter gottschalkii
  source 1..621: mol_type = genomic DNA
atggctagaaaaagtcttggtaaaggattagcttcattaattccagatttttataatgaagattttgatagcaattctactcaatctcttgaagatattatgaatgaaactgaaaataatgaagaaattaaggattctgaagaaaaaaatgctcctaaagaaaaatcttccaacgatgttaataataattctaatgaagaagagatttctaaagatgaaactcttgaagaatctggaaatgatgaaactcaaaaaaatatatttgaagagatagaggaagaaaaaaataatcaagaaaagtctattgattcaaatgaaactactttaaaggaagatgtatcggagaatattaaagaatctgaaaacatatctattcaaaataatgaaaaaaacacatcaacaactcaggaaactaaaattcaggaacatatagttgaagttaaggaaattgttgataaaaatcctagaattacgttatggtcttcaagatcctctgcggttttcagatatttaagaaaaactgaacctgagtttagtatttcaaaagaggcttctaacttaattgaagaggctgttgctaaaaaataccctgaaatatgggcattattcgatgattactaa

SEQ ID NO: 8118 - DNA, 843 bp, Methanobrevibacter gottschalkii
  source 1..843: mol_type = genomic DNA
atgagtgaaataatagcagtgatgaatcaaaaagggggttgtggtaaaacaactactgttgttaatactgcaacatctctagcagtaatgggtaaatctgttttagtagtagatatggatcctcaagctaatgctacaactagttttgggattgataaaactaaaatagaaaatacaatatacgatgctcttataggagatattagtgttaaaaaagcaacaattcctacgtttattaaaaatttatttattatcccaagtaatatatctcttagtggagctggaatggagctttctagacgtgaaaattatcatattgttttacaagaaactcttaaagatgttgtaccattatttgattatatattcattgatttgcctccttcattaggtgtcataacagtcaatgccttggtagcttcagatagtgtcttaatacctattcaagctgaatattatgcactcgaaggagtagctgatttgataaatactattaaattagttgaaaaaagacttagaagtccaactcctataaaaggaattctcctcactttattcgataaaagaactagacttagtaaagatgttcgtaaagaactcaaaaattactttggcgaaacaaatttactttttaaaactattattccaagaaatataagattagctgaagctcctagtttcggtaaaccttgtttaatttatgatccagatagcactggtactaaatcttatttgaaattagctaaagaaatcattcaaagagatgaaaatgtccaattaaatattgctaaaaccaatattgacaaagttaaaaaagattctgaagttgctgggggtaaataa

SEQ ID NO: 8119 - DNA, 1302 bp, Methanobrevibacter gottschalkii
  source 1..1302: mol_type = genomic DNA
atggattataaaattacattaaactctaatgaggtaccaaaaaaatggtacaatattaacgctgatttgcctgtcgaacttccaatgcctaaaaacagtgaaggaaatgatcaaatttcttctcttcagaaagcatttacaaaagtaggtttggagcaagaattttcaactgaacgtttcataaaaattccaaaagatgttagaaaactttacatgcagatgggaagaccatctcccctctttagagcaacaaaacttgaagaatatctggacactccggcaaaaatatattataaacgtgaagacacttcccccacggggtctcataaattaaattctgcaattcctcaagcatattttgctaaaaaagaaggtattgaaagattaactacagaaactggtgctggtcaatggggcactgctttatctcttgcatgtaacttgcttgatttagaatgcactgtctatatggttaaagtttctttccagcaaaaacctgatagaaaaagtatcatgaatatttataatggtaatgtatttgcatctccaagtgaaaatactaaagttggtcgtgaaattctagctcaaaatccaaatcaccctggatctttaggtgtagctatttctgaggctatggaagaagctttagagaatgaaaaagttaaatatactttaggaagtgtattgaatcatgtaatgctacatcagacaattatcggtcaagaattgaaaaaacagttggaaattgcaggtgaagaacctgatataatgattgcttgtgctggtggtggaagtaactttgctggttcattattcccatttattaaagataaaattgcggataaatcagatactcaatttattgctgttgaaccaagtgcctgtcctactttaactaaaggaagctatgaatatgattttggggatgtaaatggatttactccaatgcttaaaatgtttactttaggtcatgacttcgttgcaccttctgtacatgcaggtggattaagatatcatggtatgtctccacaagtatctcttttaactaaagaagggtatattgaacctagatctgctcatcaaagagatgtatttgaggcaggaattacatttgctcgtaatgaaggagtattgcctgctcctgaaactactcatgcaattaaagttgctattgacgaagcattgaaatgtaaacaaactggtgaagaaaaaactattgtcatgaacttttcaggacatgggatgttagatttaaaaggatatgcaagttattttgaaggttcaatgcctaattctaaataa

SEQ ID NO: 8120 - DNA, 1074 bp, Methanobrevibacter gottschalkii
  source 1..1074: mol_type = genomic DNA
atgtacactttaattattaataatataaaaaacaataaaaaaatcatgagaattttagctattgatgttggaacagggacacaagacataatgatttatgatacagaaaaagaattagaaaactcaattaaattggttctaccttctccccatttatttatttctcaacaaataagagatatagaaaacgacatttacttcgaaggagaaataatgggaggtggaaaaataaaaaaaagcattatagaacacatcgaaaaaggatacgaagtagttatggaacctacatgtgctaaaacaatacgtgacaatttagaacaagttaaatcatttggaattaaaatagctgatgaatcaaaaaagtatagaaattatacaaaaatcaaaatgggtgatataaacataactaaattatctaaattactattagattatgatttagaatttgattttgataaaattgcaattgcagtacaagatcatgggtatagcgaaaatatgggtgatagagattttagatttgaaaaaataagagaaaaaatttccaaaccaatgtctccattggaattcggatttactgatgatttacctgaatactacacaagaatgaatgcagtaagaagaattgttaaacatgaaggaatagatgaaattcctttaattatggatacaaaattcgcttcaatagctggaatgtgttttgatgaggttgcagaaaaattagaaagttatattgtaatagatattggaaatggacatacaacagcagcatctatagatgaaggtaaaattcaaggagtattcgaacatcatacatctagtttaactggagaatcacttgaaagatacattaaaagattagcagatggaataatcaccaatgaagaagtttataacgatcatggacatggggcgcatgttttaaatccaatatcagaaattgaaaaagtaattgtaagtggacctaaaagagaactaatagaaaaaacaaatcttgattggcatcatgctgctcccggtggagatgtaatgatgacaggcactgttggtttaataaaaacaatattaggatga

SEQ ID NO: 8121 - DNA, 660 bp, Methanobrevibacter gottschalkii
  source 1..660: mol_type = genomic DNA
atgtttaaaatggattcgcatattcatagtgaatactcctccgattcaaattcaaaaattgatgatattttaaaaaaagcaaacaaagaaaatattaatataatatccataagtgaccatgatactgtagatggaactagtgaagttatgagaaaaacaagaaatacagatatacttgccatcccctctatagaaatctcttcatcaaaaggccatattcttggttttgggtgtgaggaaaagatacctaaagacttaccacctcaagaaacaatagacagaattcatgatttaggaggtcttgcaattatccctcatccatactgtttttacagacatggattattgtgtaaaagtgacaatgaaaaattaaaaatagatgctattgaaacaaaaaatgctagattcattgttggatattgtaatagaaaagctaggaaattatctataaaaaaaaatctaccagcattgggtgcaagtgattcacattattggaaatttgtaggggattgttatagtttaattgattgtgaaaaagatatcgatagcgttttaaaagcaatcctaaaaggaaaggttaaagcatgcggaaaaggcacttcaaatattttactttccaaatacctacttgaaaaaaatcttttaaagaaatttaaataa

SEQ ID NO: 8122 - DNA, 276 bp, Methanobrevibacter gottschalkii
  source 1..276: mol_type = genomic DNA
atggagaataatacaatttttgttggaagcaaacccgttatgaattatgttttagctgtggtcacacaatttaatgaaggatctgatagtgttgttctcagagccaggggtaaagctattagtcgtgctgttgatgctgctgaaatagtcagaaataggtttgttcctgcttccgatgttacagatattaaaatttccacagaagaagttgaaaattataataaagaaaaaacaaatgtatctattattgaaattttaattgaaaagggtgaataa

SEQ ID NO: 8123 - DNA, 1542 bp, Methanobrevibacter gottschalkii
  source 1..1542: mol_type = genomic DNA
atgaatgcaaaaaatattgaaactttaaaaaaggaaaatatgaatcttgctgaaaaaatttatattttcgatactactttgagagatggtgaacaaactcctggtgttgccttaactgttgatgaaaaaattcaaatcgcacagaaacttaataatttgggtgtagataagattgaagttgggttcccggcatcatctcctggagaaatggaatctgcaaaaagaattaaaaatagagaactggattctagacttgtcggtttggcccgttcattaacaggagacattgatgcagtcattgatgctgatttggattatattcatacattcattggtacttccccattgcatcgtgattataaacttaaaaaatctaaggaagacattattcactcttcagttgtggctattgactatgcaaaggatcatggccttactgttgaattttcagctgaagatgcaacaagaactgaacgagattttctatttgaaatattcaatgaagttgttgatgctggtgctgattttttagatattcccgacactgtcggtgttttaactcccattgttactcgtgagttaatcacagatattaaaaataattttaaaactccgattagtgttcattttcataatgattttggacttgctacagctaatactttaaccgctattgaatgtggtgccaatcaggcccatgtaacaattaatggattaggtgaaaggactggtaactgttctttagaagaattggtaatggctcttaaatctgcttataatattgatttaggattagatactactagattatacagcttatctaatttggttggtcgtttaacaggagttaaaatgccggttaataaaccaattgtaggggacaatgcatttgctcatgaatccggaattcatgttcatggaattttaaataatgcttctacttatgaaccaatgtcccctgaaatggttggtcactcaagaaaaatcgttttaggtaaacacactggagctaatgctgttaaggctaaattaaaagaacatcacatagatttgaatgaaaaacagtttgacaaggtatttaaaaatattaaatcattaggggataatggtaaatgtgttacggatgatgatttaatagctattgctattacagaacttgcttctgcacgtgaaactccaattgttattaaaggtttgagtatttcaatgggagctaatgtttctcctacggctactgttaaactagaaattgatggtgttgaaaaagaaactgcaagtactggagttgggcctgttgatgcagctttaaatgctattcgtgaattgattcaggatacaatggatattgaattggaagaatataacttagaagctattactggtggtactgatgcattagctgaagtgtttgttatcagttctgattctgatggtaacaaatcaactggccgttcaactaatcaagatattgtaatggcaagtatattggctgttttagattcaattaataaattattgttaattaataggtcaattttataa

SEQ ID NO: 8124 - DNA, 1206 bp, Methanobrevibacter gottschalkii
  source 1..1206: mol_type = genomic DNA
atgtataaaaaattatttattggaatattgatttgtcttttagtaatctctccaattgctgctgcaaattggaattcatttgctggtggagttgatcacaatgcatttagagaagaaagttcggattttgtaactaatctttggacttttaatatggaatcacctattcattcatctcctgcagtttataaagattttatttatgtggtttctacccagggtattttgaaagttattaatatggaaacaggagaaaaagattgggattttgatttagaatcaaatactaattcttcaccaataattaactcaaataaattattcattggaactgaagatggtattaaagctattaatataaataatcataatgaaatatgggattatgattgtgatgatgttgaatctactccctttttatataaagatacaatttactttggaagtgatgatggtcatttatacggacttgataaggataatggaaaagttgtatttaataaaaaattagatggagaacttaaatcctccccaattgtagttgatgatacaatttatattggatctacaaactgtaagttgtatagtatcggaactgacaaagataaaaattgggaattcactactggtgatgaaattttatcttctcctagttttatcaatgacactattgttttcggatcaaatgacggcaatatttattgtttaaatgaatcggatggtgccttaaattggaaagttgatttaaataataaagttctatcttcacctactgttgataatcatgacaataatatttttataggttctgatgaaggtaatttaacttgtattgataatagggatgggactataaaatggagtcattcagttggtggtaaaatacaatcaactcctgccattaaggataatttagttgtttttggttcggataatggtaatctgtatgttttgaataaatatactggtagtgaagaatttacatataatccaggaacaatattatttaattcagctattaattcatcacctgtaattaatggtaacagtttgatatttggagatgattctggcaatgtatattctttaaatattgataaacatgaggtaccgggatcaactcaaatgtatttttccatttctgttttaataattattgttattgtagctcttgttattgttcataaagtaaaaggtagaaaataa

SEQ ID NO: 8125 - DNA, 1155 bp, Methanobrevibacter gottschalkii
  source 1..1155: mol_type = genomic DNA
atgctagagtttaaaaaattttggtggatgattaaaaaagaggtacttagtcttaaaagacatcctgctaggttagtttctattattgcatttcctataattatgattttactttttggttacggaatgggtggcgaaatgacagatttaccaattcttgttgtttcacaaagtcatggtaatttaacagatttaacattagatactattaaaacaactgaaacttataaggttattgaggttattgatgatttggatgagggtaaaaaacgtgttgattcgggtgaagttaaagcagctataatactgccatctgattatgacgataattcaacacaacaaaaatcggttactttgtatttggattcatcagatcaaatggcttctcagattttagattcatcaacacaagctatattctctagactctcaaatatggttgcttcccaaactaatgttgaaaataaagatgctaatattaatccatcaatatcaaattcatttaataactttaaagatgatattagcttacatattaatagaatttatggtaatattaagtatattgactttttagttcctgcaattttaggtatgactgtaatgatgagttgtatgatgggaatgggtgcaacaattgctggtgaacgtgaaactggcgaacttgcaagattattcatgacaccaacatctgtttcaactgtaattggaggtaaaattgctgctaagcttctaattgagttattaagagctttaatattaattttcatggctgtattacttttcaatgttagtataaaaggaggtatacttcaaacttttatagtccttgtagttggagctttatgttttgttggatttggaatgatgttgtctgcaagaacatctactcaagaagattatgttcaaatggtcatgccattttcaatgcctatgatgtttatttctggtgtattttatcctattgaaacaatgccatggattctacagaaattagcatatatattccctcttacttatttaaatgatgcaatgaggggaattatgcttaaaggtcaaacattaggggatgtatggttagatttagctgttcttttaggatttacattgttattctttataattggtgttaaaagatttaatagggacgtatag

SEQ ID NO: 8126 - DNA, 1047 bp, Methanobrevibacter gottschalkii
  source 1..1047: mol_type = genomic DNA
atgaaaaacgcaattgaaactaataatcttactaaggtttacggtaacttcactgcggttaattctcttaatttaaaaattccaaataatagtattttcggaatgttaggtccaaatggtgctggaaaaacaacaacaattaaaatgcttacttgtttaatccaaccgacttctggcaaagctgttgttgggggatatgatgtagaaaaaaatcctgatgaagttagaaatctcttaggcatggttcctcaacaagttagtttgtacaaggatttaacagttatggaaaattcacagatgtgcgctgactattatgggattccatcagatgagagagatgctcgtattgaagatttaatggaattggttgatattaaatatgctaagaataaacgagttggtcaactttcaggtggtcaaaagcaaaaagcatctcttgttgctagtttagtccacagaccagatattttatttttggatgaacctactattggcctagaccctactactaaacgtactttatgggatttaattcgcgatttgaatgatgaaggccatacaataattttatgttcacatgatatgcatgaagtagatatgctttgtgataatgttggaatcattaatacaggtaatcttgtggcttatgatacaccgcaaggtcttaaagattctcttttagaagctaataagaaaaaaatgacagaagctttaggaaagatttctgatgaaactaaaatatcaacttctactaaagaagatattggaaatcttggtttaagaaaaatgtctattcttttaaaaaatcaaaatgaagaaattattgaagctattaaaacatctgattttgtgaaaactgttgagattgctcacaatggtcgtattaatttaagaattgatagttatgatgacatggctgttcaaaatgttttaaaggatattaattcttttggtggtgtaattaaatctatttatactgaagaaccttcacttgaagatgtatttattaaagcaactgccgaggtggatgaaaatgctagagtttaa

SEQ ID NO: 8127 - DNA, 408 bp, Methanobrevibacter gottschalkii
  source 1..408: mol_type = genomic DNA
atgacagataaagaaatttatgatactcaaacaatgttaattaaacattattccaatggtttaacccgtaatttaattctttggattatttcaaaagaaaaaattcatggttatgggataatgaaaaaattagatgaattttttaactttgaagatgttaattatgaaattaaaaatacttcaagtaaagtctatccaattttgagaaaaatggagaaaaatggacttatcattggagaatgggatattaatgaaaataataaaagagtaaaatattactctattactgatgaaggattaataatcttagataaaattcgttctattattaattttatttcaaataatcccgcatggttaaatttttatggggatatgggggttgaaattaatgaaaaacgcaattga

SEQ ID NO: 8128 - DNA, 714 bp, Methanobrevibacter gottschalkii
  source 1..714: mol_type = genomic DNA
atgaagttaggttttacaactcttgcattattcatggaagataacaataaaataatagaactagcaaaacagcacggatttgaaataattgaaattctcggagaagatccattttatgaaaaagataaaggagaatttaaaaattgtggaatagacatgcgaattcatgcagcaacagtagacattaatattgcaagcctaaataaaggaataagaactgaaagtataaaacaaatgattcaatgtggccattatgcagaaagtataaatgcaaatacaataacgctacatcccggaataattggacgtaacgaaccccgccttagaaaatgggcacttgaaattgcagttgaaagtattggaaaaataattgataacacaaatattgaaatatcaattgaaaatatgccagttagaggtaaatttttaggaaataaagttgaagaaattgaaatgattcaagaagaaacaggttgcagcttaacaatagatactgggcatggaaacacttgtggaaacttagaagaaatgttaaatttaaaaaatataagttattgtcatttaaatgataataatggtgttaaagaccaacacattacattaggtgagggtacacttgatttaaatttacttaaaaaaatagatacagcaattattgagctaaataattttaataatattttaaagagtaaaaaagttattgaaaacttataa

SEQ ID NO: 8129 - DNA, 795 bp, Methanobrevibacter gottschalkii
  source 1..795: mol_type = genomic DNA
atgaagaaagctgttgtatttgataattctggaacattaattgaaaggtatagagttattaaagatgttttaaatggtaatttattcacagatattaattcattagatttaattgatgctgctgatgctttagctttagttgtacttcagtttaatacaaataaattattagatttagatcagaataccttaatttctggtgttattagagaatataacattgattttgatgtcagcttttcaacaaatcctatttctaaagctgaagttaaagagattattgataatgaaaaatctgctaccatagcagatattactgatggttttgatattttaagagataaagttcctaatatggaactatgcaatggatctgcattaatcgttgatatggatttaggggttattgcatatactataacgtctgctggtaaattttttcctaaggtttttgaaacaattgaaactttaaaatcacgtggaattgaaatatttattgcttcaggtgatcgaaaaggagctattaatagactggctaacctgcttgatattccagaagataatgcttttggaactgtttcaacaaggggtaaatgtgaagttgtttctatcctaaaagatagtggatataaagtcatgatggttggggatggtattaatgatttattagcttttaaaaatgctgatgttagcgtattaacaatagaacaacaggaagagatatctcctaaagtaatggataaaactgaccatatcattgaggatatttttgaagttactatgattgatttttaa

SEQ ID NO: 8130 - DNA, 1371 bp, Methanobrevibacter gottschalkii
  source 1..1371: mol_type = genomic DNA
atgaatgttattgaaaagttaaactccattaaaaatggagaaataacagctaaagaaaatgttgaaaacttcattaaagttattgacgaaaataacgaaagtattaatgcatttattgaattaaactatgaaaatgcgttaaaacaagcagatgttattgacgcaaaaatagctaacggagaagatgttggtgctttagctggaatagtatttggtattaaagcaaacattaatgttgaagatttaatcatttcagcagcttcaaaaactttggaaaattacattggaagttacaatgcaactgttgttaaagaaattttagatgaagatgggattatcatcggtattttaaatatggatgaatttgcagcaggaagttcaactgaaacttcatactacggacctacacaaaacccagcggcaatgggaagaattccaggaggttcatctggaggatgtgcagcagcaattgcaggtaaaatgtgtgatatttcaattggatctgatactggcggatctataagaaatccagcatctcattgtggtgtaattggatttaaaccaacttatggtgcagtttcaagacaaggattacttgacttatccatgagtttagatcaaattggacctctctcaaatgacgtaagtggtattgcactcacattaaatactattgcaaaatacgatgaaactgaatgtactaccttaaactgggataaaccagattttaccaatgtattagatgataccagcttaaaaggtatgaaaattgcagtatgtaaagaattcattgatgtaactgatgatgaaattaacaaaactgtaaaccaagctatcaataaattagttgaagcaggtgctgaacttgttgaagtaagctttgattacattaacttatgtttaccaacatattacttaattaactatgtagaattcttttctgcaactagaaaatatgatggaagagagtatggttctagaatcgaagaagtgtgtggagatgaagtacttagaagaataaaaataggttctcacattgcagaagctgagtttagtggtaaatactacaaacaagcattaaaagcaagatctgtaatcagatctgaaattacctcaatgcttgaaaatgtggatttaattgtaggaccaactgtgcctaaacttcctcatgaaattggtgctgaattagaaccaatggaaatgtatgcttacgatattttaactgtaattgctaatttagccggtattccagcagcaagcatacctgcaggtgaagtagatggtattcctgtaggattacaattacaagcaaaaccattagatgatttaaaaattattaaagcaatgagtgttttcgaaaacactcaataa

SEQ ID NO: 8131 - DNA, 1506 bp, Methanobrevibacter gottschalkii
  source 1..1506: mol_type = genomic DNA
atgacaagaattgggcttgtttatgttaatggagctgttccgggatttgaagattttggaaatttaccaacagatattgttaaagaaaatggacttattgatggatttaaagctagtaatgaattagatgcattaattattcctggaggaacacttattgagtcaaatgacatcaacatggatctaaatactgaaattaaaaaaatggctagtgatggaaagccagttattggaatttgtgctggttttcagctattatcaaatcaaatagatattgggagaaaatcaccagtaccaattgttaaagaaggtcttggaataattgatgttaacttttcaccattaattacaagtgatcgtgttaaagccaaagtatttaataactcttttttagttaaaggtcaaaaagaagatgttgatggttttcatactcacacttatggtaaagttgaaggagatgctaaaccattgttttattcacaagttcaaagaatgaattatggtgatacaaacaaaaatggagaatacaatatattttcaggtgcttgtaatgatgatggcaatgttattggcacaatgattcatggaatattagatgaaaatccaattcttataaaaaacctattagaacaaatagatgctgcaaatattgatgacatatacagtagaaacattgaaattaaaaaatatttgcaaagtgaagttggaattaacactaacattaaagttcctaaattagatataaaatgcaaaaaacctaaatatttaatgattggaagtaacggatccgattctggaaaaacatttattgtaactggccttgcaggagctttaagaagaagaggatataaagttgcactgcttaagataggtccagatgtacgtgatattataccaggattatatttgacaaaaggaaaaatggaaaaattttcatctataaagattggtcatttaggttggagtgatattgaatctacaatatcaaaacttaattcatcaaactatgatattgttttaattgaaggagtaatgagtgtatttactggccttttaaatgaaaaagtaccattttcagcagcagaaattgcaatgtcttcaaaaataccaatgatattgatttcaggtgttaataaaggtggaatagaatctgctgcagttgatttagtttctcattctaatatgcttgaaaaatttggaattcctgtaaaagcaatattactcaacaaagtatacagtgaagatattttcaacgaagtaataccttatattaagaataacaccactgttgatacagttttaaaattaccaaaaataaaatcagcagatatgaggggatttattccagaagttgagataagatatgaattatttaccaatcatgcaatggatttgattgaaaataacttaaatattgatgaaataataaatatggctcgtgaagtagaatttgaaaaaatatacaattttaatgaaattaaaaataaaatggttaatggttcttaa

SEQ ID NO: 8132 - DNA, 684 bp, Methanobrevibacter gottschalkii
  source 1..684: mol_type = genomic DNA
atgaatcaagaaacaaatttagataaagctttagaagctattagaaatggtgaattcgtactagtttttgatgatgatgatagggaaggagaagtggatatgattatcgcttctgaatttgtaacccctaaatctattgctacaatgagagataatgcaggtggattaatctgtaattgcatacactctgatttttgtgatgaaattcatttacctttcatggttgatattatggaagctgcaagtgaaaaatacccagaattagctaaacttgcaccaaatgacattccgtatgatgaaagatcttcattttcaatttgggtgaatcacagaaaatcattcacaggtgtaacagatcatgacagagcaatgacaattagtgaatgtgctataatgatgaaagaaggaagatttgatgaattcggatctactttcagatcaccgggtcatgtatgtcttttaagaggagcagatggacttgttaaaaatagaagaggacatactgaaataggtctggctttatgtgaaatggctggtgttactccagtttgtgtagtttgtgaaatgatggatggtgaaactggacaagctacatctgttgctgatgctcgtaaatttgcacaagaaaatggattaatattacttaaaggcgaagacatcattaataaatatttagaggattaa

SEQ ID NO: 8133 - DNA, 381 bp, Methanobrevibacter gottschalkii
  source 1..381: mol_type = genomic DNA
atgaaaattgatggtgaagttacaactggtttaggaaaagcagcatattttttatcacaagaattttatacaaatgaatttaagaaaaatttaggttttgttcctttcccaggaacattaaatgttattgttagtgataattatttagatgaaataaatgaaataaaaaataattgtaaaaatttaattaagccagataaaggatttggagctgtaaaatatattaaagctaaattgaatgataatattgatggagctattgtatttcctgcaaaaactacccatgaagagaattatttagaatttatttcaaaaaataagttaagagatgaattagctttaaatgatggggatattgtatctcttgaatttcaaaattaa

SEQ ID NO: 8134 - DNA, 1644 bp, Methanobrevibacter gottschalkii
  source 1..1644: mol_type = genomic DNA
atgaaaataaaaactatttcaacagatgtattaattataggatctggtggagcaggttcaagagcagctattgaagttgataatgctggattaaaagcaataattgtatcaaaaggtctttcatttagatctggttgtactggaatggcggaaggtggatacaatgcagtatttaaaacagtggataaagatgattcaaaggaagctcatatttatgatacacttaaaggtggaagttatcttaacgatgaaaaacttgtagaaattcttgttaatgaatcaccacaaagattaatagatttagaaaattatggtgctttattcgatcgccaagaatcaggtgaaatagatcaaagaccttttggtggacaaacctacagaagaacttgttatcaaggagatagaactggtgctgaattattaaatgctcttaaagaagaaatcattaaaagagatattgaatgcattgaagaagtgatgattacatccctcataactgataaaaatcaggttattggtgcaactggtcttgatttaaaagattctagtttaatttactttaaagcaaaatcaacaatccttgctagtggaggtgctggacaattataccctgtaacatcaaataccttccaaaaaaatggagatggttatgcaatagcttacaaagctggagctaaattaattgatatggaacaagttcaattccatccaactggtatggttgctcctgaatccaaaaaaggagtactagtaacagaagctgtaagggctgaaggtggaaaattattaaataaagacggtgccagatttatgagaaaatatgcacctgaaaaaatggaattagctacccgtgatattgttgcccgttcaatttaccaagaaataattgaaggtagaggaactgaaaaaggtggagtatatcttgatatttcacacttagatgatgactatatagatgaaaaacttgaaacaatggttttgcaattcaataatgtcagtattgatattaaacatgaaccaattgaagtggcaccaactgcacatcactttatgggcggtttgaaaataaatacggatgcatctacatcactaaggaacttatttggtgctggtgaagtttgtggaggagtccatggtgcaaatcgtttaggtggaaatgcattagctgacactcaggtatttggaaaaattgctggtgaaagtgcaagtaaagcatgtgcagatacagaaattaaaacagattatgaacaagtcaaaagagaatcttccagaattgaaaatttgattaaaaaaggtaatatcaaaccacaaaaattcaaagagaatattaaaaacttaatgtgggaaaaagtagctatagtaagagatgaaaaaacattgaatgaaggtttaaaagatctccaagatatgcaaaaagaattaaataacttagatgttagcgataaaaagcaatacaacaccgaattagtgactgcacttgaagtaataaatatggttgaaatttgtattttaattgtaaaatctgcaatattacgtagagaaagtagaggatcacactttaggtctgatttccctgaaagtaaagatgaatggaaaaaaagtattatatttaataaagacaaaatagaatttgaagctagatag

SEQ ID NO: 8135 - DNA, 1305 bp, Methanobrevibacter gottschalkii
  source 1..1305: mol_type = genomic DNA
atgaatgataatactattttaattaaaaatgcattaattttaagtccaaatacaaattttgaaaataaacagtctattttaattaaagataatttaattgctgaaatttcaccagatattgatgagagtaatgtcagtaaaattatagatgcaactggtaaaattttacttccgggattaatcaatactcatactcatttgtccatgacattatttagaggtttagctgatgatttaagtttggatagttggttaaatgattatatatggccgatggaagctaatcttaatggagattactgttatattggggctcttttaggtgctgttgaacttattaaatcaggaacaactactttttctgatatgtatttctacatggaagatgttgctcgtgctgttgatgaatcaggaattagggctgttttatcatatggtatgattgattttggtgatgaagataaaagaaaaaatgaaataaatgaaaatttagaattatttaaatcttgcgagggaatgggaaatgggagaattaaagttttcttaggaccacattcaccttacactgcttctgaagagttattaatccaagtacgtgagctggccgatgaatatgatatgggtattcatattcatgtttctgaaactcaaaaagaaattgtagatatttcatctgaaaaaggtttaagaccttttgaatatttggataaaattggatttttaggccctgatgttgttgctgcacattgtgtatggttaagtgataatgaaattgaaattattaagaaaaataatgtaaaaatttcacataatccatgtagtaacatgaaattagcttcaggaattgctccagtttcaaaattaattgaaaatgatatttgtgtttccattggaactgatggtgcttcttcaaataataatttagatttaattgaagaattaaaaacagcttccttacttcaaaaagtttctactttggatcctaaagttttgacttcagatgaaaccttatctatgggaactattaaaggtgctgagacgttaggtcttgaatctgaaattggttctatagaggttggtaaaaaagcagatattattttaattgacactaattcagctaatatgattccagacagttcttctttaagttcaaacattatttactccgcaaatggtttgaatgttgatacaactatttgtgatggtaaaatattaatggaaaataagaaattaactgttttagatgaaggtgaaatttatcaaaaagctagacaagcaataaaagaattaaaagaagctatctag

SEQ ID NO: 8136 - DNA, 207 bp, Methanobrevibacter gottschalkii
  source 1..207: mol_type = genomic DNA
atgtctgaaataccaaaagctcctgttgcaaggatcattaaagaatctggtgcagaaagagttagtgaagatgctaaagctgaattagcagcatacttagaagatgttgctcgtaatgtagctaaagaagcaaatgctgtagctaaaatcgctaaacgtaaaactgtaaaagcagaagatatcaaattagctatcaaaaacttataa

SEQ ID NO: 8137 - DNA, 864 bp, Methanobrevibacter gottschalkii
  source 1..864: mol_type = genomic DNA
atgatgaaaattaaaattgcaataccatcgaaaggaagaataagtgaaccttctataaacattttagaaaaagcaggtttagggttaattgataaaaataatagaaaactaatttcaaaaacatttaatgaagatatagaagttatgtttgcaagagcatctgatattccagaatttgtcaatgatggagttgcagatatgggaataacaggtgttgatttaattaatgaaaatgaagcagatgttatagaattacttgacttaagatttggtcaaacaaaattagttttagcagctccagaagaatcaaatataaattcagttgatgatattacagaagaaatgaaagtcgctactgaatttccagtattaactaaaaaatacctagataaaaaaggtttaagtttaaaaattgttaaactaagcggatcaacagaagctgcaccatttattggaattgctgatttgattactgatttaacaagtactggaacaactttaaaaatgaatcatctacaaataattgataatattttagatagcacaattaaacttattggaaataaatatagtttaaaaaataaaaaagaattaattgaagccgttagtacaagtattaaaggagttcttgacgctgaacgtaaaaaattaattatgatgaatgtgaaaaatgatgatttggataaagttaaagaagtaatgccttccatgggaggtttaacaatatctgaagtattatcaaatgaaaaaactgttgctgttcaagcagttattgatgaaaaagaagtatttgaacttgtaaactgtttaaggaatgctggtgcaaaagatattcttgtagtaccaattgaaagaataatatga

SEQ ID NO: 8138 - DNA, 495 bp, Methanobrevibacter gottschalkii
  source 1..495: mol_type = genomic DNA
atgaaaattggaataatatattctacttcaaaaaaatctacaaaaaaagcttgtaaaatattagctagtaaaattaacactgatgtacaattaatacctattgaaaaagcaaaaacaacatgcattttaaaatataatttcatcatattcattgcttctgcatataacggtaaatttcagagtagtttaaaaagatatattattagaaatattaaaacaataaaagaaaaaccaattgcactggtcattaatagtgaagaaaatattaatacagaagacatatttaataaaatatttacagaagaattagtaaattcatcatgtattaactcaaattttggatatgaattaaatattaatgaaggaaatttttttgaaaaaataaaaacaaaaaataaaattaaaaataaagaaaaccttccaagtttaaacattgatgaaatcaataaatttagtgattatataaacaatttgattgaaaaaagggttgattaa

SEQ ID NO: 8139 - DNA, 936 bp, Methanobrevibacter gottschalkii
  source 1..936: mol_type = genomic DNA
ttgattaaaatttttagattaaaaaacataatttcagtgaaagattttgaaagaaaagatattgaatatatactagatgaagcatcaaaattagaaaatattgccaaatctagagaaatatctgaagagcttaaaggaaaaattcttggattaatgttttttgaaccttcaacaaggactaaaatgtcatttgaaacatccatgaaacgtttaagtggagaatgtattggatttgaaaatagtggatctagttccgtgtctaaaggtgaaagtattgcagatacggcaaaaatgtttgaaggatattgtgacgcattagttataagacatgaacttgaaggagtatcaaaatttatatcagatattgtagatgtacctgtaattaatgcaggtgatggtgctggtcaacaccctacacaaacattattggatttatatactattaaaaatgaaatcggtgaaattgataatttaaaaatagcattaattggtgatttaaaatttggtcgtacagttcattcattaacacatgctttaggtttatttaaaaatattaaaatatatttaatatcacctcctgagcttaaaatgcctcaagaagttcttcatgatttgaacaaaaccaatgtagaatataaagaaatcggttcaattgaagaaataattgatgatgtaaacgttttatatgtaactagaatacaaaaagaacgttttgcagatattaatgattatttaaaaataaaaggtgcatatattattaataaaaacatgcttgaaggtaaagatttaattattatgcatcctttaccaagaattgatgaaatagatactaatgttgataatacaaaatataataagtattttacacaagctgctaatgctgttcctgtgagaatggccattttaaaaacattaataaaaaacaaccctaaatag

SEQ ID NO: 8140 - DNA, 1164 bp, Methanobrevibacter gottschalkii
  source 1..1164: mol_type = genomic DNA
atgtcaaatatttttgaagatttagaaaatgatgaaacacaagggcctactatatttaaagataaacgtcctttagatcatagatggttacctgataaattagttcacagagaagaacaaattaggcaaattgcaaaaaattggattgatgttttaagcaatgtaactccgtctaatgttactttatatggtaaaacaggaacaggtaaaacagctgcatcaaaatttgcccgtgaacaattaattgatattgctcgtaaaaagaatatttttgttaaagttgaatatattagatgtactgattatacaactgaatatcaggtaattgcagaattatgtaataaacttggacgtgatgttccaaatcgtggttggacaaaaggtgaagttgtaaatacatttagagacatttttaaaacaaatgcatttggtaaaaagttacatttaattgttattttagatgaaattgatattttacttgataaagatggggatggaattttatacactcttacaagaacagaaaatgtttctgtattatgtataagtaattatttagattttaaaaatttgattaaatctagggttacaagtagtttaaatgataaagagatagtatttcctccttatggtgcagatcaattatctgatattttaaaagaaagggcagaattatcttttaatgaaaatgtattggaaaatgatgttattccattatgttcagcaatggccgctaaagaggaaggtgatgcaaggtatgctcttgacttacttaaaaatgctggtgaattagcttttgatgaagattcagaaaaagttacaaataatcatgtaaaaagagcaaaagataaaatagaacacaataaagttattgaaattatatccactttaccacttcaacaacaaagagttttagaatctattttaaatttaacaaaacaaaaagaagaaattacatctggtaaattatatgaagcttatacagatttatataaaaaagatgcagttacttacagaagaatatttgactttattaatgaacttgaaatgttaggaattatttccactaatacaatctcacgcggtcgtggaaaaggaagaactaatattattaaacttcaatgtgatgaaacattacttgaaacaaccttattttctatttag

SEQ ID NO: 8141 - DNA, 459 bp, Methanobrevibacter gottschalkii
  source 1..459: mol_type = genomic DNA
atgattaatgaaaaaacaattgaaaaatggttacttgatgaagacatgttacgtgaaatgaagtttgatgaaaacgctgattttcattttattattgaatttccaaaagacaatataatagatattgtaaaaccgaaacaaaaagattgtattgtttttgcatgtgcaacacaagtttcacaagaacatattaatttgatggtttcagcagatttaaaaactaaaaaagattttattttagaattaaattttggattaaataattttttagttgactatgaacttcaaattcatgacgaaatgttacaacagtttattatcactgatcaaatatttgaagatggattaactaaagataactttattaaaactataaaaagagtttttaaatcaaaattacattgtatttggttaattgaaaaaaaatttaataatccttctttttcacccataaaataa

SEQ ID NO: 8142 - DNA, 1035 bp, Methanobrevibacter gottschalkii
  source 1..1035: mol_type = genomic DNA
atggtgtataatgaattaataaataatataaatttaataaatataaataatattatttcattttatttatttctatttataatatttgcattattactttcacttgtaatagatgtcttatttggtgaacttccaggaaaaatacaccctgttgtaataatgggttcattgattaatttttttaaaaaaaaatttattaatattaaaaattgggcatctggtttgatgcttgttttatgtactagtgttatttcaagtgtattattattaataatttatactattattaaaaataatattattttattatttttagtattttcaattcttttatcttcaacattttctgttaaaatgcttttacaaacagcaattgatgttaaaaatgatttagataatgatattaaaaaagcaagaaaatcagtttcatatttagttagtagaaacacggaagatttatctgaatgtttcattgtttctgcagttattgaaagtttaactgaaaatataactgattcttatgttgcaccaattttttattatattatttttgcaatattcattttattttatccagttcatttgaaattgtatttattattgttagtaccaatgttatatagactttcaaatacgcatgatgcaatgcttggatataaaacacaggaattaatctatattggttttttacctgcaaaaatagatgatattttaaattatattccttcaagaatcgcaggtttatttattgttatgtctgcatatttacttaatttagatgggaaaaatagttttaaaataatgatgagagatgctagaaaatgcccatctccaaattcaggttatacaatggcatcaacagcaggagcattaaatattcaattgataaaaaaagatacatacattttaggagataataataaaataatcactgctaatgacatttcaagtgctgttaaattatctaaattatcaattattttatttacattaacaattatttgtttatttatattaatttatgtgatattatga

SEQ ID NO: 8143 - DNA, 1014 bp, Methanobrevibacter gottschalkii
  source 1..1014: mol_type = genomic DNA
atgaaattagcgattatatctgtttcaaataaaggtcaaaaattagcttttaaattaaaagaaaaattaaatgaggattcaactatattgaaagtagatttatatcataaaaatgttaaaaaatattttcaaatattattttatgaatatgatgcaataatagcaataatggcttctggaattttaattagaacaattgcccctttaatagaatctaaagttactgatccggctattttaaatattgatgataatggtaattttgttatttctactttgtcaggtcatcttgggggtgctaataaattaacagataaaattgctaatttaatcgatgcaatacctgttattacaacatctactgatgttaataaaaaattaggaatagatattttagcaaaagatctttatttgtcaattaataatacaaaggaaatattgttttttaacaaatcaattcttgagggcgaacaacttaattttacaattaatccaaataaaaattttgattatttatttaattatttgaaaaatattacacttgaaatagatgtctctttttcttattcaaataatattaatacagatgaaatacatgttaaattagataatcataaaataatcttaaaagaaagaaaaattgttgttggaattggttgtagacgtggaaaagaatgttctgatatatataaaagtttaataaaatcaataaacgagttaaacattgataaatcacgaattaacatgttttcatcagctgaaataaaaaaaaatgaacaagggatattagaactttcagataaattaaatatacctgttaattttgttgaattagataaattaaaactttttgaatcaaatgatattcaaaaatcggaatttgtatattcaaaatttggtatttatggtgtatgtgaaccttcagcattaatcacggcaggttttgattcaaaattaatatataaaaaaacatcctatgatggtgttacaatatctattgcactttcaaaataa

SEQ ID NO: 8144 - DNA, 246 bp, Methanobrevibacter gottschalkii
  source 1..246: mol_type = genomic DNA
atgagtagtcaaattgacgaagtttgtgaaatacttgaatatatcgcagataacaacactgtacctcgtaacattagagaggctgcaggaaaatccagtactttattaaaagatgaagaacaagatcaatctgtaaaaataagtactgttttaggaaaattagatgaaattagtaatgatccaaacatccctgttcatgcaagaacattaatttgggaagttttgtctaaattagaatcaatctaa

SEQ ID NO: 8145 - DNA, 177 bp, Methanobrevibacter gottschalkii
  source 1..177: mol_type = genomic DNA
atgtcagatataagtagaacaactataaatcttcccgttgatttaaaaaaagaattaaaaaaacttgctattgatgaagatacttcattatctggattaataattaaaatgattaatgaaggaatggaaaatagaaaaaatagtaatatttcttattcagatgaagataatagttag

SEQ ID NO: 8146 - DNA, 582 bp, Methanobrevibacter gottschalkii
  source 1..582: mol_type = genomic DNA
atgaaaaaacatataaatgaaattataaatgtttctaatgaaatttataacaaaggattagtttctggaaaagccggaaatattagtaaaagaattaaaggaagtactggagatattgttgctattactccaacattaaaatcattatcttatttaaaagaagaagatattgtattagttgatatggatgggaatttgttaactagaggaaaaccttcttcagaattaaatatgcatttagaaatttataaaaaaagatctgatgtaaatgctattgttcacactcactcaacatatgctactggatttgctttttcatcaaaaaaacttaaaagattagaaggttttggagaaataaaaaatccttatttaaattcaattgaatattttaaaccaggtactagcgaattagctaaaaatgctagtgagggaataaaaaatgaagatgttttaattttaaaaaatcatggtgtgatttgtgttagtgataagttaaaagaagcaaaattactctcaatttttgttgaagagagtgctaaaacacaatttgtaacatgtatgttaaattcagttgaagactaa

SEQ ID NO: 8147 - DNA, 1722 bp, Methanobrevibacter gottschalkii
  source 1..1722: mol_type = genomic DNA
atgtcaactaataaaattctattaaaatttgcaaaaaaaggaatcaacctatcacctgaagcatataataaggttataaatgctaaagatcctataaattatgcatcatcattaatagttaaattaaaaagtgataaattttcaccaaaagatttaatatctgttagtggagaaatggttgatgaaattaatggtattaaaaaagaagagtcaaataaccaaaaatcattaacagaagatataacacataatgaagaaataaaaattaaaaaagaaagtataaaagaaacaccttctgaaatacagccacaaataaaagttgacacaaaagcagaaaataaacaagatttaagtattatcaaaaaagaagatactatagataacttaaaaaaagaaagtgatactcctgaaaaatatataaataaagaaattttagaagcatctgaaacaattaaagatgaaaaaattaaatttaaaagaaatgaacaaaaaactaatgttaaatacgattttaaaataatacaagatacttctaaaaaatcatatacaagtggtgaaattgaaaacttaatttcttattttaaaagtagatacgaaaaattatctaatatcttatccaaaagaccagaacttaggaattatactaaaatagctgatattgatgattcacaagagaatttaagtttaatattaatggttcgtgaaataagaaccagtaaaaatggtcataaaattatcgaatttgaagatgatactggaacaatttcaattttgttctcacataataatgaagagctatttgctgaagctgaaaaacttgtaaaagatgaagttattggcgttattgcaaataaaagtgatgatccgggatttgcatttggccaacaaatcattgatccgggtgttttaagagttccagataaagaaatggattttggaattgtatttttatcagatgttcacattggtagtttaacatttcttgaagatgctttccaaagatttattgattggataaattgtgaatatggatcagaagagcaaagaagaattgctgaagatgtcaaatatcttgttattggtggagacattgtagatggtattggtgtttatccaaatcaagataaggaattagcaattaaagatattactgaacaatataacgaagcagctagatttttaggaaatattagaagtgatattaagattattattgcacctggaaatcacgatgcatcaagagtagcagaaccacaacctgctgttccagaagaatatgcaaaagcactttatgaacttgataatgtggaattcatatcaaatcctggtgtcgtgtctcttgatggaattaatgttttaatatatcatggccgaagttttgatgatttggtaatggctgttaaacaatttactcatgaaagaaatgatttattaatggaggaattgttgaaaaaaagacatttagcaccaatttatggagaaagaactcctcttgcatcagaacttgaagattatttagtaatagatgaattaccagatatattccatacaggtcatgttcacattaatacatataaaaaattcaaaggaattcacttaattaattctggtactttccagactcaaactgaatttcagaaaatttacaatattgaaccaacgcctgctcaagttccagtaattcacaaaggaaaatataaacatttaaaatttattgaatga

SEQ ID NO: 8148 - DNA, 501 bp, Methanobrevibacter gottschalkii
  source 1..501: mol_type = genomic DNA
atggcgaataaatttgttagaattattttaatagttgttttatttgttatattttttgaagtaggcctctttagttcatatactattgtcactgctgaagctcctaatattcaaggattaattgacatgcaaatacaaaaaatatcttctattttaaatcctgaaactgttaatgaagctttaataaaagatccaactccaatcaatattactaataaaaaagatgttgcactcaaaatgcaagacttgtctaaggttgatggtgttaatgttgattcaatgaatatatctacacgtgataatccaagtaatgataaaaattttactgtaattattgaagctttaggctatgcttcccctaattcaacttcaggacaaattattattagtcaagaaccatcttataagattatagcttctgcacctgcatcttatagaggtgaaggaataatggctgatacaaattcaatgacaataacttcagttttaaaattatattag

SEQ ID NO: 8149 - DNA, 1074 bp, Methanobrevibacter gottschalkii
  source 1..1074: mol_type = genomic DNA
atgatttatgtaataggtattggtcaaaatagagaaaacatgacattaggtgctttaaaagctattgaagagtctgatgtaataatcggttataaaaaatatattgatcaaattgaagatttagttcaagataaagaggtcattaaaaaaggtatgggtgatgagatagctagagctgaattcgctattcaaagaagtttaaatggtcaaaatgtttcattgattagttctggagatcctggcgtatttggaatggcaaatgtattatatcaaattgttagtaaatatgaaggtgttgaaataaaggtttatcctggtgtttctgcattaaattatgcttctagtcatttaggagcacctttaaacgattttgcagcaattagtttaagtaatattttaactcctttatctgaaattgaaaaaaaattagaatatgctcttaaagctaatttagttgttgcaatttataatccgattagtaaaacttgtaaagaaccatttaaaagatttaaacaatgcgtttttaatattaaaggtgaagatgccttaattggtattgttgatagtacatatgaacctccaaaagcaagcattgttaaaattaaagaattaactgaagacatggttaatatgtcttgtactttaattgttggaaatgatttaacttatgttcaagatggaaaacttgtaacaccaagaggatatgtaattagatccaaaattcatgaattatcacgtaatcattatgaaaagttcttaaatggagaaattgccaatggtccaaatagtgaatgtgaattttatccatgtcattatgaaggtcaatattgtgatttctgttattgtccattttatccatgtggggattcttcaactggtggggagtggattaaaggtaaaaatgtttggaattgtaaaaattgtatatggttgcataataaagaaagtattgaatgtttacgcccaccttttgaaaatattttagaagatattgaagatttaaaatcaaagaaaaaaactttattaaagcttagaagagcatgtttattgaaaaataatccaaataatctttag

SEQ ID NO: 8150 - DNA, 603 bp, Methanobrevibacter gottschalkii
  source 1..603: mol_type = genomic DNA
ttgtcaattaaaaatcttttaatagaaatgaaaaatatgtcggaacttatggtggatttagcttactcggctgttttatttaacagtaaagatgcagcagaagaagtgattacattagaaaatgaagttaattcaatgaattatgaaattaagaaagaatcattagttgcagcacgttcatatgaagatgctgaaaaattaaccgcattacttgaaattgctgaagctgctgaaagtatggctaatgctgcaaaagatttagctgatttagtaatcactggttttaaaccacatccggtatttaaaatggtaatggaagaatctgataaaagtattgttagagtaacaattgatgaatcatcagaattagcaaataatacattaggtgatttacttttagttaatcgtactggtatgagagtaattgctattagaagaggtgtgtcttggatttatggtccagataaaaatacaatgcttttagctaatgatgtattaattttaaaaggtacttatgaaggtgctgaattattagaaaaacttgcttctggagcttgttctcttgaagatattccagaagaattagaagaagaattagagtga

SEQ ID NO: 8151 - DNA, 1272 bp, Methanobrevibacter gottschalkii
  source 1..1272: mol_type = genomic DNA
gtgatatatgtgaaaaagcaacagaagaagatacgcagttcactatctactcgaacattttctgaatttttcagtgaacatgactatgttataaaagaaggattaattgctcttttaatctgtgctgttggagatttaatagcaggtattgtattaggtaagatgacttttttccttgagtcttttccaggtttgttggttgttattcctggagctattggaatgaggggaaatatttttggatcatttgcttcaagattatctactagtttacacattggtttaatatctccacattttgaattttcagatgatttaaacaataatatattttcctcatttgttttaacattagttttatctatatttttaggtattgtagcaaagattttttgtattttactacattatcattcaatggatttaattgattttatattaatttgtacaattgctggcttaatttcaaacttaataatgctaccaataactatgtttatttcttttaaaagttttgaacatggttgggatccagacaatattacaagtccgattattgcagcattcggtgatttatttactttacctgcaatcattgtatcaatttttattttgaaatctttaaatttcaatctcattgttaaggatgtaattttagcaattattttaattgcagttttaatgagttttattcattgttataaattatcttatgaaactaaaactattttaagacaatctacaccaatattacttttatgttcttttttaggaggatctgcaggaggaattttaaatagttctgttgaaacattacttagtaatcctagtttacttacattaattccgttattttcaggtgaaagtggaagtttaattagtattttaggtgcaagaatatcatctggtcttcattctggtttaattgagcctttatctaaaccagaaggggaaacaatccataattttggaatttgttatatattagctattgttatatttccattaatcggaatccttgcagagacatcatcaatttcatttggaacaattggtgttggttttgataaaataattctaattagtggattatcaggtattattttagttacagtcatggtatttcttgtttattatatatcaacaagttcatataataataatttagatccggataatattgtaattccgatttcaacaagtgttacagattcaatttctagtttaattttaatttccatgtctttattgatattaggtactttaatttaa

SEQ ID NO: 8152 - DNA, 867 bp, Methanobrevibacter gottschalkii
  source 1..867: mol_type = genomic DNA
atggataatactggaaatatgaccatagaaataacagtagttttattaatagttttattgattattagtgttactattacctcctatgagaatataacagataaactaattaaaacacaagaaaaagaaaatatggaaatattaacctctgagattgttgataacttaatcaacaatcctggagtaccagaaaaatggtttgaatatggtaaaggaacacctggacttgcaattataaatgagggtggtgaaattattccaaatagcgtttcatattcaaagttaatctcgcttaaagaaaattataaaaaacttgttgatgatcagttattcaaatctaaatttcattcatcaatggaattaatccctcaaaagagaactatttcaagtgtaaaaattggttctaatagtgaatcaaataatatattttcagttaatagattggtaaaatgtgatttttacaaaaaatatgttttaaaagactttaaaaatgatggaaaatgtaatcacaatcatgaccaaaaatatcatagttgtaattattttaaaatttttaaaggaaatctaaaaaattcagattactatttattaatcgaggatagtgaaaagtatgatttaaaatatattgttgatacaacaagagttgttaaagaaaaatattgggaaaatgcaatatcaaataaaatttatttaaatgataaaattaatttttatgatgatacaagtgcaatcgtatttattcattttaacaaaccacaatctaaggttgttttagtaagtgttcctaaaaattttgataaaaataaattaaattatgattattttataacaaacgaatgtcaatttgttctaaaagtatggtattaa

SEQ ID NO: 8153 - DNA, 939 bp, Methanobrevibacter gottschalkii
  source 1..939: mol_type = genomic DNA
atgaaaatcaactctaaaggaaatttaatcgtaggaacgacagctattttaattatagcattattatttatttgtatttttgttgtaacatctataaattatattcaaaataaaaatatcggcattgaaagtaacgataatttcaaatatattattgatgattatacacaaaacttagaacttaattgcagagacgcaattgatgaagcaacccaaaaagtttttaacggacttcctgtgacaaacagtgaaaaccaaattaaaaagaacttaaataaaattttagataaaaaaaataaagaatatgaagaaaaatacgacgtaaaaattaattctgaaacattgtctgttgaaaataccaaatcaccatggaaaatactttttaaaattaaattaaacatcaaaaagggtgatgaaaaatattctaaaatagttgaaaaaaatgcatctgttgaaggtttaagagaccccttaccaatagctaaactaaccattatgtctggaattctaacttatgataatcaaattcattataaaactgcattatctacatatatgttattacatcatttagattcgccagaatcatatattgaagcaacagcaccattatacattaaaaaatgcccatatgatccatatatccatcatggagaccctggagtaattgaagactgtcttaaacatggatattttcatgaaagtgcagatggaagttgttatttatgtagattagaaggaaagggaaaatgtcctcattatggtttagaagtattcatacaaactcatacacctctaaaaaatgagtctttatcttgcccagatcacgttgtatttgcagaccattataacggtgaaaaaataaatccagatgattggaatagcctgattttagattcatctcatagaaagaaatacgggttgataaatgatggataa

SEQ ID NO: 8154 - DNA, 399 bp, Methanobrevibacter gottschalkii
  source 1..399: mol_type = genomic DNA
atgtctgatactgtaagaacatggcgtcatattcaacaaagatataatctcattggtactaaatgtaacacctgtggtgaattatttttcccatctcgtgtagtttgtcctaattgtagaagaaaaggagatcttgaacctttccaattttcaggaaaaggtaaaatttatacatattcagtaattagatctgcacctgatgatttcaagaaatcagcaccatatgcagtagctgtaattgagcttgaggaaggagcaaaattaacttcacaacttgtagactgtgatgttgatgaccttgaaatcggtgacgatgttgaaatggtatttagaaaaataagagaagatggaaaagacggagttatctcttatggatacaaattcaaagttatcaaataa

SEQ ID NO: 8155 - DNA, 900 bp, Methanobrevibacter gottschalkii
  source 1..900: mol_type = genomic DNA
atggatacaaattcaaagttatcaaataatgctggtgtgattttagtaagtcatggtagtactttaccttttgcagaagaagttttcacagaaattaaagaaaaattcataaaaaaaagtggtttagctactgaaattggatacatgaaagtatctgaacctactattgccggtgctgttgagatattaaaagaacaagtggatgatttagataaaattattgcacttcctgtatttttagctccaggaattcatactaatattgatattccacagttattaggtttagaacctttggaagttgatccaagatgtcctgatggaaagtatcctgctgaacactatttatcaatagctgatgatgttgattttgatggtgaaattagattattaacttcaattggacctcgtgatgaacttttagatattattgataaaaggattaatgaagcattatctgaatctaaattagatgatagtgctaaaacaggtattttacttgttactcatggttctagattacattacaacaaagaatttgccaccgaattatatgataaattcaaaaaaacatgtgatttaccatctagctttggatttatggaattatgcggtccaagcataccagaatctattaataaattagcagatgaaaatagattagaacgattagttgttgttcctgtatttattgctccaggaatgcatacaactcatgatattccacatatattaggatttttagatgatcatgatcataatcatgaagatcatgggcatgaccatactcatgatttaactcctgttgagtttgatggtgagattctttatcctgaacctattaaatctgatgatatattgattgatatgttagttgcaatggtaaatgaggctttatag

SEQ ID NO: 8156 - DNA, 480 bp, Methanobrevibacter gottschalkii
  source 1..480: mol_type = genomic DNA
atgtctgataaaaaaacaggaattttacttttaagccatggttctaggttagaagaaggtaaaaaagtaattgaagcttataaaaatatgtatttagaagaatttccagaggctattgtagattatgcttttatggaaatcagaaaaccaggtattccagaaacaatcaaaaaattaaccactgaaaatgatttagaaaaaataattgttgtaccggtatttgttgctcatggattacatactaaaagagatattccggatttgctgggtattgaaagtgactttgatattgaagaagtatcttgtcatcatcatgatcatggccatagtcatggacatcatcaccatcatcatgaacacagtcatgaggaagaggaagaggaatttgaatttgatggtgaaataatcttaacagatcctcttggtgttgataaacgtatgtatgaaattattaaagacagagtttcagaacatttatga

SEQ ID NO: 8157 - DNA, 426 bp, Methanobrevibacter gottschalkii
  source 1..426: mol_type = genomic DNA
gtgattggaagacaaacaataaacatcaataaaagtagagagcttgaagaattatatcaaattatggagaaaaaatgggataaagaaaaatataatactttctttttaggaaaaccaaatccgttatccatagaaaaatacatctgtttaccggcaactcaaagatatatgataattgcttatcctagaaaaggaggaaaattcttttctagaaatgataaagttgttttaactatttgtgatactccagatagtatgaaaaatcaaatagttacttcattagctagagacaatatttttaaattaacatatcagattagtgaatccaaatctagaaatgaagaacgtaaaggtccaactgaagaaacgttacaaggatatactgcatacatgaaacaaatacttgaagaagaagatttgctttaa

SEQ ID NO: 8158 - DNA, 1026 bp, Methanobrevibacter gottschalkii
  source 1..1026: mol_type = genomic DNA
atgttatttatattgttagattatatgatattatttttaagacaattaaaatttatacaaagacaaaatttatttattttaaaagttatactaatatttatgagtctaaaagtctctgatattggcgaaaaagaattagttaggtatattattgctaattcaaagaaaattactccggatgatgctgcaattactccattttacaattctaatttaatttcaacttgtgacatgcttattcaatcaagacattttccgaaaaacatgtcttattatgatatgggatttaaatcagtaacagttaatgtgagtgacttagcagctatgggtgcaaaaccattaggatttcttttatcaatggcaataccaaaaaatttggaggtggataattttaaggaaattgttggtggagttttaaaagcttgtgattattattcaattccattaattggtggtgatactaatgaagcatctgaaataataatatctggaacagcattagggttatgtgataatccattaatgaaaaataattataaaaaagatgatttaatagctattactggagatattggtcttgcagcattaggttttgaaatagatgatttggatagtatttatgttaagcatgctctaaggccaaaagctagaattaatgaggggcaaattttaaaaaaatatggtgcaacttctgctacggatattactgatggacttgcaagtgaattatatgaaattaaaaaagatggctttggattcatgattcatgaagagttattgggaattacagatgaatataaaaatttagccagtaatcttaatttagattatttggatttagtctttcatattggtgaggattttgaattgttatttactatatcaaaagagaatttagaaaaattaccaatagagtataaggttattggtattgtatctgattctgatgttattgaacttactttagaaaatgggtttgttgaacaaattaaaaataaaggttatgagcactatgttggtgagtaa

SEQ ID NO: 8159 - DNA, 873 bp, Methanobrevibacter gottschalkii
  source 1..873: mol_type = genomic DNA
atgttggtgagtaatgacttgtataaaaaaagttctaaaacacaaaaaatcaggtgtgagatctgtgctaattattgtaaaatagatgagggtaatgttggtatttgtcatcagcataaaaacattaatggtgagctatttgatgaatcatatggtattgtttcatctttaagtccagatccaattgaaaaaaaaccattgaataaatttttacctcacacgtcaacatattcaattggaggttttgggtgcaatatgagttgtttgcactgtcagaactatataatctctcatgaatatggtaactattcaagaggtattaaaataacaccagaggagattgtggaaaatgcaatcaattacaattgcaagtcaattgcttggacatataatgaacctactatccacttactcttcaacaggaaaacttctttacttgcaaaacaaaaaaatttgaaagtgatatatgtaagtaatggatatttttcagaaaaatctttagaagaagttttatgttttgtcgatgccttcaatatagatttgaaatccatgtctagcaatttctataaaaaagtctgtggtgctgatttagacattgttttggataatttaaaaaggatttatttcgaaaataaacatttagaaattacaaatcttataattaatgaatttaatgattctattgacgaaattacacaattgtgtgattttgttgtaaatgaattaggtccggaagttccactacatttttcaagagcgtttccttattataaaatgaatgatatttcaccaactaatacagaaacattgtttaaggcaaaagaaatagctttaaaaaaaggaattcagaatgtttatttgggcaatatttaa

SEQ ID NO: 8160 - DNA, 1254 bp, Methanobrevibacter gottschalkii
  source 1..1254: mol_type = genomic DNA
atgatattaaaagataaaaacattatagaaattaccgaagaactttcaagtgagtttgaagtagcaaaagttttaagaaaatatccaaaagacactgttctcattaaaaatgtaaaaggtttcgatattccagttatctcaggaatatgtaacacaagggataaaatcgcaaaatcaattaactgtgaagtatctgaaattactgaaaaaattatcgaagctatggaaaacccaattaaagtagacaaatttactgatttttcagattatgatagtttagatattgatttaaataaaattcctattttaactcattatacaagagatggtggagcttacattactgcaggtgttgtatttgcacgtgatccggtaactggaattcaaaatgcatcaatacacagaatgatggtccttgacaataaacgattagttattaggattgttccaagaaatctctatacttacttccaaaatgctcagaaagcaggtgaagatttgcaaattgcaatagctatcggaatggatcctgctattttacttgcaagtactacttcaatacctattgattataatgaaatggatgttgcaaatgcatttaaaaatggtgaattagaattaattaaatgcggagaactagaagttccacaagcggacattatattggaaggtaaaatttcagtgacagaaactattgctgaaggtccatttgtcgatttaactgacacttatgatattattcgtgaccagccaataattaacttagaaaaaatgcacattaaaaaagatgccgcatatcatgcaattttaccagctggatttgaacataaattattacaaggtcttcctcaagaacctagaatattcaaagctgttaaaaatgcagttccaacagttgaaaatgttgttttaactgaaggtggttgttgttggttacattcagttgtttcaattgataaacagacagaaggtgacggtaaaaatgctattatggcagcattatctgcacatccctcactgaaacattgtgttgtagttgacactgatgttaatgtcttcgatgctgaagatgttgaatatgcaatagccacacgtgtaaaaggtgatagagacattatgattgttcctaatgtgcgcggttcttctcttgatccagtagctaagagtgatggtacaactactaaaattggagtagatgcaacaaaatcaattaaaacacttgaaaaatttgaaagagttagtttttctgaataa

SEQ ID NO: 8161 - DNA, 1026 bp, Methanobrevibacter gottschalkii
  source 1..1026: mol_type = genomic DNA
atgacaccaaaaataatgattattcttggaagtggatcggatattgctatagctgaaaaaagtatgaaaatattggaaaaattagaaattccatatagtttaaaaatagcatctgctcacagaacacctgatttagtacgtgaaattgttattcagggcactaatgcaggaattgaagtgtttattggtattgcaggacttgctgcacacttaccaggtgcaattgctgcttatacaccaagaccagttattggtgtaccagtagatgttaaaacaggaggtgttgatgcattagaatccattgtccaaatgccttatccttccccaattgctactgtaggaattgatagaggagacaatgctgcaatattagctgcacaatttattggacttcatgatgatgaaatacgtcaaaaaataattaatttaagaaaaaattacgctttaaaagttaaaaatagtaatgaggaaatcatacaaaaaattgaagataaaaaattcctccaaaatgattttttaagaattaaagacctaaatattaatgatattgaagcggatgaaagtgacccatgctgtaaaaataagaatgctgatgttgcaataattgttggaagacaaacagatgttgtaactgctaaaaaagtagcagtgattttagacagacttaaaatttctcatgacacaaaagttgtttgtcccattaggtccactaaaaaattcacaaattatgtaaaagcaatgaaaaatgcaaaaatattcattggaattagctccaattcttctcaagtaactggtggaattgtaggactaactgatagaccggtaattggcgttccttgtactaatgaaaatggcgatgattatatgcttaccacagttagtatgccacctggagttcctgttgcaaccgtaggaataaacaacggaaaaaatgcggcagtccttgcaggagaaattttatcaattaataatccttctattacagaacttctcggaaaaataaaaaacaaaaaaattaatttatag

SEQ ID NO: 8162 - DNA, 2190 bp, Methanobrevibacter gottschalkii
  source 1..2190: mol_type = genomic DNA
ttgaaaataacattaatatacttaattaaattacgtgaaaaaatgatagcaaaaacactcgaaaaagaattgaatctatcaaattggcaagttaaaaaagtaataaaattaattgatgatggaaataccattccattcattgcaagatataggaaagatgttactggttctttaaatgatgcaacattaagaaaatttgatgaaagattaaaataccttagaaatttagaagaaaaaaaagaaaaaatcatcaaaagaataaatgaacttggaaaattagatgataacctaaaaaataaaattcaaaattctaaaactttagttgaacttgaggatttataccgtccatataaaagtaaaaaacaaacaagagcaacaaaagctcgtgaaaaaggtcttgaatctttagcatccataattttaaaacaagaaattaaagaaaatgttaaaaatattgctaaaaactacataaccgatgaagttaaaacactagaagaagcaattcagggtgcgcaagacattattgcagaggaaatttctaataattctgaatttagaaaaaaaattagaaaaaacaatttctatactgggcaaattgaaacaaaaactaaaaataaagatgaatcgactgaatatgatctttattatgattacgccgaaaacattaaaaaaatacctccccatagaattttagcaattaacagagctgaaaaagagggaataattaaagtaaaaatcaattgtgacaatgaggaaataattaaatatctaaatagacacgttttgaaaaatatatctggaattcctgaaaagattgaatataatccctatacaacccaaattataaaagaatctgttgaagatgcatatacaagattaatttcaccggcaattgaaagagaaattagaaattaccttactaaaaaagcagaagaaaaatcaattgaagtgtttgctaaaaacttaaatcaactattaatggaaagcccattagttggaaaaacaatactcggatgggatcctgcttttagaactggttgtaaactagccatcatagataaaactggtaaagttcttgataccgaattaatttatccaacacaacctcaaaataaagttacagaatcaattaaaactgttaaagatttgattgataaatacagcattgatgtaatagctattggaaatggaactgcttcaagagaatcagaagagattgttgctaaaataattaaaaacactaatgtagaatacattatagtaaatgaagctggtgcatcagtttattcagcttcaaaatatgccgatgaagaatttcctgatttttcagaaggtgaaagaagcgcaatttcaattgcaagaagacttcaagatccattagcagaacttgtaaaaattgacccaaaatcaattggtgttggccaatatcaacatgacatgaatcaaaaacaattaaatgaaacattaactggcgttgttgaaaaagtagtgaatgaagtaggagtagatttaaacactgcatctgtaagtttacttaattatgtatctggaattggaaatacgactgctaaaaatatcataaactatagagaagaaaatggaagttttgactctagaaaagaattattaaaagttaaaaaacttggtaaaaaaacatatgaacaatgcgcaggatttattaaagtcaataaccctaaatatcctcttgataatacgaccatacatccagaatcatatgatgctgcttacaagctacttgaaaaactcaattatagcattgatgatattggaagttcaaatttaaaattagacaatattaatcttgaagaaatttcagtagaattggatattggtcaagaaacacttaaagatattattaaagagcttagaaaacctggtcgtgatcctcgtgatgatatgccaaaaccaatgcttagaaaaaatgtattgtcaattgaagatttagaaataggaatgataatgcaaggaaccattagaaatattgtggattttggagcatttgttgatattggagttcatcaagatggattagtgcatatttcacagttagttgaaaataaatttgtaaaacatccgcttgatatcgttagtgttgggaatatagttgatgtaaaagttttagatgttgatttgaaaagaaatagaattaatctttcaatgatactttaa

SEQ ID NO: 8163 - DNA, 1698 bp, Methanobrevibacter gottschalkii
  source 1..1698: mol_type = genomic DNA
atgtattggttttttgtaatcctttcttttttgcttgcaggtataaaaactcaaaaacctaataaatataaaaaagtttcagttatcattccagcatataatgaggaagagactgtggccaaggttgtaaatgtagttaaaaaagtatcctttgttgatgagattatagttgttaatgatggttcatctgataatactgaaatggaagctttaaaagctggagctattgtaattaatcatgaggttaataaaggaaaaggagaagctttacaaaccggatatagggaagcagaatgtgatattattgcatttattgatgcagatatttataatttgacatcaagtaaagttgaatcaatgattaaacctattttggatggtggagctgatattactaaaactaaattctctagagcaagcggacgtgttactgaacttactgctaaaccattacttaactttttcttcccagaaatttcatttgaacaacctttaagcggtcaatttgcagcacgtaaggaagtattaaagaaaattaattttgaaagcgattatggtgtagatgttggtattgttattgatgctgatgttttaggaatttcaattatggaagttgatattggagctattgaacatgacatgtctccactttctgatttaaatttaatggctaatgaagttgtaagaactattataggtcgtgcaaataagtacggaagagttacaatgattgatgatattgggtattacattagaatgtctatcgttggtttgtctttagtaattcttggtttatttacaatattctttgtaaaatttgttccattagctattggagttataatttcaattataggacttttaattgcaattttttatatttttaaagttattattaaatcaatagtaatgtttaaaaagacaccaggccgcaatttattaaaatcatttgttaaaattcattttccaatgattatttcaattattatattgcttcttatgatttcaacatttctcggtgcagcacattttgatcatggagttttatcaattgaacccaattctagaaatctaattatttatgctgatgattctccaagggatactatctctgttagaggaccatatactattgatactgcaattgaaaatgaatctggtcaaatacgtatgccttctgatgctatgatgacattaggagtcaatattaatgatacgattaaattaggtgcgaatacttataaagtcaatgaaaccagattaggggagcctgatattttaaggttacctattgaagttaaaaagctattgcaagttgaaaatggtgaagttattcaaaacagtcgtttaaaagatgtttttgatggttctttaattactcatgcttatgaatataataatacaacaattaaagaaaaatattttattacatcaaatgaaaaacaatcatctacatatgaaatatttttggataatgaatctattgtgaattcatatggtacttttaaggataacggaacttatgatatttctgtagatgggaattatctaacttcttttagttataaaaataatttgactaaatcatttaaatttgacggtcatgatttagaaattgtatttagggatacaaattccacttcaattaaacaattttctagtggaaatcaaggtgttttcttaaattttaatttttaa

SEQ ID NO: 8164 - DNA, 936 bp, Methanobrevibacter gottschalkii
  source 1..936: mol_type = genomic DNA
atggaaatcttaaaacctaatgaattaagagaaagatttaacgacccatggattgcaccatataaaaaagtattgactatggtggacggaaataaagtagaaatcgttgaatatcatccatgcatatccggttcgcactggttgttaaatcaatacctgaataattctgagttgattgattcagcttatcgtgacggtaacaaacatgtttataaatgtcatgttggtaaagcaccactagaccttaaagcaagctttaatgcagcaggaattgatgagattgttgttgctgatgatgaggttaaagtaactcacagcggacttgccggtgcaggtgttggagctggaatgtgtagaggaatgggtgaaggtgttaaatatattgaacttattcaagttggaggcggttcaaaagcaggaaaagctaccgttgttactccaaaacttaataaaatagtaattggtgttgatgacactgatgttaaagatgctggagctacttggactatggcacataatttaggtgttgaacttgcaaatgaaggttttgaatacttagatcatattattgtccaattatatcctcataatccacataaaactcaaaattgtgtatcaattgctttaacattcgctgttgaagaatctaaaaaagaaaaattaatagacagagttattgaaattcttaaaagagacacattatctgataaaactgcaattgctatcttagaaggtttagatattcctgaaaaattaagaaaatattcaatagctacaaaatcaggaatgatggatattgaaactgcagaatcacttgcaaaagaattaaacataccattaattgctgttactggtgaacaaggaaaagttggtgctcttgctgctttaggtctttacgatgatgtggaagaagcagtgaaagcatatgataaataa

SEQ ID NO: 8165 - DNA, 423 bp, Methanobrevibacter gottschalkii
  source 1..423: mol_type = genomic DNA
atggcaaaatatgaaattgcagcagtagttgcagaatttaattatgatattacacaaatgatgttagaactcgcaaaagcagaagcaaaaaatagaggatgtgaaatcacaaaagtaatcgccgttcctggtgtatttgatatgcctcttataattaaaaaattattaaaatcagaaaaatatgatgcaattgtcaccttgggtgctgtaatagaaggcgcaactgatcacgaccaaattgtagcacaacatgcttctcgtaaaattgctgatttagcattggaatatgatacaccagtagcacttggtattactggtcctggaatgactagattagatgctcacagacgtgttaaaaatgcaaaaagtgcagttgaagcagctattaaaatgtgtgacagattaagtgaattagacgaatag

SEQ ID NO: 8166 - DNA, 102 bp, Methanobrevibacter gottschalkii
  source 1..102: mol_type = genomic DNA
atggattttaaaaaattaacaaaaatacaatttgcagcactttttatcatatttattatggtactgagtggggttgcaggattccttctctatattatttag

SEQ ID NO: 8167 - DNA, 1008 bp, Methanobrevibacter gottschalkii
  source 1..1008: mol_type = genomic DNA
ttgaatacctcaaaaacaaaagataaatataaaattgctgttattccaggtgatggtataggtaatgaagtaatggaagcggcaatatatgttttaaatgctttaaatatcaattttgattatgtttatggtgaagctggtgatgaatgccttgaaaaaaacggtactgcattgcctgatgaaacattagacattattagaaattctgatgcttgcttatttggtgcagcaggggaaactgcagcagatgtaattgttaaaatacgtcaagaaatgaaaatgtttgctaacttaagacctgtgaaatcataccccaacaccaattcattgtcagataatatagatttcatgatagtgcgtgaaaacacagaaggattatacattgcaggtgaagaaagttatactgacgaaggtgcagtagctagacgcattattacacgtgaagcagaaaaacgcattattgaatatgcatttaaatatgcaaaagaaaataataaaagtaaagtaactggtgttcacaaagccaatgtattaaaaaaaagtgatggtttattcaaagatgtattctatgaagttgctaaaagatatcctgaaattgcaacagaggattattatgtagatgcaacagcaatgtatcttattacaaaacctgaaagctttgatgtgattgtaaccacaaatctttttggagacattctctccgatgaaggtgcaggtcttgtcgggggacttggtttaataccatccgccaatattggtgaagatgctgcattatttgaaccggttcatggttcagcaccagatattgcaggtcaaggaaaagcaaatccaatagctatgatgctttcagctatcatgatgcttagatatcttggtgaaaatgaagcggctaatagatttgatggtgcaatattaaaagtacttaatgaagctgatattttaactggtgatttaggtggttctgcaaccactatggaactagctgaggaagttaaaaataatttataa

SEQ ID NO: 8168 - DNA, 480 bp, Methanobrevibacter gottschalkii
  source 1..480: mol_type = genomic DNA
atgaaaggaacagcatggaaattcggaaatgatattgatacagacattatcgttccaggaagatatttaatttatactaatgaagaaagattatcacaacattgtatggaaggtttagatcctgattttaacaaaaaatgtaaaaaaggagattttattgttgcaggaactaactttggatgcggatcttcaagagagcatgcaccaatagcacttaaaggtgctggagtatctgcagtaattgctgaatcttttgctagaattttttatagaaatgctacaaatattggaattcccctattagaagctccaggaattaataaacttatagaagatggggaagaaattgaaattgacatgaacaaagcaactataaaatctcaaaatggagaaataatctcatttaaaaaattacctccattcatgttagaaatattagaacaaggtggtttaattgaatacctcaaaaacaaaagataa

SEQ ID NO: 8169 - DNA, 1245 bp, Methanobrevibacter gottschalkii
  source 1..1245: mol_type = genomic DNA
atgccaacaatgtcagagaaaatattagctaaagcttccggaaaagaaaaggtagaagcaggagatatagttattgcaaatatcgatgtagcgatgacacatgatttgactgggcctctttcagtggaatcttttgaaaaaattggagctgaaaatgtttgggatgcatcaaaaattgttattcctttcgatcaccaagttcccgcagattctattgactccgccaataatcatataataatgagagaatttgttaaaaaatacaatattgaaaatttttatgatgttaatgctggagtgtgtcaccagattctaccagaaaaaggtcatgtagtacccggagaagttattgtaggtgcagactcacatacatgtactcatggagcattaggagcattttcaacaggtatcggatcgactgatatggcaatggtatttgctgaaggtaatttatggttaaaagtacctgaaacaaatagatttaatatcacaggagatttaaaagaaaatgtttatgcaaaagatgtaattttgcacattatcggtgaaatgggtgctgatggttcaacttacaaagcctgtgaatttgctggtgaaactatatcaaatatgagtatttcagatagaatggtattatgcaatatggcaattgaaatgggtggaaaaaccgggttagtagaacctgacaaaaaaacaattgattatgttgaaaaacattctaacaaaccttatgaaatatttaaaactgatttagattcctcttcgcttaacatgattgacattgatgtgagcaacttagaacctcaaatagcatgtccccataatgtagataatgtaaagccaattagtgaagtagaccaagaaatcgaccaagtatttttaggttcttgtactaatggtaggttaagtgatttaagggatgctgctaaaatattaaaaggcaaaaaagtagctaaagacaccagaatgctagttatcccagcatcacaagaaatttatttaaaagcattagatgaagggttacttaaaatatttgttgaagctggtgcacttgtatcagctccatgttgtggtccatgcctcggaggacacacaggaataattggacctgatgaagtaagtctctcaacttccaatagaaactttagaggaagacagggtagtcctgatggaaaagtatttttatcttctgctgctgttgccgctgcttcagcaattgaaggaaaaattgtaagtccagagtga

SEQ ID NO: 8170 - DNA, 1209 bp, Methanobrevibacter gottschalkii
  source 1..1209: mol_type = genomic DNA
atgagtaactcaatttttaaaagatttaaaaaaaaagaaactcctataattgaagaaaaacttcctattttggaggataggattttttgggtttcaactttacaaaaaattgcttttccggtattgaataatttagcaagagattctcttagtaaaaacatgcccgttgaatcaatttctgctgaaggtcattcgtctgcttattttgatgcttttgtaagaatattcaatggaattgcatcttggttggaacttggtgcggataattctgaagaaggtaaaattcgtgagaaatatatttatttaacattaaaagctatttctaatgctattaatccaaaaagcaatgattatatttttgttgttgaacctaaacaatctttggttgatgttgctttatttgctgaaggattactcagagctaaaaatcaaatttggcttaatttacctattaaggttcaagctagaataatcagagaccttaaaagtacaagaatcattgccccttatgaaaatcattggttgttatacacttctatgattgaagctgctcttttagaattcactggggaatgtgataaagaacgtttagtttatggtgtccgtaaatttagggatgaattatatatcggagatgcaatgtattctgatggcgaagattttgagttaggttactataatagcttatttattcatcctatgcttaatgatattttaggtgtaatgagaaaatatggtttggaagatggtgaattcttagatgttcaattaatgaggtcttcaagattagcatctcaacttgaaagagttatttcacctgaaggaacttatccattacttggaaaattcttatcttataggtgtggtgttttccatttgatgtctcaagcctctttacttaaaatattgccaaaaaatattcatccggctcaagttaggtccgctcttacaaaagttttaaaaactcaatttgaatcttacaataactttaattcaaatggatggttaattattggcttggagggatcacaaactgatatttctgatgaaactactaatacaggtactctttactcatgttgttcaatatttttaccattaggtttagataggaatgatatgttctggaaagcaccttctgcagaatggagtagtcttaaagcatggaatgggcatccaattcaaagggatcagcctattaatttttag

SEQ ID NO: 8171 - DNA, 1239 bp, Methanobrevibacter gottschalkii
  source 1..1239: mol_type = genomic DNA
atgaaagtgtgtataataggtcaaggttatattggacttccaactgcagcacttttttcaaaaaatcattgcaaagttgttggagtagatatttctgaaaaaataattaataatttaaacaaaggaattgttcacattgaagaaccgggaataggtgacctaattaaaaatgcagtggaaaaaaaatcatattcagccagtttaactccgcaaaaagctgatgcatttattattactgtgccaacaccatacattgctgaaaattatagttgcgatttaagttatgttattgatgcatgtcactcaatattaccatacttagaaaaaggaaatatagttattattgaatccacagttgcaccaatgtcaactgacgaacaaataaaaccaatatttgaagaagcaggttttagtattggaaaagatttatatcttgcacattgtcctgaaagagttcttccaggaaaaataatgtatgaattagtcaacaataaccgtattattggtggagttacagaagaatgtgctaaaaaagctagtgaagtttatggagaattcgtagaaggtgaattaatacttactgaagcaaagacagctgaattatcaaaatgtatggaaaatacttttagagatgtaaatattgcacttgctaatgaacttacaaaaatttgtgctgaaattggagtaaatgcacttgatgtaattgaaatggcaaataaacatccaagagttaaccttcattccccaggaccaggtgttggaggacattgccttgcaattgatccttactttatttatgcaaaagctcctgaaactgcaaaaattattaaattagcaagggatacaaataactccatgccagattttgtttgcgataatattagaaaaatcattaaaaaaggtaaaatagctgttttaggtgtttcttataaaggaaatactgatgatgatagggaaagtccggcttatgaaattatagataaattaagtaatgattatgagattcaaattcatgaccctcatgttgaaaatcctaattatgtaaactttgatatagcagtgaaagatagtgatttaattttagtgctctgtgaccataacgaatttaaagatttagattataatttaataaaaaaaagtatgaaaaatccagtaatattcgatacaaaaaatataataaaagaagttccatctgaaattaaattatataattatgggaacttatatgaattaaactaa

SEQ ID NO: 8172 - DNA, 840 bp, Methanobrevibacter gottschalkii
  source 1..840: mol_type = genomic DNA
atgaagattttaataactggttctaatgggatgctgggttatgatttgcaggaagttttaaggaggactcatgaattaatacttacaacttctgaaacattagatatcactgataaaaaacatacaatggagtttatttcaaataaaaagccggacattgttataaattcagcagcatatactgatgttgatggttgtgaggaaaatcaagatattgcttatactgtaaatagtgaaggagttaagaatcttgctattgcatgtaaggagattgattgtcctcttgttcatataagtactgattatgttttcaatggtaaaagtgataaaccatggattgaggaggataatgttgatccaataagtgtttatggtaaaagtaaacttaggggagaaaaatatattcttgaaatccttgataaattctttattgtaaggactgcatggttatatggtattaatggccgaaattttcctaaaacaatacttgaacttgcaaaaaatcattctgaaattactgttgtttatgatgaaataggaacacctacatatactcaagatttagctaaagctatttctgaattaataaaaactgatttttatggtatttatcatttaactaattccggaagttgctcttggtgtgagtttgcaagatatatatttgaagtggccaatgttgatgtcaaagtgattccagttaccgcatctgaatttgctcgttctgcttcacgtccaaattattcagtattgaaaaataaaaactggattaaaaatggatttaatccacttagaaattataaagaagctattaaagaatatattgagttaatcatatga

SEQ ID NO: 8173 - DNA, 450 bp, Methanobrevibacter gottschalkii
  source 1..450: mol_type = genomic DNA
atgaataaaaaattaattttaataattgcatctattgtcgcattgtttagtatcgcctctgtaagtgcgggattttttgatttcttacattgggatgacgattcagataatattaatgtagttgaggatggccaatattgcacagtgaatcaggtttcagcttatattaaagaatttcataaacttccaagtaattatataactaaaaaagaggctcaaagtttaggttggcatggcgggccacttaaaaaatacgctccaggaaaaagtataggtggagatacatttactaataggcagcatatacttccagatagtgattataaatacattgaatgtgatataaatgctaatggaacatttcgtggtgctgaaaggattgtttacaatactggcaactataaagtatactatactgatgatcattacaacacatttacagaggtataa

SEQ ID NO: 8174 - DNA, 231 bp, Methanobrevibacter gottschalkii
  source 1..231: mol_type = genomic DNA
atgctaattgatggtaaattgattaaaacagaggggcatgattatttaataaaaatattaaatctgccggactattatggtaaaaatttagatgcactttatgattgtttgtgtgaaatggattgtgaaattcaattaattaatccaaaatatgttaataaggatattattgatacttttttggatgcatctatcgaaaacgaatttctaaaatttgaaatattatattaa

SEQ ID NO: 8175 - DNA, 867 bp, Methanobrevibacter gottschalkii
  source 1..867: mol_type = genomic DNA
atgaaaggtatagtgcttgcaggtggttctggaactcgtctttatcctatcacaaaagcagtttcaaaacaattattgccgttatatgacaaaccaatgatttattatcctatatctgtactgatgcttgcaggaattaaggaaatattgattatttcaactcctcgggatttaccaatgtataaagaccttttaggtagtggagcaagttttggaattaaattatcttatgctattcaagaaaatcctaatggccttgcagaagcgtttataataggtgaagatttcattggaaatgataatgttgctttaattttaggagacaatatatttcatggtcatagatttacagaaattcttgaaagagcaactaaactggatgaaggtgcaataatattcggttattacacaaataatccagaagcttttggtgttgttgaatttgatgataattggaatgtactttctgttgaggaaaaaccaaaaaatcctaaatcaaattatattgttccgggtctttatttttatgataatgatgttatagaaatagcaaaaaatgttaaaccttctgacagaggagaagttgagattacttctgttaatggggagtatttaaaacgtggaaaacttaaagttgaacttttaggaagaggtatggcttggcttgataccggaactcatgaaggacttttagaagcagcaaattttattgaaacaattcaaaaaaggcagggattatatattgcttgtcttgaagaaattgcctatctcaaaggatatattaataaaaaacaattgttaaagacagctgaggaacttaaaaaaacagattatggtcaatatttatttaatttagctaaaatgtga

SEQ ID NO: 8176 - DNA, 561 bp, Methanobrevibacter gottschalkii
  source 1..561: mol_type = genomic DNA
atgggaaagtttaattttatagaaactggtattgaggaaatgtttgtagtagaacctgcaatctttgaagataatagaggatattttatggaaacatacaatgaaaaagattttaaggatgcgggacatgatttgacctttgttcaggataatcaatcaaaatcaagaaaaggagttttaagaggcttgcacctacaagttaaatatcctcaaggaaaattagttcgtgttatcaatggtgaagtatttgatgttggagtagatttaagagctaattcccccacttatggtaaatggtttggaactatcctatctgataaaaataaaaagcagttattcatcccaccaaaatttgctcatggatttttagtattatccgatgaagccgaatttgtatataaatgtacagaattttaccatggtgaagatgaaagtggaattaaatgggatgatgaagatatagctattgattggccattgaatgatattgatgagataattttatctgataaggataagaaatggttaggctttaaagaatctcaaattaaatataagtga

SEQ ID NO: 8177 - DNA, 1008 bp, Methanobrevibacter gottschalkii
  source 1..1008: mol_type = genomic DNA
atgtcaaaaatacttgttactggtggagcaggatttattggaagtaattttgttaggtatatggttaataaatactctgaatatgaaattgttaacttggatgctttaacatactgcggaaaccttgaaaatttaaaagatatcgaaaaaaatgataattattcatttgttaaaggcgatattagggataagaacatcgttgatgatttagttcaacaatgtgattatgttattaattttgcagctgaaagtcatgtagataggagtataaccgaccctgaaatatttattaagtcaaatgttttaggaacacaagttctattaaatgctgctaaaaaatatggtgttgataaatacatacaaatttcaactgatgaagtttatggtactcttggaaaaacaggatattttaaagaaaatactcctttacaacctaatagtccttattcggcttcaaaggctggtggagatttaattactcgtgcttatagtgaaacatttgatttgccgataaatattactcgttgttctaataattatggtccttatcaattccctgagaaattaattcccttgatgatctcaaatgctttggaagataaaaaattaccggtttatggtgacggtaaaaacattagggattggctgcatgtttatgatcactgccgagctattgatttggtgttgcatgaaggtaaacttggtgaagtttataatattggtggaaataacgaaaaacagaaccttgaaatcgttaaattaatattaaatcaattaaataaggatgaatctttaattaaatttgtgaaagataggttgggtcatgataggcgttatgcaattgattcaaataaaattcaagaggaattaggatggtctcctaaatatacatttgaaattgggattaaagaaacaattcaatggtatctggacaatcaagaatggactagtaaggttaaaagtggtcaatacaaagattattataataaaatgtattctggcagataa

SEQ ID NO: 8178 - DNA, 318 bp, Methanobrevibacter gottschalkii
  source 1..318: mol_type = genomic DNA
atgattattgtatacggtaaatattcaatatatttattgggaggaatggaaatgttagaacaatatttgccttttgttgggttaataatttttggaaacattgaaaacttagtattatcttcacaaggtgtagttgcaggcgtcaatccggttaaattagggattgtaagtatcttatttgttatgggatggttattcataggtacagttggtacttcaatgttaatgcaatatgtcgatttcattgattttattggtggtttagctatttttattttgggtttacaagcaatggtagaatctattagaggtgtttaa

SEQ ID NO: 8179 - DNA, 279 bp, Methanobrevibacter gottschalkii
  source 1..279: mol_type = genomic DNA
atgaaagaactaaaaccatttttagcattattagtttttggaaacattgaaaacttaattttagcagctcagggtgttgctgctcatgtagatcctattattttaagtatcttaagtttaattgcagttgtttgctggcttttaattggaacatttggtacaaaattagcaatgaaatattcacgttatattaatttcattggcggttttgctatttttatattaggtattcaagctatgattgagtcattaccgggaatgttaacatttttccattaa

SEQ ID NO: 8180 - DNA, 1080 bp, Methanobrevibacter gottschalkii
  source 1..1080: mol_type = genomic DNA
atgagatattttaaacatagaatttatggtgctttatttaaattattcaaagacaccattattaaaaaaaacagagtttcatttattgtcgattcaaaggaatcatttaaaggtaatttggattatattcaaaaagaatttgaaaatagagggaactttgaatttcattatttttacaagaataaactttctataggtagttttaggaaattatcaagttctaaatttatatttttaaatgataacttttttccattagctttcatggaatttcatcccgaaaccacaattgttcaattatggcatgctccaggggcttctaaaaaatttggggggtctgttgatattcaaaacagggaaatccttgagaaaatttctaaaaatactgactatttgattactacttcagtcaatattaaagattattattctgaagcttttcaaatgcctttaaataagattaaatcactaggtattcctcgtattgattattattttgaaaatcatgatgtcaatactttaaaatcaaattttcttaataaatataatatttcatcaaataaaaaaatacttctctatgctccaacatttagggatgaagaaaaatacaataacgtattcaattacttgaatttggaggaatttaatgaaaatttaggtgatgaatatattttggctttaagacttcatccaaaaattgagaatttttataaaaatgatatttcggataatggtaactacattgatgtaagtgattatgaaagtgagcaggaattaatgttaattagtgatatattaataactgattattcctctataatgattgaatttgccactttaaataaacctataatcttttttacatacgatttagatagttatttgtctaatgaacgtggtttttattatgattttaaaaaaactgtccccggtccaattgttcatacttcacaagaattaatcgatgtaattaaaaaaaatgaatttgataaaagtaagatttctgaatttcttaacacccaatttgatttaatagatggtgattcatctaaaagaattgttgattttctattaaaataa

SEQ ID NO: 8181 - DNA, 960 bp, Methanobrevibacter gottschalkii
  source 1..960: mol_type = genomic DNA
atggacaatattaatgtaagtgtcatagttccagtatataataactgtgaatatatagagagtacactcagttcaattattaatcaaaatttcgataattttgaaataattgttattgacgatggatcaacagataatagtttagaaattgttaaagaaaaattatctgcttcagatatttcttatctgattattcatcaggaaaatgcaggtgtaagttgtgcgagaaatcgtggaattgaagttgcttgtggtgattatttagtttttgttgatgctgatgattatatttctcaaaatcatttatcagaattgtataatggtgaaactgattttagtttaattcagctggttaaaagagaagggaatgatttatctatcccttatcatttttcagaaagttcaatttcatgcaatgattttattaaaatggagttaaatatggaaattccatttaatttctgccaattaatgtataaaacagacattgtaaagaaaaataatattaaattcactcctaatattatttacggggaagatacagaattcgcacttaaagcattgagttttggtgatagaatatctataagtaatgaagtaacttattattatattcaacacgagcaatctgcaattagaacatctgaatttaagcgttttgagattgtaggtatttttgaaaacctagctcaatactataaaaatcagggaaaaactgatttagctaatctgataattacttctagaattccaaaagcaatatttggaaatatgaattattttttctataataattatgattttgatgatgtaattgctaaaatgcaccaactaaatttatttaccaaattgtctaaatttgaaggtgattttaaattcaaatttaaaataagattatttttattaaatccaaaaatttattataaaatatggagaaaagttaaaaattcgattgattaa

SEQ ID NO: 8182 - DNA, 960 bp, Methanobrevibacter gottschalkii
  source 1..960: mol_type = genomic DNA
atgaaagtttcagttgtaacaccaaattataatggtgaaaaatttctaaaaacatttttaaaatcccttaatgaagatagtcaatatatcggagaagttattattgtggataatggatctgatgatggtagtttggactatcttaaaaataatagctttagtttccctttagtattaatagaaaataaggaaaatattggattttctccagctgttaatcagggaattaaaatatctcaaaataatcttattttttcaattaataatgatactgaaattaaaaaaggttcaattaaatcattagtggatttaattaattccagtgatgatattttttctgttcaagctaaaatgctccagtataataataaaaatctaattgatgatgttggagatgaatataatttgcttggttggactaaaaaaataggtgaaaatcatcactctaatgaatataataaagtaaaaaggatattttctagttgtgcaggagcggcgatgtataataagtccattttagatgaaattggactatttgatgataacttttttgcatatatggaagatgtggatttagcaatcagatcccatattaatggttataggaatttgtcatgtcctgatgcaattgtttatcatattggtagtgcaacatcaggaagcagatataatgaatttaaagttaaattagctgcacgtaataatgtatgggtaatttataaaaatttaccagttcctttaaaaattgtaaattttatttttatatttttaggatttttaattaaatacttatttttttataaaaaaggattcggatccacttatttgtcagggattcgtgaaggattatctgcaaaaagtaaaattagcaaagttaaatttgaatcaaagaatacaaaaaattattttaaattggaatttagattaataataaatactattaaatttttaaaaagatga

SEQ ID NO: 8183 - DNA, 858 bp, Methanobrevibacter gottschalkii
  source 1..858: mol_type = genomic DNA
atggatctttcaattgtaattttaaattatcaaacctttgagctaacaaaaaatactattaattctatatttgaatatgaatattcctttgactatgagatcttagtggttgataatgcatcaggtgatgatagtttagttcgcttaaaagaatatttcggtgataaagtcaatttcatcgcatcaaaagagaataatggttttgcagccggtaacaatcaagctttaaaaattgcaaatggcaaatatattcttcttttaaattcagacactatagtttgggaagatacattagaaaatatttataactacatggaaaaacataatgatgttggtgtcagtggttgcagggttcttttagaaaacggtgaacttgataaggcttgtaaaaggagttttcctaatgtgaaaaattcattttttagattatttcatattccaaccagcagtaaagataatgattataacttggataatcttccagatgatggaatttatgaaattgattgtcttactggagcattcatgttcatgcgggctgatgcactaaaagatgcgggtctattggatgaaacattcttcatgtatggtgaagatattgatttttgttttagagttaaaaaaactggttggaagattacttattatggtaagtcaaaaattactcacttaaaaggagctagtagtaaaaaacaaaaatctaagttgatttatgaattttatcgtgcaatgtatatttattataaaaaacatcatgctgatgactctttatttttattaaactggattgtttattttggaatagctattctttgtgttttgaaattatttttaaatttatttaaaaagaaagattaa

SEQ ID NO: 8184 - DNA, 1404 bp, Methanobrevibacter gottschalkii
  source 1..1404: mol_type = genomic DNA
atgattaaagagaatcaaaaattattaaatttttcattggtattgattgatgttattgtcattggactggctcttttatgctctttatggttaagatttaaaactactctatttggtccaattggaggacatttaggcttttttaactatcttttattctttacatttgccgttatacctgtttatttaattttatattttgcatttggtctttataaaccgcgtagaacttataaaaacattttttcagaagcaacacaacttattaaagtaaatatattggcatttattacattagtttctattttatttattataaaccaacctgatttttcaagaataatgttaattttattagccattattgcttcattttttggaataattgaaagatttacaattagaactattttaaggaaaatgcgtattaataatcgtaatattaagcatattcttattgttggggataatgaattagcttttagctttgctcgtaaaattcgtgaaaacccatatttgggatttgttgtaagtggctttttagggcgttcagagcatataggtcgtgaaatagatgggtgcagtgtcatcggatcatttgaagatattgataaaattcttgataaaaacagatttgatagggttgttttggctattcctttaaaatattattataaaatcaatgaccttgtggagagttgtgaaagggttggaattaaagcggaaattattcctgattatattaggtacttcccagctcaaccttctgtggacatgattgaggacatacctattattaacataagatatgttcctttagatgatgattttaataagttcttaaaatatctttctgattatattatttccataattgcaattattattacatctcctataatggtagttactgcaattgcaatcaaattatcttctaatggtccaattatatttaaacaggaaagaataggttacaacagtaaacccttcatgatgtataaattccgtagtatgaaagttcaggatcccagtgaagaaaaagctgaatggacaacaaaagatgaccctagaaaaactaaagtaggacaatttataagaaaaactagtattgatgaattacctcaatttttcaatgtgttgaaaggggatatgagtgttgtaggtcctagacctgaaagaccatattttgttgatcaatttaaagaaactgttccaaaatatatggttaaacatcaagttaaacctggattaactggctgggctcaaattcatggttgtcgtggagacacttctattaaaaaacgtattgaatatgatattgaatatgtagaaaattggcacatgggtttagatttagcaataatgattaaaaccgcattaaagaaaaaccctaatgcatattaa

SEQ ID NO: 8185 - DNA, 2625 bp, Methanobrevibacter gottschalkii
  source 1..2625: mol_type = genomic DNA
atgcaagaaaaaattttaaaattatatgaaaaaatcaaagatcagctttctgaagatgaatttcaagctgaaatggcagaaattcgtgaaaataatgcagatgtaacattttttgatgatttggatattgcacatatggttttacagaatcatggaattgaaaatacaattgctcaaaaagaagaagatactaaccaattatcttttgaatctagtgatgggactggattcacaatgactgaagaaattttggaaaaatataataaggttaaagataaaatttctgaagaagaatttttagctaaaatgaaagttcatgcagaaaaaaatgagcatgcctcattcatgaatgatgttacatttgctgatatggtagttggtgaatttataactgaggaagtagaatcagtctcccaatcaccagaattttctgataaagctattagtgatcttgaagaaaacagtaaagatgtaactgtgtctggtagagtaatatctatttcaaacccaagatcttttaaaacacgtaaaggacaaagtggagaagtttgcaatgttgagttaaaggataattccggttcacttagggctgttttttggactcaaaatattaaacttcttaaaaatgttaatgaaggggatattattcaaattaaaggtgtggatattaaagaaggttattcgggccttgaagctaatttaagaccaagatctattcttgttcatttagaggaggatacttcaaaattcccagaatataaagaagacattactgatattgcagatattaaaccagacactaaagttaacataattgcaagaattattagaattccaacaattagaacttatgaaaagaatggtaaagaaggtaaggttgcatctattgaattacaagattattctggtaaaattacttatactctatggaataaaaatgttgaacttattaatgatttaggtcttgaagatggtgattcagttaaaatcatccaagctcaagctcgtgagagaattaacagggatggtggaagtgaactgtccttaactcattgggatggaagaatcattaaaggggaatttgatgttcctgaagttaagcaggagttcactcctattggtgatgtatttgaagcgcaagatgtttctattaaaggcattgtttcaagactccaagatattaaaacatttttaagaaaaagtgatggtagtgaaggaagactaagaaattttgatgttagagatatcacaggtgagataagagtaactttatggggtgatgacacaactctaccaattaataagggagacattattaaaataattggtggtaatgtaagatatgatgaatatacacaaagtcaatattcaatgaatactaattttaacactcaaattactattaatcctgaaaatttatctactgaagaactggatgaattaaatacattaagagaagaattaagaccaaccccaattggagaaatttacaccattgatgatgatggtattgaaattgatgtacgcggtagaattctttcagtagatgatgtcaatgaattccaaagagatgatggaagtgttggtattgtacgttcaataatttttgctgatgaatctggtaaagtcagattgtctttatggaatgaacgtgctgaagaagaatatatagtaggtgatgcatatcaaattgaaaatgcaagaactagacttggtatgtatagcgttgatttaaatattggtagtggggctcgtcttattaaattatcagaagaacaggcttcatcaatgtttattccagaattatccacattagaaaaagcattatatgactacaaaaaaatcgaagaaatcgatgaagatgatcaagacattattataatcggtagagtaattgaattaaatgatattcgtaactttgaaagagacaatggtgatactggttctgttagaaatattgagcttgcagatgaaaccggttctatgagggttgttttatgggatgatgatgcaaaaagagagtttgaaattggtcaaccaattaaattgcaaaatccacgttttgacttagatagggataatcgtattgaagctattgtaaatcgaagtactgccattttagaacctagtgaaagtgaaatagaaaaattacctactcaagatgaattaatggaagcaatttatgttcctaaacctattgaagcattaacagaagatgatgttaatgtttgtgtaactggtactattagtgatattgaatcagatagagttattcgtaaaaaatgtccttcttgtggaaataatatagaagaaagtgaagatgaatatatttgtgacaattgtggtcatgtatttgatgaacctagatatcttctcatggttcctttaagaattgaagatgataccggttcaattaaagtcactttctttgataagttagctgaagaattaattggaatgaataaagaagaaattatcaatattattgaagatggttatggaattgaagataaacttgaagacttaaatggtcaaactattgaaattatagctaatgttagttttgatgagtacagcgaagagaataggttaaatcctaagaaaattttatcaaagtatatttaa

SEQ ID NO: 8186 - DNA, 936 bp, Methanobrevibacter gottschalkii
  source 1..936: mol_type = genomic DNA
atggttgaattaagtgatttaccaggtgttggagaaaaaacagcagaaaaattaagagatgcaggatttgctgacatgatgagattagcaactgctactgcaaaagaactatccgtaaaagcagaaattggtgaaggtgttgctgaaaaagttattgaagctgctcgtaggtctgaaaatatagattttgaaactgcattagaagttgatgaaagaagaaaagatgttggtcatattactgtaggtagccaagaattcaacgatttaattggtggagggattgaaactcaatctattactgaagtatttggtgaatttggatctggtaaaagtcaaatttctcatgaattagctgtaactgttcaattacctgaagaattaggtggtcttgatggtgaatgtgtatttgttgatactgaaaatactttccgtccagaaaggattagacaaatagctgaaggttttgaattagatgttgaagaggttttaggaagaattcatgttgctcgtgcattcaactcttctcaccaaattttaatggttgataaaattaatgatttaattcaaagtggtaaaaatgttaaattagtcattgttgattcattaatggcccatttcagagcagaatatgttggaagagagtctttagcagtaagacagcaaaaattaaatcaacatttacattcacttcaacaaattgctaatacttataatgttgctgtatttattactaatcaagttcaagctaaacctgattcattctttggaagtcctacaaaagctattggtggtcatgttttaggacatgcttctacttatagaatttggcttaaaaaaggattggctggtaaaagaattgcacgtttagttgattcacctcacttgcctgaaggtgaatgtgtatttaaaattactagtgaaggtattgttagttaa

SEQ ID NO: 8187 - DNA, 906 bp, Methanobrevibacter gottschalkii
  source 1..906: mol_type = genomic DNA
atggatgctatagctattactattttttcaattataataatgattggattaggttattttcttaaaagaattgattttttatctaagaaagatatggatccatttaataaaatagtaatgtatattttaatgccatgtatgatatttcatgcaatttacaatgcagatttatcatcacttccaaaattaagcctattgccttttgttattttggcttcatcaattgtcacaggagttatctcatattttattttaaaaagattaaatcttgatgataaacaggtatggagtgtattagttactgtaatgattgctaatactgcttttatgggttatccagttactttaggaatttatggtcaaactgggtttttaagagcaatattttgtgatattgcaacattatccatgtttttattattgtcttttgttttaattttaagattcggaggaacagttaagacagctattaggaaaattgctatttttccaccattatgggcagttattttaggtttgattttcaatttattgaatattccaattggtgatgtttgtgaatatactgttaattatttaggtcagggtgctattcctttaatcatgattactttaggtttatctattgatttttcagcattagctagaagtaaatccatgattatttttacttcaattatgaagttagcgtttttcccattagttgcatttttacttgcaacaaaattaggactagttgatttacagtataatgtttcaattattgaagcggcaatgccttctggaatgatgtcattattgcttgcgattacatataaattagattatgaattgacgtcagattgtatactgatcaatactgtaatctctttgattacactaccggttatcatatcattattatag

SEQ ID NO: 8188 - DNA, 1992 bp, Methanobrevibacter gottschalkii
  source 1..1992: mol_type = genomic DNA
atggcagaagaaaaaagagataataatgaagaattaaggattggtgtttacgtctgtcactgtggtgtaaacgttggtggagttgtagactgtcctaatgttgcagaatacgctaaaacattaccaaatgtagttcattcaactgactacaaatacatgtgttctgacccaggtcaagctatgattcaagaagacattaaagagaaaaacttaaacagagttgttgttgcagcatgttctcctcgtcttcacgaacctaccttccgtagatgtgttgaagaagctggattaaacaaatttttatttgaatttgctaatttaagagaacaagactcttgggtacacatgaacgaacctgaagcagctactgaaaaagctaaagatttagtacgtatggctgttgcaaaagcaagattgctcgaaccattagaagctactaaagtagctgtagataacaaagcgttagttatcggtggaggagtatgtggtattcaaactgcattagatttaggtgatatgggattcaaaacatacatggtagaaagaaacccaaccattggtggaagaatgggacaattagataaaactttccctactcttgactgttcaatgtgtattttagcacctaaaatggtagactgtgcaaaacacgaaaacatagaattaatttcatacgcagaagttaaagaagttgatggatacattggaaactttactgtaaaagtagagaaaaaagcaagatacgtagatgaagatctctgtaccggatgtggagcttgtgttgaagcttgtcctatcgaaatacctaactactacgatgaaggtgtaggtatggtaaaagctgcatacatcccattccctcaagctgtaccattatgtgcaactattgataaagattactgtattgaatgtatgttatgtactcaagcttgtggacctgatgcaatagatcacaatcaagaagctactgaaatcgaattagaagttggtactattgtagcagctatcggttacgatccatttgatccatctggaatttaccaatacggttacggtcgttacactaacgtaattactgctatggaaatcgaaaggatgattaatgcatccggtcctactggtggacatgtaatcaaaccttccgatggtattgaacctaaacgtgtagcatttatccactgtgttggttcaagagatgaaacaattggtaaaccttactgttccagagtatgttgtatgtactctatgaaaaatgctcaattatgtattgaccacgaacctgatactgaagtaacttgttactacatggatattcgtgcattcggtaaaggatacgaagagttctacaaaacttctcaagaaaaatatggaattgaatttatcagaggtaaaccagcacaaatcttcgaaaatgatgatttaacattaactatcagagcagaagatactttacttggtaaagtaactgaatacacttatgatttagttgtattaagtgtaggtctcgaacatgctgaaggatctgatgaactcagacaaacattaggtgtttccaaatctgcagatggattttacatggaagctcacccaaaactcaggccagttgacacattaactgatggtgtttacattgctggtgtagcacaaggtcctaaagatattcctgactccgtagcacaaggttctgctgcagcatcaagagcagcaattccaatggcacaaggagaagtagaaatcgaacctattattgcatctaacgatgaagctatttgtggtgcttgccaagtatgtgttgaattatgtccatacggcgctattgctatcgcaactggtgtaggtggaaaagaatttgcacaaattaactccgcattatgtaaaggatgtggtacttgtgtaggtgcatgtccatctggtgcaatgaaccaacaacacttcaaaacagagcaaattatggcacaaatcagtgctgctcttgaagacataggtaaatag

SEQ ID NO: 8189 - DNA, 1239 bp, Methanobrevibacter gottschalkii
  source 1..1239: mol_type = genomic DNA
ttgatacattcgcaaaaatttaattattataatgagaatttatcatggattattggtgatactatgaatgagatatttaggacttttacatctgaatctgtaactcagggacatcctgataaaattgcagacattgtttctgatgcaatattggatgcatatatggcaaaagataaaaattcccatgttgcatgtgaaacctgtttaacaactgatttttgtatggtatttggagaaataacatctgcaggtcatttatctgagaatgaaattgaagatattataaggaatacaattattgaaatcggttatgataattctgatttaaaatttgatgggcatagttgtgagattttaaacaaacttcatgaacaatctgcagatattaatcagggagttgatcgtggagatgatgaaaccggagcaggtgatcagggtatgatgtttggttttgcaactaatgaaactgaatcattaatgccgtatccaattgatcttgctcgtaaattaactaataaattaacagaacttagagaaactggagaaattccatatttaagacctgacggtaaagcccaagtatctgtaaattatgataaagaggggaatgttgtttcactcgatgcagtggtattgtcaactcagcatgatgaatcaatgtctgataatcaagaacaattaaaagaggatattcgtgaaaagctatttaaagcagttattccagaggaattaatgactgaaaatactaaagaacatatcaatccaactggaaaatttgaaattggtggtcctcatggagatgcaggattaacaggtcgtaaaatcattgttgatacttatggaggatatgctcgtcatggtggaggagcattttcaggtaaagactgcactaaagttgatagaagtgcatgttacatggcgagatatattgccaaaaatatcgtagcaagcggacttgcttctaaatgtgaaattcaattatcttatgcaattggagttgcagaaccaacttccgtaatggtggatacctttggaactggagcaaatattggagatttaacttttgagaaaatagtacgtgaaaacttcaaattaactccagatggaattattgaaacattaggtttaagagacattacttataaacaaactgctaaatatggccattttggtattgatggtcttccatgggaaaaaactgataaaattgatgagttgagaaaatatattaaaaattaa

SEQ ID NO: 8190 - DNA, 1269 bp, Methanobrevibacter gottschalkii
  source 1..1269: mol_type = genomic DNA
atgactaattatcatgatgaaattttaaattttgaaaaaattgcaaaagaacatactgaatacatgagaaatagtgtaaatctcattgcttctgaaaacgttactagtgtggaagtaactgaagcattagctactgattttgctcacagatatgctgaaggacaagcttttgaaagattttatgaaggatgccagtacgtagatttaattgaagacagaaccaaaaaactttcatgtaaagtatatgactgtgattatgctaatgttcaacctgtttctggtgtaactgcaaatcttgcagcattttttggattttcaaatcctggtgaaaaagttatggctttagaagtaccgtctggaggccatatctctcatgcagatgtaagtgctgcgggtattcgtggattaaaaactgtattccacccattagataaagatatcatgaatattgatattgatgcaatgaacaaaaaaatcattgaagagaaaccaaaaattattttattcggtggaagtttattcttgttccctcatccaattaaagaggcacgtgaagctgctgatgaagttggagcaaaaatcatgtatgatggagctcatgtattaggcttaattgcaggagggcaattccaacaacctcttaaagaaggagctgatttaatgatgggaagtactcacaaaacattccctggtcctcaaggaggaattattctctcacatgaagaaaatgcagaaattattgataatgcagttttccctggtgtagtaagcaaccaccatttacaccacttacttggtttaggtattgctactgctgaaatgttggaatttggtgaagattatgcaaaacaaatcatcaaaaatgctcaagcattaggtcaagcaatgtatgaaagaggatttgatgtattatgtgaagaacaagggttcacccaatcccatcaaattgcagtaaatttaactaatattagatcagcatctgatattgcacgtgaattagctgataataatgttatcttaaacaaaaatcttttacctggagataatagggataattctgatgatccatctggtatcaggataggtactcaagaaattactaggaggggattaaaagaaaaagaaatggatgaagttgctgagtttataaaacgtgttgctgttgataaagaaaatattgctgatgaagtagctgaattcatgaatcaatacactaaactcgactatgcattctctgatagagatgcttaccaatatcacagattatag

SEQ ID NO: 8191 - DNA, 693 bp, Methanobrevibacter gottschalkii
  source 1..693: mol_type = genomic DNA
atgagaataggatttgcatttactggggccggtcatttacttaaagaatcagtacaagtggctgaaaaacttgcaaatgatcatgaggttaccatatttttatctggtgctgcggaagaagttcttaaaatgtatgggctttatgaaagagttaaaagcttaactggtggaaaataccgtgaacttgcaactgattctgatcaaaaattttcatatccaataactggtcgtctttctcttggaaagtatgatttattaattgtttcaccggctacagcaaatacggtttcaaaaatcgtttatgggatagcagatactttagtaacaaatgctgttgctcaatctggtaaaggtgctgttccagtatatatggtgcctgttgatattcacccaggtccgattgatacagttcttccatctaaaatggaattatctaaatgtcaaagttgtgatgattgttttgcatctattgcctgtgaacaaggtgcaattcttccacatgaagaaatagatttaacaaaatgtattggttgcggtttgtgcaggaacacatgtccgtatgatgcaatttctgaaggcaaaatcataacaatctatatgagggatattgatattgaaaatacctgtaagttatcaagtattgataatattcaaatatttgaaaatccacacgaaatcttagataaaatctaa

SEQ ID NO: 8192 - DNA, 318 bp, Methanobrevibacter gottschalkii
  source 1..318: mol_type = genomic DNA
atgatatacaataatgaacaaattaatataaaaataacatatgctaataacttttacaaacgttttaaaggattaatgctgaaaaaagattttgatgacggattattatttacaaatcttaaagattcaagcatccacacattttttatgagatttgaaattgatgtttattttttaaatgaaaagaaatatatttttgaaaagacaagtttaaaaccttggaaattctataaacctaaaaaacaagcaaaatatatcctagaaacaagaaaaaataagttaaaattaaaaataggggatcgtttagattttatctaa

SEQ ID NO: 8193 - DNA, 663 bp, Methanobrevibacter gottschalkii
  source 1..663: mol_type = genomic DNA
atgataattgaatacttaagtgattttaactgtccatattcctatattggattaaatcgtatcatgagtgtttgtaatcatcttaatttagatgttatatgggaaatgaaatctttcgaacttgaacctgaactaaacaatatccctacatgtagcatcgatagatatgcaattagaaatagattatcaattaaagatgcagaaaatgaaattgaagaaatagaaaaaatagctcaagatgaaggattaaatataaattacaaaaacatgcaactttcaagttcaaaagatgcccatagacttgttaaatatgtagaacgtaattatcctacattaactcaagagattgttttaaaaatatttgaatccaattttattaaaaatgagaatatttcagattacaatgttctgataaaaattgctatttcctgtaaattaaatgaaaaagagatatatgaatttctaaaaaaagaaacttattcaattgaagttgatcttgatatggatgaagctatttcaaatggaataaacacaattccatattatttcataaattacaacgatgaaagattaataatacccggagtttttgaaaaagaggattttaaaactgcactagaagatttagttaatggtgaaatgaaaaataaaacatttatctaa

SEQ ID NO: 8194 - DNA, 111 bp, Methanobrevibacter gottschalkii
  source 1..111: mol_type = genomic DNA
atgggattttatagaaaatacaatacaattattagaactatagataattttgtaaaattatacaaagttgctaagaaagattctgaaaaatctaaagatgataaaaaatga

SEQ ID NO: 8195 - DNA, 3237 bp, Methanobrevibacter gottschalkii
  source 1..3237: mol_type = genomic DNA
atgccaatacatgaggcagaaaaatcatatgagcatgataaaatagaaaagaaagtacaaaaattctggaaagaagaagatacttttaaaaaagttaatgaacttagagaaaaaggtcctaagtactcatttttagatggaccaccttactgtagtggtaaaatccacttaggtacagcctggaacaaagttattaaagattcgtaccttagattcaaatcaatgaatggatttggcttaagacgccaagcaggatgggatatgcatggtcttcctattgaaaataaagtagaacatttaatgggcattcaaagcaaacaagaaattgaagaggatattggaatagctgcttttgttgacaaatgtagggaatttgcaattgaaaataaaatagcaatggaacaagaattcgatcaattaggtgtttggatggattgggataatccatacatgacacttgatcctaaatatatggaatcttcttggtggacacttaaaagggcaaatgaacaagatttacttgtaaatgaccaaagagtaatcagttggtgtcctcattgcggaactgcacttgcagctgctgaaattgaatatgaagaaaaagctgatccttctatttatattaaattccctgtaaggggagaagaaaatacttattttctcgtttggacaactactccatggactttacctgcaaatatggcaatttgtgcaaatccggaatttgattatgtttatgtttcaaaagatggtgaaacttacattttagctgaaaacctaattgaggaagtattaggtaaacaagttaaaattcatagaactgaaatttctgatgattctgaagatggtgaaaatcaaattatcgaagaaaaagaaatcatgtatgaaattattaaaacagttaagggtgaagacttgattggcatgagttatgactatattttagctgatgaagttcctatacatgataaatttgacgaaattgatgctgttcacactgttctggaaggcaatcatgttgaactaggtgaaggtactggattagtacatactgcacctgggcatggtccagatgattttgaagtaggtcaagctaataatattcctattttttgtccggtaggtgaagatggatgtttcactgaagaagcaggaaaatataatgctaaatttactaaggatgaaaattcacaaatcatcaaagatttggaagataaaggattaatgtacaaatcagaaacaattgaacacagatatggtgtatgttggagatgtaaaactcctattatctatcgtgctactaaacaatggtttttaaaagtaactgatatcaaacaaaaaatgttagatgaaattggtcgtgttgaatgggtaccaaaatgggctggtgaaggtcgattctacgattgggtagataatgctcgggactggacaatttcaagacaaaggtactggggtattccaattcctatatgggaatgtcctgactgtggggaattaaaagtaattggttctcttaatgaattaaaagaagaatcattaaatgatattaatgtttctgatgctgaacttatacataggccgtatgtcgatgaagttgaagtaaaatgtgataaatgtggaaaagttattaagagaattcctgatgtgttggatgtatggattgattcaggtgtagctggctgggcttcactttactatccagaagaaaaagaaaaattcgaagaatggtatccttatgactttataactgaaggacatgatcaaaccagaggatggttctactcccaattaggtactggagtaatttccatgggtaaaagcccatataaaaaagtattaatgcatggatttgtattggatgaacacggaaataaaatgtctaaatcattaggtaatgtagtatctcctgaagaagtaattgaaaaatatggggctgatgttttaagattttacctgttatgggcttcaaaaccatgggatgatttaaaatttgtttgggatgaacttttaaacattaataaaatgtttaacatcttatggaatgtttatgtattttcaactacttacatgtcattagataactttaaccctattggattaactgaaaaagacatgattctaagagctgaagataaatggattatctctaaagcgaatactttagtcaaagaagtaactgaggatttggataaattattcttccataaggcaacaagaaaaatcaataactttattctggaagatttaagccgttggtatgtaagacttattcgtggaagaacttgggttgagagtgatgatcctgataaattaggtgcttattatagtttatacacagcacttgtcaaattaatttcagtattatgtccaatagctcctcatgtatctgaagagatttatgaaaacctagtaaaaggtgttaatcctgatgcacttgaaagtattcacatgaatgattggggatacgatgatgatgcaattgacacagaactcgaatcaaaaatggatgttgtccgtaatgtaattgatgcatctattagagctcgtgatattgcacaatacaaactcagatggccggtttcagatattactgttgtatctcaagatgaaaatatcttaaaagctattgaagaattaactgatattattaaagaccagtcaaatacaaaagatgtactttgtgctagtgaattcgaaaaattatcatttaatgctaaacctaacctcaaaactttaggtccaagacttaaaggagacatgggtaaagtaatgaaagcattaaaagagagtgatggaaatcaaataaaagaggatattgaagcaaatggaagtattactgtagaaggtcatgaattatcaaatggagatgtattattcgattcagaacttccagatgattttgtttcgtcagaatttgaaggtggaaatgtctttgtaaatactaatgttactttagaaattaaacaagaagctatggcccgtgaattaataagaagaattcaggacatgagaaaagatttagatttggatgttgaggcaaatattaatgttgatgttgaaacttcagatgaatttaaagaattaattgtacctcaatctgaagttatttctcatgaagttagagctaaaagtttaatcatatccactagtgaagaatgtagtaaatattctaaagactataccaaagaatgggatattgaaggagaaaaagtaattatttcaattaaaaattaa

SEQ ID NO: 8196 - DNA, 2139 bp, Methanobrevibacter gottschalkii
  source 1..2139: mol_type = genomic DNA
atgactttagctgattctgaaattgaatatattgaaggaatccttggtaggaaaatgaatgaattggaagagggaatgcttgatgtaatgttttcagaacactgttcttacaaaagtagcagaccatttttaagagcttttccgaccgaaggaaaaaatattattttaggtcccggagatgatgcgggacttgtatctattactgataaatatgccctggctgtaggaatggaatctcacaatcacccttcagctattgaaccttatgggggtgcaggaactggaattggaggtattctaagagatataatatctatgggtgcaatgccaatagcacttttggattcacttagatttggaccattggaagatgataaatcaagatatttatttgaacatgttgttaaaggaatttctgattatgggaatcgtgtaggaattccaactgttgccggtgaaatcgaattcgatgaatcatttaggacaaatcctcttgtaaatgtaatgtgtgtaggacttgttgaaaaagataagattgttcgtgctcaagcaccgaatattggtgatgtatttcttttaatgggaggaacaactggtcgtgatggaattcacggggttacatttgcatctgaagaattaacttcggattctgaaacagaagataggcctgctgtacaggtggcagatccgtttactaaaaaaagagttttagaggcatcattagaaatcttggaaaaaatcaatgttagtggtgtgaaagatttaggtggtggtggtcttacctgctgtatttctgaacttgtagattcatccagtaatggtgcattagtagatttacgttcaattccattaagggaaacaggaatgactccatatgaaatcatgctttctgaatcacaagagaggatggtatttgttattggtcctaatgatgtagaacttgcttgtcaaatctgtgataaacatgaaatttcatcttccattgttggagaagtaattgaaggaaacaacatgattatttcggatgaagggaacgaaattgctaacttaccaactattcttttagcagatccaccttcaatcaatagacctattgtagaaatatctgcagatactgaaaaaattgatgttaaagagccttcaatacttaaatcactcccggcattattatccagttcaaacattgcttcaaaggaatgggtttacaaacagtatgatcatgaggttcaggtaagaactgttgtaaaacctggtgatgatgcagcagttttaagaattgatgaaaacactgcaattgcactcactaccgattcaaatacaattcatactaaattatctccatttgatggggcggcaggttgtgttgcagaagctattagaaatgtaatttcaatgggtgcaactccatacgctgttgttgactgtttaaatttcggaaatcctgaaactccagaaattttatggcaatttaaaacagctattgaaggaatgagtttggttgctgaaaaatttgatgctccagttattagtggaaacgtaagcttctacaatgaaactgaaggtgttaaaattaatccaacacctgctgtgggtgtaattggtgttgaggatattgaaaatataagaacattggacttcaaaaatgaaggagataaaatcattttaataggcaaaacctatgatgaattatctggttctgaatatcatagaactgttcataatattgaaaaaggaactgctccaaaaatcagaattgaagaagaagttgcaaatggtaaaactgttttagatttgataggtaaggataaagataaaaacattactgcagtacacgatgtgtctgctggaggacttgcagtagctttatctgaaatggttattaaatccggacttggctgtgaagtgactttaagagatgatgagttagataaaattcaattgctttactctgaaagtcatgctagatatcttttaactgtaaaagctgatgcagttgatgatattttatctaaaattgatgttgaagcaaatgtcattggtgaagtaaaagggacttcattattcattaatggtcatgaatttaagtttgaagatttagatgatgcatatcatggtgttattgaacaatatatggcttaa

SEQ ID NO: 8197 - DNA, 1218 bp, Methanobrevibacter gottschalkii
  source 1..1218: mol_type = genomic DNA
atgtttttatctaaattagattctctagcaaatgctataaaacttgtcaaggataatcaaaagttcactgaagttgaagaggtaccaatttctgaagcacataaaagggttttagctgaagatattatggcatttcatgattcaccaccttttgataaatcttcaatggatggatatgcggtaattgctgaaaatacgtttggagcatcacaatctgcccctaaaaaatttaaaatcattgatgcaataggcgctggggatttttcatctaaaatagttaatagtaatgaagctattattattgctactggtgctccaattcctgacggagctaatgctgttttaatgaaggaatatactacttctgatgaggatgatttaacaatttattctcaagtaactcctggtgaaaatataagtccaaaatctgaagatatcgaaaaaggtcaaaaagtattgtgtaaaaatacttttataagatatcaggaaatgggtttaatagcttctgcaggatatgatacagttaaagtatttaaaaaacctagggttaaaattattatcactggtaatgaattggtagaacctacaaaagaagagattgataaagctaaaattattaattcaaaccaattcactacaaaagcaatggttgaagattcaggtgctattgctgaaattactcatgctggagatacttttggcgaagtaagggaagctattttggaagcttctttggagtttgatgtaattataactactggtggaacagcaatcagtaaaggagatgttgttttagatgcattagctgacttaggggaaatattattccatggtgtagctgtaaggccgggtaaacctgtaggtgcgggtattgttaatggaaaaatgatatttacactttccggacaaccagtagcatccatgagtcaatttgatatggttgtgagaaaatacttatttgaaatgcagggcagaccttttgaattccatcttcaaaaaagagtatctgagctgaaagtaccttctcagcttggtagaacagattttatacgtgcagttgcagatgatgaatgtgcaaaacatgtcttgaataggggttcgggtattattaggtcaatggttgaggcgaatagctatatcataattgatgaaaatgatgaaggatatcaaaaggatgatatagttgatgtagttttctttgattcactgctttggtaa

SEQ ID NO: 8198 - DNA, 1131 bp, Methanobrevibacter gottschalkii
  source 1..1131: mol_type = genomic DNA
atgaatggtatttactattatttgatagcttttgttatcatctggatgttagtcacaatatttcatgataaattatcaaaccatgggtttgagttaaattttcctattataatgtggaagactcaaaaacttaagggattaatatccaaaatttctaatttttcaccaacattttggaaatggtatatgaatgttgggattgttgtagcatttggtgctatgattcttgttaccggatctataatctcgtccataccatctatttttgaaactccttctgtttcgattttaattcctggtgttgacattccaggttctcagatttatgttccatttatttatggtttgattggtctggcaactgttgttataattcatgaattttctcatggtatccagtctgtttgtgaaaaaatcccaatcaagtctatgggtttattgttgttttttattcttccaggggcatttgtcgaacctgatgaaaaaagtttaaaaaattctaaaaatgcctcaaaattaagaatatatgctgcaggctcagttgctaatattactttagcagtagttgctttgatgttaatatctttaatatcaattggtattccacattactttgcagaagatgggatttctatcgataggattgtttctgattctccttctgagggaatactaaaagagggtatgattttacaagctattgataatcataaaattaatgattctgaatcatatgtcaatattgttaaatcttttaaacccggggataatgtaacggttcaaacgaatcaaggcagttattctgtagtgttaagtaaaaatccaaataacgattctgttggattttttggaattcaagcagctaagcattatgtgttattaaatgatagtttaggaccgataccttggatattatttgagctatttgaattatttaattgggtgtttatcttaaatcttggaatcggattgtttaatctacttccacttaaaccattagatggcgggcatatgcttgaaacactcttgtcttataaatttaaagaacagttagtaaaaaaatttgtaaatgcattgtccggcgttatggcaataataattgtattcagtataattgctggttttttataa

SEQ ID NO: 8199 - DNA, 1227 bp, Methanobrevibacter gottschalkii
  source 1..1227: mol_type = genomic DNA
atgaaagctaatgctcaaaaaatagctgatggagtatactggattggtgtactcgactgggatttaagaacttaccatggttacacattagatggaaccacttataatgcatacatagtgtttggagaagacgaagtagcaattattgataatgcttaccctggaaaaactaaagaaatgatggcgcgtattgacgatgcttttgcacaagaaggaagagatgttaaagttgactacatcgtccagaaccatgttgaaaaagaccattctggagttttagtagatttacacaaaaaattcccagaagcacctatttactgtaccgaaattgcagttaaaggtcttttaaaacattaccctgcacttgaaggtgcagaattcgtcactgtaggaactggtgactccttagatgttggtggaagaactttagcattcttagatgcattcttactacattggccagacagtatgttcactttactcgctgatgaaactggaattttattccctaatgatgcatttggtcaacacttatgtttcacaaaaagattctctgacgaaattccagaaaatgtcttaatggatgcagcacaaaaattctacgcaaacttaattacaccgctttccaaattagtacttaaaaaattaaacgaagttgttgaattaggtttactcgattccattaaaatgattgcaccatctcatggccaaatttggactgacccgatgcaagtaatcggagcttaccagaattgggccactggtgtgtgtgaagataaaattactatcatttatgacactatgcactattcaacccaacaaatggctcatgaaattgctgaaggtgcaatatctgaaggttacgatgtagaaatattctacttacatgaagatgaaaggtctgaaatcgtgaaaagtattttaaccagtaaaggtgttgcaattggtgatcctacaattaacgatgcgccatatccaagtattggagacatcatgtactacttaaaaggacttttattcaacagaacaggtatagaaagaaaagctgttactttcggttcaatgggtggaaaaggaggatctcctgcaaaactcgctgaagaattaggtaactgcggatttgatgttgtagacagtcaagaaatttatttcgtgccaactgctgatgaagaaaatgcaagctttgatttaggtgtaaaattagccaaagcatgtaaagagttataa

SEQ ID NO: 8200 - DNA, 777 bp, Methanobrevibacter gottschalkii
  source 1..777: mol_type = genomic DNA
atgagcgaacaaaaaccaatacaaatattttctgattcaacagaattgcgtgttaatgtagtaaaaagtcccgtcaaactcacaattttagagatgctaagagatcgagatatggaatttgatgaaatagtgattaatactggcaaatcaaaatctacagtttcagtgcatttaaaaaacttaagagaaaatggaattatatcatataggatgcatcctattgacaatcgaaaaaaaatattttatttaaattctaaatatcttggttctgtaaacttttctgaaccaaaagaacttgaagaaacccagtctgattatttgataaggaatattgttgaaggtgatggacagttttcaacattattattccatactttaaaagcaatgcttattcaagaaggaattaatattgatcctattttaaaatcaactggcaatcaaattggcaaatctatcttttataaattgtataatgaagatctagatatctttatggataatttatctaaattttgggagaaaaaaggattaggtagattaacttttgaaataggtcagataattaaaattataatttatgattgttttgaatgtgaattacttccaaaaacaggaaaacctgcctgttttttagatacaggtatcatggaaggtttattcacagaattcttcaaactaccggtcagtgttatagaaacacaatgttatacaatgggtgatggaaagtgtgtctttgaagttgaacctcaaagcataaaacttactaatcatctttaa

SEQ ID NO: 8201 - DNA, 705 bp, Methanobrevibacter gottschalkii
  source 1..705: mol_type = genomic DNA
atggttaaaaaaggaaaattgattggaattggtgttggacctggagatactgaattattaacattgaaagctgcaaaagtattagaaaaagtcccagttattttttcaccaaaatctgcaaaagaaaaagaaagcattgcattatcaatcgtgaggcctattcttaaagaaagaaaagattataaaaaaataatgattgttgaacctatttttcctatgattgaagataaaaaagaacttgaaaaaatatgggatagtgcatctgaattagttgcacaatatcttaatacaggaagagatgttgcattcattacacttggagacacatcaatattcagtacttattcctatttgcaaaaaagattaatggatagatatgagatagaaactattcccgggattacatcatttactgcgtgtgccgctgctaaaaacgaagcattagtagaacaaaatgatattttaactattgttccaaaaattgacagcagaatagaaaatattttagaatatactgattccattgttcttatgaaagcttcaagaaactcaacaaaacttgaattaaaaataaaaaatgataaaagagaaaaagaaatttattccgtgcaaaactgtactcgtgaaaatgaaaaaataattgaaggattttctcacgaaaaaccttaccttacaacatcgatcataaagtttaaagatgattag

SEQ ID NO: 8202 - DNA, 1803 bp, Methanobrevibacter gottschalkii
  source 1..1803: mol_type = genomic DNA
atgttaaaaagtaattgtacttgtggaaaataccctaaaaaagaatctaaaggcccaacaaatttatttagttttactaaatcaaaatcaagaagttcatcaatattagatgatgagattcctgaggtatattatgttgatgaccacaaacaggatgaagggactgcagcatatttgaaagaattatatccaaatatagatgatgatataattgaaaattttccatttgatgaacctagaattggacaattggaaattattcaagatattaatgatgcgattaaaaagggttataaatacattatattggaagcaggaactggaactggtaaatctgcaatagctacaacattagctaaaatgtatgaatctgcttatattttgactatgactaaacaattgcagtcacaatattctgacgaattcgaatttccattggttaaaggtagaggtaattttgcttgtttgcatgataatttagaatctacttgtgatataggggcttgtaaaacatcacctacttcaagtaaatttttctgcccatatggtgttgctaaaaatccaactttagatgcagaattagcttttgaagattcatttgggggaaccgttttttaccaatcaagtgggcattgtcattactggaatcaaaaagccaatgcaattaattccccaatcacattaatgaattatgattatgctattgttgagcttaactatgttaaacactttgggactcgttctttacttattttagatgaagctcataatattgaaagtaaattaatgtctacaatggaagttacattgtataatagggttcttgaaaaagatattaacaaacaaatctctcctcaaactttaaaggatggtgaacttgaagattggataatggaaattgatgcaattagagaggcatatgaagatattgatttgaaagatgtgagtaaaaataaatctgaaaggattcgatcaactattggtagactaaaaactcttagaaataatcttgaaaaagagcctaaaaattgggttattgatactgacgagtctggtgtcacattcaaaccactaagagtccatcattatgctaaaaataatttattaaaatatggggatgtggttattttcatgagtgcaacaattctatctcataaaatgttttcaaaatggttgggattaaatcctaatgaagtttatcacattaaagtggatagtccttttactaaagaaaaaagaccaattgtccttaatttagctggaaaaatgtctgctaatagaattaaaaaaactgctccaaaaacaatccctattttgcaggaaattttaaagaaacatgaaggggataaaggtttaatccatactcatagttataaatgtcaacagtatattataaataatttatataactcaagattaatttcgcatacttcaaaaaatagagaacaaattttggatttctttgaaaaagatgaaaatcctttagttttagtttcaccatctatgagtgaaggggttgatttaccatatgataagtgtaggttccaagttatttataaaatgccgtttccttatctcggagataaacaagtcaatatgagaatgaaacgtgataaaaaatggtatgcttataaaacagtaatgactttaatgcaggcgtatggtcgtggtatgagggcggaagatgattcatgttatacttatattattgatagtgatattaacatgttatttaaaagtccaatgtatagatctttaatcccaaacttctttaaagaagctgttgtcagagttaaaaaatag

SEQ ID NO: 8203 - DNA, 963 bp, Methanobrevibacter gottschalkii
  source 1..963: mol_type = genomic DNA
atgaaagattctaaagaaaaagaacatagaatttctaatttaaaagacttaatcgacaatgtgaaagaagaagattccaatatcgattcacaagaagatagtgaattgataaactatttacacgaagatacagttgattttgatgaattagaaattaacgatgaatttatctatcatccagatgatgatgaagactatgtaataaatttagaagaatctccaattgatgaagaatttataattaacactcccaaagaagaagaattaaaaaacatgtccgatgatttagaagagccagaagacatcattagtgatgtgagtgaaaactttgatcaattttttaatgcaaaaattggtaaaacacctgttttagctattgttagctctgtattagggatcatatttatagcaatctcaataatcattttcgaatcccgtagtgatagagtaatagacaatgttgtatctggtgagactaactttatttctgtcatagttcttggattaggaatcttattattaatttacggaatatacaaagtatttaatattaaaagtcccctaaatggaataacagagagcattaattctattgatggaaaagaaaaagtaaaaactaatgcttctaaggaaaaagaaactgaaaagattatccctaaaagcaacatcccattggacaaagactcctataaaataggtgaattcgacattggagatataaaaaataaatttaaaaaatcaactacttctaaaaaaccaaaaccacgcccagaagatacaaacaatattcctcctgcaaaagaaaaagaggaaaataaaaaagaattaacaattgaaaaaattgaagatattgaatataaacaagcaaaacttgataatgaaactattgatgatatttttgctgaagtagaagatatcgatgaaataccaattatttctattgattctgaagaaaaagaataa

SEQ ID NO: 8204 - DNA, 312 bp, Methanobrevibacter gottschalkii
  source 1..312: mol_type = genomic DNA
atggaattttgtcctgaatgtggagcaatgatgtttccaaacaacaatgttttaaaatgcaatagctgtggttacattaaagaagactccgataataatgattataaagtttcaaagaaaattgaagctgaagaaactgttaaaatgttgggtgaagatgtagacgttggcccaagaacagaagaaacatgtcctgaatgtggacataatatagcaacctacaaattattacagactcgtagtgctgatgaagctcctactcgtatattcacatgcgtaaaatgtaaacatacttggagagcttacgactga

SEQ ID NO: 8205 - DNA, 423 bp, Methanobrevibacter gottschalkii
  source 1..423: mol_type = genomic DNA
atgaataaatacaaaaaaccatctgtaacaactgatatttttatttttgatgaagattttaattttattttaattaaaagaaaaaataatccttttaaaaattattgggcgttgcccggtggatttgttgattatggtgaaactgtagaatcggctgcaataagagaagctaaagaagagacaagtattgatgtagaacttaaagatttagttaatgtttactctaatccagatagagattcaagaggtcataccataagtattacatatactgcaaaaggagatttcaatgaaagaaaagccaatgatgatgcaatagatattggcatattttccgctgaaaaattagatgaaatcaatattgcttttgaccataataaaataataaaagactgcttaaatatagttaaaaatgaaaaataa

SEQ ID NO: 8206 - DNA, 282 bp, Methanobrevibacter gottschalkii
  source 1..282: mol_type = genomic DNA
atggaaaattttgaaattattgaagataaaacattagaattaacttttattgttaaggatgaaagtcatggagtttgtaatgcattaagacacattttaatgcaaaatcctgatgttgaatatgcagtttataatattgatcatccccttactggaaaaccagaaatgaccattaaaacaaaaagaggaaaaagaccaagaaacgcattacagaaagcagcagaacaactccaaaaagaaagtgatgaatttaaaaaacttattgacgaagctttagaataa

SEQ ID NO: 8207 - DNA, 570 bp, Methanobrevibacter gottschalkii
  source 1..570: mol_type = genomic DNA
atgaaaatagaagaagatgaaattgtaatgcctggggataaattaggaataatagaacaatatcttccaggagagggtacttatgatgatgacggagacattaaatcatcagtacttggaaatgttaaaattaatcaaaaaatgaaggtaatttctgttgtgtcagatgcgaaacctgctcttttaaaagttggagatataatttacggccaaataactgatattaaaccacaaagagctaatgttaacattgaatgtattaaagacaacgcaagaccattagcattaccctatatgggagctatacacatctcacaagcaaaaaaagattatttagagaaattatctgatgcttttagaataggagatattattcaagcaaaagttgttaaaattactggagataatgttgatttaggtagtacagatgatgattgtggtgtcctaaaagctatgtgtactcgttgtagagattacatgcatactacccaaaaagctgatgaacttcaatgtaatacttgtaatagaaaagaaaaacgtaaagtttctaaaaactacattaatgattaa

SEQ ID NO: 8208 - DNA, 1005 bp, Methanobrevibacter gottschalkii
  source 1..1005: mol_type = genomic DNA
atgtcaatgtataatctggatttagacaaagtaatccgtaaaataacttcaatggatgctcaaactgttggtcttcaatttcctgaaggtttgaaaatgcaagctataaaaatagctagacaaattgaagaagaaaccgatgcaacagttgttatttcaggtgatccctgttttggagcttgtgatgttagcgattataaaatgaaaggttcagttgatttaatcgttcattacggacacaccccccttcccttaaaatatgaagttccaacattgtttattgaagcatattccaatatagatattaaaaaagatcttgaaaagtcaatagaatatttaaaagattattacagaataggactcgtaacaacaacacaacatttacatcttttaaatgaaactaaagattacttagaagataatggaaaagaagttgttctaggttcttcaccatcgactagaaaaggtcaagttttaggatgcaacttttcatctataaaaaacttagatgctgaagtaatattattcataggaactggaaatttccatccattaggaatcaaattattttcaaacacccccgtaattgccctagacccatacaatagtgaaattagaagtatggatgaatttgcagacaggattttaagaataagatttgcaagaattacaaaagctcgtggtgctaaaaaatggggaattttagtatctacaaaagaaggtcaatacagaatgaccttagcaaaggaaattaaaaaaattctagaagattcaaaaatggaagcatatattattttagttgataatgtatcaccagatgttttacttccttacttggaattagatgcttttgttgttagtgcatgtcccagaatcgcaattgatgattcacaaatgtataaaaaaccattattaaccccacaagaattagaaatagtcctaaataagagaaaatgggaaaattaccaattagatgaaattttatttcatgaacattataaataa

SEQ ID NO: 8209 - DNA, 570 bp, Methanobrevibacter gottschalkii
  source 1..570: mol_type = genomic DNA
atgttagaagaagtaaaaaaatctttagaagcatctcctattgttaaaaaaggtgattataactactttgtaaatccaataagtgatggtgttccagcaatggatcctaaaatgcttagagaattatcattagcagtttataaacatgcagatttagatgttgataaaattgtagcagttgaagctatggggatacatttagccactgcattatcccttacaactgacatcccctttgttgtaatccgtaaaagacaatatggtcttgaaggagaaacagaagtttatcaaaaaacaggatatggttcatccaacctttatgtaaacgatttacatgaaggtgaaaaaatattactaattgatgatgtggtaagtactggaggaacattaatagctttattaaacactttaaaagatttaggattaaaaattaaatctactgttgcagtaatcgaaaaaggtgaaggcaaaaatatcgttaaaaaagaaactggtgttgatgtaatatctattattaaactagatgtcatcaacggaaaagtagttattgaaaaaacaattgaagattaa

SEQ ID NO: 8210 - DNA, 1344 bp, Methanobrevibacter gottschalkii
  source 1..1344: mol_type = genomic DNA
atgcttggaaatttaggagaaaatcttactaatacaatgaaaaaattagtaggaatgtctgttattgataaaaaaactattaaagaagttgttaaagatattcaacgagctttaattcaatctgatgttaatattaaattggttctggagttatcaaaaaaaattgaaagcaggtctcttgaagagaaaccaccaaaaggtattactccaagagagcatgttataacaattatttatgaagaaatggtaaatctgttaggtagtgaaactgttggtttagatattaatgaaagaccttacaaaattttattcttgggtcttcaaggtagtggtaaaacaactacaattggtaaattatgtaggtttttacagaaaaaaggtttcaatcctgcggttgtatgtacagatacatggagaccagctgcctatgtccaattaaaacaattaaccgaggaaatggatgttcctttatatggggatcctgagaataaggatgctcttgatttagctagaaaaggtttgcaggaatttaaaaataggaaagttattattttcgatactgccggcagacataaacaggaagaagatttgattgctgaaatggatgaattggatgatattattaatccaaatgaagctattcttgttattgatggaacaatcggccaacaagcaggtgaacaagcgaaagctttctcacaagctactgatattggatcaataattattacaaaattagatggttcagcaaagggtgggggcgcgatgtctgctgttgcagaaactggtgctccaattaaattcataggtactggtgagagaattgatgattttgaattatttgatcctgaaagatttatttcaagattacttggtatgggtgatataaaatctctcattgaaaaagctgaagagaatattgatgaggatattgcagaaaaaacaatgaccaatatgctcacgggtaaattcactttaatggatatgaaaaatcaatttgaaatgatgaataagatgggtcctatgcaacaagttttaaatatgattcctggcatgggaaataaaatttcaaaagaagcttctaaaatgactgaagataaaataggattatataaggttatgatgtcttccatgactgaagaagaaatgttaaatcctaaaataattaaacagtctcgtgttcaaagaattgctagaggatctggtgttgaagaaagtgaagtaaaagaacttttaaaatattataacaacactaaaaagacaatgaaaggaattggtaaacgtggcggtcgtttaggtggcggcgctatgaatcggatgatgggacaattcatgaatagataa

SEQ ID NO: 8211 - DNA, 1209 bp, Methanobrevibacter gottschalkii
  source 1..1209: mol_type = genomic DNA
atgtacgaattagcaaaacaaattttagaggaaaccggtggtagaatctgtaagaattgtctcggtcgcaaattatctaaaacaattgaaggaacaaacaatattgaaagagcagataaagtttgtgttgaattaaatatcagtttggatgatgtcgattgtgtaatatgtaataatatcttcgataaacttaatgacaagttatataaaaaaattaatgataaaattaatcagttaggtcttgaatttgatacatttttagtgggttcaaaagttcctaaggatgttcaagaacgtgacgattgtttatctgaaaaattcaatttaccagttgagacaatcaaaaaagaaattaatagattgattggtcttgaactttggaaaatctatgacaaagaagccgaatttgaaagtcaggatattgtatttaacattgatttaatagataatcctaaagttagaattcaaattaatcctttatatattgaaggaaaatacaataagttcaaaagaggaattccacaaactaaatggccatgtactaaatgtaaagggaaaggatgttgcgaatgtaacttcactggaaaacaataccctgaatcagttgaagaactaatttccgagcatatattaaaattaactaagggtaaggaagctaaattccatggtgcaggtcgtgaagacattgatgttttaatgttaggttcgggaagaccatttgtattggaaattaaagagccaaaaataagaaaacttaatttagcaaaagttgaagatgaaataaataaaattaacgaaggtaaaacttcatatcataatttacatttatgtaaaagaaatagaaaagcagaaattaaacaatcttctcctgatacttataaagtgtataatgcaattgttgagtgtgatgaaagattcgacgagtcaaaacttgaggaattattaaaactagatgaaattcatcagcaaactccattaagagtattaaggaggcgtgctgataaagttcgtattaaacatgttaaagagttatcttatgaaataattgatgataaacattttagtatgcgtattaaaacagaaggtggattgtatattaaagaattaatctctggggatgggggaagaagtcatcctaatgtgagtgagattttaggtattaaagcaatttgtgaacaattggatgtaatagaagtgagtgagaagtag

SEQ ID NO: 8212 - DNA, 468 bp, Methanobrevibacter gottschalkii
  source 1..468: mol_type = genomic DNA
atggcagaggaatttacacatttaacagaaacaggagtgcatatggttgaagttggtggaaaaccagatcaaaaaagaagggctattgcaagtggaagtatatttctagataaaaatactattaacttaattcaaaatgatgaaattaaaaagggtaatgttttaacaaccgctcagattgcaggaattcaggctgttaaaaacacatcttctataattccactttgtcatccattggcattaactggtattgaactggattttgatgttaaaaaagatgaaataatagctacttgtgctgttaatacattaggtaaaaccggtgttgaaatggaggctattactggtgtaagtgtagctttacttactgtatgggacatggttaaagctgttgaaaaagatgaaaatggacaataccctgatactagaattagtgacattaatgtaattaagaaagaaaaaatctaa

SEQ ID NO: 8213 - DNA, 162 bp, Methanobrevibacter gottschalkii
  source 1..162: mol_type = genomic DNA
atggcgaaaaaagataataaaatttctatgcctcaaacaggtgcaggtttagtaagatattttgatgaagaaagtcttggaccaaaactttctcctgagcatataatagttgctactgttattgtagcgatattatgtttcgtattaagatactcagcttaa

SEQ ID NO: 8214 - DNA, 825 bp, Methanobrevibacter gottschalkii
  source 1..825: mol_type = genomic DNA
atgttaactaaaagaattattccttgtttggattgtgatttacaagtgcctgaaggtagagttgtaaaaggcgtagaatttaaagaaattaaatatgctggaaatccagtagatcttgcaactaaatattatgaagaaggtgcagatgaaattgttgttttagatatcactgcttcacatgaaagacgggctactatggcagatgttattgacatgttaacagaaaatgtattcatgccaatctgtgtaggtggggggataagaaaagttgaagattatattaaaatgcttagagcaggtgctgataaatgttctacaaatacagctgcaattaaaaatccggaattgttaactgaagcttcaaaagttgtaggatcacaagcagttgttattggaattgatgcaaaaagaagatatatctcaaatccagatgacgcaccggataaagtcgttgttgaaactgataaaggcttctgctggtttgattcaagtatttatggcggacgggaatttacaggaatcgatgccattcaatgggctcaaaaatgccaggacttgggtgccggtgaaatccttttaacaagtatggatggtgatgggactcaaaacggatatgatattgagttgaacaaagctattaatgatgcagttgatattccagtcattgctagtggtggtgttggtaaaccaaaagatattttggatgtatttaagaaaactgatgttagtgcagctcttgcagcaagtatatttcattttaaccagtattctattggtgatgtaaaaaagtacttaaaagataataatgtggctgttcgtttatga

SEQ ID NO: 8215 - DNA, 915 bp, Methanobrevibacter gottschalkii
  source 1..915: mol_type = genomic DNA
atgataattgaatctccaattgatttggaattaacacaaatttcaggtcaaacttcacaacctccttggacgaaagttgataattcatatagggaagtcgtattagttaataataatccggttatttttgatgttgaacaatctggagaattctttaattttaattatattggaaatatatctaaaaaagaagccgtatcttctctaaaatatatttttgatttggaatttgatttaaataaattttataaatatttgaatggtcatgcagaactggctgaaatgtctaagttttgccatggtttaagactatttttagcaccaaatccatttgaatgtattatttcatcaatttgttctgcaaataattcaattaaaagatggacaaaatcaatttctgatattaaagagaaatggggaatcaatcataatggttttcacacttttccagaaatctctacttttcaagagatatttttagatgctgaagaagaattggatttaactgatgcaggtgatatttccaattgcaaaaacaatttaaaatcttgtggtgtgggatatagggcttcctacatgagaaaagcatctgaacttttttcattggaaatggacatttcagaaatttcaaaaatgaattatgatgaggcttttgagacaatactgcaagttccaggtgtaggtccgaaagttgctgattgcattttactttatggatttaattttagagaagcatttccatctgatatatggataaaacgcattgtatcttacttatactttgatggtaaagatatttcggttcctaaggtaagggaatttggaatggatgaatttggagataatgcaggttatgttcagttatatatgtttcattatgctagaaaatctggtttaatggctaagttaaaataa

SEQ ID NO: 8216 - DNA, 351 bp, Methanobrevibacter gottschalkii
  source 1..351: mol_type = genomic DNA
atgaaaatcagatatgctacaatgattgttaatgatatggaggaaagtgttaaattttatactgaaactctagattttactgttgatgaagtctttgatgttccggaaggcaaaatcactcttttagatggggagggttttgcaggaattgaactaattgaaagttcaaattttggcagtggcctatattccattggaatggatgttgaagatatccataaagaaattgaaaatttagaagcaaaaggggctaatattgccatgaaacccataaaaatacaggtcggttatatggcaaaagtaatagatccaaatggtattaatattgttttagttcaacataatagataa

SEQ ID NO: 8217 - DNA, 1377 bp, Methanobrevibacter gottschalkii
  source 1..1377: mol_type = genomic DNA
atgaaacttgaaaaaatcgttttaattgtagcaacattgacatcctttttcacagtatttttatcatctgctgtgatggtggcagttccaactttagcttctgaatttggaatgagcaatattatccaaaattgggtcaccatgctatttttcttagcagtagctatttttacaattccatctgggcaattatctggaaaattcggtcttaaaaaatcaatgatatttggctcatcagtttatattctaagctctattgcagctattttttcaataaactcagaaatttttttaatctgtcgattagttcaaggtattggtgtttcatttttaaatgtcgcttcaatggcaatggtcgtatcagcattctctccacaagaacgtggtaaagcaattggaattaacgtaactggagtttatcttgcaacatcaacatctccagtaattgggggatttttaaactttcattttggatggagatctatatttttaacatcagtgccatttttaatcttgattttagttttattaataactgaaattaaggaagaatgggttactatgggggatgttccgattgattggaaaggttctattgtatactcattaggcatattgttatttatttatggattcacacgtcttgatgaaagtactggcattattttgactgttataggtttaattgtattgggagtatttgtagctcttgaacttagagaaaaatatccagtattcgatgttaaattctttaaaaatcctaaattttcatctgcgaactttgcagctctaacagcgtatctcgctacatttgctgttacaactattgtaaattatcatttgcaatatattagaggttatgattctcaaatggcaggtataatcttgttagttgcacctttaattcaagtaattatggctccaatttcaggaagattgtcggataagattaatccacaaaaattagcggctattggaatgttttttggagcaatttcacttgcaatgctttcaatgcttaatgtttcaacaccattatggtttttaattattgcgatggtatctcatggtttgggttttggaatattttcatctccaaatacaaatgcaattatggggtcagttccacaaaaagatactcctgtggcttctgcatcagttgcaacaatgcgtgttattggtcaaacaatgagtatgggtatgttaacattagtatttgcatttgtgatgggtaatgtaccaatgattgagaaatattttcctcttttaattactagttctcaaattacttgcttaatttgtatggtgttatgcgcagcatctgtttttgcttcacttgtaggaattaaatctaaggaaatgttggaatttaattaa

SEQ ID NO: 8218 - DNA, 432 bp, Methanobrevibacter gottschalkii
  source 1..432: mol_type = genomic DNA
atgaaagtcgcaactattgaaaccgataaagggaatattgaacttgaattattcccaaatgaagcacctggaactgtagcaaactttgaaaaattaatcaaagaaggattctatgatggattaacattccacagagtaattcctaattttgtaattcaaggtggttgtcctaaaggaaacggtactggtggaccaggttacactatcaaatgtgaaactgaaggaaacccgcacagacatggaactggtgcattatcaatggcacatgctggaaaagatactggtggaagccagttctttattacacacagtccgcaaccacacttagatggagtacacactgtatttggtcaagttatcaaaggtcaagatgttgttaatgctattcgccaaggcgacaaaatgaacaaattgacagtggaagaaagatag

SEQ ID NO: 8219 - DNA, 1161 bp, Methanobrevibacter gottschalkii
  source 1..1161: mol_type = genomic DNA
atgaatactcaagaattaataaaaatagaagatgattatttcataaacactttcactagacaaccagttgtacttgatcatggtgaaggtgtaagagttactgatattgatggaaatgaatatttggatatgtttgcaggtattgctgtaaattctttgggtcataataaccctaaacttgtaaaagccatacaggatcaagctgcaaaactcattcacatttcaagtatttattataatgaacctgcattaatctatgctaaaagattaattgatttaactagctttgatagaattttttatgcaaacagcggtgctgaagcaaatgagggagctattaaactagctgtaaaatacaccggcaagagtgaaatcatctcaactgttgattcttttcacggaagaacaataatgactcttgcagctactggtcatgaagaataccatgaaccatttaaatcaataatgccgcaaggatttatcaatgttccatataacgaccttgaagctattaaaaatgcaattactgaaaatactgcagctatcattgtcgaacctattcagggtgaaggcggggtacatgttcctgatgttgaatatttaaaaggaattgaagcaatctgtagagaaaaaggcattgtatttattgtggatgaagtacaaacaggattcggaagatgtggaacattatttgcacacgaattatttgatgtcaaaccagatataatgactatggctaagggaataggtggaggagttccaatgggtggaattttagcaaccgagaaaatagctagtgcattcgtacctggagatcatggaacaacattcggcggtgggccacttgtatgtgctgcagctaatgctattttagatgaatttgcagataaaaatattttggataatgttaatgaagttggcggatatttcatttctgaattaaagaaattagataaagatattattgccgatgttcgcggtaaaggtttaatgatcgggcttgaattaaccaaacctggtgctgaatatgttgataaactaagaaaagcaggtttcttaataaactgtactgcaggcaatgttttaagatttgtcccacctttaataattactaaaactgacatcgacgagtttgtagaagctttagatgaaattttatag

SEQ ID NO: 8220 - DNA, 1284 bp, Methanobrevibacter gottschalkii
  source 1..1284: mol_type = genomic DNA
atggatttaaatattaaagtaaacgataaaaaccaccttgatattggtggagcagatgcaattgatattgcagaagaatttggaactccaacctatgtgattgatgagaataggataagagataattacaatagattttattcagctttctcaaaatattatcctgattttaaagtattttacgcatgtaaagctaatactaaccttgcagtaatgaaaattttagaaagtgaaggttgttgtattgatgcggtttcccctggagaagttcatatatcaaaaatgcttggattttcaggagatagaatattattcactggtaacaatattactaatgatgaattaaaatatgttcatgatgaaggtgcagttttaaatatagactcagtatcagcacttaacagattatctaaaatgattgaccctgaaggtgtaaaaatttcctttagagtaaatccaatggtaggtgcaggacatcatgatcattgtattacaggagggataatgagtaaatttggtattatggaatccgaagctgttgaagtttataaaaaagcagaaaaattaggattcaatccagttggtatgcactctcacattggttcaggtatattggatccggaaccatttaaattagctattgaatcaactatggatattgcaggtaaagttcaccaagatgctggaattgactttgaatttgttgactttggtgggggagtgggtattccttacactcctgaagaaaatgttgtagatttagacaaatttgcagaagttaatgtcggattatttaaagaaaaattagaacaatatggcatgggtaatcctacaatgtatcttgaacctggaagattcttggttggagatgcatgtgtgcttttagtaactgttaacagtctaaaacaaagttacaggaaatttattggtgtagatgcaggttttcatactctcttaagaccggcgatgtatgattcataccatcatattgttgatgcaagcagaatgaatgcagaaaatactcaaactgttgatattgcaggaaatgtatgtgaatctggagacttatttgcacgtgacagactaatgcctgatgtggaagagggtgatgtattaggtatattaaatgcaggtgcatatggatttacaatgtcttcaaactataattcaagacctcttgcttcagaaatattggtaactgatggtgaatgctcagttgtacgtgaaagagaaacttttgaagatttatatgcaaaacaaagtattcctccacatttgaaataa

SEQ ID NO: 8221 - DNA, 861 bp, Methanobrevibacter gottschalkii
  source 1..861: mol_type = genomic DNA
atggtagatttaaaaggattaaaattttcaaaaatgcatggaataggtaatgattttccaattattgatgaaacaaaaggaaaagtcatttctgaagaagacaaacctgaagcatgcagaattttatgccacagaaacttcggagtaggtggggatggtgttttattcgtagaaccatctgatgttgcggatattgggtacagaatgttcaatcctgatggaagtgaggctgaaatgtgtggaaatggcataagatgctttggagattttgtatacagaaaaggtattttaaaaaaagagaagatgactgttgagacaagggcaggaatcaaaactattgaaattactttagaagatgatgaaccggtattatttaaagtagatatgggattatcaacattcaaaactcctgaaatcccaatgatttctgaaatggatgaatttttggattgtgagttggaagttttagatactacttttaatttaactgctgttagtgttggaaatcctcatgcaatcatctttgttgatgatttagatgaaatcgacattgacaaatacggtccagctattgaagcacatgaagtattccctgaaaagatcaatgtacattttgttgaagtaatttctaaaaatgaaggtaaaatgagaacatgggagcgtggtgctggtgtaacacttgcatgtggtaccggtgcaacttctacagctatttctggttacaaactaggtttatttgatagtaatatcttacttcacttacctggcggtgacttgaaattcaatgtatatgaaaaagatgatgctcttggcgcattcatgaaaggtccagcagagcttgtttatgatggggaattctaa

SEQ ID NO: 8222 - DNA, 585 bp, Methanobrevibacter gottschalkii
  source 1..585: mol_type = genomic DNA
atgcctgattttaaaattaatattgatgataatgtttatattcccgctgaagacagctatttacttgctgataacttacagattaaaaaaggacaaagtgtgctggaaattggaactggatcgggtattgttgcaatgtatgcttcaagacttacagacaatattactgtaacagacattaattttgatgcatgtgaacttgcatgcaaaaattttgaagcaaataacattgaaaatattgaaatattatttggaaatttgtttgaccccgtgcagaatagaaagtttgatgtaattttattcaatactccatatctgcctactgaaaaaggggaggttttagatgacacaataaattatgcttttgacggtggattagatggtagaaaagttattgatgcctttttaaatgaagtgggaaatcacttaaatgatggcggaatagtgcagatgatacagtcttcactatcagataatgaagaaacactgaaaaaactcgataaattaggttttatttcagaaattgcaaaaaaagagcacttttttttcgaagatataacattgattaatgcgtataaaatttaa

SEQ ID NO: 8223 - DNA, 873 bp, Methanobrevibacter gottschalkii
  source 1..873: mol_type = genomic DNA
ttgaatagtgaaaattccatatccctttctaagacaactaaaagcatcttaaatcaaaatgggataaagttaaataagaatcttggtcaaaattatctaattgataaaaataaaagagatcaaatcattaactttggaaacatcaatgaaaatgatgtaatcttagaaattgggactggaattggaacattaacaattgaacttgccaaaaaagctaaaaaagtaatagctattgaacaagataaaaatatatgtgacatattagccaaaagacttaaagaagaaaaaatagataatgtagaattactcaatgaagatgctttaaatattgaatttccaaaattcaataaaatcatctccaatctaccttatcaaatctcatcacctattacttttaaatttttagaatatgattttgatttagctattttaatgtatcaaaaagagtttgctgatcgtatgaatggggaagttggaactaaaaattattctagactttcagctatgctacatttcaaatgtgatgtgaaaaaattaacagatgtgagttctgaaagttttattccaaaaccaaaaattgattcaacagttgtaaaattaacaccaaaaaagaataaaatttcacttgaagattttaaaatttattccaaatttacaaaagcattatttcagcatagaaacaaaaaaattagaaatgcattgattgattctagacacataataactaatcttgataaaaaagaaatgaaaaaatgtatgaatgaaattgaagatgaaaaactaaataattatctcaaaaaaagagttgttgtagtaacacctgaagaaatactatttttatctaaagatttaaattcaattttaaacggatag

SEQ ID NO: 8224 - DNA, 633 bp, Methanobrevibacter gottschalkii
  source 1..633: mol_type = genomic DNA
atggttgataataaaaaaagaaatggaaaaaaaccaactgtaaaaaaagaacaatatgctgttgttcttgattatttaagcagaggctatgttaagtcagatatgtctaaatttggcggaaaacctattgctcaagctattggtacagaacaattcactttacttgaattagctcctaaaaatggtgttgatttagaaataggagacacagtatttataggacaaggaaaaaaagataaaatatatagagtacttggaagattaaactttgaaagattaactgcaacaagtagaattgaattagattacacaatcagagacattgttgaatcaaacgaagaaaaatatgttaactttttcaatacaactggagccgttagtacaaggctccatacacttgagttaattccaggaatcggtaaaaaatatatgtgggacattattaatgccagagaagaaaaaccatttgaaagtttcaaagatataaccgaaagactcccaacattaaccgaccctgcaggaatgatagtaaacagagttaaacaagaattggatagaaatgcaattaaaagaggcaaaagtaaatattacatatttacacaggttccaaaaaaacctagaaatccaagataa

SEQ ID NO: 8225 - DNA, 354 bp, Methanobrevibacter gottschalkii
  source 1..354: mol_type = genomic DNA
atgatttctatgattggaaaagaaattattgaaagtgaaccaatatcaagtgcagaagtaaaaaaagttcttgaagatttttcagaagacaatgaattaaactacgaacagaatattactttaaatcatcttgcaagatttaaaagatattctgttgaagattcagaagaaattattgaaaaactccaagaagaatttggcctaagagataaagttgctgtacgtatcgtagatttagttccaaaagatttagcagatttaagattaatcttcgctaaagaagctataaaaattgaaaaacccgatatggaaaagatacttgaactcttagaacaatacaatattgaagaatag

SEQ ID NO: 8226 - DNA, 291 bp, Methanobrevibacter gottschalkii
  source 1..291: mol_type = genomic DNA
atgcaaagatcaagaggattaaaaagtagatcaagaaaaaaaatgacaaaaacccaaagaccaggtagaaccaatcctattactaacagaatgcaaaggtttgaagatggagatttagttcatattactatcaacccaagtattcaaaaaggacaaccggctcctagattccatggtaaaactggaaaggttactggtcaaaaaggtaaagcatatattgtatccttaaaagaaggaaacaaagcaaaagaattaattgtaagaccagaccatttaaaattacaaaaatga

SEQ ID NO: 8227 - DNA, 2319 bp, Methanobrevibacter gottschalkii
  source 1..2319: mol_type = genomic DNA
atggaaagaacttcagaattaggaaaaaatttacatgaatctacaaaaattaatgtagaaaaaaataacgggattaaagaaaggttcagctatgaaaagttattgaaatcattagtaatggttgaaactccattttttgaatccgacaaaattgtagcaacagtagtatcacaattatacgacggaatcaaaactaaagaaatcaaaaaaatagtgcatgaatgtttagaagacattgattctgaaattgcaaacaaatatttagcaagtaccagattaaaagtacgtacttctagagatactattgaagcatttgacttatcaaaaattgcaaacactttaattgaagaaactggagcaagccaagaaactgcattcgaaattgcaactgaaacttggaaagaactgaaaaaattaaatgtagaatacttaactgctccaatgatcagagaaattgttaacactaaattagtagaatatggattagaagatttaagaagtcgttacactcgtttaggtattcctgtatacaacattacaaatttaattgaaaacggtaacagggataacgcaaacatgattcacaatcctgaaagtatccacaaacatgttgcagatgaagcattaaaacaatatgcacttttaaaaatgctccctgcacatttagcagatgcacacatgtctggcgatattcacattcatgatttagaattctttgcaggcagacctttaaactgtatgcaacacgacattagaactttcatcaaatacggacttaaagtagacggtactggtgaccacacttccattgcaggagcaccaaaccacatggaaactttaatgaaccacactggcgaaatcatgcttgcagcacaacaaaatatgtccggaggacaaggaatgtcactttggaacgtatttgtagcaccatttgcaagaggaagaacctacgaagaaatcaaacaatcagtacaaatgcttgtttacaacttaaacatggcatatgcagcaagaggatcacaagttccattcacaagtatggcattagaatttggtgttccggacttcttaaaagaagaaactgcatacggaccaaaaggacaagtagttggaacctatgctgacttcgaagaagaaaccagattaattcaaagagcattcactgaaacattattagaaggagataacgaaggaaaacctcatttattccctaacacaatttacaccctccgtaaagaaacaatgactagtgaatacgaagaggatattagattagttcatgaattatctgcaaaatatggttcttcctactttgtaaatatgttccctaaatacagaggaaacatggcaaactacatgggatgtagaacttgtttacaagatacttggactggtgactgggatcaagactgtttaagaactggtaaccttgcatatgttactttaaacttaccaagaataggataccaatctaaagatgaaagtcaagtattcgaatatttagatgaatacatggatcttgcggttgaaactttaatgcttagaagagaacaaggattaaaatgtttaaatgatttccatatcttacccttcttaaaacaacaagtagctgaagattcatactacagaatccaaaattcaactttatcatttggtttcgttggacttaacgaaatgttatcatcattatttggtgcaggtattgaaaatgctgatgcaaacaaatttggagtaaaatgcattgaatatattaatgatagagctaatcaattaaaagatgaaactggactcagatggtctgttattcaaactcctgctgaatctactgcttacagattcgcaactcttgataaaaaacaatatggagatcaagctatcgttcaaggtgaaggaaatgcaaactactacactaactcttcccatgtaccggtagacacaggactttcacttatcgaaaaaatcaaaattgaagaacaatatcacagtataacacctggcggacatatcttccatgcattcatgggtgaatcatactctgatcctgattctttaatgagtttaactaataaaattgctaaaaaatccgatataggattctgggcttacagctcagcattaagtttctgtcttaaatgtaaaactttaatgaaaggattaaacaatgtttgtcctacctgcggtgaaaaagaagatgtagaatggtatgatagaattacaggatacgtacaacaagttggacgtgcaaaatctgcatctggcggatggaacccaggtaaacgtcaagaattaattgacagaagaagatttgaagataactaa

SEQ ID NO: 8228 - DNA, 3297 bp, Methanobrevibacter gottschalkii
  source 1..3297: mol_type = genomic DNA
atggattattttgatagattagaagctgatacccatcacctatacgacatagctaataaagccaggtctagagggttagatgttgaaatagaaacagaagtaccccttgcaaaggatttagctgaaagagtggaagggcttgttggtcctgaaggcgtggctaaaagaattaaaatattagaacaaaacattacaagagaggaagtcgcttttgaaattgcggctgaaattgcttcaggcaaatttgagcttacaggtgagaaagctaactgggatacagaacaaagatgtgaccaaggtcttaggactgcacttgctattcttacagaaggagtggtggcagcaccacttgaaggaatttcagatgtcaaaattaaagataactttgatggaacaaaatatataggagtatattttgcaggaccaatcagaagtgcaggaggaacagcagcagcactagcagtacttttaggggataaaattagacaagctattggcattgatgcattcaaaccaatcgatgatgaaatcgaaagatatgtagaagaagttgaattatacgaatcagaagttacaaatttacaatactcaccaacaccagaagaagtgagatttgcagcaaaccatattcctgtagaagtttcaggagaacagactgacaaagtagaagtatctcatcgtgatttagaacgtgttgaaaccaataatattcgtggcggagctcttcttgcaatggttgaaggagttatccaaaaatctaaaaagattaaaaaaatctcaaataaattaggtctagattggaattggcttgaagaatactcaaaacctaaaaaagacgattcaaaagaggattcaggagacagtgaaattgttagtgaacctaaatatattcaagatatcattggtggaagaccagttcttggatacccctctgagaaaggtgcatttagattaagatatggacgatctagaaatactggtcttgcaactatgggtgttcacccagcaacaatggccttgcttgattttttagcagttggaacacaacttaaaattgagtatcccggaaaaggtaactgtgtggttcccgtggattcaattgaaggacctacagttaaacttaaaaatggtgatgtattaattcttgattctgtaaaaaaagcaagggaagttaaaaaagatgttgttgaaatattattccttggtgatatgcttgttgcatttggagaattcttaagaaacaaccaaacattatatccctccggatggtgtgaagaatggtggattcaattattgatgagaagtgataagtttgatgcagaaaatactgatttagacttgtataagcttgaatatgaatatttatcagctactgaagcatttaatttatctaaggagtataacattcctctccatcctaaatatacatactgttacaatgatgtgacaattgaagatttaaattcattaattgatttgattgaaaatggaaaatcaacatttaataaggatgaaggaatgaaactcgatttatcatatcaaaaaagaattcttgaaatcataggtgtcccccacattgtacgcaatgataaaattatcattgataaagaccattcttattcacttttagaaacattgcccaaaaaactaccagaaaatgaaacaactatagaagcagtaaacgaaatttcacctattgaaataaaaaataaagctccagcatacattggtacccgtgtaggtaggcctgaaaaatcaaaagaaagattaatgaaacccgcccctcatggattaataccaataggaaataatggtggttctagaagacttgtggcaacagctgctaaaaaaggaagtgtgaaagtagatatttctagaagaaaatgtacaaacccagaatgtggaataagttcatttggatcactttgccctaaatgtggcagcccaactgaagtaggaaaaccgtctcaaaaaactattccccttgcaactatgcttaaaaaagcatcagataatgttaaagtaagacgtgttgatgaagttaaaggagtagttggtatgatttctgaatccaaattaccagaacctatcgaaaaaggaatacttagggcaaaacatgaagtattcacttttaaagatggaactattagacacgattcaactgacttgccacttactcattttatcccaaaggaaattggagttacagttgaaaaactacttaaaatgggttatgaaaaagattgttacggaaatccaattgaaaatgaaaatcagatcattgaacttaaagttcaagacatcgtcatttcagacaattgtggcgagtatttacttcgtactgcccaatacattgatgacgaacttgaaagatattacgatatggatccattctataatgttaaagagaaaagtgatttaattgggcatttagtcgcaggacttgctccgcatacatctgcaggagtacttggaagaattgtaggatttacaaaagcattagcttgttatgctcacccttacttccattcagcaaaacgtaggaactgtgacagtgacgaagatgcagtaatgttattattggatgcattaattaacttttcaaaatcatatctgccgaatacccggggaggaagtatggatgctcctttagttttatcttcaagaattgatcctgaagagatagatgatgaatctcacaacttagacatctttgaaagattcccggtggaattttatgaagaaacttatactcctcataagcctgcagaggttttaaaatacattgataatgtagaaatgcatttaggaactccacaacaatatgaaggattaatgttttcccatcatacctcaagcatacatgccggacctactgtctgcctctataaaagattaccttcaatgagagaaaaagttgaagctcaaattgcacttgctgaaactattagagcagtagaccaaagaggtgttgtggaaaaagttttatcatcacatttcttacctgatataatgggtaactcaagagcattctccaaacaaaaagtaagatgccctaaatgcggcgctaaatatagaaggatgccacttactggaaaatgtaagtgtggaggtaatttaattctatcagtttcaaaaggatcagttactaaatatcttgagatatcacaagagcttgttaacagatatcctgtttcacattacttgaaacagcgtcttgaaatccaagaatttggtattaactcattgtttgaaagtgataaatcaaaacagagttctttagatatctttttctaa

SEQ ID NO: 8229 - DNA, 954 bp, Methanobrevibacter gottschalkii
  source 1..954: mol_type = genomic DNA
atgtcaaatgataaaccgattaatgctatgtatggtagcaaaatgaaattagatttagataaactcaaaaataatcgcaaaaaagatgacgaaggaaaagttattgaaacaaaacatatcttggaaggttctgaagaaccagttgttgaagatgctcctgaagaggtagttgaagagactgtcaaaaaggaggctatggaagaagcagttaaagaaaaaccttccaaaaatgttgattccagtgttgtagatagtttaaaagttaaattaggcgaaagagaaaaaaaattatctaatcaatctagtgaacttaattatttaactaataaattaattcccaaacttaaaaaggaaaatgctaatctaaaaagtcttaaaatagaattaaccgatgcacttgaaaaatctactagaaaatactttgatcagttagatattaatgcagatttgagtaataaaattggaaaaattggtgctgaaggtgctgttaataaagtaagggcagataaatttgaagctgaaattaattctgttaaagaagaattgcaggataaaataaaccaatataaagaaaaacttgattcagttaatattgatgggttgaaaaaagaaaacaatgaattgtcatgcgaattaagggatataaaaactgaattggataagactaaaaaagaaaacatgaaactttctgaagaagttaaatcattaagggacgagataatcgaaattggtaactacaaacaagaagttgacaaccaaaataagaaagaaatagaagaatataaagaagaaatttcatcaatttccactaaactcagacttaaggaaagtagctatgataaattgttcaatgaatctagtaaaactatctcaaatttaagaaaacaagttgcgaaacttgaagaagacttggaaaaagaatcaaacaggggattatttaatagattcaaatag

SEQ ID NO: 8230 - DNA, 492 bp, Methanobrevibacter gottschalkii
  source 1..492: mol_type = genomic DNA
atgacaaacgataattattttatggatgaagctattgttgaagctcaaatatctttaaatgaaggaggacttccaattggagcagtccttgtaaaagataatgagataatatccagaggccataataggttaattcaaaataattctgtagttttacatgcagaaatggatgtgcttgaaaaagctggtcgtttaaactatgaggattatattaaatgcactctttatacaacattatcaccatgcccaatgtgttctggagctttaatattatataatataccaagagttgtcattggagaaaatactactcttatgggtgctgagaatttacttgaatctaatgatgttgaggttgttatattaaataatttagaatgtagggagttatttttgaaattcgtcaaagataatcctggagtatgggaaaaagaacttaaaaaagttggaaataatactacggtgaaatatggagattattgtaacaaatga

SEQ ID NO: 8231 - DNA, 378 bp, Methanobrevibacter gottschalkii
  source 1..378: mol_type = genomic DNA
atggagattattgtaacaaatgaaatggatgaaagatttattgaaatatgtaactcttttgagtgcttttcagacgaacctcaggtagttttacttttaaataatttcggtaaaattgttggttgtgcgagttttaaagtttatgatgcagattctgcggagattactacattatttttaaattcacatgataattgtgaaaagatagcttataaattaattagacagctcgaaaaaatagcaatcgattatgaatttaaaagtatagttgttaattttgatagttatgaagatattcttattgaaatctttgaaaaattagattataaattcattgatgaacttttaatgaaaaaagaatttaaaagtttaatttaa

SEQ ID NO: 8232 - DNA, 1584 bp, Methanobrevibacter gottschalkii
  source 1..1584: mol_type = genomic DNA
atgacacattggattgaaaatgtagctaaagaattagcagaaagagatgtagaagaacatgttattgcaagtggaacctctatttcaggctcaatacacattggaaactcttgtgatatatttattgctaatgcaattggaaagaaattaaggaaacttggaaaaaaagcaaaaacaatttggattgcagatgaccatgacccattaagaaaagttccattccctcttccccaagactatgataaatacttaggtatgccatactcagttattccatgccctgatggttgctgcgctaactttgtggaacattttgaaaaaccattactttcagtaatggacgattatggaattgaaatggagaccaaatctggttttgaaatgtataaaaatggagtttacaacgattacattagaacttctcttgaacatactgatgaaatcaaagaaatcttcaacgaatacagaagagaacctttagcagatgattggttaccatacaacccaatttgtgatgaatgtggacgtgtgaatacaacttatgcttatgactttgatggtgacattataaaatatagatgtgaatgtggccatgaaggtgagatggatattaaatcaggtaacggtaaacttacttggagagtagaatgggctgcaagatggaaaatctttaaaacaacatgtgagccgtttggaaaagaccatgctgctagtggcggatcctacgatgtgagtagcataatttcagaaaagatttttgattaccctgcaccttatccggtaccatacgaatggattacactcgatggtgaagcaatgagtaaatctcatggagtattctttgctcctgaagaatggttaaaaattggacctgcagaaagtcttaactattacttatttagatccaaaccaatgaaatcaaaggatttctcaccaaaaatgccttttttagactttatcgaccaatttgatactgttgaaaaagtattctatgatgaagaggaagcaccatctgaaaaagaaggtaaaaaattcaaagaaatatatgaaattgtacaaatcaacgaaggtagtcctttaccattcagaccatctttcagattcttagttaatgcatatcaaattgctggaaatgacttagaaaaaatttatggaattttaaaaagaaactcacaattatccaaaagttttaaagacaaagaatttggtgatttgactgaagcagaattagctcaatatcgtgaaagagttgataatgtaatctactggttagatacttatgcacctaaatttgtaaaattccaagtgcaagagaaaaacattccaaaattgccattaactgatgaacaaactaaatttttaactgatttagctgatttaatggaaaacaatgaatttgcagaagcaactcaattgcatgatgcaatgtatgaaatcttagaatctcaagaattaaaaccacaaaaaggattccaagctatttacaaaatgattcttggtcaaaaacaaggtccaagagcagcttcattcctattgagtttagataaagattttgttgtaaaaagattaagacaagaagcttaa

SEQ ID NO: 8233 - DNA, 1338 bp, Methanobrevibacter gottschalkii
  source 1..1338: mol_type = genomic DNA
ttgactgttttaaaacttattggactatggtgtgataaaatgactcaaattagtgatgcaagaaaaggaattttaaccgaagaaatgaaacatgttgcaaaaattgaaaatgtttcagaagattttattttaaaatcagtagctgaaggtacaattgtaataccaggaaatgtaaacagagatgttgaagctgcaggtattggtgcaggccttagaactaaagtaaatgcaacagttggaacttcaactgatattgttaactttgatgaagaagtacaaaaagcaaaaatcgcaattgaccatggtgcagactgtttaatggaattaagtattggtggagacttagatgaaatcagaagaagggttctcgatatgtcaccgttaccagtaggttccgtaccagtttaccaagcatccattgaaagtattagagaacatggttcagtagttgacatgactgaagatgacctgttcaatgctattgaaaaacaagctaaagacggtattgacttcatggcaatccacagtagcattaatattgaaactttaaccagactaaaaagacaaggccgtgtaactggacttgtatcccgtggagggtcatttatgtccggatggattgttgaaaacgaaaaagaaaatccattatactccaactttgattatgttttagaaattgcaaaagaacacgacgttgttctttcacttgcaaatggtatgagagcaggatctatagctgattcaactgacagggcacaaatccaagaattgatcattttaggagaattaattgatagatctcgtgaagctggagtacaatgtatgattgaaggccctggacacatccctattaatgaaattccaacaaacgttatgattcaaaagaagatgtgttcaaatgctcctttttacatgctaggacctattgtgtgtgatgtagcaccaggttatgaccacattgtttctgcaataggtgctgcatcatctgcaaaagccggagcagacttcatttgttatgtaacacctgccgaacaccttgctctgcctaaccctgatgatgtaagagaaggagtaattgcaactaaaatcggagcttatgctggtgacttagcaactggtcaaattgatggatcacaagatttagctatggctgaagctcgtaaaaatcttgattgggaagcacaatactcatgtgcaatgttccctgaagctgcacgtgcaaaaagggatcaaagaccacctgaagaagaagatacctgtacaatgtgtggtaactactgtgcagtaaaaattgtaaacgaatggttagataaatctgattctgacttaattaaatag

SEQ ID NO: 8234 - DNA, 915 bp, Methanobrevibacter gottschalkii
  source 1..915: mol_type = genomic DNA
atggcaaaaaacagagatttactagctattggtcactctgctcatgactacattattagagtgcctgaatttccaaaagcaaatttttctgctccaataacaaatatgaaaacatttaatggcggagctgcagcaaatgttgcttgtgttggagctaaattaggattaaaaacttctttagtttcagcagttggtggagattttaaaaaaacggaatattatgagcatatgcagaatttagatattgacacggattctttgattattgttccgggtgaatcaacacctactgcatttgtattaactgatgataatgaagatcaaattagttatttctattggggtgctgctcgtgaatttgcagaaagcaaagtacccgcatctgcaattaaaaatactgaagcagtgcatttagcaacaggagatcctaattttaattggagatgttctgaagaagctaaaaatgaagagttacttgtttcattcgatccaggtcaggatctcggaatgtatgatataaaaaagttaagggatgttattgaaaacactactattctttttggaaaccatcatgaaattggaagaatcttagaatccctcgaagtggatttggatggtcttaggacattaggtccaaaaataattgttaaaacatgcggtgctaagggtagtgaaatttattcaaatgaagataagataaaaattgatgctattgaaacagaagttgttgacccaactggagctggagattcttatagagcgggatttttatcaagatttttaaatggtgaatcgttagaagcatctgcaaaatttgcatcaactgtatcctcatttattgtcgagcaccaaggttgtcaaacaaatatgcctacttttgatgattcatttgagagaatgaatagattttactga

SEQ ID NO: 8235 - DNA, 867 bp, Methanobrevibacter gottschalkii
  source 1..867: mol_type = genomic DNA
atggaatttgaaagtaaagggttgataagtttagagatagagggtgaagtttatggatataaactatatgaaagtcttgattcactaacaaaaacaaagtcccaaagaaaatctgcaaaagaactaaatatttcccatacagtatttaatagaagaatacttagagcagaaaaaaaattaggatttaaacttacggaaaaacttggaaatggtactgaacttacaaaagaaggattggacttgttagaagaatttaaaaaatacgcaatccaaattgaaaaaacacccaccatcaacatcgttggaggccatataagtactggtcttttagaaagtatagaattaccatttaaaactaatatttacagtagtaacgatgaagatgcttttgaacttgcaaaaagaggcgtagttgatattttaacattagatgatccattaatagcatttgaaagagatataaacttttatccaatagcctatgattacctggttcttatttcaagtccagactctgaaaaaattgaaagtatttcagatttagagaaccttgattttgtaagtgtgtctggatctgcccaaaggttggcatggaacagtttaaaacattatgacatacatgttaatattaaagaaaatgtaagttcgcaatttgatgcatataaaaaagttagaaactcaaaaaatttacatacatttttaaatgcaagttactttaaaggaaacgaacttttaaaatttaatacccaacatgtaattagcttgattaaagttaatgaagataaagcaaaggttgatgaatttattaaatatttaactaatgaagcccaagaaagcattgaaaaacaaggttttacaccaatgtaa

SEQ ID NO: 8236 - DNA, 591 bp, Methanobrevibacter gottschalkii
  source 1..591: mol_type = genomic DNA
atggaaattatgaaaacttctattaaagctatattggacaatattaaaaacgctgaagattttttagatgaaaaagcaattgatgaatttgaaaatataatcattggttctaaaaatatatttgttactggtgctggaagatctggactcgctgctaaagcttttgcaatgagattaatgcatttaggtttaagtgcttatgttgtgggggaaactatttctccggctatttatgaagatgactgtattattgcaatttctggttctggtgagacaaatacaattgtttcagctgtaaaaattgctaaaaatagaggttcgaaagttttagctttaacatcttatcctgaatctagtttaggacaactagcggatgcttatattctggttaaaggaagaactaaaaaagaagttgatgatgaaaattatatgaaacgtcaaattcatgggaattacacttctttaacacctttaggcactgcatttgaattaactactttagtatttttagatgctattgtttctgagttaatggagaaaatgcaacaaactgaaagtgatttaaaagcaagacatacagttttagagtaa

SEQ ID NO: 8237 - DNA, 750 bp, Methanobrevibacter gottschalkii
  source 1..750: mol_type = genomic DNA
atgaaaatcgaaaaggtaaatgccataaaatataaaaataaccaacatgaagaagtaaaagaaaatgttgtaaaagatgaaactattactttaacaataaatggagaaatttcacgtagtttatctgcaattgaagactcacttaaagaatttgctgttggatacttatttaatgagaatatggttaaatcactagaggatattaaaaaaattgaaattgatggtgttcaaatcaatgcagaaattgatgatacattacttaaaacaaatgaaactgtattatgctctgattcagcaggtggctggagaagtaaaattaaagaagtgaatcctgttgaatctgatctgcaagttaatgttaaagaattacttgatagaatcgaggaattaaaaaataatgcagaaatatggcaagctactgggggaacacatgtagcaggaattgtacataatggacaatttgtcgtaaaagaagatgtaagtcgacatgttgcagttgataaagtaattggatatggattattaaatggttttaacttaaaccagtcctacgtaatttacagtggtagaatgccagcagatatggtaattaagatgagcagagccggcgtgccaattttagcatcaaatgcagcgccagccaattcaggatataatatagcaaaaaaagggaatataactcttgttgggttcctaagaggccaacgctgcaacatatataacaatcaaaatagagtaatttttgattaa

SEQ ID NO: 8238 - DNA, 570 bp, Methanobrevibacter gottschalkii
  source 1..570: mol_type = genomic DNA
atgaatatagatgattatgatgaacaattacaaagagcagttgagtttcatggggaactttgtggaggtatagctattggaactaaacttgggatgtatggtctcgagttattgggtatggaactaaatcaaagacataaaaatctaatagtaattttagaaagtgaaagatgcacatctgatgggattcaatctgtaactaagtgcagtattggtaaaaaatctttaaaactagtttattatggaaaatttgcagctactttttataatatggatactggtgaggcatacagagtttcagatgctgatgcaaataaaaaaaataaatctaatgaaacaaaagatgaattagttgaaagatttagaataactcctcctgaagaattattcaatgttgaaagagttcatgttaaacctttcaaaggggctcaaaaaccggggggtaatcataaaactcgttggtgtagtgtatgtggtgaaaaggtcactgatgattatcataaacttagagcaggcaaaccaatttgtgaatcttgtgcaaatggatcatattatgaaatcattgaataa

SEQ ID NO: 8239 - DNA, 804 bp, Methanobrevibacter gottschalkii
  source 1..804: mol_type = genomic DNA
atgagttcatttaaaagtccagttgatactgcaaaagcaatatctaaaacagctggagcaaaaaactctgcaaatattgttaatgtaatattgctctcattcttagcaggagcttatattgcattcggtggtttattagcaattgtatctagcgcaggtatgattaaagctggtgctccacttggtttagaaaaattcgtatttggtgcagtgttccctgtaggtttaattattgttgttcttgcaggatctgaattattcactggaaatgttatgtttatggttatgggtgttttagatggatccgcttctattggcggactcgctaaaaactgggtactcagttgggttttcaactttgttggtgctttattcgttgcatatgttatagcattcatgggcggtttatgtcctactgacgcatccgtacctgcatatgctattactgctaaagctattgcagtagcagaaggtaaagtaactatgcctttcactgtagctttaattaaagctattggttgtaactggttagtatgtttggctgtatggttagctaatgtatctgacgatgctattggtaagattgttggtatttggttcccaattatggctttcgttacccttggatttgagcacagtgtagcaaacatgtgtttcatcccattaggtatgttcttaggagctaaaggtgtaacctggactactattattgtaaacaatttaatcccagttactattggtaacattattggtggaggactcttcgtagcttgtatttattggtacactttccttaaagaataa

SEQ ID NO: 8240 - DNA, 2166 bp, Methanobrevibacter gottschalkii
  source 1..2166: mol_type = genomic DNA
atggttgaaattaaatatgttccaacaatctgtccatactgtggtactggttgtggactcaatttcgttgtaaaagacggaaaaattgttggtgtagaacctttaaaaagaagccctgtaaacgagggtaaagtatgtccaaaaggaaactttggataccaatttattaatagggaagacagattaactactcctttaataaaagaaaacggtgaatttagagaagcatcttgggatgaagcattagatttagttgctaacaaactcaaggaagtatctgatgaagatcctaataaagtaggattctatgcatgtgctcgttcacctaatgaaaacatttacattactcaaaaattagctagggtggcttgtggtactcaaaatgtagaccactgtgcacgtatatgtcacggacctactgtagcaggtttagcaaatactttcggatcaggggctatgaccaatggtttcgacagtattaaggaagctgattacattttctgtattggatccaacaacatggaagctcacccattattcggacgtaaaatgatccaagctaaagaaaatggtgctaaattagtagtattggatccaagattcactcctactgctaaaattgcagatgaatatgtacaatttgaaactggtactgacgtagctttaatgaatgctatgattaaagtcatcatcgacaaagacttgcaagatgatgagtttattgcaaacagaaccaaaggttacgaagaaatgaaagaaactgtccaaaaatacacattagacaaagtttctgaaattaccggtattaaacctgaaactattgaacacttggctgttgaatatgcatctgctgataaagcagctattgtatactcattaggtattaccgaacactcccacggtgcagataacgtaatgtccactgcaaaccttgcaatgttaactggtaacattggtagacaaggtactggtgtaaacccattaagaggacaaaacaacgtacaaggtgcttgtgatatgggtgcattaccttctgattacgtaggatacagaaaagttaaagacccagaaaccactgcatggttcaacgactactacagtggagatggttatgaagtaaacttaccaactactcctggattaactttagttgaaatgatgaacgcagctcatgctggtgacttaaaagtattatatatccatggggaagatccagttctctccgatgcagatgtaaaacacactaaagaagcacttgaaaacttagaaatgttagttgttcaagaatgtttcttaactgatactgcacaatgtgctgatgttgttttgcctgcagcaggttggggtgaacaagaaggtactttcactagtggtgaaagaagagtacaatgtttacacaaagctcaagaacctcctgaaggcgcatggttagattggaaaatcatggaagaaattgcagtcagaatgggagtacctagatctttattccactacgaaacttctgaagatattttcaacgaaatcagggaatgcgctcctatcatggcaggtatgaaccgtgaaagattagacactcctgaagcacttcactggccttgtccttctgaagatgacccatgtcaaccattaatgcacaaagaaaaatttgcacaccctgatggtttaggagttttccaagcattagaacacaaaggacctgttgaaactactgatgaggaatatccattagtcttaactactactagggtattgttccactatcacgctgcaatgaccagaagatgtgaaacattaaataatgaagtaaaaactggattcatcgaaatcaacactaaagatgctgaagaaagaggaattattaatggtgaagttgtaagagcttactctagaagaggagaaatcgcaattcctgcacgtgtaactgatgatatcagagaaggtattgtaaacatcccaatgcactttgtagaatgtgctgcaaacgtattaactaactccgattctttcgaccctaaatctaaaatggtcgaattaaaagcttgtgctattaacgtagaaaaactccctgaaaaagtagtcatgagaggagaagtctacaaagatggtactgatactgaaattaaagctgaaaacatggctactaccaccattaaagtaggtaaataa

SEQ ID NO: 8241 - DNA, 1206 bp, Methanobrevibacter gottschalkii
  source 1..1206: mol_type = genomic DNA
atgagcgcaaaaattaacgatatgtactacgcatactctgctattgaagatatcaaagaaaaaggagagtacggtggagtagtaactactatcatgaaatacttattagaagaaggtatcgttgacggtgttgttggtgtaaccgaaggtcatgatatgtatgatggtgtacctattctcgtaactgaccctgcagatgtaattaaaactgctggttccgtacactgcggtactttaaacattgctaaatttgtatcaaaatacttagatggtgcaagagacatgaaacttgctgttgcatgtaaaccttgtgatgcaatgaccatcagagaattaatgaaaaaaggtaaaatcatcgaagataatgtaatcatgattggggtaaactgtggaggtactttctcacctgttcctaccatgaacatgattagagatgtatacgaattagatcctaaagatgttatcaaagaagaaatttccaaaggaaaactcattatggaaactgctgatggtgaaaaaggaattgctattggtgagttagaagaacaaggtttaggtagaagagaaaactgtcaaagatgtaatctcaaaattccttccaatgctgatatggctttaggtaactggggtgttattggtgatttagctggaaaagcaactttcattgaagtattcactgaaaaaggtgcagatgctttaggtaaagttatcgatgctggtttaattgctactgaagaacctcttgaaaaaggaatcaaaatcagagaaaatattaacaacttcatgctcaaagagtccttggagaaaaaagatgttgactatgcaggtactactggagatattattgatgtattccacatgtatgaagatgaattctctaaatgtatgaaatgttacggttgtcgtgaagcatgtcctttatgttactgtgatgactgctgtctcgaaactgaaggtcctgaatgggtacctggtggatacactcctgcagctcctttcttccatttgactcgtttagtgcacatggttgacgcatgtactaactgtggacaatgttcagaagtatgtccatgtgaaatacctgtagctaaagtatggagtattgtaaacaataaagtaagagatatctacggatacattcctggtatgggtagtgatgatccacttccattcactgaccatgtatccaaagctaaatggatttaa

SEQ ID NO: 8242 - DNA, 936 bp, Methanobrevibacter gottschalkii
  source 1..936: mol_type = genomic DNA
atgttaaaaaacgtagttaaagataaatatgaaagacctatcctttcactaagaatcacaataacaaatagatgcaacgaaaactgcatatactgtcatcacgatggaatggtttcatcaaaagatgaaatgacaccagatgaattatataaaataagcaaaatagctaggaaaattggtgttaaaagaatgagactttctggtggagatccattggttagaaaagacatagtggaaattgttgaaaaaatagcaagtcttgattttaatgatatttccttgactacaaatggagtactacttgaaaaatatgctaaaggcttaaaagatgcggggttagatagagttaatgttagtttagatacattaaacagagatacatacaaatatgtaactaacatggattatctaaatgaagctaaatcaggtatcttaaaagctgttgaagttggattataccctgttaaaataaacatggttataatgaaagatgtgaatgtccatgaaataaaagatatgtttgaattctgtaaagaacatggaattatccttcaattgatcgaattaattgaaagtgaaaattgtgaagatgataaattcagtgctgaacatcactattcattagactcccttgaaaagaaattaactgatatggctgataaagtacatgaacgtaaatttatgcaagggcgtaagaaatattacattggtgagggtgaaattgaaatagttagaccagttgataatgctaaattctgtgcaagttgttccagattaagaataacaccagatggaaagataaaaccttgtttacttagaaatgataatttagtggaattaatttcacatattagaaatggtaaaagtgaagaagaacttgaagaactatttatcaatggaattaataaccgagaaccatttaacaaagaggattaa

SEQ ID NO: 8243 - DNA, 1038 bp, Methanobrevibacter gottschalkii
  source 1..1038: mol_type = genomic DNA
atgaaaatagtatctatagttggaagaaaaaatactggaaaaacttcactaacagtaaaaattattgaagaacttacaaaaagaggctacaatgtagcatcaatcaaacattctcatcactctatggaaatggataaagaaaataccgatacatggaaacataaacaagcaggatccaatgttgtcgttggaattggttcaacaacatttttcaatgcaagaaaagaaatggatttaaatagattgctatttttaataaaacatatggaccccgtcgacttcgttgtcattgaaggatttaaaaaatataattacccaaaaattgcaacatcccctgatgtagtcgatgaatatacaattaaagagataaattcctttactattgatgataaaggtttaaaagaattagttgatattatcgaagaaagatcccatgatattgtagatacattatttgcaaataattgcggatataacaatggagaaaatattgcatctgaaattcgtgaaggaaacttaactgttgatgaactagataatgtacacagttatctttcaattgataataaagtagttggactgaatagatttgttagtgattttttaaagcaaaatgtgcttggtgtaataaatacattaaatttagatgattataatattgaaaagatatctaacattgaattaataatcccaaatgaagtagataaaactccaattaacgctgaatgtactgttttgatcaatggcaacaatttaaaaatcaacaacttcgcaaaaaatcttgttgcaaactccattaaaggaatgattaattccattaaaactgaagacaatgctaaaatgattgacatagctatttcaaatatcaaaaacaatgaattaaaaaaagctacaattaaccttaaagtaaacaaccataatgttgaaattaacagatttacacagaagatactaaaagaaacaatttttgcaattgtaaattccttaaggattaatgaggaaattgcagaattaagaatcaaagtggaagaaagataa

SEQ ID NO: 8244 - DNA, 450 bp, Methanobrevibacter gottschalkii
  source 1..450: mol_type = genomic DNA
atgccaaaacatattgcgtctggtttaaaatatttggctgcagtcaaattaaaaatggcgggtaaaagtcatcaagaaattgctgacgagttaggtgttgatagatctactatctctcattatttgaatggtagaaacttgtcttggaactctattgatgttgcaaggacaatcatcgacttatgtcccaaagattttttgacaatgactgaagcaatatttaacaatccagaacagagtcgtaaaattgtgaatatttgcagagaaagaaattttgaagcaaaagttgaagattcttgtattggttgcggcttgtgtgtaaatgcatgtacaatgaaagctattaaattagaatcattaaaagcacatgcagactccatgcaatgttgtggttgtcagctttgtgaagatgaatgcccaactaattcgataaaaattttggagatttaa

SEQ ID NO: 8245 - DNA, 1098 bp, Methanobrevibacter gottschalkii
  source 1..1098: mol_type = genomic DNA
atgattagaaatttaaaagaggttaaagacaataactttgacatcacaaggtcagcagacgaagttagaaacttgtctttcaatgaccatgtctgtttaggttgtgggatttgtgaatctacttgtcctgttgaagcgattacattaaatgcagttgctattgatgctcgtaacagactttcaaacgacatctatttcagtgggcacgaaaagattgctcaaaacttccgtgaagattttgatgttcaaagaataagcattgacgaaagtaaatgtgtattatgtggtatgtgcagtggattatgtcctgttgatgcattggtattaactattgatgatgtgccaattagagaaattgaagcatatcctcattataatgctttctcagaaattgatgatgatgaatgtatctactgtaaaagatgtgaaattgcatgtcctcgtgatgcaatcgttatcgaaagagttttaccagaccgtgctgatttagtaactggtgaaatcaatgtcgatgatgatgaatgtatttactgcggcatatgtgaagaattatgtcctgcagaagcaattgttgttgatcatgaaactggtaaagaatctattgttattgacaaagataaatgtgtatactgtcttgtatgtaaaaaatcttgtcctactaatgcgattaacgcaatttgtagattatgtaactatggagaatatgatttagattcttcaaaatcagttgttaaaggtaactccatcattgacccagacctttgtgtctactgtggatggtgtgaaggtgtatgtcctaccgatgctgcaaaagttaaaaaaccgtttaaaggtagtattgaagttgatgatgaaaaatgtcaagcttgtggtgcttgtgtagatatttgtcaatgtaacgctttagcattccctgtatctactggtccgggttccagaatggcacatgttgttgctaatgatgattactgtgtacgttgtaaagcatgtgcaaaagcatgtcctaacggcgctattactgtaaaaagaactgaagttgaccacactcctattaactctgctacttggaaagaagctttagatgctattaaagactag

SEQ ID NO: 8246 - DNA, 231 bp, Methanobrevibacter gottschalkii
  source 1..231: mol_type = genomic DNA
atggaactaaaagttaatcaagataattgtttaggatgcggtatttgtgtaatcgcatgtcctgttaatgcagctatcagtcctgaaaatgctggtggtaacggtgcaaagactgaagaagtcattatgatggttgaaaatggatttatcaaactcttcagtcctgaaaaatgtgaattgtgtggaacatgtcaaatgttttgcccagtaaatgctatatggttagaataa

SEQ ID NO: 8247 - DNA, 570 bp, Methanobrevibacter gottschalkii
  source 1..570: mol_type = genomic DNA
atgtattatgctaatacttatttagaaaaacctgtagtgcctgatgtaaaaattactggtgaaggaaatacagaagttctcaaatgtatgttaaacactggatctgacatataccaaggtgcttgtaaaaaaagaggatctacattaaaacaagaatacaaaaatgtttctggtacttgttacatggatcctagggatatggcaaaattgggtgtaaacaattgggatactgttcttgttaaaacagatttcggtgaagttgttgtgaactgtgcagtatcaagggatgcacctcatgaaggtactgtattcatttgtaaaggtccttgggctaacactattgtaagtcacgacacttactgttgttccgaccctacttacaaaggtattaaatgtactgtagaaaaaactgatagaaaagtattactcatggctgatttaatgagatgggtatacaaaaaatacgttgatgaagaagatgacgatgttgttgaaaacatggaatctttaggtgaattacctgtttatcatggacgtaaatgggaggagttgattgatcatgacttatga

SEQ ID NO: 8248 - DNA, 1377 bp, Methanobrevibacter gottschalkii
  source 1..1377: mol_type = genomic DNA
atgacttatgaaccacctgtaactgattatgaccacattgttgaaaattgtacttgtgcattttgtggttgtaactgtgatgatttagattacttagtaaaagataatcatgttgttgctgtaagacacgcatgcagattaggagcaagtaaaatcatggaagatatggatcaaagattacttgttccaatgattagggatgaaaatggagaactcactgaagttgattgggatactgcattagataaagctgcagagtatattgctaattctatcagacctgtattctatggttggtctgaaacttcaactgaatgtatgaaagaaggtgtagcattaggtgaatacatcggtgctgtattagataaccaagctactatctgtcacggtccttctctccaagctgtacaaaacgcaggttatcctattcaaaccttaggggaagttcaaaatagggctgacatgattgtttactctggaagtaacgctatgaattctcaccctagacatttagcaagatatgctgctttctgtcgtggatacttcagacaaaggggaagatttgacagaactgttgtaactatggatcctaaattctcagatactgcaaaatgttctgataaatggattggatttgaacaaaatggggattatggtttttataatgctattagagctgtacttagaggaaaagaattataccaggatgtaatttctggaattccaaaagaagatatttatgaattggcagaagaaatgaaacaagctgaatttggtgttctcttcttcggtttaggtttaacccacactttatcaaaacaaagaaacattgatattgctattaaaatggtacaggacttaaacaaatacagtaaatggggacttactcctatgagaggtcacttcaacgtaaacggattcaacattttcatggcatttgaatgtggatttgctttcggtgttgactactgtagaggttacccaagatatatgttaggtgaaaccaacactatcgatttattagtcagaaaagaacctgactgtttcatggttattgcagcggatcctggtgctcacttccctaatggagcaaaccaacacttagctgatattcctgttattcaaatcgatattcactggggtccttccactgaactcgctgatgtagtattgcctggttcattcatcgctgtagaatgtgatggtaccagttatcgtatggatggggttcctatatacatgaaaaaagcaatcgacaaacctgaaacttgtcgtgacgatgaatggatcgtccgtgaattgaaagaaagagtaatgaaactcagagaagagcctaatgtagctccaaaatatgtgccaaatccaaacgcactctaa

SEQ ID NO: 8249 - DNA, 1716 bp, Methanobrevibacter gottschalkii
  source 1..1716: mol_type = genomic DNA
atggaatatattcttaaaaatggtattgtctacgacccagctaatgaaattaacggtgagaaaaaggacgtcatgtttaaagatggtattattgtagatgacgtatcctcagatgctaaagtcttagacgttaccgataaaatagtcatgccggcaggtattgaccctcacgcacacattgcaggtcctaaacttgtagttggaagattatacagacctgaagattccagaagaggtgttactcaaaaaaccaaagtattaagatccgaatctggtttctccatcccaagttgtcctgcaactggttacagatactcaagattaggttacggtactgttgttgaagcagctatgcctcctcttgaagcaaaacacactcacgaagaaattgcaactattcctcaattagatattccagctttaccattattcggtaacaactggtttgtaatggaatatgcaaaagataacaatattgaagatatcgcagcatttgtagctgcatggttaaaaatctccaaaggttacggaattaaaatcgtaaatccatgtggaagtgaagcatggggttggggtatgaacgtacatggtgtaaatgataaagcaccttactttgacgtaacttccaaagaagttgttgttgctttagcaaaagctaacgaaatgttaaacttacctcactctattcacattcaccctaatgacttaggacaccctggtaatgtaccaactactcttgaaactatggatgcagttaaaaacattaaaaaaggttctaaagctgctgaaatcagagatcaagttatgcacctttgtcacttacaattccatgcatatactggtaacagttggaaagatgctgcatctggtgcagaagaacttactaagtacattaacaaacatgatcatgttacttgtgatgtaggtcaaattactttcgatgaaactactactatgactgcagatgctcctatggagtacgatttattcaaattatctggtttaaaatggactaacaaagatattgaatgtgaaactgcagcaggtattattccatgtatttactcacctaaaaaccctgttaacactttacaatgggctattggtcttgaattgttcttacaaattgaggatccatggaaagtatgtttaactactgaccaccctaacgcaggtccgttcaccagatatcctagaatcatctcttggttaatgagtaaccaaagaagaatggaaatgattgaaaacagagaagttcacaaatgggcagaaaaaagaactactcttgcaactctcgacagagaatacgatttctatgatattgctactattacaagatctgctcctgctaaaatctacggatttacagatagaggtgcacttacccctggctacagagcagacattgctgtatatgatattaatcctaatgagattgacccatccagacaagctgctgacatcgaaaaaggtttcaacatagctgattacactattaaagatggtcaaatcttagtaaaagataaagaaattgtaaaagttaaagaaagtcaaaacatgtgggttaacgtaaaaggatgggaacaaaacgagcaaaaagttattgataacataatgccgttctttacccaatattactcagtcaaatgggaaaactacccagtacatgaccattacgtatccaacccaattagaatagatgttgatggtaaatag

SEQ ID NO: 8250 - DNA, 867 bp, Methanobrevibacter gottschalkii
  source 1..867: mol_type = genomic DNA
ttgaaaacaataacatttgatcaaataaaaacttcttcaatcgctttagaattcgatgaagtaattcctgatgaaattttttcatggactgaagctgattttgcaaaatatcaagttcctattggaaattctagattcccaattactgacttcttcgacattactgttgaaggggatgctgctggacctgatgaagttaaaatgattctcaacggtgatttaaacagagtaaaatacattggttgtaaaatgagtggtggagacatcgtctgtaacagtagtgtagatttacatgtgggtgcagaaatgtctggcggatccattcttgttaaaggtaatgcggctgctcatgctggaagagaaatgtctggaggataccttgaaatcgaaggtaatactaaagaattcactggtgcttcttacattggtgaatggagaggtatgactggaggacaaattgttgttggcggcaatgctggtaaacaatgtggtgaatgtttaactggtggaagaattcacgttaaaggtaattgtgatatcttagccggtattcacatgactaaaggtattattgaaattgacggtgacgtaaaccgttggcctggcggacaaatgaaaaacggtaacatcattattcacggattccttggaagattacttgaaggttttgttcttgatggtgttgtggaaaatcctgaaatcgaaggtactactttcgaaggtaaatatattaaatatactggagatattggtcttaatggtaaaggtaacctttacttaggtgctgaagctaacaaagaaaaattggcatcttatggtgaaattgacgacgaatatacttcaattagagaatataggaatttataa

SEQ ID NO: 8251 - DNA, 291 bp, Methanobrevibacter gottschalkii
  source 1..291: mol_type = genomic DNA
atgatagaagaaattgaaatgacttttgatgaagtattaagttatgttaaaactaaagtggatgttggtgatgttttagaaatttcttataatcgtatttttgctcctggtgaagttttaggattcacagaagaagatgatatgacaggagaaggttttagagtaggtcttcaattaaatggtgaaattttaaatcaatctattgaaattgattttaatgaaattgaagatgatttaattgaaatgcgtcatattactgacgaaaaagaacttattatagaaattttgtaa

SEQ ID NO: 8252 - DNA, 291 bp, Methanobrevibacter gottschalkii
  source 1..291: mol_type = genomic DNA
atgaaagaattaaaattaacaacaaaagaagctgtaaattacttaaaggaaaatgttgacattcatgataggattgaaatttcatataatagaattttcgctgaaggtgaaatattaaatatggacttttctgaatattttgggaaaccaggttttaaaatgttaatttctcttgatgaaagtcatttaggagctactgttgaaatagatgtttatgaagttgaagatgatattattgaatttaatcattatcctaaagatggtgaagaggtagatgtaactgtaatttag

SEQ ID NO: 8253 - DNA, 1683 bp, Methanobrevibacter gottschalkii
  source 1..1683: mol_type = genomic DNA
atgtcagaatcggaacatcgaatgattgaaattttaaggatactgagtgaacaggaaaaacctactggttccaaattaattgctgatgaactgaaaaacaaaggatttaatcttggcgaacgtgcagtcagatatcatatgcagatattagatgaaaaaggttttactgaaagaattggaaattctggaagaaaaattacaaaacttggtcttgaaaaattagaaaaaggattgatttatgatcaagttgacttcatttattcaaaatttgaagaaatgatatatttaactgacttcaactatatgacacaagaaggaaaagttgttgtcaatacctccaccatctataatgaagaatcagttgatataattaaaaatattatccaaagtgacctttctgttagcccttatgttaatttaaatcgtattggcaataatggtgaaatggaagtaacaacattatgtggaacaacaattgatggagtgctgcttaatgagggaattccttcacaaccaaaatatggaggactactaaaaattgaagattctgaacctgtcaaatttactgaattaatatcctacaaaaaaacatctgttcccccacttgaagcattttcagcaaaaggatgcacatcaatcatggatgtagttgaaaatggtgaaggaattatacctgcaaatttcagattaatacctggaatcggacgagaaaaagctataaatatcattaataaattagataaaataggaattggtggtgtaatagctatttctgaagaagaaaaagatattttaggactttctgtacctgaaggaatggttggaatatcaatagttggtggaatcacaccattttgtgcagttcaagaacagaatcaggatattgaaataaaaatagcagaggaaattaaagattttaaaaccttgtctccaataacctcaaagattaaacccgttttaaaagatataaaacctactcctcaacaaaaaatatcatttttactttcaaaaacatggaatttgatacaacaagtcaattttgacattgaaaaacgaaaaggagatatcatatccaatgtttcttttattgataaagataaaatagacaaatcattatctgtaatggaagaaacatacaatgataatccaaaatatattaatccttattataaattaattaaccatccaactaatgattcaaaaataggcattgcaacaatctgtagtttaagtattgatggaattttaatagacaatggcgtcatgagtaacccaaaatatggcggtttacttgaactgaccgaaccaccattatttattgacctaatttcatacaacggatccacagaagatcctcataaaatatttttagctaaaaatatgacatcaataactaggaataatggatctaacaaaattttagctagttttaaagagataccatatatatctcgtgagcatagtgtccaacttttagagattttaaacaatattggattttcaatatataaaattggaaagccaagagaagtaacatacaatgcaaaagcagacaattataattttggtattgttacaggcagtggtttaaatactattggtgcaataaaagaaaaaggaattgatgttgaagttaaagcaattgaaaaactattaccttttgaaaaaatggatagattataa

SEQ ID NO: 8254 - DNA, 1359 bp, Methanobrevibacter gottschalkii
  source 1..1359: mol_type = genomic DNA
atgagcgatatcccagaagaaaaaatcgaaagaataaccgaaataatgaaagaggacaatattaaatttatccgtttacaatttgttgatattaatggtactgtaaaaaacattgtaataccattcaatcctgaagatgacatgagtgaactgttcaacgaaggtatgttatttgatggttcatcaattgcaggatttgttggcatcaatgacagtgatttagttttaaaaccagatattaacacatattcaagactttcatggagaccggaggaatctgcaacatgcagatttatctgtgatgtatggactcctgagaaaaaaccatttgcaggagatccaagaggagtacttaaaaaatcattatcccatattgcaaaaatgggattaaaatacaatattggtcctgaaccagaattctttattgtagacattgatgaaaatggatatcctatgccttatgacaatgcaggatactttgatgttgaacctctcgataaaggacctgacttcagaagagaattaacattaaacttagaagatctagactttgaagttgaagcatcccaccatgaagtagctcccggccaaaatgaaattgcatttaaatttaaagatgcgcttaaaactgcagacgcagtaattacatttaaacaagcaattaaagctattgtagacaacatggcgactttcgatcaattagattatagagtaacatttatgccaaaaccgtttttcggtgtaagtggcagtggaatgcactgtcatcaatccgtatttaaaggagataaaaacctattttcagaccctgattctgaaaatggactttcaaaagatgctctttacttcatgggaggattattaaaacatgccccagcagttactgctattaccaaccctatagtaaattcatataaacgtttagttccgggttatgaagcgccggtttacagagcatatggtcttagaaacagatctgcattaattagagttccggcagcacgtggaaaagcaacccgtattgaatatagatcccctgatcctgcatgtaacccatacctagcatttactgttatgcttgaagcgggtattgatggtattgtcaataagattgacccgggtgaacctgtagaacttgatatttatagcatgagtgaagaagaaagaattgaaagaggaattaaagtcttgccaacaagtttatgggaagcataccactcacttgaagaagatccattaattcttaatgcgttaggctctcatgtaagtgaaaaattcttagaacttaaatacaaagaatgggatgaataccgtgttcaagtatttggatacgaacagaaaaaatatttagatatctga

SEQ ID NO: 8255 - DNA, 753 bp, Methanobrevibacter gottschalkii
  source 1..753: mol_type = genomic DNA
atgccaacaagatatataggtgacggatattgggaaatagtctcccgtcaaatgagtattgttacaagaagcgaacaacaaaaatttaaagatactaagattactgtgattggatgtggtggtattggaggtcaaaccattgaaatgcttgcaagaatgggtgttggagaaattattctagttgatgaagattcctttgacatgtcaaacttaaataggcagaattttgcaaatttaaatggtattggaatagccaaaagtgaagttgcaaaagacaaagtcaggttaataaatccatatgtaaaagtaactggatttaatgaacatgtcgatgagaccaatattgataagattattggagattcagacattgttattgatgctcttgacaatgtcctaacaagagtcatttcatcaagaaaagctattgagaaaaaaattccattcatacatggagccattcatggaactcttggtcaagttacaacattcttgcccaatactaaaagttatgaagaaatgttcaacctcccatcatttgggaaagacttaactgaagaagtcactgaaagtttaaaaaatattacatcaggtacgccgccagttatcgggccaaccccaaatttaattggctgtcttcaagcgatggaagcttataaaatcattactggtgttggaaaagttactgttgccccaaaaattttaacatttgatttattggatttaggttcatttttactagaagaaatctaa

SEQ ID NO: 8256 - DNA, 1167 bp, Methanobrevibacter gottschalkii
  source 1..1167: mol_type = genomic DNA
atgttatataatacacttggaaaaactggtcttaaagtatcaagacttggttttggaactatgagattgcctacaatcaattccaatgcagatattgataagcaagaagcatctgaaatgttaagttatggaattgaaaatggaattaatataattgatacagcttacccttaccacagcgcaggaatcgacggtaatggaaacagtgaaaaatttcttggtgaatttctaaaagaaaacaatttaagagatgaaatcttactacaaacaaaatcaccatcctggttaatagaaaagaaaactgattttgaatattatttagatattcaacttgaaaaattgcaaacagactacattgacctttatctcctacattcactaaccgttccggattggaataaggtacatgatttggaagtgcttgattttttagatgattgtttaagtagtggtaaaatcaaacatgttggattttcatcccatattgaaatagattatttaattgaaatacttgatgaatatcctaaatgggaagttgcactaactcagatgaattatcttgatgagtattaccaatcaggtgtaatgggccttaattatttaaaagaaatcaatatggggagtatggttatggaacctcttcgtggaggaagacttgttcaaaacatccccaatgaagttcaagaattatggtctacagcagaaaagaaaagaactcctgttgaatgggcattgcaatatttatggaatagaaatgatgttgattgtgtattcagcggtatgaacagtttaaatcaagttaaagaaaatgttagaattgcatctattgaagataaaataagtgaaaatgatcaggaattgataagggaagttgcaagaacttatagaacttttcttggaaacagttgcacccggtgtggttactgcatgccttgtccgcatggtgttgatataataaattgtttaactgaatataatattgcacacatgatgcagaatcctaaagctagtgctatgcaatatttcacattaatagatgatgattcaagagcagatagttgtataaactgtggagaatgcataccattctgtacacaaatgttaaatattccagaagaacttcaaaaagtatacgaatactttggtagtgaatttaatcatttttaa

SEQ ID NO: 8257 - DNA, 1251 bp, Methanobrevibacter gottschalkii
  source 1..1251: mol_type = genomic DNA
atgagtaaagttaaagatatatctttggcacctgagggtatcaggaaaattgaatgggttcaaaaacatatgcctgttttagaacacattaaacaagagtatttggagacccaaccttttaaaggcattactattggttcatgtttacatttggagcctaaaactattaatttaggtttgactttaatggcaggtggggctgaagtagcaatgactggttgtaacccattatccactcatgatgatgcagttgccggtgctgctgatttgggtttaaatgtttatggttggagggaacaagatgatgaagaatattatcaaactattaatatggtacttgatcataaacccgatataattattgacgatggtgcagacatgattatggtgcttcacaatgaaaggactgaattattaagtcgtattaaaggagcttgtgaagagactactactggtgtgcacagattacaagcaatgcatgctgatggggcattaaaatttccagttattgctgtaaatgatgcttatactaaatatttatttgataacagatatggaactggtcaatcaagttttgatgcgataatgggaacaaccaacatggtaatcgcaggaaaaacagtaacaatctgtggttatggatggtgtggaagaggacttgcacttagagctgatggtcttggtgcagatgttattgtaactgaagtagacccaatcagagcacttgaagcaagaatggatgggtacagagtaatgaccataagggaagcagtaaagcaatcagacttaatcatcacagtaacaggtaattcagatattataagtggggatgatttcaaatacatgaaggacgggtgcatgcttgcaaattcaggacattttaatgttgaaatcaacagaccagatttagaagctatttcaactgaggtaaaagaagtacgtgaaagtattgaagagtttaccactaaagatggacgtaagatttatcttttagctgatggtcgtcttgtaaatttatcagctgcacgtggacaaggacatcctgctgaaattatggatatgagttttgctgtacaagcattatctgcaaaacatattcttgaaaatgatttatctgtaggtgtgactaaggcaccagatgaaatcgactacagtgtagcaacaatgaaattaaaagctatgggtattaaaattgactcattaactgataaacaaaaagattatatgtctaattggcaagaaggaacataa

SEQ ID NO: 8258 - DNA, 651 bp, Methanobrevibacter gottschalkii
  source 1..651: mol_type = genomic DNA
atgtctttttttaaatatattgataatggtgaaggtccaacaaaactatttattggtggacttcatggaaatgaaggtaccacatctttaaagttcattaaaagaattaaagatgaaaatctatcctctggacaattctatttttataattttgataaaactccatatatttcgactgttgataaagagtattataaatctgagttgggtcaaaaagttttaggtttaattgaatatctatgtcctgatttttacacagagcttcattgctataatcttaaaaattatgataaattaacttcaatggagagatataaaaaaacaggtattcctccacttattaagctgggaaatcatgttctagtttcgtcagtatctccattaattaggatgacttatttttccactgaaaccgtatgcaaaacattggaatttccgtgttttgaaaaattaaactcggagattattgaaaaatataattttaacaagagtctggcaattgaaacctatgaagagttactcaatttaattttaagttcaccttctagagatcattttgaaagagaaatgttgaaaaaacatgaaaatcaggttcatatagctatgaggtatgcagaaaaggtatttggcaaagatttcccaccatattaa

SEQ ID NO: 8259 - DNA, 336 bp, Methanobrevibacter gottschalkii
  source 1..336: mol_type = genomic DNA
atgaattttttaaataattgtattattgttttccatgttactcataggttcgttaaagatgttcaaattaaagggatattggacatggattattatggtgaaatagaaaatccattacaatattttgatgaggataaaaacttaatttggcatattccaccaaatccttataggggaggcacaaaggaatatgttgcttataaaaaattaattgaagaatttaaaccggacgatggatttattgaacttttggctgtttgcggggaatatccggaatattatcattatgattggtatgatatagagatggaagctttaacttgggaatcaatctaa

SEQ ID NO: 8260 - DNA, 984 bp, Methanobrevibacter gottschalkii
  source 1..984: mol_type = genomic DNA
atgggtgttaaactaaaagatataattgaaccagaatcaattagttttaaagatttagaaggaagaactgtatcaattgatgcattcaatacacttttccaattcttatctacaatcagacaaagagatggcagacccttaactgatgaaaatggaaacatcacatcccatttaagcggaatattatatagaaactcatcaatggtcgaaaaagatataaaaccaatttatatctttgatggaaaagcacccgaactaaaaagtgagactcaagccaaaagaagagaagttagggaagaagctgaaaaaatctacaaagatgcattatcaagaggagatgctgaaaaagcgcgtaaatttgcaatgagatcatcgaaattatcacctgagattatttcatcttctaaaaagttattaacattaatgggaattccttatgttgatgcaaaaggcgaaggtgaagctcaagcagcatatttagttcaaaatggagatgcttatgcagttgcatcacaagactatgattgtctattgtttggagctaaaagagttgttagaaatcttgctgtcaattcaaatcttgggaacctagagttctatcaattggataaagttctaagagaattagatataacaagagaagaattaattgacatgggaatattaattggaactgatttttgtgatggtttaaaaggcgtaggtgctaaaacagcacttaaattagctcataaaggtcaattaaaagaaaaaatagcagaacttcaaaaagaatcagctcatgatttagatgaagttcgtgaaatcttcttaaaccataatgtaaatactgattataaaatcaaatgggaaaaacctcaaaaagataagattattgaatttttatgctatgaacatggattttccgaagatcgtgttttaaaagcatcagataaacttaaaaacttaaattcatcgcaaggaagtcttgatgcttggttttag

SEQ ID NO: 8261 - DNA, 564 bp, Methanobrevibacter gottschalkii
  source 1..564: mol_type = genomic DNA
atgtctgagccgaaaaatgaagcaaatagaggtcttattgataagataactcaagtagaacaagaatatggtaaaaatttctcaaatactcaaaagattttattaacaactgacggatcaattacagcaatattagatgttttatatgggaaaataacattgtctacccttgatcagcatttcgaggatgcggacgaatatcatgctaaattagtcaatgttaataaaggggatgaaattaattaccgtgaagttataatgcatagaaacgggaagcctttaatatatgcaatatcacacattccgttatctagatgcactaaagaagtttgtgctgatttaatcagagcagatataccaattggtagaatcttaaaaaactacaatatcgaatcaagaagagaaatcaataacatatacattgaaaaacctaatgaaactttaaaggaattatttggcactgacgaagacatgcttgcaagagactacgtcattatcaaccatgacaagatattaatgtggattaaagaagtgttcccaatcagctattttacagaaatataa

SEQ ID NO: 8262 - DNA, 1254 bp, Methanobrevibacter gottschalkii
  source 1..1254: mol_type = genomic DNA
atgaatattactgaaaaaatattatctgcaaaagcaggccatgaagtaacatctggcgaaatcattgaaattcccgttgatcttgcaatgtcgcatgacggaacctcaccaccagctattaaaacatttgaaaaagtagcgaaaaatgtatgggatcctgaaaaaatagccattatattcgatcacaacattcctgcaaacacaataggttctgcagaatttcaaaaagtctgtcgtgactttattaaaacacaaaatattactaaaaactttattcatggtgaaggaatatgtcatcaagttgttcctgaaatgggattagttgagcctgggatggttattgttggtgctgactcacacacatgtacttatggtgcatttggagcattttcaacaggtatgggtgcaactgaccttgcaatggtttgggcaactggtaaaacatggtttatggttcctgaagcaattagaatgaaagttgaaggtgaattaaacccatatattgcaccaaaagatataattttaaacattatcggagaaaccggaattgcaggagcaacatacaggactgctgaattctgcggtgaaactatagaaaaaatgggagttgaaggaagagcaaccatgtgtaatatggctattgaaatgggtgctaaaaatggtataatggaaccaaatcgtgaggttattaactatatctgccaaagaactggcaaaaatgaatctgaattaaatattataaagtcagatgaagatgcagtttattcaaaagaaatgcattttgacattgaaggcatggaaccgcaaattgcatgtccaaatgatgtggacaatgttaagggaatttctaaaattgaaggaactgtaataaatcaatgcttaatcggttcatgtaccaacggtagactttctgatttaaaagatgcagcagaaatattggaaggtaagaaaattaacgatgacatcagattaattattcttccagcttcaagagaaatctacaagcaagcaatgcatttaggctatatcgatacatttatagatgcaggagctattatttgcaatccaggatgtggaccatgtcttggaggacacatgggagtattatccgaaggtgaatcatgtatttcaacaaccaatagaaattttaaaggtagaatgggtgatccgaagtcttcagtatatttatctaattcaaaagtagtggcagcatcagcaattaaaggtgttattactaatccaaaagatttatag

SEQ ID NO: 8263 - DNA, 1179 bp, Methanobrevibacter gottschalkii
  source 1..1179: mol_type = genomic DNA
gtgattatattgcaatattttatcagtcattataacaaagaatatgagttaaattttccggaagatttactcatttatgatacaacattaagagatggagagcaaacccctggtgtttgttttagttttgatgaaaaattagaaatagctagaaaacttgatcaattcaaaattcatcaaattgaagctggttttccaatagtttctgaaaaagaaaaggaaactgtaaaggcaattgccaatgaaggtcttgatgctacaattttaggtttgactagaactaaaacagaagacattgatgcagctcttgattgtgatgtgggggggatcattacttttgttggaacttctgacattcatttagaccacaaaatgcacataacacgccaagatgcaattaacctatgcgaaactgcaattgattatgctaaagatcatggattatacgttgcattttcagcagaagatgctacaagaactgatattgaatttttaaaaagaatttattcaaaggcagaagaatgtggtgctgacagagtacacattgcagatactactggtgcaataacaccacaaggtatcgattatcttgtaagagaacttgtaaaagatttagatataaacattgcacttcactgtcacaatgactttggtcttgctgttatcaactcaattaccggtattttggcaggagcaaaaggtatttccacaactgttaatggtattggagaaagagcaggaaatgcttcattagaagaattaattatggctttaaaaatactttacggtaaagattacggatttaaaaccaaatacattaaagaattgtccaatattgtatcagaagccagcggacttccaattccatacaataaacctgttgttggaaataatatatttagacacgaatccggaattcatgttgatgcagttatcgaagaacccctatgttatgaaccatatgttccagaattagttggacaaaaaagacaacttgttttaggtaaacattcaggatgtagagctgtgaaagctaagttaactgaatgtgaacttgatgtgagtgatgatgaacttattcaaatcgtcagagaagttaaaaaatccagagaagaaggaaaatatatcaatgataaagtattcaaagaaatagttaaaaaaatcagcaaaaaggaatag

SEQ ID NO: 8264 - DNA, 552 bp, Methanobrevibacter gottschalkii
  source 1..552: mol_type = genomic DNA
atgatagaagttgaagtgaaagctaaaatcacaagctttagtgaaatggaaaaaaaattagagaatattggggcaacaaaaagcaaaaaagagtttcaagaagacatatacttcaatagccctattgtaaactttgctgagagtgatgaagcattaagaattagaacaacaaaagaaaatgacaacgttgatatatttataacttacaaaggcccgaaaattgataaaaaatcaaaaaccagaaaagaaattgaaatgaaaatagaagatgctgaaaaatgttcagacatctttgaagcaatcggttttaggaaagtaagaactgtcagaaaaaatagacaatactatacttatgaaaacttcgaaatatccctagacgatattgaaggacttgacccttatatggaaatagaaattggattaaaagatggagaagattattctaaagctcaaaaatctatttttgatttatttgaaaaattaaacataacagagggctttgatagaacttcctatttggagcttttggaaaacttaaatataactaattaa

SEQ ID NO: 8265 - DNA, 546 bp, Methanobrevibacter gottschalkii
  source 1..546: mol_type = genomic DNA
ttgaccgatgttgagataaaaattgaaaacattgttgcttctgcaagcattggtaaagacattgttcttactgaagtgtcccaagctttagaaggggttaattttaatcgtgaacagtttccaggattagtatttaaacttaaagatcctaaaacagcagcattaatatttagctctggtaagcttgtatgtactggagcaaaatctatagatgattctaaattagcaatcaaaaaaactgtagatttaatgaggactattgatactgaaattcctcatgagtttgaaattaaaattcagaatattgtggcttctgctaacttggaatccacattaaacttagaagccgtagctttagaacttgaaaatactgaatatgaaccagaacaattccctggtttagtatacagattatctgaccctaaagtggttttattattatttggctcaggtaaagtggtttgtactggagctaaaactaaaagtgacgctaaattaggtgtcgaaagagcttacgatagattaagtgagctagatttaatataa

SEQ ID NO: 8266 - DNA, 1542 bp, Methanobrevibacter gottschalkii
  source 1..1542: mol_type = genomic DNA
ttgattaaacttgtagtatttgacttagataatgttattattgatggtgaagcaatagatgagataggaaaaatagcaaatgttgaagaagacatagctgcaattactgaaaaagctatgcaaggggaaattgactttgaaacttctattaaagacagagttcaacttcttgagggtatatctattgaagatatcgaaaaagttgctgacgaactccctttaatacctggtgctttagaaactatcaaatctttaaaagataataacttagatgtggctattattagcggtagttttgatgtagtggctgaaaaaataaaagataaacttggtgtagacaaagtttacactaatagtttcacagtcgaagatggtaaattaactggtgaagtgactggtcctttagtatctggttctaaattagatgttttaaacgggcttgttgaagaagcaggaattactttagatgaagtagttgctgttggagatggcgctaatgacatttccatgattgaatcagcaggttgcggaattgcattcaatgcaaaagattctgtaaaagaaattgctgatgttgtaatagatgaaaaagacttatgcaaagtctcagaaaaaatccttaatcaattaaccactgataatgctggaaacgaaactgtagaaaaaaaagctgaagaaaaaaatactcttcctaaatctgattttgtccttgctgacaccatggaaggtgtaagaaaacaaaaagatgaaaaagaagctgaaattgctaaagtggctgaagaaagagaaaatttcaacagaatggctaaagaacaacgtaaaattagagatgaattaaacgcatctttaaaagaaaacttaaacaaagctattgaatttagaaatgaacgtaatgaaatcaataaagctgttgaatccgccaaaaaagctcgtaatgaagctaacaataaaattaaaagtttagaatggtcttctggtaaacgcgataaaattaaaatagaaaatgaaatcaaaaaaattgataaaatcattgaaactcgtgttttagacattaaaaaagaaaatcagcttgttaaaaatgcaaatgatctcagaaaacaattaatgaaaattcatgaagatgaatctgttcaaggcgaatctcaagaactcaaaaaattatctgaagaagaacacgaaaaagttatcactctttctgaaaaagcccaagcggctcatgaagaaatgcttacttacttcagaaaaactgatgatataagaactgctgctgacgaagcacacaaaaatttcattgaagcacgtaaaaatgcttctgctaaacatgaagaatttaaaaatatcttaagtgatattcatgttatcaacaaaaaattaggttcccatagacctaagaaaagaagaaatgataacaaaccttctagcggatctaatagaaaccgtgaagaaaaagaaagagctgaagaaatctttgctaaattcaaaaatggtggaaaagtctctactgaagagattttactcttacaaaaatacaatataggttaa

SEQ ID NO: 8267 - DNA, 147 bp, Methanobrevibacter gottschalkii
  source 1..147: mol_type = genomic DNA
atgacggaagaaaaaattgaaacttgtttcatatgtggtaaaaaatttgatatgaataaggcggaacttggatattatcgtaatggtaagtacccgatctgtgacttctgtgctgatttttaccgtttttataatgaagaattataa

SEQ ID NO: 8268 - DNA, 2157 bp, Methanobrevibacter gottschalkii
  source 1..2157: mol_type = genomic DNA
atgcatgaagtaattgtatgtgaaaagccaacatctgctgaaaaaatagcaaaagcactttcaccaagtgcaaaaaagaaagtatataataaaaaagtaaaatattgggaactcaaaaagggttcaaaagatattacggttgtatctgctgtcggacacctttattcacttactcctgataacccaaaagataaagtttactttgatcttcactgggctccggcttatgaagttaataaaaggggaagcggatttactaaagattatgtgagggctattaaaaaacttggaagaaatgcggactcatatattcatgcttgtgattatgatactgaaggaacattaattggttataatgcattaaaatacgcttgcggtcaagaaaatttagataaagtttctcgtatgaaattttccacattaaccaaaaaagacttgcttgaagcttatgacaatagaatagaattggatatgaatcaggtagatactggtattgcaagacatgtattggattattatttcggagtaaacatttccaaagctttaatgaaatcagtaagcaatgctaaacacagatttttaaaattatcagcaggccgtgttcaaacacctactttatcaattttggttgaaagggaaaaagaaattaaggattttgttccagaaccttattggttaatcaaagctgttgttgaaggaaacattgaagtcaatcatattgatggtaaaatttttgatagggatagagctgaggaaatcatgactaaatgtcaaggaaaagatgctattgttgatagaatcagcttttccaattccacaacaaaacctccggtaccatttaacttaggaggacttcaatctgaagcttataatgtattcggattttcccctaaaaaaacacaaactattgctcaaaatctttatacttcaggttatacttcttaccctcgtacctcttcacaaaaattacctgaaagtcttgattttaaatcaatatttactcaattagggtatgatggtgaatttaaaaagcatattgatcagcttccatctaaattaaaaccgaacaatggtaaaaaggatgatgcagcacatcctgcaattcatccaactggaattttaccccaaggcttatctaaagatgataaaaagatttatgagcttattgtttatagatttatttcagtgttctttgaagcagctaaattcgaaacaatgagtgctacattggacattgaaggtgaaaagtttcgttttaaacgtagaagagttactcataagggttggatggaacattatccatttagaaaaattgatgatgaaatattccctgatattaaagaggatgatttaatgaaagtcctggagttaatttctgatgaaaaagaaactaaacctcctgcaagatataatcaagcgtcacttattaaagaacttgaaaaaagagaacttggtactaaagcaactcgtgcagatattattgataaattgtatgaccgtaaatacataacaggcactcaacaaattgaagtgaatcaattaggtgaaaacatgattgatactttgagtatttattgtaataatttaacttcagaggaacttactcgtgacctgcaaatcaaacttgatggtattagcaataataaatcaactcgtagagaaatcatagatgaaggggaaaaagatgttaaagttattttagaggatattactaaaaattcaaatgagattggttctaaattatatgaatcatatcaggaaagtaacattattggaacctgtcccacttgtggaggcaatcttgtaaaaagatattctccaaagactaaaagttcatttgttggttgtgctaattatccggattgcactactagttattctattccaaaaggtaccaacttccttaaaaaaacttgtgaaaaatgtggacttcctataatctcattcggtaaacctcgccagcgtgcatgtttggattctaactgtggaaaagataaaactaaaattcacaaacctactgaagttggtaagtgtccgaattgtggcaaaccacttttaaaacgttcgggacgttatggtgaatttattggatgtaaaggatttccaaaatgcaaattcacatgttccgttgatgaacttgaaagtaaactaaaataa

SEQ ID NO: 8269 - DNA, 2679 bp, Methanobrevibacter gottschalkii
  source 1..2679: mol_type = genomic DNA
atgaataaagaaacaaagatgacaatagtcaaatcagtttttattattttaattctgctcgcagttgtttttgctcttaaaatgcctgctgctgatttacctttaattactgatgaagctaaaggagaatatgttgattcttcaggtcttccttatttcagtgaaatggattcatattataacttaaggttgactgaagattatattgatcatggttatgttggtgatcaaataataaatggtagtgagtgggatatgcacaggtatgctcctactggtaatcagattaattatgaactaggtattgtgtatgtaacttctttcttgcatgatatctttggaggagatcactcagttagagaaatagcattctggacaggagctattatatcaacacttgcagtaattccagcgtatattttctcaagaaggttaactaatgagtatggtgcaattgtagcaacacttattatagctcttgctccaaactactttgcacatacatttccgggattttttgatacagatatgttctattacatattttcattgttcttcatattcttctttgtagagagtataagagcgaaaaaaatagcatataaattgctatttgcaattttatcaattatatctattggattgttctcacaatcatggacaggttatatattttacataggacttatgggaatattttcaattgtttatttaatcgcttgttattactttaatattggtgaagattctcaagatgaatattcaagtaaattacattggtttattaaccaaaatgctttaaaatccattttgattttgggaattattggattcattggtcttgcaatattcaaagggttagatggtgtaactggattattcggaagcttactttcattactttcattacaatccgcttccagagttgttggcggtttccctaatgtacttgtttctgttgcagagatgcaaattccatccatgcttggaagcggtatgaattcattatttttagctaacactaatggtgctgtaaacggtattggtggtattggtgttttatttgctggattaacagttgcatatttattcgtaagaaacatattcaggattaagggaaattctgttaaaacagaatccaatgttaaaccacaaaaatctgaaaggttatcctcatctaaaagacttgataataaacgtaaacttaaaattgatttaagcagatataatcttgaatttgtatctgatattttatctgataaaaaattaacacttttatatggtactttgtttattgtatggcttgtagtaactgctcttgctgtaacaagaggttcaagatttattactacaattgtattgccatttgctcttttaacaggcatatttgtaagtattgcgatggaatatattagaaataaaataaccgatgataggattttattggctatcactgcaattgcagctatttttgttgcagttccagtttctactgtcaattccatttttgcgattttggtgtttgttgctattgtgggcattggtgcagtatctatttatgtgctcaaaccaaaagctacatctggaaggaaacttccaattaaaaagcacattgcaataattgctattgtacttgctttagtaactccatgtatttgtggtgctttcttaacttctgaatctgttgttccaggcacaagcgattcaatgtggaatgcaatgacttgggttaatgaaactcagagtgatgatactgtattgacatcttggtgggactttggttacctctttgagattgctgcagataaacaagtaacattcgatggaggttcacaatctggagatcgtgcattttggcttggccaggccatgacaacggataatctggaattgtctgcaggtatatttagaatgcttgatacaacaggtgataaagctgttgaatcattagtgaatattaccgaggataccggtaaatcagttgatattttaattgatattttaccaatgaaatcagatgatgctcaaaaaacattacaaagtaagtatcacttaacagcggctcaagcaaatgaggtagtccaatattcacaccctaaaaatccacgtcctgtaatatttgtcgcatcttctgatatgcttcaaaaagctggctggtggagttacttcggtgcttggaactttacaaaccaaagctctgaaaactacaattactatgttccaacagagcaggtaaaagttaatccgggttcaactggtaaactggcattacttgatgatcagggtatgactgtaaatgctgtaatccaaagaggctctggcaacaattcaactactgcatatactgaagctgtttatactgatagtggaaaacagattatggtaaatgatactccatacaatccattgaatatttcaaacttaatggttattgaagatggatatgtcatgaagaatcagtctgttggaaatgtaaaagatgcaaactacacactccttttaattggtgaaaagaatcaatacactccaattttaatgagtaatgagctagcgaactcaatgtttactagattatacttatatggtggagccggtcaaaacatttttgaaaatgtccatacggaaaatggagtgatgttgtttaaagtaaactttaataatacggctgctggtgcttaa

SEQ ID NO: 8270 - DNA, 1095 bp, Methanobrevibacter gottschalkii
  source 1..1095: mol_type = genomic DNA
atggggatagaggagaaaataaaagatattgaagatgaaatacaaaagacaccatataataaagctacttcacatcatataggtaagcttaaagctaaattatctaaattaaaagaagaatcattacaaagaagtagcggtggccataaaggtcaaggatttcacgttaaaaaaactggggatgcaactgttgtacttgttggatttccatcagttggtaaatctactctcttaaatgaaattactaacgctgaaagtaaggttggagcttaccaattcacaacattggatattgttccgggtgttatggaacataaaaatgcaaaaatccaggtgtttgatattccaggaattattacaggagcaagtagcggtaaaggtagaggaaaagaaattttatccgttgcaagaactgcagatttaattttaatcgttcttgatactttaaacccacagcatttggatgtgattttaaatgaattgagaaacattggtatcagacctaatgaaaaggaacctgatgtaactgtcaaaaggaaaaaacttggtggcattcacatttcatcaacctgtccgcttactcatttggatgaaaagattatcagatccatcattaatgagtatggtatgcataatgcagacatacttttccgtgatgatgtgactatggatcaatttattgatgttcttgatagaaataaatcatatgttccgatgaaaatcttattaaataaggtggatcttgtagatgattcataccttgaggaactcaagaaatacattccagatttcattccaatttctgcggataaaaaaactaacattgatgagttaaaggatattatttttgacaatcttaatttggttagggtttatttaaaaccccaaggtagaaaggcggacatgaacgatccgttggtcattaaaaaaggcacaaccgtaattggtgcatgccgcaaacttcaccgcgagtttgtgaaaaatttccgtcatgctaaggtctggggaacatcagttaaattcccaggtcaaaaagtaggtcctgaccatgtacttgatgacgaagatgttttaagaattattcttaaaaaataa

SEQ ID NO: 8271 - DNA, 546 bp, Methanobrevibacter gottschalkii
  source 1..546: mol_type = genomic DNA
atgagtgaagctatttttataactggtactccatgcactggaaaaacaactgtcagtgaagtattgtcttctaaattaaactgcaagttaattaagattaatgatttggctattgaaaatgattttgttttagggattgatgaggagaaaggatatagaatcattgatattgaggcacttgatgagaaagtttcagagattatttctgaaagtgatgagttaattatatttgaagggcatttggctcatttatgctcaggagcagataaagtaatagttttgagagtgaatcctgatattctacgtccaagacttgaagctcgtgattattctgaaagcaagattcgtgaaaacttggaagccgaagcaatgggagtatgtacttcagaggcttttgaagaatatggtgataaaatttctgaaattgatgttagcaaattgtcaattgaagagactgttaatgtaatttcatatgtgattgaagataaactagattttccagttggtgaagttgatttcatggactggttaatttcaaacttttaa

SEQ ID NO: 8272 - DNA, 825 bp, Methanobrevibacter gottschalkii
  source 1..825: mol_type = genomic DNA
atgggggaaacaaatgtgaaaatactgtatttaactgatttgtactatgaagccaaaggcagaaagtattttgaagaggatttatatatttctggaatattaaaggaacattttgacattgcattgtgtcatccgaaaaactcaaaggattttgaaaacgatgtggatttaatcgtttttagaaatactggtcctgtaactggttttgaggaggagtatgaatcatttgtcaaaagggtaacttcaaacgatatcaggactttcaatgagtttgtaggcaaagcggacatgaaaggcaaacaataccttttggatttgacattagatggatatcctgttattccaaccattgatgatcttgaaaacataaatctgattccggattgtgaagagtatgtcattaaaccgaaggatggtgcagattcaataggtctggaatttctaacaaagagtgaattatttgaaaaaaacctcgtgaacatgctaatacaacctgcaattgactttgaatatgaggtatcgttctatttcatcaatgacagcttggaatatgcattatatgctccgaataaggacaaacgatgggaacttgaaaaatatgaattcagccaaagggataaggagtttgcagaaaaattcattgcttggaatgacattgaaaacggaatccaaagagtggatgcctgcagaacaaaagagggcgaattattattggtggagcttgaggatttaaatccttatctgtctattttggagctggatgaaaaaacaaaagatgatttcatgaatcatttgattattgctttaaaaaacatttgcgattaa

SEQ ID NO: 8273 - DNA, 387 bp, Methanobrevibacter gottschalkii
  source 1..387: mol_type = genomic DNA
atgaataatgataaaaaagcagaaaaatgcccaatggaacttgccatggaattgattagcagaaaatgggttattcaaatcttgagagatatgttttttggaaaaaaacgtttcaatgaatttaaagatggaaaacctaatctatctaataaagttttaagcaattgtctaaaagaaatggaagaaaacggacttatctctagaaacaacgatgaagataagcaaattattgaatacacattaactgataaagggaaaaaacttaataaggtagtttatgaactcgcaatgtttacattaactaccgatttgggcaatgaattctatgatgatgaaactaaaatcgaattagagaacatattcaaaaatacattgataaacaattag

SEQ ID NO: 8274 - DNA, 447 bp, Methanobrevibacter gottschalkii
  source 1..447: mol_type = genomic DNA
atgaaatttaatgcatggaataataatgagaaatttttctcatcaaaaatcgcacaaaatgtaatttctaccgcttgtggttctgatattaacactgcttgtggcagtgatgtggctgcttctgcttgtggttctgatattaacactgcttgtggcagtgatgtggctgcttctgcttgtggttctgatattaacactgcttgtggcagtgatgtggctgcttctgcttgtggttctgatattaacactgctgtggcagtgatgtggctgcttctgcttgtggttctgatattaacactgcttgtggcagtgatgtggctgcttctgcttgtggttctgatattaacactgcatgtggatcagatatcaccacagcttgtggttcagacagattttaagattaattcaatcttaaatattttatttttttatatactatttttttga

SEQ ID NO: 8275 - DNA, 1029 bp, Methanobrevibacter gottschalkii
  source 1..1029: mol_type = genomic DNA
atggctgatttttttgcatttcaatggcatatccttgatgactgtgaccagcgatgcaagcattgctatattttttcagaagaaaatgacaaggaattaataacaatgaaatatgaggatatggaaattgttttagataactgcttaaaattctgcctgaaaacaaacaggacaccatatttcagcattactggaggagacccgattcttcatcctgatttttggcaattgcttgaaatgttgcacgaaaagaagattcactattcaatactgggaaacccctttcatattaccgatgaagttgcaaaaagacttaaaagcttaagctgcaggcagtatcaactgtctttggatggtctaagagacacccatgactattttagaaaacccggttcgtttgacattacacttgaaaaaattagaatcttgcaggatgcaggagtcagagccagcatcatgacgacagtttccaagacaaacattgatgaaattccagatttgattgatgtcgttgttgaaaataatgcatgtttattcagctttgcaagatattgtccgacaagccttgaaaaagcggcacaaatgacttctgaagaatataaaaaccttttggcaaaggtatgggaaaaatacaatgaatataaagacagcaaaacattttttacactaaaggatcatctatggacattattcttatatgaaaaagggttatatgagattccagaaaatttgaatgatgatattgtctatgatggatgcaattgtggaaacagtcatttgacaattttgccgtcaggtgatgtattcgcatgtcgcagaatggacagtaaggttggaaatgccttaaatgaatcaatatatgatattttcatgggtgataatatggatgaatacagacaatttgaaaaattcgaaaaatgcagccgatgcgaattgctgagattctgcagagggtgtccggcggtaagttacggaacaactcatgacatgtattctccagacccccaatgctggaaagtggtgttataa

SEQ ID NO: 8276 - DNA, 966 bp, Methanobrevibacter gottschalkii
  source 1..966: mol_type = genomic DNA
atgaaagcagttgttttggaaaaaacttgtaatgctgacgagttgaaagtcagcgaagttgaaattcctaaagttaaagatggttgggttttagttaagattctaggctttggaattaacagggctgaagtaattttaagggattatgaagccgatgaagattatattgaattgcctgtaattcccggtattgaatgcgttggaaaagtagttgattcatcaaatactcgatttaaaaacggggataggatagctgcacttatgggtggaatgggaagaagttttgatggaggatatgccgaatatgctctacttcctgaaaaaattgtctttaaaattgatgaagatgtttttgacaaattgacattggaggaaataatagcaattcctgaaacttatttcactgcctatgggtctttaatgtcacttaatcttgtaaaggatgatactctattaatcagaggtgcaacctctgcattgggcctttctgcaatgcaacttgcaaactcaatgggatgtgaaatatttgcaacgtccagaagtgaagaaagatttggtaagttaaagtcaaatggtgcggatgagtgctttgctgatgatggttgtttggctgaaaaattaaattgtgataaggtactggaattgattggccctaaaactcttgaagattcaatgaaatgcattaacagtggaggaatatgctgtgttacaggtgttttgggaggtattgagtatatggatgaattcgatccaatcaagattatcccaaatggcaggtacttgacttcttttttcagcaattatccgacacaggagataatggacaacatatttgatttcattattaaaaataacatcaaacctgaaatttcaagagtattctataatttggaagatattggaaaagctcatactttgatggagtcaaacatggctcaaggaaagattatatttaaattggagtag

SEQ ID NO: 8277 - DNA, 612 bp, Methanobrevibacter gottschalkii
  source 1..612: mol_type = genomic DNA
atggttactaaagaagaatgttttaaacaattaagagatgtgattgatgcggttttatccactgttgatgataatggcaatcctcaatcaagaattattgatataatgcatattgaagatgataaaatatattttctaactggccgtggaaaacatgtttattcagaaataataaatcatccaaaggttagttatttaagcttaaaagacaataaatccattagaattagtggtgaagctcataaattggacaatcaaaaatattggattgatttaatatttgaaaacaatccatttatgaataatgtttatccgggaaatgcgagatatattttagaacctttttgcattgaagattatgaaatggaattctttgatttgacacaaaagcctattttcagacaatccttcaaattcggtgatgttgaaataacagttaagggatttgagataactggtgattgtattgcttgcggtacttgtcaggcatgttgtccgcagcagattccagtttttgttgacgataagtttgaaattccgccggaacattgtttgcattgtggattatgttatgaaaattgtccgaatgatgcgattgttaaaagggaataa

SEQ ID NO: 8278 - DNA, 627 bp, Methanobrevibacter gottschalkii
  source 1..627: mol_type = genomic DNA
atgttaaaatctgaaaatggaatcattaatcaaatagggtctagaatattaactagaaaagccatattaaataattccataaattatatagaaaaatgtgtaagttccaataatatttttaaaagaagaggagttatagaggcaatttcagtagaatttgatgctataaatgattattcctttttaaaacaaattatttcatgttttttaaatgaaaccgatgtagaaattttaagtaatttatctaaggtaatggataaaattactagaaataactgttcttattttaaagatgaaattttaaaatatatttctaaagatttagataatcactactatttacatttaataaatagtttttatgaaatttctggtggagaagaagatgaatttattttaaaagctataaaaccattcatcgattactttgaaaaaaatagcatagatatccgaaaaatagatgcatcaatttcgactagaatatctgatataatattaaagatttatgaagaaaatttaggtgataactctattaaaaatcaatgcttagattatattgatatcatagttaaagatgatttatactattttgaaaataaacttaatgaaaaatttgagttactttaa

SEQ ID NO: 8279 - DNA, 582 bp, Methanobrevibacter gottschalkii
  source 1..582: mol_type = genomic DNA
ttggatcataaaataacggacttacaaatcaatgcattaattggaactaactcaaaatatgaaatttttgagatagacagacaatatgatattatgagtacatcaattaaaatggataaatctaaaaaaataaattttaataatcatatgcctcatgaatgtactcttttaaaaaatgtaattgaattaaataataaggaattatatgataaaataaaagattatttttgtttgtattatatttctgctttggaaaatacaattgaaaattcatttagaaaattttggtcacttagtgaaagaattataaaagatattcatggcggaatgaaagatgaaaaattagtaaaatatatgggaaaattattaaaaatgtgccgatatccggataaaataattcaaagagttaaattcatcaaaattaaacgaaacaatctggttcatgaaaatattcatggtgaaataactcaatctgatcaagctattgtcaaaatcattgctgaaaatttaatattgtttttaatttgttattttaatgaagtaacagatattggagattataagagtttttatgatttgtaa

SEQ ID NO: 8280 - DNA, 645 bp, Methanobrevibacter gottschalkii
  source 1..645: mol_type = genomic DNA
atgaataaaatagaatatactactagaaaattaaattcattaaaacagactttaattaaaagttttgaagctatcaatagtactagcaatgacccaaaatattactatgaaacaatttgggatttgatgaatcaaaaatctaacattaaagaaatgtttgttaaagcaacattatctaagcaaatttatttaataaatatttctagtattttaagaaaaattcaaaataatgatgaatctgatattttagataattttctagtagaattaaataaaatgtatttagagtataacgctatggataaagaacaaattaacattataatttacactaatattcccataaaacttaaaagtaatgataatctaatcgagacattaaaatatttcaatttaaaaatttttgagttttcaagttataattttgaaaatgaacttgatttggatgatgaaataaaatacaaatttaatagttctaaatttttgatgcttaaatatgctgctgatgccagagattatgaatttgttaaatctgaagctttgaatgcaatttattccttttttggatatataacatatattcatagattaattatgatactgaaaagtggcatattaatgaaattacattggatcataaaataa

SEQ ID NO: 8281 - DNA, 423 bp, Methanobrevibacter gottschalkii
  source 1..423: mol_type = genomic DNA
atggtcgatacatttagcaaagagactcgcagttatgttatgtcaagaataaaatgcaaagatactaaaccagaaattattgttcgtagttatttgttctcaagaggccttcgcttcaggaagaacgatgaaagatatcctgggagtccggacattgtcttgccaaaatataaaactattgtgttcgttcatggatgtttttggcatctccatgagggatgcaagtatgcgagaattccaaaatcaaatgttgattactgggaaaagaaactttacagaaacagagaacgtgacaaacataatcagaaagaattagagaaaatgggatggaatgtcatcactgtgtgggaatgtgaattgaaaaaagataaggttgaacaaacacttgaggatttatacgctcaaataacttccaaactgtaa

SEQ ID NO: 8282 - DNA, 174 bp, Methanobrevibacter gottschalkii
  source 1..174: mol_type = genomic DNA
atgagcgacattgtcaaagttagaggaagacatggtacaaaaacattagatataacaattcctgcaaaaattagtaaagaatatgatattcatgcaggtgatgtttttaaagtgggcattgttaaagaaaatgattctattaaaataatttatgaattagtatataaagattaa

SEQ ID NO: 8283 - DNA, 165 bp, Methanobrevibacter gottschalkii
  source 1..165: mol_type = genomic DNA
atgggacaagatggatttgaaaatgaaacactattaatggaagctcttaacaacaaaagattcaatgaattaaataaaaacttaaaagatgtgataacatttacatctgaaaagcccattaatgaaaaatatgctgatacaaggcattgtctaaaattgtcatga

SEQ ID NO: 8284 - DNA, 306 bp, Methanobrevibacter gottschalkii
  source 1..306: mol_type = genomic DNA
atgcccagacatactccaaaatctaatatttgcaataaattatcacctgttgattgtataaataaaattaaaagtgtaataactgaaaaaagaagcattgggcacggtaatgtttatggaatttctggagacaatcaagagattacacaaataaacgaagcgataaagttggataaaggttttcagtttgtattgaactgtgaatctgaagctcatttatcccaattggaggatttgattaaaaaggaattaacttctaatgagtatatatgtggagatgcttcccggtgcagagttttctgttga

SEQ ID NO: 8285 - DNA, 270 bp, Methanobrevibacter gottschalkii
  source 1..270: mol_type = genomic DNA
atgcttcccggtgcagagttttctgttgaaaatgtaatgggaatccatgaactgatatttaaggaagttgtaacccaaaaaagagattgtggaacagctatggttgggtcttcaatatatcatcagggtgctgaatcccagtgcatagaatatgttgcttcggcaaatatcaggtttgattgcaacatatctaatgttaatgtattgataaatgagatagtatcagattttgcagataaaggttatggcgtaagtgttgagtttatctaa

SEQ ID NO: 8286 - DNA, 252 bp, Methanobrevibacter gottschalkii
  source 1..252: mol_type = genomic DNA
atggtttttaatattgatgatattaaaaaaagagttattccaattgtaataaagtatggtattaatacttttagcctttttggatcttatgctcgaggtgatgctaatgaaaatagtgatttggattttgtaatggataaatgtgatttaaaaggattacaatatgtttctttagtccaagatttggaaaaggaatttaactgtcatgttgatgttatcagtaaaggaagttcaaataaaaaaatttcttga

SEQ ID NO: 8287 - DNA, 177 bp, Methanobrevibacter gottschalkii
  source 1..177: mol_type = genomic DNA
atgaacgagaaagataatcgatgggctgaaactataattggatattgtaatcgtattgacgattacttgaatcgttttgatgatgataaagagatttacatgtcagatagtttatataaagatgcttgtgcattagttattattccgattgtgaatttgcaaataattttcagataa

SEQ ID NO: 8288 - DNA, 294 bp, Methanobrevibacter gottschalkii
  source 1..294: mol_type = genomic DNA
atgattagcagtgaagaaaaagagaaaatcaaagaagagatagtggagaaaataaactctgttttagagaaaaataacgaatctttcagattggacaaaataaatgttctgaataaaaatgaaaccgttaaatttatgggaaattacagagtttacgacagaaaaaaatacgacactgtttctagagaaattaattctttcttaaagaaatacggagatgttgaaataaaatctaaaaaaatcagagacagtggaatgaaatttacaacagtgagcttcaattttgaactataa

SEQ ID NO: 8289 - DNA, 1221 bp, Methanobrevibacter gottschalkii
  source 1..1221: mol_type = genomic DNA
atgattaaacgggaattatatttaaatcaaattcgtcatctttttggatctgattttattaaggtgattgtaggattgagaagatgtggtaaaacttctttactaaagagcattattggagaacttcaggataaaggtgttaaaaaagaaaatattatttatatttcctttgagttggttcaatataaaaatatttttaatgcgcatcaattggatgagcttattttaaaattggtcgaaggtcttgaaggtaaaatatatcttctttttgatgaaattcaacaggtggaattttgggaaaaatcaatcaactcctatcaggcttcatttgactgcgatatttatataacagggtcaaactctaaactgttgtcaaacgaattggccacacttctttcaggtcgttatgttaaaatcaatttgtatccgttctcttttgctgaaattttacagtataagcaagaaattaatggtttgaaattaaatgaaatgaatctgaaagaactattcaatgaatatttgttatttgggggaatgcctgggttgcttccgattaaagatgaatcaactaagattaatatacttcatgatatttatgactccattgtaattaatgatgttctttcacgatataagattaatgaaattgatttattcatgagattttcttattatctgatgaattcaaccggtcaaacattctcaaaaacaagtataactaattatttgaaaaatgaaaataaaaaaacttctagaaatacaatatcaaattttacaaaatatcttgaagattcgttgttctgtaaaaaagtaatgcgtcaggatattataggcaaaaaattgttaaaaactgaagagaaatattatttggcagatcagggatttcatcatgctttagttgataataatagtgattggttaggtaggatattggaaaatgttgtttataatgagttgattcggagaggttattctgtaaaaattggtaaaattaaaaataaagaaatagattttgtttgtgaaaaacaggataataagatttatgttcaggtagcttatctcttatcaacaccagaaacaattgaaagagaattttctcctttatttgatgttccagataaatatagagcatatgttttaagtatggatgaagttaacttatctgaaggtgggattattcacgaaaatatcattgatttcttattggattatgaaatttaa

SEQ ID NO: 8290 - DNA, 942 bp, Methanobrevibacter gottschalkii
  source 1..942: mol_type = genomic DNA
atgttcaaatttgataaagaacaacatgtgtttgactttgccggtgtaaaaatgggcggtcaaccgggagaatatcctacagttctatgtggtacaatcttttatggcggacacaacataatcaacgatgaacttaccggtgatttcgatcatgaaagcgctgaaaaattattgaatgatatgattagcatgtccgatataactgggaatccatgtattgcacaggtattcggtcaaactgaagaagcaattgtgaaatatttagaatttgttggtgatttatgtgatatacccttcctgatagattccacttcagcagatgcaagagtagcgggtgctcaatatgcggatgaagtgggattaactgaaagagcaatttataactccatcaatatgtccgcagacaaatctgaaatggatgctctaaaagaaacaaatatcgattcttcaataatcttaggattcaaccctatgaattccacagtgcaaggtaagattgcaatgtgggaaaatggtgatgatggcgcttatgaaaaaggtttgcttgaagtcgctgaagattgcggcatcaccaaattcatgatggatacagccgttaccccattaggtcagggtgcaggtgttgcaggtagagcttcttttgcagaaaaagcaaaatggggttatcctgtaggttccggtatccacaatattccttcagcatgggattggttaagagattataaaaatgagaccggcaataaaactgcattcacagtatgcgatattggagccaacattctccaggtaatgagctgtggtgatttcgtattattcggcccaatagacaatgcaacaatatgcttcccagctattgcacagacagacatgttcattgctgaagcagcaaaagatttaagcacagaaccaattgaaacacacccaataaataatttattataa

SEQ ID NO: 8291 - DNA, 366 bp, Methanobrevibacter gottschalkii
  source 1..366: mol_type = genomic DNA
atggatgaaagatcatataacatttcagagtttgcaattgaaggtgaagaagcagtaaaaacagtattttacacaacagattccacaagcggttctgtatggtgtgtaaaaccaggtcaagaagtagcttgccacacccacaacaattccgatgacatctggatttgcatacagggggaaggagtattctatccggaactgggtgatgagattccaattaaaaaaggacaggttgcggtaactccaaaaggactgtgccatggagctacaaacacagggaatgaagatttcatctttgtaagtattgttgcacctgttccagcagattataatccattatactcttttttattttttatcaattaa

SEQ ID NO: 8292 - DNA, 366 bp, Methanobrevibacter gottschalkii
  source 1..366: mol_type = genomic DNA
ttgagtagaggaaaaagaccaaagtggatgattgaaatagctaaggaaagaatggaaattctttttaatcgtgctgagatggagttcatcaaccatcctgagcgatccaatcgatatgtcgaactggcattgaaattgtctaccaaatacaatactaaaattcctgaaaaatggggtagaagatattgtaggaattgtaaaagtttcctctcacctggtcgcaattgcaccgtccggctagttaactctgaagttaacattttttgtggtgaatgtgatcatgtaatgaaaattccatatcataaggaaaaaaagaataaaaggagagcaaaatatgagtcaatcaaaaaaagaaatgatgaatag

SEQ ID NO: 8293 - DNA, 258 bp, Methanobrevibacter gottschalkii
  source 1..258: mol_type = genomic DNA
atgagtcaatcaaaaaaagaaatgatgaatagagctctttccgctatgacaattaatattggtaagaatggcattaatgaaaatgttattgatgaaattaaacgccaactcgattctaatgaaattgtcaaacttaaatttgcaaaaaatatcgctagagataaagataaattcatagatgatattgtctctcaaacaagagctaagcttattgatgttagaggacatgtcgctgtaatttataaaaaaaagccttaa

SEQ ID NO: 8294 - DNA, 438 bp, Methanobrevibacter gottschalkii
  source 1..438: mol_type = genomic DNA
atgactactgtatttgatgtacctgcagatttattaattaaaaaagtcgcagatgaatttaaaaataatgataagatcaattcccctgcatggtccaattttgttaaaactggtgttcacaaggaaagaaaaccagaaaacgtagattggtggtatgtaaggactgcttccattatcagaagagtgtatatggatggtcctgtgggtgttatgagtttaagaactttctacggtggtaaaaaagaccgtggtgtacgtcctgaagtatttagaaaaggtagtgggtctattgttagaacctcattacatcaattggaagatgcaggacttgttgaaaaagttgaaggtggaagagttgttactccagcaggaagatcattcttggataaactttctgctgaaatcattaaagatgttcctggtcttgaaaaatactaa

SEQ ID NO: 8295 - DNA, 357 bp, Methanobrevibacter gottschalkii
  source 1..357: mol_type = genomic DNA
atgagcgatttagatgaaattcgtcaaaaaagaatggctgaattacaagctcaacaagctgctatgcagaatcaagcacaacaacaagctatggctcaagcacaacagcaagaagcacaagcaaaatttgaatctcagaaaaaacaaattattgctcaaattatgacttctgaagctcgtaataggttgtctaatcttaaattaactaaacctgaacttgttaatcaaattgaacttcaattgattcaatcagctcagtctggaagtttaagaggaaaagtgactgatgaacagcttaaagttcttttaagacaaattgctggtcaaaaaagagagattaaaattacaaggaaataa

SEQ ID NO: 8296 - DNA, 585 bp, Methanobrevibacter gottschalkii
  source 1..585: mol_type = genomic DNA
atgaaagctggtgtattatatagtggtggaaaggattcgtcttttgtagcagtaatgcttaaaagattaggtcttgacgtagaactatgcactgcaaactttggtgtttacgattcatacattccagcaagcaaatctgccgaagcgttaggtttcaagcacaatgtcctgaaaatggattatggcattttggatgatacttgtgacatgattatgaatgacggatttccgaatgatggaatcaagtttattcatgctagaactgttgaaaagcttgcagatgattttgatattattgcagatgggacaagaagagatgataggactccaaaattgaatatcaatcaaatcaaaagtcttgaagacaggaaaaatgttcaatatattaaccttgacagtttcggacacaagtctgttaaactaataacttcaagtctgtttgaaatttcacacgaaagatcaaataaggacaacagttccgattttgaagttgaaataaggactttgattgatgagaaaggaggaaactcattagatatattcccagaacattatcaaactcgtgttataggatataaaaaataa

SEQ ID NO: 8297 - DNA, 156 bp, Methanobrevibacter gottschalkii
  source 1..156: mol_type = genomic DNA
atgagtagaaataaaccattagctaaaaaattaagaatggcaaaagcaaacaaacaaaataggagaattccaatctgggcttatgctaaaactaaccgtaaacttagatacagaccaaaacctagacattggagaagaaacagtcttaaattataa

SEQ ID NO: 8298 - DNA, 246 bp, Methanobrevibacter gottschalkii
  source 1..246: mol_type = genomic DNA
atggaaagagtttacacaattccacttagaaatgttaaagaaattaaaagaactatcagagctcctagagctattagagaagttaaaaatttcttaactaaacacatgaaagctgaagaagtcaaaattgatgaatctatcaatcatgctatttggaaaagaggtatccaaaaaataccttctaaaattactgtaaaagcagttaaagatgatgatggtgttgtaacagctactttagcagaatag

SEQ ID NO: 8299 - DNA, 675 bp, Methanobrevibacter gottschalkii
  source 1..675: mol_type = genomic DNA
atgttaaaaagagtagatatcgttggaaatccaaatattggtgtatttattctggcaactgatgagtatgctattgttccttataatcttttagatgaaaaagccgatattattaaggaaacattggatgttgatgttgttaaatcctcaatttctggatgtagtcttatcggatctttagctgtagctaattcaaacggaatggttgtttcaccacatgttttagatagggaaattaaacagtttgaagatttaggtattaatgtagctactgttcccggtcaatatactgcattaggcaatatcattgcagcaaatgataagggagctcttgcaagtccatttttatctgaaaaagcaattaacattatcgaagaaactttggatgtaaatgttgaatccacttctatggttggaagtgacattattggatccatgattcaagttacaaataaaggatttttaataagttctaatgctgttaaatctgaaattagttttgctcaagaagtatttggtgtagaaggggatattggtactgttggaaaaggtatttctttagtgggtgcttgttccattgctaattcaaaaggagcaattgttgctaaagatagtactggtcctgaaatggctagagttgaagaagcattaggctttttagatgatgatttttaa

SEQ ID NO: 8300 - DNA, 225 bp, Methanobrevibacter gottschalkii
  source 1..225: mol_type = genomic DNA
atgataacaaaaatttacagagttaaaggtacttttgtaatgggtgatgaatatcataaatttactaaagaattcaaagctacttgtgaagcggatatcgaagaaaaaatatacgaacgtttcggaagtaaacacagaattaacaggaaccaaatttctatttcagaaatcgtagaaattgctcctgaagatgttgttgaccctattgtaaaagacattttatag

SEQ ID NO: 8301 - DNA, 435 bp, Methanobrevibacter gottschalkii
  source 1..435: mol_type = genomic DNA
atggaagatcagcaaaaactaaacagtcttcttaacgaaattaatgtatacagacaacaagctgatttaattcaacaacaaattgaattaatcagaacttctatggctgaagtggatgcattattctctgctttggatgatatcgaaggtaaagaatctgtcgaagcttttgtacctgttggtgctggttcattcgttaaaggagaacttaaaagtactgatgaaattattgtaagtattggagcaggacttgctgttaaaaaagatgctgatggcgctcgtgaaattttaaacgggcaaaaaaaagacttaactgatagcttagacaaaatgttagctaacttgcagcaatgcacagacattgtaggcagtcttcaggctcaagctgaacaaattgcagcagcggctcaaggaaaaatgacccaaatgggataa

SEQ ID NO: 8302 - DNA, 6225 bp, Methanobrevibacter gottschalkii
  source 1..6225: mol_type = genomic DNA
ttgaaaaaaatattgatatttctattaatattgatttttgcattatcaattaatataacatttgcaagtaatactactaatagttcagatatttacataagtaatgagggtagtgatttttgtggagacgggtctattgataatccctatcaaactcttaactacacaattgggaaagtctcaaacaattcaaatatttatttaaaaagcggaacatataattctacaggttatgatattgtaaataaatcaatttctattaatggtattggtgatgttactattgatggattaaatggatttatttcacaaagtatttttaaaattaactctaatgcatcattatttttaaacaatattaaatttaaaaatggatattgtgatttagacaatgaaactccttcttgtattataaatcaaggacgattgtttattacaaattccacatttgataattttaaaacaagcgttggagtaattactaatgaaaattatttatgcatcagcaatgtcaaaacaagtaatttgtctaattctcagttattttcagctccatataaatataacattcctattcaatttatttacaatatatggtgttgtgatatttataattcatctattggcgcatcgtataataataaaaacatgactctaacaaattcatttatagagcgatttgtttcaaataaggattattcaaatcaaacttcttatgcttactttaataattcaaatgttcatttaataacagctaatgattgtgacatgttaatttttaataatacttatattaattgttattttgatgttgatgatacaactcatacaattgaatattcaaatttaatttgggataatgtaacactctcaaaatataatgatttattttatttttctttaaaaattggttattctaatttaacagctatttcatcatattttttaacttctattttatttttatcttctaatgcaacaatttcatattcatgtattttatctaatattattactgctgtcgtttctaatgtaaatgttaattataattggtggggggataataaaggacctaatgtaatgaatggtgagttttcaaaaatcacttcaaattattgggtagtaatgatggcggattatgatgattctttagttaaaatagatttaagtaaatatacaaatggcttagatgtatggaatttaaataatccctctaaattaagaactcgtttagttaaattaagaacagaaactggtaatttaacaaaaacttcaggttatttggaaaatgctactttttactctgaattaaatggaaataacattaatactatgctttatgcgatggttgataatcaagttttaagaattgttgttggtgagggtaattctgattatgatttatatatttcagatactgaaggtaatgattatttttgtgatggatctttagagaatccatataaaacacttaaaaaagttgtttcaaaagccattagtggaaataaaatttatatattgccgggatattatactttaagttggaatgccaatattaaaatattaaaaaatttaacatttattggtattggaaatgcaacattatcaagatcaaatgctcgaaatatttttattgttcaagaaaaaggtgtgttgaatatcgaaaatctcacatttacacaagctacttctggatatcacaactactatgatccaataattcatgtaattgatggtgatgtaaatcttaagaattctaacttttataacattacaacttatggggttgttttttcagataaatctgaacatgtgactgttaataacttaactcttctaaatgttgaaggtcctgttgtagtgggtaattctactaaggtttcaatttataattctaaatttttcaatggaagtgaagcatccttttatgattcatattattcatttttaatcccagtttgttctaacttgtctgttgtaaattgtactgttgatggatataaaggtggtttaattaaactaaatcctagatatgaacaaatagctgcaaggtcatatatttataattcaacatttttaagaaattatcagtataattatgtttatgctcctatggtttcaacatattcatataattacatgacaggattttcaataattgaaaactgcacgttttgtaataacattgggaatttagtttttagtaatataataaataattgtacatttgtaagcaataaaaggattcgttatgaggaaactaacatacattacaatgtaaattatccaaaagctctaatttatgcaaaaataattattaattctaattttaataataattctttcatctctaaaaattatgaagacatggtcattcatggcgatgaagtttattattcaacctttataaataattctgcagcatttggaggtgcattatctggttcaaaagagatacattattcaatatttataaataattctgcagcatttggaggtaatgatgtatttgtttataatggggatttaaattgttctagcaactggtgggggtcaaatcaaaagccagattcatctagggtttttgttttcatcggaacattggtattggatgattgggttatattgactatggattataagaatgatagggttattgcatatctggataatttattagacaataatggaaacagttatcctttaaatcatgttttaccatctagggctgttattttttcaactgaaggtggagaattaactccatctaatacttttttggttaataataaagcttcaacttttttaattagattaacttctagcgattttaatgtatttgctcaagtcgataatcaaattacaagtttgactgtttataataacactactcaaatattaatgagtaatgttgtaatatatgggaaagatgtattgtataatttgtctttgataaatattaatggacataaaatttcaaatcaggatttaaatgttataattactcacaaaaattcaattattgattcatttattgtcaccacagataaaagtggggatgcatcatttagtgtagattacgcaatcggtatttatcaggttaatgttgtatatttaggaaatggttattttgaagaatgtaactcttcagctactataaatgtatcttctattaaaactaaacttcaatcttataaccaaacatattcaggtaaaaataataaattttatgcaatattggtcgattatcatggaagatatttgttaaatagggatttaattttaagaatatttgatttaaatgataatttagttaacacagttgatgttaaaacaggtgttggtggaagagcagacgtgttattatctttagatgtgggaaattataaaatgaaatgggattatctgggaaatgaatggtatgaaaagagcacttgtatatcatttgttacaataagacctattgaaactaatatcatacttccaaacacaacattatatggaaaaggaaatgattatgagttcacatttaaagatatgtatggaaatttaatttctaatgaaatgattacctttaaaatatcaaaagaaaatgaatctagtaaatttagtcttataaccaagaaaggaattgcatcaataaatattaatctacttccaggaaaatatgatttagaagcggtgtatgcaggtgataaagtctatggttcttcatttgcttctgcaattttatatgttgaaccaatttttgtaacaatgaatcacaattcttatcaatccctacctaaaaatggtgttttcactgttattttaaaagatatgtatggaactaaagtaagcggtgaaaatctatctcttgaattaattaacaaagatattcataaagtttatgaggctgtaagtgatgctagtggtcaagcaaatttcaaattagatgctcctgaaggagtttattttgcgttaattaattatggaggtaatatttggtatggttcttcagttagtgctgtgactattgaaataaattctaatgtgcctattaatccagtttatattaatggttctaatttagtacaatattacggtgaagataaatattatttaataaagtttaatgatacaaatgcatattcattagaaggaaaacttgtaaatgttttaatcaactctgaagattggtctaactcatatactcttgaaagcaatgtctttggtgaagctagaattcaaatagctttggaacctggaacttataatattacttataattataaaaatgaatattatggtttatttgctcaaaattcaagtactatatttgtttataaaatgcctacaagcttaatagcatcaaacatgattttaaagaaaggcgattcaaaaaatttagaagttaaacttgtaaataaaaatggagatccaattgctaacctcccagtaattattaagatagatgataatgagtataatataactactaatcaaaaaggaattgctaaattacttcttaatttagatttgggcacacataatgttacatattcatttaataataaaaattacatatcttcaaaaggtaatgtaactattttagttgttaatgactcgaaaaaaacaacaacacttgtaggtaatgatgtttatactcgtgaagatcaaacaataaattatactgttttattatctgatttattggataatccaatttcatcttctgaaattgttttaaaaattattaattcagatgatattaatataaaaacatataaaggatatacagatgtaaatggtgttgctacatttaagtttaatttaaaatttggtaactattttgttaatgcttattataatggaaatagtgtaaatttacctagtttcactactaataatctctacattaaagttttagaaaattacacagagacaatattatttggaaatgatattgaaattcataatggtggagatgattactattcagttgttttatctactgttgatggtgaatttattaaaaatcaaataatcgaatttataattaaaaataattcttattttacaaatacagacgaaaatgggatagcatatttaaaaataccattttctccaggttcttatgaagtattaactaaatttcatggttgcgataatttaaccagttcatcaattcacaattatatttcaatttatggagatttatttaatttttactcaaaagatgttgttaaagcatataacaatggtacacattattatgttgcattatatgatacaaacaatgaacctttgtccaataaaacaattaatttctatgtaaataatcagacatatcaggatgttacaaatgctgatggttttgtttgttttgaagtatggttaaatccaggaaaatatatcattaatgcaacttttaaaggcgaatatcctgatgaatttacaagtgttgtaaataacatcacagtcttaccaacaattatgggggaaaacttagatgtttattataatgaaaatacagtattttcactatttttattagattataattgtaaaccattagaaaatacagaagtagtaataacaattggtggagctaaatattctacgatatctacttttggttcagcaagttggaaattaaaattaaatgcaggggtatataatgttatttgtaagaatcctataacaacagaaaaaataactcgtaaaattaatattaaatccacaataatatctaaaaatttggtaaaatattataaagggtcttctaaattttcagtaacatttaaagatcgcttcggtaatttttctcgaaattctaaagttaaatttattattaataaaaaaacgtatgttaaaaccacaaattctagaggtattgtgtcattaaatattaatttaaaaccaggaaaatacacaattaaaacttataatttaaagactggtgaaattaaaacaaataaaataacaatcaaaacattaataatttcaaaaaataagaaagtaaaagctggtaaaaaaattaattataatgttaaagtattcaattctaaaggtaagattgctaaaaaagcaacaattaaatttaaaatcaaaggaataacttacaaaattaaaacaaataaaaaaggcattgcaaagttaaatatagttcttaaaaaaggaaaatatacacttaaaacatcttattttgggttaagtgttaaaaataaaataactgttaaatga

SEQ ID NO: 8303 - DNA, 5712 bp, Methanobrevibacter gottschalkii
  source 1..5712: mol_type = genomic DNA
atgaaaaataaaatatttatcattggattaattattttgattttatttatatcaatttcatcagtgtgtgctaataatgaaaattcaacattaaatacatctattaagatcaacaatgatttaaatcaaataaatttaggcaacgaaataaatttaattgatgaagctccaaaagaagttttacaagatgaaagtgaaatttcaatcactcctcaaaactataataaatattttaatgtctatactggtaaatttaaatctgatattgtctcatctaaaataactactgtaaaaataggtaatgtttcaaaatgtttatttgcatttgaaaaacctgtaaatttaatgccgatagattctagctgtcaaattacaaatggggtaatacatttattgcctggaagtgatggatctacaatttccggtttaaaaattatcaataatgattctgttggggatattaagtatggaggtattttaatttctagagcacatggaatatggcttacaaactcaagtaataatcttatttataataatacaattatcataggcaatcaaaagggttgttatgccatgcctatgggttattcgaataataatagaattttaaataacactataatttctggtcttacgtcttgtattgtaatgggcagatcttgttataataatatttctaataattatattgaaatttgtggctatgaacttttcactacatctaatttaattttctttaacccttggggacatgcagattatgatgatggtgtagccgagtgtaatggaaattatattgcaaataactatttaaaaaattatggaactggaatttgggctataactttatctcttggatattactcaggagatacacaagtcattaataatacaattattaaaggttcatcaggtatttcaactagtgatatgttgttcacacaaccaaaaaatattttgataaaagataatacttttattgattgtccaatatctatacttacatgtagtaataatgtcacaatagaaaaaaataaaatttttggcagttctgaagataatgcaatctatattcaagctaatgatgcacaattgtataatcatagtgtaacaatttcggataattatatagaatttgaaaatttaggttgtgcgatattagtacatagtgacaatgtaacagttgttaataatgaaattcatttatcaaggtatggtactggaattggtatttctccaaccgattttcctaaagcatcatctaataattgtaaaatagaaaataataaattatatctcagtggtgatatgggaattcgtatacttggacataatacaacaatatgtaataattacatctctacaaaggataaaggcattgtaatttcatcttcgggttataaaatatataataatactataattgctaatataattttaagtgatgatgtgccaatctatattgaaggacatgtggtaaattcaacagtaatgtataatgaaatcgaaactaataatagtgaaggtattcatttcaatccttctggtgatttaagtgactattttggcaaggtttctgaaaatacaatcaatggaattattgaaaatactgaaactataattgttaatgatacaaacttttatgattattttgatttatcaggatatttaaattatgaatttaaaccaaattcaaaaaaaattatatttttcacatttttaactaataaaaatatttatttcacagataaaatatttttaagtagtaataaaatgtacaatttattgcataatgtttcgattaaattttttgaaaatgcaagcggatcattaattcaagatttaaatttttataatattgggaataatagtatcattttagatggggttaatgatgtatcaattaataacaatgattttacaattctttcaaataagggaaagaatatttcaacaatttccgttattggtggtgaaaattgcatcatatctaataataatattttcatgaactctaaatcaaatttcactacagcaatttctatttcaaatcctaatggtgccataattaaaaaactttcaaaaaactttaaaatttttaataataatattttgattaaaacaaatggaattgcaagaggaatttatgctgattcacttgttgagacaaatatattagaaaataagatcaatattatatctgattcttcggcttatggtatatcaatagaaaatacaaatgaaatagtatataacataactattgacaataatttagttgttattaattctaaagaaatgagttatttaatcaaacttcaaatgattggcacttctgatataataaacaattatttagttggatcaagtaatggtatttgcggtattggtgcttataattctttgaatttaaatataaatagaaatgaaatttctatttcaggcaaaaaaccaattaattttcctgtttttgatgaattaggtagaaataatgtggctatttatttaaaatccacagtaataaatggtttttcaagaaatatttttgatattgaaaattcaacaatattgattaaagattcttcatcgattattaaaaatttcaatgttaatagttatgttattgcagattataatcatgatttttattttgattctcaaaataaattaaaaagtaatattattaatgataatagtataattttatttaaaaacttcacttttaaaaaaataaccaatattaatattccggtaattataaaaccatataaaaatcttaataatttcactgctacattaattttatctgaaaatgctaataaatcatcaatttatggatttaattttattaatgcaaatattaatttaaatggtgtagataatgttaatatttttaataattcgttcaaatgtagtgaaattacggataataatggtttgaataatattatttttaataattcatttgaatttaaattaaataatgcagatggaattatttttaatggatgtgcaggaggtatttttacaaataattatattctaattgattctaaaaaatctaattttattcttattagaaaagctaatggaactaaggttaataacaattatattaatgctactggtgatagtttagtattaattaaatcagattcgtcagaaaatactcaaattttaaaaaatattattaatgttacatctactggcgattttaatgtgtataatgcttttaaaactcattttgataatatttcaaacaatgaaattaaatgtagaggtacatcaaatagtgctgtaatttattatgattcttcatcttcatgtaataaaattgaatttaatgaaattatttcaagttctagtaatggtagagaatatgcagttgtatttgatacaaaacacgctttatccaatactattgcaaataactatttaattacttctaatgggtataggagaggtaatgatgcagtatatgcaatatttgaattggtctgtaataatactcctgtaactatatatgtatctattaattcaactgaagatggtaatggtagttttacaaatccttatttaacaatccatcaagcattagagaacagtttaagtggagctataatctacatattacctggttattataaggaatctaatttaattgttaataaaaatattacattaaccgcaataaataatgatggagctgtttatattgatgcattaaataatcagttatttacaataactgaaaagggtagtttgactataaatgcattaaagatttttaatggattttcagttgaaggtggatctttgttcttcaattttggttctttaattatcaataattcagttatttataatagttcttcttattatgataattctaacccaacatttaaatttacaaatatacaaactccaactctttcatatagttatgattgtgaaaatcttggtttaggaggggctattcttaattatggtaatttattaataaattcatccaccctatttgataattttgcacataagggtggcctattggctgattttggaaaatcaacaattaaaaattcattaatatttaataatactgcagttcatggcggggcaatttttacagattcatctcatgaatttaacattgaaaatagtagtttcttagaaaatttagctattcaaacattggattactgttatattcaaagaaaatctttagattctggtggttatgagtatcgtagtttatgtgatatgcggccgggatatggtggagcaattttcagtaattcttcattaatcatatccaattgtctttttgagaggaatattgctaaatctggtggcgcaattggtcactactctaaaatagaattgaattcaaatagacaggggcctaattattatgctgttaatcaaaatgtttatagtcaatttagatatgtgcctaaattgaagattgaaaattcgatatttagatataatgaagcaaaagatacaagttgtggtaacttaagtatgatttctgataggatgtataattattattatagtattaactataatggtggagctatttttggttctttaagccaattaacaatctttaattcattatttgagcataatgtagcaaatactgttggtggtgcattatgtgttcaatgtgaaaattcagtaattgagagttgtaagttttataataatactgctggggaatatgggggtgctattgaggcttttggtacttataggatatttaatactgaaatacttaataacaatgcaaaaaatggtggtgctattaaatatacttcatataattcttatggtcatttacaagaaatgatgagtttatttaatgtcacagttactggaaataaagcgttatctagtggaggtgcatttattacacaagttgctaattttgcaatcactaattcaaatatttatgataatagtgccccatatggtaatactttttatggaaaatatgggtatgatagtagttccaatattgatgctcgtaataattggtggggctctgttgatggacctgatgattccgtttggaatagtgcaaatagtaaatttaaaaattggttgaatgagaaagtaaattggcatgttcctcatgttagtggtggaagttctaataatgatgagtctggtattggaaatcaaaataatggtgtaaattcatatattccatctagtgtatcaactggttcgggggtccatacaggttcaacattaacaaacaatgttaaatcttctggtgcttcttcaaaagggttctcattcactggaaattggccttcaggaacagcaaatggttttaataatggtgggtctggtgaaggtaatgctgtcaattcaaaagataattctggaaatagtagaacttctattgcaggcaatgttaaaaatttgaatagtgttagtaaaatcaatagttctaatgttaataatcttttttcagtaggtatggatgcaaatgctgcagattcatcagctagttctgcttcatcatctcaagggggggctgatgagagtttttcaaatgcatacgaaataattaatgaagttaaaaaagaaaataatcaaaaattttcaatatttaatatattgcttattatagcttggattttctttgttgttggattttatagaaaatacaacgataatgaaaaagagatttaa

SEQ ID NO: 8304 - DNA, 5262 bp, Methanobrevibacter gottschalkii
  source 1..5262: mol_type = genomic DNA
atgaaatattctaagttatttttgatatcttttgtcttattgtttttcattgtaagtgctgttaatgctttagatgcatctgaaattactttgaatgcagataattctattgatgaaatatctaatgaagatatgggaatacttaatgaagtttcaccctcaaatgatataaaacatatttatgtaaacgatactggggatgattcaaacataggttcaattaatagtccttattcttcaataagcaaagcaattggtgatgttaattcgtctacaaatacaacgatatatttaagtaaaggaacttttggaaaaaataatgatactaattttcaatttacaaatgaaataaatacttattttgataattgtaatgtgacttttattggtgagggaactgataaaacatttatagatggtaaatcaacatataaattcatgactatactggaaatcactcctaatttagtttttaaagatattacatttgttaattttagaggacgggggagttctgtttttgaacttttggaagcaggaaatttaacaattgataattgtgtttttaaagattcatattctactagtaatggtgatacaatttcatcttcaaatagtggtgatttaaaaattattaattctcaatttattaattcaaatggtggaataattagtttattatatgaggatgtatctcccggaactctttatttagaaaataatacttttgtaaatattactaattctgaaaataatggaattgcagttactagtaattatgctaaagcagtgattaaaaataataaatttaataatatcacttgtattaatcaaaatcaagttaccctttatttagaagctcccgatgaaggtacacttgttttaactgataataattttgttaattgtgagtgtttaaatgaatattttatggctccagtatatttgtgggcatatgaagaatatgtaatatttgaaagaaatatattcttaaattctactggtgcttctggattcaatatattgcttaatggtagaatggataatttaaatattagtataggtgctgatgagattaatgttcataataatgaaattaatcatggtgtaaatattccaattaatataactgatgatgtaggaaacttagttttaattaatagtggaattcaacttaatcttataggtgataataacaattatactccatatttaagtttaaaaaataaaaaactcacatttgctactgttcctgagagtggcatttataatgtaactatcacatataatgatgggttatcaactactgaagtgttaactattataaaaattaatatctctagtagtcctgttaatatttgggtatctcctaaaggttcagattcaaataatggtagtgaagaaaacccatttaagacaattcagcatgcaatagatacgggatttgaaaaatcattcaatgtcataatatatttagatgaaggaatttattatggtgaaagtaatgttaatttaataattacgaataaaggtagtcttcaaattatcggaaaaaaatataataaaactattattgatggggaacattcaaattggtttttgagtgttgatacttgtgatgttgaagttaaaaatttaaaattcattaatggtgctggaaataaaaatttaatttctggttcaaatttacttaatcttaaagattgtattgtagatagtaatattgcttcaagaaattgttatgttttacatcaaacattatttgataatttaacttatacaaacaatactggtacaatttattataattataatagaaatattacaaaatcaaattttattaacaataaaaatatttatgattctactggtattatttatagttcttgggctcctataattattcttgattgtaaattcattaataatactgcattatatgattatggtgtaatatactctaataacaacattatgagtcttaataattactattatggaaataaagctaaaaattatggaatattctatgcttcgtcttattctagtaataaaatgattttaataaatgatacatatattaataatcacgtagatggatcatatggaattggaatttcaccatattcctctgtagtaaattgtaaatttattaataactctgctggtacagatgcgggcataggtagtataacaattacctgttcatttaaaaattgttcattcataaataacagtgctactaagggcggtgtttttgtattaaatgctgttcaacatgcattgggcactacttatgaagaacttatttcatttgacaatgtaacttttgaaaataataaagctagcatgggtgctgatatttatctgcctccaagaagttcaaattcctattactcatatacatatcctattgaattaacaattacctttgataatattactgttacttccttaactgataatttaactgctagtgtttatggagttaatggaataattgttggaggtgcaattcttgaattttatttaaacgagttatatattggttcttctcaaattgttaatagtaatgcaattttagaatatgatggttttagtaatggaaaagctattgttaatggaaatattattcatccttctgtaaaaaataatataaataatgcaacattagatattaaattagataatgtattaaatcatattgatttctgggtttcaaacataggtagtgatgaaaatggcgatggtagtaaaactaagccatttaaaacaattcaatatgctgttaataaagcatttgaaaattgtcgtgatattactatctatcttggagaagaaacatattctggtgagaataacactaatttaactatttcaagtgcaagtaatataacaataattggtaaaggaattggtaaaacaattataaatggtggtaatagcagttattttgtaaaaattctcataggcattaataaaattattattagtgatttgactattattaatatgactccagataatagatttgatcttccaattggttctacatcaccatcaggtatacatagtattattaaaagtggttccacatcaccaatcactgttgataagggagcaacattatatttaaataatgtaaatatcacagaatgtcgtggaggtaatgctataattgatggtgaaggaaacattttcattgataattccatattatataaaaatggagtttcaaagggcattattaaatgtgaaaatttagtaattaataattcaataattgataaacatttagttggaggttatccaataataggaacgaacattataataaataatactaaaattacagatgtatttaatattattagaaatggattttattttatctccaatgctaaaaatactactattgaaaatacatgtgttttaattaataattgggaaaatccattaaatatattggatattattgaatattatgatactcaaatatgtcctgcagcttgtattgcttcaactaatgcaataattaaaaattcatcatttaaaaatgaatttgaattagtgtatttatggcaatcaactactgattattcatatcataatgtttactcaggatctaatattgaagcagttaattcttcattcgaaggttatcaattcattatatattctagaatgcttcaaaatccaatatataagttcgatggatgtacatttaataatattgctaatttgatgattatgatgcaatctagaaattctatagtatctttttcaaattctgtaatgttcatatcaggcaataaaattgcaagtaataatgcatttaataactctttcctgtttaacaataattattggggtaataattcaaaacccgtaattccaaactctgtatctaatttccaaataccttctccagataattggattattttaatttctgaaggagaagaaccagtatttaagcttacagatgggaaaaatgtcactgagtatatatgtaatttgccagctaaaatatcttatgttgccgatgaaaatggtgaaatcattcctgttttaaatttaaacggtaatggatataaatttaatgtggatgaaaacggtaatgttgttcttaatatcagtgctccgatgaaaaatattgttcctaaagttccagttgatgaaactgtattcgcaaatgatattgaagttattgtaaactcttcttctaactttaaggctaaattcactaataaatggggcgattcattaaaaggtattaatgtttcattcatcattggtgaaaatattatcaatataattactaatgaaaatggtactgcaatattgcctgttgactttgatttaggagtatattttgttaaaattgttaatccagttactggtcaatttattttcaaaactattgatgtgatacttgaaaacacggttactgcaaacgatattattgtaaagtacaatgataaatctaaattctctgttatttttactgataaatttggaaatccgttaattaacactaatgtcaaatttaaagtaggaaagtatattattaatagaactactgatgaaaatggtattgcttcatttgttattaacttcaatgttggtaattatgctgtaaatactattaatccagttactaatcaaagtattgataaaataattactgttaataaaatagctactaaattaacttctcctaaattaactgtaacttataatgctggtaaatatttaactttaattttaaaagattttaatggaaaagcattgattaatcaaaaagtttctattaaaattaatggtaaagtttacactaaaattactaattctaaaggacgatctagtttaaaaattaatctccctgttaaaacatacattacaacattaacctatgcaggagatagaaatcatattaaatcctctgcaactactaaagttatagttaaaaaagcaactcctaaaatgactgctaaaaaagcaacttttaaattaaaaacaaaaactaagaaatattcaattattttaaaagataacaggtataaagttatgaaaaaagttaaagtatatcttaaagtaaaaggtaaaacttatagagcaataactaattccaaaggaaaagcaacctttaagattacaaaattaactaaaaaaggaaaatattcggctagaataaaatattcaggtaataaatactttaattcaataacaaaatatgtaaaaataacaattaaaagatag

SEQ ID NO: 8305 - DNA, 492 bp, Methanobrevibacter gottschalkii
  source 1..492: mol_type = genomic DNA
atgtctggaaaatctaagattaatgtttttaacaaaatgacaaaaactgctttggatgaagaaattagtgcttatgtggcttatcataggtactatcaaaggctaattgcagttaaaatagttagtgaaggaaatacaattcttgatgctgcaaagatattgggaaaatcctatcaaactgttcatagatggataaaaacttgtgaatctgaaggattggaaggtttaaaaccgtcttttggtggtggaagaccatcaaaattaacttatgatcaactgatggaattggataaaattattgaaaaaacaccaaacatgtcaatgaaagacgtacatattcttgttaatgaaaaattcaatgtaaattacagtttaaaacaaataggaaaaattgtaagaaaattaggttacaattatagcaaagcatgcccaaaattttcaaaatcccttgaagatgcagaagaacagttaaaaaaacttaaaagaacataa

SEQ ID NO: 8306 - DNA, 237 bp, Methanobrevibacter gottschalkii
  source 1..237: mol_type = genomic DNA
atgccacatgatcatttagcaattaatggaaattcaacaatcacaattacaaattcctcaacagcaccagaaatagtaatggtcattttagaattaagatgtgctaatacaaaaaataaaaattccacaaaatcattaaataaaataattgaagaagttaaactaacaaatgaagaaatatataaaattttaatggaaaataatgaaaataacatagttttcagagaaaaattataa

SEQ ID NO: 8307 - DNA, 1326 bp, Methanobrevibacter gottschalkii
  source 1..1326: mol_type = genomic DNA
ttgtttgaatcattgaaaaagaaattttcacgtacaagtgaaaagctagaagaagaacttattgaagaggctgaaaaagaggacaatcttcaagaagaagagggtaaaaagttttctttcttttcatttggaagtaaaaaagaaaatatggaagaagatgagtctaatttactttctgaagctgaagggactgtaggaaaagaaactgaaaatgaaattcccggaggagactctattgaagaggatgttgatgaaaaatcaggtttactttccagattgagaggttcatctgctaaagaaaatattgaagaaacttctgatgaagaaaaaatcattgaggaatcgcaagatgaggaaaaatctcacttctggagcaggaataaagacaatgaagataattctgttgatggtgaggctggtggtgggatattctcttttgttcgtgaaaaaaccattcaggaaaaacatgtggaggatatattatttgaactggaaatggagctcttacaaggtgatgttgcaatggaagtggctaatgaaattgtagaaagtgtaaaagaagaccttgtaggtaaaaaaatcaaaagaagtaatgatattactgaatacacatttttagctttaaaaaatgcagtatctgatatcatcagtattccaagtaagtctatgactgaaatgattgaagataaaaaagctgaaggggggccgttagttgtaatgtttgttggaataaatggtactggaaaaacaacaactattggtaaactggcgaatttctatatgaaaaaaggttatactcccgttattgctgcttcagatactttcagagcaggggctattgaacaagtgacatatcatgctgataatgttggcgttaaaataattaagcataaaaaaggttcagatccggcggctgttgcatatgatgctgttgaacacgcccgtgcacaaggaaaagaattagtcttaattgatactgctggtaggatgcagactaatactaatcttatggatgaaatgaaaaagattaagagagtttcaaaaccagatttagtaatatttgtaggtgatgctttaacaggtaatgatgcaaccgaacaagctaagaaattcaatgaagctattgatattgatggcgtaatattgaccaaagccgatgcggacagtaaaggaggagcctcactttcaatcggttatgtaattaaaaaaccaattctgttccttggtatgggtcagggatatgatgatatcatggaatatgattctgaatggatgttaaatcagttattcagtgataatgatgaatctgaaatcatagaggattaa

SEQ ID NO: 8308 - DNA, 1083 bp, Methanobrevibacter gottschalkii
  source 1..1083: mol_type = genomic DNA
atgaaaatcagtaagattaatttaatcttaagcgtggttttagctattttaattacaatggctacaactgcatcacttttatcaaatgctaacgattcattttcaaaagcagagccaaaagggaatgtttcaatagctatcacaggggatgttatgtttgctcgtaacatgccgggtgttttaagtgctgattcatctcctttttcaggtgtcagtaatgtaacttccaatgttgatttattactgattaattttgaaaatgcggccacttcttctgaaaatgcagttaagggtgatgttccacttaaatgtgacccgagatatgttccacttgcaaaggggaacaataacacaatagcttctcttgcaaataatcatgcatttgattatggtattgatggaatgaaggatacaattgaaaaccttaaaaatgcaggaataacgcccatcggtgctggtgaaaatgaaaaaacagcgcataatgcagtaactcaggaaattaatggtagaaatataaccatattaaattatatggattcggacaactttgcagaatattcttatgatgtaatgccttatgcaaatggttctaatcccggttactccgtatttgacctagcagatgcacaaaagcagattaaagaaaataatggctctgatttgattgtagtttatatgcactttggaaatgaatattcaaactctccaaatgacaatcaagttaaaattgcgcatgaattaatagattctggtgcagatgtggttttaggatctcaccctcatgtgactcagggaattgagatgtataatggaaaaccgatattttatagtttgggaaacttcatatttgaccaatcaaaccccgcaacgcactctgcttactttgttcaaattgatcttgtaaataatactggtgaatgcagtgtttatccaattgtaatttcgggatacctgccgcattatatggactcagatagcggtaattcattattaaatgaattgaatcctaatgctgatgaattagaagtttcaaatggtgttggtaaattaagatttaatttaacggaaggcgattcaaattaa

SEQ ID NO: 8309 - DNA, 1740 bp, Methanobrevibacter gottschalkii
  source 1..1740: mol_type = genomic DNA
atgatttcttgtgttagtgcaggcgatagtgagatgcaacaagtgaataatgatagtgttgactcagctaatcagtatgtggaaccagtgaagaatgcttcttttagtaaggttagtaatactaattatctaaaggattcaaatttcactgtaagtttaaaagatgaaaataatgaagtaattgtaaataaaacagtttatttcactattgatgatggattagtaataaatacaacaaccgacgggaaaggcagtgcaaaactattattgaatatctcaaaaggaacacacactgtcaaatacatatttaatgaaacgggatttactccatttaaatcttcaactaaagttcttgttattacaacatcaaattctaagataaaagcgtcagcttataaatcttacatcggctttaaaaaacattattcctatgctaaacatatcagctttaaaaatacatataagattacattgactgctgatggaattccgttatcaaataggattgttaaatttacaatcaacggaaaatcttatagtaaaaaaacagattcaaaaggagtggccagccttcctattggtttaaaggcaggcagatatcctattaaattttcatatgctggtgaaaaaaatattaaaaaagtcagtggaagctctattgtatatgtaattaagggcatgcctaaaaagataattaaagcaaattcactgacttataaaaataaagtttcagccccatttaaaataaaattagttaatgggcgaggaaacatacttaaaaataaaaaagtaacattcactcttgatggcagaacatatacaaaatacacggacaataatggtattgcaaccatataccttaaattaagttggggaactcatagtttaaaagtttcatcagccaagacttcttattataaatctgttttaaaaaaatattctatccatataaaatctaaggcggttaataacggactttggatgttcagttcggatatgaaaaaagcaaacttagcatcacttaaaaaggttggaacaaaacatattttcctttatgcaaaagcaattgatgtatggggcagatcggatgttgagaaatttatcaaaactgcatctggttatggtattaaggttcatctctggatgaaagtgtttaatgatgacaatgataaatggattaatccggttaaaaagggcaaaatcaactatggtctgataaaatcaaaaattaatcttgctaaagaatatgcgaaagtaaaaggggttgctggaattcattttgattatttgagatatcccggcaatgcttataaatattcaaatggtgtaaatgcaatcaattactttacaaaagctgcaactagtgcaattcatgcaattaattcaagattcattgtctcagcagcagtaatgccggaaccatcagatatgaaatattactatggtcaggatatttcaacaatgggcaagtgtttggatgtaatcattccaatgatttataaaggcaattataatgcgggatcttcctggattcaaaaaacgactctaaaatttgttaaaaaatcaggtcatgctaaaatatggtctggaattcagacttaccattctgataggtctccgataaagctgacttcatctgctttacttaaagatgctgatgcggcggctgcaggtggagcagatggggtaattttatttaggtatggtctaactaatttgattaactttaataagttatga

SEQ ID NO: 8310 - DNA, 1542 bp, Methanobrevibacter gottschalkii
  source 1..1542: mol_type = genomic DNA
atgatgaataaattaagtgtatttattgttataattatcatagcactatctatttcttcggtatgcgctggtgatagtgatcataataagacggacgattcaattcttggggaagctgatacgtcaacttcttcaaatattactcgcattggtgtgaattcaatatatgatgatggggtaaatgaaacaataaaaactaattcctcttttgtatcttctaacgtagtaacttatgaaaccttttcaaccaaaataactgtcagattattgtcgaataacaatccattaaatggaaaaaatattattatttctgtcggtaatgtttcatacaataaaaccactgatgctaatggtaaagttgttttaaatgttaaactcgcaaaaggaaagtataatgcaatgttttcttatggtggggatgaaaacattaatccttgtcaaaaaacaactactgtaattgttaaaactcccatcaaaacaaaaatttattgtgcagataaaaatattaattataggcaagatttaaagaataccttcattgtccgtttgattgatgggaatggaaaagctcttaaaagtcaaactgtaacttttaaagtcaatggtaagatgtatattgcaaaaaccgataaaaagggttatgctgaagtttgtttaaacttaaaaaaagggtctttcactgtcggattttcattttataaaaaatcaccgtattcacattctcacggatcttataaaataaaggtaaaagctccaattggaaaaggtaacgggtattggctttggccagctcatatgaaacatttgaatctcaaatccctttcaaaacttggaacaaaacatattttcttacatgtgcaggctatttcagtttatggaaaatcttctgttatttcttttgctaaaaaagcacacagatatgggattaaagttcatctgtggatgcaagtatgttgtattcgcggggataaatgggttcgtcctgttaacaaagatggttcatttaaatattcatttataaataaaaaagtcaaagaagcaatcagttatgctaaaatacccggcattgatggggttcacttggattatgtccgttttggcggaactgctcatttgtataaaacatctacacaatctataaattatattgttaaaaaaacaagtttgggaattcataaagttaaacctaattgcattgtttctgctgcagtcatgcccgaaatttcaaagatgatttcttggtatggtcaggatattcctacaatgggaaaatatttggatgtgattgttccaatggtttataaaggtaattttaatcaaaaaactgcttggattacaaaaattgtaagtaaatataaatcacaatcaaaaagtgctgtaatctggggcggtcttcagacataccactcagataataatgttaaaaaattgtcttattccgcactattgaaagatgcaaaatcctctaaagctggcggagctactggttctatactgtttagaattggactaactcattatttgaactttaaaaaagtttag

SEQ ID NO: 8311 - DNA, 378 bp, Methanobrevibacter gottschalkii
  source 1..378: mol_type = genomic DNA
atgaatgcattcgataaatttttaataggagacacatcatcaataaattggtgttttgaaaatcgccatttcctggacaggctgcaagataatggaatctccagacagtatgttgttgattgtctaatgaacgaagaaccaattaaatatgaacatattgacagcagcacttatgctgcagtatatgacgctccatcgaacaaggattataaagaaattcgaattttaatggctgttagtggaaactcgattgaccttgtaacgataatgagaaataatgaaacaacaaccgagcgccagaaaagacaataccagtcccaaaaacataaaaatatagaaaaaaagagattgaatgcaatttcaaaaagaaaatggtga

SEQ ID NO: 8312 - DNA, 1455 bp, Methanobrevibacter gottschalkii
  source 1..1455: mol_type = genomic DNA
atgtctgaacaaccgcaatgggattcatctatatcgtttatttttgcaatgattggagcggcagttggtcttggtaatatctggcgtttcagttatgtgctttattctaatggtgggggatcatttttcattccttatcttattgcaatagctattatggggattccttttttaattttagaatatggtgtgggattttcatttaaggaatctttttcaagtattatgagaaaaatcaagccggagtttgaagtgatcgcctggattttggtattatttgtatttgttgttacaatttattatctggtaattctaagttgggatctggtatatctatttagtagtttcacatttaattggggaacagatactgcatcttactttgtgaacactgttggcggaagctctgatttaactaatgcgaactttttattaattcctactacagtctgtgtgttattattatggatttcagtatggtttatatcacacagggatgttgatagtggtattggtcgggtatctaagattcttattcctgctctattcgttattatgggaattattattgtttatgcattaacacttcccggatctgtggttgggataaatgcccttatacatcctaactggaatggtcttttaaatgtaaatatctggcttgcggcatttgcgcagattatattttcattaagtatgggacaggctatagcaattacatatgccagttatttgcctaaaaactctaaattaattgataatgtactgattgttgtgtttgctaactctgcttttgaagtctgtactgcattcggggtattttcaatattgggttatatgtctttcataaatggaacgcccataactgacttaattactgaaggcactggtttagtatttattgtttttccaatgattttcaatattatggggtcagttggccgtattttagctccaatgttatttttagcaatattatttgcaggtattacttcagctttaggatattttgaaccaatgttgagttcaacttcagcaaaactaggatggtcccgtaaaaaagcggctagtgtactgtcaattattggttgtgcattttcagttcttctaacaactggaattagtagctatgtagttggtattattgattcatttgtaaatgaattcggcattctgcttttaattggtgtgcaatgtataatatttgcatgggtctatggtgttgaacactttttgccgcttttaaatgaatattcatcttttacagttggtaaaaaatggatttttgtaattaaatacttgctcccatttgttttaataattatgtgggttgtgggtattgtgcaactgtttacaactgcagatgtctttgagatagcaattgatttgataattatcgcttcagttttggtatctgctgttttcttaactaaactcaaaccaagtggggaatga

SEQ ID NO: 8313 - DNA, 222 bp, Methanobrevibacter gottschalkii
  source 1..222: mol_type = genomic DNA
atggtaagaaacaaacgtttaaatgcagtaatttcatttatacttccgggattaggtcaaatattaaatggtgatgaaaaaagaggaataaaattccttatcggaatggttgtactccatatagtgatttattatgctttaaataatgtagtgggaagcatgatttcaacactataccatgcatattctgcttatgatgcatacaaaacctgcgaaatgtag

SEQ ID NO: 8314 - DNA, 732 bp, Methanobrevibacter gottschalkii
  source 1..732: mol_type = genomic DNA
atgcaaaatactagtaagtattttaatttaagtgatatgatggttgaatattttaattttgaaaataaagaacgtgacattccatattataatcataatccaagactcacaaagcacgcttggattgtgttactctccagtgtattaatatcattcatattctatgccctttttgaagatgtatctgaattttttgcaagttttatattctgtgctattttactcgttcctttaatgtattattccgactgggatttctccctaatatttcacaggccgacaaaaagtgaaattaaacttgcattaattctttttattggttatttaatttatgcaataatactggggggagttatagaagcacttttaagcattactacaacaaccagcgaacttacagttaatgcagaatcattaatttcgcttgtattttcaatgatggctgaagaattaattaaattcataccatttgtatttataatgagattagtttataaaagtaccagcaatcgtaaattatcaattataacatccacatttatcgttttaatattttttggacttctccactatgattttgaaacatcaattatttcagtgctgttacttcagggacttggatcattatttgagctttatggatacattaaaactaaaaacttatttgtaccctatttaagtcatcttctaacagatgccgtgatttttatattaatattatttggattgtga

SEQ ID NO: 8315 - DNA, 435 bp, Methanobrevibacter gottschalkii
  source 1..435: mol_type = genomic DNA
ttgaataaaaaaattataggtgtattattagttttaatagctgctgttgcttttggttcagttgtttatgctgctgaaactgtaactattggaggatttgattttaatgttccggacggttttacagaagataaaagtcatgaaatcgtaaacatggaaaaagagcaaggtggaatcaaatacattaacaatggtaaattatttgaaaatgacaaaggggatgttgtaaatattcttgttgcaaaatatgatggtcataaagtaaccaataaaattgcaaagggtattgctgatgaacctaaaacaattggtggtgtagatggttacatagtacataatggtacttttacatcatttgattatgcaaaagaaggtaaattagtagtaattactaccaataatgaagatgcaattgaaggatttattatagaataa

SEQ ID NO: 8316 - DNA, 627 bp, Methanobrevibacter gottschalkii
  source 1..627: mol_type = genomic DNA
ttgaataaaaaaataattattgcagctattattgttgttattatagctgttgtggcaggttttatgcttacatcatcaaatagtcaggacaatagtaaaataaccattatgggtaatggatccattcatgaaaatggcactattggaattaaattgacaaatggtgaaaacacagctttaaaaaataaaactgtccatgtttgcgttaaagactcagaaggtaaaatcgtagttgataaaactgctaaaacatatgttaatggtgttgttggagttagattgacaaatgtgagtgctggagaatatgatgttaatgtaacatttgaaggtgatgaaaattacacttcaagtagtgtatctcaaaaattaaaaatcattgcaggagaaagtgatgatgatccaacatatcctgtcgacgaggatacggtaaccactactgctgatgcaagtagtactcagtcaagtcaatcctcatctcaaagccaatcttacacaccaagtagaagtaatgattatggtggtagtagtagcagtgatgatgatggtggtttggatgctgactatgatgaaaatggtaatgaaatgttgcctacagtagatgaagaaggaaatgaagtttcaaattaa

SEQ ID NO: 8317 - DNA, 477 bp, Methanobrevibacter gottschalkii
  source 1..477: mol_type = genomic DNA
atgagtttcaataaaaaaacaataataatatttttaattttaattagtgctttcttaatcattggaagcgtttgtgcagaaaatttaaaggattttaaagcaacaaaaatgcttaaaaaattaaccaaacaaaaaacactaactgttaaaatttataactttaaacctggtgttttatgggctccaaaagcaataaaacttaaaaacggcgacgcaattgcaggctatgttgaatataaaggaaacatgcaatttgaaaaaggtactgggataacttcctggtatatcggatctggtcttgatggagacatagaaccacaccacacaaaacttattaaagcaaaattcttctttaaaaacaaaaaaggaaaagtaaaaacaaaaacagttaaaggaaatggtggtggacatatttctacttcactaataaaagggtatgtaccatataaagctaaggtttcttataaaacatattaa

SEQ ID NO: 8318 - DNA, 1686 bp, Methanobrevibacter gottschalkii
  source 1..1686: mol_type = genomic DNA
atgaattttgaaaagtccattggtgctcatgtcatattctttgatgggaactattgtgttaaggggtataatgatagttttgcaaatttttttgacattgaagaggatttgacaggaaaacatattgatgatttagaaatgcctgctgattttgcggatttcattctttctggggaagaggaaattgaattatcattaaatgttaaaaatcgctggattgatgtaaagaaagagacaattaatactaatggtgctttaattggtcatttctttattctggaagatgtaactgatcaaataattaataatcaggaattaattgcacttaattctgttattggggatgtacaggatgtcatgtccatgtcaattcattttaaagatgctgaaggtaaatatcattggactcctgagacttatgctttaattgaccgtgaacctaggcttggagatgaaaataataatatttttgattctataactgttcaaaatttggataacattgcagataatcgtcccaacatcgatgatgatgtttatgtggaagattttacaattattactgaatcaggtaaaactaaatatctgagaggcactgcccacaatgtttttgatgatgagggtaattttctccgtcttatcatgactgcacaagatcttacaaaagaacatttgcaagaggcaaacctaaaaattttagatagtttaatgtctgatagtaattatcaacttggtgttggtagttatgttcatgagataggcagtgattatttttgtatttcgaaggaggcagttgatattgctgaacttaatgaaaatgaagattcacacatgcagttaaaaagccttagtggaaattttgttgattcggatgcctttaaaaaagaagtgggcaaattaatatcaggtgaattggataaaattgacaatgtgtgggaatacaaatcaccaaaaacaggccaaatcaaaaaattacatgtaattaattctataaaagtcgttggtgggcgaatattttcatttggtggaataaaagatgttacaagtgaaatggaaaaacaagagaaactgaagcatcataatatggaactggaaatgctcatacgtgaaagcaaccataggataaaaaataatttaaatctgctacttagattcatatctcttgaaaaaaggtttaataagaataatcctgagaagattattgaaaatactgttggaagaatcgaatcattttccttacttcatgaaaaaatttataatgtggacaattttaaggatattaatgttgaagaatacttgaattctttaattagcgggttgtattctatatttggtgatgacggcagtattaattataattcaaacaataatgaacttatattgaacagtgaaatacttgttccattatctttgataatcactgaacttgttattaattcaatcaaatatggttatgttgattatgagttggataataaagcaattaatgtctctgttgataaatttgataataaattaatattgcattactctgataatggtaagggattgcctaaagactttaaccctcataaaagtattggtcttggttggagaattattaattctttaatcagtcagttagaaggggaatatgaagtatttaatgatgatggaatgcattttaaattaacatttaatatttaa

SEQ ID NO: 8319 - DNA, 429 bp, Methanobrevibacter gottschalkii
  source 1..429: mol_type = genomic DNA
atggatgctgctaaatataacatcgaggaaaatgttatgaaaacattaaatgtcgttgcagcaattattaaaaaagataataaaattttagcaaccaaaaggggttatggtgaattcactgatatgtgggagtttccaggtggaaaaatagaaaataatgaaacaaaagaggaagctattataagagaaatcaaagaagaacttgactgtgttattgaacctacaaaatttgccttggacttagaatatcaatatcctactttttatcttaaaatgagttgttttgaagctataattaaagaaggaactccaaaactcatagaacacaatgatgcgaaatggttaactaaacaagaattggattcaattaactggattccagcagatattcagataattgactatttaaaagaaacaatgagggattaa

SEQ ID NO: 8320 - DNA, 150 bp, Methanobrevibacter gottschalkii
  source 1..150: mol_type = genomic DNA
atgattgataaaagattggaacttgcaaaaaataaaaaagttgaattagagcttaaacttaaaaaagttaaaggaactccaagagaagaagattttaaactccaaattgaaaaactagaacagttaattgaacatcttcaaaaagagtag

SEQ ID NO: 8321 - DNA, 2958 bp, Methanobrevibacter gottschalkii
  source 1..2958: mol_type = genomic DNA
atgaatatggatgaaatcttaaatggtgcaagaactgcttttattgatgaaaaactggattccagcctagatttcagaccaaaactattgcataatggcaaagaaacaaaagtcattaattcaattcgtgatgaacttcaaaattgtgatgaatttataatatcctcagctttcatcacattaagtggtttgactccccttttagaagagtttaggaacttggagcaaaaaaatatcaaaggtaagattctcacaactgattatttaaattttacagaaccaaaagctttaagaaaacttcaacaattcggtaatattgaagttaagatttacagtcaggaaaaagaaggttttcacactaaaggatatatttttaagaaagatgatgtttataagggtattgttggaagctctaatttaacaatgaatgcattatctgtaaataaggagtggaatgttgaatttacttctctaaaagaaggtgaaatgttatctgaaattaaaagcgaatttttcgcattatggagggaagctgatgatttaaacaatgttcttccagaatatgaaaaaatttacaatgacaataaacgtttcactgatttaaggaaaattacagctgaaattaaaaagaaaaatatcacattaactccaaatattatgcaggaacagtttattgaaaacttaagaaaactcatcaaacaaggtgaaaagagagctattttggtatcagcaacaggaactggtaaaacatatgcatctgcttttgcagtaaatgattttaatcctaaaaaacttttatttttagttcacagggaacaaattgcaaaacaatcaattaatgcttataaaaatgtctttaaagatcatgaaaatttcggattgttgtctggaaattccaaagattatgataaaaattatcttttctcaacaattcagacaatgtcaaaagatgatgtgtttagaagatatgataaaaatcattttgactatattattattgatgaggttcacaaagccggtgcattaagttatcaaaagattttccaatattttgagcctaaattctggctggggatgactgcatcacctgagaggactgatggatttaacatctatgatctgtttgataataatattgcccatgaaattagacttcaggaagctctagaagaggatttgttatgtccatttcattactttgggattgctgatgttgagttttgtgatggtgaaattgatgattcttttgaagactttaatttacttgcatctgataaacgtgttgattatctgatagaaaaatcagagttttatggatattctggcgatagaagaaaagcattggtattttgttctagaaaaaaagaagcagaattattgtcagatgaatttaataggagaggttataactctactgtattaacaggggatgattcacaggagaaaaggattgaagctattgatagattaactaatgatgaaaatccggataagttggaatttattttcactgtggatattttcaatgaaggagttgatattcctgaaattaatcaggtattgcttgttaggccaactgaatctccaattattttcatacagcaacttggaagaggtcttaggaaatatgaaaataaggaatatgttgttataattgattttattggtaattataagaataatttcatgattcccattgcactttcaggagatagatcgtatgataaggataaaattcgtaaatacttaatggaaggaaataaaattattcccggtgcttcttcaattaattttgatgaaatttccagaaaacgtatatatgagtcaattaataattcttctttttcaaaaattggcgtatttaaagaaaaatacaataatttaaaatataagttaggtcgtattccttcattgcatgattttgcaattaacggcgaatttaatcctgaacttatcttaaatcactccagatttgattcatatcataattttttagattatgttgataatgattataattcaacactaagcgatgcagaagttgcatctcttaaattcatttccaaaaagttaataaaaggaataaggcctcatgaacttgttattttaagttgtcttaaatttaataattatttcactgttaatcaaattgaaaagtatttaaatgagaaatatggtctttcaaatcaatttaaatctattaggaatgctattaattatttaagtatgaatttttacagaaaagagacaagtgatgattatcaagccaatactgtcactagttttgtttcaaaagaaaaaatcattgattatgaggacattttctttaactttgatgaagaaatctataatgatttagaaaataataaagattttaaatttgagatttcacattatttcaaatcttgtttaatcaatccagtttatttaaatcattttgaagatgctgtaaaatatgcgatatttaaatatgctcaagtttacaaaagcaatgataaatttagattatatgagaaatactcaagagaagacgttttaagacttttaaattgggaaagattcatgaatgctcaaaatattggaggatataaagtcaaatacaacacttgtccaatttttgtaacttatgataaaaaagatgatatttcagaaactattaattatgaagatcaatttttatcaaaacaactctttagctggatgagtagaaacaatagaaaaatatcaagttcggaactagagccaattgttaactacacagatttggatattgagttatttatccagaaaagtaatgatgaaggcattgaattttattatgttggtaagctaacaccattagaacatgatcagctttatcgtgaaattgaaggtaaacaacatccaattgttaattttaaatttaaaattagtcctgaagttaaagatgaactttacagttattttataaatgattaa

SEQ ID NO: 8322 - DNA, 1182 bp, Methanobrevibacter gottschalkii
  source 1..1182: mol_type = genomic DNA
atggcaagtttaccattaggaaatgacaatgatttagatgacacacagttctataatagagtagaggagatttcattcatatgtgataatttagaactaactaaaaaaggatcaactccaacaatactgcttacaggcattagaggagtaggtaaaactgcattaatgaaaaaattaaaaaaagattttcaaaatgattatttagttgtttatatggacttatcagcaatggataaatttaaaaaaaacgaactaacccgttttagctttatgaaattattttacgagtctattatcaaagcattaaggcattcaaatatcataactattgatacacagattttaaaatattttaaaacacgcaattttaaattagataaactaaaatcagttgataaaattcccatccctattcttaaatcagaagaggattatgcaaaattcactacttttgtaatggatttgccccaacagatatatgatgattgcaaagatcatattgatggtgttttaatatttatggacgaatttcaaatgttaaaacaacttgatgaagatgttaacggatttttatggtacatcagaagtgttattcaatcacaaaaacatattggttatattttttccggaagcatgagcgttaaagatgaattgattgcagatattgcaggtcaaaaaggagcttttggaggtagaatattaaattatgaacttaagacattcccatttaatacaacagaaaattatttaaaagaaaaagcaaactatcttaaatttactgatgatgggattgaaaggttttataaatgtacaaatggaattccatattatgttaatagttttgcaagattattacctcctaatgaagaattaaatgaaaaaaaaataatttctgaatttaaaaaagccttaccttatttattgattcatttgaccaatgaatggtataaactaaataatcaagaacaaagaattatcactgctcttgttgaaaaaccattgaaaagaattgaaatagcaaataaattaggagtaacaagtggagccattggtgcttccctaaaatcattgcaaaataaaactttaatagaattagataaagatggttatatgatatatgattctattttcaaagcatggctaaaaaaggaatacgaagaaaaaggaaattatccatattaa

SEQ ID NO: 8323 - DNA, 939 bp, Methanobrevibacter gottschalkii
  source 1..939: mol_type = genomic DNA
atggataggaaatatctgcgggaaaataaaaattcttttaatatagttaaaaattctaaaatttatgcaaaaataactgcatatgaagatactatttttattagggatttattgatcaaatatgattggaatttggataaaatgccatctattattaaaaacgaagaaaagtatttggttttagccgtaattgatgaaaaattacggttacttgcgaaatacaatactcgacctgattctcaagtaataacaaagcttattagaaaattcaaaagaaatccaaataattcagcatatggtttaaatattacaaaagtatttgatacatatgtaattaaaaagcagattgcaggtgatgagtatatatttggatattatgataatttagatgatgctcaatttgttagaaatattctgttggataataattgggatgtaaacatatttaatgaaatagaatttgatgatgaaacacttaattacagagttattagtgtaattgatagcaatgtttatgttttaggcaattttaaagctaaagatgaaatcgatattaaaaagattcgtgaggaatttttagccaaaatatcaaagcataaatatggtcttgcaagttatcctcacttggatcttctaaaagataaaatctctgaattggaagaaaaattcaatgtcaaaacaaaggatgggatatggtcatttgagaatatcagtgaaaatgaatccgttttgaatcaaattatttttaatttaactccatttcaacaagctgtttttgatgcaatagataaaaatacatcttacgatcaaattaaaaaatcattaatcagatataattctaaaaattttgataaaaagatattgagaaatttagatggtttaattgaattaaagctcatagaaaaaatagatgatggttattctaaaacaaatttataa

SEQ ID NO: 8324 - DNA, 189 bp, Methanobrevibacter gottschalkii
  source 1..189: mol_type = genomic DNA
atgcccgtaattacaatagctggaaataaaggaataactatagaaaagaaaagagaaatggtcaaaaaagtatctgaagtagtatctgaagcatatggtctgccaatagaagcaataaccgtattaattcaagaatatgactttgatgatattggagttgctggtgaattgttaagtgacagaaaataa

SEQ ID NO: 8325 - DNA, 459 bp, Methanobrevibacter gottschalkii
  source 1..459: mol_type = genomic DNA
atgcttggtgaaagagaacttgttaagttatttccagacttcgctgatttagtacagccttctggaattgatttggaattagataagatatatacacaagaaagcggcgggtctttaattgataatgaaaaaaacttgcccgaaattaaagaaatggatggaggcatctacactttaaaaccacatactgcatatcttgcaagtattaaaaggaaaattaaaattccaaaaggatatgccatgctttatcttccaagatcaacacttcttagatcttttgtttctgttcaaacagcagtaggtgatcccggattttatgggactctcatgttcatgatttacaatcatggggactatgaatataaaatcaaatcaggggatagaatcgctcaggctgttgtatttcctgttgttggttctggtgaatataatggatcttatcaggaggtggaagagtga

SEQ ID NO: 8326 - DNA, 1536 bp, Methanobrevibacter gottschalkii
  source 1..1536: mol_type = genomic DNA
gtgaatgtagcagataatattgttaaaattcttgaagaagaaggaatagaaaatatcttcgggatacctggcgagcagataatgccagtttataaagcattatctgaatctaacattaatcacattttaacaaggcatgaacaggcagcagctcatgcagctgatggatattataggtcaagtggcaagattggtgtctgtattgcaactgcatctcccggtgctttgaactttacaatggcagttgctactgcgtttaaagataatgtcccattacttatattgacgggggataatgaattaaaatacagggggtctgatcattttcaatccactcctcaagtagatatttttaaaaacataactcgggcatcttacaatcctttaaatggaactgaggcaatgtatgttttaagggcagctatttatgagcttaaaaccattccaaaagggccaattcatattaacttatcaaaagatatattgcttcaggaagatttcgatgattttgagttatgttatttatgtgaggaggatttgtcaaatatatctaaagctcaagagttaataaatgcatcagaaaaacctttgcttatattaggtgcaggtgcaatttcacaaaaagaaaacattgaaatgcttgcacatatgtatcaaatcccagtcactacaacatttcacgcaaaaggaattatctcagaagaagatgagataaatttgggtattatagggatacgttccacaccaaggtcaaaatatgcaattgaaaatgcagattgtgttattgcgttaggtataaaagcatcagaaaggactttacccgaaatcccaaagaatttgattcatgtaaatattaataaagatgttttaattggtaattgtccaattcagggaaaggttgaagattttttacttaaaattagctttaaaaaagctgaatggttatgtgaaattttagagattaataataaaatcgaaatcgaaggtttggatgtagattttaaacctcaagcatctattaaacgaattttagacaaatttaatgataatatcattgcagcggatgcaggttcacacactacttggacaacacttcttaaaaaatctttaaaaccgggccaattattgttttcaggatctatggctccaatggggtatggtcttccagcagctattggtgctgcaattgcaacagatgaaaagataatagtaatcaatggagatggggatttccatatgaatcttcaggaattggctactattcgcgaaaataacttgaatataattatattcattttaaataattcagaatatgggattatacggcaatggcaggaatccatatatggcatgaaaccataccaagttaaattaaataatcctgactttacaaaattagcttcaagttatggaattgatgctattaaggtagataatttagctgatttggaactaattctagaaaaagagttaacaggaccccttgtagttgaagtaattgtagaaagtgaggacattccattacctaaaaattaa

SEQ ID NO: 8327 - DNA, 258 bp, Methanobrevibacter gottschalkii
  source 1..258: mol_type = genomic DNA
atgaaagaaaatatcaaaagtttcattctagatattgcaaacattaaagaaattattgaatatgatttttatgaaacctgcggttttacattcgtgtttaaaagtgaatttctcaaagtaaaaaatcaaataaattctgcaaccattgcacctattggaataatttattatgaaaatgaagaatattattttgccccgttagccaatgatgttaatgttgacatcattgtcaaaaattatttgaaatttaaaaattga

SEQ ID NO: 8328 - DNA, 558 bp, Methanobrevibacter gottschalkii
  source 1..558: mol_type = genomic DNA
atgattattttaataatcttcttttccattattgttttactctattttggtgttaaaatatcacttatttatgataaaacagacagtaaacttgaaggatgtttacaaatatcaattttaagaaaaattaaaatatacacattaaacctctcatcattaaacaaagataaaaaaaatgatgaaaatgaaaaaaaaacaaataacgatataaaacaactatttaaactacttaaaccttgttttggaccttttaaactatttttaaaatcatttatgaaatgtattaaagttcaaaatcttgaaaatcatctcatttttggcatggactcatacacagatacggcaaaatatattggatacatttggagtttcatcataattataaattcttctcataaaaatgcaaaactaagtgctgaaccttcatttaatggaattgtttttgatgtaaatggcattaatgaacttgagataaatatcttaaaattaatccccccagttttgagattaatttctaaaaaagaagtaaggacattaatcaaagaggttaaaaaatga

SEQ ID NO: 8329 - DNA, 405 bp, Methanobrevibacter gottschalkii
  source 1..405: mol_type = genomic DNA
atgtctgaaaatataaaaacaacagtagaagaattacgtaaacttattaatgtagaaaatgttgttggacaacctattgaaaccgaagacaaacttctaatacctgtaatgagaatgggcgttggatttggcgttggggaaaatatcttaggtgctgacaaaggtgatgccgcaggtgctggcgctggagttgaaccaatttccatggtagtaattcctaagaaaggaaatgattctgaaggagttcgtgtgctcaacttaagtaaaggaaatcaaaccaacaaagcattatccgatctaggtttattaataagtgatttagtcaaaaattatattaataatgatgaaaaaattgacgaatcagaatacattgaaccagaatttaccactgctgatgatgaataa

SEQ ID NO: 8330 - DNA, 1143 bp, Methanobrevibacter gottschalkii
  source 1..1143: mol_type = genomic DNA
atgaacgaaactttattaatgcttccaggtccaactacagtacatcctagagtgcttgctgcaatgtctagagctgttgttaaccatagaggagctaaatatggagaaattttatcagaaactaataaattaatggctgatgttttccaaacctctaatgatgcatatttattaacaggatctggaactgcagctatggaagcaggtatcagtaataccgttgcttctggtgaaaaaatgctcaacattgtgggaggaaaattcggtgaacgtttcatgaaaatcgctcagacccatggaattgatgcgcaagaattagcagtagaatggggaactgctgtaactcctgaagcaattaaagaagctttagatgcagatgaagatattaaagcagtatctgtaattcacaacgaaacttctactggagtagctgcacctattgaggaaattggtaaagtaatgaaaaattacgatgcattatacatcgtagatactgtatcttcccttggaggagattatgtagatgtggacaaatttggaatcgatgtctgcgtaactggttctcaaaaatgtattgccgcaccacctggaatggccgccattactttaagtgatgatgcctgggctgctgcagataaaattgactcacctacattctacttagatatgaaagctgcaagaaaaagtggaaacaaagttccacctcaaactccatacactcctgccgtatcattaacctatgcaatgaacgaagcattgaatatggttatggaagaaggacttgaagctagagttgcacgtcatcataaagctgctgaagctagtgtagcagctgttaaagcattaggtttagaattatttgctgatgaagcagtatcatctgcaactgtaactgccgtaaaaatgcctgaaggaatcagtgatgatcaattcagaggaaccacccgtgataaatatggtgtagaattagccggtggacaggatcatctaaaaggaaacatcttcagaatcggacacatgggaaacatttcttacaaagaactaactcaagcgtttgctgctatcggtatgaccttaaaaggtttaggtgtaattgaagatgctggtgctggtgtagcatccatcgcagaatcatatttatga

SEQ ID NO: 8331 - DNA, 675 bp, Methanobrevibacter gottschalkii
  source 1..675: mol_type = genomic DNA
atgaattttttcagttggggtaaaataaatttcaaaagaatgttcagatatgctgttggtctgtttgtcatgaacattggaattgcattatcaatcaaatccaatttaggttcaactcctgttgtggcagtgccttatgctattagtttaataacttcagttgatctcggttattgcaacatgatatttcaaggttttttagttttagtggagttaattcttcttggaagagcatttaaaccaaaacatttcttacaatttttcgttggagtaatattcggaatatttacttcactttcaatgtttatattgagttttttgcctcttgctaatagtttaacctttcagattattttcttaatttcaggcattgttctcttggcatttggtttattcttatatgttccaatgaatgctgttccagtttccgttgatggtgtaacacaagcattagctattttaactaatcaatcatttgcaaaaaccaaaattatttttgatatatctatgataagcatctcattgattgtattattcaccttcaccggacatattaatgggagtgtgggtattgtaactataattgccgcagtctcaattggagcaactgtgaaattaattaatattgtttatgctaagatatctggaaatgaagctgatttaaagaaaatgtag

SEQ ID NO: 8332 - DNA, 651 bp, Methanobrevibacter gottschalkii
  source 1..651: mol_type = genomic DNA
atgtgggttaaaagaatattgtcatttgttattggtttattaataatgtcattcggtgttgcattttcaattgtgtcacttcttggaacaactcctataagttctatttcttattcgctggcattaattaccaatatcgatattggaattacaacattcatattcaatgcagcattaattgttatgcaattattaatcttaagatcaaaattccataaaaaaagattgcttcaattgattaactgtgtgttattcggatactttaccgatgtagcactttactttgttgcatttattccatttgactcatcattatggatgtctgttttattcttgctcataagtatctttttaactgcatttggaatattcatttacatgccggctaatatcgcaccacttccaggtgaaggatgtgttgaggcaattgcaattgttactggatggagattttcaactataaaaattggttttgatgcttcaatggttgtgatgtcattaataatgtgcggattatggtatacagatatgtttggtgcagtttacattggaacaattatctcagccatcatggttggttttactttaagacaaattaataatatatatgctcacattactggagctcaaattaatgttgtaaataaataa

SEQ ID NO: 8333 - DNA, 720 bp, Methanobrevibacter gottschalkii
  source 1..720: mol_type = genomic DNA
atggaattcggactctgggaaaaatattataaagacataattgaggattttggattttcaagaagtggtgatgagaaatcagcaaaattactcgatgaaattttatcaacagaaggctgccttacattagatgatttatcacaaattgtaggtttttcagataaattcattgtatttggagcaggaccatctctaaaaaatcatgttttaatgttaaaggaaaatcatgatttaaaagattatgttttggttgcagctgatggtgcaacaaccgctttaattgaagagaaaatctctccagatattgtgtgcacggatttagatggaaatgttgatgatatacttcttgcaaatcttagaggggcaaacatggtaatccatgctcatggagataatattgataaagtagctacactgtcctcacttttcagcaatgtccttggaactacacaagcacagcctatagggaatctttacaactttgggggatttactgatggggatagagcattattcctttcagttgcacttggggcatctgaaattatacttgcgggaatggatttcggagataaagtaactaaatattcaagaccggaccttgaagttaaagttgagggtgctgatgaatttaaacgtaaaaaattattgtatgctgaaaaattcactaattggataactgaaaatgaaccagttaatgtgataaacttattagaataa

SEQ ID NO: 8334 - DNA, 1110 bp, Methanobrevibacter gottschalkii
  source 1..1110: mol_type = genomic DNA
atgggaatcgaagatattttaatgcatgatgaaagtctttttcaaaatataaatgcttttgatccagattatgtacctcaagactacaatttcagagatacacaaatggaagcaatggcaatatcaataaggcctgcaatgattggtggtcaaccgtcaaatgctattgttttaggttcacctgcaaccggaaaaacaacagctataagaaaggtatttgaacttgtcgaaaaaagcacagaaaaggttgtttgtgtttatattaactgccagcttcacacaactcgttttggaatattctcacaaatttataaaaagatatttggacatattccacctgaaactggagttccattctcaagaatttatgatcaaatcatgcagaatcttcagaagaataataaatctcttgttattgccttagatgatgtcaattatttattccaatcaaaaacagctaataaagtattttatgacatgcttagggcatatgaagaatatcctggagttaaaacagctatttttgcaattttgtctgatttggaatttaaatatgcatttgataaaaatgtaaactcagtttttattccgcaggaaattaatttccccctatatacttactcagaaattgaggatatattaaaaaatagggcaaaagcaggtttttttccaaatgtactgcctgaggatatattggagcaaattgcaatgtatacttatgaaaatggagatttaagaattgggattaatcttttaaaatcttgcggtaatttcgcagaagcaagtgctagtcgtgaagtaacacaagaacattttgaacaggctattgattcattagtttcaattaatattcgtgaaacattaaattcactaaacgatatggaaaaagatcttctaaaagtaattagtggttgggaaggtgtttgcaaagctggtgaattggctgaaatgtatagggaaaaaacaaattccagttatgcttcttttaaccgtacattggataaattagaatttgtaagattaattgatacgaaatttacaggaaaaggggttagaggaaattctagagaaattatattgcgttttaaccccgacgaataccttatttaa

SEQ ID NO: 8335 - DNA, 180 bp, Methanobrevibacter gottschalkii
  source 1..180: mol_type = genomic DNA
atgttcgaaaataatgacaccacaattcaagtagatttaaggaaaaaaaatagtttaaaagaagaaatcatgtataaaaatatcgatgttcaatcttgcatggtaatgcttgtagtaatagcagcattacttttatctgttatttctgttgtagcagcccaaaatccatacattatctaa

SEQ ID NO: 8336 - DNA, 414 bp, Methanobrevibacter gottschalkii
  source 1..414: mol_type = genomic DNA
atgaaaaaatttgaatattttgaagtaactgcggatattggttttaaagcttatggaaaaaacttaaatgaagcttttgaaaatgcaggtttagctatttttaatataatttcagatacaaattatataaatccgacaaaagaaatatcatttgaaataacctcagaagataatgtatctatgttgtatgattatttggaagaattattgttctatcatgaagtggaattcatgttattttctgaatttagtgttgaaatttcagaaggattctcattaaaagcaacaataatgggtgaagaaattgattgggataaacacgagaggaaatctgaaattaaagcgataaccttccataagatggaagttttagagaccaatcccgtaaaactccaagctattgttgatttataa

SEQ ID NO: 8337 - DNA, 321 bp, Methanobrevibacter gottschalkii
  source 1..321: mol_type = genomic DNA
atgaaaagaactagaatcgtatcaagaaattttgaaatggtacttggtattataggatcaattattgggtcattctctggttctattttattatttttaggaaccttttataatgtccctactccttttttaggttttgtagctataattgcgtcctttttaggattagcttcaagtgtttatgtcaaaaaggatactgaaattgctggtgtaggattcataatcgcaactatgtttgttattgtcggatctgaatatattaatataataagtgcaatttttttacttgttgcaggtgtatccgcattatttaggaaataa

SEQ ID NO: 8338 - DNA, 1449 bp, Methanobrevibacter gottschalkii
  source 1..1449: mol_type = genomic DNA
atgagtattaaagatgaaattaaaaaaattaaagataatgtttatgagattccgggatcttttaataaaaaaatgagggcttctggaaggttttatattgctgatgaatattttgatgaacttgaagagggagctgttgaacaaattgtcaatgtagcttgccttccgggtgttcaaagatattccattggtcttcctgatatccattttggttatggatttccaattggtggtgttgcagcattttcattaagaaatggaatcgtatcacctggaggagttggatttgatattaactgtggagttagattaattaaatccaatttaactattgatgatattgatggcaaattagatgagcttacagaaaaattatttaaaaacattccttctggtgttggaagtaaaggtaaaataagattggaagagaatgaaatcaacgatgtacttgactatggtgctgaatgggctgttaataatggatatggatggcctgaagatttggaagttctggaagaaaatggaagaatggttgatgctgattcaagtatcgtatctgaaaaagctaaaaaaagaggaattccacaattaggttctcttggttcaggcaatcacttcttagaagttcaaattgttgatgagatttacaatgaagaggtggctaaagtattcggacttgaaaaaggaatgattgtagtcatgattcactcaggttctagaggatgcggtcaccaggtatgttcagattacttaagagtaatggataaagcttataaaaaatacaaagttaacattgatgatagacaattagcctgcgcaccacttgattcaaaagaagcacaagaatatatccaagcaatggcagcggctgctaattatgcatgggcaaataggcaaatgatgactcattgggttcgtgaaaccttcgaagaagtacttggaaaatctgcaaaagaaatggaaatggatattgtctatgatgtagctcataatattgcaaaaatggaaactcacaaaatttacaaccgtgaagaagaagtattagttcacagaaaaggtgcaactcgcgcattcggacctggatgtgaagaagtgcctgaaaaatacagggcggttggtcagccagtattaattcccggaacaatgggtactgcgtcatacattttacacggaactgatgttgcaatggaagaaacatttggttcaactgctcatggcgctggaagaatactttcaagatctaaagctaaaaaagattacaatgcggatgaaattactgaagatttagaatcaaaaggtattaaaattaaagctactagtaaaaatgtaattgcagaagaagcgcctggagcttataaagacgtggatagtgtagttagggtgtctgatgaaacaggcattgctaaattagtagctaaagttaaaccgctctcagtttgcaaaggatga

SEQ ID NO: 8339 - DNA, 759 bp, Methanobrevibacter gottschalkii
  source 1..759: mol_type = genomic DNA
atgattggaattattgggggtagtggagtatatgaaattactcaaaaagctgattcatgctcaaaaaaagtagtaaaaaccgattatggtgaagttacagtttcaattttagaaattttttccaaaaaaattgcttttattccgcgtcatgctcaaggtcactcaattccaccacataagattaattatagggcaaacattgatgcattaagaaatgtgggggttactcagataatagctaccaactccgttggatcaatgaatattgatatggctccgggttcattcgttgttccaaatgattttttagatttcacacaaaacagaattaaaacattctatgaggataaggttgtccatgttgatgtgacagaaccatattgtccaaatttaagagatattttggacagatctggtgatgtaattttaggtggaacatatgtgtgcactgaggggccacgttttgaaactcctgctgagattaaaatgtttaaaatgcttggaggggatttggttggaatgactggagttccagaagtaacacttgcacgtgaaaggggaatttgttataattcaatatgtattgtatctaattatgcggcgggcatttcatcaaatactttaacgattgatgaagtcttcgatattgttagtgaaaaagaacatgatttgcttgaattaatttataattttataaaaaatgcagaagattcaccaaactgtgaatgtcatcatgcattaaatggtgctgaagtatag

SEQ ID NO: 8340 - DNA, 324 bp, Methanobrevibacter gottschalkii
  source 1..324: mol_type = genomic DNA
atgagattagctgtagtgtcttccgatggtgagaatgttgatttgcaccttggaaaaggaaaatctgtttatatttatgaatatgtggagaataaattaaattttattgaacgcagggatattgaaatatctgatgattcaaaacatcagggtggtaaagttattaaaacttgtgaagactgtgatgttttaatttctcttcaatacggatttaaatctaaaattaaagcggatgatgtggatttaaagctggttattgatgaaggtccaattgatgaagttctacaaagatatattgatcattataacttcatgcataaataa

SEQ ID NO: 8341 - DNA, 558 bp, Methanobrevibacter gottschalkii
  source 1..558: mol_type = genomic DNA
atgtctaaatatataattgttaccggaagcccacgtgtgggagcaaattcagatgctattgctgaattcatcaaagagtcattaggaactaatgatgtcgaaatttggaatatatatgaaaaagattacacttactgtcatgcagacaatgcttgtaaggaattagggcactgttcaatagatgatgatgctacagatttagtggccgatttaaaagaagctgatggtgcatttttaatctcccccatctactttggacgtttgccgggtcctgtttacactataattgacagattttatggtgtttttaaccctgctaaaggattggatgtgccttctccagataaaaaaataggttttgttctcactatgggtggggatgaagaagcagttaaaaatgccgaacctgtagctgctcaagcaggttttgcattttcagttgttggttttggagcttctgatagtgttattttaggtggcaacaacgatcctactgcatttgcaaatagtgatgaggaacaagcaaaagttaaaactttggtcgactggatgttataa

SEQ ID NO: 8342 - DNA, 582 bp, Methanobrevibacter gottschalkii
  source 1..582: mol_type = genomic DNA
atggcaaaagcaaaagcaagacgtagagtacgtgatacatggaaagaaaaatcctggtatactattaaaaccccagtgaactttgaagataaagaaattggagaaactcctgcaaaagaccctgaacttcttataggaagaggtgtagaagttactatgagagaattaactggagacttctcaaaacagtacatcaaactcagatttgaaattgataatgttgcaggtgaagttgcaaacactaaattcaccggacacaaaactactactgattatgtaagaagcatgattagaagaggaacttctagaattgatgcttctactattgcaactactaaagatggtcgcaaaatcaaacttcaagttcttgctgtaactgtaagaagagcaaaatcttcccaacaaaaatacatgagaaaagtaattgaagatttactcaatgaggcagcagctgaaaaatcattcgacgaattaataaaagttgttgtaaatggtaaattagcatctgaaatttatcacaatgctaaaaaaatatatccacttaaaagagtggaaattatcaaaagtaaagtaatcaaatag

SEQ ID NO: 8343 - DNA, 210 bp, Methanobrevibacter gottschalkii
  source 1..210: mol_type = genomic DNA
atgaaaaaaatcttccaaaatttaattttacaacccagatatgaaactaaaacaactaacaccattaatattgcaaatattggattggcagcatcatttaaattatttactgtaacatcattccccttgaatttaaaccctattgaccataaagcgaaacaagcaaaaataaataattatcaagtagcggacaataatatgtttgtataa

SEQ ID NO: 8344 - DNA, 696 bp, Methanobrevibacter gottschalkii
  source 1..696: mol_type = genomic DNA
atgtatgggataatgattaactggttatatgtaattcttttatttattttaggatttatcacttatagaagacaatccttagatttattcggttctgcagtaatgattattatgggtattgtgattattttttcagctggaaccaactggttattgttaattgttttattccttgttttatctttaattgccactaaattttctaaaaagtataaactatctttaggtgaatttgaaggaagaagaacatctaaaaatgttatttcaaatggtgttgtagcttgttttatggctgcatttggagggtattactctccatttgttggaggtttcattggagcaattgcaacagcaacagcagatacattggcttctgagattggggttttggatcctcatcctcgtttaataaccactcttcaaaaagtagatccgggaactaatggtgctgtttcagtgttgggaactgtttcaggaatcgttggttcagctattattggtattgcagcatatttcttaggaataatgccaaatccatttttagcaattttagtttcaattatatctggtactattggctgttttggggatagcattttaggagctttatttgaaaacaatgggtggcttactaatgaacatgttaatttacttgcaacaatcttcggagcacttgttggaattttactaatttaa

SEQ ID NO: 8345 - DNA, 1239 bp, Methanobrevibacter gottschalkii
  source 1..1239: mol_type = genomic DNA
atgaaaggacttattttaattatggatggtatgggtgatcgtcctattaaggagttaggtaataaaactcctttggaagcggctaatactcctaatatggataaaatggctgaagaaggaattactggtattatggattcaatagctccaggtattattcctggaagtgatactgcacacctttccatcttaggttataatccttatgaggtatatactggaagaggtccgtttgaagcaaatggggttggagtagatgttcttccaggggatattgcattcagatgtaatttttcaactgcagatgaaaatttaattgtaactgataggcgtgcaggaagaatcaaagaaggtactgaagaaatagttgaagaattaaacaaaatggttttggaagactatcctgagattaaaataatctttaaagaatccactggtcacagagcggttttagttttaagaggtgaagggctttccggtaaagtaagcgatgcggaccctaaagttgaaggcaataaacctaaagaagttaaggctttagatgatactcaggaagctaaaaaaactgcagatattttaaacaaattagtttttaaaacttatgaaatggttaaggatcatccagttaacttaaaaagaattgaggaaggaaaacctccggcaaacattgtcatccctcgtggtgcaggtgaagttcctgttgtcgattcattaaatgataaatatgaagtaaactcagcatgtattgcagaaacaggacttatcatgggaattggaagatttgcaggaatggatatcatcgaaatggaggatgtaaccggtggaatagatactaacttagaaaatattcgtgatactatcatagatcaagttaagaactccgaacacgactttttcttagtaaacatcgatggggctgatgaagcagggcatgatggtcaaactaaagagaaaaaagagttcatagaaaaagtcgattgtgttattatgggcgaattaatgaaacttgacaatgtttatatttatttaacagccgatcattcaactccaatttcagtaatgaatcattcaggagatcctgtacctgtgcttattagaggtcctgaagtaagggtggatgatgttaaagaattttctgagagagcctgtgctaaaggaggccttaataggattagaggatcagatgtaatgaatattatgatggatttaatgaattatgctcataaattcggtgcatag

SEQ ID NO: 8346 - DNA, 1338 bp, Methanobrevibacter gottschalkii
  source 1..1338: mol_type = genomic DNA
atggtagcaaaaaaactatttggaacatcaggaatcagaggaagaataggatctgaagtaacttgtgaacttgcattaaatgtaggtaaatctttagcttactatttaggtaattctggaactgtagttttaggttatgatacaagaacaactaatcagatgttggatcaagcaatttgtgcaggtttgcttgaaagtggtgttgatgttataaaaataggtatggttccaactccattagtcggttatgctactgaaaaacttgatgctgatgcaggaatcatgttaaccgcctcccataatccttcacagtataacggaattaaattatggaataaaaatggaatggcatacacttccaaacaagaaacagaaattgaaaaaatttatgcaaataatgattatatttcagttaactgggataaaataggtaagttaagtgtcaatgaagaaatcaaagggcagtatgttgatgatttagttaacctggtggatatcaaagaaggtttaaaggtagtaattgattgcgcgtctggtgcaggtagtgaaatatcacctttagtatttagaaaagcaggatgtgaagttacaacccttaactctcaagtagacggatttttcccaggtaggaatcctgaacctaatgaggaaaacttacaaacattaatgaaaactgttgtagctattggagcagatttaggtattgctcatgatggtgatgcagatagaatgattacggttgatgaaaatggtaatgtttccccctttgattctcttctagcattaatatcaaaagaatttgatggagatattgtaacaacagttgatgcaggattatgtatggatgaatccgtcaaaggtaaagtaataagaactccagtcggtgatgtaaatgttgctgaggcaataattgaaaaagatgctagttttggtggagaaccttctggaacttggttgcatccagacttttgcatgtgtccggacggaatcctttcaggtttaagaatagcttcaattgtttcacgagatggtaaattatctgatcttttggattcgataccatcctatccaaatatccgtgaaaaaatagtatgttcaaaagaagctaaaatcaaagtaatggaaaacatggaaaatttacttattaatgcatttgatgatgttgctgatgtaaatcctctcgatggagttagattaacatttgaagatgatagctgggtacttataagaccttctggtactgaagattatattagaattactttagaatcaagagatgctaaaagagctgaggaaatcaaagaggtttgtgtgaaaataattaatgaaaatttatga

SEQ ID NO: 8347 - DNA, 174 bp, Methanobrevibacter gottschalkii
  source 1..174: mol_type = genomic DNA
atgacaatatacgtttgtttacactgtgaatacagatttgattcagaaaaaggagaccctgcttacaacattccagctggagcaactcctgcagatatgcctgatgattgggtttgcccagaatgtgctgcattaggtattgaagcatttatcgcagaagaagaggaagaataa

SEQ ID NO: 8348 - DNA, 1308 bp, Methanobrevibacter gottschalkii
  source 1..1308: mol_type = genomic DNA
gtgaaagcaattattttatgcgctggtgaagggtctaggatgagaccattaacacttaccaagcctaaaactatgttgcctgttgcagggaaaccaatcatgcaatataacatagaatcattaagagaaaatggtattgaagatattttacttattgttcgttataaagaggaaatggttagaaattactttggtgatggtagcgaatttggagttaatattatttatcagaggcaaaaagatttcttgggaactgctgatgcaatttcttatggaaaaaacttcatcgatgatagcttgatagttttaaacggagatatcattttggatgatgagattattagtgatttcattaataaatatgatgagttaaaaccagatactttaatgcttttaacagaggtagaaaatccttctgcattcggtgtcgttgaaattgaagatggatatattaaaaatattgttgaaaagcctaaaagagaagaagcgccaagcaatttagttaatgcgggaatttatattttcaataaagatatatttgataaaattgataaaactgaaatttcccaaaggggggaatatgaaattactgattctttaactatgcaaattgaagatggattaaaagtaatgggtcataaaactgataaagactggattgatgtaggtcgtccatgggaattgattgaagttaatgaagaactaattggcaatcttaaaactgaaatcagaggcaaagtggaagatggagcccatattcatggggaagtatttttggatgaaggaagtgtaattagggcgggagtttacattgtaggtaatgtgtatattggtaaaaattgtgatataggtcctaattcttatattcggggtaattcttacttcggagataatgttcatgttggaaatgcagttgaaattaaaaattcaattattatggaaaatactaatgttagtcatttaagttatgttggagattctgtaattggttctaattgtaatattgcagcaggaactaacattgctaatttacgttttgacaataaatcagttaaaacaaaaatcaaagatcaaatgattgatagtggaagacgtaaattcggttctatcattggggattctgtaaaaacaggtattaattcaagtttctctccaggtgtaaaagtgggtcataattccactattggttctggagttctattatataatgatgtaccatctgacacaagggtgttagtaaaacaaaattatattattcaagataaaaatataaaaaatgatattcaagataagaatataaaaaaataa

SEQ ID NO: 8349 - DNA, 483 bp, Methanobrevibacter gottschalkii
  source 1..483: mol_type = genomic DNA
atggaaaatattgaagactctattgtaatatgccctggcgcacaagtatttggtgatgttgaattaggtgaaaatgtctctatatggcatggtgctgtaataagaggagatactgactcaattactattggaaataattctaatgttcaagataattgtgttattcactgtactaaaggatttccagttgaaatcggggacaatgtatctgttggtcatggtgcagttgtccatggttgcaaattagatgacaatgttttaatcggaatgaatgcaactgttttagacggtgcacacatctctaaaaattctattgttggagcaggtgctgttgtaagtgaaggtaaagaatttcctgagaatagtttaattttaggaattcctgctaaagcggttaaacaattatctccagaacaagttgaattgattcaaaataatgcggataattatgtaaaactttccaaacaatacatggaagattag

SEQ ID NO: 8350 - DNA, 1101 bp, Methanobrevibacter gottschalkii
  source 1..1101: mol_type = genomic DNA
atgaaagcaagaaaaattgtagatgaaatggattcctatgttccgggcaaatctcaagatgagattgctcaagactttaacttaaaaaaagaagatattattaaattaggttctaatgaaaatccatgggggccctctcctaaagctatggacgcaattaaacaggaaattaacactataaatagatatccggaatcacaattgggggaattggcatcagaaattgccagatactccggtgtagacgattctcaagtgattattggtggcgatggtgctgatgaaataattgatgttttagcaaaaacattcatagatgctggagatgaattcattgtccctttaccttcctatatgtattatgagtacttattaaaacaatatggagccagtccaatttacgcaagatgggatattgaaaaaaatgaactggatgttgattcaatttataatgctataactgacaaaactaaaatgattttcttgtgcagtcctaataatcctaatggcgctttaattgatcaagaagtatttattgacatcgcttctaaaaaccctaatatattgattgttattgatgaagcgtactttgaatattcagaagttactaataaagatttaatcaatgaatttaataatgtttttattattcgtacattttcaaaagttttggggcttgctggaatgagaattggttatggtcttgcatgttctgaaattattgaatatatgcacagaattaaacctgtattctctataacaagattatctttcattgcggcccttaatactcttaaggatactgaatatattgaaaattcaattaaaaaaggtattgaatcaagacagtatctatatgatgaaatttcaaaaatagatggtctttttgtatttccatctaaatctaacttcatgctaatcaatattaaagaaacaggttttacagcctcagaattagcgttagaactaatgaaacaaggtataattgtaagggattgtacttcatttaaaggattggatgagtattggattagaataagtatttgcactcttgatgaagataaaaaattcattgaaatcctaaaagaggttctaggataa

SEQ ID NO: 8351 - DNA, 705 bp, Methanobrevibacter gottschalkii
  source 1..705: mol_type = genomic DNA
atgtatataggtggaactgttatttcttccgttgaatttcatggaaatatgtcattagtcattttcatgtctaaatgccctttggcttgtagatattgtcataatgtggaacttttagaagacaatacggaatggccttttgataaggtaaaacaagaaattgattattctgctgattttttagatgctgttgtcatttctggtggagaacccctggtacaagtagatgcagtaatagaaattttaacttatgttcgtcaaattggattaaaaacaaaattggacactagcggcatatatccggataatcttaaaaagatattggatttaaatttacttgattatgtctcccttgatgttaaaacaacattttctaaatataaaaaaatcactggagctaatgtaggttttcaagttagaaaatcaatgaatttaataaatgatgcgggagttcatttagaagtaagaacaacttatgtcccaacattacatacaaaaaaagacattattaatttagtggatgacatcaaagcggatatttacactatccagcaatttagaaataaaaatgtattggatccagctttagaaaaggtggatgtcccaaatccgcatgatttggtaatgctggctcaggaaattaaaccatattttaatgggattgttaaagttaaatcaggagaatttggagaacaagtaatctaa

SEQ ID NO: 8352 - DNA, 1137 bp, Methanobrevibacter gottschalkii
  source 1..1137: mol_type = genomic DNA
atgccgattttatcattttcaagtaatgatattgatgttattacaggtaaaaaaaccagaacaattcgtaaagcatggaaaactccacttaaagttggagataggctttattgttattggaatttagtatcaaaagaaaaaatgaagatttttgaagcgtttgttacaaagattgaagacatttcttttgatgaacttaaaggtaatgatgaattggctcgtcaagaaggatttaaagattcaaaagacatgctgaaggaatttaaaaagatgtatggtggaagaattgatccttctgataaattccaaataatctattttgaaaaaattcatattgatgattggaaaggcgataaaattgatgaaaaagcaatgatttctaaaagagcagatattctatttgatagtggtaaatttgacaaatccaccatgtgttatgatgctgctttaaaattagatcctcatgatgtttatttattgaataaacaaggagataacttatcaaggttaggtagatttatggatgcaattgagtgttatgataaagcattgatgatcgagcctgataatgtatatatcttaaataataaagctattgcacttctaaactctggaaatatcaatgaagcattaaaagtaagtaatattgcttataattatcgtccaagtagtccgatagttctttattggagaggttttattttagagatgcttggaagatatgataatgctttaaaagtttatgataaacttatagttattgatggggataatcctgaggtatggaattcccgtgggaatttattaactgatatgggcatgctggaagaagctattgaatcatttgataaggcagttgaagtttgtttagatgattctgaaatggatgcttcagctattaataggatgggtaatgcttatattgatttgggaaaacttgatgaggctttggattgttttaataaagctatttctttagaaaaaaataacattgattttttacttaataaaggagtggttttaatggaacttggaaaatttaaagaagcaattgatagtttcaataaagtattacttagaaatcctgataatgaggacgcatttttcttaaaagaggaatgtttggagtatttgtga

SEQ ID NO: 8353 - DNA, 1365 bp, Methanobrevibacter gottschalkii
  source 1..1365: mol_type = genomic DNA
atgtccaacaaaaaaagattatttggaacatttggagttagaagaactgcaaatgatgtgttaactccagaatttgcaacaagattatctgcatgttatggaagtgttgttaaaggcaaaattgcagttggtgcagacaccagaacaactagccctatgttaaaagatgcagttattgctggtttgctttcagctggttgtgatgctgtagatttaggaacattgccaacacctgcagttcaatatgcagtaagacaatattatgatggtggaattatgataacagccagccacaatcctcctgaatttaatggacttaaatttttagatgaattcggtattggtcttcctgacgatattgaattagaaattgaaagtctttattttgatagtgaaccaattagagcaaattgggatgagattggtgagaaatatacaaatgacaacatcattgatgaatacattcaaacagcaatgtcccatgttgatgtcgatgcaattaaagaagctaatttaaaagtagtattagactgtggatccggtgcaggttcttttacagcaccttatttagttagagaacttggatgtgaagtaactactctaaattgtcaagctgatggatttttcccaggcagggatcctgaaccaatagaagaaaacttacaagaactcatttctgttgtaaaagaattgaatgctgatatcggtcttgctcatgatggtgatgcagacagaaccatttgtattgatgaaaacggtgcttttgtcctgggagataaaacattcacattagtagaaaaacaaatgcttaaagaaaatggtggaggaactattgtaacaaccgttgcaacttcacaagctatttatgacatagccgaagaatacaatggagaagtaatagcaactgcagttggagatttacttgtagcacgtaaattaaaagatactgatggtctttttggaggagaagaaaacggtggcctaattttccctaatttcgtttatggaagagacgccgctttaactgttgctaaaatcctagaaataatagctaaagaaaataaaacattatcccaattagtttcagaattaccagtttattattctgctaaaatgaaaactgaatgttctgatgatttaaaagaagaaataatgtccaagatagctgcagaagttaaagaaaccacagattatgaacttgacacaacagatggagttaaaatctttaaagatggtggttgggtcattatcagaccatccggaacagaaccaattttcagaagttattcagaagggaattctcaagaacaagctgatgaaatggcccaatggggaatcagcttaattaaaaaatacagagattag

SEQ ID NO: 8354 - DNA, 399 bp, Methanobrevibacter gottschalkii
  source 1..399: mol_type = genomic DNA
atgagaattacagatgaaaaattattaagaatatccttaataactgcattaattggaataattggattaattatattcacaccatcaattgaagtcaaaaaaattgacattaaagatattacaagatcaatgattgatgaaaaggtatctgttcgtggcataattacagatattaaagaatcaagttcaaaaacaaattattttttgactataagtgatggggaaagtcgaattacattaattatatttgaaaaacaagtttcagagattacttctagaaatttagatattggagattttaaaaataaaaaggttgaagttgtaggaaccataacagaatataaatctgatttagaattaattttatcgagcggagacagtttgcgcataattaattaa

SEQ ID NO: 8355 - DNA, 1659 bp, Methanobrevibacter gottschalkii
  source 1..1659: mol_type = genomic DNA
atgaaatatcaagaattggtagatgtttactcagcacttgaagcaactacaaaaagactcgaaaaaaccgaaataatttctgaatttttaaaaaaattagacacaggcacaattgaaaaagtaggattattaattttaggtgttgtatttccagcatggagttcagaagagataggaattggaggaaaattagttgaaagagcagtagcagaagccgttggaacaacacaagctactgtagaagatgctgttcgtgatgaaggagatattggtcttgcatgtattaaattatatgctaaaaagtcccaaatgacttttttctcacaaccactaacaattgattttgtattcaatagcttacgcaaactatctcagattagcggatctagatcaactaatcgtaaaattgctgttatcttagaattattaagccaagccagtgcaacagaagctaaatatttaacccgtaccattacagaagagttaagaattggcgtaggggatggagtagttagggatgcaatagcacaagcttttgacattgataaaaaagtggttgaaagagcccaaatgcttacaaatgatttttctgttgttgcaaaaacagcgaaagaagaaggcagttctggtttagaaaaacttaatttaactcccggaactccagttaaaccaatgcttgcacagcttgcaccaccattagaagaaatcattcctgaaatgggtgtggcaatttgtgataccaaatatgatggaattagattgcaggttcacaggaacaatgatgaaattaacatattcacccgtagacttgaaaatattactcatgctcttccagaaatcgttagattatttgatgaacatttgccccatgaaaattacatcgtagaaggtgaagtaatagctacaagagatggaaaaccattgcctttccaaaatatattacatcgtgttagaagaaaacataatgttgaagaagctatagaaaatgttcctctaaaagtatatctgtttgatgtaatgtattaccaagttccaatgattgatgaacctttaaaaaacagaagaacaattttagagtcaattgttgatacttcagttgatgaaatgaatttaagtaccatgaaaattggaacagcagaaaacatcaaagaaattcaagaactatttgaaacttcaattaaagaaggtcacgaaggaattatgattaaagatgcatcagaaccatatattccaggacttagaggaaaaaaaatgcttaaatacaaagcagaacctgaaaccctcgatatgattgttataggtggaacctacggaattggtaaaagaggagatttcgttggttcttacttggtagcacttagagatgaaaataatgaatttaaaagtgtggcttatgctgcaacaggtcttgatgatgcaacattagaatatttgactggcaaaatgaaagaacttgaactttcaactaaagggcgtgaaattaaagttgaaccaaaaattgttttagaaatcgcattttctgaaattgttgaatcaccagaatatgaaacgggttattctttaagattccctgttgttaaaaacataagaaaagataaaggtccgatggatgttgatactgttgaaagattaatttccatgtacaatactggaaattaa

SEQ ID NO: 8356 - DNA, 1275 bp, Methanobrevibacter gottschalkii
  source 1..1275: mol_type = genomic DNA
ttgactcaaaaaagtgaagcacaaaaaggtaatattactccggagatggaaattgttgcaaaacaagaaaacatggacataaataaattagtaaaattagtggacttaggaaaaatcgtaattccaaaaaatattaacgggcactcaaaaccatgcggtattggagaaggacttaaaactaaaattaatgcaaatattggttcatcatctaaaattgacgatattgaattagaaattaacaaagcaaaattagcacaagaatatggtgctgatgcattaatggacttatccaccggttctgatttaaaattatttagaaaaaaaattatggatgcagttgatatctgtatcggaactgttccaatatatgaagccggtgttgttacccttggtaaaaataaagaaataattgatatggatcctgatgatatatttaaagctatagaaaatcaagcgaaagaaggagtggatttcatgacgctccattgtggaatcactgaagatttagttcaaaaattaaaagattccaataggatgatgggaattgtgagtcgtggcggaacgtttatggcctcttggattaaccataacaatatggaaaatccattgtacgaaaattatgattatcttttagaattatcttacgaatatgacatcacattatcattaggagatggtttaagaccaggttgtttagctgatgcaagtgacatccctcaaattcaagaacttgtaaacttaggtggccttgttaaaagagcacaagatgcaaatgttcaagtaatggttgaaggtccaggacatatgcccttaaatcagattaaagcaaatatggaacttcagaaaaccatttgtcatggtgctcctttttatgtgctgggaccactcgtaactgatcttgcacctggctatgatcatattacaggagcgataggaggagcaatagccgcatcatccggtgctaacttcttatgttatgtaacaccagcagaacacttatcccttccaagcttagaagatgtaaaagaaggagttatcgcgtccaaaattgctgcagaagctgctgatgttgcaaaaggtcttgaatcctcatggactcaggaacgtgctatggcacaagcaagaaaagaatttgactgggaaaaacaattcaatcttgctttagataaatccaaacctagaacctatcgtgaaaaatgtgaacttgacgatgatgaaatgtgtgcaatgtgtggagaatattgtgcagttaaaatagctaaaggcgatttttaa

SEQ ID NO: 8357 - DNA, 669 bp, Methanobrevibacter gottschalkii
  source 1..669: mol_type = genomic DNA
gtgtttactataaaagttatattttttgatactgaaactacaggtcttgactgttctaggtgtaaaattattgaacttgcaatgttgacagttgaaaatggtattgtaattgacaagtatgatgaatttattgatgttgaggaaccaattccaccaaaaatatctgcattaactggaattacagatgacatgataaaaaatgagggagttagcgaagaaaaagtcgctaatgatttaaaagagagactaacagatgatacattaatgattgctcataattgtcaatttgatttgcaatttatttattatttattaaaacgtcattttccaaatgaagcggacaaaattgtttctaatttaaattggttggatactgtatcagttttaaaagatagaaaaaaatttccccataaattaatcgatgctgttaagcattataatattccggaagttaattttcatagagctattgatgatacaaaagcattatataaagtaacattagcaatgaaaagtgaaagggatgatttaagagattatattaatatttttggttataatccaaaatacggtgtaagcggaagaagatttgatttcattgaatataaatcacagttttatcatcaaagaattgttgcacaagaatttactttaccaaataggagataa

SEQ ID NO: 8358 - DNA, 834 bp, Methanobrevibacter gottschalkii
  source 1..834: mol_type = genomic DNA
atgagcgaacatattattgaagcattaggattaagtaaagtaattattaaagatggcaaagttattgatgtaagtgaaccccaagttgaatattgtcctctttttgatcaccacaggggaattaaaaaattaacatctgaaataatagctaaaaatataaagttcagaatagatgattttggaatgtgcatgccaaatcgccagttaagaatgaaggactttttaaactttggaatttctgaaattatgtgcacattacttgatgaaaaaataattgattctgttgtaatggttttagaaggttgtggaacattaattgttacagaatcagaacttgttcaaggaataggtggaagagtgtctggccttgtaaaaaccagtccaattcctgaattaatagataaaattggtaaagaaaatattgttcaaccagaaaccgctgaaataaaccaaattaaaggattagaacttgcaattaaaaaaggttttaaaaatattgcagttacaataaccttagcaagtgatattgatgaaattgaaagaataaaatctgaaaaccccaatgtgtccatctatgtttttgtcgttcacacaactaaaagaaatgctaaagatgctagaaaattatttgatggatgtgatgttataacctcttgtgcatccaaatatgtgcgtgaaatcggaaaaaaagaaagtataaaaacagttggtcaatccataccaattttcgcacacaccgaagatggaaaaagatttttagaaatgcgtttgaaaaaaattggtggggaaaaacctaaaatagataatccggatttgccatacccgttaatttaa

SEQ ID NO: 8359 - DNA, 2202 bp, Methanobrevibacter gottschalkii
  source 1..2202: mol_type = genomic DNA
atggcagaaaatgaaattactctaaaagttgcagaagcaatttcacaaaaagatgtaggtcagggcgtggcacgacttgaccctaatgttatggatgacttaaatattcatgaaagagatttaatcgaaatcataggtgaaaaaagaactgccgcaatcgctcttccttcacaaaccgacattggacttgaagttataagaattgatggattagtacgtaaaaattctggtgcaactatcggtggggaggttcaaattagaaaaattaaggcagtagaagctaaaaaagttgttttagccccaattgaaaataacatccgtgtacaaggagatgttcgtggtttatttgctggaaaagtaatggtgcaaggagacattattggatctcaaattagagcaccaaaaccaagtatgaatatgggttttggtagcttatttgatgaattaatggatttcacaccagcaatgaaagaaattaaattcgctgttgtatccactaaccctaaagatattgttattgttggtccaaataccgaagtacaactttacgaaaccccagttgatgtaagtaaaatagaaggtgtaggaaaccttgttgatgtaagctatgaagatatcggcggtcttaaagaagaagttaaaaaagtaagagaaatgattgaaattcctctaaaaagaccagaactctttgaaaaattaggtattgcacctccaaaaggagtattgatgcatggtccaccaggtactggtaaaacattactcgctaaagcagtagctagtgaaagtgatgctcatttcattgcaataaatgggcctgaaattatgagcaaatatgtaggtggatctgaagaaaacttaagagaatacttcgaagaagcagaagaaaatgctccttcaatcatatttatcgatgagcttgatgcaattgcaccaaaaagagaagaaaccaacggtgaagttgaaagaagaaccgttgctcaacttcttactttaatggatggtcttaaatcccgtggccaagtagtagtaattggtgcaaccaacagaccagattctcttgaccctgcacttagaaggccaggaagatttgatcgtgaaatagaaattggagtaccggattctgaagaaagaaaagaagtgcttgaaattcacacaagaaatatgcctctctcagaggatgtcgacctcgataaaatttcaaatacaacccatggatttgtaggtgccgatcttgaatccttatgtaaagaagcagctatgagagttgttagaagaatcttacctgaaatccaaaacgatgaggaaattccaaaagaagtgatggaaaaaatcgttgttacaggcgatgactttaaaaatgcgcaaaaagaaatccaaccttcagctttaagagaagtacttgttcaaattccagatattaaatgggatgatataggtggtcttgaagacgtaaaacaagaacttaaagaagctgttgaatggccattaaaacacccagaaacattcaaacgtttaggaataagacctccaaaaggaacattgctttatggaattccaggaactggtaaaactttacttgcaaaagcagtagcaagtgaaagtgaagcaaacttcatttcagtgaaaggtcctgaacttttatccaaatgggttggagaatcagaaaaaggtgttagagaagtatttagaaaagcaaaacaagcagcaccaacagtaatatttttcgatgaaattgatgcaatagctagcacacgtagcggaaatgatactgatagtggtgtaactaaaagagttgtaaaccaactgttaacagaaatggacggtttagaagagcttgaagatgtttcaattattgcagcaaccaacagaccagacattttagatgctggactcatgagacctggaagattcgatagacacatacaagtcgatgaaccagatgaagaaacaagacttgcaatctttaaagtacacactaaaaatatgcctcttgcggaagacgttgatcttaaaaaacttgccaaaaatactgaaaaatatgttggagcagacattgaatcagtatgtagagaagcagcaatgcttactttaagaaaagatcttgatgccaaagaaatcccatataaatacttcaaagaagcaatcgataaagtaaaacctggatatagctccaatgaggagcaattagtccaatacatgtag

SEQ ID NO: 8360 - DNA, 1347 bp, Methanobrevibacter gottschalkii
  source 1..1347: mol_type = genomic DNA
atgaaaatcaaggttattactaatttaaaattattaatgattaaaatgaatgttggaattattggaggtagcgatggtttaggtaaaacaattgtctactacttaagggatgaatttgatgtatacataactggaagagatcataaaaaaggtaaagaagttgcttgtaatttaaatgttaattatattgaatcaaatactgatttagcaaaaattagtgatattataattgtttcagtaccaatacatcatacatcagatgttatacgtgaagttgctcaatttatgaaagcaggatcattgatgattgatgtaacatcagttaaagaagagccctctagaactatggaagaagtattgcctgacaccgtagaatatattccaacacacccaatttttggtccgagaacaacagagttagataaccaggttattgttttaaccgctactaaaaaaggcgaatggtacagaaaagtttatgactatctgaataaacaacatatgcgaataattgaaactactgccaaaaaacacgattatatgatgagtatcgtgcaagttttaactcatttttcatttatttcaactgcatcagctattgaaaaattaaaaatagatatttctgaaactgaagattatgaaagtccaatatataatcttatgattgatatgattgcccgtattgttgcacaaaacccttacttaacttatcacattcaatctatgaacaataatggtccaaaaattagaaatacatttgcagatgcagttattgagttaagagatgtaattaataatgaagatgatgaaaaatttgttgaaatagcaattaaagcaacaaaacatatgggggacattaaaaatgcattaggtagaagtgataaagcaattaatggattaaaccacgaatttacattattaaataaatcaataggtactgaagttggcctaaggcatatttactctggaaaaatccatgttggaattttagagaaaatagaaaataaaactgcaatattaagaaaaagaaataaggttaaaaaattacgtatagctaatattgaggttttaagcgataatgaactttatgaatggaaaattaataatctagataaaaaaagagaatcaatcagttgtgtatttccaaagagagttgatgccgaagtcatacaagatacagttatgaatatcgcaaatataattgatataaaattaactgacacatacaatggtccccaaattagtaaaaattctataagtttgacttttgaagttattgcactatcaaaagaagatattgaaaaaattaaagagttattcactggttttggtggagttataagataa

SEQ ID NO: 8361 - DNA, 4473 bp, Methanobrevibacter gottschalkii
  source 1..4473: mol_type = genomic DNA
ttgaaaaactcaaaaggcaaagtattaactgggaaaaagattacagtcaattattctggtaaaacttactcacgtacaacagattccaaaggttgcgttagttggaatgttcaaaaaaaaccgggaacatattcggtgaaatttactttcaaagcaaaaggatatcaaacaagcagtaaaacagcaaaagtaacggtaaaagcaatgccaacatcattaactgtgaataatcttgctttcacatatggtgacggcaacaataagttaaaagcgacactaaaagataaaaaaagaaaagttttagtaaataaaactgttgtttttaattttaatggtaaaaactataatcaaaaaacaaattcgaaaggagttgcaactctaacaattggagctggaccaaaaaaatacactaccacaatttcatttacaaatgcaaattatttgaaaagtaaaaagacagtaactgtaactgtcaatagtattcctacaagtttaactgtaaatgatttaacttgtaattatgatgacagcaatgcatacttatatgcaactttaaaagatactaagaataataaatttttaagtggacaaacaatcacttttaaaatcaatgataaaagtaaaaatgtagttagtgacagcaatggaaaagcagggattaaaatagaagaaaaatctggaacatataatgttgatgtttcatttgctaaaagtccatatgcaagcattagtaaaaagattaatttaaatgttcaaggagctttaacacctgaaatcaatatgcacaatggtttttataatgtatctaatttattagttgattttactggtgataatgctgagtacattgtctattgtagttttgataatggtgcttcttggtataaagataatcacagtttatcttttaatttaactacatgtaattggagcataatatattattcttcttttagaggattcaacagcacaattaaccatgttaattatgttctagatggggatgttccattggtttgggcaagtcatgggtcaggaatttataatactaattttcaggttaatttaacaagtgttgatttatttgatgaaaaaccaataatatattacaccttagatggtagtgaccctacagttcaaagcactatttactcagaacccattaatgttgtaaaaaacaccaatttacgtttttttgcaatggacacatttaaccatagaagtgaaataattagtgtttattatttcattggaaattgcatagctaatctaaacaatggaaaaacatataataccatacaaaatgcaatcaatgatgataaaacaaaaaaaggagacattattgaagttaataaagatatcataattgaaaatgttgttattaataaaaatatttatttaatttctaataatgtgatttggcaatctaacaataagtcccctataatttacatgaaaaatgtaaataatacctttattgaaggttttacttttaaatcagataatgggtcaggtattgaattaaataatgtttcaaattgtgttattcaaaataacaatttttataataaatatggatttagtattcataatgaaaataaagataatgataatctaaataatatttgtattcaaggaaataatttttatgataattattataattatattaattttgaagttttagaaaattcaaaaattattaataataattttgaatctaataaaaatgtttctgctataaccattttaaattcaaaatccaatattcttataaacaatcaatttactaatttaaactacggaattttaattaataagtcctatgatgatgttttctttggaaataatttctctataaataatattgggctttatttaaattgtgttgatagtaaagtaattagtaatacttttattaataatcattatggtatttactctataaatgcttctaatttaagaattaatttcaatcgtattgtagataattctaaattcggtgtttactgtaaaaagggtattgttgatgcaaataacaattggtggggtaaaaattatataactaataatgccttaaattcaggagatataaataataatgaaaatattggaataaattgttctgcttatttagttttgaatgtttatgaaactaattataaaattgataatggaattgtttataatgtttcttatgttgctaatttaagatcaaataattatggggaaatttttaatcaatattttattccaaattgtaaaattgtttataatatgtattgtgaatatttatatgataatggtgttgtgtataggggtgttaatagaataattgacttaatgttatctgaaggtagttctattaaagaatatagattaggatttttaaataatctaactgttacattggatcatcaaaatatctcatttttccgtgaaagttcatttaatgcatatgcaaccattgatatcgttagttctgctatttttaatggttcaaatcttgatattagtgttagagttccattggttgataatgtagattggtttagtattgtatgcagatatgtggggaactttaaaagtgagttattattaatttataatggagaagtgcgcaatacaatagttattgaaagttccttttataatgaagcaaagaatgtgttttcaaataatttttggaatgctttagatacatatcactcttgtttttcaggttatagaaataagcaaatatgcgcatatgcttatttatatttaaatgaccctagtttgaatacaattgaattattggataataaactaagtaaaagcaatatccaatttaagttacaagatgtttataatttactagctaataataatattactcttaatgatattttattaaatttaatcaagaattcttatagcttgtctgatttagagatgtcatttattgattatgcaaatggaaatttatttgatacaatgagtgtttcattaaaatatcctggaaatgacagattattttttgcatttgaagacactatcaacaaaacttttgtgtggagaggggattcttcagttagtttgtataatattcattatgtaaatggaggatattttgatttgactgcaccattccctattggcgataatggtgatttaatttatgacaatggaaatatttactccattaactataactgtatttatacatttttatcttcagattatgattgtttaaaaacctatacctttgcaaatagcaaaattaataataatgctctaaattattggttaaatcagaagaaccgtactgatgttaatggggaattatattataatataggttatatgaaagcagcttatggtagtttccttgaaggtttactagtaatttattgtaatgatgttgttgctgacgttagtgcagataagttcaatgtatcctggactcgtgtaaaccctatggttatgagtgtttgtgatagtttggaaggttattatctgactggagaatctgattttaactttggtcgtgaagtagttggtgatgtaaataatattaaatcatttaattttgcttgttcagcatcattttctattattgaaaagtatgttattgatgcattattccctaatgaaggaaataaatcttcagctatgttttctttgattgatagtttatttaataatggaactttagaatttattgttgaaggaaattatactttgattcgtagcttaaatgttagtaatgttgtttttgtttacgatgaaactactggaattttacgtgattgtattaatggatgctatggagcatattgttatgccagccaacaaactgaatgggggcataattttggtgaaaattcattgaaattagaagatttaattgttggtattataaatggaattgatacctcgttggacaatatgaataatgattggttaggttttgcaggatgtttggcaattactattggaaccggattgtttttagtttctaatcctgttggatggagtattgcaattggagcaggtttgttaattggttccggaatgttggccacatattacgcagatgatttaaataaaggttggaattataataggggtgcacacttcatatttgatgttggtacttcaatgattcccgcaggtgctccatcatctttaataaaatggaatgttggcagtttaggtaaaattgttttaagtgatggtcatttggttaggcatgttactaaaaattccattaataaaggttttgacaaatatttaatgaatttagctaaatctcatggaggaactattgattacggttctcataaaattataagatatggaactatagaatcaatatcaaatactatgtatggtacaacaaaaaaagattttatatactattccattcaatattatattaacaaatatattattggagacattgtaattaataaaatctttagcaggtaa

SEQ ID NO: 8362 - DNA, 324 bp, Methanobrevibacter gottschalkii
  source 1..324: mol_type = genomic DNA
atgtcttttgatacaaaaagaaaaaaattgataagacatactattttaataaatattatcgtatttttaataatgttatttttatcaatatttttaaataatgaagtgtatctacaatcctgtccctttattttattaatgattggaggttacatatctcgtgaatacactgaattatattttaaatataaacataaatattcatacttccaagttttttttaaagtatgtttattttcagtaattgtgagtattatttgttgtgaagtaatattgagattatatttcggatcaagtatttttttgtttattttaaataaatag

SEQ ID NO: 8363 - DNA, 333 bp, Methanobrevibacter gottschalkii
  source 1..333: mol_type = genomic DNA
atgtcatttaatgaagaaagaggctgtttaatgaaaattactatttgtatatatttgttacttttagttatttttactagtttatccatattatttagtaataaaatttttttagaattgttacccataattattctggtcataagtattgaacatgttagagattatgcatgcatctatgaaaaatattttaaacagaattattccttgtttaaactatatttaaatgtctctactattcccactattttatttgcaatatgttgtgaagcgttattgagagtttatttcaattcaagtataatcttaaaatatctaaagatattaacatga

SEQ ID NO: 8364 - DNA, 384 bp, Methanobrevibacter gottschalkii
  source 1..384: mol_type = genomic DNA
atggaaattcaaccctcacaatttacaaactcctcaacagcacctgaaattgcaatagcacttttagaaataagatacgcaaatacaaagaacaaaaatactgtaaaaatattaaataaaatcataaatgaagtaaatttaactgataaagaaatagacgaaattttaatcgaaaacaacgaaaataataaagttttcacagaaaaaattctaaaaataatagaaaaatataaagacgatacaacctcaacaatcgccagaataataggaaaacactgtaatcgtgaatcaatccaaaatgtgaaaaaaagaagagaaataagaagaaaaataacattaaatctcttaaaaaaagaaaacatattatcaaaaacaaaaaaatga

SEQ ID NO: 8365 - DNA, 483 bp, Methanobrevibacter gottschalkii
  source 1..483: mol_type = genomic DNA
atgtcaggtaaatccaatattaatgttttaaaaaatgtgaaaaaaacagctctggatgaagaaattgcaaaatatgttgcttaccataggtattatcaaagactaattgcaattagaattatcagtgaaggtcatagcattgcggaagctgcaagaataattagaaaatcatatcaaacagttcatcgatgggctaaaacatgcgaaagtgaaggactggaaggtttaaaaccgtcatttggtggtggaagaccttcaaaattaacttatgatcaactaattgaactggacaaaatcattgaaaaaacacctaatatctcaatgaaagacgtacatattcttgttaatgaaaaattcaatgtaaattatagtttaaagcaaataggcaaaattatgaaaaaattaggatacaattacagtaaagcatatccaaaatcttcaaaatctccaaaagatgctgaaaaacagttaaaaaaaacttaa

SEQ ID NO: 8366 - DNA, 1254 bp, Methanobrevibacter gottschalkii
  source 1..1254: mol_type = genomic DNA
ttggcttcatatatcatatggagtttttatattgttattattcatattgacatattagttccacttaatatattatttttacaacttttaaatcaaaaaagaagaaaaagtagaaagaaaaatttttatgactcaaaaattaatcaaaattcagatcacacaagtcgaaagagccaaagtattgtgaaacttatgaaaattataaagcaagacaccaaagaaggaattattgaaattgttccagaaacattggatgatttatggcatttatcccatataattgaagagggagataatgcatcttctaaaacaacaagacgtattcaggataatactggagataaattaagaagtgataggggagttaaaaaaacattttatttaggtttagatattgaaaatatcacttttcatttattcactggaaaactgagattaaccggcaccattacaaaaggtcctgaagatttaattcctctcggatcacatcatactttggaagttaaacttaacactccaatcaaaatcaaaaaaaggttctggccaaaatgggcaattaaaagacttaatcaagctattgatgcatctaaaaaactatctgcaattataattgtttttgaagatgatactgcaacaattggtttaatgaggcaatttggaatagaatattacggtccaattaaaggatatgtgtctggtaaaagaataattgataaaaacaggcagaaaaacattgttcagttttatgataaagttattgaatcaatagaaaaatttgattcaattcagaatattgttattgcaggtcccggttttgttaaaaacgatttttatgaatatattaaggataattataaaaatttagctaaaatatcggttatagaagctactggttctggagggcgcaatggcattagtgaagttctaaaaaagggaactgttgaaaaattaactgcagaaaatagggttgctcaggaaatgggagctattaatagattactcactgaaattggtaaaaattcatctaaaatcgcatatggtataaaacaaacaaaaaacgcaattaatctgggtgctgttagtgaacttttaattttagatactaaagtggctagtgagaacatgggtgaattaatggatatggttgaaaatatgaaaggtgaggtaatggttgttagtagtgaacatgaaggtggtaaacaattagaaagtcttgggggtatggcagctatcctaagatatgaaattgtttaa

SEQ ID NO: 8367 - DNA, 963 bp, Methanobrevibacter gottschalkii
  source 1..963: mol_type = genomic DNA
atgttttattcatcaattattattgcatttattattgtttttatcataactgcagtaagcactgctattttagatatcatttttagattttttggaaaaagaggatatctgggtaatttatatccgaatgtaagagggggaatacctcgtgctataggcataattccttttattgttttgtccttttatatgattcctgtttgcaactcaatgattttaattataggtgtttttgcattaattgatgatattttggggagaaagaaatgtgttccattaggcattgaatggggacaactttcaagaggaattggaattgttttggtgatgattacaggtattcttgaaggatattggatttctgcaattttcattgcattaatggttcaaccgcttaatatttcagatatgcaaccgggcagtgcatgtattgttactatgataatgtctgttataactatgattttcatgttaattgcaggttcgcctatggtaaatgaactgcctgcggtttatacgcctttattaatatttgttgtatgtgcagcttattctcctcttgatttttcaggaaaaataatgttgggtgaagttggaaatcatacattcggtgtagcacttggtttagctttttatctagttggaggattatggtctgttatcttgctcggattcataactgttgctttaattgcatttgttagaagaaataatttaagagtatttttcagacaaaatttaagaatattaaatccaacatttggggattatttcatggatgtattgactggtggaggtttaggagatttatttagaaaattgattcttaaggataaacgatttgatattaagaatcctttattgatctcattaggttttagaagattattgttcaatccatatgcatcacatgcaaaagaatatgctccaaaaaaaataccaaaattaggaaaaggagtgtga

SEQ ID NO: 8368 - DNA, 1053 bp, Methanobrevibacter gottschalkii
  source 1..1053: mol_type = genomic DNA
atgaaagcattttttacagttactggaagaggtttgggtggtgatgcagttgttgcacttaacaccatggcagcacttagaaaaaggggtgtggaatgcataattggtttagataaaactgcttccagtgatttatttgaaaaaaatggttttgaggtatgtaaaatttctattcctcatgctggtggacattctgcaaccaaactttctgcaataagaggtgctctgaaattagtgaccgctacttttaaagcaagatcagctattaaaaaatctaaatctgattttgtcgttgctgttttaggtggaggagctattgtaggttctttaggggcgaaatttgcaagaaaaccctgtttttctttaatttcaacacctttggattctaaagtatgtcctaaatttaattattgttatgctttaccggaattagatgcatttaggtttgacactcttcctaaaaatatggataggtcattttacccattaactgatgatattggtgatggaaaagaagaaattgctcttcaaaaactaaaagaatatcctaatttcgatgaaaataaaaaaacaattatattctcttcaggttcatcaatatttaaaggaatgattgatgctattaacatagtagctaattctactgatgaatataatttagttctaatcggacgtcccttgagagaggaatattatgatttgattgatgatgagaaaataatttatgttggtttcattgattggattaatcatttatttaaatttgctgatttaacaatattgactgatgatggagtttctcttgaagaagcaatgatttgtggaaaaccgattattgctcttactaaagtaaaatggggaagatatcagaatatggctggtgtttttaagggagctatcattgaatcggaagttaaagatgtttgtaaaagtataatgaaagcatttgagaattataattctctaaaagaaaatgctgaagtatatggtaagcaatgttttgaagctgctgatgttcttgcagataaaatattgaaaaaagttgaatattag

SEQ ID NO: 8369 - DNA, 1302 bp, Methanobrevibacter gottschalkii
  source 1..1302: mol_type = genomic DNA
atgaaaaatatcgttattggttctggacctgctggaagattagcatccctgcaacttggaaaattaggagaagatgttactttaattgaaaaaaatcatattgccggcacttgtctaaatgaagggtgcatggttgtttgtgcactaacagacattacaaaatttattgatgcgaacaaaagatttaattcacacggatttttaaaaagtcagcttgaaatatcttatgaaaaaattgttgaaagaattgttgaaacacaagaaaaattaagaaaattaaatcaaatagaaaatgaaagtgttggaaatcgcataatttatggtgaagctaatattggaaataatatagttgaagtaaataatgaaagttttgaatatgataatctacttattgcaacaggtgcacgcccttttattcctaatattaaagggaatgaatttggattaacaaataaggacatattaaaaattgatgatgttcctgaaaaattaaatataattggtggaggaatcatagctggagaaatagctaatatttactcaactttaggtagtgaagtcaatatttttgcaagaaacacatttttaaaagaaattactccaaatacaaaaaaatatatattggaaaacctcatgactgatgttaatatctatgaaaacattaatgttgtagaagtatttaaagataaagttttacttgaaaatggtgaagaactagatggaattccattttttgcaacaggaagaacaccaaacagtgaaattgttaaagatattgttgagctaaaccatgataaaaccataaaagttaatgaaatgatgaaaacttcagttgaaaatatatatgctgcaggagatgttactggaggatatcaactaacaccagtagcaagaaaagagggcatcacagctgcaagaaatatggcagggtactcaaataaaataacctacaattgcattcctcaaagtttaagtttgaacatggaagtaagttttgttgaaaatgaaaaatcagagtgtaatgaagaagacaaacaaacaattgcaatgccggcgattgcaggaccttcagcattttggaatattttaaatgaagatacaggatattcagaaattgaatttgataagagaaataataaaataaacagaattaattcaatttcaccatcttcagtaagcgatgttgcatatttatcttatataatgagaatgaattatgatttaaatgattatgatgaatttttagaaattcacccctcaactgatacaaactacaaaataataaagaacatgtggttatga

SEQ ID NO: 8370 - DNA, 273 bp, Methanobrevibacter gottschalkii
  source 1..273: mol_type = genomic DNA
atgtgtattgcagcacctgctcatgttgttgaaattaatagagaagacaactggttatatgctgactttggtggagcaagacaacaagcaaaaatggatcttttacctgatgtagaaattggtgattatgttcttatccacgctggttatgcaatagaaaaattaactgaagaagctgctaaagaatctttagaagcttgggaagaacttttagaagttcttgaggaagaagataaagaaatggaaaaagcaagaatggctgatttagattaa

SEQ ID NO: 8371 - DNA, 504 bp, Methanobrevibacter gottschalkii
  source 1..504: mol_type = genomic DNA
atgtgggaaaaaattaatgaaaaattcaaaaaataccctgcaagaattagagttgcagaaaaaatgatcgaacttggactatctttaaatgaagatgggaaaatctattgtggaaatttaaaaataagtgataaagcattagctactgctgctgatgtagatagaagagctatcaaatccactattgaagtaatacaagaagatgaagaattgtataatcttttcagcaatataatacctgccggaacacttctaaaaaatattgctaaaaacttaaaattaggagtaatcgaaatcgaagtagggtccgaaagtgaaggcatacttgcaaatactgcaaatttaatcacaaaaaaaggaattgggataagacaagcttatgccgaagatacagaacttcaagaaagtcctatactaaccattataaccgaagaggtcgtaagtggtgatttaataaatgaatttttaaaaataaaaggagtaacaagagtatcaatttattaa

SEQ ID NO: 8372 - DNA, 285 bp, Methanobrevibacter gottschalkii
  source 1..285: mol_type = genomic DNA
atgtctgaagaattagtaaataatattaaagatgctattactgtaattaatgacccacacatggggattagtattgtagaaatgggcattgtacaaaacatcaaagttgatggagatcaagctgaaattacccttaaaccaactaatcctggttgtatgagtatcactcgtattgctgctgatgctaaagtcaaagctgaagctgttgatggaattgaaaaagcgaagattattgttgaaggacatgctatggcagattccattaatgaaatgattaatagataa

SEQ ID NO: 8373 - DNA, 909 bp, Methanobrevibacter gottschalkii
  source 1..909: mol_type = genomic DNA
atgaaagtaatatgttcaagtgaagagtccctataccgtccagaagcagttagatggagacaaagaatggaaatgatggagcctcttggggatagtgttgttttattaccatgcagtatgaaaaaaccttattctaattctaaatcacatcaaaaatttaggaaaattgcacgttcatatcaagaacttattgtgacatccccctttggaatttgtccgagagaacttgaaaatacattcccaattcaatcttatgatgtaagtacaactggttcatggtcacaagatgaaattgaagaaacaggcaaattaattgcaaaatattgtgaagggaaaaatattgttgcaaatctttctggaggatatttggaatcatgtgaatcatatgttgatgatttcattaatgtttgtaaagatggaagaccaacttcccctgattcactttacaatttaagaatggaacttaaaaaacatcagaaaataaacaggaaggaaaaaacattacatgaactaagatccattgccaaatttcaatttggtgaaaatggagataaatttatccccgataatgttaaaaccaaaggaatgtatcataaaagaatattatctgatggaaaacaattagctttactaaacaaagatcatggattatatagattaaatttgtctggtggggaaattttaaaagaattaaatacacatattgttgaaattgactttgaccttacaacaaataccgtttttgcaccaggaatcattaaagcagaccctaaaatagtgccaaatgatgaggttatagttgttaaagatgatgctgttgttggtgttggaaaagctataatgaccggacatgaaatggaagaatgtcgtaatggcattagcgttaaactgaaacacagagtgaaatga

SEQ ID NO: 8374 - DNA, 678 bp, Methanobrevibacter gottschalkii
  source 1..678: mol_type = genomic DNA
atgatagatgatatattagtaaagaaattattatcacaaattgttgaaaaagaccatgaagaaaaccttaaaaaaaattttagagaaagatatccggatgaatcaacccctgatggaattgacaatcttataagagcactagaacttccgccagaagatgtgcagtatattgctaatgatattcgtgaaactgttgaaaaaaccatcagtccaattattaaatcattaatagatggtgttgaaacagatgaagaaatagctgaaaaaacaggtattaaattaaatatcgttagaaaaattttatataaactttatgatttaaaaattgccaattataaaagaagtaaagacccggaaactcaatggtttacttattcttggaaatttgaagaaagtgaattaatcaatagaattaaaagtgatagtgaaactgaattatctgaacttaatgcaaaattagaaaatgaagaacataatatgttttttgtctgtccatacggtcatgttaggtttaattttgatactgcagctgatccttattatgaatttttatgccctgcatgcggtgaagaattagaattccaagataatgctgaaattattgaaaaacttaaaaacaatattgaaattgctgaagataattataattcatttattgaaaaaattgataattcatag

SEQ ID NO: 8375 - DNA, 1200 bp, Methanobrevibacter gottschalkii
  source 1..1200: mol_type = genomic DNA
atgaatattccattttccccaccagatataagcgaaaaagaaattgaagaagttgtagcagcgttaaaatctggatggattacaacaggacctaaaacaaaagaatttgaaaaaaaaatcagtgcatactgtggcagtgacaagactgtttgtttaagtgctgcaaccactgctttagaaatgactttaagattgttaggtattggtgaaggtgatgaagtaatcgtgcctgcatatacatatactgcaacatgtagtgtaatttgccatgtgggagcgacacctgtaatgattgacagccaagaatataaagaggaaatggattactcaaaagtaagtgatgcaataactgaaaaaacaaaagttattatgcccgtcgacattgcaggtatattatgcaattatgataaattatatgaaataattgaaagcaaaaaagaattatttgcagccagtaatggcttacaaaaagcttacggtagaattattgtcttagcagactgtgcccatggtttcggtgctgttcaaaataataaaactgcaggaacacttgctgattttacctgtttttcatttcatgcagttaaaaacttaacaacagctgaaggtggagcagtgacttggaaagaacatgaaggaattgattctgaaaaattatataagcaattacagattctttcacttcacggtcaaaccaaagatgcattagaaaaaaccaaaaaaggatcttgggaatatgatattcttcttccggcatacaaatgtaatatgactgatgttcaagctggaattggacttggacaacttgagagatatgattcactgcttaaaagaagacacgaaatcattaaaaagtatgacgaaggatttaaaaatagtaaaattatatgtcctgaacatttctctgaaaacgcaacatcttctggtcatttatatttaactagaattaaagacattaatctagaacaaagaaatgaaatcatgattaaaatggatgaaaaaggaataagtaccaatgtacattataaaccgcttccaatgcttacggcatatagaaatttaggatttgatattgaagattatcctaatgcatataacttatttaaaaatgaaataagtttaccaatttattccactttaagtgatgaagaagttgagtatattattgaaaattttttagatatattaaaagaatattaa

SEQ ID NO: 8376 - DNA, 1887 bp, Methanobrevibacter gottschalkii
  source 1..1887: mol_type = genomic DNA
atgaatgtagatagttttggaaaatacagaaatttcttattgccattaatggatagtatatctgtaattttaggatattacttgatatctgttttaattactgactcttttttaatggatccgataagtgcaataacaagaaatgaaattttaattagtattatactcgcaataattattttacagacaatttttagattaacaaaaagatattcaaatattatccgttacgaaaataaccaagactatattatgtacattcttctttcaataatatctctgcttattgtctctttaattgaagatataattggtatgaagaatccttcaataaaattcaatttaacaacaggtatcctaattgggacactaaccgttgtttaccgtttagtaataagatatgcattattatcagatattgcaaataaaggaattaactacacacctgaaaatcaggaaaaagtattaatcataggtggagggtattctgcaaataatatcattaaaacattgcaaacctcattaaaaggaaagtacaacattattggtattgttgatgacaataaaaaacgtattggctattccgtagctggagtaaaaattatcggtaacagaaaagatatcctgaaaatatgtgaaaacgaagaaattgatacaatatttttcacaattgtaaatattgacaataaaaataaaaaggaaattttagaaatttgtaataaaacatcagcaaatgtaaaagttttaccggacttacgagaaatcatatcttctgaaaatttatatggtagtttaagggatattgaaattgaagatttgcttggaagagaaccagtagaacttgataataataatattaaaagtctaattaataataaagttgttttagtaaccggtggcgggggatctattggtgaagaactttgtagacagataatgattcaccatcctaaacagttattaatgttagacatatatgaaaatagtttatacaatattgagttagaacttaaagataattatccgaatgatgatatcaaagcaattattgcaaacattagagataaagaaagaatgtttgaaatatttgaagaatattcccctgaaattgtttttcatgcagcagcacataaacatgtgcccctaatggaaaataacccaactgaagcaattaaaaataatgtatttggaacttataatctcgttaatgcatgtgacaaatataacacaaaacgttttattttaatttcaacagacaaagcagttaatccgacaaatataatgggtgctaccaaaagattatgtgaaatgatcatacaagccaaagataaagaaagtgaaactgaatttgtagctgttcgttttggaaatgttttaggaagtaacggatctgttgtacctttatttaaaaaacaaattgcaaatggaggtcctgtaactgtaactcataaagacattacaagatttttcatgaccatacctgaagcagtagctttagtattgcaatcaatcacatatgcaaaaggcggagaaatatttgtattaaatatgggtgaacccgttaaaatttatgatttagctaaaagtttaatcgaattatcaggattaactcttggaaaagatattgacattacatttacaggtttgagacctggagaaaaattatatgaagaaattttaatggatgaggaaaatcttgaaggaacagggcatgaaaaaatattcattacagaacctatgaatttcacaatgagagatgttgaagaaaagttagatgcatttagagaaatcataaacaaagaaattactgataaacaaattattaaagaaactatgaaaaaatgtgttcctacttacaaggaaccaaaagaagttaacggagagtaa

SEQ ID NO: 8377 - DNA, 864 bp, Methanobrevibacter gottschalkii
  source 1..864: mol_type = genomic DNA
atgacaagctctaatgaattaaaaaatattaaacatattattaatggagattacattataattcctattgaaacaggttatattaaaccaaatgaaagtttggacgttattattaaacctgccaaagaactaatgaaagataatgattatttagtaatagctgaaacacctgtttcagtttcacaaggcagactaattgatgaatcaaaatattcaccatcattaactgctaaattcttaacaacagtttggagtaaatatttatggggatatattttaggaccggctttaggaattaaaaaaagaacaattagaaatttaagaaaattgcctaaagaaacttatgcccataaagaattaattttacaactatacggtttaaaacatgcattgaaacctgcatctgaggcaggtgttgatttaagcaatgctcctggaacttatgtttcattacttccggacaatcctgaagaagtcactaaagacttgaaaaagaggattggaaaagatgtttgtgtaatgattattgatactgatgcgacatatatgaaaaatggaaagtattttactggactccccattgcaattgaaggaattgatgccgataatggattttttggatatgtaaaaggacaattatctgaaaacatgggatccacaccattaggttgcagtgaaaaactagatgttgaaactgcattaaaaatagcaaacattgctgaagattatcaaaagtcactttccactgaaatgaaaacaatacatagcgttaaggatgtcctcggtactgaatttgatgaagtaactattgaagatcttgattcaattatccacacacctgcagtaataataaggaaaatataa

SEQ ID NO: 8378 - DNA, 570 bp, Methanobrevibacter gottschalkii
  source 1..570: mol_type = genomic DNA
atggcaagaaaatttattacatattttgataaagaaggtaatgattatactgatgagttaataatggctattaaggataaattagatattactgatattaaaagagttataattgcttctgctagtggtgaatctgcattaaaattatatgaagctattggtgatgaagttgaaattattaatgtgactcatcatgttggatttagtggttctaatgaatcagatatttcaaaaggcatgattaaaaaacttgaaaaggtgggaattaaaacatattttggaagtcatgcatttagtggtgctgcaagaggagtcaccaataaattcggagggtattctccattagatattgtagctaatacttttcgaatgttttcacatgggattaaagttggcgttgaaatatctatcatggctacagatgcgggtttaattcctgctggtgaagaaataattgctgttggtggtagaggtcatggtgttgatagtgctgttattttaactccagttaattcaaaagatttgtttgatttaaagattcatgagattatagcaatgccaagagattga

SEQ ID NO: 8379 - DNA, 1137 bp, Methanobrevibacter gottschalkii
  source 1..1137: mol_type = genomic DNA
gtgaaatttatagatgatgcaatcaaagaatccgaacaaagaatggaagaaaaagtgcctgataaactctcttccgatattgacgatgatcttatagagatgattaaaggagctaaaactaatatatttgttgttggtgctggtggagcaggaaacaatactatttcaagattaaatgaaatgggtatcgaaggagcaactacaattgcagtaaatactgatgctcaagatttattttatagtcaatctgctaaaaaaattcttttaggtagaaaaacttctaaagggttaggtgcaggtggagaaccggctgtcggtgaagaatgtgctgaagaaagtgaagatgagattagagaagaattagaaggtgcagacatggtatttgttacatgtggtcttggtggaggaactggaactggttcagcaccgatcatctctaaactctctaaaaaattaggtgcattaactgttgctgtagctactatgcccttttcagcagaaggtattaaaagaagagaaaatgctgaacaaggtttagaaaaactccaagagtctgctgatactgttattgtaattccaaatgataaattattggaagtagcacctaatttacctctaaacaaagcattcatggtatctgatgaaattttaggaagggctgttaaaggtattactgaattaattactaaaaaaggtcttgtaagtttggactttgcagatattagaagtatcatgggaggttctggaatggctatgattggtatgggtgaatctgatactggtgatagagctttagaatctgtacatgaagcattaagtagtccattattggatattgatatatcaaatgctactggtgcattagttaacatatctggtagttccgacttaacattacatgaagctgagaaaatcgttcaagttgttgctgataaattagatcctgaagctaacattatttggggtactcaaattgatgaaagtcttcaaaacactgttagaactacagttgttgtttcaggcattaaaactggttatgaggaagataattcccctgaaattgaatatgcggaagataattctgaaaataagtcagcagatgatcaattagatgatttcattgatggaattttctaa

SEQ ID NO: 8380 - DNA, 180 bp, Methanobrevibacter gottschalkii
  source 1..180: mol_type = genomic DNA
atgaatgttcaagaaaattttaacaagtttatcaaagacagtaaaagagtattaaaagtagctaaaaaacccgatggtgctgaataccgtgaattggctaaaatttcagttttaggtgttgcagtcattggtgttgttggttttgttattgttttattaggctctttaatcggcttataa

SEQ ID NO: 8381 - DNA, 471 bp, Methanobrevibacter gottschalkii
  source 1..471: mol_type = genomic DNA
atggaagatactaatagttccatatatgctcttaaaacatccgcaggtcaagaaagaaatgttgctaggcttttggcacgtaaagctagaactatagatggtataggcatttcctcaattcttgttccagaatctttaaaagggtatattttagtcgaatcttcaacaaagatagatctcagaaaccctgatttaaaagtacaacatttaagaggggttgttggtggagatgctacaattacttttgaagaagtaaaaagattcttaaaaccagaacctattatttcctctattcaaaaaggaagtattgttgaacttatttctggtcctttcaaaggagaaagagcaaaagtggttcgtattgatgaatcacgtgaagaagtcgttcttgagttaatagaggctgcagtaccaattccagttactgttaaagctgatcaaattagaataattcaaaaggaggctgactga

SEQ ID NO: 8382 - DNA, 480 bp, Methanobrevibacter gottschalkii
  source 1..480: mol_type = genomic DNA
atggctaaagatacagtcgaagttcttatcgaaggtggaactgctactcctggtccaccattaggtccggctttaggacctctcggtattaacatgatgcaagtagttgaagaaattaataagaaaagcgctgattttgcaggaatgaaagtacctgttaaagtcatcgttgacagagatactaaagattttgaaattgaaatcggtactccacctacaactgctcttatcatggaagagttaggcatcgaaaaggcttctcatgaaccaggtttagatattgtaaatgacttaccaatcgaagctgcatttaaaattacaagaatgaaatttgattcattacttgctaatgattataaatcaggtatcaaagaagttatgggaacctgtgttagtatgggattatctgttgatggtaaagacccaagagaagcacaaaaagatgttgatgctggaaaatatgatgatatcttattataa

SEQ ID NO: 8383 - DNA, 639 bp, Methanobrevibacter gottschalkii
  source 1..639: mol_type = genomic DNA
atgacacaagatgtaattaacgcggtgaaggaggcaaaagaacaatctaagccgagaaacttcactgagtccgtagatattattattaatatccgtgacttagatgtcaaaaaaccagaaaataggtttaatgaggaagttactcttcctaacggccgtggcaaagatgttaaaattggagtcattgctgatggggaactcattgttcaagctaaagatgctggtcttgacactgtaattaataaaggagatttagaagcttttggaaaagacaggaaatctgctaaaaaaatggcaaactctgttgatttcttagtggctcaagctgatatgatgccacttgttggtaggttcttaggtccagtacttggtcctcgtggtaaaatgccaaaaccagtgcctgcaagtattaaattagctcctctcttagaaagattacagaacactgtcaaagttggtgtaaaacagcaaccaagtattcaaattgttgttggaagccaagacatgtcagacgaggatatagctgagaatgtggaaactgttcttacagtcttagaccgcaatttagaaaaaggaagaagtcaaatcaagtccatgtttattaaaacaactatgggaccagtagtgagggtgatctaa

SEQ ID NO: 8384 - DNA, 1005 bp, Methanobrevibacter gottschalkii
  source 1..1005: mol_type = genomic DNA
atggctcatgttgcagaatggaaaaaggaagaagtccaagagattaaagaaatcattaatcaacacgaagtaattggtattgttgatttaatgaacattcctgctaaacagctccaagaaatgagaaaatctcttaatggcaaagctgttatcagaatgtctaaaataaatcttattgatttagctcttgaagattgtaatgctgataaaaacaatattgttgatttatctgaacatatggaaggacaagttgcacttattgctactgaaatgaatcctttcaaattatacaaaatattagaagacagcaaaacttctgctcctgccaaaccaggaaccattgcttctgatgatattattgtacctgaaggagacacaggttttgaaccaggtcctttcttaggtgaattacaacaagttggaattcctgcaaaaattgataaaggtaaaatttgcgtacaaaaagaaacagtcgttgtaaaagcaggtgaagaagtttctaaacaagtggcagcaactttatctagaatggatattaatcctatggaagtgggaattgatttaaaagcagtatatgaagatgaagcaatttatacttccgacatacttgcaatcgacgaagaacaaacattagctgacgttcaaaatgcattcagaaatgcatttaatttatctgtaaacgcagcaatccctactgatgaaactatttccactattattactctcgcatacactagagctattaatgttggtgttgcaggagcaattatgacttccgaaactgctgaaccaatccttggtttagctcaagctaaaatgttagctattgcatctgaagttgctgatgcacccggtgctattgatgatgaattagctgaaaaactttctaatgttgctgtagcagctgctccagtaattgaagaagttgttgaagaagaggaagaagaggaagaagaaagtagtgaagaagaagcagcagctgggttaggagctctcttcggttaa

SEQ ID NO: 8385 - DNA, 303 bp, Methanobrevibacter gottschalkii
  source 1..303: mol_type = genomic DNA
atggaatacatatatgcggcaatgattttacacagtgcagaaaaagagattaacgaagaaaatgttaaaagtattatcgaagcagcaggaattgaagctgaagatgctagaatcaaagctttaattgcagctttagaagatgttgacattgatgaagctatggaaactactgctatggcagcagcagctcctgctgcagctcctgcagcagctgaagcagctgaagaagaagaggaagaagaagaggaagaagaagcttctgaagaagaagcagcagctggattaggcgctctcttcggatag

SEQ ID NO: 8386 - DNA, 2703 bp, Methanobrevibacter gottschalkii
  source 1..2703: mol_type = genomic DNA
atgattaatatggtagaaatttttgaaaaacttggttataaactacaaacttgtaaaacttgtggacaagagttttactctcaagtggatagagacacttgtggtgatgctccatgtgatgagtatggttttattgcaaatcctgctactgataaaccatataatttgtatgaaatccaaaaagtttttaaagaatttttagaaagcgaaggccacacagctattgatagatatcctgttttagcaaaaagatggagagatgatgtatttttagttggagcatctatcttttgcttccaaccatggattacttcaggacttgttaaacctcctgcaaatccattggaaatcgcccagccttctattaggttaaacgatgttgataatgttggaaggactggtcgtcacatgacttgttttaccatgggttcccatactgttataaatactgaagatgattttatttactgggaagatgaaactattaggctttgtcatgaatttttcaagtcaattgggattaatacagaagaaattactttcattaaatcctggtggtctggtggaggtaatgagggaccttgttatgaagtatgttgtagaggtgtagagcttgcaacacttgttttcattcaatatgaaactttagacgatggatctaaaaaagaaattcctattaaagttgtggatacaggttacggtcttgaaagaattgcatggatttctcaaggaactccaacagcctatgatgcatgtttcgcgcctgttgttgataaattaatggaattaactggtgttgaaattaatgaagatattcaaggaaaaaatgcccaaatagctggaatgatggatattgaagatataggggacttaaaagatcttcgccaacaagttgcagacagtttaggtctttcattaaatgattatttagaaatagctgaaccgatggaggcaatttatattattgctgatcacactcgttgtcttgcgttcatgattgctgacggtattattccatctaatgtaaaagaaggttatcttgcaaggttagttttaaggagaacaattaggttcatgaaagatttgaacatgaaagaatctcttgcagatattatggcaatacagcttgattttttatctaaattctaccctgaaattcgcgattcagaacagcacatcatgaatattatttctctggaagaagaaagatattccgccactgttaaaaaaggcaaaagtattgttaaaagatccattaaaagactcaaaaaagaaggcaaaaacgaaatgcctcttaatttgctaatagatttatatgatgctcatggaattcctcctgaaacagttgttgaaatcgcaggagatgattttgttgttaatgttccagacaatttctttacacaagtggcgggagctcatgaaaaagataattctagtaaaaaatccactttcaaagtagattttcctgaaactgagttgttattctataaatatttctaccaacaagaatttgaagcggaagttttaggcgtgcttgaaaaggatggaaaacaatgtttaatctttgataagaccatattctatcctgaaggaggaggtcaaccttctgatatgggtgaaatttcaattgatggaaatgtgttaaaagtaagtcatgctgaaaaagtcgatgatgtggtgttacatcatgtagatgaagtttcacaggatattgtcggcaaaacgatcttgggtaaaattgattgggataggagaataacacttgcacgtcaccacacaggaactcacttagttattgcagctgcaagaaaagtgttgggtcagcatatctggcaagcaggatctcaaaatggtcttacaagggcacgtattgatttatctcattacaggcgtattactcaagaggaattaaatgaaattgagaaattagctaatgaatatgtaatggaaaatattgatctggatattcagttccacacaagagatgaagcacaagaattatatggattcgtactttaccagggtggtattgttccgggtaaaatgattcgtgttgttaaaattcctggtgttgatgttcaagcttgtgcaggcactcatgttttaagaactggtgtagttggaccaattaaaattaataaaactgaaagagttcaagatggtgtggaaagaattgatttctcagcaggtcttgcagcaattgattccatgcagcatgataatgaacttttaagggaaagctcatcaatatttaaagttgacaacgaacaactcccaaaaacatgtgataggttctttagtgaatggaaagcacagaaaaatgaaattgacaggttaaaaactcaaattgcttctttaaaaatgaattctttagctgaggattatgaagaaatcaatggattgaaagttgtatctgaattgatggaagcggactttaaagaacttcaaaaaatagctactgactttacggataatggaaaggcagatgtagttattatgggaaacaatgatggtaaaatcgttggtgcagcttctcaaaatgcaattgataatggaattaaaattaataatgttatcaagtctgcagctagtatattgggtggtggcggtggaggtcgtttaacattagcacaaggtgctggtaaaaacacagataaaatgaatgaagctattcaaacagcaattgggttaatcaaaggataa

SEQ ID NO: 8387 - DNA, 3057 bp, Methanobrevibacter gottschalkii
  source 1..3057: mol_type = genomic DNA
atgaaactaaaaaataagattttagttttactattatttttagtgcttatttgctgtcttggggcagtaagtgcagctgaagatattaatgaaaccataactgcggattcttcaatagatgatgtgaatactgtttctgttgaagatgcagttgatgaaactgtatctgatgattcagatagtgataagggaatagttgaaaatcaagatgttgaaaaaacaaccatgttaactgataggggagttaatgttaatgcagcaacatggagtaaattatcacaatatgctggagttattggcactgattatattataactttaactggggatagttacgctactgatagtcaaataaagtttaataatggtgctacaattattggttctccaaataattacataactactggatcttatactaaaactccttttcttaatacaaattctgctctcaccataactttcataaatgtcacttttaagaatatgaatgttgattatcttttaagtttagcaggaacaaatgttttagaaaattgtaatttttataatattactgctggaactggtcataatgcagtaatctataacacagatggaacaatgaatttaactaattgtaacgttattaattcatctgcaggttatggtgttgtaagtaattataaatctggaacttatacaggggttgttatgaatgtaaatcattgtacatttattaataactctgctagtgtagaacctggtgctattaataattgtggtattttaaatgttgataattcagaatttattaataatactgctacttggtgggcaggtgcaattcacactcattacaatgcacaaactataataaataacagtctttttgaaggtaatgtcgcaggatggaatggtggagcattatatacctacagtacattaaaggtatataattccatttttaaaagaaataaatgtcacacaaatattggtggtggagctataggtgcttcaagatggtggagtggaaactatgatattacaatagtgaactgtacttttgaagaaaatgaaaactgtaatactaatggaaatggtggtgcaattactgctttgaatagtggggcattaaatgtgcatgactcaactttcatagccaatgttgcaaaaaatggtcaagcaatatctgctttcagtcaagcatttgaaaatattactgcaggtattccaaacttaaaagtatacaataatactttctacaatcacactttaactacatccgatacagttgaaataagtggaaattacacatttgaaaacaatacatttattaattgttatcagactaatttagggactaataacgtatttattaatcctgtaacacttaataacaataatttgattcttaaatcaaataaagagcatttgttaatgagtaatttatctgaaaatattttaaaaaatgctcctaatgtaatatatgtagatagtaattctgataaggactgtgatgaagatccaaatattgatggtcacaattgggaaactgcttatggaggaatttttgctttatcaagtgcaatatttaacatatgtgatggtggaaaaatttatcttgcagatggtgaatatagttatagaacaaacggtgctattactcatcctaaaaatttaactataattggtcaaggagcaaatactattgttgaccttatttcatgtggagaagaaactacttatacatgtatttttattaatttaacagtttctggtaaggattatggtaggaacaccaattttattaattgtacatttattaaaccaatttcaatatctgctgatataaatttaaatagtgttttaaaagaacatgctgtggaaaatggatatgcaaatacatatttaataaattttgataattgtgtttttaaagatgttgttgacgatagaataatcactttatttgaatatggtgctttgaattttactgattgtgtttttgagaatattactgctgattcaattgtttatcgcaatagtactggctattttgaggatgacagtatttcatttaggaattgtactttcagtaattgtaagtttaatggtgtagttgattctaagactaattttgatgatgctattgttattgaggattgtacttatgatggtgatgttgctttaggtactactgaggttgatggtcatttttatgtaaatgctactaaacttaaggttgttgctgttgctactaatatgagtatttcttcttctcaaagaggggttgtagttattactcttagagatgctgaaggtaatgctgttagtggtgttaatgttagttatactgttaatggtgtgaatatgagtggcgttagtgatgcaaatggcactatcactatttctgatttaactgatgaagttactgttagtgcaaatttcactggtagtgaatcttatttagcttccaataacactgctagctttaatttcacaattcctaaagtttcaactaaactctatgtttctagtgtgactacattttataatgcaggtaagtatttgactgctactttaaaagattccaatggtgaagttttagctaatcagaaagttacaattaaaatcaatggtaaaacatataataaaataactaatgctaaaggtcaggctactttaaaaataagcactcttttacctaaaaaatatactgctactgtaaattatgctggtgatgatacacatattaaatcttcagctaatgctaaagtaattgttaaaaaagcaactcttaaactaacagctaaagcaaaaacatttaaaaaatcattaaaaaccaaaaaatacacaataaccttaaaaaacaatgtaggtaaagtcatgaaaaagaccaaagtcacattaaaaatcaaaggaaaaacatacaaagcatacaccaacagcaaaggaatagccacatttaaaattacaaaactaactaaaaaaggcaaatacaatgcttacattaagtttgcaggaagcaaatactacaacagcttaaacaaaaaagtcaaaataaccttaaaatag

SEQ ID NO: 8388 - DNA, 1155 bp, Methanobrevibacter gottschalkii
  source 1..1155: mol_type = genomic DNA
atgaattatgatttaattattgccagatatggtgaaattggtgttaaaagtccaaaaatcaggtcacgttttgaaagaaagctagttaaaaatattaaagctacttttgattgtgaagttgatagaaatcaaggaagaatttatattcatccaaaagattttgaagatggtgtaaaaaaattgaacagagtattcggtgttgtatcttattctccagccacatctactactgctacttatgaaggtattgatgaaacattaactaaatatgttggggatttaatttcagaagatttaattgatgaaaatacaaaatttgctattaaatgtcgtcgtgttggaaaacatgatttttcatcacaggaaatggctgctcactgtggtggggttgtgagaaatgttgttttagctccagttgacttaacaaatcctgatttaacaatatttgttgagattagagataataatgcttttattttccatgaaaaaattaaaggacctggtggtcttccattaggaacacaaggaaaagttgttgcattgctttcaagcggaattgactctcctgtcgctgcttatttgatgatgaagagaggttgtgaagttattgcactaaattgtgacaattcaccatttacaactccaaaagctagtgaactttttgatgcattagttgatcagttaaatatttatgcaaaaggttctcctattaaaaaacgagttgttcattatggggaatatctgcaagctgctaaggataaggctcctgaaaaaatgacttgtgttttatgtaaatctggaatgtatcatattgcagagaaattagctttgaaacttggagcagatgctattgttgatggaagtagcgtaggtcaagtggcttcacaaacattatcaaatattttagctactagatatggtgttgacatgccaattctatctccattaattggtttggataaagaagagattactcaaattgctaaaaaaattggcacttttgaaatctctaaaattgatgatggtggatgtagtgcggttcctagatatcctgaaacacaggcagatttagaacgtgttaaattagcttgtgaagatatgaatcaggatgaagaaattgaaaaagcttttagaaatattgtaagatttgattaa

SEQ ID NO: 8389 - DNA, 1095 bp, Methanobrevibacter gottschalkii
  source 1..1095: mol_type = genomic DNA
atgaaaactactgttagtgtaattaaagctgatattggaagtgtgtctggacactgtgtagcacacccagaattaattgatatttgtgatgaagttttaaatgaagctttagaagcaggtattataaaagattactatatctcccgttgtggagatgacattgatttaatcatgacccatgataaaggggaagaaaatgaagaagttcataaaactgcatatactgcattcatgaaagctactgaaagagcacgtgaattaaaattatacggtgcaggtcaggatttattaactgatactttctctggaaacatcaaaggtatgggtcctggtgtagcagaaattgaatttgaagaaagaccttctgatcctgtacttgtattctgttgtgataaaactgaacccggtgcatttaatttaccagtattcagaatattcgcagatccattcaacactgcaggtttagtaattgatcctaaattacacgacggttttaaatttgaagtattcgatgtaattgaacacaaaaaagttatcttaaactgtcctgaagaaatgtatgatttactcgcattgattggttctactggcagatatgtaattaaaagagtatggaagaaaaatggtgaaattgctgctgcagtaagtactgaaaggttaaacttaatggctggagaatatgttggtaaagacgacccagtatgtattgtaagagcacaatccggttttcctgctaatggtgaatgcgtagatccatttgcattcccacacatcgtaagtggatggatgagaggatctcacaatggtccaatgatgcctgtatctgaagcagaagcaaacccaatcagattcgatggtcctcctagagtggttggtttaggtttccaagtatctaacggggaattaataggtcctgtagacttatttgatgatccagcatttgatcctactcgtgaacaagctgctaaaattgcaacttatctcagaagacacggtccatttgaacctcacagattacctgctgaagaaatggaatacacttcattacctggtgtaatgaaaaaactagaatccagattcgaagacatggattaa

SEQ ID NO: 8390 - DNA, 276 bp, Methanobrevibacter gottschalkii
  source 1..276: mol_type = genomic DNA
atgccacaaaatgaaatgcgaaaatcaggtgttaaaatgcataaaacatatctgctggaaaatatcgatgaaatacatacaactgaaatgggtattggaagagtgcaaaaaaatttacaaataacatccgaacccgtcagttattgcatttcaaaacttaaacaagaagattcaaaagtaactaaaaaaggaaaaaattattatgtcaaagctgataattgtataataaccattaattcaagcagttttacaataataactgcccataaaaactaa

SEQ ID NO: 8391 - DNA, 1110 bp, Methanobrevibacter gottschalkii
  source 1..1110: mol_type = genomic DNA
atgtcatttttaaaattcattcttaaaaatccatttaggagaaaaaatagtgcaattttggctattgttggtattgcaataggtattgtcgttattgtttctctcggtggcattactgatggtttaattaatacttttgaagatactatacatgcaggtggtgctgacttttcaatttcaggaaaagaaactggaaattcggcatatggaactaatacaattgattctagttggacagaaaaaatagccaaggtacctggagttgatgaagcttatccaatttatgttgttctaacttcggttggtgatgattatatgaatactttaattggtattgatcctgaaggtagtgaacttgcagacatatcaatgaaagaaggtaggatatttgaagacaatacttctgaagttattttaggtgaaatctatgcagaagataataattattctgttggagacagtatcataattaatggtgaggactttaaagtttcaggtatttatgaaactggtgatcaaaacatggctggaggggtttttacatcaatctctaaaattggagagttaatggatgataaagactcaatttcaaatatttatgttaaagtaaataagggggaagatgctcaggctgttgctgatagaattgatactaaatatggggataatatcacaacagtcacatcagttatggaaatgactcaaatggctgatatgttgaatatgcttcaagcatccacttgggcgatttcacttttagctattgtagttggtggtcttggcattatcaatacaatgttaatgtctgtatttgagagaactcgtgaaattggtgttttaaaagctgttggttggtctaataaaaagattcttacaatgattgtaggtgaatcattagtaattacaatagtctcagcaattatcgggtcattaattggatttttagcatgtactctgttaggtccgcaaatgggaataaatccattgttcactccgaaaattttcatacaggcattttcaatagcaattattgttggggttgttggagggttatatcctgcaattaaagcagtaaaacttccaccaacagaagcattgaggtatgaatga

SEQ ID NO: 8392 - DNA, 699 bp, Methanobrevibacter gottschalkii
  source 1..699: mol_type = genomic DNA
atgaatgctgtggaaataaaagagttatataaaagttatgagggcggaaaaataaaagcattaaatgggattaatctcacaattaaacagggagaattcgtatctattattggtccgtcaggttctggcaaatcaacattgctaaatatgctgggcgcattagatattcctgattcaggaacaatcaatgtcaatgggcatgacttaaaaacatctaaaaagttaaatgaattcagatcaaaaaaaatcggttttatttttcagctacataatttaattccaaatatttctgttgttgaaaatgttgaaattccaatgtatactcaaaaattatcttctaaagagatgcgatttcgcgcattaaagttattggatgatgttggtcttagtgaaaaatcaaaaattttaccaaataaattgtctggtggtgaacgtcagagagttgctattgctcgtgcactggcaaacaatccatcaataatattagcagatgaaccaacaggatcacttgattctaaaacaagtagtaaaattcttaaacaattaattgatttgcatgaagacaaaaatgtgactttgataattgtaactcatgatatggatgtagctaaactggctgatagggttattgaagttttagatggtgaaataatatctgcaggtgatgattcattaataaatagtaaaattgatgtttag

SEQ ID NO: 8393 - DNA, 243 bp, Methanobrevibacter gottschalkii
  source 1..243: mol_type = genomic DNA
atgactgaacttgaaagtcctgaaaagatagcgaaagatattttaaaattagaaaggaatttgaatcaagttgccgatattacttttaaaggaaaagaaaaagaagtttatgacagagctattgattactggaatgattcaaaatattatcttgaaaaaaaagatatgaggactgcattcggttgtattgaatacagccacggactgcttgatgctttaaggatgattcatggaatcatctaa

SEQ ID NO: 8394 - DNA, 570 bp, Methanobrevibacter gottschalkii
  source 1..570: mol_type = genomic DNA
atgcttcaaagtttaagaccattattaacaagaatattgaacccaatagctaagagattaaatattaatccgaatattgtgacaataatttcaccatttgttgctctacttgcagcttatggatttgcaaataaattattaattttaggaacaatagcaattctgctttcgggatttttagatgttgttgatggtgctgttgcaagatatcatgaaaaatcttctaaattcggtgcttttcttgattcaacaatggatagatttgcagatgcaataatttacatcggaataatatttggaggatactgtgattggttagttggaatactggcaatccattctgcaatatgtgttagttatgtaagagcaagagccgaatctcaggaagttgattgcaatattggaattgcagaacgtgctgttcgtatgattattttaatgattggagcaataattggatacttcgcaggagacatttactttacatacattatttacattttagtaattttatcttacttcacagttggacaaagaatattacatgtttggaggcaattaaatgactga

SEQ ID NO: 8395 - DNA, 582 bp, Methanobrevibacter gottschalkii
  source 1..582: mol_type = genomic DNA
atgaaagttttaaaaacaagtattgattgtgttgatgaaagaataattaatgaagcggttaatgtattggctaatggtggggttgtattatatcccactgatactgtttatggattgggagctaatatttttgataataaagcagttaaaaaagtttatggtattaaacaaagaagcttattaaaacctttttcaatacttgttaaggatattgaatctattaatctggttgcaaaagtctcatcagctcaaaaaaatctttttaataagtatttgcctggaccttatacgtttattttaaataaacgcaatattgttccgagagttgttacaagtgggttggctaatgttggtgttagggttccggactgtgatattgcttgtaatcttgctaaaatttttccaataactacaactagtgctaatgtttctgatgatgagatgctatctaatcccagagaaattttagaacaattggattgtgatgttgatttggtaattgatgttggagatttagattcaaatgtcccttcatcgattattgatttatcaggattcaaaccaaaaataataagaaaataa

SEQ ID NO: 8396 - DNA, 705 bp, Methanobrevibacter gottschalkii
  source 1..705: mol_type = genomic DNA
atgaaagtattggctaattttgaagacaatcacaaaattccatcaaattctgctcttgatgtgatgttggcagggggatttgagaaaggaacaattactcagatatttggaccacctagttcaggtaaaagcaatataactctttcagttgctgtcaatgttgctaaatttaataaaaaagtgatttacattgatactgagggcggaatctcaattgataggattaaacaaattgcaggtgttgatttttcaaatgttgctaataatattattgttttcgaaccaacaagttttttagaacaaaatgatgcagtaaagtctattgatgcttggcttagaagtaatcataatgatgttgatttaattgttttagattctgctgtggcattgtacagggtagatgatatgaaatcatccaaattaaataaagaattaggtaaacagatgggtcttttatctaaaattgcaagacagtatgatgtcgccattattttgacaaatcaaatttatagttcttatgatgatgagggaaataatgatattaaagcagttggaggaaccattttacaatactggagtaaagtaataattcagcttgaacgtggtgaggaaatcaatcaaagaatcgccacattaaaacgtcatagaagtattcctgaaggaaaacaagttactttttcaattacttcaaaaggaattatttag

SEQ ID NO: 8397 - DNA, 1170 bp, Methanobrevibacter gottschalkii
  source 1..1170: mol_type = genomic DNA
atgaggactgattttgatataaaaaacccaaagaaaaagtttaaaaaaactgaaagggtgcctccaaagggttatgataatgcaaatgatttttttgaagatatgtatatggatgaaaatatgatttggatgggtcaaaacaccaaccatttgcatgatgatacaatagctaatgctatgattgatgctatccgtatgaaaacttattgcagatatccggctccagaagggttttctgaactcaaaaaattagttttgaaagatttaggttttgaagatgaagaagttttattaacctctggtgcaactgaatcattatatttatgtatgcaagctcttttaactcctgaagataatgtgattctatcagatcctggatattttattattggagactttgcaaatagatttgcaaatgaagtaagatatgttcctatttatgatgaaaaatacgggtataagttaactccagatcttttaagagaaaatatggatgaaaatactcgtatggctattttaattgatccattaaatcctttaggttcctcatacacggaagatgaattaaaagaatttgcagaaatcgcaaaagaaaatgatatttaccttttacatgatgttacttacaaagactttgcaagagaacattttcttgtagagaattatgctcctggtcaaactttgacaatttacagtttttcaaaaatattcggaatggcaggtttaagaattggtggggttgtatcctcaaaaccgataattgatgctattaagaatgctgttgtaaatgatttgggagtaaatattatttctcaatatggtgccattgcaggactcaaatcaaaagatgtttggtttgaggatatgaggcaaacttgttttgaaaatcagagattaattaaagaaatggttgatacagtggatggtattttcttacctgtttatccatcagatgcaaacatgatggttatcgatatttatgatacaggtatcaatccaaaagatttgtcaaattatttaattcagaaaggactattcacaagagaaggagaatacacttctgatgaatttggagagagatacttacgtgtcagtttttcaattccaacagaagagattaaaatattctgtgaagagttccctaaagctattgaagctttaagaaaatga

SEQ ID NO: 8398 - DNA, 735 bp, Methanobrevibacter gottschalkii
  source 1..735: mol_type = genomic DNA
atgattaatatggattttaaggggttcagataccacaagccgcttcctaatttttataaaactgataatcctttaactcctaaaagggagatttccgatgatttacttttaaagttagataatttagctaaaaaatataatttcactggaattagctattctaaattatctgatgactttaaaaaggattttaatatagattttgataatgtaattatttttagatttcttatgaaaaatgaattgataaaaatggaatcttcccctgagaaatctaaattaatggatatggagtttcaagtatatgggattcatatctatgaatttgcagattttttaagagaaaacggatttcaagcagatttattgcatccatttgatgatgacttaagtttaaaatcaatagctatgcaatctggggattgtataattactagaagtaacatatgtttatttaaagaagggttgcataatggatttttcatgattcatacatcaattgataatttaccatttaaaaatgaaaatgatatgttatgggttaaagatttctgttcaacttgtggggtttgtattgagagatgtcctaacgatgcatttgattatgaagaaaatctgcttcgaaaattttgtacagctcatagagaaggttgtagtgaatgtattttaatatgtcctttctttaaaagaggttatgataaagttaaaagaagatatgatggaatgaaaaagtag

SEQ ID NO: 8399 - DNA, 378 bp, Methanobrevibacter gottschalkii
  source 1..378: mol_type = genomic DNA
atgaatgataaaatagctttagtttcatgtagtggtttgagcccattaggattagttgtaagagcagcaagtgttgaacttgctttagaaaatgaaaatattgttgcagcatgcattacagaatattcagcacaaccaaacaattgttctccaatactggatgatgcaaaaatagttactataactggttgtggagatgactgtgcatctgttattctaaaagataaaaatattgctgctgttaaaaatatttctctagatcatgttgtaaaagcctatgaattaaaccctttggatgcagttcgtttagatgaggatggtgaaaaggctgttgttgttttgaaaaaatacatcttaaaagaacttgaaaatatctaa

SEQ ID NO: 8400 - DNA, 1779 bp, Methanobrevibacter gottschalkii
  source 1..1779: mol_type = genomic DNA
atgactcgtatttcaattttagacaaagatagatgtcaacctaaaaaatgtgattatctttgtattaattattgtccaggtgttagaatggatgaagacaccataataattgatgaagatacaaaaaaaccgttgatatctgaagaattatgtgaaggatgcggtatttgtacaaaccgctgcccttttgatgctattacaattatcaacttaccagaagctgtaggagagcccattcacagatttggtcaaaatcaattcgaattatttggacttccaactttagaagaaggaacagtattaggtcttctcggacaaaacggtattggtaaatccacaatcatgaatattttatctggtaatctgattccaaattttggagactttgaaaacaagcctgaaaactgggatgaagtaatcgaattttacaagggatcatctcttcagaaatatttcagagatttatccgaaggaaatataaaaaccatcctaaaaccacaaatggttgatcaacttccaaaagttgtaaaaggtaaagttaaagatttactaacaaatgttaatgaaagagataaactggattatgttacccaagaattacaacttgaaaatgtattagaaagaaaaatggaaaacttaagtggtggggaacttcaaagagttgcaatagccgctactgttttaagagaaggggatttttattatttcgatgagcctacttcatggctggatgtatctcaaagattaaatgcagtgaaagtaattcgttcacttgctgatgaaggcaaaagtgtacttgttattgaacacgacctcgctactttagatgcattatctgataacataaatatcctatatggtcaacctggaggatatggagttgtatctggaagaaaaggtgttcgtttgggaattaatgcatatattaatggatttttaaatgaagaaaatgtaagaattagaaaaaatcctattgaatttaccataaggccaccaactccagaagacgagggagatgtacttgcaagttactctgacttaaaaaaagagtatgatggattcagattatctgcagatgctggtgaaatattttacgacgaaattataactgccttcggttcaaacggtattggtaaaaccacttttgctaaaatgcttgcaggagttgaagaaccaaccaatggtgaaattgatgaagaagttaccattgcatacaaaccgcaatacattgtttctaactttgaaggaactgttagtgacttcctatacatgaatgctccaagttttggtagtaaaatcttcgatagtgaaattatgaaaccgttaactttagatgaaatgttagacaaaccagttaatggattaagtggaggggaacttcaaagattagctattgctgcaacactatcgaaagatgctgaaatttatctttttgatgaaccaacagcatttttagatgttgaacagagattaatagctgcaagggttatccgcaaaatggtggaaagtagaaatgccgcttcacttatcgttgaccatgatatcgtatttattgactacatttcagatagggcaatggtattcaacggaactccaggtttaaacggtcatgcatccaaaccaactgaccttagaaatgcaatgaacgaatttttaggaaatcttaatattacatttagaagagataaagaaacaaaaagacctagagtaaataaacttgacagttataaagaccgtgaacaaaaagagaaaggagaatattattacttatcagattaa

SEQ ID NO: 8401 - DNA, 339 bp, Methanobrevibacter gottschalkii
  source 1..339: mol_type = genomic DNA
atgaaacaggtgatgattgtcagaacagatttgaagatgggtaagggaaaaatggctgctcaatgctgtcatggatctatcggttcatataagaaagcttccccagataaaattaaaaaatgggaaaatgaggcttatgctaaggttgttttgaaagttaaaactttagaagaattaacagaacttaagaagatggctgatataaataaagttcctaattatcttgtagttgatgctggaagaactcagatacctacatcaagtgttacagttttagcaatcggtcctgatgaggacgagataattgataagataactggtaatttaaaacttttgtag

SEQ ID NO: 8402 - DNA, 663 bp, Methanobrevibacter gottschalkii
  source 1..663: mol_type = genomic DNA
atgagcataaaacaggttgttaaaattgggggaagtttgtttccagattatgcaatagatttagcaagacatctcaaaaatactgattcactcattattttagggggtggtgaatttgcgaatcttattcgtaaatatgactcagaaattaatttttcacaaaaaactagtcactggacagctattgattgtatggatataattgctaaacttgtaaatgataaagttgaatcaacaaaattggcatattcaattgatgaagttcaaaagatttctgatgaggggttcactccgatatttgtagtttcaggttttttaagatgtgaagatccttttgaatgttcgtggaatgtaacttctgattcaattgcagcttatatttcacaccttctgaatgcaaaccttttaatagtaacaaatgtaaatggtatatatacccatgaacctaaagagtcaggttcaacattcataagtaaaattgatgcaaaaactttactaaattttcaagagtcatcaattgatgtaatgttaccatctcttttgttaaagttcgggactgattgttatgttgtgaatgggaagtaccctgaaagggtgttatctttaatagatgataatataaatgattataacttcgattacacacaaataataggtgattaa

SEQ ID NO: 8403 - DNA, 162 bp, Methanobrevibacter gottschalkii
  source 1..162: mol_type = genomic DNA
atgaaaactgtagaatgcatttcatgtaaacaagaaattccattaactggcacatttgttgaattcaaatgtcctatttgtggagcaaaaatcgcaagatgtgaaaaatgtcgtacctttggtcacgcttacaaatgtgaatgtggttttgaaggaccataa

SEQ ID NO: 8404 - DNA, 270 bp, Methanobrevibacter gottschalkii
  source 1..270: mol_type = genomic DNA
atgggtgaagttttaactacaatgaaaatcatgcctgatagtccagatattgatttagatgctattaaatctactatcgaaaattcaatgccagaaagcgctaaactccatgatatggctgaagaaccaatcgcttttggtttggttgctattatattacagtttattactgatgatggtgaaggtggatctgagcctgttgaagatatggttcaatctatagaaggcgtagctagtattgaaattactggtgtaggaagattaatgtag

SEQ ID NO: 8405 - DNA, 729 bp, Methanobrevibacter gottschalkii
  source 1..729: mol_type = genomic DNA
atgggtaatattatggatagaacaaaaaagattatcattgcacttataattattgttttgattatattggtaggaattattgctagtgtatggttcattggtcatgatgttgatttagatgagggtagcaaaacaatattggtatgtgcaattgatgaaagcgaggatcggccaggtatgggggcttgtgatatggcattccttgttcatttggaaaatggagctattaaaaattatactcctgtttatccgggcggtatgacacacccaactgctcaggagcccgctgaagctcaaagtcagggtgccggatcagatttattacttcacgatgcattctgggatgtggataattctaaaggaatgaatcttgcaaaagaaatagttgaatatcgtacaggtagttcagttgattctgttgtagcaattaatactaaagcattagatgctattttatctgcagcagctcctcttgaagttaatggtaaaataattaatggaagtggaattgatttcattcgcgaagatggaagtaatggtgtgtctaggggtgatgcagtaatggaaatagttaaagctacagcaaactctgcaaaagatccggttaaaaaatctgcaatgataaatgctgcagtggatcaatactctaaaggtaacattattatggatcaacaagggtcttttgttgatttattagcatcaaaagggattgaaactttttttaattaa

SEQ ID NO: 8406 - DNA, 1068 bp, Methanobrevibacter gottschalkii
  source 1..1068: mol_type = genomic DNA
atgtacaaaaagatattagttcctactgatggatcagaggcatcattcaaagaagttataagtgctagtaatttattagcagaagatggtgaaattattgttttatccgttgcaaaacagctaaaacaacatccgcttcaaataaaaaaggatattaaaaaaaccaatgagacatttattgaatatgcaaaagaaaatgttgaagaaatgaaaaagaaatttgattcaaacataaaagtttccactaaagttgttgttggttttccggcagaagccatatgtgatgttgctgaaaaagagggcgttgaattaattgtaatttcttctgcaggtgaaagaggattcagtaaacgtattattggtagtgttgcaggaaaagtatgttctatttccaatataaatgtattgttaatttctaatgaagaaaaagaattaataaaacattcaaccactaaaaaatcagacaataaaaataagatcaatagggattatacaagatttagaaatgatttgtatgttctattaagatttatttctgttgagaaaagacttaacagcgattacccagaagaaattattgattctattgaaagaagaatcaaatatttagatttaatttataaaacacttaacacacattcagaatcagaatatgtaaatgttaaagaatattttaaaaaatatagtgctaatttttattcattatacaaaaataaacagccaggtattgaatttgtaaataaaagtgaagataattttaatattcctgataacattataactccacttacagcaataatcaatgaattaattgttaattcattgaaatttgcatatgaagattatgatgttgagaaaaaaattatcacagaaaaagttacaaaaaataaagatatctgtgaagttttctataaggacaatggtaaaggattaccagatgactttgacaaagataatccaacaggattaggttggaccataataaatgcattagttaaacagcttgatggtgaagtaaaagcatataattctgatggaatgtgctttgaaatgaaatttaaattataa

SEQ ID NO: 8407 - DNA, 915 bp, Methanobrevibacter gottschalkii
  source 1..915: mol_type = genomic DNA
gtgattaatattatagaagaatttttcatagcaattggaggaatttcacttttcctcattgatttttttaaaaatttttcattaaaagaaattgaaattgaaaaaacgaaagacattaaccagaatatagctcaaaaattaaatttacaaaaagatataaaattgcaaaacaacgaaaaagattcaattgataaaattcgaaggttaataatcccctatctgacaaataaaaaaataattggattactcggattactttttctactaataaatttatttataagtttagagatatcaggaatttatattgtattagttttaatgacatacatatttgtattttattatcctcagatccagcagcaaagaaattactccgatataaaccaggaactgccatatgcattaagacatataggtattgaattaaaatccggaaaaggacttcatgacacattaagaacaattaaaaatgcagattatggatctatttcacaagaatttaatagaattttagaagaaattaaatttggtaaatcaacagaagaatcattacttgaaatgtctaccagagttaaatcagaaggtcttacaagagcaatacatcagattatcagtacattacgagttggtggtaacttatccaacagtttagatatcatagctaaagatatatcatttgatatgcaaattaaattaaaagaatattctcaaaaattaaactcatttatcttaatttacacatttattgctattttaacaccagtaattagtttaataatgttaatggcaagttcaactgttatgggtgatatattatcatcaagtttattatttatactctatggagtatttttcccatcaattgtagtttttatgggggtttttattaaaaaattagaacctaaaatttaa

SEQ ID NO: 8408 - DNA, 1419 bp, Methanobrevibacter gottschalkii
  source 1..1419: mol_type = genomic DNA
atgaacaataatggaataataccacaatatgacatcattaaacaagaatatacatctgaagaaaaaatattacttggggaaatcagggaaaacttagttgatttagccatatcaactggagaaaattttcaagtaaatgaaacaaagttaataaataacataaagaattttttatttgaaagattaaatgacaaccaacaaaataataatggcacaaatgaatatttagataacttgtctcggaagttgctcagagatattgttggatatggggaaatagatccattaattcaagatgatgaattagaagaaattatgataatcggaataaataaaccagtatttgtttatcataggaaatatggaatgatgaaaaccaatatcacatttaatgacgaacaagaattaatagatttaatagatgcaatcgcaagacaaattaaccgacgaattgatcaagaatctccaattttagatgggagattaattgacggatcaagaattaacgccacaatacctccaatctcagcagacggcccatcacttacaataagaaaattcaaaaaagatcctcttacaataatcgatttaataaaatcaaaaacaatatctgttgaacttgcagcatttttttggctgtgttttgacggattaggaattaaatccgctaatgccataatatctggcgggacaagttccgggaaaacaacaacactcaatgctctttcagccttcatcaatcctaaagaaagaataataactattgaagatacattagaacttcaaatacctcatgaacatgttatcagaatggaaacaagaccatccaatgttgaaaataaaggcgaattaactatgaatgatttagttaaaaattccttaagacaacgcccagatagaataatagttggagaggtaagagctgaagaagcaataactctatttactgcattaaatactgggcattcaggatttggaaccctacattcaaatgatgcaagagaaaccataaccagattaactaatgaacctatgtctgtaccaaaaataatgattcaagccattgactttatcataatgcagaatagaatttacacatcatctggagtatcatttagaagaataagtgaagtggctgaagtagtcggaattgaagaaggagttgttcagttaaataaaatatttcaatggaatcctgaaaccgatacaattgataatgttagtataagcagtaaaacaatatcccaaattgcaaatctaagtggaaaatcacttaatgaattatatcatgaaattgagaaaagagaattagttttgaaacatatggtgaactacaatattcgttctgttgatgatgtaactgcaattatagaactatactataaaaatcctgaaaaagttttaaataatattatttaa

SEQ ID NO: 8409 - DNA, 897 bp, Methanobrevibacter gottschalkii
  source 1..897: mol_type = genomic DNA
atgattgatttaaatgaacagattaaagcattggattattgtgaaaactgtaatgatattcagattaaaaaattttctccattaaaagatttaattgattttgatgaacttaatggtgaatatatgaaatgtgaatgtggaaaaagaccccttgacattgtaatgagtcatatcttaaaaataatgattgaagaaaaaatagtccctgaaaatgcatcattaagacgtaattctccagttccattatctaatttttactatagtaatttaaatccgcaatttatcggtgaaggtactttaattttacttcatcctgatttcacctcgaatgtcgctttaaagttatttaatgaagttcaggaagttcggtgtgttttaaaagggagtcctcaaagtcacattggtcaatttgataggaattctcaaattaatcattttgaaattctcataggtgatgatgagcagattaatgtaatgagaacattactgggggataagattgttttagtaaaaaatcaatctaaacaccatatagaagtagcaatgaccacagaagagaagttattgaaattacataactatcttgacaataataagattaataaatgtgtagctattgatgggatgtgtggtctcggggcattaggaatttatcttcttaaatatggttttaaaaaagttatattcaacgatataaatcctgaaatgattgaaaacttaaataaaaatttaatttttaataatatttcagagggatttgaaatttttaatgaatcatttgagaatttggatgttggacatgtggatttatgtgtaattgatgcatttcctggtgcagacacctctgagattgtaaaaaaagcagaaaaaatagcggatgatgtattaattatataa

SEQ ID NO: 8410 - DNA, 1254 bp, Methanobrevibacter gottschalkii
  source 1..1254: mol_type = genomic DNA
atgatagaaatagttattgcttgcttcataggcatactaattggaacaacaacaggacttataccaggaatacatgtcaacactgctggagcaatcttatttgcatcatccggattgttactgacacaattttcaccagaattcctatgtgtattaatggtttccatgtcagttgcccatgcattaatcgaatttataccatccatgctattaggagtcccacaagaaggaaccgccacatcaatacttcccggacatagaatggttctagaaggcagatcaaaagaagtaatacgaatagtggctgtgggaggttttggagcaataatagttacaattttaatgcttccaattttttcgatcatattacccatcctacatgatattttaaagccatacacctggataattcttcttgccgcatcactttatctaacatacagattaacagtgaattttagggattttttatggtcactacttctgtttatattatcaggaattttaggttggaccttatttcaaagccccataacttccggagttacattaatgtgtacattctcaggtctttttggaataagtactattttatttagtttaaatgattcatcaacaatgcctcatcaaaatccattttatgagctgaatattgattatgataaacttaaaagcatttttacaggaggcataaccggagccattttaggttttcttccagggtttggacctgcacaaggaactgtaatagctcaagcagtaagtggaactaatgataatagaaatgatgatacagttaatttcttacttgcaacatccggacttaatatttcagactgtttattttctctaatagcaatatatattatcggaaatcccagaagtggaattgcagtttatatgtcttatttaatttcagaaatgaatataaaccatttaataatattcatttttgcatcattgcttgcagtttctgtttcactaatattagccctaaaattaggagattcattttctagactaatgggaattgtaaattataaaaaattatccatatccgtcattttacttcaaattataatattatacatcttcattttttattataaatcgcccacttgttatatgaccctagcattaattacttcaactgctttaggaatgttaccccattatattggtgttggaaagtctcatttaatgggtgttctaataattccggcaattgtaatttatatgaaaatgtttatctaa

SEQ ID NO: 8411 - DNA, 465 bp, Methanobrevibacter gottschalkii
  source 1..465: mol_type = genomic DNA
atgattgaatatgatgacataattaaagattcaccatttctcgcaaaccatttaattacattgaataaaactcatgatttttacattaataagcatattaaaagcggaacagacattttgcctagtcagtactatatgttaatgtttttatattatgaaatgggaacaacacaatcagatattgctaaagcatgtttaatggatagaagtggagtttcaagagcatttaaagattttgaaaaaaaaggattaatcaaaagaaaagttgataatgacaataaaagagcatacaaaataaaattaacacaaaaaggtattgaaactgctgaatttctaattaaaaaagaaaaagaatgggacaatatgatttgtgagcagttatacatatcacgagaagatttgcttaaattattatccaaaatttctttaaaatcattagaatttaatagaaatcaatttcaataa

SEQ ID NO: 8412 - DNA, 498 bp, Methanobrevibacter gottschalkii
  source 1..498: mol_type = genomic DNA
atgaataaaaaagaaattataattattttgatatttattggtttttgttttgtatttgcaggaccggtatttgcaaaagaaaaggttaaagtaaatgtttctattgatgatcatcctttaaataataaaggtttcattgtgataaaacttgttgatagtaggggtaaagatattgaaagtaacggaacaatacattataaaattacggatgagtttggtaattataaatgggcttataaatcatatgatggtgaaatcaggttaaaatatacggcgggtatttataaagttgatgttaaattcgatggtgattttcattataattctgctataaaaaataaatctgttatagttaaaactgagaaatttaatccatatacttattatgataatcataattggggtttaaatcaggaaatagatgattatatagaatataattattgggatgaagatatatatgatgatcctacaaattatgatggtgagggaccttga

SEQ ID NO: 8413 - DNA, 2019 bp, Methanobrevibacter gottschalkii
  source 1..2019: mol_type = genomic DNA
atgaaaaaattgattgtaggattagcaggaaacccgaatgtgggtaaaactacagtatttaatcaattgactggtatgcgtcaacatgttggtaactggccgggtaaaactgtcgaaagggcagagggtcatttcacccacggaaattatgagtatgatgttgttgatttaccgggtaattatgcattaagtgctcattctatggaagaaattgtttccagagattttattgtagatgatgattctgatgttattgttaatgtagttgatgcagctaatctcgaacgtaatttgtatttaacagttcaaatgatggagctgggtgccaatttagtattggctcttaacatgaatgatttcgcaaagaaaaaagatcatattattgatattgatttaatgagtgaactattaggtttctctgttgtggaaattaatgcaaagaataaagatggttttgatgttttattaagtgctgttgaaaaagcggcttcaaaaccaaaaaatacaagtgctaaattatcatatggtgatgaattaaaagaacatttgggtgatcttcaagaattaattgaaagagacaataagttgttggatgttccatctatttggactgcaatcaaattattggaaaaggattcaattgtaattcaaaaagtacaacagtcttcaataagttctcaaatcatggccgaaactgataaggtggcaggtcatcttcatactatttataaagaaggtgctgaagaagttgtcgctaatgctagatatgcatttattgatggtttaatggctgaagctgttaaaagacctgctgttgaaaaggaaacaattactgataaaattgataaaattgttacaaacaggattttagctccgtttatatttattattcttatgtgggcaatgttccaactaacatttacagttggagctcctttccaagatatgattgatcaagcatttggtatgttgagtgaatgggtagctacattccttggtgatggtttattatcttcatttgtctgtgatggtattataggtggggttggtggtgttcttactttcttgccgattattattctaatgttcttgtttttaagtatcttagaagattgtggttatcttgcaagggcagcatttactttagataaaattatgcataagatagttggtcttcatggtaaggcgtttattcctatgattttaggatttggttgtggtgtgcctgctattatggcaacaagaactatggaaaatgaaggggatcgtatgcttgctatgatgcttgttccatttatgtcttgtactgccagattaccaatttatgctatttttgttgccgcattctttgctgacaatggaggtaatgtattacttgcaatttatttactcggtattgttgtagcgcttattgttgcagcaatccttaaaaggaccatgtttaaaggattatccactccgtttgttatggagttgccaacttacaaagttccatccctaaaaggtgtattattgcatacatgggaaaaagtaaaaggattcttaagaaaagcaggtactattatccttgcttgttccatcgtattatggattttacaaaatatattcccatatggcggatcagatcctcaaatgagtcttcttggtatgattggtactgctattgctccaatatttgctccattaggatttggtacatggcaagcagctgtagcaattattgctggtttggctgccaaggaagtagtggttgcaacattcggtactcttgcgggtatggaggaagatgatgaagaaggaattactaacttaatacatgatactttcacaccattatctgcattttcattcatggcatttacattgttatatactccatgttttgcagctattggtgcaattaaacaagaaaccaacagttataaatgggcattaactatgtgcgctattaccttagtaacagcattcattgtttcattcttaatttataatattggtttattggcaggattcggataa

SEQ ID NO: 8414 - DNA, 228 bp, Methanobrevibacter gottschalkii
  source 1..228: mol_type = genomic DNA
atgaaaacattaaaagatgcaaaacctggtgaaacagtaactttagttaaatatcatgatactggagatcttgatttgagaagacatttattgggtatgggatttattaaaggagcaaagattactcttaaaaaagtagctactttaggtgatcctatcgaaatgaatgtaaaaggttatgatgtttgtcttcgtaaggaagaagctgaaaatattgaagttatgtag

SEQ ID NO: 8415 - DNA, 207 bp, Methanobrevibacter gottschalkii
  source 1..207: mol_type = genomic DNA
atgaaatgtcgaatgtgtggttttgagttcgatgaaaatgaattggaaaacagaggatgttctagttgcggtaaacataactgtaatcaagttcattgtccaaattgcggattcggaaattctccagaactaggtcaggagtttgaatttataacaaaacttaaaaatagatttaataaaaatgaatcagaaaatggttctatttaa

SEQ ID NO: 8416 - DNA, 843 bp, Methanobrevibacter gottschalkii
  source 1..843: mol_type = genomic DNA
atggaaaaaattcatttagagacaaaaaatttatcttttacttaccctgacggaactaaagctttaaaaaatgtgaatattcaaattaaaaaaggagagaaaattgcaattatgggacctaatggtgccggcaaatcaacacttttttcacattttaatggtttaacggaacctacatcaggacatgttgaaattgatggtgaaaagataatctttaatcgtgaagagctacttaaagtaagacaaaaagtaggaatcgtatttcaagatcctaatgaccaattatttgcaccaactgttaaagaagatgttgcttttggacctatgaatttaggccttgattatgatgaagttaaaaacagaatcgccgaatcattgaaaatggttggaatgagtggttttgaagataaaacaccacatcatctaagtggaggccaacaaaaaagaatagctattgcaggcatagttgcaatgaaacccgaaattatgattttagatgaaccaacagcaggtcttgatccagaaggtgttgacaaagtattgaatatcttgaataaccttaataatgaaggaatgagtattgtaatatcatcacatgacattgaaatggtaaatcattttgcagataaaatattcattttatacaatggtgaaataatagccaaaggcaataagcaccagatattttcaaataaagaattattaaaaaaagctcacctaaaagcaccgacaacaactgaaattttatataaattaaaagaaaacggacttgatgtcaatactgaaaaaataactgttgatgaaacagttgaagaaatcttaaatattgaaagaattaaatag

SEQ ID NO: 8417 - DNA, 831 bp, Methanobrevibacter gottschalkii
  source 1..831: mol_type = genomic DNA
atggttgacataacacaaataatgaggtttgatgaattatcatcacaaaatagcccaatacataatttagaaggacgtattaaattaataaccactatttttattatccttgttagtgttatttcaaaagaactttttataccaataatattagaaataatcttattaaacatattaaagattgcagatttatcctatattaattctgcaaaaagattattaatgttgcttccttttggcggagcaataattgtattccaaccatttattcaaccaggaaatataatctggagttattcatggttgcatattactgattttggacttaattgggcaattttactacttgttcgtatgattgtctgcttaactgcaataatcatctattcatcaacaacccccctacaagaaatggcaagttcatttagaaaactaaagatgccgagagatttagcaatgattctttcaatcatggtcagatttttatttttatttgttgatgagcttgcagcaatccgaaaaagtcaaaaatctagaaattttaacatacactctaaaaatacaacatacaaatggagagtaaaacaagttggatacacaataggaatgatgtttttaaaatcatatgaacaaggagagcgtgttcacaaaagtatggtaagccgtggattttcagatacatcagaaatgtttgacgaaaagaaatctcctgaaaaaagcgattatatattcattatctcaattattattgtagtaattatacttgagattatcatgttcaaatatagtggtcaattaggttacttcggccaaaatttatctattaactag

SEQ ID NO: 8418 - DNA, 306 bp, Methanobrevibacter gottschalkii
  source 1..306: mol_type = genomic DNA
atggataaaaaagatatgtcattaatcattgttgcagtagtaatatgtattgtaatcagttgtctttcaccatacattgcatctggcgatccagacggtcttgaaaaatctgcagaagatgcgagtgtccctgaagacttccaaattgaaccaataaatggaattccagatgcgatcttcccagattatgcatttgcaagcgccccagataatcaaggattacaaattgtagccctgataataggagcaattttaactcttggtgtaggatacggagttgcaacaattttaaaaagtagaaattaa

SEQ ID NO: 8419 - DNA, 639 bp, Methanobrevibacter gottschalkii
  source 1..639: mol_type = genomic DNA
ttgcatatacctgatggatttatacctatcgcacaatgtcttgtatactatgtaattttaatcgttgcattatacttctctgtgaaatgggccaaatccaacttagatgaaaaacgtatacctcttttagcagtacttgcggcaggtatctttgcaatcatgtccatgaacatgccaatcccatttggtactagtggacacatggttggaggtgctttagtagcaattgtattcttagcacctgaagctgctgttttagtattcacagttgttttacttatccaagcattaatcttcggagacggaggaattactgctctgggagcaaatgtattgaatatggctattgttggaggttttgtaggtttatacacctttaaaacattaaatggaaaaataggaaaatatcctgcagcaggaattgctgcatggttagctacagtacttgctgcattagcatgtgctattgaaatgggcattgctggtacattcccagtaaatgttggtatcccatccatggttttataccacttctttattggaataatcgaagctatattaactgtaatcgttcttgtagcattagacaaatttagaccagacttactctcatggaataaaactgaaggaagtgcatag

SEQ ID NO: 8420 - DNA, 1275 bp, Methanobrevibacter gottschalkii
  source 1..1275: mol_type = genomic DNA
atgagcattatttattccaagataacttcagtgataaacaagataagtgatgaaattcacagatcttttttatttacaacaatattttctattttaagattcattgaactccaatggatcaatagctattttaaggaattatatccaaatgaaaaatttttaaattttttaaataacagtatcttaaaaaaaaatttatttaatccattaatagtccttttactattttctttctttttaattttatcaataaaatcaccatctaaaagtttagttattacattaattgtcggatttatagcattttttataggatcaaccatattaccaaaatatttcttaaataataatatcagaattattgaatttaataaaaaagacatatattcaattggtttttgtttaatattagttagtatcatattttttggaatatgtattgcgtctgttggaggaattcctcttttaaaaccatcaataagatatttactaaaaccaatatttacaatgcctgtgtttttaataataccaggaacctgtttagtggccagtgcttatttaaaagatttccaaatgaaaaatattacacgttcacaagcaagattcagattcatatttttgcttgccatagacactgcattattattactcctaggttatagaacaccactagttgcagcatttctcatcataattataataggtttttatggaaatatcatttcactttgggaagttataataagtggattaattggtataggtgctattataggaatcggttattttagatcacttagtgagatgacaataacatcatcaacaaatccattttacacattacaatcaagagcggatttcacattacatgttttaaacttgcttgattttgttggaggcaatgcaggattaacacacgggcatttgttgaccagttccattccaggaagtgatttaggaccaagaatgctcattggaaaaattattgcatggagaacagaagttacagttacccccacactaattggacagatggttgtagactttggtaaaataggtgtagcagttgaaatgtgtattttaggattcattttaggaattggatttaaaataatgcagaaaacaaaaaactatttttacattgccatttactcattgattttaacatattcaattttaggcatagaaactggaattttagacatacaagttttattttacttcgcaacagccatatttatttatttaattaacatcaaaaaatcccaacaatag

SEQ ID NO: 8421 - DNA, 774 bp, Methanobrevibacter gottschalkii
  source 1..774: mol_type = genomic DNA
atgaaaataaaatttactttaattgattacttaattatcattttggtcgtatgtgctatttcatttgcatttatacacataacaacagataattcatcagaagtgcaaaaaaccgtgtttgatgcatctacaatcaataaaattccagatacttattttaactattatagagatggatatattgtaggaactactgtcgatggatttaatgctagtactggagaaaaaataacactaaatggcactataaaatggattggaaataatggtggaacagacgttaagatattagtcgaatccgacaataccacttatcttgttggtctatataaaagtattccggaagcggatatttatatagataaaatttcacttgaaactaatggcagtacctacccaaatttagtagaaattaaagcaagtccagaaaatatctcaacaatcaatgatttgaataaaaatttatcaaatagtgattttgaaatatctactataatctctcttgattccttggacttggtaaaaatccaagagatagctaacaaaataaattctcacgataaaagaatggctattaaaacacctagttcaggattggggaatagcctgatattggaaaatgctaataaacaaacacttgacgatgcaaattctgttttaggcaatattaacggacttacagatgaacttacaattagaatatacaactgtagtgacagccaattagagcaggtaaagaatagctataatattacaaatataagaacattttaa

SEQ ID NO: 8422 - DNA, 156 bp, Methanobrevibacter gottschalkii
  source 1..156: mol_type = genomic DNA
atggaagaatgtggagtttgtgaagactgtattgatgtatgcgtagaagaagcaattgaaagaaaagcatacactgtaactattgatcctgaaaaatgcgataactgtggagaatgtgttgacgtatgtccagttggagctatttatgaagaatag

SEQ ID NO: 8423 - DNA, 561 bp, Methanobrevibacter gottschalkii
  source 1..561: mol_type = genomic DNA
atgattaaaatagctacagcagaatgctttacccatggaaaaattggaagggaactccatgcactagctcaaaattacgaaggaaattttggaatggaatatatccaaaattctaaacaatatggtaactttgactacaatgaactgaatgtaacctgtagcctatttataccaacacttgaagccgttaaaaaaattttaaatgtgaaaaatcctccgaaaccagatactttaatcaaaggaattaaagtttataatgaagaaaaagataaaactgtaagtaaaattatggcaaaagcggttaaagaactaagtgattgtgatattgctattggaacaagtgcaggaataggtagaggtggaataaccatattaacaaataattttgaaataacaaccaccaccgatatttatgctgatttaacagataacaatagttcagatttattcaagagatcagaatccggaattaaaaaaacattagaaataatattacttcttttaaataataattttgacagaataaactcgttagaaaatgttgaaattataaaaaaataa

SEQ ID NO: 8424 - DNA, 651 bp, Methanobrevibacter gottschalkii
  source 1..651: mol_type = genomic DNA
atgatagatgaaatacaaaaaatggaagatttacaagttccaaaaggcagaatagatctgatcggttgtggaagattaggattaagaatagcaattaacttaatacaaattcatagaggaggaccgaaagtaattggtgcttttgatgggcaaaaaatttctgatggagacataattttcaaattatatggtgcggagcttgatgaatccaaacctgattttataaaaagattatgtacacatgacaaagaatttagaaaaatcgaggtgcataacgaatatatcaacgatgataacttagatttaataactggggatgtgataattattgttatcgctggtggaaacacaatacctactgcttcaaaaataatcaaacatgcgcaaaaaaaaggtgctaaaaccattagtaccgcaggaatattcggatttggtaacgaacacatcgaaataaaagacatttccgaatatgataacaacaatccagctattgaagaattgagagcacaaggagttactgagaaccatttagttttaacaacaaataaattaattagagataatgaaccagtaacaccatacaccttagatgaagttgcaaaactaattaccatatgttcactaaaattattaaaagatcaaaatgattaa

SEQ ID NO: 8425 - DNA, 696 bp, Methanobrevibacter gottschalkii
  source 1..696: mol_type = genomic DNA
atgaaacttaaagaaattattagctttataaatgaaagaatacctgaagatttagcattaaaacacgacaatgttggattgaatggagaatatgatttaaaccaagagataacatctattaaaattttcatggatttattgcctgatgatgataatggtgagaatacattaattattacacatcatcccccattatttatccctaaaacacccacttacacaattcattcaaattgggatgtaattaaaggaggatctaatgatattttagcaaagacattaaaattagatgtaattgatgttttagatgaaaaaacaaatattggaagaatctgtaagactgattattcatttaatcaattgaaaaaaatcatcttagacaaatatgaaaatgtaaggattgtaactcaattaaatgatgattacattttaaataagattggaacaatatctggatttggtcttaaaaactcaaaatatgtcaaattagcaaaagaaaaagaattagacatattaatttctggtgatttgacacaagaaactgcaatccttggaaaaaatttaagcatcacattaattgatttaggacatcatgaaagtgaagtacccggtttatatcaattagcaaacctcttaaaagaaattaatattaatattgaagtgattgataaaacccccatcaaagtgataaaatga

SEQ ID NO: 8426 - DNA, 798 bp, Methanobrevibacter gottschalkii
  source 1..798: mol_type = genomic DNA
atgaatatcgatacgggaattacatcagaagtatttacaatcaaatctcaaataagattattagacatttttaatgagataattaataaaaaatcacaaattgtatatgaatatttgaaaagtttaaatctggataataatgttaaaataattgttattggaacgtattttactggattgggaatagttaaaaaattaagtgaaaaatacaataatattatattagttgacatttatcctcatttagaacagttattatataccaaaattggcggggaattaaaaaataatattaaattttcatcagatctaaatttaatatataatggagatgttgttattgataccacaggatttggcggaatcaatgtagaacagtcttcaaaatttaatgttaatacatttataatcgaagatccgatagcagagaataatgatattttgttgaaacataaaaacaatatcctaaacagaataaatgtggtgaattctcaaaataaagcaattataaaaacaaaaggaattaacacaaaaacttctggaacaatgagtttaacaatgagaatattaacaaatgccctagataactgccttaaaaaagaaggtgttctctatagtgcctgtgaaatgggattttttgaagaaattatttttaaagaaaaaaatattgataaattcatagaactgacaaatatgcctgcaattaaagtatcaacaataaaaccatttaattgtaatgagattattaacagagaacttgataaaataacatcaaaaatgattttaaatgaaacttaa

SEQ ID NO: 8427 - DNA, 486 bp, Methanobrevibacter gottschalkii
  source 1..486: mol_type = genomic DNA
atggcatttgaaaagatgatacatgatgcatttgaagaatctaggaataactctagactcggagatacaactgatgaaataaatgaaattaaagaatatataaaaaatgctaaaaaaatttatgttccaaataaaaatgggattaaagtaaaagttttaaatgaagtattaaataaatatggacttccagaagctgaaatccttcaaattaataccagtactgccgacaccagtagaattcccgcccttgcaaaagcttatatggctcttgatcaaagtgatgctgatttaattattgcaagaggcagattaggaattcccggttctggctcattacttatttttatagacaataaaggaagaatattaacttgtggaacatccccttcccatcccattcataaaaaatctcttgaacaagcagtatatgaagaagcatgtgaagcacttgaaaagattggatttgataaaaggttaaaaaaatga

SEQ ID NO: 8428 - DNA, 999 bp, Methanobrevibacter gottschalkii
  source 1..999: mol_type = genomic DNA
atgattgatgatattttaaataaagcaaaattaggaaaaaaattaactgatgaagaatatttagaactattaaaaattgacaataatgactatttagaaaagttattttcaatagcttgttatatcagaaatagccaatcaaaagaaataaaattaacatcaacagtccatattaccaataaatgccaaatccaaccaagatgcgaatactgcggatttgctgaaaagacctcaagaactggatattatgatgcattttataaatcaaatgaagaaattttaaatgccatcgtctcaattcagaaagcccatattcctcgtgtaagctgctctggaggatatggatataaaggcagacaggcagtaaatgcatgcaaaatagtaaaagaaaattcgaatctggaaattctaattaatgttggtggagatttaactgaaaaatcagtagaagaattagcaaaattaggtgttgatacagtatgctgtaatctcgaaacaatcaatgaggacatatttaatgaaagaaaacccggagattcattgaaacaaagaattttaacttgcagacgagtgagttccgcaggaattggtttatcatcaggattactattgggaattggagaaagtgttgaggatagattaaaacacttgcgttatttatccagctttaaaactcttgaagaaattccgattatgggttttaatccatatccagatactgcaatggctgactatccttcgtttcccttaaaagaacagttgaagattgttgccattacacgtataatgtacccttcaattagaattacaatgcctacaccgactgttgggccagaaaatgttgaattttcactgaaagcaggggcgaataatttagctactgtgattgccgataattaccctcttgaagtaaaaggggttggatcaccagaatatggcaactatacagaagtaattaatgtaattgaaaaattagggttaatacctcaaactatttaa

SEQ ID NO: 8429 - DNA, 1014 bp, Methanobrevibacter gottschalkii
  source 1..1014: mol_type = genomic DNA
atgaaagtagcaattttaggtgcaggatgttatagaacccatgctgcaagtggaattacaaacttcacaagagcttgtgaggttgctgaggcgacaggaaaagaaaatatttcaatgacccactcaacaattgaaatgggtgctgaattattagagttagctggagtagatgaagttgtagtatctgatccaacttttgacggtgaatttactgtagtggatgattttgattatgctgaagtaatagcagcacacaaagccgggaatcctgaagaagtaatgccagcaatcagagcaaaagtagcagaattagccgaaacagttccaaaaccatcaaaaggtgcaattcactttactcacccagaagacttgggaatgaaagtaactactgatgattctgaagcagttgctgatgctgattgggtaatgacatggttacctgaaggcggtatgcagcctgacatcatcaaaaactttgctgatgacatcaaagaaggtgcaatcgtaactcatgcatgcaccatcccaactaccggattaaataaaatctttgaggatctcggaacaaatgttaatgtagcctcctaccatcctggtgctgtacctgaaatgaaaggacaagtttacatagcagaaggttttgctgaccaagattccatcaacacattaatggatttaggtaaaaaagcaagaggatctgcattcacattgccggcaaacatgataggtcctgtatgtgacatgtgttctgcagtaactgcaattacctatgcaggtattttagcatacagagacacagtgactcaaattttaggtgctcctgcaggatttgcacaatccatggctaatgaagctttaacacaagtaactgcattaatgcagaatgaaggaattgacaaaatggatgatgctttaaatccagctgcattattaggtactgcggattccatgaacttcggttccctagcagaaattgttcctactgtattagattacttaggtaaagacgaataa

SEQ ID NO: 8430 - DNA, 1497 bp, Methanobrevibacter gottschalkii
  source 1..1497: mol_type = genomic DNA
atgtatgatttaattaaagaagcagttcatagtgatgaagcggcaattgaaatatcaaaaatgaaaaaagatgtaggttctgtggtggatgcaatatctgaactttcattagatgataccatgaaattgggaatgagttttaaaagatttcctttaggttgtgatttgactgaagttgttgttggtacatgtgcttcggatttggaattaatggatttgttgggtaattgccgtctatctgatatgattggcgctccaattcatatttgtgcttatgctttttctgatattggtgaaaaatttggaatgactggttttgaagtaatgaaaaaggttcatgaaattgttgatgttcctcttgatttggatcattttggtgaaaatggtgcaatgagacttccaaaaaacattacaggttgtggtggtgaatgttacagtaaaggaccttcatttactgaatgtcctcgtggaagaatacatgaacgattaattgataaagaatttgaacaaaaagaagataaagaaaattgggttaaattatcttcatctgttgcagttaatgtttcatcagaacaaactggtgatgctcatgcagctcccttaagtgaagctaaggatattgcagttttggctaaaaaatatggcaagggtttggagtctataatgtttgttggtgatggttatgatgaagtaatcacaggttttgaaaaatccatcgaccttggtgctgatgttattgtagttgaaggaggtccatttaatagatgtgaaaacacaacagaatcatttgcaaaaacaattgcagctgcaagaattttatctcctggaaaagttgtagctactaatggtgcttatgaacatgaacttagaatgggactgaggtctggtttaaatatggtaataaccggttttcctaaaaatcatcatggttatatgtgcggatatgaacctggaactgcaagaagggggaagtttggtcttccaagagtagtgcaaataatcaatgaagaatttccaaatatgggtcttccagttcaaaaacaggatttgattgcaatagccgctgcagtaaaatttgcaggctctgaaaatatttatccaaataaaataggatcatatcatgttggggatgcgcattgggcaacattagttaattccaggatgtatcataatattaaacttaaacatacattaaatgacatagttaatttggttgaaggtagtactgtttcattacatggtgggagatttgtttcttgggttattgccaaagaacttgacaaaaaagttgaagaaataattatttccgatgttgatgattgggttttgagcaatacagttaataatttgcaagatgaattgaatgctacaatcattgctgaaaatgatgataaacgggcatctagtcaggcaaacttttctattgcttcatcaacaatgatttcaattaaagaaaacattttaaagaaagtaccgcatgctttaactatagtttaa

SEQ ID NO: 8431 - DNA, 900 bp, Methanobrevibacter gottschalkii
  source 1..900: mol_type = genomic DNA
atgaactataaaaaacttgtattagttggttgtatttcagcatttgttgctattttaacttcagttatgggtgttgcaggtacaattattggttcagttatttcttctgttctttataatatgcttacagaagtattggaaaatcctattgggaaaaaaacattcagccctagctttgaatgggaaattgcatatgtatttccacttattgtaatagctataattcagtttattttaatttcagctttattatcagaagttggtattttaccttatacttttgtaaatgtttatttatcaattcaggaaattgccaataataatttatacagaattttaggtttagcattgttagttatgagtgtttatccgtttgtattaaaaagaggcattgttaaaaaatcaaatggaacggttattgcatttgtcggtttaatctttttagcccgtgggtttgtggatttgggaaacaggattacagagatttatcatgccgtatttgtatattttgatttaccaatagctattattgcttttgtattgttagtatttgtgataattaacatactcatttcagcaaaatctgttgaaaatgagtttaaagtaattagccatagtactaatgaagaaaatttttcctctccaaatgttcgaagagtacatcactccagaaaacacaatgatttcaactatgctgaaagagacatatcaagacaaaattatcaaaatatgaataaacataaacatggtgataatgttcatgaagtaaaatttaaaaaagtagttaaacaagaatctgatagaagcaagtcatcaaatagtaatcaagaagcaggtattaatgaatcttcaggcaatattcaatttgaatccaatgatttgttggatgattacaaataa

SEQ ID NO: 8432 - DNA, 885 bp, Methanobrevibacter gottschalkii
  source 1..885: mol_type = genomic DNA
atgagtaaaaaagataaaactttgaaagatattttagatattattttatatgacaatccttcaactcaagatgaaattgctgtaaagttgggaataactcgcagatatgttactcaattattgcaacctcttgttaaagatggaactgtaaaaagagcatatatgattgatttaaaaagctatgaaaaagttgccgagtctttaagtgattatgccggatctaatgagacaaaagggaatgtgatagtcaatgatatgattgcaaacatggcaagacatgttcattcacaaatcgaagtttcgtttgatgctgttttagaatatgatgaagaaaaagcaaataaagccttggaaatggattatgccacaaacaatatggttgaaaagataagaacatccgtcgaaacaattgttagtatgaataaacattcggaaatctcaaaatcaatgctttataatgaacttgcttatgatctggagcgtattggtgattattgtggtcatattgctaaatttgtaatcaatgatgtttatgaaattgatgaaaatgttttaaaaaaattaaaaaagatgtataaaatagctcaaaaaatgattcgtttagctattacatcatttattgaaggaaaaactgaacttaaagatgatttaatggaattagaagaatcaatccatattcttcaaactaaagctattaatttaatagcagaacaaatggctgaaaattcatttgatgaaaaagagcgttcaaactattttatttatttatttagagttgtcaaagcatttgaaagaatgggggatatctctgttgaaatgatggatgtttcaatcgaatttcatgaaaatattcctaggtcaactactccgagaaatttcagataa

SEQ ID NO: 8433 - DNA, 843 bp, Methanobrevibacter gottschalkii
  source 1..843: mol_type = genomic DNA
ttgattacaaaagatactattaaagatactgtttatgaactttacaaacaggccgttatcgttttaggtgatgatgtaaagaaatcacttaaagatgctcttaaaattgaagaacatgatcttgcaaggttaaatattgaagctattttaaaaaatattgaacttgctaaagaaaaacaaattccgatgtgccaagatacaggtttgccagtagtttttgttagattaggtaatgttgaagttgaaaatttacgtgaagggattgaagaaggtataaaaaaagcaacaaaagaaatcccaatcagaccaaacattgttgatccattaacaagagaaaatacaaatgttaatgttggagattacatacctccaatagatattgaattaatcgatgaagattacctcgaaataacaatattgcctaaaggattcggttctgaaaataacaatgctttaaaaatggcactccccgccgaaggaattgagggcattaaagaatttgtagtggaatctgttcttaaagctaaaggaaaaccctgccccccaacagttgtaggtgttggaattggtggaacatcagatttatgtttaaaacttggtaaaaaagctttacttggtgaagttggtgtgagaaatcccaatccacaaatagctaaactagaacaagaaattttagatgaaatcaataattctggaattggaccgatgggacttggtggaaagacaacctgtttagatgtaaaaatattaaaagcacatacacacacagcaggtttaccaattggtgtttgtatccaatgttgggcagataggcatgcaacaacaaagatatatgataattag

SEQ ID NO: 8434 - DNA, 246 bp, Methanobrevibacter gottschalkii
  source 1..246: mol_type = genomic DNA
atgagaattatgtattcaggaaactgtacaaattgtacaacctgtggaagttgtcaacaaacacagaatgttgacactcctattttattttgtatgcactgccaaccatcagatgcgccatgtttaaaagtttgcaaggaaaatgcaattgaagtattaggtggagccataacaattaatggtgaaaaatgtaacaaatgcagagattgtgttgaagtctgcccaattaatgtaattaaaatttaa

SEQ ID NO: 8435 - DNA, 501 bp, Methanobrevibacter gottschalkii
  source 1..501: mol_type = genomic DNA
gtggaaagtattcttgtaaatagcgacttatgtgatggatgtatgaattgtgaaaacatgtgtgcatcagtccataatgctagtaggataaaaattattgaacatgattcttccttttattccattgtatgtcaacattgtgaaaatgctccatgtataaaaatctgcccaactgaagcggtcactgaagaaggagtggatactgaaaaatgtattggctgtggattatgtgtaatgatttgcccatttggtgctatgacattccagtccaaagttgctgaaaaatgtgacctgtgtgctgacagggaagaaggacctgcgtgtattaaatcatgtactaaaagagctattagcatcgctgatcctgaaaaaattagatctaaaaaccagcaaaaatatttagctaaaatggctggaatctatgaaccagatagtaaaaaaggcggatttgtccatgtcataacaggtcaggcaagagcaagacttgtttttgatgaataa

SEQ ID NO: 8436 - DNA, 867 bp, Methanobrevibacter gottschalkii
  source 1..867: mol_type = genomic DNA
atggatatacctgataaagatttattagcaccgggacacagaggctgtgctggttgtggagcatcaattgctgtaaaattagctcttaatgcattaggcaaaaatactgtagctatttctgctacaggttgtcttgaagtaatgaccaccccatacccagaaacttcatgggaagtcccatttattcacgttgcatttgaaaattcaggagcagtagcatctggtgttgaaagtgcattaagaattcaaggaaaagatgatgttaatgttgttgctttcggtggtgacggaggaactgtggatataggtttacagtcattatctggagctatggaaaggggacataatatgctctacatctgttatgataatgaagcatacatgaatactggaattcaaagaagtggagctacaccatatggtgcaagtacaactacttcaccaaaaggaagtgcaagttttggggaagacaaacctaagaaaaatatgccaatgattatggccgcacatggaattccatatgtagcaaccgcatctattgcatatcctgaagattatgttaaaaaagtcaaaaaagcagctgaaactaaaggacctgcatacatacatttacaacaaccatgtactaccggttggggatatgcatctgaaaaaactattgaaatgggaagattagcagttgaaaccggatcttggattttatatgaaattgaaaatggtgactttgaaattacatacagacctgaagaaagaaaaccggttaaagattacatatcagtacagaaaagattcaaacacttagatgaagaacaaatcaataaaatccaaaaatatgttgatgcacattgtaaagaattaggattatag

SEQ ID NO: 8437 - DNA, 1146 bp, Methanobrevibacter gottschalkii
  source 1..1146: mol_type = genomic DNA
atgataaaagaagtaatgaccgcaaacaaagcagttgcagaagctgtaagattagctaaaccacaagttattcccgtttatccaattactccgcaaactacaatttctgaatacttagcacaatatgttgcagatgaaaaaattgatgctaaatatattaaagtagagtcagagcacagtgcaataagtgctgctgttggagcaagtggtgctggagtaagagtatttaccgcaacatcttcacaaggattaatgttaatgcatgagattttatttgcagcagcaggtatgagagtgcctatcgttttagcagatgcgaatagagcaatttcagcaccgttaaatatttggaacgatcaacaagattcaattgcacaaagagatgcgggatggttacaaatttatgttgaaaatgctcaagaagcattagattccactttaatggcttataaaatttcagaaaattccaatgtattacttccatcaatggtatgtttagatggatttattttaacacacacagtagaacctgtagaaattcctgatcaagaaagtgtagataaatttttacctccatatgttccagaacatgcatttcttgatccaaatgaacctatgacaatcggtagttttgctgatacaaattattatattgaagcaagacatgacatggaaattgcaatgaacaactcaatagaagttattaaaaagacttgtgatgaatttgctgaaatatttggaagaaaatacggtcttgttgatccatacaaaaccgaagatgcagacatcatttttgttgcaatgggttcactctgcagcacagttagagtaatcgtggaccaattaagagaaaatggggaaaaagtaggtttacttaaaattagagcatacagaccattccctgttgaagaaatcaaagaagttataaaagactgtgaaaaattagctgttattgataaaaacttcacattcggaattggtggagcactttatgcggacatgaaagttaaaattgataaagaaatctatggatttattgcgggtttaggtggaagagacatcacgccagattcaatcatggaaatttatgaaaaaacaaaagaacctgtacaagatgttacatggattggacttaaggaggaatag

SEQ ID NO: 8438 - DNA, 243 bp, Methanobrevibacter gottschalkii
  source 1..243: mol_type = genomic DNA
atggtaagtataggttgtgtaattaaaacaccaggcaatagtaaaatcaacaaaactggaagttggagaacatttaaacccattttagataaagaaaaatgtattgactgtgacaattgtattattttctgtccagactccagtgtaaataaacaacatgatatagattatgattactgcaaaggatgtggaatttgtgcacacgaatgtccatctgatgcaattgaaatggtaaaagaataa

SEQ ID NO: 8439 - DNA, 558 bp, Methanobrevibacter gottschalkii
  source 1..558: mol_type = genomic DNA
atgattatacatgataaatgtatggaggaaaaattaatgattgaaattcgttttcatggaagaggtggacaaggtgctgtaactgctgctgaacttttggctaaagcagcatttaaagacggcaaatattctcaggcttttccattttttggagttgaacgtagaggagctccagttatggctttcacaagaattgataccgaaccaatagctttaagataccaaatctacaatcccgaccatgtattagttttagatgatggattattgaatgtagtagatgttttttcaggaattaaagatactactgaagttataatcaatactaaaacttttgaaggtagtggagaacatactgttaatagtattgatgcaactggagttgcattagacatgttaggacgcaatatcgtaaatactattattttaggatattttgctaagaaaacccaaattgtaagtattgaatcattacttgaagtgattagagaaacattccccggtaaagttggagaattaaatgtagaagctactaaaaaagcttatgatatgggataa

SEQ ID NO: 8440 - DNA, 1605 bp, Methanobrevibacter gottschalkii
  source 1..1605: mol_type = genomic DNA
atgaaagttctgattatcacaggggagttggcatatcctttaataaaagaggtagtttcaaattcaaaagaggatataattgtacacattgcagataatactcaagttgcagcatttttaactcctaaacaaataattaaagaagtaaaaacttgtttttcaaatcaattagatgaaattgatatgattttagttccaggtttgattaaaaaaggaacaaaagaaataactaaagaacttggaattcctacatttaaaggatccactgatggggcggatcttgcaatggttttaaatttagtgggtactattgaattgtctgaagataaacctgcagataagttgattgatgaagaaaagagaaaaaaagcttttaaattcattgacgaatttgaaaatgataaagaaaatattgaaaaacttctaaaaaaaccaaataatattttaatcaagaatcttccagttggggaagattttccaatgagggtattgtctgagattgctaatgcaccttttttatcaaaagaagcattgattaataaatgccagtattttgttgattcaggagcagatatgattgatatagggatggctgcaggtgaagatttctcagataaaattcctgaattaattgatacactgcgccctattgttggtggtaggccattaagtattgacacattaaatacaaatgaaataaaggttgcagctgaaaatggtattgatcttgttttaagtcttgatttaggcaataactctgaagttaaagaaattctaaaagaaaaaaacattcctgctgttttacttccaacaaacttttcacaaggtaagtctccaaaatctccggctgaaagagttgaagcaatgaatcagttgattaaagatactgaaggtttaaaatatgttgcagatttaattttagatcctgtaaatagttctagcattgttgaatccataatcgcttgtaatgaattccataaaacaaatcctgcaccaatgttttttggtgtgggcaatgttactgagttaatggatgctgattctggtggagttaatgttttacttgcaggaattggtatggaattgggtgtaagcatattgtttacacctgaagaaagtgggaagacaagaggtagtgtttatgaattagctacagcatctaaaatgatgtttcttgcaaaacataggaaatccattccaaaagatctggggattaatttagttgcatttaaagataaacataaaagaaatgatattatattaaatgagagggatggcattccagaaactatgcaagaaaagcctatgaaattcataagggataaggcaggcagttttaaaatcaatgttgattatggaactacggttaagcatagtaagattactgccactcacttcaagaaaaataagccggatattgtaattgtagggcataatgctcgggaaatttatgaagaaatcattacaaaagaattggttacaagaatggagcatgcagcatatctaggttcagaattacaaaaagcagaaattgctatgattactggaaaagaatatgttcaggattttgatttattcaaaaatcctgatgaatttaaaaaatag

SEQ ID NO: 8441 - DNA, 405 bp, Methanobrevibacter gottschalkii
  source 1..405: mol_type = genomic DNA
atgaaagctgataatgcaatcataattgtattagtagtattgataatactttgtggagcagttgctcttgttattactaacaatggaatttcatttaataatacaagtgattctgtagtgaacaatacaaccaatacaaccaatatcactgctaatgatactgatgaaactggtgcgactcatgataccggacttgtagcttccagttcagatgatggttccagttacagtagtagtggatatagcagcagtagtggctcaaacagcggttctagttcaggacatcaaagtgacaactctcaaagttcaagcggaagtgaatccagttcaggatcagaatccaattcagaaccagaatctgatagtgcaggacaaagtgaaggctcatccgcagacttcgaataa

SEQ ID NO: 8442 - DNA, 855 bp, Methanobrevibacter gottschalkii
  source 1..855: mol_type = genomic DNA
ttgcaagctgaaaatattagtattaaggatattgataaaagtcttttagattcaaattatgtttcaaacaatgaaatttcaactactttatatttatcattattacttggaaaaccgatgcttatagaaggaccgccgggtgttgggaaaacagaattagcaaaagtagttgcaaaaacattcaatagggatttttttagaatacaatgttatgaaggaattacttttgaacaaattgttggcgaatggaattatcaaaaacaattacttcatttggaagccgctagaaatgattcagttcgtgaagataaaatatttgatgaagagttcttcataagaaggcctttacttaatgcatttttaaatgataatgattcagtattgttaatagatgaaatcgataaagctgatgaggaagtagaaagttttttactccaggcattaggagaacaagaaataactatcaatgatcttggtacttttcaattaaacaatgatttgattgtcattttaacatcaaattctcaaaggtcattacttgatgagacaaaagacagatgtttgtttttatacattccatatcccagcattgaacgtgaaattgaaattgttaaatcaaaattacataatgcagatgatgaaactgtatcatatgttgttaaattagttcatgatatacgtaacctcaacttaatgaaaaaaccatctgttagaggtactgtggattgggttcaatcagttatgaatttaggaactaaaaatttagatcagtccttaaaagatagtgttggtgtagctattaaaactgaaagcgataaaaaaagagttttaaaggatatttttaataaaagataa

SEQ ID NO: 8443 - DNA, 1155 bp, Methanobrevibacter gottschalkii
  source 1..1155: mol_type = genomic DNA
atgttaacaaaaatagcaactttgtccgctcagttaagagaaaaagatttgcccgtaagtgttaggagtactcaggcagctgtgcaaatttataagaatttaggtgaaagcgataggaatctactaaaaaccgcattaatggcaatttatgttaaggatagatatgatattcctaaattcaataaaatatttgatgaagtattcactgttaataaaaaggttgaaatgcctgaacaacttcaaaaaagtaaggcatatgagggtactggacctaaatctaacaaatatgtaatcaaaaaacaaggaagcatggcaagtaaagttcaaaaagagaaaattacaaatgaaaaattaaaaatgctttctggccaaccgttacttgatgaggctaaaaaacttgagcgtgatggtgagttgatgaataaagatttgacaaaattaaatcgttttgatcctcgcatgcttgagatttgccaaaggttgggtaaaagaattgctaataaacgttcacgaagaaaaactaaaacaacttctaataaaattgacattaggagaaccataagagctaacttaaaatatggtggagttccttttgaacttgtaaaagcaaaaccaagacctcacaaaaatgaacatttatttttaaatgatatcagcgggtcatgtgaatggattagcagctggtttttcatgttgatgttttcagcacaaacagcatttaaacgatcaagaactttcgaatttgataacaaagtaattgaaactactgatgctttaaaagaagaatatttaattgattcattcgtaaaagttaaagatttgcgagttaaaaatttaatggttcatggtacttcagatatgtactcctcatttaaaagctttcaagaacaagctaatattaataataaatcttacgtgattattttatcagattgccgtgattgggcaggaccaaaggttaatggtattccagctagtgtggaaattgttgaagagatggtaaaagattctaaaaaacttataattttaaatccggaagataaaaataaatgggatgttgtggacagctgtgtttcattgtatagggatgcaggagcacaaatatttgaagttaatactttaaaccaacttgcacaatttgtagaacagatgtag

SEQ ID NO: 8444 - DNA, 918 bp, Methanobrevibacter gottschalkii
  source 1..918: mol_type = genomic DNA
atgcaatgtagtaaatgtggtaatcctaaggttattattaaaaaggaacaatctggtcaattattatgtaaggattgttttattgaatcaattgagaagaaagctataaagactattagaaaagaaaaactgttagataagggggataaagttttagtagcattatctggtggaaaggatagtgtaacaacacttgaaatattaaatacattccgtcaaatgcacattattgagctttgcgccgttacagttgatgaaggaatcgataattataggcaggatggtgttgatatagctattaggcatgctgagagattgggtattgaacataaagtagtgtccttaaaagatgaatatgggattactctagatgaaataatgcagaaagaaaatcataaaggttcttgtacatactgcggtgtatttagaagaactatcatcaataaagcagctcgagaaatgggtgcaacaaaaatagctacaggacataacttggacgatgaagttcaaggaatcctaatgaattatcttgaaggaaatattgataatttgactaaattaggtgcaaaatcagaatctaaggcagaagaattcacagttaaaatcaaacctttacgtgaaatacctgaacgtgaaatcggattatatgttgttgcaaaagaattggaagttcattttgacagttgtccttatgcgatgcagtcatttagaggtgaaatttctgaagttattaatcatttagctgaaaaacaccctacaattaaatattctacactcagaggatatgataaaattaaaaatgtattgaaaaaggaattaaaaaaagaatttaatcatggaagatgtagtaaatgtggtgaacctgcagctaatgaattatgtaaggcttgttcatttttagaagaattgggaatgtga

SEQ ID NO: 8445 - DNA, 204 bp, Methanobrevibacter gottschalkii
  source 1..204: mol_type = genomic DNA
ttgcaatttatattgaaatataaatcaataaatgagaaaagagtattacctaatgataattatacaattaaagatttgcttgatgaattacaattatctgctcaaactattgtgtcaaaacaaaatggtgaacttgtaattgaggatactgtaattgaaaacggtgatgaaattcaattagttcaaataatatatggtggttaa

SEQ ID NO: 8446 - DNA, 864 bp, Methanobrevibacter gottschalkii
  source 1..864: mol_type = genomic DNA
ttggatattagttatgaatgtgggccttgttttttaagacaggctcgtgaagctttagatttatcaactgatgatgaaaatcttaaaatggaagtaatgggtgaaattttcaaatttttaagtgttactttcagagaaggtactaattcaaatagcaccggttcttcaatgcataatattattaaacaaaaaactggttgcatggatccatattataaagaaaaagttgaaggtaatgaaattgctattaaatacttgcctgaagttaaaaagatattgactgaagatgacagtttggaaaattatgttaaaatagctattattggtaacattctagactttggtgcatttacattagacgatgatattgaaagtgtaattaaaaattcacttaaaaaagatttggctgttaaggatattgaggaatttgaaaattctctaaaaacacatgataaagtgttatatttagtggataatactggtgagattgtatttgataaattacttctaagtaaaattaaagaatatgatttgaatattacaattgcagtcaaatcagaacctattttaaatgatgcaacaatggttgaagcattggaggtgggactcgatgaattcggagaacttgttgatataggggctggaactgttggttatgtggatagtgaaatttcagatgaatttagacaaatttttgatagtcatgaattcataatttcaaaaggtatgggaaattatgaaggattgactgaaatagatctatctgataaagatatttacttcttattatgtgtaaaatgcaatactattgcaagacacattggtgcaaatttgcatgatatgcttctttttaaaaaacaatga

SEQ ID NO: 8447 - DNA, 735 bp, Methanobrevibacter gottschalkii
  source 1..735: mol_type = genomic DNA
atgattattggtttaattggatttggaaatgtttcaaaaaatttagtaaaattaattaaatcagatgatattacatttataacttcgatggaagatagatctcctaaaacaattgatgctattgagaaatctaaaattaaagttctggatacatttaaggatgtggctgttgcttgtgatattttaatttctgcaaattctccaaaaagtgcacttgaagctgcagaaaattatggaaagtttacaaaaggaatctacttagatttaaacaatatttctcctgatactacttttaaaataaatcagcatgttgaaaatcttgttgatggtgcaataattggaaaaatagattctcctaatccttatttatatatctctggtgaaaaagcagaagaattattatttttaaatggatttttgcaaaccaaaaaaattagtgacaatgttggtgatgtagctattttaaaattacttagaagtagttatacaaaaacattgtctgctattttaattgaatcaacagaactttccagagaatatgatttagaagaagagttttttgatattttatcactaacagaaggggataactttagagagaaatctatctcaagaataaataatacattaaataattcaaaaagaaaatctgaagagattgaagaaataataaattattttaataaaaataatttaagtatggttagagcagcattaaaaaagcttaaccaataa

SEQ ID NO: 8448 - DNA, 1269 bp, Methanobrevibacter gottschalkii
  source 1..1269: mol_type = genomic DNA
gtgttaatattgattggaattagtgcagattttgaccctgttcataaaggtcatgaaaagttaattaaagaagctagaaaattagctgataatgaaaacaaaaaagttgttgtttatttaaataagggattcagtgcaaatcacgctcctttttttgttaatttcgaagcgcgtagagatatggcattggctttaggtgttgacgaggttaaatcttttgaaggattgcatcatagattagttctgtcttacagtgtgccgattaggcttaaacaaatgattgatgatggaataactgattatattacatcagcaagcatttcacttgatgaaattaaatcaaaagcacaaaagtttattgatgaaggaaattttgttggaatgccaaaaagttacactaacaggaatgaaatccgttggtatgctataaatcagtttctcggatcaaaacttaattatcatgtagtaaaagaattcaataaagacaaatattccgggagactcattagacaatcaataatcgataacggaatggtaataacagatgatgttaaaaaattactcccaaaaacaactatcgagattcttcaacatgaaattgatgccgatagaattccagaaaatagaaattgggtagaaatctataaaaaaatgaacacatattccagaggaaaccttgaaaaaatagcttaccttaacggaaacacaataaacgaaattattaaaagaagagtttatagagatccggaatctatttgggcagtttttagaagatctaattacggtcccgtaatgacaagattagcaatcagttcaattgaaatgggagttacaaaaaaagaagtaatggatttaatgaaaggttatgaatcacaaggagttattccagataatcaaaaagtccagagagtaattgatagagcatggtatgttgcaactagcagattagatgcacgtgaagctaatgaaaaatttagaaatgaaaagattgaggttaattctccattatgtttagaagcaggcctaaatttaactaaatttgaaacaaaaataaccaaagaaggattgaaaacagatttatatgtagataaaaatggtaaaatatctgttcagtttaaaagtgaaggcaaaaagattaaaacaaatttaagacttccagcagaagaagttacatatttaagatacattatggactctcattttattccggttaatggacatataaaaaaatctgaaaaaggatttaaagttaaagtaattattggttaa

SEQ ID NO: 8449 - DNA, 483 bp, Methanobrevibacter gottschalkii
  source 1..483: mol_type = genomic DNA
atgaaaactaaatttgttagtttactgtccatacttctcggattaataattgtcatttttccaataatgggagttattggagttggttccttaattggtttatccgcattattaatgtctatttatttacttatcgttggaatagcaataatagattataataatagtggtgcgatacttgatttagttttaggacttatacttttattcttaagtatctgtttaatattcaatccatcattacttggatttttaactgaaatttcaatgtattttgcaggaataatgttaattattgttgctgttgtctcattaataaataaccgcaattcaagatacggattttatagtggaatcattggaatcatacttggtttattatatataattattggaacttacctctcaaacccaattattcttggtactttaatcggaatatggttagtgataagtggtattttaaaattaatggatagataa

SEQ ID NO: 8450 - DNA, 1083 bp, Methanobrevibacter gottschalkii
  source 1..1083: mol_type = genomic DNA
atggaaattgaaaatttaacaaaagatataagagcgagagcttttgagaaaaaagatccgaaaactccagagcaagttggagcaagttggtataatgatgatttaacttatgagggtatttcaaaaacattatttatgatattgccaacaccaggatgttcatgggcacttggcgatagtggtggatgtacaatgtgcagttatgtgtctgattgtacattagaaccaattgatactgaaactattcttagaatatttaatgaccatttatcaagacatccaataaatgaagaagataaaatttcagtaaaattattcgcatcaggaagtttcctaaacccctacgaacttccaaaagatgcacgtgatgaaattttaaaaacattggtaaacttaggcaatgttactgaaattattgtcgagtctagaccagaatatgtgaaagaagaatacttagatgaaatatttgaaataataggagatactttatttgaagtaagtattggtcttgaaacatcaaatgattacactagacttaaaaaaataaacaaaggttttacccgtgatgattttgaaaatgctacaaaattaatgcaacatcaaagaaaaacaaaaggatataatttgaaaacaaaagcatatatttttgtaaagccgattctcgtatccgaaaaacaagcgataacagaagcaatagaaactgcagaatattgtgattccattaatgttgatagactttcattctgtcctgcaacaatacatggtggaactgtaatcgaaaggttatggagaaaaggggcttatcaaccaccttggatttggtcatgtgttgaaattataaatactgtacgtgatgaattaagcatacctgcacttttagacacatcaggatttggatcaagacgtggtccatataactgtaagaaatgtaataaagatttaaaacagattataatagctaacaatttaacacaaaacaaaattgaatatgaatgtgaatgtaaaaatgaatggttagctgaaattaataattcagatatgaataactcaactgttaaagttaaacatatcccattatattaa

SEQ ID NO: 8451 - DNA, 960 bp, Methanobrevibacter gottschalkii
  source 1..960: mol_type = genomic DNA
atgaagttcggtatagaattcgtaccaaatcaacctttggatgaaattgtaaaattagtaaaattagctgaagatgtgggttttgaatatgcatggattactgaccactacaacaacaaaaatgtatacgaaaccttagcattacttgcagcaaacactgaaactattaaaatgggtcctggtgtaaccaacccatatgtaagaagccctgcaatcgcagcttctgcaattgcaaccattgatgaaatttcagaaggaagagcaactttcggtattggtcctggtgacaaagcaactttcgatgctttaggaattgagtggactaaacctgtatctacaattaaagcagcaattgctgacattaacactttattggctggtgacaaaactgaaggtggagcagcattaggtggagtaaaagcagtccaagaacacattcctatttacatgggtgcacaaggacctaaaatgttagaaactgctggagaaatcgcagatggtgtattaattaatgcttctaaccctaaagattacgaagcagctatgccaatgattaaaaaaggaattgaagcagctggagataaagaatttgatgtaggtgcatacactgcaacttctatcggacctgactcagatgcagctaaaaatgcagctaaaattgtagttgcattcattgcagcaggatcccctccacaagttatcgaaagacatggattgcctgaaggattcaacgaaaaaatgggtggattcttagctaaaggtgacttcggtggagctatcggtgcagtaactgatgaagcactcgatgcattctcagtatgtggtactcctgatgaattcattccaaaaattgaaggcttagctgaaatgggcgtaactcaatatgtagcaggttctcctgttggtaaaaatgtagaagagtccattaaattattaggagatgtaattgcaagtttctaa

SEQ ID NO: 8452 - DNA, 192 bp, synthetic construct
  source 1..192: mol_type = other DNA
ttgacagtcccagagacgtccgaaattctcgcctcattcggcttcaagaacctgaataagcaggtgtttaccttcaagattatattcatcagcatgctctttgggctggacatccccttcatcctgagtgagctagagtccaaagaaaagcttcggaaatactttaacatctctgaggtgtggagcgcagat

SEQ ID NO: 8453 - DNA, 249 bp, synthetic construct
  source 1..249: mol_type = other DNA
gtgggagacaaacttctgattatgtacaagcaaaacaactgcctgccattcctcatattggaagataagacctataacttcgtcggcgattttgtcgacccgattaggcatgagaataaatgtgagattctagataatagcgtacagatcatcctgcccatccagagtatcctcgacaataacttctttgtgaactccgacggggtgatcgaataccgggagcgccactgctgtaagtgcggcagctga

SEQ ID NO: 8454 - DNA, 1053 bp, synthetic construct
  source 1..1053: mol_type = other DNA
ctctacagtataaagagcgtcaaagaaatacaggatctgaatcccttcatcgtcgtcggttgtgggggaggaggggagaaattctccaacctggaaggggtcgagacggttggcttcatcgatgataatgtgaagaagcagggcaaagaattttgtggctatattgtagcagggagcctggacgagagtctcaaacatgccaagaacgccaagtcattagtgatcatgctccctattggtgctgagggctccgcgcttaaatacgccgtgcaggcgattgacgccggactgaatgtgatcacgtcatttcggtcactgtccataacagaaaacatctcgctaaaaaaatttgctgacgccaagggcgtggtcatcaaggacattggccctagactggacgtggtgaagacaatcgccggagtggctcccaagaagtcttgcgaggtgcttccaaagatttcgtacgaaagcaaagctccagtaatcttcgtgggagggacctcccaggagtgcgggaaacgtaccaccacaaaaaaactgggcatagcaagcatgaagcgcggactgaccccggccattatcagcactgacgagatgggcctcgaggagcccactgatttcaactttagggctggcagtctcagcgcaatggatgtaccagcggccgtcttaagcgcaattaagtacgcagaggagacaaagcaaccggacattatcttcatcgagggtcagagcagtttgaccgaaaagggcaacccccacccaagaggactcagcgccgccatactgatcggcgcagcccccgacgccgttattgtgggacaccggccaaaccacccctacagggaacctcgcgggattgaggaggagatccgagccatcgaagctgttgagcccactaaggtggtgggcttgtccatcaacctgaagaatgctgacctggacctgtgccctgaatttttcgaatccaagtacaacctacctgctgaggacgtttataacaatggtgccgataaacttctggatgcgatcttcgaatatttgggggagtga

SEQ ID NO: 8455 - DNA, 534 bp, synthetic construct
  source 1..534: mol_type = other DNA
atgagcttcatggataatctcaaaaggagtttaggctacgaggaaacagaagatagtgaaaagaaagagggtggcagcttcaacttctctgagtttgtgaatgacttcaccaaaagcgttaagaactcaagagagcagtataagcaatccaaacaacaggagacggcacagcagcagtaccgaccggcgcctgaaccacagcaggctcaccggactgctcccgtgtacgatgacttcgatgacgattttgtgataacccccgaacagtccttttatgagatcgtactgatcaggccaaagactctggacgacatcaattatatggtggaccagatcctcgaagagaagaaccccatcattgtggacctatccttcctggagaaagagagcgaggccaactttaagctcgcaggggataaaattcgccaaatgagaaccaagtacggggcccaggccctgcttttgacacgctcagaagacaagaacctgataattctttcgcctcggaaagtcaagctggtcaacaagggatga

SEQ ID NO: 8456 - DNA, 915 bp, synthetic construct
  source 1..915: mol_type = other DNA
atgctcatcaaaaagatcccaatcccaattgccggactcgccctggctctgctctcactgggcaacctattgcaggacatgaatcctaacgtcaagtacctgttcggagctatgggcgcaattatcattgtgctgacaattcttaaggctatcttctaccccgaggatgtgaaagatgacttcaagaatccagtaatcgcaagcagttccgggactttcagcatgagcctgatgctgtcctctacctatgctctggaatttatgcccaatatttcctacattgtgtggatcattggcatcagcctgcatattttgctcatgatctactttacgtatcacttcatcatacggaattttaacataactgacgtgtatcccagctactggattgtgtatgtgggggtctcgatggctgccattaccgccccccttcacggccacaaggagatcgggttcatatttctggtcatcagttttatctccatgctcataacattgcctttaatgatctaccgctatgtcaaatactccgaaatgcctgatgccaacaagccaaccacctgtattttcacagccctgatgagcatactgcttgtgggatatatcaactccgcgccggcaatctcaacggcgtttataatctgcctctattgtattgcctgcctgttctacatcttctcattctacaagctcgttgagtacagaactctgaagttctatccgagtttcgcagcgtttacatttccctttgtaatcagtgccctcgccacgaaagacatcgtgaagatcgtcggtagcaacaccctactgtctagcgtccagaccgttgagaccttgatcgccgtgattgtggtgttctacgttcttttcgagtactgcgaatttttaaaaaatagcaaaaagtcgaggaactga

SEQ ID NO: 8457 - DNA, 756 bp, synthetic construct
  source 1..756: mol_type = other DNA
atgattgatacgcatattcacgctgacgccaggagcagtgaagactttaaggagatgtacctatccggtatcgattgtgcaataacttgcagctattatccgtacaaaattgacgccgagaacatcctcctcaatcacctcaatagaatcttggaatacgataccctgcgggccagccaatacggcctggatttgaaggtggccctggggattcatcccacaaacagtatcgagaatcctcagatgatcttcgacgagatgtataactggattgaaaacaaacagatcgtggcgataggcgagattgggctggaagatttgactgagacagagatcgacatattcaagaaacagctggacatcgctgatgagaccaattcaaaggtcatcatccacacacccaggaaaaagaagctggaagtgctaaaagtaatcctcgacattgtgccacagcacctggacgaatcccaggcagtgattgaccatgtcaatcaggaggtgatcggagaagtgattgaccgaaactatatgcttgggatcaccgtccagccccaaaagctcgacgttgacggagcgatcgatattctggataatttcggcttcgataactttctgttaaacagcgatatgtctaacaaaccaagtgaccacctttctgttgccaagaccatccgcgagctttcccggctgggctacaaaaagagctcgatagacaagatatcccaccgcaacgcttcagactactttaagatctga

SEQ ID NO: 8458 - DNA, 900 bp, synthetic construct
  source 1..900: mol_type = other DNA
ctgttcctgatcgtcgggagtctgtacgcagtgagcctctttcacattttcagcctgcaggagatcctgtatttcctggtaattaagaacaatgacgtatcgaatactcgactggtgatcaatttggaaaataatgagaactatcttaagagctacgatttgatctcagaagaggtcaaatatcttacgaatagcataattcggcttaagatactggccacattatttaagtgccccttaaacatgaaagacataaacggcatcacctccctaagttactccagcatctccagcaatctgcacaacctcgagctcaaagggcacgtgtacagagaacacaataagtactttctgtccaactccaccaagttggaagtggagcaggttcttaagctggggaaccttattaacctcctgaacgatttctttaacattctggacaaacatctagtcgacatgatcccgaatcagtcagttgcggaattatacttgcttggcaatgcctgcctgatggaatccgatggtgtggacgtctacaggatctataaatatatcgaggatgcactaaacgctgccgaggaggttaaatgtgtgctgcctttttactacgaaacattcaatgataagctcaacgacctggtgaagaacgacaagaaggtggaggccatggtgccactcagtctgttcgaggtctttgatgaaaaatcggagattggaaagttgtcttttttcagcaatgacaagaccttcctgctcattatcactcatgaactcatgatcctcggcctgttcaaggaggatggatatttcgaccaaaaccgcctgctcacctctaagaacagtgactcaataaagtgggctaacaacctgtacgagaacttcaaaatcaaaaacaaatga

SEQ ID NO: 8459 - DNA, 1695 bp, synthetic construct
  source 1..1695: mol_type = other DNA
atgaatcatgacaagatgagcaacataagtagcaagcggggcttcctgtggcctagctttgagatttactcaggcgtgtctgggtttaccgactacggccctctgggagctagcctcaagaataatatcatgcagaaatggagaaagcaatatgtctccggtgagggattttacgagatcgaggggccgaccgtaatgccaaaagaggtgctgaaagccagcgggcatgttgataacttcaccgacccgatgtgcaagtgtgaggactgcggcgaagtattcagagcggatcacatcattgaggaggtgatcggtgaagatgtggagagcctggagaatgaggaactggaccagatcgtaattgacaacaacattaagtgcccggaatgcggcggtaacctttcgaacatctggaattacaatctgatgttcaagaccgaaatcggcgccaagggcgataaaatagggtacatgaggcccgaaactgcccaaggaatcttcattctgttcaagcggttggaaaggttcttccggggaaaactccccttcggcgcggtgcagctcgggaaagcttacagaaacgagatttccccacgccagggcgtgattagactgcgggaatttacacaggccgaggcagaaatcttcctgaaccctaaagagaagacacaccccaagttctcacagatagagaatgtcatattgcgcctaaacagccaggaggtgcaggagaaaaacttagagcccttggagatcacagctcgggaagcactggacaaaggcattgtcgctaacgaaatgctcatctaccagctgtacctggcccgtaagtttctgactgaaatcggcatccccgaggatgtgttgcgcttcaggcagcacttaaagggggagatggcccactatgcacttgactgttgggacgtggaagtgaagaccgacaagtatggctgggtggagatcatcggaatagcggatcgcggggattatgacctcagttcccactccaaatacagtaatgatgagctaaacgtgtttattgagtacgataagcccaagaaggttcagaagaccatcgttaagccaaacctctctaaattcggccctatcttcaaaggggattcgcctaaggtaaagcaggctatcgaggacgccaatgtggaagatattaaatccgcaattaaatctgagggtaaattcacggtcgagcttgataaagtctatgaagtgcccgaggacctgctcatctttgaagacgttgaagaagagataaccggtgagaaaatcatccctcacgttatcgagccatcatttgggattgatcggattacatattccgtcctgctacattcatttacagagactgaaggaaaggattacttcaggtttgacaagagtgtggctccagtgcaactcggaatctttccccttgtgaacaaggagggccctcgtgaaattgcccaggagctgacggaacagttccgaatgaacggattcaaggtcgaatacgacgctaccggaaccattgggaagcgctatgcccgagccgacgagatcggtatccccattgcagtgacggttgactttgatacactcgacgataatcaggtcactgtccgagacagggacagcgaggcccaagaaagaatcccaatagccgagctggcagactacgtggaaaaatattataagtga

SEQ ID NO: 8460 - DNA, 585 bp, synthetic construct
  source 1..585: mol_type = other DNA
atggctattctcagcgataaagacataaagaaatatctggaggaagggaagatcggcatcgaaccgctgctcgacgagaagcagatccagccatcttcagtggatatgcgcctcggagatgagtttaaagtcttcaaagttattcgcaaaccctacattgacccaaaagacgaggaagacatcgcaagctatatggaatccactacggtgaacgagggcgaggcctttattatccaccccaacgagttcgccctggccacgacattggaatacgtgaaggtacctgacgacctagtggcaagggtggagggccggagctccatgggaaggcttggcgttacaatgcacgtcaccgccggtttcatcgatcccgggttcgaggggaagatcactctggaaatatcgaatatcggtgcgatgccggtggctctgtaccccggccagcgggtatgccagattgtctttgagaccatgaccacaccctcagaagtgccttacggacatccagaccgacagagcaagtatatggggcaaaccagtcctgagtccagtagagtcaagttagattacgagctgaagaagtga

SEQ ID NO: 8461 - DNA, 831 bp, synthetic construct
  source 1..831: mol_type = other DNA
atgcgtcggatcaggtttgtggacatcagcatcttcgtccttaaatatattttcaactggcgcttttggattgcggagattaccaagaagagcaaaatctacaagaagttcatcgacaaaatgctgttcgaggaagacgagattgttgtggtgcccaacacggttaacataaataaaaaaatcgagtctgagggctcggaatttctcccaacagacatcatcaaggaagtagtgaagcgcagcgaagacattgtcatcatgaacacatgcctgtgccgggagtcaaacgactgccaggattatcctcacgacatcggatgtatctttctggggccaaccaccagaaagattccgaatcacatcggtaagaaggctaccgtggacgaagccttagcccagatcgacaaagccgatgaggccgggctcacccacattatcggaaggaataaaatcgatactatctggatgaatatccgacctgggaaaggactgctaaccatatgccactgctgtccctgttgttgcttgtggaaggtctaccccaacctggatgaggacatctccgataagatagagaagctgaacggtgtggagataaagctccatgaagacaactgcaaacattgtatgaaatgcctcgatgacatttgcatgtacggctccatcagtttggagaataacaagataactattgattacgatacttgtaagggctgcggcctttgtgtcaatgcttgcaagttcgacgcaattacaatagattatacggcaaaaacaattgacaacatcgtgaatagaatcgatgacctgattgaaattaaggagctgtga

SEQ ID NO: 8462 - DNA, 909 bp, synthetic construct
  source 1..909: mol_type = other DNA
ctgatcaagataggcgacactgccgttagtgaggaaaaagtcgtggaaactacctctctaaactcacctaaagagaaggaaaaaagcgatgacgagaaaaagtccacgtcaaccaaaaaggctaagtctaccagccagtctcgggggactgcccgcgccaaactgatcaaaaagcaggaaaaaaaggagattagtcttttcaaggagaatatttacatcgtctttgtcgagtgtgaaacccccggcaacattgggttccttgcacggaccatggccaatttcggactgaagaacttagtactgattaatccccccacattgacaaatgaagcatactatcaggcgacccatggcaagtacatcgtggagaatgcaaagatataccctaccctggatgacttctatcaatcccagcgcattgactttaaagtggctagcacagggatggccggtgggagttataacctgtcaagaatcccaatccggcccgaagagctgggcaggtccatgaacgtgtcgaacaagatcgccatactgtttggacgagagggaaatggcctcacaaataaggagatcgaggactgcgacatttgcgtgtcgatcccgaccgatccaacgtaccctatcatgaacatttcccacgcagcggccatcatcttttatgaactgttcaggaacaaacacgactacggtgctgaaggactcgatgagagcagcgacttggagaaggagtttctcctcatggatatgaaagagatcatcaacagcctcgatatcccagaccataagaagagaaacggcctgaagacgttcaacaacataattagccgcgctttcattacatccagagaagcccacactttcaagggcatactaaggcgaatgaaaaataagtttggggagcagtga

SEQ ID NO: 8463 - DNA, 1476 bp, synthetic construct
  source 1..1476: mol_type = other DNA
atgatcaaggtctacgttagcaggtttaaccgtgggatcgacacagagccccacctggagtgctacgacatcaacgaaacccccaacatgaaggtgcttgacgcactccaagccattaatgagaagtatgacgcagacatttccttccgaagctcatgtcgggcgggccagtgcggctcctgcggcatcctcttcaacggcaacggagccctggcttgccaaaaagagatcaaggatggagccataattgagccacttaagttcccagtcatcaaggatctgattgtcgatacgagcagcatcgaggcaaaagtcaaagacctggagctctcgctgcagtgcagtcacgagtgcagcgagctggattccagcatcacaaagaaagatactgcagacacgaaaaaggtaaggaattgcattgagtgttactcttgctactccacttgtcctgtggtcaacattgccacagaggagtttgggggcccgtacctgatgcgctacatcaataaattcgacactgatccccgcgacaactttgacaggcttaaggaggccctggacgagggactgtataattgtaccagctgcggcaagtgcctgtctgtgtgtccgaagaacatcaacacctttggcgatgcgatagaaaaaatgcgcgctattgctgtggccaacggttccggtcctctcccaaagcatgttgcattcaaagaaaacattctgaagaccggcagatcggtaaagacagacaaaccaaccttcatcgaagagacaaagaacaaaacaggctcaaaaatagcattcttcactgggtgtatggttgattacaagttcccggaagtggggcacaagttagtgaaaatcctcaaagagaacggcattgacattgatgtgcccgaaggccaggtgtgttgcgggtctccactgctgcggacgggtcagaccgacatcgtacaggatcttgtggacaaaaataaggaagtcttcaaggattatgacaccatcatcaccgtttgttcaggatgtggagctactctcaagaataatcatcctgagtttgggagcaaattaaacgtgatggacattagtgagttcctggtcgacaaactcgatgaaagtaaactcaaggacgtgaatatgacggtgacctatcacgatccctgccacctggcccggagtcagggcatcaaggatgcgcctagagagatcatcgagaagatacccggtgtggaatttaaagaaatgttgtacccctgccagtgttgcggggccgggggaggaatcaagtccggaaagcccgagattgccatggaattggccaaatcaaaggccgaaatggtcaaggataccggggctgatgccgtggtgacaatatgtcctttttgcgagttgaatattcaggacggtctaaatgaaataggctacgacaacatcaagtgcatccatatcttggagctgctagacaaggcttatgaatga

SEQ ID NO: 8464 - DNA, 780 bp, synthetic construct
  source 1..780: mol_type = other DNA
atgaagatcaaggccgtgaaactatttgagaacggattcatgactcagcccttcgcctttgggggcgagaagggcgccgagaactttgatgcaagcgtgaaatacaggtcgagtctccaaaactacgtgatcgacaccggcgacgaggtgatccttgtggacacgggactgccttcagaactgcccgaacagccccgggatgacaacgctcctatctggagcggggataagattaaggactacgttccagcacttaaagaggctggctatgatattgaagacatcacaaagatactcgtcacacacaagcatctggaccacaccggggaactgaaaaagttccccaacgctgaaatcttcatgagcaaaaccgaggccggcgaagtagatctggaatccgacaatataatcggtgtggactttgatgacggggagtattacaatttcaagaaatcccagaagattgccaacggagtgtacttaattgaagcgaagggacataccctcggcaacagtatggtgatcgtcgagtgcgacgatgtcttttacatgctgcacggcgatattacatacactgatgaagccttgtacgagaataagctgagcattgttttcgaggacatcggggcggcaagagagactctcgacaatgtccgcgagttcattaagaacaacaaaaccgtatatctctccacacacacgccactgggttatgagaatctggagaacaacaaaataatcgacttggagaatcctccggaatcaatctatccaaattga

SEQ ID NO: 8465 - DNA, 1887 bp, synthetic construct
  source 1..1887: mol_type = other DNA
atgaatttaaaagaactggtcacaggcgattctggggagaagcgatttctgctagggaacgaggctgccgtccgcgggcttatcgaggccggcatttccatcgcggctacctaccctggcaccccttcatctgagattggaaacgtgctgtcagtcctggctaaggatgccaatatttattttgagttctctacgaacgaaaaggtcgccatggaggtggcagccacggcagcggtgtccggtcttaggtcatttaccttcatgaagcatgtggggatgaatgttgcggctgacagcttcatgacaaccgcctatagcggggtcaacggtggaatggtgatattatccgccgacgatccgtctcttttctcatcgcagaatgagcaggacacccgtaattacgccaagttggccaatgttcctattctcgagccatccaactgccaggaagtgaaagacatggtcaaatatgcattcgacctcagcgagcaatttaagctgcccgtcatcgtgagaacaactactcgcgtgagccacatgaggggcgtggtggaatttggggacgtgcgggacaactcatccaacaatgataaccactggaagcgcggccattttaacaaagacccatccaagtacgttcctgtgccggcgtttgcaggggacatgcatgtcagactttgggacaaaatccgcaaaatcgaggaagtcagcaacaagagcaagtttaactgcgaatgggggaccggtaaaaagtacggattgatagctagcagcagtgcattcaattacgcctgcgacgttgtcaagttcaataatctggatattaagatcctgaagctgggattcagctatccgttcccccagaataaggtcattgagtttttgagtgatctcgacgaggtatttgttgtggaggaagtggacccaatcatcgagcgagatactctggtgtgtattggcagcaaaaacctcaacgtgcaagtgcacgggaagctggacggcaccttcccgatatatcatgaatttaactccgatattgttgcggagggactcaacaaagtcctgaacttcaaggaaaacaagtccgtgcagttcacacaaagtctcgaaaaactaagtgaagacatcccctctcgagcccccgtgctctgtgccggctgccctcaccgggccatgtactatggcatcaatattgccattgaggagctgggcctcaaacccgaggatgtgatcttcgcaagcgatatcggatgctacacactcggcattaacccaccatacaatgcagctgattacctgctgtccatggggtccagtgtgggagacggctgcggattctcggtgtcaacagaccagaaagtagccagtttcatcggagacagcacctttttccacagcggtatctcgcccctgataaatgcagttcacaacaagcacaacttcgtgctaaccgtgctggacaacaggattaccgccatgactggtggccagccaaaccctggaatccccgtggacgggatgggtgatgatgctccagaggtctctattcggaaactggctttggcttgcggctgtgattttgtacgggtaatcaatccctttaacctggagcaggttgtgaagacctaccgggaagccttcgaaagaaaggatgctgccgtcataataagcaaggcgccctgcacgcttatcaaaggcttgacgagaaaaccccctgtgaagttcatcgaaagtaactgtaacaattgcgacaagtgtgtaaaagagctggcctgccctgctatcagcaagatcaatggcaagatcactatcgatgagtcccagtgcgacggatgtacagcatgtattcaggtatgtaaatatggggccctcgaggacggcaggtga

SEQ ID NO: 8466 - DNA, 648 bp, synthetic construct
  source 1..648: mol_type = other DNA
atggacgtccagcacgtattccggtacgtcaacatggtgccctggaagatggtcggggagaagatggacaatcattacaatatttatatctgcggggtgggcggtcagggcatcatcaagacctcaaccattattggggaggccgcaatgaatcaaggtctcgatgtcgttatgtccgaaatccacggcatgtctcagaggggcggaagcgtgagcaccgagctcaagatagggggctacaactcgagcatcatcccaaagcaaggggcagatatgctgcttagttttgaaccggttgagacaatacgcggcttggacaaggtaaactccgaaactaagatcgtgtacaacacccatcccatcatcccctcctcaactgacaagcagtatcctaacgtggacagcattacgaaaacgctgaaggaaaactttaaatatgtgctgccaatagacggaacccagctggctatggatgccggaagtgtgctcgcgctgaacatggtgctgcttggcgccgtcacagccgatgacaagttcccattaacaaaagagtctgtgatcgaggccatgaaaaacaatctaaaacctaaattccacgaaatgaatctgaaagctattgagagtggatacaactccattaagagctga

SEQ ID NO: 8467 - DNA, 279 bp, synthetic construct
  source 1..279: mol_type = other DNA
atggcctataaaatagacaatgcaatcatcaaaaaagatcggaacgggaaggtgaccctcatcgaccccgaaaacgtgttcggcgatgaagatgcattcattgccgtaaaatccgacgacctgattacaattcagttgctcatcaacgccatcatgaagaacgattttaagagttggaaggagcttggcgctattccggaaacggagccaatcaagagcctatttgtccgcctgggatacagcagggaggacatagcgaatatgctgaaggagttctga

SEQ ID NO: 8468 - DNA, 432 bp, synthetic construct
  source 1..432: mol_type = other DNA
atggccgtaaagcagatcagcgtgttcgtggagaacaaggagggccgcatcaaaaaggctattaacacactcgcagaagagaacatcaatatacgggccctgtccatagccgacacgaccaagtacggaatccttaggctcattgtcagcgataatgagaaggccatcgctgcgctggagaaggacggcttcatcgtgaaggagaacgaagtcatactactggcagtgccagataaacccaacgggcttaactcaacattagcaatctttgatgagaaaggtattaacctggaatacctctatgccttcgtctccagtaaaactgacgcggctattgtggttatgagactggaaaatatggaaaaggccatcgaggccctgcaggatagcaatgtgaaaatcttgaagaccgaggacattaaagacctgtga

SEQ ID NO: 8469 - DNA, 1305 bp, synthetic construct
  source 1..1305: mol_type = other DNA
atgttctgggacgagaaggccgagtgtatgagtaaggaagaaaaagaaaagatacagctcaaacgcctgcagaagagcgtgaagctcgcgtacgagaatgttgagttctataagaaaaggtttgacgagatagggcttaagccggaagacatcaaaaccttgaaagatatcgagaaaatccccttcacgactaagagcgatctgagagaggcttacccactcggcttacttgctgttccacgggaagacattgtagaagtacatgcaagctccgggactacggggaaacccacagtgaccgcctatactcagaatgacctggatatctggggggaatgcatagcccggggcctcaaaatggccggtgccaagaaggactacattatccagaacgcatacggctacggactgttcacgggcggctttggaatccaccacggtggcaacatgatgggaaccattacaatcccaatttcagccggcaacacccagcgacagctcgacaccatggtggacttccaaagtgatatactgacttgcaccccgtcgtatgccgcatatatcggagagagccgggagaaggctggaattagcttggatgagattaacctgaaggcgggaatccatggcgccgagatgtggactgacgaaatgcgaaaacgtatcgagaccagcctgggaatcaagacccataacatttacgggctcacagaggtgatgggtcctggggtggctcaggaatgcggcgagcaaaacggaatgcacatacaagatgaccacttttatcccgaaatcattgaccctgagactggtgagacactaggctacggtgagaaaggcgagctggtcttaacgtccttgaccaaaactgggatgcctattctgcgcttcagaacaaaggatctgacctctctcataggggaggcctgtgactgcggacggacaaccgtgagaatgacacgcatcacgggcaggagtgacgatatgctaaagatcaaaggcgtcatggtgttcccatcacagatcgaaaaagccctgctgaagatccaggggatcagccacaattacatgatccacgtcaccagacccgacattcttgacgaggtcgaagtgaaggttgaagcttccaaggaactgttctttgatgagatgaaggaaatggagaaagtggaaaagcagattcaggcatcaatccgaagcgagaccggccttcgcgtggatgtcacaatttgtgagcctgaatccctgcccaggtccgaggggaaggcggtgcgggtcatcgatgagaggaattttgaggactga

SEQ ID NO: 8470 - DNA, 876 bp, synthetic construct
  source 1..876: mol_type = other DNA
ttgatatccattttccatttatttttcaaaaagaccatttacagttcgttgattctaaatctgattggagatatcctgaactttaagtttaaagagtgtaaaacggagttcgacgggggaaatttcgaagaggccctcgatattctgggcgaaattgaaaacgacgacgaggactacaagtttgctctcatgctcaagtataactgcctgatgggtctggggtgctacggcgacgctctgactattataaacatgctcatccatgagaacccctatatgtccctgttttggttcgataaggtgaagtgtcactatttccttaaggaccttacaaacgccgccggcgcgctgtaccacgtggagcacatcattgatctgaaggatgtcgttgaaatcattgactttgtgaagctttgtaacatgatcggagagcacgtaatcgcactcaaatactgtaacatcgtcctcgataccgacgaaaaccagatcgacgcactgctcgaaaaaagcttgatttccaatatcatcgatgacaagaacatgatgaatgaatgcggtgacaagcttttcgagctgagcggcgataatctgagcctgctgatggtgagcttcgccctaaaactctttagcgggatgtaccgcgacagtttcaacatcattctgaacataaattgcatggattcaaaaatggggctcatcctgaagaagataatctataatcagatgctgtgcgacctaaatatccagatcgtgatggaaagcaatgccgagcttacaatcgacgagttcatcttactgttgttcgattatcggtactacggagtggagtcaggcgaggttaaaaacgtcaggtacatgatagtgaaacaagactga

SEQ ID NO: 8471 - DNA, 1611 bp, synthetic construct
  source 1..1611: mol_type = other DNA
atgaacgtcatgattctggccatcgtgttcataatctacatatttagcctagtgtttgtgggctattacgcctacaagaagactaattcctccgaggactttatgatcgctgggaaagacacccaccctttcatcatggccatgagttacggggctacatttatctcgacagcggctatcgttggtttcggaggggtggctagtgagtatgggatgtccgtgctgtggctcgcattcctgaacatcatcattggggtcttcatcgccttcgtctttctgggcaagcgaactcggaggatgggccatgcccttaatagcctaacgtttcccgaatttttaggtaaacgtttcaactccaacttcatccactacttcagcggcctggtgattttctgcgcgatgccgctgtacgcagccgtagtactgatcggagctgcgagattcctggagtctagcctattaatcgatttcagcattgctttgctgatactctcaatcatcattacattctacgtgctcttcgggggtattcggggggtaatgtatactgacgctctccaaggctccatcatggtggtggctatggtatttctgcttgtctttgtttattggctgctcggaggaatcgatattgcaaacactgccctgacaaatatggtcaatttatatcccgccaatgcaatcgcaaccggcggcacgggctggacggcctttccagaatttggcaccccattttggtggtcccttgtgtcttccacactcattggtgttgggatcggagttctggcccagcccagcctcatcgtgagattcatgaccgttaagagcgataaagagttgaaccgctctgtgctgattggaggtattttcattgcaatcatgccaacgaccgcatatatcgtcggctcgctgagcaatgtgtatttctacgacaagctgggcaagatcgcggtcgacgtggtgggcggcaacattgacaaggttatccccacatttatcacaatggccttgcccgagtggtttgtgtacattttcctgttgtcactgatcgcagctgctatgagcaccatatcttctcagctgcacactcaggggacagcattcggtgtcgatatctacggtaccctgcggaacaagtccaaacagaaactcgaccaagtgagcatctcccgcgtcgggatactgattgctattatttcagccctggtcatggcattttcactcccgggcagtgtcgtggcgctcggaaccagtctgttctttgaaatctgtgccgcggccttccttcctgtgtttctgggagccctttactggaaaggcatcaccaggctcggagccatttcagggatcataagcggcactctggtcagtctattctggcttatgttcgtattcaaaaagacggccctcggacttggcatttgcaagtttgtctttggggtggaaaccttgctgcctgtggccccctggccattcattgatgtgatgttgatagctgtgccaatcagcgccatattcaccatcgtggttagtttgctcaccaagcctctggagcaggaggtgattgacaaggccttcgagaacatagatgaaaaaggatcggacgcctga

SEQ ID NO: 8472 - DNA, 114 bp, synthetic construct
  source 1..114: mol_type = other DNA
atgatgattctaggcatcgaggaccccatgatttggggtgtatatgtcggcatcatcctcagcaccctgctgtgcgtggtgtacgggatagtgaactggaataacggagattga

SEQ ID NO: 8473 - DNA, 720 bp, synthetic construct
  source 1..720: mol_type = other DNA
atgaaggaactcttttccaattttggccgcatccagaagaacgatcctgagttccacgagattttcgaaaagttcgcttacggcgaggtattcgaatatagcaatctatcagagaaagaatctatcctggtgacactggccagtctgcttgcatgccaaagccctaaagcatttaagaagatcctcctggcggctctggacatggacctgaccgccgaggagatcaaagaactgctttatcagtcagtgccatacgtgggcttcgcaagagcgcacaactttttcgggatcgtcattaaggtgttcaacaaaaaaggcatagagctcccattgcccaaccggtccaacacgaatccggagaataggcacaagaagggtagggaactgcaggataagtactttggtgctgaaataatccaaatgatgaatgacaacactccagccgatcagcagcatttcaaccgcttcctcgagggattctgctttggcgacttctacacacgagacggactcaacgatcaggaacgggagctgatcaccttcgtctttttggcctccctcggaggatgtgagagccagctaatggggcatattcagggcaacttgaacgccgggaatgacaaagaaaagctgatttcggccttaactgttgtcatgccctatatcgggtttcccagaacccttaacgccctgagcattgtgaatgagagttgcgagtga

SEQ ID NO: 8474 - DNA, 435 bp, synthetic construct
  source 1..435: mol_type = other DNA
atgaatatctccaatcggagtgttaaaatgagcaacatcgagaaggttgacgaaattctgtcaaaagcagaagtcttttaccttgccacagtatatggggaaaagccaaaggtcaggcccctgggcttccatctcctcattgatggcaaaatctactttggggtcggaactttcaaggaggtgtataagcagatagaaagcaatcagaatgtggagatcgctgcctgggacggtgaacacttcttgagatactacggagtggccgatctaaccaagaacgacgccattgtggagaaagccttcgaactgatgccggagatagcggagatgtatgaggctaacggctgggaaatgggggtgttctacctgaacgacgcgaccgcagagatccgcaacatgatgaacgtggaggagacgtatgagtttaagtactga

SEQ ID NO: 8475 - DNA, 1077 bp, synthetic construct
  source 1..1077: mol_type = other DNA
atgctgataatcctgatcgtgctgggtgtggccacccacctttttctcacccctagcagtgtggaaacagaaggctctaagaacataactgacatgcttaaccggaccgtggaggttcccaacggggtgaataacgtcatcgccacgtccccgccaatgaccacggtcctatacatgctttcacctgaaaagctgaaggcagtgaacttccaatggaccgaagacgaattgaagtacgtgccaagcgagtacgccaacctcccagtcgttggaggttggtacggaacacaggacgggagctacgaggaatttatcgccgctgaacccgatattgtgattgagtcaatcgatgaggggggggacggcgacgcattcaccgtgcaggaacgccaggataaatttggcaagattcccgtgctggccgtgaaagacaccacaaacgttgagaagatcggagactccattagcttcatgggcgaggtaatcggcacggaggacaaggcaaaccagctgaacgagttcaacactaaatacctcgatatcgtccatgataaaagctcgaaactcgtggattccaacaagaagacagtctattacgcagcgagtagcgacggcctacaaacttacccctcaggcgcgagccacggccagctgatcgacttgattggggggaaaaatgttgccgacagcctcaatcaaggtaacaccacctcaggcgtccaggtatccattgagcaggtaattaagctggacccggatgtgataataacaaatgacatgcatttctataataaggtgtacaacgactccagttgggctcacttgaaagctgtgaaaaataagaaggtctatgtctctccccagtctccatttaagtggttcgataagcctgttggagccaatatgatcatcggagtgccctggacagctaaagtaatctatcctgaggattataaggatattaatatggtggacgtcactaaagagttctacagtaatttctatcactttgatttaaatgacaaccaggccaaggagatcctgctggattcgggactcaaagaatccaacctgtga

SEQ ID NO: 8476 - DNA, 1014 bp, synthetic construct
  source 1..1014: mol_type = other DNA
atggacaatgattccaaggatgtgatttcaatcatcctgctgatttttctccctatcatcctgtttttcacctcatttttattgggccggtatcctattagtccaatcgacgtgatcaacaccatactgtgcccaatcttccctcaactggaggtctcccctactatcaccacaatcgtctttgagatcagactgcccaggattattgccgccatcgtagttggggccgccctggcgatggcaggagctgcctttcagagtatttttaaaaatcccctagtcagcccggacctcctgggcgtgagcaacggtgcagggttcggggcggctttggccatcctcataagcggggctggtgtggtcactcagatcttcgccttcgctttcggaatcatctccgtgtcagtcacctatctaatctccagagcatacaaagcgggtggaatcctcatcttggtgctgtctggagtggccatcagcgccttcttctccgcactgatttccgctatcaaattcatagccgacccagatgacaagctgcccgagatcgtgtactggctgatgggaagtctcgcttcgatcacgatggatcagctgataatgattattatcccaataattgtgggcatgatcatcctccttaccctccgctggcatatgaacttactggctatgggtgatgaagaggcccagtctttggggctgaacccaacacgagtccgtctactgattattgccggctgtactctccttacgtctgcagccgtttctgtaagtggaattattggctggattggccttgttattccccacatggctcggatgatcgtggggcccgacaataagatactgatccccgcctcactcagcttcggcgcatcgttcctgctgttgattgacaacatcagccgcgccataatcagcatcgaaattccgatcggcatacttacagcgattataggcgtgcctatttttctgtaccttctcaagagggggtacagcgaatgggcatga

SEQ ID NO: 8477 - DNA, 804 bp, synthetic construct
  source 1..804: mol_type = other DNA
atgggcataaccaacaacttttatgaggttaagaatatttcattctcgtatgatggcaacgaaatcttcagcgatatcagtttctcaattgagaagggagacgtcctctgcattttagggccgaacggcactggcaagacaacgcttatcaagtgtcttaatggactgcatgaaatcggtagcggagagatccttatcaaagggaaaaatatcaagaaactgtccttcaaagaaataagccggaatattggttacatccctcagaaccacgcaccctcctttccatttaaagtaattgatgtggtgctcatgggcagagcaccatacctcaacctgatcgacgccccccgcaagaaagacatgggaatcgccctcaacagcctgaagaccctcggtatcgacaatctcaaggacaaggagtacaccaacctgagcgggggggagatgcagctagtcttcttggcccgaatactctgccaacagcccgatattctgatccttgacgagccaacttctcacctggactttggcaaccagattaaactgctggagataattgacaatttggcggcctccggcctatcaatcatcatgagcagccacttccctgatcatgcctttctgtccagcaacaaggttgctatcatgaaagacgggtgctttatagacttcggaagtcctaacgatgtggtgaccgaggaaaatctgaagaaggcttactccatcgatgtcaagttaattgaattggaaaataaaaggaaggtgtgtgtgcccctgaagacaaacttcgagctgagtctgtga

SEQ ID NO: 8478 - DNA, 570 bp, synthetic construct
  source 1..570: mol_type = other DNA
atgaacgagcaggattacgacgagcagctcgccaaagcagcgaagtttcacgggcacatctgcggcggaattgcaataggcactaagctggccatgtatgggcttgagctgctgggaatggagttcaaccagaaacacaaaaacttgattgtctttctagagattgacaggtgtatgtcagacgccgttcagtccgtgacgggctgttctatgggtaagcggacactgaaacaaatgtattatggtaagttcgccgctaccttttacaatcaggacaccggggaagctttacggatcactgatgcggatgctaacaagaagttcaaagatgaagagaccaaggaagaaatgatcgatcgatttagacgcacgctccccgaggagctcttcaaggtgaataaggtaaaaatcgagctgaatcccggagacatgccgggcaagccttacacaaccacattctgctccgtctgcggggaaaaagtgagcgacggcagacatatccttcgcggcgggaagccaatatgcaggagttgtgccgaaggaagctactacgaactgatcgaggactga

SEQ ID NO: 8479 - DNA, 2061 bp, synthetic construct
  source 1..2061: mol_type = other DNA
atgaggaagtgtttcgtgatcatattggttctatgcctcctgttctccctgaacatctgcttcgcgcaggatatcagcaacagcacagattttactttccagaatagtaacttcgactacctggagaagaccgacagcgtgaacctgatcagcacgagcgacaaaattagcacacatattgatgtggtcagtaataccacatttgatgggactgtggactactttaagattaaactcagcgacgaaaacaacaaatcagtgccaaacgctaaagtgatctttacagtgaatggggttagttacgacaagaataccgattcccagggcatcagctcactgcagattaatttggctgatgggtcctacaaagtcattagcaaattcgtgggagactctaactacaaatccagctcaaagtccacaacaatcaccattgacaacacgcgcatcgtcgaagacggcctcaacaatgcggaaattcaaaatataattgacgatgcgaaggaagggaacgtgatactcttcaagggaaatagctactcaaacatcaatctggtgattaataaacggctgaccctaatttctacggttaataccgtcctcaaatcaagctcatcaagcccaacaatcaccattaagggcaaggaagccagctactctatcgtgaagggattcaagatccagggcaacggtgacggtgtggtcgtggatggctcgaactacgtacggatcttaaataatgacatcactgctgacggagtaggcatcacggcctttaatgtgaaatatatcaacattactgggaataacattgtgaagaacgggaagtgcggcatcattctttactccaccgagaagtcctacataatcaataatgtgatcaacaataacaacgccaacggcatcgtcctgaccaaatccgacatcacatacatcgatagcaacactatctcaaacaacgctcgctatggtattctgctgaccaacaaattcaacggcaattcctacaagaacggcccggagaacgtgtacatcacgaagaacactatcaataacaacaagtgggatgggatttctgtcaacaacgcagaggacaacatcaacatcaagggaaatacaatcgttggcaacgacgagagtgggatctcggtgaatgttgtcgggtcctacaaaattcagtccaacatcataactaatagttataccggtgtcagattcgacgaggaccacgtgcagaagaagaaccaagagattacttacaacgccatttatggaaatgctcacgttcaaattgaggccaaatcatataatggggtgaatcccctctctgtaggcgacaactggtataccgatgacggactgttatgtcccaagatcaagacaaacaatttgaagttcactgtcacccagatcggaaagaaccagttccaagccacctttgttgattctaatggcaacatcgcaagtcttctcccggatagggagctgaagtataaaaccaatgacggtaagatcgcaaccgtgatgattaagggaggaataggcacctttactgtcacggcctctgatgcagacattatcaagtctacggtggatcgcacaagcagaaaaaacgtgtatgattcgaacagtcccaccaagaccccccagaacggtcaatctcctacctatgattatcctaacatcgactatggtggcggccagggcaatggaaatggccaggggggtaacgccaataatgggaacgggtcgtcccagaaatccagtgacgactctggaaatagcagcaacagcaaaaagatggaacctaatagtaacccagtaaatcaggcaaacgatgtatctcagagttacgacacttcgcagagcatggctcgagccgacgcctccgagattagtgggggagccaactccggctcacagtctattgcaaaacagatcataatcgaggacgatgaattttttatagtgaaaggtctttccctcatagtcttgctgatacttctgacaataggcttctactaccgtgatgacatcaatgagatgcggtccaagctgtga

SEQ ID NO: 8480 - DNA, 1458 bp, synthetic construct
  source 1..1458: mol_type = other DNA
gtgagtatcaatgataatctcggcgatgcatcgtcagacctggaaaatgagatcattaactcaaagaatggagacataatcttgattaagcctggaacatataacatccacaacattaccattaccaataaaactatcacgctccagggaattggcaatcctagtgatattatcattgacggagggaaacagagcagcatttttttgatcaacaatattaccacctgcgtaacatttaagaacctcacattcatcaatggcctgtcctacaatttcggtggtgccatatgcattaatacagggagtgtttatatcgataactgccagttcatcaacaacacagccctcaacaataccaacgccggtgccatatccaactacggcaacgaagataacaaggcctacctccttgtcaacaacaccctgttcatgaacaaccatgccgaccacgacggaggggctgttaccacatgttacgctaattctgacatgtataattgtgtctttataaacaatacggcagttcgggacgggggagccgtgcgagtgtcggtgtacgggtatggccatgtcgaagattgtatctttatgtacaatcacgctgacgagtggggcggagcgtactacagttggtcagggactagcaagatcaacagatgcatctttatgaacaacactgccgggacgaatggtggcgcagtaatggtgtccggcaacctggaccttgagaacagcatcattgtgaacaatagtgggggaaagactggcgggtccttctacatccaggagccaatgtatcaggctaaaacctatattaatgtgaacaataacctgatcacaaataactcttcccccaagggtcaggagatctatgtcaagtggcgccactcacaaaacctgtaccctgactttaacgataacgattggggcagcgaagatcccaatgactacaaaatcaacgacccggataacgtgacggcgcggagtaaagtgaaaactacgactgataagtccaacctgctggatgagttgaatttcaacgcgctcaacaagtactatgacctgattaaagactacttccccgagaactatctggagaacatcaaaaagcaggccgaaagcaaggctaaccaaaataaagagaacaataagaacaatactccaaataacaaagacgaacacggccttaaggactcaaacaataccaagaacagcttaaatgacagcaagataatcctgtccaacaagacaaccgaaaatatcgagacagagaattacctcattagcagcaacagcaccacccccataggcgatgacgaaaaagcctacgagctaaatgagaccaagagcgtgtccaaatcccagtctccaaggttactatacctggtgatctgcctggtcattaccatcatagcactgttcatcggctatggaaaagaaaactcgaaggacaagtga

SEQ ID NO: 8481 - DNA, 2865 bp, synthetic construct
  source 1..2865: mol_type = other DNA
ctgatcggtgtggtctgtgccgaggataataatgtaacagagaatgccacgaatgaggatttccaagctattcagatcctgattgataacgccaaccccggggactcgatatacctggagaacaagacgtaccagggtagtggatcgcccatcatcgttaacaaaagcgtgaatgtctacggggtggactcttccaagacgatcctggacgccagtaacaaatcaagtatctttctgatctcgaaagatgtcaaggtcaatttcaatggtctcactcttactaacgggtataatgagaccaagggcggagcgatctataacctggggatcttgaacatcaccaactcgaagatttccagtaactacgcggaaagtggtgctatacgtaatgagggcactgggaaactgaccatcagcaattctctctttgataagaactgcggaagcttcggcgccgcgattgacaactacgtcgggtacctgaatattgtggacacaacattcaccaacaatgactgccttgagggcggcgccatctacaacaggtttggtgaatttttagtctacaactgcacatttatcaacaactctgccgcccggggcgggggagtatacaataacaggggcggcatgtatatctacaactccagattcatagccaataacgtttatgacctcggaggcggcatcaagagttgggggtcctgtgaagtgtacaatacagtcctgatcaacaacaccgccaagcaggggggaggcatttacgtatcagagttcacactgattgccgaaaattgttttgtggaaaataattccgctcactggggcggtggaatcgctgtggaggccaaagctactgccaaaattaagaacgccactattataaacaacctcgctgaccgcggtgccgggatagacatcaatatgggctcgatcgatctgcaggactccattgttaataacaatgtggccaagtatggtgcgggcggaatctacttcgccctgctctcttcaaccgtaaagaatacctatatctgcaacaacatcgctaatacctccgggggagggtgctacatttatggatttaggggtgtcgtggtaaatttcactaatgtgatcatcaataacaactctgctagcaagggtggagccatttacagcaccggaaccgcaaacattcagaacagtatcctgaacagcaacaacgcgtataaggggggagccatctataatgaacttaacctgacagtgaaggacagccaattcttcgagaataccgctgacagttggggtggagctatttacaataacctcaattcattcatcgataatgtggtgctaaattcaaatgaagtgaaacagttcgggggcgccatttataacgagaagctcgtcaacgctaaaaacagcctttttgagtccaacaaagcactgcaagcaggagcaatttattctacaaacgacctgatcattgataattctcagtttatcaagaactatgtgaagcggaactattgcgttctaatgcttagtaaaggcgatgtgaatatcacaaacagcttgttcaagttcaacacaaacgctgatgaggggggctgtatttttaactataacgcaaatctgctgatcgacgcttcccagtttattagcaatgacgcacgaagttatggcgcagcgatcgacaactccggcaatttgactataaaaaattcactgttttacaagaataaggcatacggcgcagcagccattgataactccggtaacctcgtgataatcaaatctaatttcaccgacaacgtggccacgaataacggcggcgctattgacagcaacggcaagctgattattatcgggagcatctttaagaacaatctcgccggcaacaacggcggagccctgatacttagaggagatacgaccgtcacccattcgattatctataataatcacgacaaaaacgggtatgcaattttcaataaaggtgtggaaaatataagcctttcaaataattggtggggcagcaacaatcctgattttgaaaaattgctgaacatgggaacgtccgatgatttcaactggatcatcatgagcttcagctccaacaaccagttgattcagtacaagaactccatcttgaatataaacttcgataacgtcaaggataaaatggggaacgtgtacaagatcaacagcacagagctcctgcctatcttcaaaatagcgttgtcaaactacggggaggttaccatatctaacggatttaagtctatgaataaaaacatacccctaatcacatccatctccgccaagattgacaatcagagtatcattctcaaaatcactccgacaaataagcgcataatcgacaacaagaacattgttgttgactacaacggaaaggtgacgtataaggttcgggtggttggcgtggacggcaaaatcgtcggcgcaaacgtcgccgtggtgatgaaaatcgcaggtaagaaatacactgtgaaaactaacaagaacggcttcgtcagcaagttattcagcctcactccaggcaaatactccatcattaccacatacaaaggattcaccgtcaaaaattccataaccgttaagaaggtactgtacgctaagagcatcaccaagaagaagagcaagaagattacatactccgtctcattaaagataagcaacggcaagccaatcgccgggaaaaaaattacgtttaagatcaagagtaaaacctacaccgcgaagaccaataaaaagggggtggccgtggtaagctttaagaacctcaaagtggggaaatactcagtgattgtgaactatctgaactcaaaggtgaaaaccactctaaagatcaagtga

SEQ ID NO: 8482 - DNA, 4419 bp, synthetic construct
  source 1..4419: mol_type = other DNA
atgaagattaacaagatcttagtcctgttatcgtttatacttgtggtgctcatctgcactaactccgtgtccgcctttagcgatgactccaacctcacagacgatctgtccagcttcgcaagtgatttcgacaaaagcaaccttggccagaacatcgaggtgaacctcgacaagctgagtttcagcgaggattctcctctttcggatacgataatcgtggaagaggttgaaaaggatcacaatgagatggacgattcaacaatacagaaggcaatcaacaacgccaaggccggagacaccatcatcatcaacgggacctcctacgtgcactgtcactttatcattgataagaaactgaccataatcagcaacgttggcaccactatggaaccctgcggctccgatgctgtatctggacaccggggcatcttttacatttcgcctgaagcgtccgggactgtcatcagtggcttcactatccgaaatgatgtggctaaggctgatgactatggaattttggtacggggggcggacgacgtcaaaattcagaactgtgttatctataacaacggattgagctctgatgccatcagagtggaaaacaccaagaacacagtcattgaaaacgtctcaataagcaaagcatttaacgggatacgaattttggactcggaaaatgtcaacataagtgacagcttcattgataacgccaagtattgcattaacgtgattgacagcaataaaattaacctggtgtctaacaacatcactaataataaaatttccggaatcgcaatttcaggttcaagtaaaaacattaatattctttctaacaacatctccaaggggcatgtcggcattaatttaaccgtcgctaatcatgtgtacattatcagcaattacatcggcctctcggacaaatacggtgtgtacacaaattgtaatataactaagatggaaattaagggtaacttcatagacaggaacggcaactacaacattttcaacgatcatcgtgtgaaaaacctttttgtcaacggcggggagaataaacaggtcatcaacaataactacatgatcggaggggacaaccaggatcgccccgtctggcaccaagtgtacgagtatcggcccggaaagggggataatacctataatcccgagaccgatacgtacacttacgtgggggaggataacggagactattatgggcaccagtccggcaccttcatggggtatgtactggctatcaatcagttcttgcaatgcccaaacatatacttcacgttccccactaacggggtaactccatggaccaagacgggcaattacaatctgtatctgtccgagattacgcaggtgaaaaagggagtctattcaatttcaatcgttgatgtggacggaaacctagctgaggagatcagtagcgtccctgttacgttttacctcatgaagaataacacggacaacaatggtaagcagaaggcgcctcaggaggacgatgtgtctaaagtggtcatgatgaaaaacggcaccgccaccgtgcggttctacccggacgagtttaaggagtctgataatattctgctggccagtttcccaggtatcggcaataacatatactcgaacatgtatagtccatacaaactgttcagcatcgacgacaaattcatcccaggcaatgtcaccgagacaaaggtcaccgtgagcaatctcaatacatatcctaactccaatgccatcttcaaagtcattcttatcgacctgaccggtaatgcgatcgcaaatgagctggtaaacttcaagattaacgggaaaagctacggcgctaccacagacgtgaacggggtcgccaaaataaagattagccagtccaaagagggaacctacaccatagccgtcaattatatcggtgatgatattgactacacctccagcagtgctcaggctaaggttgccgtcaagaaaatatccactaaaatcctaagctcaaatgtgtatatgatccccaacatagctgaatactattctatcactctgaaggacgcctcaggccacggcatctcataccagaaagtgactttcaagctcaataagaagatatacaccgtcaagaccaacaaaaatggcgtcgccaagctgaaactcaaattcaccaagaagaccacttattatattcacgttaactttgaaggcaattccaagtacaaggcggtgtccaagacaaacaagatcattgttaaatactcctctaaaattgctaaactgaccgtgccgaaggttaccatccttcccaagacatataaatactacacaatcagcctaaaaaatacgaatgggaaaggcatcgcaaagcaaaagatcactgtgaagctcaatggcaagacctatatcaagacaacaaacggtaagggtaacgttgccatcaaagtgaaattctcaaaactgggcgcctataaggtaagcgccatctacaagggaagtaagatttacaaaaaaacgtctagcaacggtaagatcgtagtggccaagtcatccacgaagtttacagcgccgaaagtgacaatcctgccatacgagaagaaggtatacaccacaacgctgaagaccagtgccggaaaggcgctgagcaagcagaagatcaccattgttctgaatggcaagacatactccaagaccacgaactccaaaggccaggctagtatcaatgtgaaattctcctcagagaacgtgtactctgttatcttgaagtattctggaaacggatactataaatcgagtaaggccacaggcaccataacagtgtcaaaaatctctactcagctaatcagttacaataaaaccttcgccattgattcaactaaaaacttcaccatctcgctgaaggacaagtctggcaagaccctgtcaaatcagaatatcacgtttctgttcaacaatcagaatctcaccaaaatcaccgatgaaaatggtatcgcctccgtcaacctggacgccaatgtcggaagctttgaaatcatctcaaaatactgcggaaacaaccaatataagtctatatccaacacaaacatgattaccatttctaataagacaaacgtggtcttcgtggacgccagtttgcccaacagcgagatccagaagatcttcgacgactgcaagaacggaagcaatgtggagtttctggggaactcctacaatgacatctccctcaacatcaacaaacccttaaacatttactctgagaacagaatcacgctaaatgcgaagagcatgagtcctgtatttaaggtgctggccagcgacgtgaagatttgtaacctgtccattgttggaaacagctacgacggaattgagatcaacaacgctgtgaatgttgtcatatttgaaaacaatatcctcaatcgcttggatcaatctaaaatcggggagtacatgttgagtacaatcagcctgccggggtacgggataaacgtgattgactccaagaatgtggaaatttcgaacaatagcatcaacacctttgaaagcggcatttttgtgtcaaacagcaataatctttccattaactccaatgtgctgaaggagaacaattacgggattaagtatggattcaacgtgagcaacagcaacatcacaaacaacatgatctctgaaagtatcggcctgtatacaaatctggttcccgagggtccgcgcggatatggggtcttcctgaataattcagccgttaatgtaaccattgcaaagaacaacatcagctggaaccatctcgggatctccattgatgcaaactatagcacaggtatcctcataactagtaacctcatctccgataatgtactggagggaatcaggtttaatgaagggtatgatttggccaagaatgctattgaacctgtggtgactgacaatgcaatatacagaaacggcaggggtccaagcatgatgattcttggtgagctgagcgcaaaccctgcaggcatttatggccctggtgcattcaacgattctctgaagcttaagctcggcgctaattggtacgggaaaaacctgatcgtgacatgggacaacgacaccggggtcgtgggctacggaacaatgtgcccccgcatcaacaccaccggaatcgcatttaaagagatcacttgtgtgaacccaggcacttattcgattacattttataaaaatgatgaggttgcctcaaaattgcccgtcttcaacatgtacgccacgctcaacgacaatgtggaaattgtgtttgacgtgataaacggcgttggggtgtttactttcgacactcaaaaattcactactggcgagaatgtaatcaaggtgtctagtggctccttaaatgacagcgataggatctttaaggtggaaatgagcaagaccctcgacgacagtgaggtgccaatttga

SEQ ID NO: 8483 - DNA, 549 bp, synthetic construct
  source 1..549: mol_type = other DNA
atgacaattaaaaggtgcagttgggtcacggacgaggagatctatatcaagtaccacgatgaggagtggggcgtcccaacacatgacgaccaggagctgttcgagatgcttgtgctagagtccttccaggccggcctctcctggattaccatactgaaaaaacgggaaaatttcagaaaagcatttgacaacttcgattacatgaagatttctgagtataaagaagataaggtgaacgaattgaaggagaataaaggaatcattcgccacaagggaaagattaacgccgctatcaacaatgcgaaaatattcatggaaatccaaaacgagttcgagagcttcgactcatatatctggggctttagcaacgggaagatcatcaaggccgagtttaaaactgaaagcgaactctcgaagaccatcagcaaggacctgaagaagcgagggatgaaattcgtaggtcccaccatagtgtactcatacctggaaagtatcgggattatcgataaccaccagaagtcctgttttaagtttaataagactgactga

SEQ ID NO: 8484 - DNA, 1353 bp, synthetic construct
  source 1..1353: mol_type = other DNA
atgaataacgctcttaaattgaagctcagcatgtttttcctcatgatgtttgtcatgatcttttacatgctggtgttcggcaaggtgaacatcgtcatcgggcttatggtggttgttgcagcgttgctgaacctgggtaacgatttgagctacaaccccaaattgtccttcatcaaagtctttagcctgctgatgattctgggcttcgcatcctacctcaacaatcctataacggcatttgggtgcattctgacctttttcatagtctttggaacaactttcacttcgtatcacctgttcggcactcatgtgtatctgcccttcctcatgatttactttatgatggtcgtcatcccagtccctcttgaggctctcccgatgaggctcctatctctggccatcggagcgattttcatcgtgggcctgaatctaaaggttaacggaaagaagtattcgaagctgagcaagttcacaatcagcagcctgatcaacgagctgctggaggcaatcgatctgaaactggacggcaaggaagtgtcaatggacagtttcaacgtcgctaacggattttaccgcagtattttcagcaaatttgagtacaagtacttcccgaatcagaagcacgaatgcatccttaatattctaaagtccttccagtatatcgggtggagtttgtccaattatgaactcagcgtaaacgagctcacccacatcaagcgaatcctcaacgacatcaaaaattttaagttctccgagattgaggaaattaccggtgaaacgaaagaaatgaaccttatccttctgaacctgaagatcattgtgaacgaggccagtaaaaaaaacatagaaaaagagaagaaaattcccaataagtacgtggtgttcaatgtactcaaacacttgattaagcggcagttcagctttaagagcgccaaattcactttcgcattcaagatggcggttgtgctgacgctctgggaggtgataaccctgatattcaattttccctacacaaagtggttatattttgccagcattccattaatgctgccatatatcgacgacgtggcccataccgctaaaagtagaatgggaggcacactcattggcgtgagcgcctttgccgtgatcatgattgctctgcagtacatccccatcagctcttacatcgccatgatcatagtactgatagcctcactatttgggatggtgttctccctgcaaaataagctcaaattatcctcattcacaaccttgatgtcagttaccgtatccctgatgtacatcacaccacctaaggccattaagaacaccgtggggtactgttgcaatgattgttgcaacctttattga

SEQ ID NO: 8485 - DNA, 426 bp, synthetic construct
  source 1..426: mol_type = other DNA
atgatcgtggtcaccttcattaactatggcttcctccccttttcggtggagaaagagaccaagaataacctgaaaacttcctatgtgctcaatcggtgcttcgtcaacctaattaagctgaaatgtgaggggaaaaacatcaacaagacaagcttgcttgccgtgagttccatggttcacgagaatattgagctgaccaacaataacaaggaattgtaccagatgcagactaagacaacgaatatcagtaattcaatactgaattacatcgaaatctacggaatatccagcgaaatgaaggtgaaaattatcaaggtaatcgagaacaagggcaattttgacaaccatgaaaacattattctctactctatcaattatgtcgtgaacttactgaacgaggaaaagaacctgatcgagagcatatga

SEQ ID NO: 8486 - DNA, 1143 bp, synthetic construct
  source 1..1143: mol_type = other DNA
atggtcgagctggggctcgggatgatgagactcccggttctggacgagaacgacttctcatccgtagactacgatcagatcacaaagatgatagacgcattgatggacgctggtttcaactgcttcgacactgcctatccctaccatgaaggtttaagtgaagtcgcgctgcggaaatgtctggtggaaagatatcctagggattcttttaaggtcttcgataaattgcccacgtttgccattaccgaagaatcacagcttgaaccaatctttaaagagcagctggagcgctgcggcgtcgaatacttcgattactacttgatgcataatgtaagcggatatagcgagaagggatggttggacgtggattccttctcatttgccaataagaaaaaggaggaaggatacatcaaacacctgggcttatccacgcacgccaacgcagagttcctggataatatgctcacaatccacccagagatggagtttgtgcttctccagatcaactaccttgattgggaagacgagggaatcgagtctaggaagtgctgggaagtggcccggaaacacaacaagccgataatggtgatggaggcctttaaaggcggatttctgtcggacgttcccaaggaggcagagaagctcatgaaggagtatgcgccagacaagagcgtggtcagctgggctatgcgctttgtggctaacctggatggggtattcctagtgctgacaggcgccagcagcctggagcaagtggaagaaaatatcgtggagttcaataacgccaccccactcaatgacgaagaactcaacgtcattagtgaagtgtccgagataatcaatgctaatattactgtcgattgcacaaaatgccgatactgtgtggactcttgcagtgaggagatcgatatcgcaaaactgttcgacctgtacaacaaggagaagattctaggcgagaatgactggtcccccatagggaacgcttatgtgaactattcgaagatccctggtgtgggcattgcgagcgattgtactgagtgtgaactgtgtattgaggagtgccctcaggaaatcaacattcccgaagttcttaaggacgttgccaaaaccttcgagaccgagggctacgggttcaccaactga

SEQ ID NO: 8487 - DNA, 351 bp, synthetic construct
  source 1..351: mol_type = other DNA
atgatacccggaatgaacaaaaggcagatgaagcaaatggaaaagcagatgaagaaaatggggatgaaaatggaggagctggagggagtgagagaagtggtcatacggttcgacgaaaaggagctcattatcgacaatccgagtgtgtccctaatgaacgtgatgggccaggagacctaccaggtggaaggcaaagcgcacgaggtagagctcgattatgagatcgagatcccagaggaggatattgagatggtcgctaatagcgccggcgttagcgccaacaaggcaaaggaagcacttgaagaatgccgcggggacctggccgaagctatcatgaagctgaaccagtga

SEQ ID NO: 8488 - DNA, 744 bp, synthetic construct
  source 1..744: mol_type = other DNA
atgaccctgattgtgcatatttcagacctacatgtgtgtgaaaatgagtttgacgaggatattttcatgcaggctgtgtcggaaatcaacaatctgaagcccgacatgattatcctgactggggacatcaccaatagcgggtactactatgagttccagcaggcaacgaaatacctggagatgtttgaagcaccgcttttcgccgtaccaggaaaccacgacgctcggaacttgggttatcagaccttcgaagagctcattggcgagcgcagttggaagctcactatgggcggcaatttgacggtcattggcctggacagcagctcccccgatgagaaccgaggacacatcggcaatccacagcatatgtggcttgagcaccaattggacgagtgcacaattaacgagaacttttcaatcgtggccctccaccatcacgtaatctctatccctcaaaccggccgcgaacggaacgtgctttctgatgccggggacgtcctgaaaacactgactaaccacgaagttgatctcgtcctgagcggacacaagcacgttcccaacatatggaaactaaacaacaccatcgtcgtgaatgccggttccctgtgctccaaaaagctgagagggaaaataaagaacagttacatgatctataatgtgacagaagatgaaatagagatcttcctcaacaacatcaatggggagaagttcttatttggaaagtacgcgaggaatgtgctgtga

SEQ ID NO: 8489 - DNA, 1026 bp, synthetic construct
  source 1..1026: mol_type = other DNA
atgaaagtggtggtagacgctagcaatgtagcttttagcgtgaagaatgaaatgggacagcctcaaatgtcgaacatactagccgccgttaaggccctggaggaaggggaggacgaatttgtaatcatcgccgacgccagccttcggcatgacattgacgataaagaaacatttctgaaactgctggagagtgagaacgtggaggaagtccccgcagggaatgacgccgatcacttcattctggatatcgcctcacgggagaaggcaaaggtcctgagcaacgataagtttagggactacgcagctgagtttaggaacatctctagcatccggattccattcatcatcgagaacaatcgcctaacatttgggaagccgaagaaagctaagaaggataagaacatccttcagcacatatgcgacgagatcataaaggagctgaacttcaaaaaatgggaaatctacaccggcaaagagggtctcgaaatctccccattgaatattgcgaagcaggcgattattcgcatcgacaatgagaataatacggaatccaagctggagaacatcttttctaaaatccccatgttcaataaaattgtcgagatggtggacgatgtggagatagctgcaccctatgtgattttcgtcctcgtgcaccctaaagactacaagctggcggtgaagaacgcagggaacatctccgtgaccgtggccgatagattgggccttgagaaaaaacccctcatcgccgttcgtaatgacctcttcaccaagcagggcaacttcgagttgaacatcatgctggctgatgaagtcactgagtatgccccctacaacatttcagttcgcgtgtgtgatagtgacgaaatattcattaagagaaacagtaggaacatcgcaagcactattgccggacgactcggctcctggaagttcccattcgtttctgtcaagccggacatgctcctggagaagcctggcgatttcgagatagaactggaaaaaggcggaggattagacggttga

SEQ ID NO: 8490 - DNA, 1203 bp, synthetic construct
  source 1..1203: mol_type = other DNA
atggtgaatccgctgacgaagagcctgattaaggtcactaccaacctgaccccaatcagcgtgggaaccaagtttttccccacaaattcactagagacagaatacgtggaactatttaactacacgcagactatcctgtttgagcttgacaaagcagagatcacctccgattccattctggaaaacctgatccgggacgttggggtggaaaacctgcccaaagattacaacttctatgaactgaagcccgctgagaaccggatcgaagagtatgcattggtaagtaatattatcatgggcaacgaccggtacttctacatcgaacttcagaatccttcgcacctgatcaatattttcgtcaagatcatcgaaaatgagaaaggggaggtggtcgagaagaccgccacagaactcgtggctaaaatgctaagcaagaacgacgccattcgagtcgctatcgaactcattggcatcggactgagcgagggaatccaggtcattagcgctgttggaatgaccggcgcggcatccatcgagagagccatacattacacccaaaacgtaggcagttttcctgggattgcctttactaagttaggcggggagtacgcgcttgtgttcgattctcccttcctcctgcaagagtcaaggcctgtggacttggaaaactatctgttcatcgatctgatcgattcgacaaaattcattgacaagaacggtcgtaaccagctggtggatttgatgacaggtattaagaacttcatcgaaacggagtgcaatggcgagctggaagggtaccgggagggcggggacgactttattgccaggtttccatccaaggaccttgctatacgcgctggactcgatgcagcctggttcgccctggacaatggcgcgaaaataagggcgggagttggcagaagtcgacgcgaggccggtgagcgcgcccagcttgtggacgatttgaaatcaactgccccattgagcctcgtggtctttgagctcgccaacggcctgtacgcctataacatcccgtctgagtttacaagaaccctcattaatttaatagagaatgagaaggccaaactgatcggcgtctttgtgttcgtgttcatcttcgcatttataatgtccattctggggctcggagtcttcagcttcatcggtgttatcatagccctcgtgtatgcattcgtagcttga

SEQ ID NO: 8491 - DNA, 378 bp, synthetic construct
  source 1..378: mol_type = other DNA
atgagacggaagaaggacgacaagagggtcctattttcgcccaatagtaacaggccgaagcactccaacaagcggaaactgaacctgcctaattttcagcgccagccccaacgatcacgcaaacagtccaaatggggcaacgtgaccgtgttccttataatcttggccctggttgcattcgtggtcggcgcgggaatgggggtcagcctcagcttcgacaatgatgatgggccacattggaagaacgtgaccgaagagatgactaccaacctgaatgagacggataactttacttatgacgaggaagtagacggtgtggatttcaacagcaacgagacactgaccgaactcaatgttacagtgaaaccaagctactga

SEQ ID NO: 8492 - DNA, 1224 bp, synthetic construct
  source 1..1224: mol_type = other DNA
atggagttcatcaaggatctgagtggtggattctccgtgatagaaaatcttatggtcagcggagctcgcgaagggaagtttggcgttgcaattatctactcacccaacagtacagccagcgcagtgttcacttccaacaaggtagtggcagctccagttaactacactaaaaacgtcctcaagaaaggcattatcagtgccgtgctggtcaacagcggcaatgccaactgctttaccggcaagaagggatttaaagattgcgagaccctcgcggaattagtgagcaacgacctaaacctacctaaggacgaaattgcgatttcgagcacaggagtcattggccgggagatgccgatcgatattatctcgaaggtggcttacgagagcctgtcaaagcttggcaacggccccgaaaattccctggccgccgcaaaagccataatgaccacggacacattcccaaaggagtgtgccatagaggttaccctcaccacgggggagaccgtgaagattgccggcatcaccaagggaagtggaatgattgctcccaacatgggaaccatgctgtccttcatcgtcactgacgctgttatcccatccgatgagattaataaagccctcaagaaatctgcagacatcagttttaacatgatcgtggtggatggggacgagagcacgaacgatacctgcctgatgatggccaatgggacaagcaacgttgaggtcgtgaatgaaggcaagttggactctaacttccaggaggctctcaattatatttgcatcgacctggctaagaagatggcgagggacggtgagggcgctacgaaattcatcgaagcgaacgtgtacggtgccaaaaacgagacagacgccaaattggccgcaaaaagcatcatatcctcaaatctgttcaagagcgcagtctttggtggggaccccaactgggggcgaatcgtatctgccattggctactccgggtgtgatttgaatcctgacatcgtcacaatagctatcgccgacgattctgacgatgtggaccttgtgtgtaatggcaagatcctggcatttgaaaatacccctaatctgaaaagagcggaaaagataatgcagtcaaaaaacgtgaaggtaaacatcgacatgcacctcggtgatggagaggccactgcttgggggtgcgatctgacctatgattacgtgaaaatcaatgccgagtatactacatga

SEQ ID NO: 8493 - DNA, 105 bp, synthetic construct
  source 1..105: mol_type = other DNA
atggccaaggtgaagggaacgaacagacggacccgccagaaacgaagctacaccaaacccgggagcaagcggggcaggggcgtcaagcagacatggaaaaagtga

SEQ ID NO: 8494 - DNA, 591 bp, synthetic construct
  source 1..591: mol_type = other DNA
atgaacggacaccgcgctcacggcttctcaagtgtccatttcctcgatagcgatgaaatcttgaatgagctgaacctgaaaggggatgaaactttcatggacgccgggtgcggcgacggccacattgccataaaggtgattgaggactaccttccaaaaggcaccgtgtacgccgtggacgtttacggcgcgtcgattgaagatatggagacatacaagaatgagaacaatgtggagaatctgatcaacatcgaagccgatattcccaagggaatcccgggtgtggaagacgagtccgtcgatgtggtgctgatggtcaatgtttttcacggatttaaagccagcaggaccatcgacgatgctatcgaggagctcaaacggatcatcaagaaggacggtaaaatcgcaatcatggactataaggcatgggacgtccccaagggaccacctacggcgtttagatcctctcccgaagagctagaagaaatatttaacaagcacgggctgaagatgacatatctcaacgaagagattggggaggacattcctgagggcaaaagccataacttcatagtattccagaaggagtga

SEQ ID NO: 8495 - DNA, 804 bp, synthetic construct
  source 1..804: mol_type = other DNA
atgaagagcatgaagaccgtcgccgtggcgattatagcaatagtcgttattgtggctgtggggctttacctcacgggctcagtagggacgtccaacggagacctaaacggccaggatgtgcagctggcggccgcagcttccttgaaaaacgtgtacgatgagaaactcatccccatgttcgaggagaagtatcccggggtcaaggttaccccgacttatgcttcaagtggggacctgcagaaacagatcgagaacggcctcaaagcagacgtgttcatgtcggctggcaataagcagatggacgccctgatcaatgaatcctatgtggacaacgattccaatgtgaagtttttagaaaacaagctcgttctgatcgtctctgccgactccaatgtgaacgtctctagctttgaagatctgaaaaacgtgaatggcacaatcgctattggtgacccagaaagcgtgcccgccggacagtacgccaatgagtcactacataacctgggtatttgggacgacgtggaatctaaactgagcttgggaaccgatgtgacagcagtactgaatcaggtagcccagggctcggccgattgcgggctggtctacaccaccgatgcgaagagcagtgatgaggttaaggtgatctgtgaggcacctgaggatagccttaaggacattgtctaccctgtcgccccaatcaaagacagcgagcacgccgacgctgcaaacaagtttatggagttcctccaaactccagaggcccaaagtgtgttcgaagactacggattcacaatccacgaatga

SEQ ID NO: 8496 - DNA, 675 bp, synthetic construct
  source 1..675: mol_type = other DNA
atgatggattggacccctatccttatatcgatgaagactgcgagtctgtcaattttcatcactttcttcctggggctgattgtggcttggggcatcgtgaaaattaaaaaggacagcataaagatagtcctggacggaatctttacactcccaatcgtactgccccccacagtcgtggggtttttcctgctgtacatctttggtgtgagggggccaatcgggagctttcttatagactttttcgccgtgaaaatcgctttctcatggtccgcaacggtgatcgccgcagttgtcatgtctttccctctgatgtatcggagcgcccgcggagcatttgagcaagtcgactctaacctgttggatgctggtcgcaccttaggcatgagtgagtggaagatcttctggaaagtgctctttgcaaatgccctcccgggaatcatcagcggcggaattttggcctacgctcgaggcctaggcgagtttggcgctacagccatgatcgccggtaatattgcaggacagaccagaaccctccccatggcggtttactccgaagtggctgcgggcaacatgggggacgccttcaactatgtaatcttcattattattattgcctttatcgccatcttcattatggatttcgtgtccatacggaaggaaaagcagtggaagtga

SEQ ID NO: 8497 - DNA, 1185 bp, synthetic construct
  source 1..1185: mol_type = other DNA
atgcggtgcgtggggacagtggtgcggggaatacgcacacccatcatcaaagagaacgatgatctggcaaacatagtggtcgatagcgtgatggctgccaaagagagtgagggattcgaatttaaaaataaggatatcgtggcgattaccgaggccgtcgtgggtatctcagaaggcaattatgtcactgtggacgacgttgcccaagacctccagaacaaattcccctcgaaaaatataggcgtaaccaaccctatcctgagccggaatagattctcgatcattctcaaggggatcgcccgaggcatggacaaaatcaccctgctgacttctttccctgcagatgaggtgggcaatggcattctggacgaggaggtcctcgatgctagcgaatataacttggccagcgtgattagcgaggaggagtacaagaagacgttcggctcatggaaacacccatttaccggcattaacatgatcgatttgtacagggagcttatcgaaagcgaggactgcgaagttgaatttgtgttttccaatgatgtaaaaaccatcctggactataataaggacattctgacgtgtgacatacatacaagggagaagacaacaaaattactgaagtccgagggagctaatgtgtatggcctgcacaacgtcctgagtgagccgattggagactccgggttcaaccccgattacggagtgctcggcagcaacaaagccactgaagagaagcttaagctcttccccaagaccggcaacaagttggtcaacgaaattcaaaagcgtttaaataacattacggggaagcagatcgaagttatggtgtacggggacggtgcattcaaagaccctgtaggtcacatttgggagcttgccgaccccgttgtgtccccagcgcataccagtggcctgataggaaccccgaacgaaattaaactgaagtacgtctccgataacaagttcgccaatctgagaggtgaggaactaaaggatgctatcaaggaggaaatcaaaaacaaggacaaggatttgactggtcagatgatcacccaggggaccacaccaaggcgccttactgacctcatcgggtcactctgcgacctgacgagcgggtctggagataagggcacaccagtcatctttatccagggatactttgacaatctagcaaacgactga

SEQ ID NO: 8498 - DNA, 594 bp, synthetic construct
  source 1..594: mol_type = other DNA
atggagcacaagcaccatggcaaatcaagtgccaagtttctagactccgacgagattctgagcgagctcaatcttaaaggagacgaggtcttcatggatgctggctgtggtgacggctacatcaccaaaaaggccatcaaagactatctccccaacggcttcgtgtatgcagtcgacagttacgataaggctatcgaactcatggaaatctacaagaaagataacgccatcgaaaacttgatcaatatcgaagccgacattagcaaggggatacccgatgtggaggaggactcagtcgatgtgctgttaatggtgaacgtatttcatggatttattgaatcctcccatcgggatgcggttatcgaggagctgagccgaatcattcgcaatgacggcaggattgcaatcatggattttagacctgtggagctgtcgttcggacccccaattgaaatcaagtgcggtccggacgagttggagaagctgttcaacgaatatcacttcaaaaagattcacctgaatgaaaagatggggccaaaagggcctaacgggaacagccactacatcataatattcggaaaggagcagttctga

SEQ ID NO: 8499 - DNA, 711 bp, synthetic construct
  source 1..711: mol_type = other DNA
atgatctttgctgccattctggctggtggcataggaagccgaatgggcggaactgacacgccgaaacaattcttaacactgggcaataagcccgtcattattcacactattgaaaagtttgtgataaacgagaagatcgacaagataatcgtgctcacacctaagaatttcattaatcataccaatcatctcattgaggaatacatcttgtataaggatgacatcatcgtcatcgaggggggccggaccagaaacgacacactcatgaacggtatcgactacataaatgaacactatggaatcgatgaggattcaattatcctcacccacgattccgtgcggccatttgtgactcacaggattattgaagacaacattgacgccgccaaaaagtatggcgcctgtgacaccgtcattcctgccaccgataccatcgtggagtccatcaacgggaagactatcgaaagcatccccgtacgcgattactactaccaggggcagacaccacagagcttcaacatcaagaaactgttcaaccttatcaatagtctgacggaggaggagtcgaacattcttaccgacgcgtgcaaaatattcgcactgaaagacgaagacgtgtacctagttgaaggggagctgacaaacatcaagatcacctacccctatgatctgaaattggcaaacacgatactggaggacatccacgattga

SEQ ID NO: 8500 - DNA, 1017 bp, synthetic construct
  source 1..1017: mol_type = other DNA
atgattaacatcgtgtacagattgaagagcccaaagttttttgaggaggcaattgatgaaattgagctggagggggttatcgtacgcccaacgtatctctccatatgccaggccgaccagagatactatcagggctcacggccggcggaaatcctggagaagaaattacctatggccctgattcatgaaggaattggcgaagtggtatttgacgagtcagggaagctgaagagcggagataaagtggtgatgatccccaacacgcccgagggtaaagacgtgtatagggctaattacagctacgactccaagttccgcgggagtggtttcgacgggtttacttccgatctgattaagctccagtcggatagggtggtgaagatccccaatgagttcaaccctcatgtcgccgcatttatcgagctgatgaccgtcagctaccagggcatttcccggttcagtgaaatagccatcactccaaaggatgttctgggcgtgtggggcgacggcaaccttggattcatcaccgccctgttcctcaaggagaagttccccgagagcaaagtgtacgtattcgggaagcacctagaaaacctgaatttgttctccttcgctgacgggatttatcagatacacaacgtgccaaaagatttgctcattgaccacgcctttgagtgcgtcggtagcagcgcgagtcaatcggcaatcgagcagatcatagatttaatcaatccgcaaggctccataaacctgttcggagtcagtgagtaccctatccccctgaatacacgtatggtcctcgagaaaggcctcaccattcagggcaatagccggtctgaacgagaggatttcgtgggagtggtcgaaaccctaaagcaaaaccctaaactttttgaatatctgggaaaactggttacaaacatctgtgaaatcaactcactcaacgaccttaaggaaagctttgacaaggactacatctctaattttggtaagacaatcctgaaatgggacaaatga

SEQ ID NO: 8501 - DNA, 525 bp, synthetic construct
  source 1..525: mol_type = other DNA
atgaagaagcaggatttcctaatgaagacaaagctgatccaggagaccttcaacgacaagcggaaaatcaagtgccagattcctatccagaatctgaagttagagaaccacatccatcaagagggcagcattttcattaccgaaaacgatgagattatcgaccttgagctccagctgacaaactttaccgaggacgagctggtaaagtacgtggaactggcagaagccttgtacgagactaacaacaaatatgtgtcaatctacataatctgcccaaatacggtcaatatttgtgtgaaggaatgtgagatcaaatccgaggcggaatttagcataaaacttgcagctgtcgaggagaatcccgccgaaatcctgctcaacataattaaaaataaaatcatcaagggggaaatcctggacaacgaggatttgtatgccctgagtatgatgccgctcatctgcaagaaggaagagaggaactattttcgcaaagaatacttcaaaataattaataatctcaactga

SEQ ID NO: 8502 - DNA, 1365 bp, synthetic construct
  source 1..1365: mol_type = other DNA
atggtgaacaaaaatgtcgcacttatgaggggggagcctgaaatagctgtcaagaagctggctatccccattatgatttcaatgatcctgactgccctttacaacattatcgacggtatttgggtcgctgggctggggccaacggctatcgccggaatcggctttgtaacgcccatattcatggtgctgaacggcgcgagtgtgggcctgggtaacggagccacatccagtattagcagatttatcggggccaagaaccacgaaatggcaaataaatctgccacgcacagcttattcatctttctcatcgcatcaatcatcctcaccatcattttcatgatgatgcagaagccactgctcgttagttatggagccagcggccagacactgaacgaggcgatcgcatatgctacacccctcttcttgggcttgataggcttcatgttttcaaacggctgcagtggaatccttcgcggggagggagatatgaaacgggccatgtacgttgtaatcctgacagtcatacttaacgccatactagatccgctgtttatctacacgattggactggggtcagctggagcctccctcgccaccatcgcctccagctccattgcggccctggtgatgctgtactggatcttggtgaagaaggacacttacgtgaacgtgactattaaaaagttcaagctagacatgaatctgactaaagacatccttaaggttggaatcccctcctccctggatatgctaatcatggcgattgctatgtccatttatctaatcgtgatctctcaggtgggcggtgattacggcatagcaaccttcacatcgggtcagcgcctgtatctgtttgccataatgccactcaccgctatcggatcggcagtgattgcagtgagcggcagtgcttttggtgctaagaacggggactacctcagccggacccatatttatgggtctaagttcgggttgatcctgggaactatcattactcttatcctggtgatcttcgccacccccctgagcacactcttcgcgtacacccctgagaccaccaatctggtgccgggcattgcattatacctgcaagtcgtttgccctaccttaattctcacaggcatcggtatcccaagcagcttcttttaccaggggattggcaaagggatctattccttgatgttcaccatcctccgtgaaatcatattcgtagtccctcttatcttcctgtttgtgtacatattccacctcgacattctgggcatctggctgggcctctgtataggcagggccattgccagcaccttgaattacatttttgccagatatgaggtccggcgaattaggagcaaatttggaaattga

SEQ ID NO: 8503 - DNA, 1836 bp, synthetic construct
  source 1..1836: mol_type = other DNA
atgagtaaaataaactttggcaacattgtggagatcatcaagcatgactttaaggcgagcttctcaaatcccatagtgacgattgtactgattgcaataattatcctaccttccctgtacgccctgctgaatatccaggcctgctggaacccctatgaaaacactaacgaggtagaatttgctatcgctaacttagacaacggcagcacctttgagggtacctatttaaacgttggcaatgagatcgtgaaggatttgaagaacaacactaagttcgattggaagttcgtcactgaggacgagctgcggaaaggggttcacgacggggactattatgcaggcattataatccctaagaatctgagtgaaaacattgcatccatcacatccgacaatcccaagcaggcggaactcgagtacctggtgaacatcaaatcaaacccagtcgctacaaagctgacggacacaggtgccaataccgtttacactaccgttaacgcaaagattgtgcagattataaacctcgccgcctacggaaaactcggagacctgaaagacggtctgtcttctggtgcagggcagttatacagtgggggaagccagctgtcggcaggggccgcaaaaatttcttccggcgccggacaggtgtccagcggagtgagtgatgttcagaacggcgcaagccaagtgcaaagcggtgctaaccaggttcagcaggggtcctctgcaatcaacaatggggccagtgatgtgaagcagggctcagcctccattaagcagagtgcgagcgacctggagaaagggtcgcagcaaatacagtcacaggtcgacccatcaaccctgcccgaacctatgaagcaatatgtggaaggcaatatcaaactggctaacggaagcggcgaactggctaagggttcatcccagttggccgatggttccgtcaagcttgcagacagcagttcgaaattggctaatggtgctagcaatgttgcggggggggcaaatcaggtagccggaggcagcgtggagctcgccaaaggctcactgagcctggccgccggggcccagatgctgagcggctccgcctcacaggctttgttcagcgctgccggagccctaagcagctctgctaacagcctcagtagcatcactggcatcaatgagacagaacttggagactatttctactccccaattaagctggataggcaggaggtcttctccgtccctgattacggatcaaatgtggcgcctttctatatcgtgcttagcatgtgggtgggggctatcattacgtgtgtaatgatcacaccgggaaccagccaagggaccaaatacaagcccgttgaaatgtactttggcaaggtgatcctgtttgtcgtcatgagcatgctccaggcggccgtgaccatcagtggggcctatatcctcggcatctatataagtaacagcccactcttcattttctctgccatcctggtatcggtcatctttatgatcctggtctattccatcatatccgccttgggccaggtgggaaagggcataggagtcatccttcttgtgctacaaatcagcggaacgggcggcatttaccccatcgagatcatgcaggatttcttccagaccctatacccgtacttgccaatgacatacgctatcacattgattagagaggcccaactcggggtggtgtggtccaattacctccccgcgctcgtggtgctcgtctcgattggcattgtgaccattattgtggctgccctgatcaaacagaaagccgataagtcctctaaatacttcgaggaacgcctgaaggagagtggccttttttga

SEQ ID NO: 8504 - DNA, 204 bp, synthetic construct
  source 1..204: mol_type = other DNA
atgaacctcatactcagcaacgagaaagacattaatatgaagttctgcccaaaatgcatgcgggagctgaagaaggtgttccacggggagcccaccacagagctggccatcgagtccctggaaaacgaaatcatcattggaaatagctgtatgggcaattacaactactattgtgaatactgcgatgaatttttccagctatga

SEQ ID NO: 8505 - DNA, 927 bp, synthetic construct
  source 1..927: mol_type = other DNA
gtgagcgaacaaaagctcgaagtgttcaacgttttaaactttttagataacggctacgagattgacgatatccttaacgagggtaaattcggaacctttccgtcagcccaggactgtattaaatacatgatcgacgagggctacctcaaaggggaatttaacgccgcaatccataacgacggcaagtccctgacagccgaagaggtcagcaagaagtacacagttgcggagttgaaggatctgctccgagagaatgggttgaaggtgtcaggcaagaagcaggaactggtggagagactgttgcctgccctgagtggtgaaatcacagtcgagccagataatggggaatctgtggatctagcactcactgacaaggcacaggaatttcttaatgagaatgattggatggacctgtatatgttcgccctcgtggctttccgcttcgaggattacgaaacctaccggaaaaattccagcgaggacaacatacagacggctctcaaattctgcgacgagatcattagtagggcacttatcgccaatcagtttctggtattcatcgacgccctgagcgctaaggcccacgtgtatgcgtacgacaaggattatgagtcgttcctggactatgacctgcaacgcttcattctaggactgaatcccatagtcatggactcccaaacctacgctaactatgacgcgatcaattacgccaacgtcattaacctgaagaatgtcattgagcagcttgatctgggcagtctgaagaaacggtttgacaagatatgggataagtctaacatcaaaagcatcaccgtgcccaagaagacttgctataaaatcctgcagaaagctttggccgggtccgatgtggaagagctcaacttcaacgtaacgcagaaatacttcgtgaggaaatttggagtttga

SEQ ID NO: 8506 - DNA, 591 bp, synthetic construct
  source 1..591: mol_type = other DNA
atgcgaaacaaagttgcaggaatcgtcttcatcgtgggcagtctgtattatgtcctcgccgaagccgtgagcgcaacgttcttcaatgctagcctatttaacacttattctttccacaccatctccgagctgggcatccctaatgtaaactcccccttgttttggctgatgaacagtgcgttcatcctgattggactcaccctcatttttggtaatttttacaagtttaaggacttcctggtgaagaacaggatcataatctacatcctcacactaatgacctcaactggagtcattatggtaggctggatacacgggggcaatccattcacgcttgggtatcatatgctgggcgctatgatggccattttcggggggaacgttctgctgattgtgatcagccgctccatgtctgagtacagcaagttccagaaaaccacattggtgctcggaatatttggtctggccgtcttttggattatgttcttcaacatggagagcatctacatgccggtgttcgaaagactttcagtgtacacaatgatcatctggtgttttttaaccggctgctacataatttcgcgggagtga

SEQ ID NO: 8507 - DNA, 249 bp, synthetic construct
  source 1..249: mol_type = other DNA
atgacaaacctggacaaatccgtcgaggaggagatcctcgccatcattgagaagtatcaaaaggaagatacaaagctgttgaattacctaattacggatgacgagataacctttttcagccccctggcaaacgggaacagcatcaccgccgaagaccttcacaaagtggctgacatcctcaaaggaaccttcaagggcatgcagattgtgaatcaggaataccggtttactttcgaaatcggcctgtga

SEQ ID NO: 8508 - DNA, 678 bp, synthetic construct
  source 1..678: mol_type = other DNA
atgagcgaggataacgatctcaaaaatttcctcataaaaaaaggagcgagcaaagtcggattcgccaacgtggatggactggctgagggattcatcgatctgccctacggaattagcttggtactcaaaatcccaaaaaaagcaatgatttacatcgagaatgaagattacgagtcctattggagctgttttcattcactaatcgaccggctaacggaaatctccattaagggggagaagtacatcaagaatcacggctacgatgcctttgctcttaccatgagtcgaaatgagtgcgacatgaagcgcttactgagtatactgccttataagacaatcgccaccaagtccgggctgggctggatcggtcggtctgcactttttgtgacgccagactacgggtcggccgtggtcctcggcggcatactcactaacatgccgctgaccttcggcacccagatcacagactcacagtgtgacgactgtgaaaactgtcagaaggcgtgccccgtgggggccattaatccccaaaaatggaacactaagctgaacaggaacgacattatcgacatcggcaagtgcagggaatatattgttgagcagtataagaacggtttgggctgcacaaagtgcatgtatgaatgcaaactgaccaagaagtacctggggagactgtga

SEQ ID NO: 8509 - DNA, 864 bp, synthetic construct
  source 1..864: mol_type = other DNA
atgaaggacatagacgttttaattgaggcgctcccttatatcaaaaagtttcatgacaagaagatactgatcaagtacggcggacatgccatggtggatgataaggcgaagtcctccacagcccgcgatactgtcctgctgaaatacgttggaatgaagcccctgattgtccacggtggaggcccagaaatcagcagatccatgaataaactcggcaaacaggccaaattcatcaaagggttgagggtcactgacgaagaaactatggagataattgaaatggtgctggtgggtaaaatctccacagagatcgtaagcgagcttattaagcacgatgggcaggcaatttcattgagcggaaaagactcaagcctcatattcgctcacaagaaaggcgccagtaagatcgatgaggagcttgtggatctggggctcgtgggtgaggtcgactgcatcaacacgaatctgctcgagatgttcctagacaacgactatatccccgtcattagcccagtggggatcgctgaagacggaaccagtcttaatttgaacgcagataccgccgccggggaggtagcaagtgctatcggtgccgaaaagctaattatcctgaccgatgtgccaggcgtgctgcgagacccttcagacccgacaagcctgatccaaaagattaaggttgacgagataccctctctgatcgacgagggcattatctccggaggcatgattcccaaaatcgaaacgtgcatcaacgctattaacaatggggtgggctcgtgtcacatcattgatggccggaaaaagcacagcatcctcctggagatctttaccacaaacgggataggcaccatgatttacaagtga

SEQ ID NO: 8510 - DNA, 1470 bp, synthetic construct
  source 1..1470: mol_type = other DNA
atgctgaatattactaccttccttgacgccaactcaaaacgactcgacaaggacgtgcttttcaatccaacgaccggagagaagtatagttctggagagattctgtcgatcgtctccgagatcggtaggatcttgaaggagctggggatcaagaagggcgaccgcatcctcatctacctgaaaaattccgaagagtacttgttttcactgtttgcaatctggcggattggggccatcgccattccaaccaaccgggtgttcacagccaacgagctcgaatacattgtcagtgactcgaaggcaaagctgatgattacggatgaagaagcaaaagacctcatcaatgtggaaacatatattcctaagaacatctccagttttaagaattgcaaagtcctggagtctgagaacactgactgggacgatctgtgtcagctgcagtacactagcggcaccacagggcagcctaaaggggccatgctcacccatggaaactattttactgctatacacaacgagtgcgacgtcctgacgctgaaacaggatgatgtatttctcggcatctacccgatggctcatgttggcctcagctgggccatagctgccctccgagccgctgcatactacatcctgatagaaaagttcaacatggacgagtacctggaattatgtgaaaaggagaaggtgagcgttcttactgggatgcctcccgtgatacacagcctgacgaccattgatgcccggaagcaactgaagaccgtgcgcgaaattatctcaggtgggggccccttgcacaagaaaatctggaaagatttccaccagacctaccaaataccaattatcaacgcatatgggctatccgagacaattgtgatcggaactggcaccgtcatcaggccggaagactattgggaggcggatcggtttgagagcgtgggtcacccagtctgtttctccgaggtgaaaatcgtcgatgagcatgattctgacatcatcctgcccaagtacgaacagggggagatcgccctcagaggacccgccgtggccaaaggatactggggcaatgaggagaaaacaaaaagctcattccttgatgacggctggttcttaacaggcgacatcggatatctggatgaagacaaccgcctattcattacagaccggaagaaggatatgattgtaatgagcggctggaaaatctacccaaccgaggtggaggaggtattgatcaaatatcctgcggtgaaggaaatagctattttcagcatcaatgactgccacaggggcgagattcctgttgctgcagttgtgtggaaggacggtgaggagtgcgaaggactggtcagttatgcgcgtaaaaacctatccagatacaaagtgcccagaaagatatttaccctcaatgaactgccccgcgtgaacggctggaagttgcttagacgagagctgaggaagatgttcaaggaatga

SEQ ID NO: 8511 - DNA, 1059 bp, synthetic construct
  source 1..1059: mol_type = other DNA
ttgaactatcatctgaatatcatcaacgctatcctgctgatttacgaacagattgtggtcagtgagatcatgtacgatattgccgtcatctccggtgatggcataggcagggaagtaatgtccgcctgcgaatatctgcttgataaactcgacctgaagctcagcttcaagtacggagaagcggggtttgattgtttcaacaagaatggcacaactctgcccgaggagacaattaaactagctaacgatagtgatgccgtcctcttcggcgcctcgacctcaacccctggacaaccaagtcccatcatcaatttgcggaaggagcttaatgtttatgcaaacataaggcccatcaagtcatacaaaggcattaattccattcacgatgacatcgactttgtgatcgtgcgcgagaataccgagggtctttactcccaggctgagtacggggacgaaaacaaagtgatcgcagagcgtattatcacgcgcagagccagcgagagaatctccaaggccgcatttaatttatgcgtcaagcgagggcaaagcaaagtcacctgcgtgcataaaagcaatgtgctgaaaaagacggacggcgtcttcaaagagagcttttacaagatagccaaggagtaccctcagattaaaactgaagacttctacgtggatgccaccgcaatgtatctcatcacacagcctcagaactttgacgttattgtatcgagcaacttgttcggagacattctgtccgacgaaagtgccggcctggtggggggactgggtctcgccccgtctgggaacataggggatcacaacggcctattcgaacccgttcacggatcagctccagacatcgcgggcaaaaacatcgctaacccatgttctatgattctctctgctagcatgatgctggactatttaggagagtgggagatcagcaacgacatcaagggggcgattgagaaggtgatctccgactgcaagattcggaccccggatctgggtggcgacagctcaactatggaagtgacaaaggcaatagtgaaggagataatctga

SEQ ID NO: 8512 - DNA, 465 bp, synthetic construct
  source 1..465: mol_type = other DNA
atggagagcaccattgaggagctgatagagctactgaacgacaaggatgactacgtagtggaagatgcgataggccagctggagttaaaaggggccgacgcactcgagccccttatggacgcactatcacaccggaagaaaaatgtcagactgcatgccgccacgctcctgggggcaatcaatgatgaaaaggccattccttccctgatcgaaacactgaaagacaacaacaagctcgtgaggcgggaagcatcgaccgccctgtcccgaatgggagccccggctgttgacccactcatcgagactttggccgctgaagattggcgcgtgaggggcgccgccgcgtgggctctcggaaacctgggtgacaagaaagccatccacgaactggagaaattgcttgacgatgagagtgctttcgtcaaggcaggcgcgaagagcgctatcgagagcattcagaagtga

SEQ ID NO: 8513 - DNA, 891 bp, synthetic construct
  source 1..891: mol_type = other DNA
atgcactacaccggccccgtgtaccgccctccccctgaggccaacacaccactgctggaagtcacatatggctgctcttggaacgagtgttccttttgcacaatgtatgacacgcagaagtttggcataagcccaatcgaggacatcgaggaggacctggcggagctaagtcagttctaccccaaagacctcaaacgcatctttctcgtgaacggagacgcttttgccctgcaggcaaagaagctttttgcgatttcagacctgatccacgagtacttccccgaggttgagtgcataacctgttacgcctcgatcaaaaacatcaaaccaaagagcgatgaggacctggaaaaactgaggcagaagggattcaatgaactgtatatcggtctcgagaccgcctataacccggcactcaaccagatgcggaaagaatatactcagaaagatgaatacgaacaactcgagcgtatccagaatgtcggaatggattacaatgctctgttgatgctgggggtcgccggacggggcaactacaaggagaacattgatgcaaccatcaatttgttaaacaccttcaagcctaagattgtggggcccctaacgacatccgtgcaaaatccttcccccctgcatgagatgaagttgaagggggagtttgtggaagccactgaaagggagatgatttgtgaagaattaatgctcctcgagaaccttgagatggatgacgattgcttcttcttcggtgggcacccgtacaatctgatcagattcagtgacagcttcaagaacaaggataaaatgattgaaaaccttaagaatcaggtgttccaaattgacgaactgagacagggcatactggacactgtacttccacgaggcaatttgtga

SEQ ID NO: 8514 - DNA, 528 bp, synthetic construct
  source 1..528: mol_type = other DNA
atgcggatttgtctgtatggctctggaagcgctgaaatcgatgaaatatacaccgatgccgcatatgaattgggctgcatgatggctcagaagggccacactctggtgttcggggggggagacactgggatgatgggtgcatgtgcccatggcgtgcaagacacaaacggcaagtccataggaatagcgcccaagtggatcgagaacttcgagccactgtgcaaggaatgcagcaaattcatttacgtcgacagtatggacgagaggaaaaataaattcctggaaaattcagatgcctttatcatcacaccgggcggaattgggaccctcgacgagttctttgagatcatcacgctaaagaagctcgaacagcacgataaggagattatcgtattcaacatcgatggtttttacaacaaaatgtttgacatgatcgatgacatggcccagaaagggtttctgtacaaccagtatgagattttcaagatcgccaatacccttgaggagatttttaactacttcgactga

SEQ ID NO: 8515 - DNA, 555 bp, synthetic construct
  source 1..555: mol_type = other DNA
atggaatccgagtacatactcatcgagctgaaggagttaagttcccacgacaccatcacaaaaaaggaactcatgggcctcctgaagaaatatgccagcatcatatcggtgtatgacctaatgatggctacggcacatatgcgcaaggacggagagtatgtgcacgctaactaccgagaaaagtacctggaagtgtatatcaagtacttcatcatgcggatgaaagaagtcttggaaaatgaggactacaattataaaactaacattgacaagaagtctttcgatcaaagcttccccatgctcgagagaacatttgagaaggagaggcttacggcgtcaaaggatgacaagttccctttgatctacgtcatcactgccctgtacaccacatttattctggaggaaccgattcacccagttgggagcgagtttcccggcagtctgaaggtagaaaaacggaatggtgagttctactgcccagtgaaagacaaccagaaagataacaccaacgccatctgccatctgtgtcttgcagagcagacccccgatatttga

SEQ ID NO: 8516 - DNA, 645 bp, synthetic construct
  source 1..645: mol_type = other DNA
atgtccgagaattttatggagattaccaaggaggatatcgaaaatatcgagaacgccctcaaaagcaatgcagattacaagctgaataacactaagttcgacattaagagcttcgaaaagggcggggacatcagtctgatccaatatgtcgctgatgtggaaaacgagctcgttttccagaccaaggaggaaaacggcaaatattacatctccgagatatttggcttgtttatggacaacattattaacggaaatgtgtcaagggacgtcttccagagcgtaagcgattacttccatgaggtgatcgcaggagagaagaacgactttgaggacgagaaagaagagcttatcaacttcctcgtgctgacggaggagtacgacgccaacaaattggaaatggatctgaacccctcgaagatacgcgaagactataaaaaagattatggtgaaatctacggggatgacagcctgaacagagtgcagaagagtctagccctgaaggagctcctgcacatgtccatatgccaggtcgtgaacgacattgatctgtttttcacacggccgtacgacttaacaccagaggagaatgctgagaagaataagcaggaacagaaagcgcttgaaaatgaactgcaaatgtcatga

SEQ ID NO: 8517 - DNA, 468 bp, synthetic construct
  source 1..468: mol_type = other DNA
atgataacgattaccaagaaagaagaggtggttctggaccaagtgaagatattcaacctggagtactctgacggaatccccgtaaatattctcaggaaggagctgggttttcacgaatacgacctggtgcacatccttgaggagctgcaggataaggacctcgtcatcttccgcgacaacaaagtgagcttgtccgagagtgaaaaggagattaacaccgtcaatagcaaaaaggatatcgagcagctcgaattaaacctgaaggaaaaggagtcgtataacctgatcaaaagcctagtggacgataaaaatctgatttcaaaatatacactggaggggcacctcctgtacggcgacctgaaactcactaatttccggatgtaccatatcatcttgagtcttcagaacaagggccttctaaagccaatcgataagtccgatggggaatattacctcttggtcgaatga

SEQ ID NO: 8518 - DNA, 438 bp, synthetic construct
  source 1..438: mol_type = other DNA
atgagcctcccaaagaagttgctggccgactttgacgaagtcctaaaggataggggataccagtctcggtcaaaaggcattcgcgatgcacttcaggactatattgtgcgctaccagtggatgaatagcatggaaggtcagcgaatagggatcgtcaccatcatctacgaccaccactatactggggttatggaaaatctggcggaaatccaacacagcttcagaaacgagatcaacacgtcgatgcatatccacatgaccgacaaatactgcatggagattgtggtggtgaacggagacatagctgagattcgggatctgaccgagagaatcatgaggctgaagggcgtggagcacgtaaaactcacatccacagccaacggcgaagagttcagtgagcccgggcactcccatgatcatggctatcaccaccattga

SEQ ID NO: 8519 - DNA, 768 bp, synthetic construct
  source 1..768: mol_type = other DNA
atgaaatttaaaaccacttcataccacttcgatctgctgaaagacaatgaccgggtgagtgccttcttcgaggccatcaacgactacgagggaaacaataatttagcttacgatctcggatgcggtattggtgtgctgtcctacttcctcaaggaccacttcggggaggtcacctccctcgagattgacaaaaaagcatactgttgcgccaaagagaatctgaagagtttcgacaacgtagaagtggttaacgaggatgtcttgaagtataactttacaaagaaggcggacctgattgtgtgcgaaatgcttgacacggcattaatcgatgaggaggagatccctgtgcttaattatgctaaacagttcctgaaagaagatggcaagatcatccctcagggcatcatcaacaccgccgaactggtgaaccttgagaggcattacgtgcactgggacgaggaggtgaactatgaagtgtattcaaagcccatagtctactccgagtttaactttctgaatgaaatcaatccggaatttggggcctatctgacactcaaaaccgataagagcgggattatcaacggcctgaagattacaagctacacgaagctgaacgacaagctaattgttggcccatcgccaatgctgaacccacccctcttgattcccttggatgagaagagcgtcaacgtcaacgacctcataaatgtaaagctaaagtacatcatgggcaatggaatagaaagcatccgcactgaatactattga

SEQ ID NO: 8520 - DNA, 483 bp, synthetic construct
  source 1..483: mol_type = other DNA
ctgtcgtttgacctcgagctgaacgacttcatcatggattttaaaaagttggtggtattgggtgtcggcaacgagcttaagagtgacgacggggtgggccctttcattatcaagaaactcatcgaggaaaatatcgttaacgacaacctgatcctgattaacgccgagacggtccccgaaaatttcacaggcaaaatccgcaaagaacagccaagccacatcatcattgtggatgcatgcctaatgggagcgcagccgggggacatcaaaatcgtggataaggatgattttgccaatattggcatttccactcatagcatgtcactgtcctacttcgtcaggtacttagaacggagcaacgactttaagataatattcgtgggaatcgagcccgaaacaatggagtggggggagaacccaaccgaaaaggtggagaataccgcttattacttcattgacctcctgaaggagtgtatactgtga

SEQ ID NO: 8521 - DNA, 1095 bp, synthetic construct
  source 1..1095: mol_type = other DNA
atgaaactgcttttcatagggagccgcctgtatgatgacatagactggtatgtcaagagaaagaacattgagagtgtgctgacagaaagcaatgaaaacgccatcaaccttgacttgcccgatcaagtatttattgtgcctcggggaatggacgggccaaagcaggttgcactcatgcaaaaggtggacgctatcgtgccactgataggcatcgaccctccattaatggatgttgcactcatgaaggaggaaatcgaggagaagtatggaatccccgtgatcgccgccggtgtcagggcagttgaactgactagcaacaaaatcgagacgaaaaagttctacaaggaaattggggtggtaacccccgattaccagatcctgaacgaccctgaggatctcaccctagacttcccggtcgtgctgaagcagggcgagggtcaaggtggcaaggacatcaaaattgccaaaagcatcgatgatgtcaacgaatactttgagaacttcaatcaggctctgtgcgaggagtttatcgaaggctccgagatcagtattgaggtcctgggattcaacggagagtacgtggctttacccccgatatataagggcgagaccacgctcgaaggtacacaccccctaaataagatcaaaactggcccttgcatggtgcagggcttggataacaatctggtgcagcataccgcctacaagatcgccaagaaccttgcgtccgacggcattttcgagatggacttcatgtactccgcaaagaaggaccagctctacgctatcgaggtaaatacacgcccgaacggcacacggtatctgaccaccgcgacctgcggcgtgaacagcctgtgtgagctggtgaacatggccattggggagttcagcctccacaacatttcggataaattgggatactattactcaactgaaattccaatcggaaattacgaagggcccgctccaataaaacctgaaaaatcctttgagaataatgactttgtggtccacgggcccgcggggtatcagagggttacggcccgagccgatagcaaagacaatcttgaaagtctcgtgtcaaaactggtctga

SEQ ID NO: 8522 - DNA, 1071 bp, synthetic construct
  source 1..1071: mol_type = other DNA
atgaacaacaccgacatgctgattctttttctcataacactgtgtgctacaatattcttcacatggtatatcaaaagaatattgattaaagcccggatcgctgataatcctatcgtatccgagcaccgccataagagtggtacgcccacaatgggggggatcgccttcctcttcaccatctccctgatcattgcgctgtattaccaaaatactccgatcctgctcgtgtcgtttataatgcttgccgggggaatcgtgggcctcgtggacgacctgattgggctgaaggtgaaagaagtgcagaagatcgtggtaaacaccagcagtgacgttattaccctaggaaggctggacgtggagcctaatgaggaagtacgcgtcgctactcccaaggcaaaagctgaagtggacgacctgctcaaggatggcaaggtcgaggtggtgggggaagtgccaattaagactgagcctggcgagcttgagaaaatcatatgtcagatcgtcctgggactcttcttcgctttgacgggcatcattaccgcagtcgggggtttcaagttaggcgtgcttgccattcccgttgtggtcatcgccattctggggtctatcaactctattaacctcatcgatggtatggacggcctggccgcaggcatcgtgggaattgcctcaatcgcttgttgcgtctatggctacctctttggacccgccagcattatccctccattcctaatcctttccggtctgtgcctgggcttcctggtattcaacaagcatcccgcatcaatctttatgggggatacgggaagctttgttttgggtactgggtacgccgcggcggttctcgtctgcgatatcccctactttggagttctggcattgggcgtgccgattatcagcgtggtggtgagtttactgcaccgggcccacattatcaaattgccagtcgaaccactgcaccacaccctgaatcattacggcatgagcgagacacgaattatagtttcctattggggaatcaccttcctgctatgcataatcggcattctcgccaagatgtacgtcttttga

SEQ ID NO: 8523 - DNA, 1431 bp, synthetic construct
  source 1..1431: mol_type = other DNA
atggatattcaggagctggtgagactggtggagggtgagctggtcgggaacgtggacttcttcagcatcgatgggttttcggggcggttcactttcctgaacgacgcccacacaggagacattgttgtccgccactggatcgacggtaacggagtcgccatggcatttaagaagaacatcgcctgcctgataacccagactcccaaggatgatgctattgaaatggcagagaagctgaactttccactcgtgatcacaaataagatcgaacttgccaatgctctcgccctgtcacacaccattgataaatacagccacaatagcactaacgtggtcataaccggcacaaacgggaaatcaacgacttcgcatttaatctatcacattctcaacaatgctggctttcacgtgctcacaaacacggatagtgaatctgagttcaacacgctcatcgatccgatggttagcaagcttatctccgacgaagttaaaaagaacggcaaattggactatttggttatcgaagtgagcgaggtacaaggatggctcggaaagctaatgaagaaccatgccgccctcatgagtgaggctatcaagccccaggtcggcgtcataacaaacattgcgatggaccatattgggctggtaaattccatcgatgacgtgtttaatgagataaccgccgtgcccaaagccataggcgacggaatctgtattctgaatcacgatgacgagctagttaggaaactgaatgcaaagaatccgttctacaccagcatgtctaaaatagacggcgacaatgccgtatatttcgacgacgggaccatctactataacgacaatccaattttgactatcggggagttgccattcaccggcaaacactttatccaaaatatcctgtccgctattggcgcatgtatctccctcaatctgcccatcgaggatattgtggacggcgtgcgctcctacaaggcacttaacagacgattcaccaagctgaacgacgaacctcttatttatgatgattttgcgcataaccctgatggcattaaagccacaatctccgaaaccctcaagctcctgcctgacaaccagaagttatacgtggtctgcgccattaggggatcacggggtgtggagatcaaccagctgaatgtggaagctatcgtcgaatctatggatgatggcattgagctggtattaagtagcagtaatgatgtggtgaacaacctgaattgggtgaacgagaacgaaaaggaagttttcttcaacgtcttgaaccagaataatatcgactacgtgcactttgacaatctaaaagactgcctgaacgaggtgtacaacaaagcagacaagaaagatatcatcctgctgattggtgctcagggaatggaccatgcggagttccttctgaaggacatcatatga

SEQ ID NO: 8524 - DNA, 441 bp, synthetic construct
  source 1..441: mol_type = other DNA
atgttcatcaagattcggcgagacactctgataattctgctactcgccttcatcctgatcctgtgcggccgcctgattacctacgtcgcgtttgcctcctccgatgagataaacgacggtatagccatttcgggcgtgatcattaaagggaacgatatcgtgccggtagataccatcagaagtaatgtgatgcaggcagggttccgcgatggaagcgtcatctatggcgacatcctcaagacttccaaaagggaggtgtcacttcaggatgctattcagacggctcaggaatttgcaacccggagcacagtgcccggaacctcagtacaaccaatcactgccgccgacgtgcaggtggacaagaataccggggtcgttacagtcacggttatcgaggacttcagcagcgtggaattggacaacaagacaagtggcggatga

SEQ ID NO: 8525 - DNA, 1260 bp, synthetic construct
  source 1..1260: mol_type = other DNA
ctgaacaaactgaaacttagcctcgtattttttgcagtcctgttgttgacaatgagcagtgtcgcagccacgtgcaacatcatagtgatcaccgatccctcggggaacgaccctaatggcgccgccgcgggaagtatgagctttgccgacaacatgttccagtcaactttcctgctgtctcgctcgaaccactttgccgtcctgtcgggcggcactgggagtagcgatactaggctcgatagcatcgttgacgcagtggcctccctggaaaacaatgcctccgcagcctccgctgctagcctggctagccaattcaagggagcccgtctcgtagtgggcggccccaacatcggggctgctgtgggaggtagctttaatgcatatgtcattacagttgacgactcaagtaacgacattaaggtcaccccctataacagcggggtggctacactgcagccgggccagaagggagctatcatacacttgcgcaacaccgccggaaacccactctacggtaccgccgattccgtccggaaggaaactgcaatgaatatcgggaagatgattagggatggctaccctgcaaccaccattctggcggaagctatgggcgaggtggcgaaggacagcggcgagaaatatgggggggggggcgtgaaccttgtgtctggcattagcacatcagacatgttcacaccaaaggagctgaatagcaccggatatccgatggacgaggagtactccaaggtgtgtgacagctgcggatgggctatgggtttcccagccgcagaagcctatgagaaatgtcccgtgtgcggtggagacctccggaccgtgtacgcctaccaggccctgggcgacgcgttaacggtgagcagcaaagccgtgagtgtttccgtctacggaagtgatcgaccaggtctggccgaaactaccaaagagatagtggaggcctccgttagcaagtacgggtatgacgcttccgccatctcagggtcaatcaataggggcattaacaatggcctactggtcggggtggatcatgttgaacctaaggacatcaatgtaaagcagggttcaaaagcagtcggagtgtactacaaatccctaccttccgagcgctcctctcccgcgtgggatcttcccatcgatggaaatattctgacaatacttggcagcatccaaacggctgtgggcatcatcttgattctcctggtattattcagaagtagactcctcaagagcttccagaaccggtga

SEQ ID NO: 8526 - DNA, 432 bp, synthetic construct
  source 1..432: mol_type = other DNA
atggccctgattctcatcaggggagaaacaaactcgaagttacttaatgccatcgccgacatggagcggcacgggaacttgaacctgatcacgaagcccaaggtggtcgacagtaagttcgctgacagtctggtggaaaaaattctcaattcaaagctgagaactaaaagcaaagtggccaccgcgttctttgtcaaagaggataccacattgtccataatgcaggtgaaaaagatccatccgccagcacacgtcgttgtggtttccgatgaatacgagggctaccataagctgaagaaactgctggacaacgctaaggtattccagggttactactctcacaaggcaaagaacgatggcctaatcgactatagcattaaggggaagaaacgccacgtgaagaatgagaaactcaacagctatataaaatga

SEQ ID NO: 8527 - DNA, 495 bp, synthetic construct
  source 1..495: mol_type = other DNA
atggagtgcgagatctgcgggaagacagtccccgaaaacaatccaattagagcaaagatcgaaggcagcgtgatggttgtctgtaaggagtgctcgaaactgggcactatacagaaagctccccagcagccaaaattccggcaacagcctaaggggaagaaggccaagaatactaagaacaccggcaattacagcagacgagatgagccctcagaggaactgatcgaggactttaacctcaagattcgtaaggcgcgcgagacgaaaaactggtcccgggaggatcttggtaagaagattaatgaaagggtaagcgtgatcaccaggattgaaaccggaaaaatgacaccggacacgaaattgaccaaaaagattgagaaaactctgaacataaaactgctggaaaaggtgaacaatatcgacctcaaccagttcatcaacacctccacaggggagcgcgccctaggaagtatcatgaagatcaagcggaaatga

SEQ ID NO: 8528 - DNA, 1257 bp, synthetic construct
  source 1..1257: mol_type = other DNA
atggacgatttcaatgacctggagaacagctcaaaggaacagctgatggagaaagtagaggacctgcagaacgaaatcgatttgctgaaggaggaaaagtccaaggccaagagtaacctaatgtggaaagtgagaaagctggaaaaagataaggtcctcatagagaatgagaagatcagactggagcgggagaccaagtccctccggtcagaggtggataggttccgatctccacctctggtgcttgcaaccatcactgaagtcttggacgataaccgcatgacggtgaagagtagcacaggacctagcttcctcgttaattactcaaagttcttagacgaaaagctcctggtgccgggcagccgggttgccttgaaccaacagacgttcggtatcgtggaggtcttgccgtcggaaaaggacgctaatgtgtcgggaatggagatcgagactaaacccgacatcacctacgaaaaaattgggggactggaggagcagatccgcgaggtgaaagagacagtggagcttcccctgactgagccagagctgttcgaaaatgtaggaatcgagcccccaaagggaatactactgtatgggcctcccggcacagggaagacattgcttgccaaagctgtggccaacgagacaaacgctacctttattaagattgtagcctctgagtttgtgaaaaaatacattggggaaggcgcacgccttgtcagggaggttttcgaactggctaaggaaaaagcccctgctattatattcatcgacgaactcgatgcggtggcagcgaagcgactgaaaagctccaccagtggagacagggaggtgcaaagaacactgatgcagctcttagccgagttagacggctttgagtccaggggggatattgggatcatcggtgcaaccaacaggccagacatcctcgatcccgccctgctgcgccctggtcggtttgacagatttattgaagtgcccctgccaaacgttgacggccgccgggagattctgaaaatccacaccaagaatatgagctttgatgaagaagccgaccttgacctcctcgcggatctaactgaaggcctctctggcgccgatctgaaggcagtctgcaccgaagcaggcatgttcgccattcgagagaaacgtgataagataaccgtcacggacttcatggatgctatcgacaaggtcatgtccaaaaacaaggaagacgagatgttcaatactgaggccggcgtcatgtttggttga

SEQ ID NO: 8529 - DNA, 960 bp, synthetic construct
  source 1..960: mol_type = other DNA
atgctcttcaataaaaacgagaataaagcgaatgaacgaatcatctataaaacaaagagcaacgtgattttaggctgcaaaaaagccatctatgggcttgtgctgttgattatagttctgtccattagcccaatcatgatcaagttcattgccaagatgcaggtgtacctgatctctcagatccaacttcctctgactaggtacgcagctatcgctttcttcgtaattattctcatcatcgtcatatacatcatctggcacattatcggatggtactctctggagtacacactcaccgacagcagaattatggtcaagtctggcgtgatatcaaccaagaagaactacatgccctatgccacaattcaggacgtgaccacgtcccagagtatcctcgcaagactgttccacatagggaccgtaagcgtgttcagcgcctacgataacaaccgactggaactgaagaatatttcaaatccatcggaggtggaggagataatcttttcaaacatgcgggggtcccgcacgttccagcctcaacagtccagaccgataaattatcaccaacaggataattacctcgataatggctcgtacctgggcaggaacgagatgtatgatgagtttgaacccattactcccatcacccacgagaaagacagctaccagggacgggactacgagtattacccggaagacaggggattcgaaaacagcgaccagatccgtcatgagtacgagtacgagccatatgacgatattgatcggtttgtcgaagaatttgagcctcataagaactatcccaatgaaatctatgacgatgaattggacgaggattactacgagtttggtagtaagaaccactatgacgaaaaacgcaacgaggttatcgacaacgactccaacagtctatccagtgaaaaggtcatccggcgccattttgataagttcaaaaagtga

SEQ ID NO: 8530 - DNA, 1035 bp, synthetic construct
  source 1..1035: mol_type = other DNA
atggagctcctatgtatacagagtcaagagcaccctgaactgccccttgccgagttaaaggcggtgatggaatgcgagaacatttccgcagagatcgatgttatcacagaaggtctcgtgatcctgaaaaacattagcaatgacaacatcgattcgtactacgaaattctcacccgccggctgggttacacgcacgagatacacgaaatcatcaaggaatccaacaccgacaattttgacgaggacatcctgtctatcaactggagcgagtatattgacgggactttcgccgtgcgggtgaaaagatttaataccgagatcggtacggtcgccaccgagcgacgagcaggcagcctgatcctcagcaactcggataacatcaaagtcaatctgtcacggcctgaaaccctgatccgtatagtggtgcacaagaatgatttttacattgctattgaaaggattaagttgaataagaaacacttcgaagacagcaagccccataagcggccattcttttaccctggctccatgaacccgaagttagcgaggtgtatggttaatctatcaagagtgaaggagggacagctgctccttgaccccttctgtggcaccggaggaatcttgatcgaggcagggttgatcgggtgcaagctggtcggaagcgatatctactggaagatgaaaaacgggacatcaattaacctggactactatggaattaccgattatcgcacattcaacatagatgtccgcgagctgaagatgtacgaaaaggtaatggccgtagttactgacccaccgtatggcatctccacatctactggcgacattgagggcgaagatattttcaaagagtttttcaaatctatctacaacaatatgagggatgacgcctacctttgcatggccagtccccattatgtggacctcaagccaatggctgacgagatagggttcgacatcgtcgagcagtatggcattaaaatgcataggagtctgacgagaataatttccgtgatctgcaagaaacactga

SEQ ID NO: 8531 - DNA, 141 bp, synthetic construct
  source 1..141: mol_type = other DNA
agcattaagcggatcacatacaccacgttcgtcgaaaccaaagaggagctcatcaagctgtttaaaaaggagtactataagataatcaataacgaaagcttcttcaacaaatgggtgtccaagtacattctgaaaagttga

SEQ ID NO: 8532 - DNA, 906 bp, synthetic construct
  source 1..906: mol_type = other DNA
atgttcaaggaccggatagttaactattatatcgataaaagtatggaatacggccacaaccacctcaataagaaggcaattgactgtgtagataaaatacttttcttggacaagaataacgcccgagctctctccttcaaggggctctattatgcttttctcttcgagaaggagaaatcgtttgagtgtttcagtgaaatcctgaaaaacaaccctgacgacgtccattgctactaccgcaagggcttggcctgcatggagctcgagaagtacgagcaggccatcaactgctttaaaaaggtgctggacgtggacccccaccaccccatcgtgttaaggtacatctcctcatgttatttgtacctcgaggagtacgacctggcatttaattccatcaatgacgtgctgaaggaggacatggaaaatcccgaactactgcttagtttaagcctttattacgatgtgttggagatgtatgatgagagcctgaacatcctgaataagataattgaaaagaatccgaacgaggataacgccctgctgcagatggcgattgtttatagaaatcaagaaatgtacgacgatgccctgaaatacattgaactggctctgaatatcaacgccgactgcattgtctcaaagtccatcaaatacaaccttctggcgtacgtgggagatttcgaacattctctccaggggtttgacgagatctctaagacatatttcgatggatggggtgtaatcgaaagctattacagctattacggcgagagcctggaggtgatggggaaatacgaggatgcactaaaggtctacgatgagtacctggaaaagtacccaaacttcccaaaaaaaatgattgaaaacatgaaaaccgacgtcaagaaactcattaagcagtgctga

SEQ ID NO: 8533 - DNA, 204 bp, synthetic construct
  source 1..204: mol_type = other DNA
atggggagtgcagaagaggtgggcaagtacctgaagaagctgtacaagaactataaagacgccaaatccaaaggcgaggtgctcaagtttgtaaagagcaatattaaagagcttttcgcgttgagcctatacttcgaatcaatcgagaccgtcaacctgctcatcaacctgttcctgtatgagctcgaaaaagataagggatga

SEQ ID NO: 8534 - DNA, 753 bp, synthetic construct
  source 1..753: mol_type = other DNA
ctgatagagattcacgacaaacttggtacgctcgacgagctgttggtgatcatcgatgacttactactggatgagagatacgactataatgagctactggtgcagaagggaaacatcctgtccatccagggaaaggataagatcgccatgaaatgctttgacaaggtgctccaggacgatagcaccaatctctgggcctactactttaaatgctacgttctgaataagagcgacgacctgagtaatttcgacaagctctttagcatggtcaagagccagtcgccggacgaatattatatctggctgctgatcggggtcttgttctcccgaaacgacaggttcgatgatgccctatactgcatcgacgaaagcataaatcggtacgatggccaagaagatagttggctgtacaaagggttgattttttacgagatgggcaagtacgacgaagcgctgtctgctatcgatattgctctcaaaattaacccaaaggactcttacttgtatcttacaaaaagcgtgatccttaacgcaatggagaagtatgacggcgcaattttctactccaacaagtgcctcgagctcgataagaacaatgtactgtgtctgtacaacttatccctgagtctttataatcagaacaaattcgatgaatcactcaaatactgtgagtctgccctcaaaatagaccccaactattgtctgtcactgaacctttatgccgagattctgcgccataagaagaaggtgtga

SEQ ID NO: 8535 - DNA, 900 bp, synthetic construct
  source 1..900: mol_type = other DNA
atgtttaaggacagaatcgtgaattactatattgacaaaagcatggagtacggtcacaaccacctgaataaaaaagccatccggtgcgtggacaaaattttgttctttgacaagaacaatgcgagggctctctccttcaaggggctctattacgcgtttctttttgaaaaggagaagagctttgagtgtttctccgaaattctgaagaacaaccacgacgacgtacactgttattatcgcaagggcttggcctgcatggagctgatagaatatgaacaggccgtggattgcttcaaaaaagtcctggacgtggacccccatcatccaatcgttctgcgatacatcagttcgtgttatttgtacctgggagaatacgacctggtattcaattccatcaatgacgtgctcaaggatgacggggagaaccctgagctattacttagtctgagcctttactacgatgccctcgagatgtacgatgagtcattaaacatcctgaacaaaataattgagaagaacccgaatgacaacgatgcactactgcaaatggctacagtttatgaaaaccaggagatgtacgatgatgccctcaagtacatcgagctggccctgaacattaatgtcgacagcatcgtgctcaaatcaataaagtataacctgctagctcacgtgggcgacttcgaacatagcctccagggcttcgatgagatttctaagacctgctttgatggatggggtgtcatggaattgtattacatctactacggaggcgcactggaggtcatggggaagtacgaggatgcacttaacctctatgacgagtatctggaaaaataccccaatttcccaaaagaaatgatcgagaatatgaaggaagatgccctgaagctgatcaagtga

SEQ ID NO: 8536 - DNA, 4041 bp, synthetic construct
  source 1..4041: mol_type = other DNA
atgctgcaggcaaagaagacaataaccgtaacagtcaaatccatccccaccagtttgaccgtaaacgatctgacatgtaattacggggaggacaactcgtacttatatgccaccctgaaagacactaaaaataataaatttctaaacgggcaaaccatcactttcaagatcaatgacaaaattataaacgttgtgtccgataacaaggggagagccaagatcaagatcgacgaaaaaccgggcctctacaacgtgattgtgtcattcaccaaaagcccatacgccagtatcagtaaaaagatcaacgtgaatgtaataagcttcaaccccactgtgaactatgatgggggattctacaataagagctatctgaacctttcactgaacatcaataacgcgaagttgatcaagtattgtctcaacaatgactcctggagtcagtccgacaaaagcgtatcattcatcctcaccaatgggatctacgacctctactactccaatggcagtgggagcattttccatgagcattatttgatcgacaataactgcccggtggtgtggagtaactttggcagcgacctgtacgactctagcattatcgttaatttgtccagttgggacaaccttgacgccaatcctaagatttactactcgctcgatgaatccaattttaagctgtacgaaaacctgctgaacatttccaggacaacactgctgaaattctacagcatcgactttaacggccacaagagcgaaacaaaaacctgcaattacatcttcgaaaagataggcaatctcaatagcggcaggggctttacaacaatccagtcagctatcgatgattcaaatacccacaacggggatataatcaaaattagtgagggcctctacaatgagccactgacggttaacaagttcgtgactatgattgggatcaatgctaccctgacaagtagggacccttcccgcccagtgattggaatcactggggggggaagtaacagtgtgatttacggattcaaaatcaaggactcggagcatggcgtggtcatctaccacgccgacaacgtttcggtcattaataaccagttcatcaacgtggtgaagtctatagagatcgacgatgacaagaacaccttggtcgcctacaatagcatcgattcagacaaatttctgaacttcatgtctggggttgcgattcggaagagcgataacctaatggttttcaataacaatatttccttaaactccgatacgggtgctggtggcatcgttgtgaccaatatcacctccaataatatctctatcgtgaacaaccgaataaccaacaagaacaatctgaacggtatcggcctatacgtcatctgctcaaatgtcagtatcgattccaacaatgtgtctaactttaatgcgggcttgtacgtggtgtcaagcaactctcatgtcactcacaatgagtttaaaaacaataaccacggagtattcctgagagtctcagtgaacaatacctacgctttcaataacatccacgacaatatcctctgtggctttgttttggacacctctcttttatcgtataacgacagctgctacctgaacagactgtgcgacaactctcagtacgatttctactccgaagccaactccgactacgtcattaacgacaactggtggggtgaaaacacgcctaaaatctcaattaaccggtctatccttgctaacatttacaacgccactggaaatgtcatcatgaactcttggatggttgcccatctgttcagcagctcttataagatcaatgagaacaacaacatcgagagggccaagttttatgttgatctgacgtataacaacatcggcaacgatctgtcctacaagggttacattccaaataacctgaagtctttcataggagtctttaacggggacggcgccaaaaagtccaatatctcatatctccatgaggggaagtccttcgtggactttgaacttaatgacctcttcaagaaccacgagaacatcactgtcatgtctatcttcgacaacgtaaagatactaaactccttcaataaaaaggtgaccattgacataatgctattttcgagcgcatgggacttcgagaacaactatttcgtcaataagacctaccagattccattcagcaataacgcctcctggattacattttgctggtccgaaaccggcctgtttaccggcaaaatttatgtcatagttaatggcgagatcctcgatgaaattaacatccacaaccttttctaccagaaattcaaaaataattactccacaaatgtgttcgaagctatcaagctcctggatacggtgtttgcctccacgaaggagggtgtgtgggcaccgaatgggtactacttcagcttcgctaaggccgccaacattgactttagagattacaactcggtttataaccgatttctgaattacattaaactgtattacgacttaacagactctgatctgaacttcgtgaaaaattacaaaggttttttcattgattttatcgatatgactatcgacttccacggggatatgaccccagatatcaacttcgactataacggagtgcacaaacttctcaagccaccctctagctatgctcaccggatcagtaatatttattacaccgacatcgaggacgaaaataacattagtattggctatgaaggtatgcgcagctttgcaatcgtgaaggataatctgacgaatgacgatctgcaattttggcttaatcaaaaggagttgtatgctcccgggctgatgaaggccgcttacggcacttttttaactagcttgctggtgatctatgaaaacgaccgcgtggccgatgaatctgccatcaaattcaacgtgacttggtctcgtatcagcccggtgtgtgtgagcttgtgtaatgactacaattgcctctatgtgaccggggagtctgaccatggaatgggccgggaagcgataggaaatatcagtgatgtgtggaagtttaactttgcaacaagcttcagtttcagcctggtggagcagctggtcggtaataacatttggaatgatacgacaatcggcagcgtgactcttggattaattgagagctactttaacaatgaaaccatggagattttcacatccaacggatatatattcattaaatgtgagaatgacggcaacactctgctgttcctagatctgaagacaggaatcgtgcgggactatttcagttactatggtctgcttgggaccatgccctgctaccacgataacataacagagaacgcatggaaatacggaaataatctactcaacaacatgggccgcgaatttaatgacctgaaaaacattttcggtattggagtaatatccgcaacgctcattggggaggtcgaatttattgggctggagatgtccggaattggaagcgccctgatcgagggatctgaaattggcctcctgtttggggagatttcaatcgcgcccatcatgctgataagcttgcccattatcatgttcctgttccccgagcaggtgaacgaggtctggatgaacttcgcaagcctctttaacccctattacaaggattatcccgatattccaatctacgagaacacctatcctgcaaatatcataaatcctcctaaactcgtcctggacggcaaatcatcagatgactacatcatctcccagcttaaaaacaatcgaaactttaataacaagtacaagaggtataactcgaacgtgaacaaggataacatcaattttaagataaagatcggccctattcctagtggcaagggacccaaggacatggataaccttggctcagccgaggaggttggcaaatatcttaaggagctgtataaaaactataaggacgcgaagagcaagggtgaagtcctcaagttcgtcaagtccaacattaaggagctgttcgctttgtcgctctattttgagtcaatcgaaacggtaaatctcctcataaacttgtttctgtacgaaatagagaaagacaagggatga

SEQ ID NO: 8537 - DNA, 801 bp, synthetic construct
  source 1..801: mol_type = other DNA
gtgaagaagttctacaaggccgttctgctgttgactttctgctttttcatttgtctggactgtgtgtgcgccgtgtcagacaatgtagtcgagaacgacactctgagtgtcgattgtcaggtaggagaactctgctcggacacgatagaggtctcatcagataactattacatcgataataacgttgtcaactccagcgatatcaactttaccgacgtctattccggcaacgtggtgaaaaaggtcaaatctacagtgaagacctcgatcactgcaaaagacataactaagtactttcaggacggtaccagtgttaaagcttacctgaaaaattcaaatgggaaggtgttatctggaaaaaagatcactgtgacgtactctggcaaaacgtactctcggaccacggattccaaagggtgcgtcagttgggacgtgaaaaaggggcctggaacctactccgtgaagttttctttcaaggcctccggctataagagcagcagcaagacagccaaagtgacagtaaaggcaatgccgacaaccctgacagccaataatcttgtcttcacctatggtgataccaacaataaactcaaggcgaccctaaagaataaaaagggcaaatccattgtgaataagaccgtggtgttcaacttctccgggaagaagtatattaagaagacgaacagcaaaggcgttgcgtgcctcacaatcactgcaaagccaaaaacataccccacagccatcagctttaccaacgctaattacgtgaccagcaagaaaaacaacaacagtaacagctga

SEQ ID NO: 8538 - DNA, 945 bp, synthetic construct
  source 1..945: mol_type = other DNA
atgcggaagccttatgtgatactgattggtagtgcaagcgggatcggaaagagcacgatttctgctgagcttgctaaggccctcaatataaagcacctgatcgaaagtgatttcatccgggccgtcgtgcgcgggatcattgggaaagagtacgctccggccctccacagctcatcttatgacgcttacaagcatatcaggaacaaaagcagatacgacagctacgacgaactcgtgtcggccggcttcgacgatcacgcatcctatgtaatccccgcgctggagaagattatccaacgcgcaattaccgactacgatgatatcattatcgagggagttcacctcgtgccaggcttgattaatatcgagcagtttagggatgaggcaaatatctacttcttcattctgatttcggacgaagagtcccataaggagaggttcgtgaaaagagccattcagatccaccgtgggggaaaacagctagatttctttaaagagaatcggatcatacatgaccacctgttgactcaggcccaaaacaataacgttaccatcatagatacagaatccatcgagtccagtctagagggcatcctttccataataaataaaagctgcaccacaatcaagctgatcaacactatcgacgaactcgaggacgtggtggacatcatcagcaataagaacaacggtacgctggaaaagattacatataacattaaaggctttaaggaaccccttatccgaaatattgacgtctacgacaccaaatccgccaacagattcataaacagtattaacgaaaacaaggacaaaaaggaatacctgtcacagttgtacgagttatctgaatttcgagaggcccgcatttgtgcgtcaaatcaggacaacctggataaaatcatcaaggagctgcagaacaagggctatgtcctggatgagtga

SEQ ID NO: 8539 - DNA, 579 bp, synthetic construct
  source 1..579: mol_type = other DNA
atgaacgagatggaaattaatgagatgatcataaagtgtcccgcttgcagcgtggagggagtggccaaatcaatcatgaaggagatcgaaataccccacttcggcaaagtgctggagacaaccattcagtgcccggactgcggatttaaacacagcgacattatcgccctcgagcaaaatgacccagcccggtatgttattgagattaacaagaacaacttgtccgtcagggttgtgagatcccagagcgcaactgtgcttatccccgaactgggggtgaaggtcgaacctgggccaaagtcagaagggtacgtcaccaacgtcgaaggcatcctcacccgctttgaggacgccgtgaaaaaggcgctaaacctgttcgatgatgatgctagccaggagaacggcacaaatacgctgaaagaaatccagaatcttaagaagggaaacggcacggcaactctgatcatcctcgatccattcggtcagtcgaatgtggtaagtgacaatgtagagatttccgagatccctgagaacgagttaaacacactgaagaccggtttcagtcatatagaagaatga

SEQ ID NO: 8540 - DNA, 435 bp, synthetic construct
  source 1..435: mol_type = other DNA
atgagcgaggaggagatgatggaagagacttcagaggaatttattgatgaggacggcgagaagttgccgttcgccaaggcagaagttgtgcggctgatgaaggaaaacctcgacgacgacaagatgatccgcgagcgagtcaaagtagagatgaacaaatttctgggggacgtgcttaagaatgtgtgcaagcagctgaatgactatccatacaccaccgtcgaatacgagatgctaaaagagtccacgtatccttacaccaacatcgaaaggataaaccaggagaaagagagaatcctgctccacctcgaagctattaaggcggattgtaatgccttagcaatggatgtgcaaaagacactgaagctgaaagatgtggtcgaggaagatactttcagcttcacagcccccagtgaagaagacgaggaagagtga

SEQ ID NO: 8541 - DNA, 4248 bp, synthetic construct
  source 1..4248: mol_type = other DNA
atgttaaacaagatccagaagatagtgattggcaagcccttcctcatttccctcatctttgtgtgcctaatcttcacttcccttggagttagcattgagcatagctacgccgccgaccttaacgagagtgataagctcgggtccggtgtaaatgtggaggacaagctcgagaatagccagaagaacaaatcaatgtcggacactaatcagaatcccgctcttaaagccaaaacctacagcgtcaacggaggtacttttagggatatccagaacgctattgacaaatcaagtgccggagatacaataaagttgagcgggaagtttgtgagcaagggggatgacaccattagcatgagcaagaagcttacaatcacgtcaccatcccaggccattctggatggaaaaaactccaccacaatcctgaaaatctttaccggagcaacccaatctaagctgtcgaacctgcgattcgtcaacggctactctgatagtaagggcggagccatcgtcatttcagccaagagcattgcattcgacaagtgtgtgttcgagaacaattacgcaaatctcagctcgggcgcaatacatactccatatagggcaatagccacccaagggatgctcattaagaactgtaacttcacaaacaatggtgccggaattgccgctggcgctctcggaatattcggccacgattttctcattgagaactgtgccttcagtagcaattacgttaaaggatatggcgagtgctatggcggagctatccagataggattggatacggagccgtcctatggtaacgtgagaaactgccgcttcatcaataataaggccatatcctctactggcctgggccatgcaggagctggatgcgttagaaacgggtcttcctattataactgcatttttattaacaatagcgcggattggggcgccgctctgacataccacgccagcggcaacctcaacaactgcacgctgattaataacaccgccacgaagtatggcggcgctgtagctattatgatgaattacctgaacttcatgaacctgaatatcacaaacagtattttcaaaggcaacaaggctcctctggggggcgcggtcaagttggatgggctgaatatcaagattgaggagtccacctttgacgacaactacgcatctgagtatggcggggctgtgaacatcaatgccaccaacgtgaaaatcataaactccaaattcaaccggaacatcgcaaacattgatggtggggcggtattcatcaaggggaaagacacgacagtgaagaatagcaaattcatttccaacgaagccatacctgacgtgaaaaagctgaacgatggactgggcggagccatctatgtgaacagtaccaaggtgctggcccagaataacgagttcaagctaaacaccgcacgcaacggaagtgcaatctacttcgatcggaatgggctcgaatttaagctggtcaacaacacactgtatcagaatcaggcgtgggtttaccgactgccgatttttgcccatgacatctattacggggagtccgagaacatcaagtccgtcatctacggcgggaataacatcgcagacttcgataacttgaaagtctcaaacgccatctacaatgccgccagcaacaataagatcgaaattgacggggaacacccagttctgggcgcaacgaccagcggtaagctgtaccaggatgaccgggaatataacgtgagggtactgatgatggtgcgccacgaagatggcactatcgtctacaacaactccctgaacacgaactatctaggggcagtatccggtaagctggacaacttaaagcccggaaagtattatgtgaccgctaagcatttcgaggacaattactacaaggcaatcgccaataccaccgtcttcaatgttctgcccaaaactgacaacaagatcctcaaaagcagtaacggcaactcaattgcgtataaggacacagtcatctggacattgaacatcacaaacaacgggccaaacgactcaaccggtgtggtggtctacgatgtccttcctgagggactcatctgggtgaatgatgacagtaatggcgcttataatccaaagacgggtgtgctcaccatcggatctctgaaagtgggcgaaacgatcgtgcttaacataatgactaaggttaacgccactggcaagatcgtaaacaaagctaatgtcaccggcaacgagtacgacatcaaccttgacaacaatcacgacgagaaagagatcaacgtgcctcctactgtggatctggccatcattaagaaggtcaacatcaccacgcccaactacggtgattcggttatctggacactcaccgtgtctaattccggcccagacgtggcccacgatgtcaaggtaacagacatctttagcgatagcctgatttggatcgaagacgactctctcggaaaatacaacccgaagactggaatctggaacatcggcacactgaacaagggcaaaaccatcgaactgaacatcgtctcacaagtgaatcaaaccggaaatattaccaataacgtgtctgtgacatcccgtgagcatgacattgacctcagcaacaatgtcgctaataaaactatattcgtgattaagtccggagatttgagcatcttaaaaacagtgaatgtcagtgatgctaattacggtgagattgtgaagtggactctcactgcatacaataatgggcccaacaaagtcaacggggtgaccgtgcaggacattctgcctaagggcctgatgcttcttaactacacggctagtaaaggcttctacgacgatggcgtatgggtcgtgtgctgtctggagaaaggcaagaccgagaccctggagttgatatgcaaagtcaacagaacaggcaatatcacaaatatcgctaaaatctcaggcatagaatacgaccccaacctggacaataatctcgacaacgaatcgatcattgtgccacctgcctcggacatcagcgtcatcaaacaggtggacagtaagaatccttactttggagatattataacttggattatcgaagtgacaaacaagggcccggacagggccaccaatattcgggtgaccgatgaattgccagaaggtctcatctttaaagactatgtgtccacgtgtggtgtttaccagaacggcgtttggttcctggactacctaaatgccggggacagcgagtatctaaacatcagttgtcacgtcgggcagctgggcatcatcgtcaacgacgtgagcgccatagccaacgaatttgacattaacctgagcgacaatcattataacgagagcattaacgtcttgccagtctcagatttgtcaattgagaagttcgtcaacgtttccaatgcgaattacaaggacctgataaaatggacactgatagtgagcaataacgggttcaatgacgcaaccgacgtggtggttgaggatattttacccgactcgttagaatttatcagtgcaaacggggactatgaagaggggatctggtatgtgggggatctgggtgttggtaattcaaaaaccctcgacatagttaccagaatcatcaagaccggagatattaccaatgtagccgcggtctattgtagtgaagacgatcccgatctgagcaacaacgaagctgaggacactgtgcacgttgggcccgcagcggatttgtccatcacaaaaacagtttctaaacacgcctacgaaatcggccaaattcttacttacaatattaatgtgaataacaatgggcctgatgacgcggtaaatgtgaaggtgagtgaggaatttcccaagtctcttcacctgaaatcatttaagatgtccgctggggaatttaatgcgtacagcaacgtgtggtcaatagacaaactggccgctggtggggaggagaaactccgcatggagttcgaggcgctgtctgaaggaatctttaagaatacggcctctgtggtgagcgatactttcgacaatgacctgaacaacaatcacgattcggccctcgtgaaaattattgccaacacctccgacaagatcatcaatgatttgactgataactttaccaaatccaatgtggtgaaagctgagaatatcaagcagcccgtttactgccttgagaagcactctacagccaatttcatagaattactatctatctccgtaatcgtgagcatgatctttggaggcggtgatattttccggaagcgatga

SEQ ID NO: 8542 - DNA, 1149 bp, synthetic construct
  source 1..1149: mol_type = other DNA
atgaagaagcagattgcgattatcttgatgattctgttgattgccgcccccattgtgcagggcgtgtgcgcatcaaagactgcattcatcaccagcgataatctgatcgatgagaaaactgatacaaatatgctaaattccattaagaactacgtggaagagatcagtaacggggaaattcaagtcatcgtcgataacgaagctccgggccctggcgaggggtggcgatccatatcggtaacaagcgatgtgagtattgacattgcagcatcagacgccggcaactacatccagcttgccagcgctgctaccgcgggaaacaagcagatcatcttcataaacacgggtgacttcgacttagataaccactctaactttttgaggagagcatgggacgacaattacagcaatgaatcacttgccggagtgcgggaccccgggacactcctgaacaatgccggaatacagtatatccagctggctaaggactatccggacaatatcgacaataacgggctactcgataagtatgacgacaaaatgaaccacgagattgccgagaagatcgtcaacatcgtgaataactatgacaacagtagcacaaaggagctgagcgataacctgatcgtcaagaacaaaatatcccctaaaggaatggccgatgcctccaaaatgcttgtcgagagcggagataaggagatgaatggcccatatggttcctactccaccccacagctgctctatcagaccagcacctatctcaatggtgatggaattgacattcctaaggactacaagaaaccagacaaccccctggggatctcatttctcaccaaagacacgtacagtgtttatgattacttcaaaatggccgggatcgttaaaaattacatggacgcgaatggcaaagcacccgactcgatcgaatacgagggcgcccacatcagctactacgacctcacctacaactttgctaagatcgttcaaaaccacactgatgctaatcatatgggctttgaaagcgagtatcactttgacaaggtaaacgatagcatcctgttacatatactgcccttcgtgctgatattcgtggtgctgttcctcgcctacatgctgatgaagcgcatcaaaaggttcaagcggaagtga

SEQ ID NO: 8543 - DNA, 684 bp, synthetic construct
  source 1..684: mol_type = other DNA
atgaagcggtatatcagcgagctaataggaaccatggtgcttgtccttttcgggtgcggatcggctgctattgcggggtccatgctgggcacagtggggattgcactggcattcggtttgagcatcgttgctatggcctacgtgatcggcgacatctccggatgccacatcaaccccgctgtttcaattgggatgtggattgacggcaggctggagacaaaggatctggtgatgtacatcgtcttccaatgtatcggagcgatcatcggcatcgggctgttggctattatcattaacagcgccccagtgctgggcggctacgaggccacaggcctgggtcagaatggatttggctctgcctccagtgtcgggttaaatgtgtttggcgccataatcgtggagataattctgacctttgtattcgtcttcactgtgctgggagtgacgaaaaaagccgaaaacggggcggtggcaggcatagttattggtctcactctggcctttgtccatatcatgggaatccctttgaccggaacgtcagtgaacccagcccgcagtatagcacccgcactattcctcgggggccaggctctcgaacaggtctgggtattcattctcgccccgattatcggtgccatcatcgccggtaccctctttaagggccttaccagcgaggacgaatga

SEQ ID NO: 8544 - DNA, 693 bp, synthetic construct
  source 1..693: mol_type = other DNA
atgaactttcaagagcagatttacattcgcaagtcttgcagaaaatacatggacgacgctatcgacatggacctcattcatgatttcatggaatcggtcaagctattaaatagcgaaatcaactacaactatgagattctcacccatgaggaggtgaacgtgcgaaaccggtggtccgccccgtactatctggccatctactccgagaagaaagagaactacctgacgaatataggcttcatattccagcagctgtgcttgtatctgcagagcataagcatcggcacctgttgggttggcatggatgtgccaaagaataagagcagtgattttgtcatcgcaatagcttttggtaagagcgacgagatgacaagggacctgtccaagttcaggcggaaagagctcagcaaaatctgcgattacgaagatgaaaaattgatccctgcacagcttgccccctcagcgattaactcacagccatggtacttcaaacacacaaatgaggggtttgacgtgtatcaggtaaagcagaatatcctgaaacgccaagtccttaagaagtggaatcccatcgatatgggaatcgcgctggcccacatgtatgtgtccaacgaaaaaagattcgagtttgaaatcaaggccaacttcgacagtattgaagggcacacttacattggaagtatcaagatctga

SEQ ID NO: 8545 - DNA, 678 bp, synthetic construct
  source 1..678: mol_type = other DNA
atgaagatcgtcatcgccattggcggaagcattctgctgaaagagtacgattgcaaaaaatttcaggagtatagtgcgattctaaaggatctttccacggaacatgagctgttcgtggtggtcgggggtggaaagcccgctagagagtatatcaatgtggttcgggacttaggggccggggaagcccagtgtgacgacatcggcattgaagtaacacgaatcaatgctaagctcatgctgtcggccctgggggacgcggcataccagagggtcccgcacaatttccaggaggctctggaattttcagccactggcaaaataatagtaatgggagggactgagcctgcacacagtacggatgcagtgtctgccattctggctgagtacatccaagccgacaagctcatcaacctcacctccgttgatggcatgtacacaaaggaccccaataagttcgatgacgccgagctggtgagcgaaatcaccgcaactgagttgcttaactttctcagcgacaaagatgtgaaggctggaacctatgaatttttcgacaccaccgcggtgcagatgattaagcgctccgacttggagacggtgatcacaaacggtttcaaaccagagaacctgatcaaggccgtcaacggcgaaaccgtgggcacaaaaataatcaacgagtga

SEQ ID NO: 8546 - DNA, 789 bp, synthetic construct
  source 1..789: mol_type = other DNA
gtggacaatctcgttgatattggcctgaatcttatgcacagcagcttcaaaaaggaccgggtggaactgatcgaggaggccaaaaaggtcggtgtgaaccagttcattatcacagggacgaacgtccattccagccagatggcagccgagtatgcttcaaagtaccccggcaccttgttctccacgagtggggtccacccccacgacgcgaaaacttgcaatggacacaccatgttcgaactagaaaaaatagcgaagaatgactgtgtggtggccatcggagaatgcggtctggattacaaccggaacttctccccccaggacttgcagcgcaagtggtttgaagctcagatcgaggtggctgagaggataaacatgccgctcttccttcatgagagagaagcacacgaagatctgtacaacatcctgaagcgccatgacaacgttatcgaaaaatcggtcgtgcattgttttactggcacaaaacaggaagctcagaactacatcgatctcggatgttttattggggtgaccgggtggatttgcgacatgaagcgtggacgaaatctccaagaggccgtaagtgcaattcctccagagaaattaatgattgagaccgatgccccctttctgatcccaaagaacttcgagtttaagcctaagaagaacaggaatgagccaaaatatctgcctcacatcctcgagacaatcgccctgtgcatgggcatcgacgccgaggagctgggcgagcaagtaagcagaaataccaaggaatttttcaagatatga

SEQ ID NO: 8547 - DNA, 192 bp, synthetic construct
  source 1..192: mol_type = other DNA
atggccgtggagcctcacaaacattgtcccatctgcggcacaccgatcccactcaacgaactagtgtgcagccccgattgccagaaagtctgggacgctcggctggcgcagacgaagaggacccgcatcatcctgtacatcataattgccattttcctgatcatatgggcaattatgacctttatgaagtga

SEQ ID NO: 8548 - DNA, 324 bp, synthetic construct
  source 1..324: mol_type = other DNA
atgatcttgacctcgagcaacacactcgtgaacaagcagatcgttgaatacaaaggcctagtcaccggggagtcactcatcggaagcaatatctataaggacctgttctccggtgtgcgcgacgtggtcggtggaaggacctccaagtatgaagaggagctgaagaaagcccgggatattgcttttaaaagtatggaagagaaggcggagaatctgggggcaaatgccataattggccttaagattagctacgacaacctgggcggcactatgggaaacacaatcctggtaactgcctacgggacggcagtgaaatgcgaatga

SEQ ID NO: 8549 - DNA, 849 bp, synthetic construct
  source 1..849: mol_type = other DNA
atgaaattcaaagtgccggagaaacccgagaatttgcaagagcggctcatctgcatcatattcggcactttcgtcggaacggccgtctatgtacttttcttatacttgaatatagccatcttgggctggaacctgggcctgatctttgcaccattgctggcaggatacgctgagacgatgctggccgaacgaatgctgagctccgataccggtgctataagcgcattcattctttttgcagggaccacattttattcgttcatcctagtcaatcctacactcggggcgaattttatcacgttcggcgccaccgccgtgatcttacaggccgccttcccaaccctgatcaactacatccttctcgtgatcatcatcggagctatcttctacattctccgcttcgtgaagaagaccctgacacggatttatcttaaaatcaaacacataatctacaagtacattctgaagaagccatttgaagtcaagcctaaagctatcgagtattacgatgagctcagaaacaaccaggaaattaacagcctgggcgttatttttatgaccagtactgatgtgcccgacaaacatgttatcaacctgggtcagtttcagtctacagtgattctggagaaggaacccgacctactggacctgaaccccaaggagagggaaaaccacacactcaccatactgaaatcaggaaaggacaagtgtctgattgggctcactgataagatcaaggcggcgggggggaatggcattattgacctcgacatccaatacattaagattggcttcgggggtgagtcctaccagataagcgccatgggaatgggcgtgtatatcaactga

SEQ ID NO: 8550 - DNA, 204 bp, synthetic construct
  source 1..204: mol_type = other DNA
atggacaagaaaatgattgtaagcatcatcggatacattgtggctttgctcatcccaatcgtcgggctcgtctacggggccatcctgtttttctttaaaaaggaagagcccacatatcggaagcacggcaggctgattatatacttcagcatcgtgattttcgtggcaaccctaatagccaagcttctgatcggcggtttctga

SEQ ID NO: 8551 - DNA, 360 bp, synthetic construct
  source 1..360: mol_type = other DNA
atgaaggagaatcgcaagatcggagaaaactttgacgtgaacgatgcggaggatatttttgacaagcttaggaacgtgaaagggaaaaccaagccaaagggcgaatccaaattcaagaacatttcatacctcatgaatgaggcccagtacctggagaaaaacggccagctgggggaagctgtcgagttgtacaaacagatcatcttcattctccccgacagcatcaaggcctatgaggcaatagccaatatctatcaaaagcagggtgacatcgacagcgaaaaagagattctaaagaaggcaatcagtaactgcaaggagaacgatgagttcaagaaacggctgaatgaaataacatga

SEQ ID NO: 8552 - DNA, 810 bp, synthetic construct
  source 1..810: mol_type = other DNA
atgttcaccatcgagtatttcgtaggtttgattcttattggcatctttgctggtttcgccagcggccttctaggggtgggcggaggattcttaataactcctctccagttcttcctgctgaagtacatcggcgtggcaccagacctggccatactgataagctttggaacgagcctggccatcattatccccacaagcctgagtggtgcttatcggcacaccaaatccatggataacatcctgaagccaggaatcaggctcgggattttcggagtcattggcggtttcgtaggggggttcgttgcctcagcactccccagcagaacgctcgaaattatatttgggctgctactcctcttcatagcgttcaacaacatcgtgaatattaataaggagcgggagaaggctcgaatcccatttaattggaccagtatcggcctcatcgggttgctcgtgggcttttccagcggactgttaggagtcgggggcggaatcttcctgatcgccattcttaccgctctgctgggctttagcatgatcgaagccattggcacctcctccattttcatcagtctaacagcaatcgggggctttctttcgtacatgatcactgggtggggcgttagcacatttccctatagcataggttacgtgaacatcatcaacctggtgctgattgcgtgcttttccgtgcctatggcgtcatttggcgccaaaatggcccatcgcgtgccccagaagaagctgaaaattatcttctcaattgtcatcttgtacatggcattgaaaatgctgggagtcctgccgtga

SEQ ID NO: 8553 - DNA, 1059 bp, synthetic construct
  source 1..1059: mol_type = other DNA
atgaaagtgaataagaccatcctggtgggcttcctcttcctattgattggcgcattcatcttcgtctcggacctcctgaaccccctgattagaccggtcactcacctttttctcatgggatcatcgaaaggaaaagacattatcttctttggtcttctgggcttgctgctaattctgagtcaggtcataccccggaagatcgacgccacccgatacttgaagatatcaattgttatcggcttcgtgctgctggtgtttggaaacctgctggaggtggtattccgcctacaaatgggaatcaaactgaacaccgtgttttgctctatgtccagcacgatgagctctacgagtattctccacactcatttgttgaagtccattctgggggaagtgctcactaagatcatcggacccttcatccagagcaacatcaacacaggggttggtctctacgcctacgtcccagatattagtttcctggtggtgctgatcattccgattctcttcatcacactgatcctcgctaatcagaagcggccttggttcaccaacttcctgatcgcttttttttcaagttgtctgctgatcgggagctttgatggaggtctgtgggccacaccctccctcgtagggctcctgggcctgtggatcgtttataggaacggctattacttaaaccttcatctcggcaagatcataaaggacaagaagcttctgaaggcgaatgaaaatatccagccttcctatagaaatatcgggttgagcgaggcaaaatacctcttcaacaggtttttaccaatcctaataattctgattgtgattgcgctgcgctttacggtggcctttgccggggcagagcccgattattatacagtcgaaatagtcaacatgaccgacaacgtggatttcggcgacatccctatagagaaaatcagcaatgagacctaccacgtagactccaactacaacgagatggaattgattaatgatcttaaagtgccacttaataactcctgcaagtactacaccgtttcttggaatgcctacagctatttatga

SEQ ID NO: 8554 - DNA, 1032 bp, synthetic construct
  source 1..1032: mol_type = other DNA
atgctcaattcaatctttaagtatagctacggggtgatagtttgcctgatcatcgccatcccatccttaatcttggggaaccttttcccagtgatcggcggtccgattatcgcgattatcctgggcatgttgattgctttcgcatggcacgaaaaagagagctttgacgaaggcatcagcttcaccagcaagtacgtcctacagacagccgttgtgctcctgggcttcggactgaacttgaatataattctgaaaacgggcatccaaagcctgcccatcattatcgccacaatatccgtcgccctcatcgttgccttcatcatgcagaaaattctaaacatcgaggagaagtcagccatactaatcggcgtgggttcctcgatttgcgggggctcagcgattgctgccacagcacctgtaattaacgccgacgaggagcaggtggcacagagcatcagcgtgatattcttcttcaatgtgcttgctgccattatcttcccatttctcggcaaaataattggtttctccacagtggacgggggcccttttggtctctttgccggcaccgcaatcaatgacactagctctgtcaccgcagccgctgccacctgggacaacatgtggggactcggaagtcaaactctggataaggctagtactgttaagctcacccggaccctggccattattcccatcaccctggccctgtccgtgttcaccagcaagaaatcagagtacgtgggaggggaattttcgctcaaaaaggcattccctatgttcatcttatattttgtcattgcttccgtaatcacgacgctggcagtcagcctgggggtggatgccaacgtctttcttccctttaaggaactgagtaagttctttatcatattggctatggcggctatcggactgcatacagatatcgtaaagcttgtgaaatccggaacaaagcccataatcctgggagctacctgttggatcgcgatcattattgtgagtatcagcattcagttcactctggggataatttga

SEQ ID NO: 8555 - DNA, 888 bp, synthetic construct
  source 1..888: mol_type = other DNA
atgaaaaagatctatttcattctgcccatcctagccgggatcatgttcggctcaggtggcgtgttcgtccggacactgatggtaaatggcattgactccaccacgctgctcttcttaaggttcagtatagcaatcatccccataatgatagccatcctcgtgaccgacaaaagtctgttgaagatagatctcattgacatttccctattcctggtgtgcggaatatgcatcgtcgggctgaacctgtgctacaacgaatcaatgggcaacatcccccttagcctcgctgccgtgctgctgtcccttgcccctatctatgtcattataattgcttatttcacctttaaggagaagattacacgcaaaaagatcatctgtatggccctcgccatctttggttgtattctaatgacgggggttttggaaactagtttgagcaacatcccattctacggcatcactgctggtattggggcgggcctgttctgggccatctacctcatggctagcaagaagtccattgaaaatggaaagcacacctttacaatcctgatttactccatcaccatcatctccatgggcctgctgccatttacgaactttggccagatcaccaacttcatttcgattaatcccattctggtgatcatcttcctcatcatgcacagcaccttttcgtttgcccttccatacattttcagcacagtgagcctcgagcatattgatagtgggatcgctagcatcctgctctctggagcagaaccgtttgcagcccttatcttcggattaatattctactcagagattcctacatttctgatgttttgcggattcatattgactatcattgcaatgatggcgctgagcagaaaagaggagatcaaatga

SEQ ID NO: 8556 - DNA, 1896 bp, synthetic construct
  source 1..1896: mol_type = other DNA
atgatcctgagcattatcatacccacctacaacgaagaaaagtacctcccaattctccttgagagcatcaaaaaacagagctttgaggattatgagatcatcgtggctgatgccaattcaacagacaatacccgaaacatcgcacaggaatatgggtgcataatcgtcgacggcggcctgccggcaatagggaggaataacggtgctaacgttgcaaaaggagacatcctccttttcctcgactcagacctgaagctcacagacgagtacctacgcgatgtggtatatgaatttaaaatggagagactcggaatagccatcacccgcatggaaccactgtccaacaaggttgaggacaaactattccacgactttgcaaatttcttcatggtgagtgtggagaacattaagccccatggcgcaggatgctacggaatcatctccaaacgcaaattgcacgaggagtgtaatggatttgatgaatccctcaccttcggggaagacactgattatattgagcgactggccaagaaggagcggttcagggtactgcggaaagccaagatcggggtgagcacaaggcgactggaggaggaaggcattacaaccctcatcagacagtacggtaagagcactgtaaatgacttcttggggaagagaactgatgcgaatgagttaaactataaatttgaccatggacacgatcggatcgctgagtccaagatgagcggcatcgagaagagtgccgaaaaaatcaacgtaatcaaggagacttacgatgagtccaaagagaaggtcaacaaggcccgctccctgctcaacacgaagacggagagggacaagaagatcgtcttttactgcgtgtgtggcgaagggatgggtcatgccatacgcactggcgtcatcgttgacaagatcaaggatgagtacgatgtgtacttgttttcaagcgaccgggcctacgagtatttaaagtccaagttcaataatgtgtataagattggcgggttcaacacagtgtacatcaacaataaagtcaacaatttgaagaccctttcgaacgctctgaagagaaaccccggcaacataaagacagggtatgagacgctgtacaagaaggcccgtgagctgaggccagatgtgattgtcaccgactttgaaatctatgctacaatggtgtctaaacttctaaatattcctctgatcagcctggataacatccatatgattacgcaaactaaaatcgactatcctaaggacaaatacgtggagatggttaaggccaaaggggtcatcaagacctatgtcgttaaaccaaaggtccacatcctgaccagcttcttttaccccaagctgaagccgaaaaagaatgcgattatctaccctccaattatacgggaagatattctgaacctgaagcctagtaaaggtgaccacgtcattgtgtaccagacaagtaaagagagtggaaagctcgtgcgtaagttaaaatctcttaacaacgagaagttcatcgtctacggctttaacaaaaacgaaatagatggcaatttgacgtacaaagagtttaacgaggacgtgttctacgacgacttggcaagctctaaggcggttatttgcaatgggggcttcaccttcatctcagaagctatacacctgaaaaaacccatttactctgtgcccgccattggcaacttcgaacaaaccctgaatggctattatgtgcagaagctgggttacggagaataccacgaagtgatgaatgcctctaaggtgaaaaaattcctctcaaggctgtccaagtatcagaagcgccttgacaaagtgaagaaaaccaacaacgatggaattgtgcgggaactgaagtacagaattgaaaagtattcgaaacagtga

SEQ ID NO: 8557 - DNA, 1455 bp, synthetic construct
  source 1..1455: mol_type = other DNA
ttgttgagcaagaagctgatactgattacagtactactcgggctgttggcgatcagcactgtatccgctgctgacaacactgagagtgacattatcggagccgatgggctgaacagcacaagcaatataccgatggacgctccacgcacatttacgcagcttaacgaagccatcacgccctacaccagtatcgatctggagcacgattatagatatgacaatgagacagattccgagtttgctaacggagtgcccattaccaagaatatcacgatcgacggtaaggggcatacccttgacggcaattatctggcccgcattttcattataaaggaagattgcacggcagtgttcaagaacatcaacttcatcaacggcaaggccagcaccaatggcggcgcgatttacggagtgtgtaatgcggaaaactgcaacttcctcaacaatactgccgtcaaagacgggggcgcaatccatctcagtaacgccaataactgtaactttatcaacaactacgtgctgaatgggaggggtggcgcaatgtataagggttacgccaccaactgcatcttcactgacaactccgccgtgactggcggcgcactcttcgagaactctgcaaccaagtgtaagttcaccaataactttgccaaagagaacggtggcgccctgtatggaggctttgctgtgcagtgtaattttaacaagaatagtgcaaagaataacgggggagccctgtataaaggtagcgcccactactgcaatttctcggacaattacgccgtgaatcacggcggaggcatgtacggaggggccggcgaatactgcttcttcaaaaacaacgccgctaaatcaggacatgacgcgtaccggagctccctcaaaaagactaagacaaccatctacatcaagcctaccacgactgcccactacggggattatgtcgtgataaccctgaaaaatatcaaaaacaaggttgtgtctggggtgaaggtctcggtgttcatcaatgggaagaagtatgctaccaaaatcaccaacaaatatggccaaattaaaatcgatacacggaacggctttgttatcaagaagtacactattaagtcaaagtttgcagaggactccaactactacgcaagctcaaaaacagttaagattacgattaagaagagcacaccaaaaataaccgcgaatagcaagacattcaaaaaatcaactaagatcaagaagtacagcataaccctcaaaaccaagcagggcaagattatgaaaaacaagaaaatcaccttaaacgtcaatcacaggtattactatgccacaaccaattataaaggaattgctacattcaaaatcaccaagctactgtacaaaggtaagtttacggctacaactggatatgctgggtccaaatactacaacgcccttactaagaaatccaccattatcgtccgatga

SEQ ID NO: 8558 - DNA, 297 bp, synthetic construct
  source 1..297: mol_type = other DNA
atgatcatcgttcaggccaaggccattcccaaggatgaaacgagtaaaaatcggataattgagtttgctcaagacttgatcaaaaaatccaaagaggagagcgggaacattgattacaacctgttcgtcaataccgacgacaacacactgctgttcgtggagcagtgggactcggtagaaatcctcaagaaccacctaaagaccgaacatttcataaagtttggcgagaacatctcagatcttgtggtgtccgatctggaaatcaatgtcttcgacgcaaacagcattagcctctga

SEQ ID NO: 8559 - DNA, 1077 bp, synthetic construct
  source 1..1077: mol_type = other DNA
atggcgaccttcaaagggttcgccatgaagaagttaaatgagacaggttgggtggagaaggaggtgcctgagtgtgggcccctcgacgctattatcaagcccacatgtgtctccccatgcacgtcagatattcatactgtatgggagggcgccattggagatcggaaggacatgatcctgggccacgaggccgtgggggaggtcgttgaagttggcaaactggttcaaaactttaagcccggcgacaaggtgatcgtgccggcaatcactccagattgggatgatgaagctgcgcagcgcggtttccccagccagaccatggaaccactcgggggatggaaattcagcaactttaaagacggggtgttcggcgagagattccacgtgaatctcgccgatgccaacttggcccatatgccagacgggctgagcgatgagggcgcatgcatgctggtggacatgtggagcaccggcatgatgggctccgagaacgctgatatcccgttaggtggatcggtactggtcatcggcattggagctgtcggactgtcagctatcgcgggggccaagctgctgggggctggaaggctatttgccgccggcacaaggcctattagcgtgaaggtggcaaaaaagtacggtgcaacggacataattaattacaaggaggggcctatcgatgaacaggttatggaactgaccgacggcgcaggagtcgacagcgtagtgattgccggcggcaatctggagaacacatggaaggaagccatctccagtgcaaaggccggcggaaccgtgtccaatgtcaattatctcagtggagcggacaacgttttgatacctcgggtggagtgggggtgtggtatgagcaacataaacatcaaaaacggattgtgccccgggggccgtgtgcgaatggaacgcctcgccgaccttgctctgtgcggcagacaggaccctgagcttctggtcactcacaaatttgagggtctggataaaatcgaagacgccctatacctgatgaaggaaaaaccaaaagatcttatcaagcccgtggtcatgctcgacctcgactga

SEQ ID NO: 8560 - DNA, 261 bp, synthetic construct
  source 1..261: mol_type = other DNA
atggatgacgagacgctgaagaagttcgcgtatgtaaacatcagcagctacagagtgaaaacaatgaaggctctaaaagatgacgtcaagactccaaccaacatcgccaaggaagccggaatcctccccaaccacatttccaaagtcttgcgagagctgaaggaaagtggcatagccgagtgcatcaatgaggaagcacgcaagggccggctttacaggctcaccgacgtgggggaggaaattgtggataaactggactga

SEQ ID NO: 8561 - DNA, 936 bp, synthetic construct
  source 1..936: mol_type = other DNA
atggctaaggcccaggaggaagaacttaaagagcccacagtctgccctgaatgcggctcaactgaactgataggggactatgaaagagcagaagtggtgtgcagccggtgcggactggtgattgatgagaatcttgtggacatgggccctgagtggagggcatttgaccatgaacaaagagacaaacggacacgtgtgggtgctccaatcacatacaccattcacgacaagggtctgagcaccatgatagactggcggaataaggacatctatgggcgggatattcccgccaggaacagggcacaatggtaccgactgcgcaaatggcagaggaaaatcagaatatccggagccaccgagaggaacttagccttcgccctaagtgaactcgaccgggactccagccgcttggggcttccccgaagcgtcagggaggctgccagcgtcgtgtaccgcagtgcagtcgataacaagctgatccgcggacgaagtatcgagggcgtagtagcggcgagcctgtacgctgcatgtagacgttgtaatgttccacggacgctggatgagatcgccgaagtctcccgcgtcactaagaaggaggtgggccggacctaccgcttcttgacccgggagctgaacattaaactcccgcccacttctccagtggattatgtgcctagattcgcctcggaactgggactcagcggcgaggcacagtccaaggctattgagattatcgagaaggccatggagaaaggcctcacgtcaggccgcgggccgacaggcgtagcggctgccgcgctctacatcgccagcgtgttgctgggagatagaaagacccagcgagacgttgctgaaatcgccggggtgactgaggtgaccatcagaaacaggtataaggagctcacagagcagctagagatgggtgttacgctgtga

SEQ ID NO: 8562 - DNA, 303 bp, synthetic construct
  source 1..303: mol_type = other DNA
atgaagctgctgggcaaaagtctgcacatagcgaatagcgggaagctcatcgctcgaaccaccaagacacctagcccgggagccattgtgttcgacagcaacaagaagaaaatcggcaaagtaggctatgtgttcgggccaacggccaatccctacgtgtcgatccgtctatttcggcaggcaaacagggaagagattgagcgcaactgcggagaaaagctcttcgtctccaaaccaaagtccaagaagactagaaagaggcggatgagatcacgccagaagaaaccccaaaacaaaaaatga

SEQ ID NO: 8563 - DNA, 744 bp, synthetic construct
  source 1..744: mol_type = other DNA
atgtcaattagtccaaaggacttactgaataagaataagaacctgaacaagcgactggacattagtgaaatttgcctggacaacgtgaccatcaatgatctaaaattcaatggggataactatgatgagtatataaatctccacagccttttggaaaacataagcacatgccaggttagcgatgcctttaacgggatctcaagacagtccggagtcatccagaagataaaaccaattaataaccggagggtcttcggcaggatctttacagctgaaaccaccagcggggactggggaacttctgctatggcgatcgacgaggcggatgagggagacatactcttcttcaaagtggacagtgaggagatggccatctggggcgagcttgcttccacgtgtgcccgcgacaatggaatcaaagctaccgtgatttacggttccgcccgggatttggatgcactcctgtacatggattaccccgtattcgcaagcaactactgcccgaacgcagggttggccctaggcctgggtagcctgaacgaaagcctcgacatcgaaggctttaaggttaaccctggcgatttcctgattggcgacgagtgtgggattgtggtgatcccccaagagctgttcgtcaagactatgtttgcctctctcgacatcaagatcaaggagtccctcatcattgacaagatcgccctgggcaatacactgtcgcagatcgtgggtcttggaaaaaaatga

SEQ ID NO: 8564 - DNA, 1260 bp, synthetic construct
  source 1..1260: mol_type = other DNA
atgggcaaaggtgaggagcttactacaacaaagtatctgatccacgcccagatcacggctaacgggatcgtagaaaagccggatgtggttggtgccgtattcgggcagacagaaggactcctcagtaacgacctcgatctgagagagttgcagaggactgggcgaatcggccgcatccaagtgaacatccactccaatagcggacgagccaaaggagagattgtcattccatcaagtctggacagagttgagaccgccatcctagccgcctctcttgaaactattaatcgggtcgggccttgcgaagctgaaatccagaccaccaaggtggaggacgtgagggcggtgaaacgggagcaggtggtcaaccgtgctaaggagatttacaagaacatggttgagagcgtggggcccaccagcattaagatgattgaggaagtacgcgaggcaatgcgcgtgcacgaaatctccgaatatggagaagaccgactgcctgccggccctgccatccactcatctgatgcgattatagtcgtggagggcagaagcgacgttctgaacctcctcaaatacggtattaagaacactgtcgccgttgagggggtcagtgtaccccattccatcggtgagctgagcaaaaaaaggaccacaacggcattcgtcgatggagatagaggaggcgagctcatcctgaaagagctgctgcagatcggggatgttgactttataacacgggctccaaagggcaaggaggtggaggacttggagaaggacgaagttttggtcgctctgagggacaaggtgcccacagcacaattcctagctaccaccaatatcctgaatgaaaatcccaagaaagagcacatcaaaaaccggaataataacagaaacaacacgaagtacgataaaaagcagaagtacaataataaccgccgggaagaacagcatgtggtcgatgagccagtgatcgaggacgatgaagtgagcctcatgaaggacatgcttcgcgagtttgagggaaccggcgtgggcgcaatactggatgaggccctgaatatgacgaaagaggtggaagtggagaacatctatgaggaaattaaaaacatagaaggcactgccgacgcggtgatattcgacggcgtgatcagccaaaggttagtggacgcagcctcggaaaagggcattaaaaagttagtggcatttaaatccgtcaacattgtgaagaagccgcataacgtcaagatcataaccattaattga

SEQ ID NO: 8565 - DNA, 612 bp, synthetic construct
  source 1..612: mol_type = other DNA
atgaatatcaacattgaaaactactacagtaccaggaagaatgtgtttgagcgcatccaggacgctgggaccgctaccaaggtgctcatgtcgctcatgatggcatgtttcacggggataatggctcagataattatccctctcccatggactcctgtgcccgtcactgcccagacctttgccgtcctgtgctctgggttgctgttggggaaaaagtatggctgcctaagccagatcctgtacgtggttctaggtgtggcctttattccatggtttggaggaatgaccgggggattcgagacattactcggctcaacgggcggcttccttatcggattcattattgcatcctgcttcatcggcacaataacagagaaatatgccgacgctcggaacttcaagaagatggcggccgtaatcggtatcgcaaatttcagcctcatttacatccccgggttgctgggccttgccctgtggctgaacctgactcaaggcacaagcgttggaattgtggacctgctgatgatgggacttgtcccgtttatcgccggcgatatcgtaaaaatcctgggtgcggcatccgtgagcaaggtcttcctgcccaaagaatga

SEQ ID NO: 8566 - DNA, 399 bp, synthetic construct
  source 1..399: mol_type = other DNA
atgaagctgatccttagggggcaccatctcttgtgtctcaaaggcttccagggctatggatacgacgagaagttcaccaagaacatgactgatatcaactccaagcgaaaatcaccagagacagtaattaagctcacgaactctccggacgacatctgcaaagcctgccccaatctgagaaacaacatatgcgagaatgaagcacagaatgataagattgtgctgatggacgatcaggtcctggaaaaattagactccagcaaggagtacaacagcgtggagctattcaagcggatcgaacacatctttaataccaaagagagtgtgtgtgaaatttgctttaactgcatatggcacgagaagtgtctgttctaccaaaagatcggtaaacgcatttga

SEQ ID NO: 8567 - DNA, 810 bp, synthetic construct
  source 1..810: mol_type = other DNA
atgaaagaaaaagtaaatctgtccggagtcagcgagacaatgctcgtgccattatattcgagggccctggagagcaatcggaagaaccccgccttctatgacaaaacggccatcggaattgtgaaaaatctggattacaatttcaaggagcgatttaaggaatctaagaacaagatgaacttctggggatgcgcggcacgcaccattatcctggatgacgaggttagcaaatacattaaaaacaatcccgaatgtagcgtagtgaacctagcatgcggcttggatgacagattcagtagggtcgacaacgggaagataaactggtacaacatagactttgagaacatcatttccctcagggacaagctcatagataagaaggaccgcgtgaccgacatccctacgtcagccctcgatttctgctggatcgacaagatcgaaaacaaggataacgtgctgatcatcgctgaaggctttctgatgtatctgtccgaggaggatgtgaaaaatctgttcttcaagattagcgagagtttcgggaaggttgaactgcttcttgagctcatgacccattggatggtcaagaaccagaagaaacacgacaccgtcaaacagactggcgctgtgtttcggtggggtataaatgagaccgaggacttcgagatgatttgtcccatgttcaagatgactggggattacaatctgacaaatgtgatgaagagatactcaccgatctttattacaatcgcctctccatttcttaagcctcgtaacaaccggatcggcaaatttgaaaaattgatcctatga

SEQ ID NO: 8568 - DNA, 225 bp, synthetic construct
  source 1..225: mol_type = other DNA
atgttcaactccaagtttctgatccttatcattggcgtactaatcataggcttggccctctcctgctacttctactcgtcagataacttccatgagagtgactctagtctgaatgagcggcacgacgacgtggtgtatctctggatgctggacgataacggaaagctgaaactggtcccaacaaccgaaacgtacagcgaagggagcgcaagcgatcccgactga

SEQ ID NO: 8569 - DNA, 2289 bp, synthetic construct
  source 1..2289: mol_type = other DNA
ctggagaacaagatcaacgcgggctacgggtccaccataacactggagaacgattatgagtatgaggagtctggatatagttcgggaatagaaattactcaggatatcaccattgacgggaaaggtcatacaatcgacgccaaaggacagacacgcattttcgacgtggaggcaggcaaggttaccctgaaaaatattacctttaaaaatggaatgcagaacttctttttcggtgggggcgccattctctggaagtcactcgatggcatcattacgaattgcacctttataaacaactatgctcccagcggtggcgcaatccgcctcgaagcctgggacaataccatatccgattgcacgttcatcagaaacaccgccaaccagggcggagctataaacctcaataccactaactacgctagcatctccaactgtgtgttcgtgaataatgacatttactcagtgcagggtgacggctgcaagataaacaacaatattttcatgagctgtagcatcgggttcgacttcactcggaattacaatattgacaacaactggttcgggaacaatgcctccaattatacttacaagcccaatgagttttgcaataactggttgttcctgaacgccacaacagatcccaacaccgtgtccgtgagcaacacggcagacattatctttaaactgtacgcctataactcaacttcaggaaacatctcgaagtatgataacgcgccattcaagaatcttaatcttaccatcacagccacaaacgggaatattgacaagaatatcgctaaattaggcgagactatcaagtataccgcttccagtgtgggcacgggcaacgtctctgccaaggtggagaatgtcgagtataccatcggcctggacatcattccaatcgaaaccaagctgatactcaactcgaccgacacaattattgacagcatctccaccgtgggcatcaatgtcaccgatattaataacaatcctcttagtggagtggttaagcttacaatcaaggacaacaaggggaatgagtacaacacaactgtaacagtgaaaaccggcatcaccacttacatttaccctgccgataaaacaaatatcagcaagattgtgaacatcaccggtttctacctgggcaatgacaccttggggtacgtggattctcccgtcgccgaaaccaagtttagggtggataagctaaacgctaccgtgaacctggtcgtaaacaactacaccatcaggaacttctcagtcaacattacagtgactggtaagaatacggaccggatcgtcgaaaacggttccttaataatctatgcaaatcgagaaaaaattgacgagatcaacatcacagatgggaaggctgaaaatatcctgctgaacatcaccaaaatcggcaattatgagctgtccgtggcctatagtggcaataacgttttcaacgagaacaatacttttagcaagaatgtcaccgctatcaagataagtaccatcatctcagccaacaacattatcacgacgtataacactgataaatacctggaaatcactttgctggatagcgaaaaaaatccgctcaacaatgcaaccctgtctgttgacctgaacggggctaaaaaatacacaacttataagaatggacagattaagatagcattggggagtctggttccgaagacatacaccgcaaaagtcagttttgccgggaacgacatttacagcccctatagcaccagctttaaggtggtagttgaaaaagcgacaccaacaatcacggcgaaaacaaagatctttaagtttgaggacaagaccaagaagtacacgataaccctcaagaacaacaagggcattgtcatgaagaacaccaaggtgacgcttactattaatggaaaaacctacactgcgacaacaaacactaacggggtagcaactttcaagtttaacaaattgaataaaaagggcacctatacggcctctatcacctactccggagataaatattacaacaaactaatcaagaaggctaagattaagattaaggcccctgcctggaaaacagtggcgaaaggtagcaagaacaaggccatcgtcaagaagatccagaagactctgaaaaacaatggatactacctcaagtacaatggcagatacctcaaaatagacggaattttccagaaatacactcaaatcgccgttaagcacttccaaaaggcaaataaactgaaaacaacgggaaaggtggattacaagacggctaaaaaactaaaaataatctga

SEQ ID NO: 8570 - DNA, 147 bp, synthetic construct
  source 1..147: mol_type = other DNA
atgaaagaaattaatatcgtggagataattaaaaacaaggataagctggagaagcacgaaggctatctaccaatccccatcctgcattggattgacatcgggaaatgggagatcttcctggagaaacacgacaagaagctctactga

SEQ ID NO: 8571 - DNA, 144 bp, synthetic construct
  source 1..144: mol_type = other DNA
atgaagctgttcaaaaccgagatcacagtgctaggaaacgaaaatacgaagggcctggccctgaacggccggtgcagccacgggaaatttcaggacatgctcgagaacatgaactattacctcgaaaagatccataatatttga

SEQ ID NO: 8572 - DNA, 1185 bp, synthetic construct
  source 1..1185: mol_type = other DNA
atggaaaaattgctgctgatcggcattgataccagaagcatgattaacagcgccctccagcttgatttcgaactattctccacctcctatttttcaacttccgacaccccaaccatcaaaaatcagaaaattattctgaaggaaaagtacggggaaagttgcggggcttttgaaaatcagttctccaacctcgacatcctggagttttcaaaagattatctggacgaggttgactatatcattcccatttccggtgtgtctccaagtgatttctctaagcgccataaaaggaagattctggggaccacgaatgtgtgtgacattgaaaacaaattcaaattcttcaaaaagatcaagaatgagtttcttacgcccatgactttcaagttgtctgacgtagatgaggccatcgaaattgataagagctacccgaatagtcaattcatcttgaaacctgtcaagggcagcggaggctataatataaacctcctaaacaacgtcagcgattttcaattcaacgacagcgagtttatcttgcaggagtacgtgacaggaatcaacgtgagtagcagcattttaagcactgcccatgctgccaagaccatcatgaactcgcggttactgaccctgaatgatttcggaaagcaggacaacttcatttacgcgggcaacatactgcccctcaccaacgagtccgtcatggccgagtttaacggaatcgacgacattatcaaggagatgaatgagacttcagagaacctggcactggagtttaacctcctcgggtctaatggtgtcgactatatcatcaatgaaaagggcctgtacgtgatcgagctcaacccaaggctgcaggggacattcgagtgtgtggaaaagacactgggaataaatatgcttgatgcacacattaaagcatgccgaggcgagcttgttgacattcccgagcccaaatgctattcctacaaaaagatcatctactcacctacacggatgaagtacgagaagataaacctggataacatctacgacctgccgcacataggctccatcacggagaagtcggaacctcttctcacaatcatagacagcgataaggactttaagaagctctacgaaaaagtggagctggccagtgaactaatcaataagaaggcgaaactgcaccagagcgacatcaaatga

SEQ ID NO: 8573 - DNA, 234 bp, synthetic construct
  source 1..234: mol_type = other DNA
ctattcatcttcaagatcagctactataatctctttacagtgatcaattttttcacccggaattttctgaagaacggagcaaacatgaagaggaaccccattgaccagttcatgaaagatccagacaacaaggcgaaaattttcatctggatgacccgcgccatgattataactacgtttatgatcacaatcggggtcatactcttcatcctgtacctgatcggcgtgatttga

SEQ ID NO: 8574 - DNA, 684 bp, synthetic construct
  source 1..684: mol_type = other DNA
atggcacaggatattatagatggaatcaacccaactcggatggaactactgagtctgaaaaaccgcaccaaactggccatcaaggggcatgggctgctcaaggaaaaaagggacgcgctaattaaggagttttttgatatcctggatcgtgtcaagggtatccgggaaaacgcagagcagtccctgaaagaagcaaatgacgccctcttggaagcccagatcgccatgggcgatctggcggtccggaaggccgcattgagcgtgaaagagagcatagacgtggagattacatcacgcagtgtgatgggcgtggcggtgcccgtgaccaacgttaagatggaggagagatctattatcgaccgcggctatggattttcggacaccactatccagctggacgaggctgccaagaaattcgaggagagcttaaagtacctcattgaacttggggaagtagagaaaacaattttcctgcttgctgaagaaatcgaggctacaaagcggcgagtcaatgccctggaacacattatgatcccgcgattccagaatacggagaagtacatcgacatgagactccaagagatggaaagggagaacttcgttaggctcaagatgatcagatccaccatagagaagaacgagaaagccgctgctgaggccgctgccgccgaaaatgcagagtga

SEQ ID NO: 8575 - DNA, 1392 bp, synthetic construct
  source 1..1392: mol_type = other DNA
atgaatacaaatattaaaacgcgggaatatactacggtgagcgaagtctcaggtccgctgatggtggtggaaggcgtcgaaggcgttggttacaacgaaatcgtggatattgagacacctaccggtgagaagcgcagtggccaggtgctggaagttactaaggatgttgccgtgatccaggtattcgaaggaaccactgacctgaacacgaaggacacaaaaacccggtttacgggtcagaccgccaaaattggcgtgtccagagacatgatgggacgaatattcaacggtatcggtaagccaattgacgggggacctgagattattccagatgaggagctcgatataaatggggccccaatgaacccggcctcccgtgagttccccgaggagtttatccagactgggatctcgaccatagacggaatgaacacacttgtgcgcggacagaaacttcctatctttagtggctccggcctgccacacaatgacttggctgtgcagatcgctagacaggctaaggtcttaggggctgatgatgagtttgccgtcatttttgcagccatggggatcaccaacgaggaagcaaacttcttcatgcgggacttcgaacgtacgggagcactggaaaagctaacagtcttcatgaacttggcagacgaccctgctatagagcgcatcctgactccaaagatggccctcacaactgctgagtactacgcctttaccctgggcatgcaagtgctagtgatcctgaccgatatgaccaactactgcgaggcgttaagggagatctccgcagcgagagaggaggtacccggacgccgaggctaccctgggtacatgtacacagacctggcagggatttatgagagggccggaagaatcgacggcaaagagggctcgattacccagatgccgatcctcgtcatgccccaggacgatatcacccatccaatccccgatttgacagggtatataaccgaaggacagatagtcctgagcagggagctctcaagaaaggggatttacccccccgtcgacgtgcttccctcactgtcccggttgatgagcgggggcatcggcggagacaaaacacgcgatgaccacagcggcgtgtctgaccagctctattctgcctatgccgaaggccgggaactgcgagaccttgtggcggtggtaggggaagaggctctaactgagagggatcaaaagttcctggagtttgcgcaggccttcgaggaccaattcatcacccaaagcaaagacgaggatcggagtatcttcgaatctctcgatctgggctggaatctgctcaagatcctgcctaaaagcgagctcaagagggttaaggaggaatttattgaacagtacctgcccaaggatgagtga

SEQ ID NO: 8576 - DNA, 1743 bp, synthetic construct
  source 1..1743: mol_type = other DNA
atgatcatcgaaggaaatataatcaagatcgctgggcccgtgatagtcgcagatggtatgcgcggggcccagatgctcgagatggttagggtagggaacgagaagctcatcggagagatcatcgagctggagggagacactgctacgatccaggtttatgaggagacagccggcatccagcccggcgaagtggttgagtgtacgggtggagccctgtccgtggaactggggcccggggtcatgagttccatttttgacggcattcagagacccctcaggatcatccgcgaggcgagcggggatttcattgctagagggatcgacgtagattccattaataaagagaagaaatgggaatttaagccagtggctaaagtcggagatgtcctgaaagccggagatgtgctgggcgaggtccaggaaacaagcgccgtcttgcacaagatcatggtgccccctgcccttgagggcgaagtgacagagattgccgctgaaggtgaatataccattctggaggacattgccgaggtgggcggacaaaaagtccagatgctccagaagtggccggtgaaaaagagccggccctatgtgaggaagctcgatccagacgtgcctttggtgaccggccagcgcgcacaggatactttcttctctgtcgctaaagggggagcggcagccattcctgggcccttcggatcagggaagaccgttacacagcagcagcttgccaaatgggctgatgccgacatcgtggtctacattggatgcggagagcgtggcaacgaaatgaccgaagtgctgaccgaatttccattcctcgacgaccctaagacgggcaacccattgatggaccgcactgtgcttatcgcaaacaccagcaacatgccagtcgcagctcgagaggcctgtgtctacacaggcataaccatagccgagtattaccgggatcagggttacgatgtggcgctcatggctgactcaacctccagatgggcggaggcgatgagggagattagcggccgccttgaagaaatgcccggggaagagggctatccggcctaccttgcgtccaggctggctcaattctacgagcgagcaggacgggtagagaccattggctccgagcctcatgtagcctcgatctctgtggtgggtgcagtgagcccgcccggtggggacttatctgagcctgttacgcagaacacactgcggatctgcaaggtgttctgggcattggatgcatcactggcagataagcggcactttccgtcaattgactggctgcaaagttattcgttatatgtggacagtatcgagggctggtgggctgataatgtcgctgccgactggagagccacccgggaccaggccatgggcctgttgcagaaggaaagcgagctgcaggaaattgttcagctagtgggccctgacgccctgcccgaaaccgaccaagctactctggagacaacacgtatgctaagagaagacttcctacagcaaaatgcctttgacgacgtagacacttactgcgctccaacgaagcagtaccagatgctgaagaccatcctcctgttctacaaggaaagcctcgccgcggttaaccgaggcgctccaatcgcaactattgccgccctgcccgttaaagaagagataggtaagatgaaatacataccacaagatgagtttgatgcaaagatcgccgacatccaagcggccgtggtgaaacagtgcagtgaggcctga

SEQ ID NO: 8577 - DNA, 318 bp, synthetic construct
  source 1..318: mol_type = other DNA
atgtccagtgtcgcggtgattggcgacatcgacaccgtctccggattccgcctaggcggtgtcaagcaggctgtggtggtgaagacatctgaggaagccatcgccgccttcgataagtttctcgaagacgagatttcgattatcatcatcacgcagctgatggcaaacgagataagagaacacatcaataggaaaatcgggagcagtgtgctgccaatgataattgagatccccggcaaggatgggtccagcgaaggatcaagcgatcaaataaacgacctgattcgacgggtgatcggggtagagatggttaaatga

SEQ ID NO: 8578 - DNA, 1155 bp, synthetic construct
  source 1..1155: mol_type = other DNA
atggcagatcaaattgctaccctgataagtagtgtaggactgacccaggaaacattcctcgtgctctgtgtaatctcactgcttgtggtgggtgccgtcgtcgtcatcatcacctcccgacccattctggacatctatccttacctaaacccaagtgccagagtccgcgctagaaaaggcaggttgttcgacgagaaacaaattagcgaaattgtggaaaccagcaatatcgaggaagtggagaactatctcaaaggcgttcctgagtacgctgacgttctggacgaatatccccttgataaggcactggatgtggaacgcgctaatacgtacgagtttatcgcccggctggctcccaaagacatcaaggctcctttcgccgtaatgtcgaagaaggccgacattgacaatatcaaaagccttttaactgccaaggaggtcggttatgacgcggatgagaccaaggagttactcatcccgtgcggggcgctgtacaatgacctggaatccttggccgacgccgagaacgtcactgacattgttacaagtctggacaacacagagtacgccgccgtgttagaagacgctctcccacagtatgagaatacaaacatgatccttccactggagtctgctctcgacaagtactacctgggcaagcttctccggtccactgatgtgccctcggacgagaacaagcagattctgtatgcctatgtgggaacccaggtggatgtaacgaacctgaaactaatcataagggcgaaggaagacggcctagattacgatgcaatcagcccctacatactggacgagggctaccagctccgggagtggaagctcaaagatctgatggaatcccctgacgttacaaacgtcgtgtctggattggaaggaaccaagtatagcagcgcactgacggatgtggtgccagtgtacaacgagactggctcagtggcagtctttgagaaagcactggatgtttacgcatccgagtactcaaagtctctggccagcaaaaaaccattggggatcgggcccattatcgggtatctgtcccagaaggaaaatgagataaagaatctcaagatcattgcccgtgccaagagggaagtggatttcccgaacgcgaaaatcatggagatgttgatatga

SEQ ID NO: 8579 - DNA, 612 bp, synthetic construct
  source 1..612: mol_type = other DNA
atgagctcaggcacagataaaatcgtgagcagcattatgagcgaggcccaagagaaggcagacgtgatcattcaggaggtgaacgcagaggtgtccgccatacaggccaaggcggacaaaaccgctgaggtggaaaagacgcgcatcctagagaacgggaaaaaacagagcgacatgagataccagcagatcatctcggaagctaagatgaacgcccggagggccaagctgggcgccaaggaagaggtgatcgaggccgctttcagtcaggctgtcggtgagctcaaagagaaggcgtcttcccggagtgcagactatgaggattcactgattaagatgattaaagaggcggccgatgagattggcggggacgacctgatcatccaactgaacgaagccgacaccaaccagttcaagtccgaaatatcttccggaaatgccttcgagattgaaggcatcaagttcgaacttggggagcccatcaataccattggtggagcagtcttgaagactaataatggagatatagaagtaaataacacaatcgaagcacgactcgataggtttaagagcatcctccgcagtgaagttgctaacgtcctgtttaaatga

SEQ ID NO: 8580 - DNA, 486 bp, synthetic construct
  source 1..486: mol_type = other DNA
atggtggaaattgctcttggcacggcgctggccgccatcggtgctggcgtcgcaataggatttgccggcctaggcagcgggctggggcaaggcatggccgctgctggcagtgtgggagccgtggcagaagacaacgacatgtttgcccgggggatcatcttctcggccctcccagagacccaggctatctatgggttcttggtcgcaatcctgctgctcgtattctcaggattactgggtggaggccagggactcccgaccgaggccggcattgtcgcgataggtgtgggggcatctatcggttttgccggcctggggtccggaatgggacagggcatggcagccgcctccagcgttggcgcgatcgtggaggacaatgatatgtttgcacgcggtattattttcagcgccctgcccgagacacaggctatttacgggttcttgatagctatcctccttatggtgttcggcggaatcctggggtga

SEQ ID NO: 8581 - DNA, 2001 bp, synthetic construct
  source 1..2001: mol_type = other DNA
atgttcaagaccgctagaatgcggaaaattagaatcgtgacactggataagtatgtcgcccccacagtggatgcgctccacgagagcgggctgatacaggtcagtgatatttcggagagcatccagcaggaccccgaactcgcagaactggtgactccctccaaagccaccccttacaccggcaagctgagctccctgctcatgaagacaaacgggatatccgagctactcggaaatagcataagcgagggccatgggctgaaagacactctaatgtcttttattagtccggacatgccagtgcagaaggaagtagaaaaactggatacacccgctttcatcgagaaagctgaggaaacgctggccaaggtggaaagcaagacctccgtgattgaaggcaagctggctgcactcgactccgaaacaagtgaactaaagtctaacaagagcttggccaagcggttatcccacttcgacatggatttggcgctgttgaaagactcaaagtacaccagcactacggtgggaaggatcaatgccgagtccacttcagagatcaagaatgagctgtccaacttgactgatgagctggagatatttactgttcctatggatgacgatgacggtgaagtcatcgccgtagtgacccttaaagaatttagtgacgacgtgtattccacccttaggaaattcgacttcgagaagatcgaggtggccaatgttgagggcacccctcaacacatcatcagcagtgctgattcgcggctgctgaccatcgagtcagagcgcgccgctgtgaaaaaagaattgcgcgcagtcgccgagcagtgggatgatgagatactggcgctcaaggaacagctggagaatgagaaagacaagaacgaaattctttcatcttttgtgcagacgaaagacgcttatgtgctcgaggcatgggttcctgtaaaggatacagaggaggtcgagcagctggttgaaaagtcctctgagggacattgcgcctttgagacaattgaaatcgaggggacagatgatgaggatgtccccattttgcagcaaaacggatggtatgccaagcctttcgagttcctcgtcgacatgtacagcccagtccgttacaacgaaattgacccaacaatatttgtggcaatcaccttcccgttcttcttcggtttctgcctcaccgacgcaatctatgggctagtggtatctgccatcggcgtcgttatcattagggggctggggaaagttaaagaaagcatgcgctcatttggatggattctggtgtgggccggtctatgggctgtgattctgggtctgcttactaatgggtttatcggggacttcccagagagaattgccggattccggctgccaactgtgttcgctcccgtcgaagcattcaagcaccccgacaccattttattgatagcgatcggagtcggactcctttacacgaacgtgggatttcttctgggcgctatcgacaacctgcgatacggcaatgtgaaggaagccattggatctcagctctgctggtttgtgttcgaggctgggatcattctcctcgccctcggctacatgatgcccgccatcggcatggtgggcatggctctgggcggcattctcatcatcgcaacgattggaatgctggtgtgggccaacggcgcctatggtgtgatggacattttcggctacatgggagacgtgttgtcatacgcacgcctgctggccctgtgtctggccaccggtggcatcgccatgaccgtaaacatcctggcgcaaatgctcaacaacatggttccgcatgtagggatagtgcttgcgatctttgtcttcatctttgggcacatcgcaaactttgctttccaggttttaggtgcctttatcaattcgttacgacttaactacgtcgaatttttcagccagttctttatgagtggcaagggcaaattcgaggcgttcaaagcaaataggacctttacaaagctgaagtga

SEQ ID NO: 8582 - DNA, 315 bp, synthetic construct
  source 1..315: mol_type = other DNA
atggcagagatcagtgacgcaatcgccatgataaaaaaggccgagtcggacgccgagcagctcattgcggattcacaggcccagagcaaggacatgatcgccgacgcaaacctgaaagctgaggaatccgtgagcgaggtgaaaatttcagcagaagaggaagctcaaaagaccgttttcgatgccgaggacaaggccaagaaagaagcccagagcatctccgagcagtccaaagtggaagtaaagagtctaaaggataaggctatgggcaacgtcgatgaggcggctagcattatcgtcaagaatatactgtga

SEQ ID NO: 8583 - DNA, 351 bp, synthetic construct
  source 1..351: mol_type = other DNA
atggccaatattaagatgttcaagctgctaggggtgctggtcagcctgctgttaatcatttggggcattctgcccttcctccggcaccagccaatcaccacagacgtcattgcaacggccatcattctcatcatgatagctgtggcgtacatgattatcatgttcaacccaagctggaccaaggccgtgttcttttttgaaggtatcatcatcgccgttgcaggatacatgctgcttgcctttccctataacctcgagttcgccctggtgggcgtaatcataattgcaatcgcgatccttgcttatctccagaaactgcctccgaaaatattgaggttgttttaccgctga

SEQ ID NO: 8584 - DNA, 330 bp, synthetic construct
  source 1..330: mol_type = other DNA
atggagcgcgcagtctggatcatcctgaacaataacttctccctgaccttggacagtgagattaaagatgaaaaaattgtgaataaaaggttcagcccggggtcggatctatggacaagcgagctccctcagctcagctttagcgacgagaacatccagaaggattacgacgagtttatctcagacatcatctcacttttctctgagcccagtgtagacaagattttcattgatgccaagattggcgaagaatccgagtacgtgaatgcgaagaacccactggtcatacggaagatcgaagaatattccgtggacgagatcataggatga

SEQ ID NO: 8585 - DNA, 339 bp, synthetic construct
  source 1..339: mol_type = other DNA
atgaagcttttcatcctgtccgccaacgactcgagggacatggatgacatcagtcagaagctgtctctgaaaaaattcaaaattacccagaccgagaacaactacattctgatgtgcaagaaacggtatggcaacattctcatccacgcaatctgtctgatcatcgctctgtcatatgtgtggcccgtgctgatagtcaatgtgatttacttcacttactcctacctctgggccagcccaaatgtattaatcacgacagagagtctagacgatgaagggaatccgttggagtttagcagcatggatgaaatacttaagaaggccacagcgatcctctga

SEQ ID NO: 8586 - DNA, 510 bp, synthetic construct
  source 1..510: mol_type = other DNA
atggagttcatcgatgtgataaacgagagatacagtgtccggggatacctcgacaaggaggtagagcaggaaaaactagaatttgtgctgaaggcggccaccatcgctcccacgggcgtcaacaaccagcctttcaaggtctacgtcattgacagcaagaagtacaaggagaagttaagcaaaatctataaagctaaatggttcgttgaagcgccatacgttctggccgtggttgcacttcgaaatgaagcctgggtgaggccatgggattccaaaaacatcgccgacattgatgccaccattgtgatggaccacatgatcctcgcagctactgacgtggggctcggcacatgctatgtcggtgcatttaagaaaaactatgcccataagttcctgggactgaatgaaaacgaggaggtggtgctgttcacccccctggggtatggcaatgtggagccgcgggagacaccccgcaaggacttgaatgattttgtagtgtacaaagactga

SEQ ID NO: 8587 - DNA, 804 bp, synthetic construct
  source 1..804: mol_type = other DNA
atgcaggaaaacaattttaaaatcgataggcactctctgaagacagcgatttcacgggttgaaactgacaagatcgtcacaagagggtataaccagagggatctcattgaaaaaatacgctacagtgacatggtgtttctcctgctcaaaggacgcctgccttccattattgagggcaaaatatttaaccatgtgttggttagcttctgtgatcatggcgtgaccccaccaagtactcagacagcgcggatcgtgaccagctcaggctcgccagtcaacagcgcagtggccggggcactgctgagcttcggacacaagcatgccggggccattgagaagaccatggacctctatcagtccaagatcaacagcctatacctgaccgatgatgctgagattgacaacaagcagatcgctgggctggctatcgaaatctaccaggagtatatccttaaggacaaaaaagtgcctggttttggccacaggtaccacaatatcgatccccgagccgacaaactgatggagatcgtcatcaaggagggcttcatcggaccgcatataaagctggcactcgctcttgaagacctaatctaccaaaagaagcaaattcggctgaatgtggacggtgcaaacgccgccattctgtccgacttagggttcacgcccgacttgggcttgggcatcttcataatcggtcgaatccccggaatcattgcccacattcacgaagagaagatgaatgaggatgagttccgcagattctgcgaccttgatgacgtaatataccagcagagaggaaaatga

SEQ ID NO: 8588 - DNA, 873 bp, synthetic construct
  source 1..873: mol_type = other DNA
atggatattttggaggatatcagcaagacaatcatcgatgcctcaacaactctgtcccaggacaaattcaatgccttgaagcgcagcattgatgcagaagacaacgaaaatgctaaatgggcactggaacagattttagagaactacaaggtggcgcaggacatcaaattccctctgtgcgacgacacgggcatccctcacgttatcattgaaataggggaggaccgagagatcagcggagacctgctcaaccagatccacaagggaatcgagcttggcctgaataatctgccggcccgaccaatggctgtcattggagacgaggttcagcggattgaacaaagtaaagggctctttgagaagcctggaatgcttcgccccgtcagcatcctaatagacaccgcaaacgatgaaagcacatataaaagggacatatcttccgatacgcttaatattcactttttactggagggcgggggccccgaaatcagagctaacacatttagggtgtatcataagagatccttcgacaacgtcattaacaccgcctgtggctggctggaggagagcctacggatgctcggctgcaccccatccatcccctcaatcggtatcggacgtacacatttcgaatcaaccagcctgctgctcaagtccatcgcctacgggaatctggataaccagagtgagcacgaacaaaagataacccagcgcctcaatgagacttgcattgggcccatggggttcggcggcaagaccacggtgttgggtacctacctcaacatcggaaaccagcgggcgagtggtgtgagaatagtgagcgtgaggccgtcgtgttttgtggagccacgggtagccactctgaaactgtga

SEQ ID NO: 8589 - DNA, 903 bp, synthetic construct
  source 1..903: mol_type = other DNA
atggagaacaccaagaagttcctcaaaaagatcgggatcaaggaggtgtacgacgactttaaaagcgataagcggtttgacgatggggggcagtaccggtttgaagtgccgggaatccagtcccccaagacaatggaggcgctattgaccgaatcaatcaaacagggcatcttcattcatagggtcactcaaaccaagggaatcatgatgttgactgacgaggagataggcaagatgattgacctggccatcgactacggatgtgagctgttcttggccgtaggtcccagagccacctatgataccagcgccacagtccacacgaaagagggcagcagaataggataccggctccggggttatgataacctagtgtatgcaattgaggacgtgaagcgagcttgcagacttggcgttcgcggcatactgctgtacgatgagggcctgctctgggcactcaatcagatgagggccgaaggcgaaatcccagagaacgtgcattttaaactcagcgcccacgcaggccacagtaatcccgctagcgctaaactgctggaagctcaggggttaaactcccttaatcccgtgcgagacctgcaaatcagcatgcttgcggctattcgctacgcctgcagtatggccatcgatctgcacactgaaaatccaaagagcacaggagggttcattcgccactacgaagtgcctaaattcattaaggttgcctcccctgtatatctgaagaccggtgggtcggtcgctgcaaaccataactgggacacaacggagaaagaggccctggcgcgtataaagcaggtgtcactcgtcaaaaggattatcgacgaatattacccggacgcaatcgtctctcctgtgaagtccagtgatctgtctatcccagagtga

SEQ ID NO: 8590 - DNA, 1407 bp, synthetic construct
  source 1..1407: mol_type = other DNA
atgtttttgcagaatatctctaaatttatatcgaactaccgatacgagcaggccacggtggaaagcctgaccacggtgaaagctgcctttctggatttctttggagtcacatatcgcggcatgagcgaggaagcgccctcaatcgccctcaataccatcgaggagatactgccaaagaggaacagtaatcttactgcctccatcatcggccagaatttcaaaaccgacattttgagtgcggcttttgttaacgggattgcggcccatgtcctggagctggacgacggccataggggggctcaacttcacctaggggccgtcatattctcaacagccctcgcaatctccgaagcttacgacttaaccggccgagaatttctggaaggtgtgattgtaggctatgaagtgggaatcttgctcggccagcttgtaaatcccaaacacagaaataagggattccataccactggaacaataggaacattcatcgcaggggtcgtggccagcaagctcctcaagctggatgagaagcagacgctgaatgcactcgggctgtgtggaactcaggccgctggtcttctggaatctgatcacgggggctcgatgggcaaggtcctgcacgtgggcaaagcttcatacaacggcattctgtccgccttcctggctcggaacggctttacgggtagtggcactatcttcgatggagatgaggggtttctgaagacaatggtgctggacaacaccaaccacgacattgatgagttttctttcgagaacgccctcaaaaacatcggaaaagtcagggtgcgggatatctactttaagaagtacccgttctgcagacacctgcattcctcaatagataccgcactcaagcttaaggcaagcatcggggacgagtataatcacatacagaacgttgcagtgaagacctacgaaattgccgccgaacacaacaatttccatccaaagaacttggaggagctgaaacagagccttccctatgcggtggccatctctctcgtggtcggcgaagttagtgtggacaagattaaccaactgatcgaatttggtctcctcgagaactatagcactgttgacgacgtgaatgctattaaaaacatcgtaaacgggatgattatcctaagcgacgataagttgaatgagttatatccttccaaaagaccttccaatgtcatcattaaactggacgatgtgttccgcaacggaatcttccagaatatcaccttcctgcccaagggtgacttcgagaacccactacaactgcgcgagttaatcgataagttcaagggcttgaaccctcactacgacattaagaacctaacagttattgacagcctggaggactacaatatgaagtacgtggtgcggaaactgaaagggtga

SEQ ID NO: 8591 - DNA, 489 bp, synthetic construct
  source 1..489: mol_type = other DNA
atggtggatattattgacggctcagagaacatctcggttcacgggatcttaaactgggtgctgcttctaaccatattcagcatcattaccgtggtgggaaattacatcggctataagcatcctatcggcgacgcactcatcggcatgttcctcctgtccctgatcacgctaatcggggtctggatggagcggtatctgcccctggacattagcagtatcatctatatcagcataattgggattgtcctggccttcccgggaatgcccaccagcaagactctgctgtactacgtatcacaggtggaactcatatccatcgtgacagtatttcttgcctacgtgggaattggcatggggaaaagttgggatgaatttaaagcactcggtccaaaggctgtgatcattacaattctcgttatcgcgtccacctacctgggacttgctttggtggcccaagtcatactgatgttgactggtgtccagatctga

SEQ ID NO: 8592 - DNA, 897 bp, synthetic construct
  source 1..897: mol_type = other DNA
ctgtcaataatatcaaagcgcaacaacgatacggaggatattaggcatatttatcgggataagactgacaggcgtattctgaaaaagaacccatggaaggactatggactccacattagcgtactgattctggtggtaatcgccgagctgattggaccaatgaagattcccgtggccaagggcgtcgagatcagcataatgcctctcctctacaccatgatcctagggttaatattttacttagctaaacccatcacctggatacagcgcaagcagtctagagtggctgaaggagccatgatgctctttatcggtgttctgatcgccaaactggccgtgagcagcggccagtctatccacctgattttcgagatgggtccggcgctgatgctgcaggaactcgggcatctggcgacaatcctgatcgcccttcctattgcattgctgcttggattcaagcgggaggccatcggcatgacctcgagcattggccgggagcccgaagtcgcagtggtggtggacaaatatggtttcaattccccggaatcaagaggcatcttcgcacttttcatcgtgggaaccatcatcgggacagtgttcatcagtttcttgaccagtatctgcgtgagcgtcatacccctacacccatacgccttcgctatggccagcggcgtcggctccgcatccatgaacgctgcctccctcgctcccacggtggcggcctttccacaactggcaactcagatcgaggcctttgcaggcttcagtaatctgctctcgttttccgttgggatctacattgtcatatttgttgctatccctttgacagaaaagctttacgggatcttggaacctaaaatcggacgagaccccattgtcgacgaggaggaggggtga

SEQ ID NO: 8593 - DNA, 1269 bp, synthetic construct
  source 1..1269: mol_type = other DNA
gtgatcataatcaatattctacatattggcatagacgacaccgattcccctgacggaatgtgcacgacctacctcgctagccagatcataaataaattcgaggaaaacggcatcaacctggtggactacccacggttgataagactgaatccttttgctcggtttaagactcgaggaaatggtggggtcagttttaggattccaaaggatgacaatgtggatctcgccaagaagatcgttctggaagaggttgaaaaactctccatgttcgactgcgataacacaaaccccggtgtgatattctacgacggagagattacagaagagatggagaattatgcctttcgcgccatctacaagttcatcacaatcgaggaagctgagaagcttgcaaagagcgtaggctgcgagatccacaaattcaaaaagggaaggggcatcatcggatcggtcgcagcgatcagtctgccgttgaaggactacacctttgaactgctgacctatcgcgcaagcgagaactatggaaccaaacgacagattgattacgacagcgtgtacaaaatggataaggagacctttcccgacacgttcgaaaacatcgattactcggaggagtacattgcaattgagcctaagacaccctgccccgtgctgtatgggatcaggagcaataacgttgagtcccttaagatcgccaaagacatcgtgcaggtctccgaacccatcgctgattggtgtatcttcaagacaaaccagcacacggacatgcacatccaaaaagtgagtaacatttcctctatggagcagttcggctgctacgagatcattggcgaggtcaaaaacaagcctaagatcatcgacggagggcatatgttcttctatatctcagacgattctggcgagattgagtgtggtgcctacgaaccaactaagaattttagaaaattaatttcacacctccgtccgggggacattataaaggtcttcggggggattggcgaacagaacacattcaacattgagaaatttcaggtggtcaagctgaacgatactgaatataagaacccaatatgtgaatgtgggaagcgcatgaccagcgccggtaaaaataagggcttcaaatgcaagaaatgcggcaacaagattcaaagcgataagaaagtgcccatcaaggtaactcggttcctcaaaaatgcgcagttttacgaaacccctgtgagcgccaggagacacctatcaaagccaatctgtcggatgtatctggactga

SEQ ID NO: 8594 - DNA, 933 bp, synthetic construct
  source 1..933: mol_type = other DNA
atgctcacgcgaggcaacttgctgcagcagaccgagaagttactgaaatcccaaggctttaagacctcagatatctacgagcacggttcgttcgacatcgtcgcgagaaaaaacttgttaatcctgctgctgaaaacattcctgaatattgacagcattaacgagcagaatgctcacgagatgaaccagctcgcaaatatcttcctggcctccccgatcattatcggcgaaaagtcacgtaacggcatcctggaagagggagtcatctacgaaaggtatgacattccaacaattggatttgagacgttcaagaatatgattctgtacaatgagtaccctgaaatactggctgatcgcggagggtattttgtgaagatcgatgggaacgttataaaacagtaccgggaggagtacagcatgtccctgaaggaccttgcaaacctggcccatgtatcccgcgcgacaatgtataaatacgagaacggcattgtccgggccaacacggaaactgcaatgatcctggaggaaatactcaataccaaagtcacccttgacatcgatttgctcaagcagccccaaaaggataagatagagtatagtgatgacgtgaaggacctctccaaactcgggtatggggtgctaagcactaacaagagccccttcgatgctgttgccaagatgaagaccagcgacaaacacagcccacttatggccaatgtggaaaagaacagaactgagaaaaccttgaaacggatggccattccactaaaggacctgagtctggtgaccacatcagaacctgtgtttatcataaataacgacaagatcaaggagtctattggtaagatccccgtgatcaagtcttgggagcttaaagagttcgaaaacagtaaagaactcctcaagatgatcagggaaaggaaagagaattga

SEQ ID NO: 8595 - DNA, 387 bp, synthetic construct
  source 1..387: mol_type = other DNA
atggagaatctccagattaccaaaatggaaaaccacccaatcaagtggatttgcaacttcaaaggacaaacagctatcgggatctgcggcaaaacccagaagatagccatgttcgcctctgacgaccgggtgagcaaaatcctagatgatattgtgatcggcactgacgaaagccaggagggctacgggtgtgaggaaaagaacaggtgctgtaacttcgactgtgaactttgcgagatttcaccccgccagtacctgcagatcacgggaaagaagccttccaataagaatataaaagacctgatcaacggtctggcagatttgaacaatagtctggaggagaagaacctcgtcccgtttgaggagtatgaagtggtaaatttttga

SEQ ID NO: 8596 - DNA, 795 bp, synthetic construct
  source 1..795: mol_type = other DNA
atgttctttgatgacctgacatttaaagagaagatcatacccaaaaccatcctgggatacagcccattcgtggccgaacccttcttggggcaccgctccatgctttacaagcgggacttgtacgacaatccccaggccatcgccgacgtgattgtggagagttataaccagggagtgagggctatcaatctgttcaatgactcccagctgctgaaagcatacgatatcgcttgcgaccaggggtgcaacatgaaggtaatagctaccatcggtaagaccgaggtggattacctaaacccaaattatgagatcgccaaggagaccgactgggatgatgatatcgagctctttaatagctacgattgtcccctcatgctggttgacgagttcattgtcgacgcctatgactggagactgacttcaaagatattggactgcattaacgatacagatagcctctccggccttatcacggccttcccactgaggacaactaacttaattcctgaaaatctgaacatggatctttttgatttttatatggttcctttcaacgcgatttcttacatgatggacatcacggccttcaacgcatcacagcgagaggaatttaagcaaaagctcaccagtctgaacaaaaaggtcattgccagccggattttcgcatgtggcattctaaagccgaaagaagcattcgagttttacaaaaagatagactacatcgacctcatctcgatcggcgtggctaaggtcgaagaggcgcgcgaagacttcactctgctcaaagaatattga

SEQ ID NO: 8597 - DNA, 339 bp, synthetic construct
  source 1..339: mol_type = other DNA
atggttagcatggaggaatttcccataagctccgccaacttcatttcaggctataagatcgtggagaataaaggcttcgtctacggtctcaccgtacgagccagagggatcgggggagacattggcgctggtctgaagggcctcctgggcggagagatcaagcaatacgtgaccatgatggaggatagccgggaggagtctattcagcgctgcatcgagcacgcgaaagaactgggggcaaacgccataattagtgtcaggatggactccgacagtatctcgcagaacatgcaggaagtgctaacatacggaacggcagtgatcatcgaaaaggaatga

SEQ ID NO: 8598 - DNA, 1575 bp, synthetic construct
  source 1..1575: mol_type = other DNA
atgaaggtactgatcgctgatgccatcaacgagaaggggattgagaacttaaaagaggtcgccgatgtggttgtgaacaccagcatcacccccgacgagctggcagataccatccatgaatacaacgggatcgtagtccgcagccgtacaaagctgactgccgacatcattgagaaagccgacaacctgcagatcatcgcccgagctggggtcggcgtcgacaatatagaccttaacgcggcaactgagaaaggaatcatggtggtaaattccccagagtcaacaagcgtgaccgttgccgaacacacaatgggcttgattctcagtatggcccggaaaattagcatagcagataaatctgttaaagaaggcaagtgggaaaagaaaaagttcatgggggtggaactgagaaacaagaccctgggggtcataggcatgggccgcattgggtctcaggtagtcaacaggtgtaaagcgtttggcatggacgccatggcctacgatccatatctgccagaagaggtggcaaaacagatgtgcgtggatctgacggacctggagaccgtgcttaagaatgcagacttcatcacaatccacgtgcccctgacaccggaaactaaacactcaatttccacagagcagttcgaaataatgaaggacaccgcctttatcgtgaactgtgctcggggtggcatcattgatgaaaaggccctgtatgatgccttggtgaatgacaagatcggtggggccgcactggacgtgtacgaagaggagccgcctgccgaggattcaaagctctttgaactcgacaatatcgtgctaacaccccacatagcagcttcgacgaaggaggctcagcgggacgcggccatcattgtcgctgatgaaattatagacttagccaatggcaacactcccaagaacgtcttgaaccttccacggatcgacaagaacacgtacaatgagctgagcccttacatggaactgtgcgagaagcttgggtgctttgtgagccagggcatcaacggcaagctcaaggagattgagattatttacagcggcgagctctccgagattgacaacctcgagatactctcccgcaccgtcattcagggtgctgtcaatcccttcctaagttcgccagtgaacgcagtgaatgctgccctcgtggcgaaggatcgaggaatcagcatcaccgaagggaggaaaaataattcaaagggctatgagtccctgattaaggttatcgcgaagagtgagaatgaaaccttcacggctgaaggaacccagctgcatgaatccagaatcttgaaagtgaacgactattgggttgatgttattcctaagggacacatgttcatcgctaaatacgaggatgtgcctggaagtatcggtaaaatcggtaccaaactgggcgagcataacgtaaacattggaatcatgcaagtgggaagggacgagaagggtggaagagcaatcatggtgctaactctggataaggaagtgcccaaagaggtcattagcgagatccaagccctcgacaatgtttatgaagccactggaatagagctttga

SEQ ID NO: 8599 - DNA, 681 bp, synthetic construct
  source 1..681: mol_type = other DNA
atgagttttatctcaaagctcttcggcaataacgacgacgagtttgaggaggttagagtcgaccgggaagttctgaacagcgtgatctattacagcaagcaggcctatccaaatgagttcttagcctttctggatggtaagatcaaaaaccggattctctacattactgggctgatctttatccctggtgaaacctgcgagaccggggccgtcatccactccgagatggtgccaatgaacacaaaatacttcggcagcgtgcactcgcaccctggacccagtgcatccccgagcgatgctgacttgatgaccttcagcaaaaacggatacttccatatgatcgtgtgtttgccctactcttacaacacatttaaagcatatgacaggcatggagaatccattgattacattgtgggggattatgcgtatctggtcaacgatgaccttgacgaatttttcgacgaggatgacgtgctgacggacaatgatgagtttaaacccggcttcttcgatgaagatgacgacgaatttttcaagaatctcgatgaggagaaggtgaatcactacgacgagttcgaaaagcgcaaccaaataaacaaccagctaccaaacaatgtaatcaagatagagctgaataatgacggcaacgtcaaaaagatttcaaggcgattcaaggactga

SEQ ID NO: 8600 - DNA, 723 bp, synthetic construct
  source 1..723: mol_type = other DNA
atgaaggagtacgaggtctatagctcgctgaaggtgccaataaactctaaaatcatcgttcgtttggacgggcggaactttcaccaactggctcgggacctcaacctgattaagccatatgatgagaacttctacaaagtgctttctaaggtgtgtgaagaccttttcaaggagttttcacctatctttatctacgcgttctcagacgaaatcagcctactgttggacaatattcccttcaatgggcgcatcgagaagatcgattcagtaatggccagttttgcatccagttcctttgtgattaattacaatgccaaattcaagaaaccccctagctttgacagccgggtgattcccatctccgacgatgatgtgctcgagtacttcaagtggcgacaggacgagtcctggaggaactgcgtcaattcccacggcatcttccacctgcgctcgaactatccggaaaatctgagcaataacaagataaaaggcatgaacctgagtgatatacatgaactcctgttccagaacggcatcaacctgaatgacattgacacatacaaaaagagaggaattggagtctataggaaaaacaaaaaggtggtcgggttcaacaaaaaggaaaataagaaacagatcagctacagaagctatgtttgcaccgattggaatctcccaaaattcaacaaggagtttttcaagaacatgggtgtattaaagtga

SEQ ID NO: 8601 - DNA, 765 bp, synthetic construct
  source 1..765: mol_type = other DNA
atgaaggtcgggattataggctgcggggctatcgctaacatcatcactggcagcatcgccccagaaaacaatggtatagagatcgcatacttttttgataaagacgtcgagcgggcagagaatctggccagtctggctgggggcgtagccgtcctgaattttgatgacatgctgaacgatgtggatctcgtgctggaatgcgcttcacccgactcggttaagaagtacgctcccattatcctcaagaagggaatcgacatgattaccatgagcatcggcgcattcatggacaaagacttctataacgaagtgctgaagatcgccagagagaataacgctaagatacacctcccatcaggcgccgtggtgggcctcgatggaatcaaggcggtggccaaattcggtttgaaggaaattaatctggtaacccgcaagagcccacggtctcttggaaaaaatatcgacattgaggaagttttattcgagggaaaagcctccgaggccgtcaaacagtttcccctgaacatcaacgtcgcggcaacaatttccatggcatgtaacagggacatcgacgtgaagataattgtcgatcctaaagtggaccgcaacgtgcatgagattacggccaaaggggatttcggggagtttaagacaaccactatgaacttcccttgcgaggcaaacccgaagacaagcatgctggcggccctttccgccattcgactattgaaaagcttcaatgaaaccatcagtgtgggcatgtga

SEQ ID NO: 8602 - DNA, 402 bp, synthetic construct
  source 1..402: mol_type = other DNA
atggtggaggtgtccaaattgcgctcactcgatatttatacgaacacaggacactacgttggccgcgtagaggacgtcgtcctgaatatcaggcttggaaccataagcaaactacaggtgagagctattgagcaagagcgaaaacccgccggcgttctgaacagcttcctcgggagtatcaggggggaggtgcccgaagaaaatgatatgaagtctttccaaaatgacctgctcaccgtggactttgataaggtccaggcaatcggcgacatcatgctgattaaccctcgggatatcaagaagataaaccctgaaccgcaggtgccagacgcggtcgccccaaagcagcccgaaactcagccacaggagacacaggtgcagttcgacgccgagcggctgtga

SEQ ID NO: 8603 - DNA, 723 bp, synthetic construct
  source 1..723: mol_type = other DNA
atgtgggacactaccaaagactaccgaattttggtggcttcgaaggcacgggagaattacctcaacctcataccaaccgcgagctttagaggcagttggaacaaaaagcaggctatcgatctaggaaagcagatgaacagcgacttccagtcattgatctatagctacctcgagggggaggaactggtgaactctcctgatgtggcctcattgaaggagaaaggggagaagataattgaatatcttggaggccccgactggaataagaagttcttatccaatgcccctaaagaggatagggaaaaaacccaggagaatatcgcaaaggtccgctttttcctggacaccatcatcggcctgaaggacagactgagcctggggccgatcaatgatcccattatcggggtggacattagggtaggggaggtaatgagcgttacgaaacaccctaagaatgacaagctgctgatctgcaacgtgaacctgggcaaacgggccattacagtcctcactaacgatctgaatgtgaaagacgataacaaggtgggtgtctccctgctccccccccaatcctttagtgacattgtcagtgagggaatgttccttggcatgaatggaaacatactgaagagcgtggagggcgaacttggtgaaatgccaaagggcatcccaatggaatccctcaacgaaacacgcaacctggttgagaactacctaaaatga

SEQ ID NO: 8604 - DNA, 1413 bp, synthetic construct
  source 1..1413: mol_type = other DNA
atggatatgttgatcggcggaaagcacatttcaagcgaagatcttgaagacgtgattaatccgtacactggggaggtaattgacaccgtgccaatcgctcaccggcagactgctgagctggcgattgagtcggcaaacaacgcccgcgagagtctgtcggaaatgagcgcattcaaggtgtcaaataatctgttcaatgttgttcttaagctgaaagaaaagcgtcagatgttcgccgaaagcctgaccctggaggtgggcaaacctataatcgaatctctacttgaggtcgacaggagcattgagaccctgaagctcgcagccgaagaggccaagcgcatttacggggagtccgtacccttggacgccggcatgggcggtaagggatttttcgcttttactcaaaaggtcccactcggggtggtggtggccatcacccctttcaactatcccctcaatttgacaatccacaagatagcacctgctatcgcctgtaagaacaccgtaatcgtcaaacccccaacagaagcccccctgacagtgatgaaattctgcgaactactgaatgaagagtttcccgacggtgttgtcaacgttgtgaccggatacggttctgaggtgggagatcatctggtggtcagcccggaggtgaacaaaatcagctttacgggatcagtcacaaccggcctcatgatctcccaaaaagctggcatgaagaagactaccttggagcttggcggaaacgacccaacagtgatcctgaaggatgcggacctcaataatgccgtcaagggcattgttaatggcgccttcctgaatgcagggcaggtgtgcatgggtgttaagagagtaatcgtcgaggatgagattgccgacgagtttgcagagaagctcgtggcggccacgcagaagctcgtcatgggaaacccactggactctaaaaccactctgggcaccctgatttccgagaaagctgcgatacaggtggaggagacagttaataacgctgtgagtatgggggctaagatactgacgggagggaaccgggatggtgcattctacgaggccactgtgatcgataacgtaacaaccgacatggatttaatcctcaatgagacctttggccctgtcgcacctattatccgggtgaagaacgtcgacggggcgatcgaagtggccaacaacacggactatggcctccaggctggggtcttcacaggcgactacgcctccgctatgagatgcgcccaggagattgaaactggaacggtgttcatcaacaaacagtccacatttaggactgataacatgcccttcgggggctttaaaaacagtggggtgggcaaagaaggaataaaatatgccgtggacgaaatgaccaaaaccaagttaatcggtctaaacctgcgatga

SEQ ID NO: 8605 - DNA, 582 bp, synthetic construct
  source 1..582: mol_type = other DNA
atggaaaccaccagatttgagacattttttgacgcaatcatagccattatcataactgtgcttgtcctaaaagtcccccaaccagcaaccccaacgatcggcgccatcttaaagctgaacacaatcttcattgcttatcttatctccttccttaccctgtacaacctctggtatgccaatcataacctgctcaaaatcatagatattattgacaactccgccgtgtggagctacggagcaatgaccttcatcctgagcctcctcccctattttactctgtggctggctaacgatattaattcgatacctgccgagacaatgttcggactgatcttcattttcacccacattttcaataggttggcgacgaagtcaatttaccgcagcaacccgtacaataagcagttgattgaattgaactttgactcccacatccagagtatccccctgatcattctgatcatcggcttcatcctaacttatacaatctacgcccctgggatctacgtaagctgcctgctggcggtgattttttggatctcactcagtaaaataaagcgggggtgtaataacggcaactga

SEQ ID NO: 8606 - DNA, 573 bp, synthetic construct
  source 1..573: mol_type = other DNA
atggagaccgaaaggtttgaggccctgttcgacgcgattctggcaatcataatcaccatgattgtgctggagattcccctggccagcactggcagttgggaagctctcttcgacttaaagtacgagttcctgatctacgccgtctcgtttatcgtctgctttaacttttggaattacaacaataatatcttccacctcgtaaacaagatcgactacaaagtgatatggaccatggcaattacactgtttgtgttctcctttctaccatacctgacctcatttgtgggcgaaaacttctatttgttcctaccacagtttctgtacggactcagcttcatcatcactgccatcctgagcatgataattgggaacttcctcaaacaggctgatcctggaaacatcgctttgcatattgcactgagtaagcactatccgatgtatgccacgataatcacagttagcatcggcatgatcattggttatttcatctaccctcccgcgatcattgcctgctgtcttctctccattcttggggtgtggttcataccccggattatcttccacatgaagtga

SEQ ID NO: 8607 - DNA, 948 bp, synthetic construct
  source 1..948: mol_type = other DNA
atgaacctggtcttcaaatttatcgaaaagtattactgcctaatccttttgttccttgttgtcatcgccctcatttatccaatcagcttcaactgggtgttgaatagctacggtaacctgaatattctcaacctgctgctgagcattgtcctcttcacgatggggacaaccctcaaggtggacaacttcataagtgtgttcaaaaaccccaaggagattatcattggaatctcctcccagtacattatcatgccgttcctggcctttgcgctggctagcattttctccctcgatgcagccctaactgtcggcgttatcttagtgggcaccgtgccgggggggacggcttccgatgtaatcacatttctggcaaagggcgacgtggcactttcagtctcgctcaccgccatcagtacttttctgtcacctattgtcacccctctgatcaccctggtgctgatcggcaaccagatcgctttcaatcccgtggacatgtttctgtctattgttcagatcgtcatcgtgccagtcatattgggactgttgcttaattataagttccccagcttttgtaaaattctggaggaatacctgcccggcatctccgccatcgtagtgtgcgtgattgttgcggggataatgggtgctaataagcaggctatactgacaagctcgctcgtgatcatggtagtgatcataacccaatacttcttagccatggccttaggatgcctcatgggctaccttttcggaatgaagcgggaacatattattacaatagccatcgagctggcttttcaaaacagcggcctctcaaccagtctggccaaaactcacttcccaaatctattgatcgccacggtgcctggagcactgtattctgtgtggcagaactttgcagggtccataatcgcgtatctcctgaacagttactttattgaggagtga

SEQ ID NO: 8608 - DNA, 183 bp, synthetic construct
  source 1..183: mol_type = other DNA
atggacgactccgcacagaccagcgccgagttcatcctccttttcggcggaatatttgtagtggtcctactggtgatctatatgtacaacaactacatggatgacctcgggggcgagattaagagcaaagaagtcaatgaatttaataaccagctgaacgcgctgaaggtgtacttcaaatga

SEQ ID NO: 8609 - DNA, 927 bp, synthetic construct
  source 1..927: mol_type = other DNA
atgaaattcaacataatcaacaacctgactctttttttagacaataacgttcctgagaagtatctcttcaagataaatgaatttttgctgagcgggtcgatctctaccgaggctagtaaggtgctgagcatcattataatcttcatcctcgtaaccgaaatttttctagtaatcgcgctaactctcttcaacttgcccttcagcatcctgatcttcccatttttcattattccaatcatttttacatatattattgtccaacaggagaaacgcgctcaggagatcgagcataccgccccagactttctgagacagctgtccagcatgcttcaggtgggcctgagcttcgaaaatgccatggaggacatgtcccactacagcagtgggcccctctacgacgaaatcagaagggcaattatcgaaatccggatggggcaaaatttcgatgacgcatggcgggcgatgagtaagcgattaaagtcaaaggagcttgagcggatcttcgggatcattttggatggcaggaaaagtggaagcagcatttcaacagtcctgctcgatgtgtcaaacgatctgagggacctcatggcccttaagcgtgagcgcaaatccgctgtcatgatgtcagtcatgttcctgctcatctcggccattgttgccacgccctttgctatgggtatggtgagtgtctactctaactttatgcagagctacggcatggagtctgaaatgattatttccgccccgctcgtgggcgaaatgtacctgatcatccactctttcttggtgggattcataatctccgtgatcatgtacggcgaggtgaaaacgggactgaagttctccctgcctctggtggccgcaagcttcggaatattttatataatctccacctttggcggcacactgtttatggggggtttctga

SEQ ID NO: 8610 - DNA, 1017 bp, synthetic construct
  source 1..1017: mol_type = other DNA
atgaacctgcacttaaataacatcctaaaagacatcaaaaaagacggtgtgcaggcttaccttctgacccagtttaccaatatcgagtacatttcgggatataagcctaccagtttcgctttctgcatcctgaaggaaaacccaatcatctacgtgtccggcatggatatggagatagcaaatcgcgatagcaccatcgaggtcaagcagtacgagtcctatgacctgatgataaaggagctaaaggaggaaggaattaaaaaccttgcaattgaacccaccctcccttacagtacttacgcccgcttcaaggacgattttgagatctctgacaagtcatacgtggataagcaaagaatgatcaagaccccatctgagattgagaaaatcacaaaggccacggaaatagcccagaaatcatttctccagctggatattctcaataataacggcacagagagggaagtggccttcaatctggttcggtacatgatcgataacggcgcctcaaaagaaagcttcgagacaattgtcactagtggagccaactccagcctgccccatgcgattcctgaggcgaagaaactggaaaggccaatcttgatagattggggagccatcttcaagggctactgtagcgataacacgcgtaccatcgtctatgctgaaagccagcaagaaatttgggacatcgtggcagaggcgcacgacaaggcaataaaatcggttaaggtgggtatgaagtgctgcgaagttgataaggtggctcgagacatcattgctgaatatggttatggggacaactacatccactccacaggccacagcctggggctcaatatccatgagactcccgggttttccgcccgggacgagacggtcattgaaaaagggatggtaatcacagtcgagccgggcatatatttggaggggaagttcggagtgagactggaggacactgtgatcattagcaagaaagccaacgtaattggcgacctcccccttaacattgagtga

SEQ ID NO: 8611 - DNA, 642 bp, synthetic construct
  source 1..642: mol_type = other DNA
atgttcaagttcacgagcagtgagatacgcgacctcataatcgcgtttatcgttatctctctcagctttgccatcgtgaatggtggcaggaacccctctgctgtgcttagcattctgccaattgttatggtgggggtgggagccgggttcattctgcacgagctggggcataaatttgtctcaatgaaatacggctactgggccgagttcaagctctggccccagggattgatatttgcccttgtgagctccttcctgggattcgtgtttgccgctccgggtgctgtctatacttacgcaaattacatgacagatgagatcaatggcaagatttccattgcaggccctgttgtcaacattattctggccctgattttcttggcaatctgtgtcgccatctatcccagtgcctttaactccgaaacctcagtactcatattcatcatctgctccgtagggtattcgatcaacagtttcctggcggcattcaacctaatcccaattggcaacctggacggaagcaaggtgctgacatggaatgctggcatctggactatcacaatcgctatcgccggaataatgaccgtgatgtctatgaccatgggggtggaaaccattgtccggatcatcttaggcttttga

SEQ ID NO: 8612 - DNA, 1203 bp, synthetic construct
  source 1..1203: mol_type = other DNA
atgacggagaagctcacctacttcgaaggaacccaccgagtaatcgcaccgaaaaagacgattgaaataaacgaaaataagctgaggatcgctggcattacacggattgccgacatcacggatctcgacaggatcggaatgcccgtgttcactgcaatcagaccaacggccgaggatggggctatcagcatttatggtggcaaagggatctcaaaagaccacgcaaaagcttccgcgatgatggaggggtttgagcggtattccgctgaaaagcaggaggccgacgagaccctgatcgccactaccagcgccatcactcagaagggaaaatatgccaatcctaaaacactgaatctgccgcaaaagtatgagaaagaggatattagtaagataccccttgaatggaacatagccactgacctcatttcgggggaggaatactacgtgccttcaaatgcagtcttccacccctacaaccacgagaacaacgtgcagagtctgtttaagtcaaacaccaatggcctggcatccgggaatattttagatgaagccatcttgcatggcatcttcgaggtcatcgagcgcgacgcatggagcatctttgagctgactcataagaactatagccagattaagctggacagcatcgaaagcgaacttattaacacaataatcaacaaattcgagtctaacggaattaagattaaactgatggactttaccgccgacattaagattccaacaatcgccgctagcgccgatgacaccattaccaaggatgccggactattgacattaggcatgggcacccacctcgatcctgaggttgccgtcttgagggctctcacagaggttgcgcagtcccgagctacccagatcaatggtgcgcgtgaggacaccgtccgcgccgactttgctcgggaggcaggctatgaaaggatgaagagaataaataaatactacttccgcgaggaggaaaagcaaatcaacttccaggatatcgaaaacaagtccacaactagcatcaacgccgatctggatatcgtgaagaaggaactgatagcgaatgacatcaaacagattctgtacacgaacctaacacggccagaactgaatgtgagtgtggtacgcgtgataatccccgagatggagatctacgccctcgaccccaccagagctggttaccggttccttagagtgtga

SEQ ID NO: 8613 - DNA, 651 bp, synthetic construct
  source 1..651: mol_type = other DNA
atgaagatcataatctataccggattgagtatccccttcgacgaagccaaggagattctggacagccatgacaacatcgaggtgatctacaagaagccgatcaaacgcggagatttggggcacgacattaaggagaatcccgatatcatcgcaataatagatggggttttccaccagaactccgcagttggccatcgggagattcttagcgtgatgaagaagggagtgaaggtgtatggttcgtccagcatgggggctcttagagcgtcagaactggacacactcggcatggagggcgtgggctactgctataatgagtacgccagtggcaatgtcacatccgacgatgatgtcgccgtaatgctggactcagataccctggaagccatcagcgtgccactcataagtatgaactacgtcttcactaacgctgtcaacgaaaatatcctcacccaagaggagaaggacgagctgatcaggatcacgaaagaaacctactatcctaagcgaaactacgctcagacattatccaaatctggtctgaatagggacaaaaaagaaaagctaattaactttattcggactagcgaagatatcaagaaagaggacgcgaaagccctgctcagccacattaaatacgtgattgagtga

SEQ ID NO: 8614 - DNA, 1011 bp, synthetic construct
  source 1..1011: mol_type = other DNA
atgagactggaagacaaaatcaacatcgttaggaatatcctaaaagacaagaacgtggctatcggtttttcaggggggagcgatagcacactgatcatctatctcgctagtatgttcgccaagaacacgctggccgtcacaatagataatcatctgatgcccactgagtttatcgaacacgcaaagagagtgacatcctccctcggggtgaaacacgaaatcatcgacatagatttctacaaggaccctgatttcttgaagaatacgcctaagcgctgctatacctgccggaatttgatgtacggcgaaatcaagaaggtggccaacgagaacggctttgactacatttgtgacggcaataacattagcgacctagtcgacaaccgtccgggcatcctcattacctacgcgaatgaatttaagacaccactgatcgaagcgaagctgacttccaaagagattcatgagtacctggacaaaaacaacattccctactcgaaatctaccacttgccttgcaacacgcattaagaccaacaccccaataactaaagagaaaattgagaatatcagttattgtgaagattacattctgtccaatactgagtgcgagacagtaaaagtgcgagatctcgggagcatatgtatgtgtgaagttgacaagatcgacgaaattatcaacgagaataagttcaaacagattaatgacgaactgaagaaacagggatacgagaaggtcagccttaacctctcagagattaagaataacggcgagatcatcctgaactatatcgatggtagtttcagctataaactgcccttcaccatcaacattgccgacaccaagaagcagcttaagaacaaaatcatttgccaaaccaaagagaagatagagatagagaacatcgatatcttcgacacgggattaataaagggaaacaattttaagaactacgaggatgccctgaataaattcatgcacgtgctcaccaagttgcggaggaacatttga

SEQ ID NO: 8615 - DNA, 459 bp, synthetic construct
  source 1..459: mol_type = other DNA
atggctgttaacccagtcctggtgatcaaggtcgtagataataccagtgtgggcgttcgcgcgcggctgtatgatgacttcagcgaacacaacattgtcctcaactccgtgctaacttactggtgggcaaataacatgcccccagccgtgaaattcctcgaactctttgactcggtcatcaagagaaccatcaatgagataatgccccataaaacacttaacctgaagtacgaggtgaaggccgatgacatactggaaaatgcaagccagatcgaaatcaccttgatttccatcagcgccgatggagtagggtttaaaattgacggcaaatctgtgttcttaaaggacctgaggaaagtggaggaggatttcgagcctaaggaattttcaacaactttcgaccagtgcatcgagacgccggacattgtgctgaagaaatacaaggagatgaagaactga

SEQ ID NO: 8616 - DNA, 846 bp, synthetic construct
  source 1..846: mol_type = other DNA
atgctcgtaaaacggacaatgagcaagaacgtagtgagtgtgtcggtgccaggcaacagagacaaggttctggacttgatgaggaaagagaaaaaggcagtcctgcccgtggttaaaggcgacaccgacatattggtcggaatagtgactcgttccgatctaatcaacaatcccgacgaagaacagatcgctatgctcatgagcagagatctcatcaccgtcagccctggggatgacgtcattgatgcggcccggaaaatgatggacaacgacgtgcgccgcgttccggtggtggacgacgatggcaagctggtgggaattatcacatccttcgatctggtgtcaaatgctctgactaagactgagatcaacgatgttgtggaaaactatatgattactaccgtccccacaacctgggagaaggccccattgaacgtggcatttgaatctatgaatcaatttgggctaaaatccatactggcacttgatgacgatgccaagctgtccggcatcttaaccgaaacagacttcatttccgaaattgagattatctcggagcgaagtgagcacagcagcaccgtgggtacggagggagacaagtggtcttgggacagcacctcagtactgtacatcgagaaaaatcatctgaaattcacggataagacagtctgtgatgtggccgtcggtaatgtcgaagtagctaactctaagacgaaggtgtcagactgcgccaagaaaatgaagaccctgaacatcgagcagattcctgtgatcggggtggaggggaatctcgtgggccttgtcagggcgagtgacctcatcaaggcccttgttccacaggagtga

SEQ ID NO: 8617 - DNA, 423 bp, synthetic construct
  source 1..423: mol_type = other DNA
atgtataaaaagatcctagtcccaacagatggatcggagtttgccaaaaaagcccaaaaacacgctttgttccttgccgagataagcggggcggagataatcgctatctccgttacggagaataacttcgttaacggactgcccctcgacgatgaagtataccagctgaaccagatcttaaaggaaaggtctgaggagaatctgaaggaatttgacaagctgaacgaaaacgatctgaagatcacccatattgtgcgggaggggtcaccggccaaagtgattctcgaggtggcaaaggaagagaacatcgacctcatcgtgatcggcagtagtggtaagagcggcttcgaccgcttcattatgggctccgtcgccgacaaggtggtgaatagcgcgaagtgcgcagtgctggtcattcactga

SEQ ID NO: 8618 - DNA, 1155 bp, synthetic construct
  source 1..1155: mol_type = other DNA
atgttcacgatcgctaatggcatcatcttgaaaggcaaggacctggtgcccactcgcgagaacatcgtggtggatgacggacgaatcattgagatcggaaagggcttcctagagggtaaaatcatcgatgtggacgggagcgtcgtgtgtccttcttttataaacggccatatgcacattggggattctatcattaaggatgaggggtacgggctgagcctgagtgagatggtgaaacctcccaacggggtgaagcacgtcgctctgtccgacgtgagtgacgacgagttgatacaggcgatgaagtactcaatgtgggatatggtttacgggggaaccacccacttcatcgattatcgtgaagggggacttaagggggttaagctgctcaggaaggcctccgaggacattcccatcaaaccaatcattctcggccgggacgacagtttctacggtgacgacccagacctcagcaaggtaaagatcgccattcgcaaactgctgaaattcgcagatggcatcgccccgagtggtttcggcgagataacaatggatgttgccgaactcatttcaaaggaatgtgaaaaagcaggtaagatcagctccattcatgtggccgagtcggaattgaatcagatcgaaagccttaatgcttgcggcttaagcgaaatcgagaagggagtgattaacaacttttctcagcttgtccaccttactaacccaaaaaatgaggatctcaactcggtgtccgtaagcgctcaaaacgtcgttgtctgcccaagagcgaatgcaaccctgaacgtgggcatagtgcctttaaacaaaatgctggacctcggaatcacacccttgctgggaaccgataacgtaatgattaactcaccgaacatgctccgggaactggagtttaccctgaaaataatctctgtctattataagaagtatatcgatccctccaacctgctgaaaatggccacaaccaatatttgcggcttcggcatcaacaatgtgatcgacaagagcctaatcactgaggacaacctggccgaatttaatgtcttcaactcattttccaagaatccttacctcaatataataaatcggtgcgagacgaagaacattctgtacaggattaatagacgcacaatcatttga

SEQ ID NO: 8619 - DNA, 531 bp, synthetic construct
  source 1..531: mol_type = other DNA
gtgtatagggtgaagtacaacaataaagattatggggagtttaagaaactgagcgacgcactctacgagcgagatgccctgtttttctgtaatttcgactatgacctgctggttgaatgcgacctggaaaacaagtatgagaacatggtgctaccacccttccctgagaagagaccgaagggtcgcatcaagggaaccaaagtaaacaaaaaggaacgggagggggagatcctcttcaaccacaaaattaagaagttctacattcaaaaaggcgacgagacaattggccagtacgatacaatgaccgaggctttctactacaaaaagatactgatggccaacaagtgggataagaacatccttaaaaccaatatcactaagaagatcgaggtcaatataattattgacccagcggtggagtatgaagtccagctcaacttttgccccaaatgtaaaaataggttgaagatcggagagacggaatgccccagctgcggcatcaacatcgaagaatacttatttaatcggtga

SEQ ID NO: 8620 - DNA, 3177 bp, synthetic construct
  source 1..3177: mol_type = other DNA
atgccagtggataaggacattaagaaggtgctgattattggctccggccccatccaaatcggccaggccgcggaatttgactactccggatcgcaagcatgcaagtcactacgcgaggagggaatagagacagttctggtgaacagtaatccggccacaatccagacagacatcgacatggcagatactgtgtacacagaaccattgaccccggaagtggtggctaaaataatcaaagaagaaaatgtcgattcaatattgccaactatgggggggcagacaggcctgaatatcgcaacagggctcggagacttgggattgcttgacggcattaaggtgctcggctcggacgtgcagacaatcaaagatgtagaggaccgggacctgttcgcaaatctgatggataaaattggggaggagattcctaagtgtcatgcagttgaaagcgtcgaagcagccctggaagcagttgatgacattggttaccccgtgattgttaggccggccttcaccctcggcggcacggggggtggaatcgctcataacgaggaggaactcattgaaattgccactcacggactggatatgagtttcattaatcaggtcctcatcgacgagagcgttctcggctggaaagagatagagtttgaagtcatgagggacaaggaggacacgtgcatcattgtgtgcaccatggaaaacatagaccctatgggtatccacaccggcgacagtgtggtggtggcccccatccagaacctttgtgatgagacgatccagaagatgagggatgcctccattaagattatcagagccctaggcatccggggcggctgcaacatccaatttgcactgaacccagagaccgatgagtacaaggtcatcgaggtgaacccccgggtctcaagaagtagcgctctggcgagcaaggcaacaggttatccaatcgctaagatctcctctaagatagctctcggattaactctagatgagataaagaacgacatcaccaaggagacaccggcctccttcgagcccgccatcgattacgtggtgattaagatccctcgctggccttttgataaattcaaaggtgtcagccgtgaagtgggcgtgcagatgaaggccaccggcgaggtaatggctatcggacgaacctttgaggaggccttccaaaaagcactgaggtcactagatatgggcttcgacgggttcgagtacatcgactacactgaggaagacttggcgcatcctactgacaagatctacttccagatttattcagccataaaagatgggatggacattgacaagatcagggaaatcaccaatatagataactttttcctgtacaaaatccgaaacatcgtgaactttgaagacagtgtcaccgcggacaaactgaacgacgaggacttcctgagaaaggctaaacagattggctgttccaataaacgcttagccgatctgagcggccagactgaggagtacatcaaaaacctgctgagccgatacaacattaaacccagctacaagatggtcgatacttgtgccgccgaatttgaggccaagaccccctattactacagcagttatgataagggaaatgagctcgtctcaaccaacaagaagaaagtggtcatcctcggagcgggccccatccgaatagggcaggggatcgaatttgattactgttgcgttcacagctctctggctttaaaggaagagggaattgagacgatcctcatcaacaataatcctgagaccgtaagtactgattatgacatttctgacaaactgttcttcgagccacttacatttgaagatgtgatgggggtgattgagcaggaaaagcccgatggggtcatcgtgcagttcggcggtcagacatccattaatctgtcagtgcccttggccaatgcgggcgttaaaatcctggggaccccatatgagagcatcgatcgcgtggaggacagggaactgtttgctgaactgctggagaaattacacattcaccaggcgccctacggcacagctaattccttcgaggaggcaaaggaaatagcagagaaaatcaccttccccgttctcgtccggccatcatatgtcatcgggggcagagcgatggagattgtgtacgacaacaacgagctggaagagtatatgaaggaggctgtaaaagtaagtcctgagcacccaattctcgtggacaagtttttggaggacgctattgagctcgacgttgatattctttgcgacggcgaggacgtgttcatcgcaggaatcatggagcatatcgaggaagccggagtgcactctggagatagcgcctgcgtaataccccctcaaacaattcctgagtatatcctggacacgatccgggaaaattccaccaagctggccctggaactgaatgtgaagggccttatgaacattcagtatgccgtcaagctggatgaggaaatggtgtacattattgaagctaacccccgtgccagccggacggtcccattcgtcagcaaggccattggtgttccactggccaaagtagccacctggattatgcagggagccaaactgcgcgacttcgacctcaccaaggaaatcaagttaaatcacgtggcagtcaaggagagcgtatttcccttccttaagctgccggaatccgataccgtgcttggccccgagatgaaatccacgggtgagagtatcggtatcgatgaaacctatggcatggcgttctataaatcccagctcagcggaggtatggaactacctaaggaggggaagatatttatcagcgtgaaggaggccgacaaaaagaagatcagacctattgctgagactgccgctaacttggggtttgatcttatagccactgacggtactgccgacgccacgggtattgactcggtggagaagatactgaaggtctctcaggggtctcctaacatccgcgatgctatcctcaacaaagaaatcgatttgatcatcaacacctccgaagggaaacagtctgctaaagacgggtatataatccgccggcttgctatcgaactggggattccgtacgttacaacccttgcaggagccagagccgtgctcaacgcaataaaagctatccaaaataacgaaatcaatgttaagtcgctgaacgactacgtgggcggagagtga

SEQ ID NO: 8621 - DNA, 1083 bp, synthetic construct
  source 1..1083: mol_type = other DNA
atggtaaagatagctaagctggccctcgaagacggcacgatcctaaagggtgaggcattcgggtacgagaccactaaattgggcgaacttatcttctctaccggcatgggcgggtacaccgaatctctcactgacccgtcgtttaagggagagattctcatgagcacctacccactggagggaaaccacggtgtgagtgagaagtggtatcaaagcgataaaattcaggcggaagggtttgtgtgccgggaggtgtgccgggaggtgagcaacttcggacctcagaaaacactggatgattttctgaaggagtttaagactcccggaatcagcgggatcgatacccgtgacctgacacttaaaattcgcgagcgaggcagccttaaggccgcaatcacaacggaaaatatctccgacgatgaactaatcaacctggctagtagccagccaagtattgaggacatggacgtggtcccgctcgtgagtacaaaagaaatcaagatgttcaatggagatgctgataggaaggtggcgttgattgactgcggtgttaaaaagaatatcattaactcatttctggagcgcaatatcggcgtcatactgttcccctacgatacggactataagactgttctcgactattcccccaatgggctgatgatcacatcgggccccggcaaccccgatagggtcagcgaaaccatcgagaccatgaagaagctgtccaacagattaccaatattcggtatctgtatggggcagcagctcatagccaagtccttcggagccagatcatataaaatgaaatttgggcaccgcggcgagaaccaacctgtgaaggatctgaatactggcaaggtctttattacgtcacagaaccacggattcaccattgacaaagaatccctgaaagagaccgacctggtactcacccagatcaacttgaatgacggaacaccagaggggatatcccataaggaactgccattacattgtatccagtaccaccctgaggccggccctggccccaacgatacacggaatattttcgacaaattcaaccaaatgatggacgactactga

SEQ ID NO: 8622 - DNA, 1521 bp, synthetic construct
  source 1..1521: mol_type = other DNA
atggatgccaaatctgaggagatattcaagaagcacctgaacaactcgaaagaatatgtcaagttcaagaaacttgtgaatgaaacccgggtttacgacattccaaaggagttgaccggggagttacgggcctaccagaagatcggttattcctggatcgtgcagaacattaaatataactttggatgcatactcgctgacgacatggggctggggaagaccatccaggtgctcacggccattctgcactttaaagagcaaaaacattacgattatgagccatccctcatcatagtaccccctaccttgctgtccaactgggagaatgaaatcaaaaagttcacgcctacactttcctactatatttaccacggcgctaacaggacattccccctggacgagtacgacatcatcctcacctcatatggagtcatcagactggatctggatatgttcctggacaagaaatggttcatctgtgtgatcgatgaggctcagaacatcaagaaccccaacacacagcagaccaaagccatcaagagtgtccccgcatttaacaagattgctctcacaggaaccccaattgagaataagctaactgactactggtcaatctttgattttgtcaataaaggctacctgagtacgctggacaatttcaagagagattacgtttttcgcatcgagaggctagaagagacctcaactctcgagaattttaagactatcactaagccatttgtgcttaggcggctcaaaactgacgacaacatcaaggacgagctgcccgacaaaattgtgaacgacatatactgcagcctaaccaagaaacaagtactgctctataacgcgatcatggaaggcatttttgaggatttggaaggcaagacagggatcgaacgcaaagggatcatcctcaacattataactggcctgaaacaggcctgcaatcacccggcacagtacctccgtagcgacaaccctaagattaacgaaagcggtaaaatggagctgctgatcacaattctggagaatatcttggatgtgaatgaaaaggtcataatcttcacccaatatgccaagatgggggagattattaagaagctggtgtctaagaaactgaagacagacgtgttattcctacacggctcccttacacaggaaaagcgaagcgatataatcagcacgttccaggaagacgaagaccataaaattctcgttgcaacccttaagacgggaggtgtgggcttaaatctgactgccgcccagaatgtgattcactacgacttgtggtggaatccggccatagagaaccaggcgaccgatcgggttcatcgaatcggccaagaaaaagatgtgatggtctaccgcttcatcacaaaaggaaccctggaagaagtaattgacgagatgagcaagaataagttgaacctggctgaaaaggcaattagcaacgatgagactttcatcaccgagatgagtgatgaggagctgaaggagaaactttcgctcagactgtga

SEQ ID NO: 8623 - DNA, 825 bp, synthetic construct
  source 1..825: mol_type = other DNA
ctggacagaataattgaatacatgctcgaggaagacaagggatttggcgacattacgagcgaagcactggtggaaaaggacctggaggtgaacgcctacatcatttcaaaggatgaggggattctggcaggaatgaacattgtcaaagacctattcgaggagtttgacgtggaagttgtatataacctggaggatgggtccaaaattacaaaaaaagacctgctcatgtctgttaagggtaatgcccgcacaattctgctcctggagcgaaccgtgctcaacttatcaatgaggatgagcggagtggcctcggccgctagttactattcctctctcgtgaagaatcacgatgtgcggatcgctggtactcggaagacctccccagccctggctaagtttgacaaatatgcactcaaggtcgggggcgtagatacccaccgcttcagcctggacgatatggtgctcataaaggacaatcatatcgccgtcttcaaatctcccttggacgctctgctaaaggcaaaagccaacgtaagcttcagcaagaaaatcgaaattgaggttgagacactgtccgatgccatagagtgcgtcaagaataaagcggatatcgtgatgctggataacatgagtggaaatgaggtcaaggaggtcatcgacgaacttgaaaagttaaacatcagacagaactcccttatcgaagtgtcgggcggcatcactgaggacaatatcatggattacgtggagagcggggtggacataatctcaatcggcgcgcttacccactccagcaggagtttgaacttcagtttgaagatcgagtga

SEQ ID NO: 8624 - DNA, 894 bp, synthetic construct
  source 1..894: mol_type = other DNA
atggagattatatttctgggcactagtagcgcggtccacagctatacgaggaaccaccctgccattatcctcaaggcattcggtgagattatactgttcgactgcggtgagggaacccagcgccagctgatctttgctaaaatcagtcccatgaagatctctaagatcttcattagtcattaccacggcgaccacatcctcggccttcccggactactgcagagcatgaactttcgcggccgggagaccaagctgacaatatacgggccaaaagggttgaacgccctgaaaaacgcgatcttgaacttgggctactgtaaaatcgacttcccaattgaatttattgaaattgggacagagaccatcgagtgttgcgaagagtacatcatccgatcccagcatgtcaatcaccaagtgccctgcctagcctatgctgtggaagagcttaagaagccaagattcctccgtcaaaaggcaattgaactcggcgtgcctgttggaccggctttcggaaagctccacaatggcgaggaaatagaaatcaatgggaaaatcatcaagccggagcaggtattagggcctgccagaaaaggaattaaaataacttacagcggtgatactgcgccctgcgaagagatgatcgatttcgccaaagactcaaccatcctgatccatgagtcaacctacatgaatgaggacgccgataaggccgaagagaacttccattccacctcttcggatgctgccaggatagctaagaagagcaactccaagcagctggtgctcacacacttctccacgcggtatgcaaccctggacgatctgcttaaagaagccaagaaaatttttaagaatacaaagctggcaaaggactttatgaaaatcgagatttga

SEQ ID NO: 8625 - DNA, 756 bp, synthetic construct
  source 1..756: mol_type = other DNA
atgaacatatcagtaactttgaataatcctgcatggacgctgatctatatcttgattgtgattatcgccacgagcttcctcacgcggctaattgcctttttgatgaacaagatgaaacggttccacaacaatgaggctgccatttaccttaccagagacatcataaactatataatctatttcatcgcgttaatgatcattctgcaattttttggcatcaatctggccggcaccctgctaagtctgggaatcgcaggtatcgctctgagctttgccgcgaaggatctgataagcaatctcttctccgggatcacactcattatcggcaagagtattcaggtgggggacacaattgagattaacaataagaagggcatcgtggaacgcataacccttaggagcaccatcatcagcgatgactccggtgtgaaaaagatcatcccaaactccaccctgacaaattacccctacctccatttcaagactccagaaaagtaccgagttgacatccagaccggactctcactgaacattgatgtcgaggagttcgagaaatacattgtcaagaaaatacttgagtatgacggaatcctgaaaaacccgaaaccctccgtgtacagcaagggcatcacttttgaagagactcagctcaaggtctcgttctgggtgaaagaatttaacagcaaggataagtacaaactgacaattaccaacgaaattaggaagttcacaaaaatgggggagaaggacgagtga

SEQ ID NO: 8626 - DNA, 918 bp, synthetic construct
  source 1..918: mol_type = other DNA
atgagtaataccctgcaaaaagaaatcctgaagctgaaggaggagaagaacgcaataatcctggcccataactaccagcctaaagaggtgcaggagatcgcagattttctcggagactcactggagctgtgcattaaggcctctgaaatcgacgacaaggacctggtcatcttctgcggagtagacttcatggccgagaccgcatttatcctaaaccccgacaaaaagattgttatcccaacacttgaggctgaatgtccaatggcccatatgttgcccgaggatgtgctgctgaaagccaaggaggaaaatcccgacgccggcgtgatcctttacgtaaactccattgctgaagctaagcagcatgccgataccctgtgcacttcggctaacgccgttaaagttgcccagagcttgccgcacgacaaaatactcttcggccccgataaaaatttaggaactcacgtcgccgataaaatcgacaaggtcatcattcctgtgcctaaggatggtcactgttatgtgcacaggctcttccacgtggaggatgtggagctcaagcgggagcaatacccgaacgcggagatcatatgccaccctgaatgtgatatcaaggtgcagaaggcctgcgataaggtgatgtccacgggcgggatgctaaaatacattgcaacaagtgacaaggaggaatttgtcattggcactgaaatcgacatgattacaagaatcaatgcagaggtacccgggaaaaagctgtatcccctgctggagggggctatttgtgaaaccatgaaattgcacacgcttgaaaaaatacgcgatagcctcgtcaacgaagcgccacaggtcaccttaccaaaggacgtggcggacaagagcaaaaaggctgtgcagcatatgctcgacgtgtccaagtga

SEQ ID NO: 8627 - DNA, 1029 bp, synthetic construct
  source 1..1029: mol_type = other DNA
atgtggggtgtgagtatttttcgagagctgaacattgagttcagcaattttatcatgagctctttcgaatttgaaagcggaagaatcttaaaagacgtcaacgttgagtatagtacaatgggattccccaaatatgatgaagacggaaacatcactaatgcgattgtcttctgccccacgcttaagggggagagatctgtgttagccaacctgcataacgccctcactatggataatattagcaatgatgatgagtttgcttttatccgcgacaagaagtatttcttcattcggatcgtgtcactaggctcgccggagtcatgttctccttccaccaccgatctgaagcacaacttccctaactacacattcagggactgcgttaacttcaaaaaacagttcctaaaagagaagtttaatttggactccgttctggctattgtgggcgagggcgtcgggggctgcgaggtcttcacctgggcctgtgaatatcccgactacatggagtttatactctccatgaacaatctggccaaactatccggcacaagttacatctttttcaagagcatggagagtgtacttgagtccaacgataagatctatagcgatgtctacgacccatctctctccaaactcgttgtggccgtgaacaagatgctgttcttgaattacttgagccgcaacatgctgtccaacctgtcaagggacgagcttgacgcgctgctggacaactttgtcgaagatggtttgttccgggacgtgcacgacctcaagtacctttgcgactgtctcctggagtacgacgtgaatgacaaactgagcaatataaaggctaagaccatcctgatcgcaatcgaaggccaatttctcgtcaacgtggagaaggaagtgctgccactggaaaacgcaattgacgatgtggaggtaatggtgatccagctggatgagggggaatttgataatggggagtcatacagctcggtgttcaagatatttagtttcctcaatgaatacggagtagaatga

SEQ ID NO: 8628 - DNA, 279 bp, synthetic construct
  source 1..279: mol_type = other DNA
gtgattgtcaagattctgaactacggggacgtaggtaatctgaaattcattgagtacggcatctacggactgcttagcacacagatcgactatctgatggaaaacctcgaggaggaaaccagcatcaacgaggatgtgctcatcatcaagatgtattttgaatccaagctgtaccccttccagagcggcgccgcaaaattcaggctcgacgatttcgtcgctcgggaggaaatagagatggccatgtttttgtcaagttttctagaggacatggtgtga

SEQ ID NO: 8629 - DNA, 1011 bp, synthetic construct
  source 1..1011: mol_type = other DNA
atgtgggggatcattatttacgatgagaactatttcataagcaaaaacgagtatttcacactcaatagttttgaatttgagaacggcggtgttctgaacgacgtgaacgtggagtatatgtcattcggaactccaatttacgacgacaatggcatcataaagaacgccattgtctattgccacggatctctgggcagttacagctcaatcaaaaaacttgcccccttacttggcgagaacgatgctttcgacgaaaataagtacttcttcatctgtattagtgcgctgggatcgccagggtcctgttccccctccagcaccgatctgaaaaacaaattccccaagtactccatccgcgatgtggtaaagttccagaagaagtttctagctgagaaattcaacatcaatcacgtgctggggatgatcggtaactccatggggggctttgtgtgccttacgtctgcaatcaatttccccgactatgcagactttatcatttgcggcgtcagtagctacaaggtggcggggcatgatttcatactaagccaattcgttaatgaaatcattgaatctgacccggactacaataaaggagatttgacctacagcctcattagaacactccggatcgcctgcttggctgagtttaactttggactgtccaagaaggccctgagggacatgagcaagatcgaattatcctcggaatttgagaacttcggcaacgaaagtatcgagaccgacatctacgacctcaaatattgtaatgaggcatgcatgtactttgacgtggaagaagagctgggcaatatcaaatcaaagaccctgatcatcgcctgcaaccaggaccctcacttcccacctgagctcgatgccattcctatgagcaagatgataaatggcagcaagctggtcataatggattcagacctcgggcatctgtgctttaacgaactggatactattagcaacgagctgaaggagttcatggagggattgggtgattgttga

SEQ ID NO: 8630 - DNA, 783 bp, synthetic construct
  source 1..783: mol_type = other DNA
atgaagtacaagatcctggagaagcccagctgcgaggatgggtacgatctggtccaggaggctctccgtaaaaagacaacgatactaatcttcgcctgctgtaaggttagttatgagggaagggcgctctccgaactcaactggggagagcggatcatcatgattaaaccagatggaacattcctgatccatcaagagaagaaggtcgaacctgtgaactggcagccacccaaaagccggaccagatcctacattaagaatgacaatttgttccttgagagccacaggcgcactcccaaggaattgctgacggtggaaattagaaaaatccagtttataaactatgcaaacatcgaagacttcgaggagctggaacaggccggctatgaaaaagacatgggtgacatgataatggagaaaccacacatgatcgaggaaggttttactcctaccgcccgcgaatactccgtggagcacgggttcatcgacattctgggcaaggacagtgataacaatttaatggtgcttgaactcaaagcccgaaaggctggcatcaccgcagtgaagcaactgcgaaggtacctacaggaccttgagaataccgacaacgattacctcaaagagtgcgaatcgcagaagaaaaaaattagaggcctgctggtggctccttcaattatggacgacgcgttggagctgctggaaaacgaggggatcgagtttgtctctattgagccgccccgggagctgaagcgcgataagaaggtaacactcgatgccttttga

SEQ ID NO: 8631 - DNA, 480 bp, synthetic construct
  source 1..480: mol_type = other DNA
atgcttagtgaagaaatgattgacattaatgatataaattatgctatctacaagatcgggcattgggagaataactacgaaattaaccaaatcggcctgtctaacgaaatcccggtgacaaagaataccctcaagcacgtcaaactttcaatggtggagattcggactagcaggttcgagctgagcgacaaaatcgtgaacggatttgtcgccatagcaatccacttaaattccaacgtgcagaacatggagctcgatgagctgatcgaactggaggaaaaagagtatcagaatattctgaaggagctggataacctggagctcttggacgataacgaatccatccccttggactcggaggactatctcatctacaaactagaaaaagactgccatgtaacgaagagcgttccagccaacctgtacaccataaattaccacaacaacgagctgaagaagattgaggacgcgctcgattga

SEQ ID NO: 8632 - DNA, 693 bp, synthetic construct
  source 1..693: mol_type = other DNA
gtgaagaagtgtcccgaatgcgggaatccttcctatgacggggccccagtgtgcggtaactgcggatataagttccccaaggctaaaaattcagtgcccaagggagaggacatcttcaaaaaagagcacaaaaaggagccttccaacgacgaaagtacactgactattatcaagcagaagaagctaatcattggcataatcttagttatcactctgattttgatttgtgggatctttctgacgggcagcaccaataagagctcaccgatccagaatgtggacacagaaaaatacagcgcaggctcctttagcttcaagtacccaggggattggcaggagctcaaccagacggacgaagagcacccaggcgccatcttttataaagcggccaacaacacaaccgttgaatattacaacgtcagctccagcgcaagctcgcttaaagagatcaaccagaataggatcacccatgcccaaagtgtgggcgcgtcggtcacccttctggagaccataactctcgatggtcgcaacgcctcaaacattatcctggagaacgctgatggcaactacacccggtacgtgagcatgttcagtaatggagagctctacgtattcagactgtctggagattccgtcaactccatcacatctgacgaaattaatagtgtgataaatagcgcagacattgcctga

SEQ ID NO: 8633 - DNA, 828 bp, synthetic construct
  source 1..828: mol_type = other DNA
atgacaaagatcaagctcgccctgtgtcaaatgaatgtggtggacaacaaaaaagaaaatatcaaacgggcccactcaatgattaaggagagcgtatctaagaacgctgatttcataatcctgcccgaaatgttcaactgcccatactccaacgataagtttattgagtacggtgagaaggaaaacaatagcccaacccttaacgagatttctgaactagctaaaaccaacaaggtctacattctcgccggctccattcctgaacgcgaggagaacaaactgtataatactagctatcttttcgacaagcagggaaatgttatcgcaaagcacaggaagatgcatctgtttgacatcgacgtgaaagggaaggtcacattcaaagagtccgatgtgctgaccgcaggcaataaggttactgtcgcggagaccgaatttggaaagataggcatcgggatctgctacgacatccgtttccccgagctggcccgaatcatggtggagaacggagccctgatcttggtgtatccgggtgctttcaacatgacaacggggtcttcccactgggagctgctcttccgcagtagagccattgacaatcaggcattttgcattggcgtggcaccagccctcaataaaaacgcgagctatcacagttacgggcattcgatcattgtaaatccttggggcaaagtcatcgctcaggccagcgaaaaagagagtttgatcatctcagaaattgatctgaacgaaataaagaaaataagggaggagttacccctcataaagaacaagagaaacgacatctacaagatcattctacggtga

SEQ ID NO: 8634 - DNA, 849 bp, synthetic construct
  source 1..849: mol_type = other DNA
atgtctaacctcagttttgatgaggctatctcgaacctgtccgctgaggatgttggcgttagaaaagaggccatcaaatcattggtgggcattacagacgaaaaagctatcgaacccctcattaaggccaccactgatgataacgcacaagtccggttcaaagcggccgaaatcttaggaaatatgggtgatctagccgtggacaaacttatcaacgagtttaataatgcggaaggcaaggataagagattcttggctttcgcactgaaggaaacggaggacaacaggatcattccttacttcgtggaggcaaccgaggacgacgacttcggcgtgagaaaagtggctgtacgcgccctgggagagctgcaggccataaacgagctggagtcaatcagcaagtgcctcaaggacgaagactggggggtacggcttgctactattcaggcgctgggggatttcgcaaccgatgagtccattaagctgatcaaggacgcccgcaagagtgaggatgacaaggacttcaagaagtcttgcaataaggccatcaaaaaagccgaaaaacgccagaaagcaaaggcaagcgggaaggccatagtcaaggtcattccgatgagcaccattaaggagatggagaagagcaatatacagaaagccatcaaggaatatgagcgatatgtggaggccaagcaggcaaaggacgctccatacaagcgactatgtgtcctctacaggaaagccaacgactatgagaacgaagtgagggtgatcgaaacagctatcgaagtgtttgccgataacgacaaaaagctgtcctactttgagaaacggctggcgaaactcaagtga

SEQ ID NO: 8635 - DNA, 771 bp, synthetic construct
  source 1..771: mol_type = other DNA
atgaaaaactatttcgatattaaagacaaggtggccgtgatcacaggggccagcagcgggctgggctggcagattgcccaggcatatgcaagccaaggtgcaaaactcgccctctttgcgcgaagagaggaaaggctgcaggagaatatcgctgaaatagagaaagaatttggaaccgaagcgatctacgccgtctgcgacgtaggcaattacgacagcatcactgaggctgttgcaaaggtgatggatgcttatggaaggattgacattctcgtgaatgcggcaggcatgggaaacaacaagatggtgaccgaccaatccaacgaggagtgggaacgccacatccacatcgacctgagcggtgtgtattacatgtgcaaggctgtgggagaggtcatgatcgagcaggaatacggcaaaatcatcaacattgggtcaatccattcgcgggtgatcttcccaggcggaggcattagtgcttactccagcgcgaagggcggggtcatgaacttgaccaagaacctggccgttgagtgggccaagtataatatcaccgtaaatgctataggccccgccgtcttcgagacagaactaactgtggattcaatcgagatggatggctttatggatcttattaaggcctactgtcctgccgggcggcttggtaagccgggggagttagacggcatagctatctacctggcctctgacgcatccagtttctgcacggggcagctgatttgtattgatggtggatggacagccatatga

SEQ ID NO: 8636 - DNA, 2598 bp, synthetic construct
  source 1..2598: mol_type = other DNA
atgatcgaagagcagactaagatctactcaaagaagcagatcttcaaaaccctgcacccatgggtgcagaagtggttcgacctgcaattcgaggattttacaccggcacagaagaagtccatcatagacatccacaagaggaacaacatcctcattagcagcccaaccggatctgggaagaccttaaccgcctttctctccatcattagtgagcttacaacactggccgataccgatcagctcgaggataaggtgtactgcatctacatttcaccgctaaaggcacttgacaatgatattgaaaaaaacctagaagagccactgaagggaatcgaggagatagctggcaaggatcttggaatacgaaaggctgtccgaaccggtgatacgtcgcaatatcagaggcagaagatgcttaagaagcctccccacattctcatcaccacgcccgagaccctgtccattctgctggtcgccccgaagttcagagagaaactgagcggcgttaaatatgtgattgtggacgaaatccatagcctcgccgaaaataaacgtggagttcacctgagtctgtccctcgagaggttgcaacacctcattggacaatacactcggattggcctttcagccactgtaagtccgctggaggaagttgccagattcctggtcgggtacgagtacgggattgagcgggactgcaagctcgtgaagatcaactatctgaaagagctggatatgcaggtaatgtgtcccgtaagtgacattgtcatagcggatgaagaagatacgcggctggggatgtacgatctgctagatgatctgatccaggagaataaaactaccctgatctttaccaatacccgcagcggtacagagcgttttgtgtataacctcaagaagatgtatcctatgaattataatgactcaaatatcatggcccaccactcctccctgagcaaagaagtccggctggacacagagaacaagctgaaggagggaaagctcaaagtagtcgtttcgagcacatctcttgagctgggaatcgacatcggatacattgaccttgtggtgctgataaactcacccaagtctgtggcacgcgccctgcagagaatcgggcgcagcggacacaagttgcatgagaagtctcgcggcaggattatcgtcacgaatagggacgacttggtggaatgctctgtgttgctgaaaaatgccaaagagggcaagatagacaatatcaacatccccactaactgtctggacgtgctagcccagcatatctacggcatgagtattgaaaacccatgggacatcgattacgcttacgacgtgataaaaaagagctactgctacaaaaacttaccaagggacgactatgaagatgtcctcagttacatggccggcgaataccctgagcttgaggagcgatatgtttacgctaagatttggattgactataaagagaacactttcggcaagcgggggaaactggccagaatgatttattccaccaatattggaacaatccctgatagctctggggtgttggtcaaatgcgacggtgaaacggttggaaagatcgaagagaacttcatggaaagactgaagaaaggcgacactttcgtgctgggtgggaggatctatcgcttcaactatgggaaaggcatgacaatcaacgtcactcccgcaagcggccctccaactataccttcatggttcagccagcagttacccctgtcttttgacctggcaatggacatccaacggttccgctcccatatggagaccaaattcgagtatcgacggagcaaggaagagatcatggacttcatttttgattacctgtacgtggatgattttgcagctaattccatttatgaatatttcgtggagcagtacaaatacgccaagattcccagtaaccgccttctgctcgtggaatactacaaaggctttggtggccgcaacttcgtcatatttcattcacttttcggccgcaaggtcaatgacgccctatcccgggctgtgggttatgtggttgcccatcagtacaacacaaatatcaccatttccattacggacaatgggttctacttgagtagcgatgggaagatcggtggattggagagtttcaagcagctgacccctgaaaacttcgagacaatcctcactaactccctcaacaaaacagagacactcgcgtcgcgatttcggcactgtgctggcagatctctcatgacgctaaggaagtacaaaggcgaatccaagtcagccgggcggcaacaggtgcgtggcaagatcttgctcaagtttgtgcaggacatggacgacaacttcagcatattaaaagaggctagaagggaggcgctggaagattacatggatatcaaaaatgctttgaaagtaataaacatgatcgacaacgagtccatggaaattaaaaccatcaacaccgtgattcccagcccatttgcgtttaatttagtgtcgcagggctatctggatatcctcaaccagaatgacaaggcggagtttaccaaaagaatgcacaaggcaatcctggatcagatcaaggacaaattgaaggacatctactga

SEQ ID NO: 8637 - DNA, 462 bp, synthetic construct
  source 1..462: mol_type = other DNA
atgaaaaccctgctcgtgtattattccaggacagatgtaactaagaagatagccaaaatgattcaggagaagattaactgcgatatcgaagaaatcacggacgacgacaagtactctgggaagctgggatttcttaagggtggaatgaatgccagtatgggccggacaagcgacattaacatcatcagcaagaatccgaccgattatgatctaatcatcattgggacacctgtgtgggcgagcaatatagctactcccatttacacatacctgatgaaatacaacaaggacttcaaaaacgtcgcctcattctgtacctgcatgggcaacgggtacgaaaaaaccctcaaaaatatctcggagatcacgggcaaggagcagatctccaccatgtttttcactgcagaggacattaaaaacccagaggagaagataaatattttcatcaacgaaatcaagtga

SEQ ID NO: 8638 - DNA, 369 bp, synthetic construct
  source 1..369: mol_type = other DNA
atgactaagtggaaagccgtgattatcgggttcatcctggccgtcatagtcaaatcatttttcgcacagtatgagtttattggactgctgtttgtgggcttcatcacaggttacatcgcccacgacggcgccctttccggcctatggaacgcagctgtggccggagcactgggcaccattgtgtgcgctatcttatttgtgctggttgccacgctcgggggcagtctgttcgggatcttcggcggtctcactggattcaccctctccggaattacaagcataaccattgtccttggttacttgatctactatagcatcgtaatgggaatcaccggcgcgctgggggggattatagcgtctaagaagtga

SEQ ID NO: 8639 - DNA, 408 bp, synthetic construct
  source 1..408: mol_type = other DNA
atgaatatgtttagcgagattaatatcaaggccctcgtcttcggagctgccatcgctgccgcatgcattctgatcggataccagtactgggattggctctatcccttcagtgcgataggactaatctatgcaggctacggacagagcaacatcaaaattgggactgcgatgggcgcactggcctccaccccagtagccatactgacactccagggctatttgggcacttttaaagaagggttcttcacgacagagaacggcattcttgccgtgaccctgaccgtcattgctgtgggggcctttatcggtttcgtgggtgcctgggctaagcgggaccgcatcaaagcactggaacaatacaatcaaaagcagaagatcgggaaaaacaaaaacaagaagcagaagtga

SEQ ID NO: 8640 - DNA, 1092 bp, synthetic construct
  source 1..1092: mol_type = other DNA
atgggaaaggtgaagaaggaggatatcttggatatcctggctaagtacgacaaaagtgaaataaccattgctaccctgggaagccacacctccctccatattctccagggggcaaaagaggagggctttagaacagctatcgtttgcgagaaaggaagggagattccataccaacggttcgatgtggcagacgaatacatcctggtcgataagttcaaggacattgtgaacgaggacgtgcagcagaagcttagagacatgaacgccattgtggtgcctcatggatcgttcgtcgcctatgccggtttggataacgtggaagacaagttcaatgtccccatgtttggcaatagggacgtacttcgctgggaggccgagagggacaaagagcgacaactgctggtggaagggggcgtccgaataccattcaagtataatggtcctagcgagatcgacaggccagtcatggttaagttcccgggggcgagaggcggccgggggtactttgtggccagctccacggaggagtttgatgctaagatcgaagctatgaaagcccggggatggctggaagataaggacgtcgaagcggcacacattgaagagtatgtttccgggtgtaactactgcatacactatttctactctgcactggacgacacggtggagctcatgggcatggacacccgctacgagtccagcattgatgggtttgtaagaatgcctgccaaggatcagctcgacatcgacctgagtccctcttatgtggtgacaggcaaccaccctgccgttatccgtgagtctctactgccgcaggtcttcgatatggccgataaactcaccgagagcgctaaaaagcttgtggcccccggactgaacggccccttctgcatgcagactctggtgaacgacaatttggaggtaatctgttttgagatctcagcacggactgacggcggtaccaatacattcatggatgggagcccctactcatacctaacttatggtaaaccaatgagtatgggccgccggattgccctcgaaatcaagcgagcgatcgaacgcgaagagttagaaaaaataatcacatga

SEQ ID NO: 8641 - DNA, 531 bp, synthetic construct
  source 1..531: mol_type = other DNA
atgctcatcggcttaatcagcgacacacacattcccgatagagccaaggagatcccgcagaaggtcatcgacgcttttaaagatgtggatctgatcttgcacgctggagatctcacctccatgaaggtgatcgaggaattggagaaaatcgcacctaccatagttatacagggaaatatggaccgcatcaatgggattgacctgccaaaaacaaaggtaatcacggccgaagacctgaaaattgggcttgtgcatggcgaggtgtacccccgggccgacactcaacagctgctgtatattgcaaagcagcttcaggtcgacattctcgtcagcggccattcacaccagccaaagattgagcaaatagagggggttctcctactgaaccccggcagtcccatcgtgccacgactggccgatcggaccgtgatgctgctcgagattaacaagcaggaagtaaacgtggaaatcaaaaagatcggtgcgcctgtctgcagcgccctggacttcgacaaatacaagagggattga

SEQ ID NO: 8642 - DNA, 639 bp, synthetic construct
  source 1..639: mol_type = other DNA
atggggagccgttggcagatggaaaagcacaacgacccgtactacaagaaagcgaagcaggaggagtatcgctcccgggccagctacaaactcaaacagctggataagaagtacaagctaatcaaggagggcaacacagtcgtagaccttggcgcagcccccggaggctggagtcaagttgctctggaaaaggtgggggacgaaggtattgttgtgggagtggacctgaatagattcaagaagttccatgaggagaattattacgggctcaggggggactttacaacccctgaaattcaagaaaagatcatgaccctcataggcggcaaggctaaagtcgtgatgtccgatgcctcaccatccttgtgcggaatcaagaatattgaccagcttaggtctatcgatctggtgaatgtggtcatcgaaattgccgagaacatattagaggaaaaagggaatctggtaatgaaagtcttccagggtcccgagtataaaaacatgctggatagcttgaagggaaaatttcggcacgtgagaactacgaaaccagcaagctcgcggaagaagagttcagagatgtatgtgatcggcctggagtacatgcccaacaagcgaaaccgcaagaaaaggaaaaactga

SEQ ID NO: 8643 - DNA, 420 bp, synthetic construct
  source 1..420: mol_type = other DNA
atgagaaagtcccgcctgagtctattcaagtctactagcatgatgatttcggtcgttggaatcatcatgataattagcaccattatcgtcgtggcatacgtggggtatagcatcgtgtcatccagtatcaccaacgatatatcctctggcacgcagtacgacgagcttgcagagctgaaggctgagtacagcaacttgagcgtgaagttcgacaatatcaagtcaacatattatgcaggcgacgctgatgacgtgaaagtgtacaacgatgcgaaactggagctgtcccgggccaattccgccattgaaaacgttcagagcgcgctggacgccgataaaccctcgaatgacgtcgacagcaggatcgtatttgccaaagaaaagctcgagtcagccgaaaaggcctacaacagtctctga

SEQ ID NO: 8644 - DNA, 2004 bp, synthetic construct
  source 1..2004: mol_type = other DNA
atgaacagtactaccaaatcacaaaccagcattgcaaagttcgaggaatttttcgccacatcgtataaggacgacgtattcaagatccttgagcaataccctgacgaacgatcacttaacgtcgactaccgtgccctcgagatctttgatccggacctcgcagacctcttgatcgataaacccgaagaagtgatcgatgcggctaagatagccataaagaatattgacccactggtgaaagatgctgacatcaacatccgctttgagcatctgtccaacattatcccccttaagacactgttaagcaaatacatcggtactttcgtggccgccgacgggattgtcaggaaaacggatgagatcagaccccggattgaaaccggagtgtttgagtgtcggggttgcatgagactgcacgaggtggaacaaagcagcgcaaatagaataatagagccgagcctgtgtagcgagtgcggaggacgatcattccgcctgcttcaggaagagtcaaagtatgttgatacgcagactgctcgcatgcaggaaccgctagaaaatctgtctgggggcactgagcccaaacagatgttgatgatcctggaggatgatctggtggacaagctcaaccccggcgataaagtgagaattaccggcacactgaaaactttccgcgaggaaaggagcggcaagtttaaaaattacatttatgtgaatcacatcgagcccctggagcaggaatttgaggaattgcagctctccgaggaagatgaggagcagatcatcgagctgagcaaggaccctaatatctatgataaaatcatcaaaagcacagccccatccatccggggatatagggacgtcaaggaggcgatagccctacagctgttcggcggggccgctaaacagctagaggacgagaccaaactgaggggagacatccatatcctcattgtgggggaccctgggatcgggaagtcccagatcttgaagtacgtgtctagactcgcgccaaggagtatttataccagcgggaaagggacaaccggtgcaggcctcaccgctgctgctgtgcgcgatgagctgggcggctggtctctggaggccggagcactggtgctcggcgatcagggtaatgtttgcgtcgatgagctcgacaagatgcgctcggaggatcgatctgcactgcacgaggctttagagcaacagaccgtgagtattgcaaaggcgggcattatggccacccttaactccagatgctccgtactggccgcagccaaccccaagttcgggcggtttgacagatacaaggtgctcgccgagcagattgacctcccggccccaattatctctcggttcgatttgattttcgtcatcgaagacaagccaagtaaggagcgagatagcaagttagcagagcacattttaaagacgcaccaattcaacacggttgactacgagattgagcctgaactgcttcgcaaatatatcgcctacgctcgtaagaacgtgaacccacgcctgaccgaggaggcgaacgaggtgctgaaagagttttacgtgtcgacaaggaacagcaatcctgaagaacagggagccgtgcctatcactgccaggcagctagaggcaattatccgtctgtccgaagccagtgctaagatcaagctgaaagaaacggttgataaggaagacgccgaaaaggcggttcggctgcagctcgcctgtctgaaggaggtgggggtcgatccagagactggagaactggacgctgacatcgtatccggcggtacacccaagtcagacagggacaagatacaacgggtcacagaggaaatcaagcagcttgaagaagagtacgccggccaggctcctttgaacgtactcatatccaatatgagcgacaaatatggcgtcagtgaagacaaaaccgaacagattgtcaagaacttggtccagaaaggagtcatataccagcccgtgaatggctacttcaagcgggtggtttga

SEQ ID NO: 8645 - DNA, 408 bp, synthetic construct
  source 1..408: mol_type = other DNA
atggacaagtacgaagacctgctggaacgggcaattgaccaactgccacccgaggtgtttgagcataaaaggtttaaaatccccaaggcttacagcgatattcagggcaataggacgttcatcaaaaacttcaaggatgtagccgaaggcctcaaccgtgatccgcagcacttactcaagttcctgatgagagagctaggtaccgccggaaatatcgagggccagagagcgatccttcagggaaagtttactcactacctcataaacgagcggattgaggattatgtggacaaatatgtcatttgccacgaatgtaaccggccagacacccgaatcatccgcgaggggcgcatattcctgcttaagtgcgctgcctgcggggcaacagcccctttgaagagcctgtga

SEQ ID NO: 8646 - DNA, 1044 bp, synthetic construct
  source 1..1044: mol_type = other DNA
atgttctgtcccgagtgcggaagcaccgacaaaaaaatgattggcaacatctgcataaactgtttcctcaaagatttccagatgatcgaactgcctaagcggatcgaggtgcagatctgcagccattgtaactccaaacttgaagaaggaaagtggagcgaagaatttatccccgaggaggaaataatctacagggcactcgagcgaaacataaagattgatgacaaggtctccaatgagattatcaacctggaaatcgaccagatgaaaggtacaatcgccaagtgctatgtggagattgtgggtgatgtggagggaactgagatcgaggaaactcaggaaacggaggtcaagattcttaagaccgtctgtccaacatgcagtaagatccagtctggctattatgagtcagtcatccaattccgggccgataagagggagatcaaaagcgaagagtacgacaaggctgacgaaatagtggaaaaaaccctcatcaaacagctcaaaaatgacaagttagcctactgcccacaaatcgccaagcctaaggaagggcacgattattacattggctcactgaagagtgggcggaaggttgcggaggcgctcaaggaggagttcgggggcacaatcaaggagagcccccgcctgatctcggaagataagtctacgggcaaaggcttgtacagaatttggattagcgtgagaatacccgaatttgagattaatgacttcatcatgtttgaagataaactaattcaagtaactagtatcgataagaaccgtatcgttgggaacgacatcaagaccgggaagaagcagaacattccactgaaaaatatggagaaaattaaactgatcaaaaagtcatccgacattgagaccaccaccatcatttctatgtcgccttccacaatccagattttggacccggctgactactccgcagtggacctggagatgaaggatgagtttgccaattacaacattggagacgagatacgcctgataaaaatcgacaattacacgtatctgctaaactga

SEQ ID NO: 8647 - DNA, 963 bp, synthetic construct
  source 1..963: mol_type = other DNA
atgaacatagaagagaagatccagttaatcgaagagggaaccctggaggtgatagacacggaggagcttaaagaggtgctggccaaaaaagaacctatagcctatacaggctacgagccgagcgggaagatccacctgggacatgctgtgaccgtccaaaagctcaagcagttgcagaagctgggcttcaagataaagatcctcctagcagactaccatgctttcttgaatggcaagggcaccattgaggaaattgccgagaccgccgagtacaataagaagtgttttcaagcgctcgggcttgacgaaaaaactgagtacatttacgggtcaagtttccagctggagcccgactacactgataaggtctatcagttagccacaatgaccacgcttaagagagcaaggcggagtatggatcaagtctcccgagcagacgataaccctaaggtcgcgagcgtgatttatccgatcatgcagactgttgatatggctgcactgaaggtagacatcgctctgggaggtatggagcagaggaaaatccagatgttggcccgggagaacctcgagaagattggggaaaatgtgcccatttgcattcacacccccctgctgcacggtctggatggagatgccaaaatgtcatcctcgaaaggaaattatattgccgtggatgactccattaaagacatcacgaaaaaaatcaacaagagctactgcccccagggggagatcaaaggcaacccaatgatcgagatcgccgagacattcgtttatccaaacgaagaaaagctgctcatcaaacgccctgaaaagttcggcggcgacatcgaactcacacacgacgaactaataaaggaatttagcgaaggtaacctccacccaatggacctgaaaaatggcatcaaggatttcctgatcgagttttttgctcccgtgcgcgaatacatggaggagaactga

SEQ ID NO: 8648 - DNA, 210 bp, synthetic construct
  source 1..210: mol_type = other DNA
atggtcgaggagaaggaggagtttgaaatgggcctgccaaacggggtgggggaacagatgttggcccacgcattcgagaagttcgatatcaagctagagcagacagagtttggacccaaacttatcggcgagtacgacgaactcataaaggtgaaagagttcctggaaaccggaattagggaccggctcaaagaactggagggcgaatga

SEQ ID NO: 8649 - DNA, 579 bp, synthetic construct
  source 1..579: mol_type = other DNA
atgtacatcgtcttcgagggcattgatggggctggaaagtcaactcaaattcagctcctgaagcaatggctcgaggacaacgggttcagagtcgagacgctggtggaaccaacagatagcgaagtgggaaaactaatacggaagatactgcagcgaccagatgccactaccgacaacgttcagaagacactggggctcctcttcgccgcggacaggatgctaatcatggataagctggaagacaagtcgaaaataatcatttccgatcggtcatttatcagtagtttggcctatcaggagcctgtggactggattgaagtgctgaacaagtacgccaagaagccggacttactggtcctgcttgacttggatgttaagaagtccgtggcccgcaccagcggcgaggacaccttcgagaatgaggaatttcttatcggtgtgaaagacaactatctgaagctggctaaaaattacacctccgagattatcgacgcaaataacggcgtaaacaaagtcagcagcgatatcaaaaaagtgattgcaccctacctcggcatctgtcccgactgcatccagtga

SEQ ID NO: 8650 - DNA, 2535 bp, synthetic construct
  source 1..2535: mol_type = other DNA
atgaataatcagagcaggtgtaagaataagatggtgctcaaggagctgctcgctcccgcagggtcctacgatgtcttagtcactgcggtgaacgctggggccgacgcagtttatattgccggaccaaattacggggccagagcctatgctaagaacttcacaatcgaggagctggaaaaggccgtgaactacgctcacctgaacggtgtgaagattcatgtcacagtcaatacactcgtcaataactttgaaatcgcagacgtgttgaactatctgtttaagctctaccagattggagtggacgctgtgattgtacaggattttggccttatctggcttctgaagacttttatccctgacctggaagttcacgcctcgacacaaatgggactgaacaactacagtagcatcaaatgggcttcagacaataatatcaaacgcgtagtgcttcccagagaggttaacataaatcagataaaaaaaacctataatcagctgaagaaggacaacatctccatggatctcgaggtattcgggcacggcgccttgtgctattgtgtgagtggcaaatgctacatgtctagctacaatagcgggcgcagtggcaataggggcgcttgcgcccagccatgccggcgacagtaccgtctcaaatacagagggtacaatatcggaaacggatttctgctcagcacgcatgacctcgctacttacaagaacataaaggaaatctccaatgccggcgtgaaatctctgaagctggagggcaggatgaaatccaaagactacattgggacaatagtcaatagctaccgcaacatcattgatggcaaccccggaaactatgaaaaggacttgcacctggtgtttaaccggaactttaccagcgggtacattatgggcgacaagcctggggaagtcatgggacgagagagcagcggtcacgaaggactttacatcggcgacatcaccaacatcgagggaaccaaagtgactattgagataaagaacaaggaaattccggtgatcctggagcctggcgacggaatcgccttcaaatacaatgggaaaattaaggggatctatctggaaaatatcatcaaacaagatgaaaatgaaatcataatcgataccacccggctcgtgaaagaaggcactgaggtcttcatcagttactctagctcaacccacgagtatctgaaacagtttgaaaaagagaccattaagaatcacatcggccttaacctgagcctcacttgggacaaggaattgaacctgtacaccaaggtggaatactatgttgatggggagctcattaacttcaggcacaagtcgctggacatgttcgagaaagcaaaaaacaagcccgtcgacgagaagacaattgagaatcagcttaacaagacgggtgaaacaccattcttcattgagaagatccagtttaacaacatgccgaacgacatgttcatacaaattcggaagattaatcagatccgacgggagatactagataacgccaccgagttgctgatgaaacactacaccccaacgaagaaggcagtgaaggaagtgcggaagaacctcactaagtttttcgaggactatgagaataacaaagggaagatcaagcaaaagacacccaaattgtccctattcatcgatgacctaagccagataagagcggcctcaggattcggcttgaaacgcatttactttgatggtacctgccattataacaacccagatgattattttaaaaacatcaaagacaccctgatgaagggcagtctgatggcgtcccctaccgagtttgtttgggttctgtcctccttcatgacacagaaggacgccatcaaatgcaacgagattgttaaagagctggaaaatgagggaatcatcatttctgtcatgggcgacttccccggcatgaatgacatcttcgagtgccctgtatatggtaaccataatctgaacgtgtggaatagtttttgtgtcagagatttaaacgaggccggtttcaagagcctgatcttatcatctgagctctcagggcatgagattaaggaactaatccgtaggaatcatgaccgcaacattgacctcgaaatgattgtgaatggaaacctggaggtgatcgtgagtaaagatgacttcacgaacctgaatgacggtaaggatttcattatcagcaacgatgcggactacgcaatcctagaagataagaaaaggaaaaagttcaagtacaaggtgttcttcgactacaaccggcagtcccacatcatcaacaaagattgtctttgtctgatcgaggagataaatgagattaaggaatttggtctggattcattgattcttgattgccgctattctaacgagaagtatactacgcagatattatcgatttataacgaaagcctgcataataaggatcaagatgagctgtccaaatacaaatatcagatcatggacttcagccagtcctacataaacaagggcaattacatcgaaggcagactccacgaggacaagaagtga

SEQ ID NO: 8651 - DNA, 2418 bp, synthetic construct
  source 1..2418: mol_type = other DNA
atgaggattcccgaactactggcccccgtggggtcaatggaccacctcaaagtggctatcaatgctggggcgagttctgtgtacctgtctggcaaggaatatggggcccggaagtatgccaccaacttcaccttagacgaaatcaatgaggcagtcgacacagctcatatacacaatgtgaaagtgtacgttacggtgaatacactcatcaaagaggacgaactggaggatgtcatcaactatgtttccaatctatatgccattggagttgatgctgtgttggtgcaggatctgggattggtcgagttgatcaacaagcacataccaaaactgaagattcatgcctcgacacaaatgacctgtgagaaccagctgaagctgaattacctggaacaaaagggaataaagcgggttgtactcccacgtgaaatgagaaaagaagagatcaaaagcctcaatacaaatatggaacttgagatatttgtccacggggctctttgttactcgtactcaggccagtgcctgatgagtagtttcaaaggtggccggagcggcaaccgcggaacctgcgcgcagccttgtcgccagaaatataaaatcgaggggattggaaaagagaactactacttgtctccctgcgacctctccctgtttaacaaactgaaagaaattctcgagctcaatattgactgtatcaaaatcgagggcaggatgaggaacaaggaatacctggccattgtaattaacgcttaccgtaaagcattgaacaaactgaagagtaaaaaggagattgaaaacgagaacatcaatcttgtattcaatcgcgggctgtgcgagggcttattcaatgattcgccaaaaagaagcctgaaagccggacatatcggtctgaagattgggcacgtgataaaatccgagaagaatcaaatcgccatcaaattagatgattccatcaagaccatacctgagaagggcgatggattgctgataatcaagaataatgacgactatgggttcgagatttcccagaacccaatcattacctccctaaatcacttcaagaccggtaaaaacaagccaatgaagaacctgacccggagagacaagatcctgattgtgaagaaggtttggcaaaacaagaagagcacgtttaatctgaacgaatccgacgtgtacctgacgaagaaaaacaaactgaccaaaaaggtgaaagagatagagtcaaagggcagcagttttatcaagtccaagttagtactcacattttccatcaaaaacaagtatccaactcttaagggcaagctgacgcttcagaacaaaaaggaggtggaaagtgaggtgattggcaatactcccttcgaaaaacccatcaagaagagcattaatcgagaggtcattaagaagcagctccagaagatcgataactacccttacaacatcattcagattaacatcaattatgacggaactctctttattcctataaggaagattaacgagctgcggcgcaatctgttcgagcgcctggagaaggaggccatcaactcctttaaacacgaaaacaagaaaattaagcttaagcagtacaacaatgagactaatgagtccaaatacaacatctctttttacaccaacaacctcaagcacctggaacacatcgaaaacgtcgaaagagtgtatctagagatccctaataatgatgacagccttatcctctcagaggaaaagcctaacatcagttatatgattaactttatcaaacaggcctacgaaatttcttatgataaggattataagctgatctggaagtggcccgacataacgcacgacaacctcatcaaatcattgaacaaggtcaggggcatactgaataaaatgcattacaccctgcccattatgagcaactccttcaatggggagtacggcttctatagcatgaatatcacaaacaatgagaccatcaacagtcttaaggactacaagattctgacattatcaccggagctgactaaaaaggactacgagaacatcatcaagcattgccgataccccaagaaagtggagatcctggtccagggttcagtcgaactcatgaaaactcgatacccgctcctttatggtgcagaagtgaaaaagaactacaaaaactatctgattgacaagaagaacaacaaatacccgatccacaagagcattagctcgcaggaactcagcatcttcaatgacagcgagctctctctaatcaatgagataaagcatttgaagaacatcaattatagcaatttcgcaatagatggaagatacaaggacgatgaatactataagatgattgatatctacaactgcgcaatcaacggctacatcaacgaaaaagagttgaagaagtatagcagcaagaacacaatcgcgaactattga

SEQ ID NO: 8652 - DNA, 1926 bp, synthetic construct
  source 1..1926: mol_type = other DNA
atgcagagggaaataatcacattgcagaatattaagggcatcggtgacaagatctcagagaagatcataaaatcggttggaggtgagaaagagctccagaagatcgtggacaacgctgacgtggaaaaaattaccaacattgacggaataagtcagcggaaagccatcgacatcatgaaccagcttctgaacaacccgaaatctgagtttatcaaaagcgacagggctatggagatttacgaggacatcatcaacaagatcctggcctattctaacactagctattccaagaatcggatactgctgctttcaccttcaaaggatatcaaaaaaatcaacagccagctcgacttcgtcatggatgcaaaagagcacgtgtcaaagctgccgatcatcaagctgaagggtttgatgaagaatctaaaggaggtggaggaagtcaagaccgagtacgatccaagtaaggtcattctggttgagagcgaggaggataacagctatctgaccgatctgggcctgaaccagtactaccccattataacggcaagtgactcgcctctgctccaggaggagatgatgaattacgacttggtcttttacgtatattcccaggggatactggatttcgaggggatgccaaacctcatcatgataaatatcgaggataatgattatgagatagtgcctgaaaagattatcaatttcttcatccagaacaaggacctcttcacacgcgttcatgagatccaaaaaatccgaaacaaagactccgtgctgggcgaaatcgtccccatcattgatgagctcaatatcattgataaacgcgaagtcaacatcgaaaagctggtgtactccctgaaagaggacatggacaatgagctggagaagagcattaagcagattgatctagaggggaatgagatccttaacctcttgaacaataatttccctccaaagatttccaagatttttgacgacatcatcaacaagcggaaagatattatccgtgaaaagactggattgagcttcgacccattcctgagaacctatcccatcgagatcgacgatgctgagatccaacgcataacacttgagcagtcctctaaaaaagaaaacgatatttttgatattaaaagaagtgccgccattgaactgaacagcattaagaagaaagctattgaagaagtggaggacgctatcaagtttgactacgagtttagcttaggcagttttgcctacgaatatgatctgtgtcgccccaagttcagcgaagagatccagctaaccggagccttgcatctcgaactcgcacttaaaaaagacaaggaatttattcagaagatcaattaccaactgacgcaaaaggaaaacatttccctgctaacgggagcgaatagcgggggcaagacaacactgctggagactctcacccagatatcaataatggcgcagatgggcctccctgtgtgcgcggacaatgtgcaaatcaaattattcgacgagatttatcacttctctaagaaaaggtcactcgacgccggagcctttgaatcgtttctgaatgtcttcataccaattgtgactaccaatagtgagaagcttgtacttctcgacgagctggaaggcatcaccgaactggatgccgcagtgaagatcatctccaccttcatcgacatgataaaagaatccaactcttacggcgtaatcgtcacgcacatggcccgggagctcatgaactacactgatattcgagtggatgggatcgaagccaaggggttagatgagaagtacaacctgattgttgacagaacacccagaatgaacttccttgcaaaatccacccccgaactgattttaaagcggatctatgaaaaaagcgacgacaacttgaaggctgtgtactctaggattttggagaagttctga

SEQ ID NO: 8653 - DNA, 1482 bp, synthetic construct
  source 1..1482: mol_type = other DNA
gtgattttcctgaatatcaaagtattcgataccacactgcgggacggagagcagaccccgggcgtttctctgactcagcaagagaagctaagaattgcaaccaagctagatgagatcggcatcgactacatcgaggccgggagcgctataacgagcaagggcgaacggaagagcatcaaaggaattgcacagcaaggttttaacgcagaaatactcagtttctcccgccctctgagcgtggacatcgactattgcttggaatgtgacgtggacggggtgaatctggtggtgccaactagcgatttgcacatcagcgacaagctgaaaatcacacgggacgagctcatccagctgtccaacaacgctgtggattactgcaaggaccatggcctgattgttgagttaagcgccgaagacgcatcaaggagtgacacggatttcctgaaatctgtgtacctaagcgccataaaccacggggccgataggatctgcgtgtgcgacaccgtaggcatactgacaccagactcttcattcgaactcttcgataaactgaacgaggatattaatgttcccatcgctgctcactgccataacgactttgggctggccgtcgctaataccctctccgccttgaaaggcggggccacagaatttcacagtacaattaacggcattggagagcgagcgggaaacacttctttcgaggagtgtgtcgtgagcattgacagactcctgacaaatttctccactaatgtcaacattcatgaaatctatgacatcagcaagctcgtggccaggtcaactggggtgtacatccagcctaacaaggcaatcgtgggtgagaacgcctttgctcacgaatcaggtatccactcggatggcattatcaaaaactccgctacatatgagcctatgacccccgaactcgtgggccgtaaacgaaagtttgttatcggaaagcacatggggacccacgggctcgagaatagactgaaggaaattggcctgtccgtcaataaaacgcagctgcagcagatttgtaatgacatcaaggagcttgctgataaaggaaagaccgtcactgacgtggacttacatgtaatagcggacaacgttctggagataaatcatgaggataggattaagcttgatgagctcaccatcgtgtccggaaacaagataatgccaacggcatcggtgaaaataacctttgacgatgaagagattcttaacgccggagtcggtttgggccccgtcgatgccgccatcaacgccgtgaagacagttgacgcattcagtgacgtcgagctgatcgagtaccacgtagacgctatcaccggcggtaccgatgccttcattgatgtcatcatcaaacttcaaaagggggacaaggtcgtctctgcccggggcacggaacccgatatcatcaatgcgagtgtgaaggcgtacatttccggagtgaaccgccttttgcgcgattga

SEQ ID NO: 8654 - DNA, 492 bp, synthetic construct
  source 1..492: mol_type = other DNA
atgtacatggaaaatatccagatcttggggctcaagggcaccattgactccgtgagtgagactctcaacctgatcgacgggattaaagaagatagcgaaataatccagctgctgaatgcagattccattgcttcaagaaatcatatcatccacggcgtgaaccaagccattcttgccttcgatcggtgtgagaatctcgctaaggacctgagtgttgagatcgtacttcgatgcagcgcccagaggcagatttccaaggcgttcgagatcttgggtttaaaggagggatacatgaacctgtgcgcaatcctggtcaatagcaagaaccacacgtctgagctatcagaaatattctcgctggacgataacgtgtttattcccgacgacgagatactgatgaaaatctataaaattagcgatatcgagataaagaacatgtctctggaagacatcatcatcgaccgcattacaaaactcaccgtcaactactga

SEQ ID NO: 8655 - DNA, 954 bp, synthetic construct
  source 1..954: mol_type = other DNA
atgtttaagtttaagaccccatcagagaaaactcgacagaccatgtctaaggttgccctcggtaagaccaacatcaactttgaggagcgctgcacagaaaagatcaaaaggctcaccgagaaggaagaggtgaaaatcacgtcctccggaaacaactccatctttattgccctttcagctatcaagggcgacatcatcattcccgaccaaggagggtggcacggcttcaaacagattgcaaaattcctgaataagaacatcattacactgaagacagatttgggactaattaacccgaagtacatcgacgagctggacctcagagaggggtctgctctgatttatactagcttcgccggatactgtgccgagcaggacacgaagtccattgcaaagtattgtaagaacaacaacatcctaacgatcgaggatgctagcgccggcattggagatagtgaaaaaaaactgggcaaatactcggacataatccttgccagcaccggcagccctaagatcatcaacgtcgggcagggcgggttcattgcaagcaatgagagtgagatcttcaaagaggatttaatgccccagaaactgagcaagacatcagaaattgtctgcagtgggatagacagcgaactggacaacattgcggaaaagttgaatctgaccgtaaatgctaccaactacctcaagaagtatattaacaatgccctgcacccaaataagcggggtgtgaacgtgatcatactgcatgatgacgcgaaagcaatcggttggaatttgaagaagaagctgactaccgataaatcgggcttcatcacaacttgccccaattacaatcgggtgaaacaaaaggccatatccatagaaatcaaaaatctggactacaactgccttaaaaaagagcacctcgataagataatcgaagaaatggagattaacaatctccagtga

SEQ ID NO: 8656 - DNA, 1173 bp, synthetic construct
  source 1..1173: mol_type = other DNA
atgaagaccactaagaatgcttacctggccaaactaacggagcaaatccagatgaagtccgtcaaggtgggaaagaacctggagggcaccactcccccgtccgtgtttattggacgctggagctatcccaaagtatatgctgggccaatgatgagtagccagatgggcgacacctctatcatggacacaccagaagactggatcgggcagaataagacacaagacgaaattattaactaccggatgaatctggtccgtggcaagcagctgataaaaattgatgacttggagaatccgttcattgagaagctgcaagacatatcactggcatccaagtccatcgatagtgaggcgaccttcggacggcgccccaccggctcagtgcttacagaggacagtatgcctcatggccccagcgccgtgatcgaaaagttcgatattgacgcggtgaagtgggataggcagctggagaaaacattttatgacactgatctgaagtcaacggacgccattgtgaatctccacaataaggacgtgccattcaccgccatgcagaaggcattctcggtgggcgctatcgggactaagaacaagcgaaaacttgtgccaacgcgctggtccattaccgcctgcgactcgacactggccgatgaatttctcaaaaaggtaagaaaattcgagaaactggacacataccgggtcttcgagtttggggcgctaaacaactactacgttatcatcctcacccctaccgagtggcagtacgaatggtacgaagccttcattcggcttatgaagaacgaggagctgatctttagcgattacgaaaccaatgggggcaaaaaagagtatagcatcgtgggtggatgttattatactgcaaagatggttgtcctcgactacttgatgcagatcaaaaaacagagcgggcttctcatcttaagagaggcttatgatggttacgtgcctctgggtgttttcaacgtcagggagaacatcaaggaagccatgcagaggccctacatagagttcgagaccctcgaaagctgcttggaatacgcaggaactaaactgcgaatacctatcaacagatatgtcaagcagggcacgttaatgaacgaaatgctccacacaaagcagaccacactggatatgtactttaaaagcggatga

SEQ ID NO: 8657 - DNA, 936 bp, synthetic construct
  source 1..936: mol_type = other DNA
atgaataaaatgctgagccccaaagagtttatcgaggattccatacagaaaattaaggatcagatcggggacgagaaggccatcatcgccctgtcgggaggcgtagatagttccgtgtgctctgtcctcgtgcaggaagctattggcgacaatctcaccgccgtattcgtggatcacggcctgttacgcgaaggggaggtggaacaagtgacaaacactttcaaggaccggttgaatctcaaatttgtggatgctagtgacgaatttatggatgccctggatggtatcgaagacccggaactgaagaggaagattatcggcaaaatattcgtcgacgttttcgagagggaagcaattaagagcggggctaagttcctagtccagggaacgatcgctcctgactggatcgagactaaaggtgagatcaagtcccatcacaacctggccctgcccagtggcatgaagttgaaggtatgtgagccaatccgggacctctacaaggacgaggtacgcgagatcggggacgagctcaacatacccgccagcacagtttacaggcaaccattcccgggacctgggcttggcgtgcgtgtggtcggagcactgacaaaggagaatgttgaggtgtgccggaaagcaaacaagattgtttgtgatgaaatcgaagcggcaggtatcgacaaagatgtctggcagtatttcgccgtgctgaccaacaccaaagtgaccggcgtgaagggagaccagcgagactttggctacctagtggtcgtgagagtcgtgaactctattgatgctatgacggccagcgtcgcggaactgccttgggaggtgattcagactatatcaaaaagaatcacatcagagatttccgaggtgacccacgtcgcgctttctgttagcgacaagccacccgccaccattgaattttgctga

SEQ ID NO: 8658 - DNA, 258 bp, synthetic construct
  source 1..258: mol_type = other DNA
atgattgacaacgcggatgatctgagggacaaagcaaatgagtttaagatcggactgaaaaagcaatccattaacgtgcagatcggggacgaagaatacagctttcggatctcagggattggccagaagagtgtcaaactcgagaaatatgtgaagttcgacgaaatattcgaagccatcgagagcggcaatgacaacggtctagagaccataatcaagcagttcatcgaggattacgaagaggaggacgatgagtga

SEQ ID NO: 8659 - DNA, 558 bp, synthetic construct
  source 1..558: mol_type = other DNA
atgacaattctggtcattaataacaagggccagtacaaccataggatcgcccggagcctgcaatacctgaagatccccagcaagctagtcagcaacaatctctcaattgaggaaatcgaggccgagaaccctattggcttaatccttgggggtggaccaagcatagaagatgctggtctgtccgaggagtacattaaatattttgacatacccattctggggatatgccttggccaccagctcattgccaaggtgtacgggggcgaagtgaccacttccgatacggaaagttatgcacaggttaagatcgacatcaagaatgacgaaaacctgttcgagggcctcgctcctgagatcgacgtgtggtcgtcccataaggatgaagtgaaaacaatccccgatgagtttgagatcttggcgagttctaacctgtgcaacgtggaatcattcaaacacaaagacaaggacgtctacggaatccagttccacccagaggtacaccacaccccgaagggagaggcaatcttcaataatttttataaaatctgtaaaaagtga

SEQ ID NO: 8660 - DNA, 147 bp, synthetic construct
  source 1..147: mol_type = other DNA
atggagctaaaagacctgatcttcgtgatcgctgcaatcttgatcgccgttgtgctgctgaagatttttttctggcttctccccgtgattgtagtcctcataattgccttctttatctatgtctacctgcaggatcggtacaactga

SEQ ID NO: 8661 - DNA, 915 bp, synthetic construct
  source 1..915: mol_type = other DNA
atgaatcagtatgatatcatcatcatcggggccggccccggtgggctgaccgcaggaatctatgccggccgtcagggaactaagaacctaataattgataaagacctggccggcggcctgggccgggaagtccccgagatggagaactatcctggcttcgataaaatctcaggcctggagctggtggagaaaatgaaggagcaagcaattaaaaactgtgacttgcatgaaatggaaaatgtggaggagatcatacgcaccgacgacgagtaccgcttcactgtgaagacagataaagacgcttaccagtccaagattattatcctcgctaccggcagttcccataggcagctgaacgtgaagggggaggaagagtttagaggaaagggagtgtcgtactgtgccacctgcgatggatttttcttcgctggcagagacatcgtaatggtggggggcggaaacagcgcgctccaagaggcgctctacctcaataatctgggcgccaacgttaccctgattcaccgacggggggagtttagggcccaaaaacacttacaggacatgattaaaaaggagggcattaagacaattttgaacgcaaccgtggaagaaataaagggggatatgcttgtggagagcgtccttctcaaggacaatgaaacgaacgaaatgaaggaagttccaacgaacggtgtgttcatcagtgtcggttacatgccgcacacaaagcttgcctaccagctgggagtcacactagatgagagcgggcacgtcataatcgacaaatctcagaaaactaacatcgactatgtatacgctatcggtgatgtttgcatcggtctgaagcagtgggtggtcgcgtgcggagagggggcagtggccgccacctccgcttttgaagacattcagaattga

SEQ ID NO: 8662 - DNA, 432 bp, synthetic construct
  source 1..432: mol_type = other DNA
atgttttgcgaaaaatgtggcaaagaaattccggacaatacgcgcttctgcagcaattgcggcaaccagattaagaaaccaaacaacaagatcaccgaagagaagaacatgtacctggctctgttcctgtcaatttttttgatgggcctaggaatctattacgcagggaataagaaaaagggaattatcctctttattttcatactgatatccaacagaatgcggaagtttcagatcttcattatcattgccataatcctctggatctatgccatctacgagacatacatcgatgtgaagagggcaaatggggaggagaatcccaacttactggaggacatcaacaacttcaccactagtaaacatttcgtccacatcatcgcgatcgcccttctgttcgctgtgtcttattttcttataagcaagctctga

SEQ ID NO: 8663 - DNA, 750 bp, synthetic construct
  source 1..750: mol_type = other DNA
atgaagatgtgcaatagatgcggagcagaaaataaagacaagagcaacttctgttccaactgcggggctatcttaaacaaccccaaaccaacgcacagctatgacaagaagctgatagagaggttcatggacgcgaatatcattctgaaacttatcatcatcattgtggccgttttcgtattcttcgtcgcgtccgcctggatcgggcatattttcttcggaatgcccttggaattttataccgagggagacgccacataccacctatcccaattcaacaaattggacctggacggggacggcaacctcaccttttacgaagtcaagggcctcgccagcgatatttcgcaggataatctgagcgggatatttgacgccgccgataaaaataacaacggtgtgctgaagggatcggaatttgatggctatcttcagttcattgacaagtactataaggaactgggcaagcagcagaaggctgagcgcaaaaattcagcacaacagaaaagttcctctagcagctccagttctaatccatcatttcaggacgagggacacgagatctgcccggtgtgtggcggcaaccagtttactgagttttacaacagccaatacggggaaatgaactggcagtgtgactactgtggtgagatcttccggagtgatgatgagttctacatagattattgggagtcaaacggcattaagtgcatcctccctgcactggagaacaatctcgatatcatctga

SEQ ID NO: 8664 - DNA, 1041 bp, synthetic construct
  source 1..1041: mol_type = other DNA
atggaagatgagattgtttgtcccaagtgccacaagaggaacgacctgcacaaattctgcatttactgcggtcataagctgttggacgatgaccagatcggactgatcctggacaatcccgaacagtattgcctcaactgtggccggctggtgaagaagggccaaaagaaatgtgagtgcggatacgaatttagtgacattaactgcccagagtgcaacagcaaaaactcctataccaacagattctgcaccacatgtgggaagaagctttggacctctaacgtgtacaattacaagtacagtaagcatctttttgagaagcatattctgaaggaggtgctgccatattcactgcgcaatacatccctgtaccagcggcccaagatggatttcaccctcaaccatttattgtattgcaatgagtaccttaacggcctcaagagcgccaaatcgaaaatcgacgagtacctctgtgaaatcggctcaagatggaaggtggtgtcccctaattattgcataaactgtattaatataatcaagccggatgagtgctcctgtacaaaatgtgggtcgattctctttgccgacaaaaagcgcgtcgactgtctgcagactaaaaataagtatgtcaaacccaagttcgacaacgtggagttgaagtggacttcaaaattctctaatgattacctggattccctagctccagccatcggcgaatcccagtttgaatacagggagcgcctcaagtgggagtttgcggaaaacaactaccacaagataagcatcatcggcgcaattgaccggaaacggaaagatgaaggcagaaaaagacagatcgaagagcgtaagcgactggaggaagagtacataaggcaattcggggggggttattgcagcagcagctgccgataccactacgaggaaatcatcacgcctcgcgggatcagtgcagattatacggacgacatgtatggagtcgactactgctgtaggctaggacacttcgtaagccacggaagtttctgtaaagattatgagtga

SEQ ID NO: 8665 - DNA, 753 bp, synthetic construct
  source 1..753: mol_type = other DNA
atgacgaacaagatttgctttgaatgtggaattgaacaagatgacgcattcaattactgcatcaactgtggggccctgctttcgaacgagaatgatgacagcttgtccaacagtaacgagtaccgcctgcccgaggacatcgagaatcagaatgatgaatacgacaatctcaatgatgtaaaaacttgtcctaaatgcgggattgaacaggaaatcttcgccaagttctgccggaactgtggggcgtcattctcctccgagaacaaggacgagatcacaatcagatgtgagtattgtggtgccgagctgaatgatgaggccttctgtcccgactgcggcaaagccaccggcatcacaatctgcaccaactgcaggcagaaaatagtgaacgaagacttttgcagcatttgtggatatcagattaaccataaaatcaagatctgtgctaactgcggaagtaagatcgacgcaatggccaaggtctgcgcacactgcggcgccaagatcattaaaaagaatccgctgatagctttgggtttcagctttgtgttcccaggactgggccaactgtacaataaccagaaccacaaagggttcattcttattatcgctaacattattagctttatactatgcttcatctttatcggcatcatattagtgatcctgatctggatctatgcaatgtacgatgcggccacctcagcgatagctataaataagggcgaaattctcgaggacaagctcttttga

SEQ ID NO: 8666 - DNA, 1866 bp, synthetic construct
  source 1..1866: mol_type = other DNA
atggactacgaaaaactgggattgaagatgggcctcgaaatccaccagcagctaaactccgagcacaaattgttctgtccttgtaagacagaactggtggatgatgatttcgacggcatagtgcagcgcaagctgcgcccaacccaatccgagctgggagagatcgatcgagccgctctgcaagagagcctccgcggtttaaatttcaaatacgagaacttcgccaaacatacctgcctcgtggagaacgacgacgaaccacctcacagtctcaatgaggaggcgctggacatctgcattacaatagcttgcctgatgaacatgcacatcgttgatgagtttcatacaatgaggaaacaggtgatcgacggctcgaacactggggggttccagaggacaggtatggttgccacggatggctacttggaaaccccatacggaaaagtggtaatcgaaagtcttggcctggaagaagacgcggcacgccgcattgagaccaaggatggattcacggaatttcgcctggacagacttggcatccctctggccgaagtgacaaccgacccctcaatgcaccatcccgatcaggtacgggaggtggcctacatgctggggcagatattgcgaagcaccaatgttaaacgggggctcggcactatcagacaagacctgaatatctccatcgccgagggcgctcgtgtagagatcaagggcgtgcaggacttggatcttatggctgagattgtaaaccgagaaatccagaggcagctggtgttaattgacatcaagaaggagcttgtcgccagaaatgcagaggtcctggatgagatccatgacctggacgagctgttcaaggacacagagtccaagatactaaagtcggccgagacgattaaggccgtggttctgaaagggtatgatgggctcattgggcgggaggtgcagcccggcaggcggtttgggagcgagattgcaagctatgctaagaagagaggagtctctggtattttccactctgatgagctcccggcttacggaattacccaggaagaagtcgataacgtgacggattacttaaacattggtgaggacgacgcgttcatcatcgtcgctcacgacgaagatatcgctatatccgccctggaggaagttaagcgacgcgcgtccctcggcctagatggggtggtggaggaaacccggaaggccttagaagacggcaatactgagtacatgaggccccttccaaccgccaataggatgtatctcgagaccgacatcccgttgtttaagatcactgcggatagaattgaacccatctcaaacaatctccctgaattgccagacgtgaaacaagcaagaatcatcaaggagtataatctgagtgaggatctggcaacacagctggtgaagaggcaggaggcagacatgtttgaagccattattgccgacgtgagcatagacgcaacccctgtcgccagccttctggcttatgacctacgtgagatcaaaagagaaggtcatgacatcaccgcgctcgggcttgatcactttaaggaaatattcactctgctcgctgaaggcaaaattgcaaaggatagtgtgcggaaactggctattgagacaatcaaggcacccgagagcgatgtggccgagatcgccgagataaacaacctcactatgctcagcgaagacgacgtcgtcaagatcatttctgagattgttgccaaaaacgagggcatggtcaaggagcggcagatgggagccatgggtcccctgatgggaatgtgcatgaagcagctgaaaggaaaggccgacggaggcatggtcaacaaaacggtgcggtcagaaattcaaaaactgatctga

SEQ ID NO: 8667 - DNA, 1311 bp, synthetic construct
  source 1..1311: mol_type = other DNA
atgacctacaaagaaaacgctgagaaatttatcgagacctacggcctcagcataggggataaaatccaagtcaacaaggaggatatcacctataccgggatcttactggataggcccgaggatgctgacgatggctatctggtcttgaagctgtccagcggatacaacatcggtgtggccattgagaacaccgctgcggagctgatcgagaagggtgagaagcctaaaatcggattcggcaagagcgaaatcccagccgatccaaagaagcagaacatttcaattgttagcactggcgggacagtgtcctccgtgatcgactataggaccggagcggtgcatcccgccttcacagcttccgacctggtcaaagcaaaccctgagctgttggattatgccaactacaatgtgaaggcactatataatatactgagtgaggatatgaaacccgagtactgggtaaaggctgcccgagaaatagccaacgacatctccaatggcagtgacggggtggtgatagcccacggtactgacacaatgcactacacggcggctgcacttagctttatgctgaagaccccagtgccaattatactcacgggtgcccagcgcagttcagaccggccttcaagcgacgccaacatcaacctgatcgatagcgtggttgcggcaaaatctgacattgccgaggtgtgcgtatgcatgcatggaagcctgaatgacaaatacacatacttgcacaagggcacgaaggtccgaaagatgcacaccagccggagagatacattcaggagtattaatgcccagcccatagccaagattgagaacaagaagatcaacattaacccggactatgcttacaccaaacggggggtgaatgggctggaactcaatgcaaatattgaagagaaggttggattcatcaagagcttcccgggaatctctagcgactacatcgaataccacatcgataatggatataagggcctcgtggttgaaggaacggggcttggccacgtgcccaatgacctcatcgactcatttaaaagagcccgcgacgaaaatattcccgtcatcatgacttcacagtgcctatatggcagagtgaacatgaatgtctactccaccggccgcaacattattgactctggcgtaatctccggcgtggacatgacacctgaaactacttatgtcaaactttgttgggccctcgggcagagcgactcgtacaacgaagtcaaagagatcatgcatgaagatatcgcaggtgagtttagtgagaaatcgtccattaaggatttcctgaactga

SEQ ID NO: 8668 - DNA, 1446 bp, synthetic construct
  source 1..1446: mol_type = other DNA
atgagtgacaaggagattgggaaagactatgagctgaaggtgcggaggaatccacaatccctgttagaggagtacccacggaagggtaacaacatccagagcacgcactattgtgctgggtgcggccacggcattatacacaaacttatcgcagaatgcatggacgaacttggaatacaggatcgatgcgtgatgatctctccggtcggctgtagcgtatacgcctacttctattttaactgtggaaactttcaaacggctcatggaagagcacctgcagtggccacagggattagcagggccgaggataactccattgtgatgagctaccagggcgatggcgacctcgcctccatcgggctgaatgaaaccttgcaggcggctaacagaggggagaaaatcgccgtattcttcgtgaacaatacggtctacggcatgaccggcggtcagatggcgccaacaacactggttggagagaagactgtcacttgccagaccggacgcgatcctaactatacaggccacccgacccacatgtgtgagctaattaacactcttaaagccccagtatacatcgaaagggtgtctctcgccaatcccctgaagatccgactcgccaagtacgccataaagcaggctctcaccgtccagaaggaagggaaaggatattcgttcgttgaaatcctgtccccctgccctaccaacttaaagcaagatgtgaagagtgcccagaaatttatcgaggaacagatggagaaggagttccccgttaagaatttccggaatgatctctacaaacgcgaatctatccagcgcccagtgagtgactttagcacggaaacactggacaaggtgttcaatgtcaacagagacggcaactccgggtacgttgatgacgcaagcatcagtagcaccagcattaaggtgtccggattcggcggccagggtgtactgagcgccgggctgaccatcgctcatgccgcttgcgatgagggaaaacatgtgtcatggtaccctagttatggccccgagcaaaggggtggcaaatccaattgtagcgtggtcatatcaaatgaaaccattgggactcccgttgtggatgagatggatatcctcatcgcactgaataagccttccctagagcagttctcgcaggacgtcaaaaccggcggtacaatactttacgacagcaagatcggggaatttgaaacagatagagacgtcaacgtgatcgctatgccctgcgtggacatcgcagaggagcacggcaatgcccgcactgcaaataccgctctgctcggtggattgaccgagctgactgacgcgctgaaacgtgagtcttatgagaacgcgattcgggacatgtttgcttcaaaacccaaggtcattgacgtgaacattgacgtgctgaaggccggagccgaatggttgaagaacaactcatga

SEQ ID NO: 8669 - DNA, 1116 bp, synthetic construct
  source 1..1116: mol_type = other DNA
atgagcaatcagatggtaaaaggaaacaccgccgtcatcattggtgccatgtatgccgggtgtgactgcttctttggctacccaataacacctgcaagtgagatcctgcacgaagcatccaagtacttcccaatggtgggaagaaattttgtgcaagctgagtccgaagaagccagcattaacatggtctatggcgctagtggaaccgggcatagagtgatgactgcctcatccggacccggtatcagtttgatgcaggaagggttcacctacctggccggtgccgaactcccggctgtgatcgtcgatattatgcgcgcaggccctggcctgggaaacatcgggcccgagcaaggcgactacaatcaaatcgtcaaaggcggcggccatggaaactatcgcaacatagtcctggcacccaactccgtgcaggagatgtgcgacttgaccatgaaggcctttgagctcgccgataagtggcgaaaccctgtggtggtgctcgccgatggtacgctgggccagatggcagaaccgctggagtttccagctgaggctgttaagcctgaaatcgacgagtcttgggccgtgagggggacggagaacacaatgggcaatcttattacatcaatcttcaatgacttcgatgagttagaggacttcaactacaagctgcaggaaaaatacgcgaagatcgacgctgaggaagttatcgttgatgagtatcaggttgaggatgctgatatcgtattggtctcatatggcattagctcccgcatcgcaagatcggctgtggacaagagccgtgagagcgggataaaggtgggactgctgcggcccatcaccctctcgccctttccaactgagaggatcaaagaattagcggacaaaggggtggaatttatatctgtcgagatgagtaatggtcagctgctagccgacgtgcagttcgcagcgctccgacgggaaaagactcaccttgtaaacaggatgggagggaacctaattgaactgaaacagattcttgcgaagatctacgagatagccggcttcgaggaccacgatctcgatctgagcaaacggagcgccgagaaggcctcccccaatattattgactga

SEQ ID NO: 8670 - DNA, 291 bp, synthetic construct
  source 1..291: mol_type = other DNA
atgatcgaagaagagatttcctacccagtgatcaacaaagagatctgcaaaggctgcatgcggtgtatcgtcggctgccctcagaacgccatactactcagtgaggacatgaataacgcagggtaccaatttgcctattatagcggaaatggttgtacagggtgcaaggattgttacttcacctgccccgagccgctgggcctggaagtacaccagataaagaacatcacgaacaattcaatcgccaaaatgattaaggcgaaggtggctagcaaagggggaattaagtga

SEQ ID NO: 8671 - DNA, 1674 bp, synthetic construct
  source 1..1674: mol_type = other DNA
atgacctcgctgataggcaatttcgtagagcgagttgactttaacagctatgaagactttatgaagaatttcaagctcaagtatgagcccgactacaactttggatttgatgtcgtcgacaagtacgcagaaatcgatccggataaagttgctctaatctggactaacgacaatgacgagaaccacactttcacattcaaggacatgaaagagtactccaacaagaccgttaacctcctgagaaaactgggaatcaagaagggcgataaggtaatgctcacgttgaagaaccgctacgaatggtggttctgcatggtggccctgcacaagatcggggccatcgtgattcctgccactcacatgctcaagcttcacgatatcgatttccggctgaagcaggcagaagtgaaagcagtgatcagtgtggaagaagattcgttgctccctgattttgaggaggctgagaagggcctggattgggatctgataaaacttgtcattgagaccgaccgagatggatggattaacttcaatgaagcgatcgagaaggagagttccgtgtatgagaggccgacgggtgacgagaaccctatggctgatgaggtgttccttatctactttaccagcggtacaagcggaaaccccaagatggtgtcacatgcccacacgtatgggttaggccacatccccacggctaagtactggcataacgtcatcgaggacggtgttcatcactccgccgcggacactggctggggaaaagctgtctggggcaacctgtacggccaatggatagccgggacttcagtctttatctatgactacgaacggtttaacggcatcaaactgctcgaaaaaattattgaacacaaagtgaacaccttctgcgcccccccaaccgtttaccgcttcttgattaaggagaatattgaggggtacgactttagtaatctgacctatgtgacaaccgccggggagccgcttccacccgaggtgtctgaaaaattctatgaaatctcaggtctgagaattaaggaaggctttggccagacagaaacaacgctgtctattgcaacattcatctggctcgatgcaaaagttgggtgcttagggaaaccttccccactctacaatctaaagctgctagacgagagcaacaacgaagtcgacattggtgagaaaggagaactctgcttcgacatatccaatggacccaccccaggcctgttcaaggagtattataaagaccctgtaaagcaagcggagcagtgtcacgacgggttttactactgtggcgatactgcctgggtggacgaagacggatacgtgcacttcgtgggaaggaacgatgacatcatcaagtctagcgggtaccgtattggcccattcgaggtcgaaagtgcagtgctgtcccatgaggctgtattgcattgtgccattaccgcctatcctgacgaggtccgggggcagattgtcaaggccagcatcgtgctgcagcccggctatgagcccagcaataagctgacaaaagacatccagaatcatgtgaaaaatgtgacagctccatacaagtacccaaggatggtggagtacgtcgatgatatacccgaaaccataagcggtaaaacccggagagtggagatccgcgagaacgaccagaaaaagtttaattga

SEQ ID NO: 8672 - DNA, 663 bp, synthetic construct
  source 1..663: mol_type = other DNA
atgaattatcatgatttcgaaaagccgctatacaatgataaattcaaactgagtatatgctatactatcaacattattatcaaaatcaactataagaagcaggtgtttattctgaatgagtacaacaaagatatcggaaacagaatccgcgagttacgagagttgagcgacattacaattagtgaaattgcgtctgacctgaacattaaagaggaaacatacatccaatacgagaatggagaagtagacatcccagcgagcttcttgtatgagctggcccatatttttaaggtggatctaggcctgctcctcaccggggaggagagccgcatgagcatctttgacgtgacccgggcaaataagggcgttgccgtcgaccggaggaaggagtacctgcacgaaaacctctgttcaaaattcatccataagaaggccgaaacgttcctcgttgtggtggaccccgaaaaaaaccctgtgccctccctcaattcgcaccccgggcaggagtttaactacgtcctggagggttcccttaagatatacatccacaacaacgagataatacttaatgaaggcgactcaatcttctttgactccgcccacaggcacgctatggtcgcactgaacgataagccagctaagttcctggccgtgatcatctga

SEQ ID NO: 8673 - DNA, 372 bp, synthetic construct
  source 1..372: mol_type = other DNA
atgagcacaaacgagatcgggactaaggtcctcttcaaaaaacaactgggtctgaattacgagatagaccagaagtatgtggggctaaagatgaaggaaaacaatatactctccttcaacttcagggtaccgggagacttgaaggatgaggtggaagcctactttaagcggtttaaactgggcgaacccatcctggtggacatcggcggcacaggcgatatcaaatgcgactttaaggggatttcacctgtcctgaagaacaaggatgagtttgatcagtatttcattagcgcaacccttcaggaagacaaaacctacgacccaatggaagaggagaaatgtgagacgtgcagtggatgcggattccactga

SEQ ID NO: 8674 - DNA, 390 bp, synthetic construct
  source 1..390: mol_type = other DNA
atgtttaacctgatcgatagcaccctcttctttgcctcgtacggcaacattttcgggcttgctaatatagcagttagtccgattgatatcatcctggcctatgtcgtggccattgtgatctccatcatcatggctttcgtgctgaaagtgcccctgttgccaagcaaaccataccggtactcctttgacgtttgcgcggtataccccacgcctattattgccatcgggatcttttcaatattcctagtcctcaactatacattcatctataatggtttagtgctggccatcataatcggcattctgagcgcactgttcgtgaagtaccttttcaactttgtcttccccaagcctctcaatgaggacgagggagacgaaattaacgaatga

SEQ ID NO: 8675 - DNA, 498 bp, synthetic construct
  source 1..498: mol_type = other DNA
atgaacgaggtaattggcatcatcattgccgccgtgctctgctggctgaactttgtgatcgtggacacctattttggacttcccgagcagccaggtgtgcgaggggccgggattatcggtcaggatgtcgaaaagcgcgggggagacattgctggcggatttttccaaggcaacatcacctgtagcccggatgcttccgcgggcacattactcgcctccattggatacctagtgctgggcatccccggcggaataattgccgcattcttcgtcttcattggcaatagattgtgtgccgaccctgggtacgcagggacctgcggaagcctcacagccacgtgcatcatcttcatatgctcatttctgggcatgactccagaaatgttcatcgtggggatggttatcgctatcctgactgtgatgggcatcagtcagaccaaagcgagcgtcatactgggtaaagttgcaaagaagttcaataggcacgctcgggagtga

SEQ ID NO: 8676 - DNA, 249 bp, synthetic construct
  source 1..249: mol_type = other DNA
atgtatggcgaaatcatcggcgtcatcgtcatattcgtggcactgcgagcgctggtaacaagaaacagggccgagcggctactgtacctgaatgtgatcggatttggggtgagcgccatagtggctttcgtgattaacacgccctttgctctcattgttgccgcagccttcttcatctgctccaccattagcgccaacgcgattgcttacaccttgaagcgcctcgatgacgaaatccttctggagtga

SEQ ID NO: 8677 - DNA, 270 bp, synthetic construct
  source 1..270: mol_type = other DNA
atggagttcttcgtgagcattatcgccatcgctctgatgatcatcggtgcatttggcatcatattcatgaagaaacccttggacaaggtcataatgttttccgtgctggacgcggggtttgtactcgtcattgtgctgttcaagtacctggatgtggccatgtttgcagccctagccgacccacttagcaccctggtcttcattctcgctatcgtgaaaatcaacgaagttcggaagaagaaaattatcagtggcggaacagacgattga

SEQ ID NO: 8678 - DNA, 261 bp, synthetic construct
  source 1..261: mol_type = other DNA
atgattagtgtgcccttattcttctattttggaatcttccttgccatcgtaggtagcattgctactgcatgggggccaggcgttaaggacccgattatacggacattcaatacggaagtcgcttccatcggggtctgtctggtgctcctgtgctacaaccacgtgctggcactactgacattgctcgccaccaccgtgattatcagcctcatcctgtttagggccatcatccgcctggaggagatgggcgcgaacatatga

SEQ ID NO: 8679 - DNA, 594 bp, synthetic construct
  source 1..594: mol_type = other DNA
atgcgaataggcgtgctgtggaacaaacttgctgagcccaagaatattccacgtttgtttgcgttcagtctcggaatcatcctgattctcgggcttattgtccccatggccctgaatcctgaccagctgtatgtcagaccggccccacaggagcaaattggcgacgggctatctatcgcaccgtacgacagaggtggagaagttctgactcaacctggccagatcaacccccagtacccagataactcccgggaactgggaatgataacagcctacatgagccccatctcacagtgggtgtcttccatttccccctactttggcaccagtatctacagcagccctggcgggctcatagacgagatattgtattacacccggggtttcgataccatcctcgagtcctcaatcctgatgatgtccttcattatcgctagctggctgagcatcaactatacaatgaaccgcaagaatgatgaatcggagatcaagaaggatgtgaagaaggccatcaaagactcaacgaaagtagcgaatgaaattagtgtgagcgacgctaaagcccgcgcaaagcagttaaggagggacaactga

SEQ ID NO: 8680 - DNA, 696 bp, synthetic construct
  source 1..696: mol_type = other DNA
atggtgtttataccccagttcgttcccgctgccttcctgaatatgtacttgcctgcaatttatgccggtctgatcgttgggtttatcggttcgatggccatcgctctgaaaagggaggagattcacatcctgatcctcaccgatattgtgggccttgccatgatctttattgtgtccgccgtgggaactgaccttgccgaagcactgatcctccccgggctcgtggtggaacttgcagaaaccttagcgattagcgaaattttgatcacacgagagatgcgcataattgagaacaatccgagaaagaacttatctaactccagctccctattcccacagctattcgccctcaacatggagatactcaacacagcccctaatttcatcgccctcgtactgattgcttacgggatcttcttgaccggctttactggcggggcagtagctggcggaggaattgtcctctatgccctcagtaagaaggcccggggcctcccagtgcttgtcttggatggcatcgcgggagtcagcggcatcgcatggtgtctgtggataatcggattcctgtttttctttgtgacgccacaatactggctgctgagtctgttcctggctgcttgcggtctgctgctgaaagtcgcgtcaaaagtggggctgatcggcctactgatgcgggaggacatcgacaaggagtga

SEQ ID NO: 8681 - DNA, 672 bp, synthetic construct
  source 1..672: mol_type = other DNA
atggacttcgtgacactcggtggcaatctacttggaacaatccccctgggagacatcgtgctgtatctgaccccgttcaacctcttccttttcgccgtcctcctaggcttcaccgtaatgataggcctcagcaaacctgaaacccagatagaagccacaatgcactacctgtcgaatacggaggttaaggtgggagaaaaagagtttaagcagagacgctttctgagcgtcctgtgcgggatcgccagcgcaggcgcaatgattacgggggatctctttaacttcaccctgttcatggccttggtgggcatgttgaacatcggcatagtgtcagctgttcggcaaactagtgtattgaactccgcattcaattacgggctcatcgcgatgatgtgtagcctcccactgtttgggggtgctagcatcatccttgcctcaaccggaactctgtcccttgctgtgctgtctcagatgcctgtgtcccccatggtggtcttcggcgccacactcatgctgctgggtattttgggggagagtggagtggcgcccttctttgcctccaaggcagagatgttccgaactgctggcagcccatttatcgttattattcatctgagtagcctgtttatcattgtcagggccgtcgagattctgttactggtgttatggtga

SEQ ID NO: 8682 - DNA, 231 bp, synthetic construct
  source 1..231: mol_type = other DNA
atggtgtccgacagcatggatagtcagaaaagcctgtgtattattctgttggtactatcaacaatcgccattatcgcttgccttgttgtcaacttcgaggcatggatcgtgtataccatcgccatcttcggaatacccgtgtgggtcctgtctctgggcctcctcacgatggccaagccgcggcctgaggacgcggaagaaagggtgaaggagccatttaccgggtactga

SEQ ID NO: 8683 - DNA, 873 bp, synthetic construct
  source 1..873: mol_type = other DNA
atgaacttaatggctgatatcttaatccaggttattatcgccttcattgcaggaagtctgctgcttggcctgcacaggaagatcatggcccgggtccagaagagacccggaccaccgatagtccagcacttgctgcactctctgaagtttttctttaaagagacggccttccccaaaactgtgagcaaattgttttacataggcatcgtcttcatattggccctgatctggattgtgggggtgattgcagggccggttgcgcatgactccctgctgatcctatttggggtgtatgctgtgtacaagatcgttgaacataactccggatcaagttcaggtagcccatacggcaagcttagttgtgtacgcgccgtcctatcggccgctaccgagcttccactttttgcagctatcatatttgtgtatctcgtaaccgggtcaatgaacattggggagatcatcacctaccagtctgttaatggacccctcgtattcacgatccctctggccgccctgatgttctttatgctgattatcacaaaaagcccttacagcccttttgccataaccaaggacaaggccctgatcagcggctttgagaccgaacacttcggatttctgcgaggcttcatgctgttctccgaaagcattgcatggtatgtgatgttgtgggtcttcctcactatcttcttcggtcccctcaatgcggtgggctacgtgattggcatgatcgtcattaccttcattacaggattcattaacgctacaacccccatactctccccaaatcactccgtgatgacgcaaatcactattggcgcgatctgcttctttggcacaatcatcatgctcttcggtggggtggtgctctga

SEQ ID NO: 8684 - DNA, 255 bp, synthetic construct
  source 1..255: mol_type = other DNA
atgaatagcgaggacgtgatagtgtatttcaccgccctggtggccatcgggatcgtggttgtcggcctccttacgaccgtcttccactcgtccgtgatcgctcccatcgtaattattggaatcattttgagcatttttgtcctgtgcactaggagcaacttctcacataaaatagaaagtattgagaagatctgctttgtgataacactgatcgcaatcatttgttccttcatcctactctaccggccaatgtga

SEQ ID NO: 8685 - DNA, 306 bp, synthetic construct
  source 1..306: mol_type = other DNA
atgctagattatatgatctatatcctggtatttgcggtcggctccattctcgggcttctgtacagctacaaactgcacggtgagccatacgtggtcgacaccgagtttaatgtcctgttggctgtggtgtcagttgccggctggtgcctgggcttcctgagtggcaacataattcttagcgctatcgggttcctcctggcaggtttcgtgatggggggacgccccggatatggacggagggaaacagccgtgggcctcatagtggcaatcgttgcctacctcttactgaagtgtgggatgttgtga

SEQ ID NO: 8686 - DNA, 393 bp, synthetic construct
  source 1..393: mol_type = other DNA
atggacgagaacgccaaattaaaggtcatgcaggagcggatcataaagagttacgcatggcagcgcgacatcatcattccccttagcaacgagtttaattgcacgaacgaagagctggaggaactgttcttcgacctgttggatatgaacagccttgaatccctgcacggcacattcgattcagccagggatatttgtctgtaccagaagttcaatgctgatctccgactatgctggtttatcgactcgctcgaagtgatatcccaagaggaaggcaaaaaactcaagatgagactcgtggaggaggtgaaaaaagggcggagctatgacgacgtactgaaggaaggaaggttggaactgtttgagctgctgaagaaggagaccaattactga

SEQ ID NO: 8687 - DNA, 450 bp, synthetic construct
  source 1..450: mol_type = other DNA
atgctggacgccgtcaaggatgctgtgcgcaagagcagcatccacgtctgcatagtgaattgcgggggctgtaacggctgcgacgtggaagttgtcgcactactgtcaccccggtacgacctggagcagtacgggatctacgtgcagaacaatccgcgggaggctgacgtcctgttgctcacaggtgctgtcaccgagcagtggattcataacctcaagagagtttatgataaagcccccgaacccaagattgtggtagccgtaggaaactgcccccagtccggagatgtgttcgcccaagaaggaggccacgtgcacgcccctgcatctaattttatcccagtggatgcggccataccgggttgtccacctcgacctagtgagatccttgaggcgattctgtccgtgggcccacaggccatcgcagaccgcgggagggaagagaaatga

SEQ ID NO: 8688 - DNA, 1125 bp, synthetic construct
  source 1..1125: mol_type = other DNA
atgattgtcccgatcgggcctatccacccagcgcttaaagaacccataaggctgaagctgcaaacggagggggagagagtggttaaggccgaaattgaatatgggtacgttcaccgaggcatcgaaaaaataatcgagggacaaacatggcagaagggaatttacctttctgagcgcgtatgcggtatttgctcctatgaacatacccagacatttgcagagaccattgagaagatcagcaacgtcgatgtgccgctaagggctcagttcctgcgggtcatcaccaatgaactcgaccgcatccagagccacctgctcgctaatagtaccttcttcaagtcaatggaccatgaaacactctttatgcacgttttggaactcagggagtacgccatggatagcatcgagcttctgacgggaaacagagtgaacatgggctggaacgtggtggggggcgtcaggatggatgcggatgagcggcacttcaaacccatactggaaaacctgaaaaaaattgaggagggatttgacaccacacgcgccctgttcgccgagggccccgccttagcattgcgctgtaagggaattggtcacatgagtaaaaaggaggctattaagggacgggccgtcgggcctatcggcagagcctcggacattaaagaggactataggatcggccattacacttatgatgactacttcgactttaaggtaatccgacgtaaagagggcgacaactacgcacgtaccctaactcgattcgacgaaatcccagagtccataagtttgatcagacaggccatcgaaaacatgcccaagggcgagatacggactcctgctgacctgaagagcgggtacgcaatgaataagaatgaggcaccccggggtgaggtgacctacatgattgagacaaatggtaacctgattaagcacatctccatcagaaccccatccatcgcaaacatggatagctgcgccaaatacatgattcgggacgtgccaacggtggccgatgcggtgtcaacctatgccagctgtgatccttgtgtggcttgcgccgaacgcgtcgctatcactaatgaacatggcaagacagaactcaagaacatctatgaggtgatatga

SEQ ID NO: 8689 - DNA, 1026 bp, synthetic construct
  source 1..1026: mol_type = other DNA
gtgagctcgctcatgtggtatatctttgacttcgccaggaaggcatgggctgatgcgttcactaatgctaagactaaccccgagatcgccgaaaagccagagcgctttcgagacttccccaaggtcaacaaggaatattgcatagggtgtggagcctgtacggtttcctgcccttctcccaacgcaattaagattgtaagggagaaagatgacgaaacaggtgaggggtccacatatccagttatcacaccgggcgcctgcatccggtgcggcttctgcgcggaagtctgccccaccgagccaaagacactggaatgtgggttgaatcacctcatcttgcctgaatttaacctcattcccagcaagcggcaattcatcgtggatgactacctctgcatcaagtgcaaaaagtgtatcaaaaaatgtcctgtggaagcaataagtctaatcgacggaaatgtagtagtcgaccaactgaagtgtatcagctgcggggagtgtctagaggtctgtcccgtgaatggtgccatgaagggcgttttcgtggacaacctccaggatcagaaagagctgattctgctcacggtgaactaccttgaagagttcattaatagcaaggaagaggacttgcggagtctggatcataacggcctgctgcagtacgacgtgccgctttccaacatctgggatgaagccctgaagataattcctgacgaggagatctcactggagatcattactaacgctgtgaaccgccttaaggtgagaataattgattgggacaaatcaaagtgcaaaaaatgccagctgtgcatacctgattgtccaaccggatgtatcagctttgatgaaattaacgacaccatcgtcagggacaaggatcgttgcctgagatgcagtatctgttaccagacctgcccatttagcgtgattaaatacttcatcgctaaattcgcctttgacgacggcgagaatatccacgtgaccgtcaaagcatccaatttaaatgaggatattgtggagtga

SEQ ID NO: 8690 - DNA, 1359 bp, synthetic construct
  source 1..1359: mol_type = other DNA
atgattgacagttacaccaagacaccaagaccactgcggcatgtggacgttgagtacctcatcgaccagaccaaatgcgctaactgtaaggataagccttgcctggagtcctgccctattgatgccatctatctggataacgaggaaggcctgattaagatcaaaagcacctgttttggctgtgtactgtgccggaacgcttgcccctacgacgctatcagccttgaagtccacatggacagccccatcaaagagaatgtgcccaatatcaatgtcaaattgtgtaaggcatgcggggcctgtgttcaggcctgcaagaaaggcagcatccacattgtgtccgatggaaaacagccccctcacagtgagatcgacaaggacacgtgtgtgcgatgcggctactgtttccgagtgtgcccgactgatgcgatcaagtacgggcaactgctccctaaaacagtgaagggcgggaaggcagtggtagttaaccaggataattgcatcgggtgcatgacttgtataagagtttgcccatcaatgggagctcttaatgtggccagaactaacaagctgccttacatcaacccgggatattgtgcaaggtgcgaggaatgcatgcatagctgccccagcggcgctattaaatattcatcacgtaagaaagcctataagatgtacagtgagataaagtccttcgatattgtcagcgagatcgtggaccacgatattaagatactgagcctcgacctcatctccctgaacaaggtcctccagaaggtaggcaagtcaatagccttagaatttaacgaccagaactttgagaatttcattgagtataaggtcaacgacctgatggagagggaattgtccatcagtctcaactccaatattgaagtgggagaatttaccaaacttgtcggctcgtacctgatggataggaacatcgaaatctacaataacaaatgtattgcgtgcggagactgttacaatgtctgcccggtgggggcaattgagctaaacggcccaaatccaatctccattagcgataactgcatttattgcggaaagtgcgtggagcagtgtaagtttgacgcgatcggtgcttacgatgactatttctacagcaaagacacagatttgtattatgccaggtcttacctgcggggtcaacgcttaggggacttcacactgtcgaacagcaaatgtcaggcctgtgccatctgtgtgaataattgccccacgggtgccctaaccctcggtgacgacattatcgagttcgatgatgaaaaatgcatctactgtcgcaactgcgaggccatatgtcccctggacgcaatccgcatagtgaacttccggtga

SEQ ID NO: 8691 - DNA, 1047 bp, synthetic construct
  source 1..1047: mol_type = other DNA
atgttcgagaagtcatttatcacggactgcgagggcccactgactctgaacgacaacgcattcgagttggctgccaacttcattgagaacggtgggaaacttttcaaaatacttagtctgtacgatgactatctggtggatattgtgaaaaaggagaactataaggccggcaacacgctgaaactgatcctgccattttttatcgccgaaaatctaaagaatgacgacctcatcgacttcagccaaaagcacatttactccgtggaggactccaagttccttctcacctatctgcagaaagtaatgaacacctatatagtgagtactagctatgggcagtatattgaggccatatctaactacatgaacctcccctttaagaacaccttttacaccaaggtaaatctcgataacatcacacccactgtccaggaaatcaataagattaacgagtttaaacagttgattttagaaaatcctaaggattatgacctattcgatgatatcttcttctcacgaattacaaaaatggacatctacgagaaaatcaagaatgtggaagtggtcggtgggcaaggaaagaaactggctatcgaccagatcatcgaaagagacaatatcgataaggatgaaattttctacattggggacagcatcaccgacgtggaaccgctggatttcgcttgtatcaacaatggaatcagcgtttcctttaatggcaatgagtaccccctcaaggtggccgagatcgcgattgtttctccaagcgcagtggccacagcagtcatagccaacatatacgttaattatgataaaaacaaggtcatggagtttattaagggctacaacaacctgaatgactacgagaagctgttcgacgactacaacgtcgacggcgaaatcaagaataggtttttctcctttttcaattcgggaaagtaccctttaatcgaaattatcaacgagagtaacttcgatgagattttgaaagcgagcaaggaaatgcgcaacaatatccgggggaaagatataggcggactcggctga

SEQ ID NO: 8692 - DNA, 891 bp, synthetic construct
  source 1..891: mol_type = other DNA
atgagctacgaaaaggtaaaagacacattcttcgaggcttttgagggaaaatatgtaagagccctgattaccggacctagtgagaagatcgtcaaatgggcggcctacgattccacgtcaactcccagtgccgtgatcggccgggtggaagggggtgttgagggattcttagacgaatcgcagactcccgatgggcggttcggtgcggtggtccaatactggctggggggcgacgacgtgggcaagttcgcttttgaactctcctacaggctaaggcaggatgtcctcgtcaaaccatttacccgaattttcgattactctgcatccaacagtgacgaatgcatcgaaatgatggatatcgtgggccactgtggtgacggctatgagtggatcgtggaggagtacggccgcaaaatgattaatgtgcccattgccgtgcctgactttcagatcgaagagaaattcaagatcaacaatgggataatgggcggaaacttctggtatttgtgcacgacagcccaggcagttatagaagccggggaggccgtcatcgacgccatcatgaacgtggagggcgctaccacaccattcgacatctgtagcgccgcgagcaagccagaaactaactatcccgaaattgggccgaccaccaatcatgtttactgccctagcctgaaggagagcctcggagacatctctaaggttccggagggcattaactatatccccgagatcgtaataaacgcagtggacgagaagtccatgaataaggccgtgaaggcagggattgatgctgctctggagtttgagggcgtcgtgggaatctcagcaggcaattttgacggtaagcttggagataaaaacataaacctgcttgatattctgaagtga

SEQ ID NO: 8693 - DNA, 948 bp, synthetic construct
  source 1..948: mol_type = other DNA
atggagattctggacgatgacatcaacgcagaggtcgtgggattcggcgcgctgaatgtggataaactttatagtgtggcaaatatcgccgggaaagacgaagagagttttataaaaagcgaaacggacacgcccgggggcagcgctgccaacacaatcgtgggcctaagccggctggggtgttccacatctattataggcaagatcgctgaagacaacgatggggacctcatagagtacaatctggccattaatggtgtttactcaaataacctgatctactccgaaacagggagcactggcaagtgcctcgggtttgtagatgatgagggggagaggtgcctatacatcaacccaggcgtcaacgatgaaatccagcttggtgagatcaatccactgaacataatgagatgcaagatcatgcactacacctcattcgttggggattcgttcaaaacacaaatcgaactgttggacttattaaacgaaaatactgtgctgagctttgacccgggaatgctgtacgtgcagaaaggattcgacgagctgaaacctatccttgatcgcaccggcatcttgctcattaatgagtctgaactccggctgctctgcaacaattataagtcttccttgaaggaattggctattggattccttgatctgggcattgaaaccgtcgtggtaaagcagggtgcgaagggtgtgtttgcaattaacaactcaaccgactgtttcgtcgagtcctacgagtgtgacgttgtcgacactaccggtgccggagacagtttcaacagcggctttctctattcgttcctcaagggatatgatctggagaagtcctgccgaatcggcaactgggtggccagcaaaagcattgagggctttggaatggataagttcccctccgccaaggacctggaggacttcctgagtgagtttaactattga

SEQ ID NO: 8694 - DNA, 828 bp, synthetic construct
  source 1..828: mol_type = other DNA
atgaatgtatctttcataaagcagatgaaggacttagaacgggaagtcctcctcaagtctgtggaacttgacgacgacagcgatgatttccagtttgaactagacgatttcagcgccaatgatgaaatcatcgcagtggcccctaaatgtgtcaggtgcaacacatgtgttggggagtgcccggtgaacgctatcgagccagccaacatctttagaattgccaagatcaccgacaagtgtgttaagtgcgagatttgcgtgcaaagctgccccgtgagcgcaatcaaactcattgataactcaatcgtgtatgacggggagaacgaggaaaatataatcgagtacaagctctccaacatcagttcccggcatagggtagtccgcatgaacaatatttcaatcgattacagttgcgataacaattgggacgactgttccaaactgtgtcccacgaacgcgttcacactggaatttaaggagttctttgatgacctggatatggacctgggtattgagctcatagatgacgagttgtacccatatgtgaacgaaaagatgtgtataggatgcggcgcgtgcgccgaaatatcgcttaatgacaatgcaatcgaactggaccgctatatcggcccaattatccacagccggttcattgatgtcaaccacgatctgtgcgtgaactgttacctgtgcgaggagaattgccccaccggagctatcgagctggttgacggcaaagtggtgctggacgacgacaaatgcattcgatgtatcgagtgcactcgtcactgtcctgtcgtcgccttgaaaagagtggagattgagtga

SEQ ID NO: 8695 - DNA, 636 bp, synthetic construct
  source 1..636: mol_type = other DNA
atgcgcgccaaagagctgatggataagaactttgtataccttaacgccaacgatagcgtcatcgaagtgtccaaggtcatggaggagatacgccggttcacatgtcctgtggtgaatgacaataagcagttgatcggctgggtcacttcttttgacatcaccaaggggttaagggaaggcaacgagaaaatctcggacataatgagcggttatgaggaaatagggactgttcacgccgatgacccagcacgaaaagctgtcatcctaaccgccaacaacaaattcgtcacggtgccggtggtcaacgacgacaagcagatcattggcatggtgagagcgtgcgatatcgtggaactcctgagcgaactctacgacattaaggtttcaaagctgtatgaggcaatgcagaatcagcttaagggagtgacctgggaggagctcatggctgccagtgctctggtttcacaaaaaacaacgggcgtgaagattagccccgaggcctacgaagagaatattatgaatagtacatttggagaggccatctggtccaccgggggtctggagaaattcttcgcgggcctgatctccgtgggggaactggtaattgctcgtagagtgggaaaggcacggaggtga

SEQ ID NO: 8696 - DNA, 642 bp, synthetic construct
  source 1..642: mol_type = other DNA
atgaatctcaattttgactttacggaaaagagggtcatcattactgcatttttctgcatggctttcaccattgcaaatctgatcaccgttaaggtcatcaacatcggattcctggggatggagacgcccgccggggttctgatctatcctctggtgtatatcctgacaaacgtgatcgcagacgtgtacggagaaaaaatagcgcagcggacaataattctcggcctttgtgtggacattctgtttgtcttcatgacaaccctgatactcttcctgccctctccagcgtactacacgggcgattccagcctggcctttgtgtttacccaaaccccaagaattttagttgcctcctacatcagctacttgatcggcaacttcgtgaacgcccgcatcaccgccaaagtcaacgaggggaaggagtattcatcgaccaaaaacttgggtattcttgccttcagtgagctaatcgacaattttgtattcatcggtctcgcattcgtgggcgtcttcgctgtgactgatatcctaataatgattgtgtcccactggattctgagtctcatttggagcgcgatcgctcagccgttcacaaagatgactgtaaagtgggctgaaaagggaaaacccgccgaggcctga

SEQ ID NO: 8697 - DNA, 366 bp, synthetic construct
  source 1..366: mol_type = other DNA
atggaactgaaatatataatcgtcctgttcgacggagaatttatgaaattcaagtctaaattctttatttcactgctcatcatcttcgtgttgagcatcgtggccgtcccggcgtccgacgtcaactccacagactttagccagctcaacgacaccgtgctagactcaagtttcaatgataatcttagtactgtggagactagcaacaactcgaagaccgtaaacaacaccaataatggggatatggtgcagattattaaaaccaatcccaagatcacggttaagtccacatacctcaagagcaaggataagctggagtttaacttcaaaaacgcatctggcaacccactgaagtccaagagctga

SEQ ID NO: 8698 - DNA, 1572 bp, synthetic construct
  source 1..1572: mol_type = other DNA
atggtcttcatcggcaacaaaaagtattcggtgtacaccaactccaaaggggtggctaatctcaacattaacctcgtagccaagacgtataagctgactatttctttcgaaggggacgacaactacaacgctgtcaataaaatcatgtatctgcgcatctccaagctgtcgaccagaatcacgtgctacaaaaacttcgtcgtgaaaggaaataacctgtatttctatctctttgacagctactacaacccagtcagctgtaagaaattgatcgtcaagtacaagggaaagacagtgactaaaacatccaacaaaaacggccggatctcttacaagatcaaatcatcaggaagtaagcactcccttcatgtgaaatttaagggtgacggtcagttcaagtcatcttcaaagtaccacaaattctatataaccaccttttccccactcaagatcggcaactctaagctcttaaccaatggatatctgcggatctacctgaatggcctgactaagagctcaatttctaagaagacaattgtgattaaggtggcgagcaagaagttttctaaaaagtcctcttcggaggggattgtggttctgaagccaaatgtatgcgccaaggcctatacggttagtgcgaaatttggcaagtatgtcgtgtacaagaagatgaagtgcattgagggcaacgtgaaagaccccctgaagtacaacatcccgacaaaaagcggcgtgcccgacattgatgtcatgcctggaaattacgtgatgggagacaacaatgccagatacaccctgaccaagatacaatacaatgaggttataaagagagacagttactgcttgtttctgaataataagttatccaagtacacctttttcaaaacaaagaacaaccccaatactaaccatatcattcagcgagaaaagtggaatgtgatcgaaagggctataaatctgaagattgttgggaaaaacaaggccaattattggctatccgaaatcagcgtgttgcttaagggcaaatcatataaatatcctgaggtcaggaagacccagtccaccaactactactgtggccccaactcagctagcgtttgcactcaggtgctcaagaactactattgtgaaaagtacctcgcaaagctaatggggacaaatcgaagggaggggacaaaatgccagtggatcattgacggtctaaataaactcgggttcaacgcaacctacttctacaaggccagctttgataatgccttgaatgagcttaagaaaggcggtgccgcactggtattccacgcacctcggcactatgttagcatcctggatatcagctcggatggcaaaaaagtgctggtgagcaactcttatggaagctatgacaatatcccgactaaatggacgaaaataagttacatgaaaaccaagttcagtaaatgggaggagagtgtgatcgtccgctccaactacaagctttccgatagcgtaaacgatagcgtcaactgtttctataactccatgggtacaaactggtaccgccacagtacgagtcaaaaaatggggctggtgtga

SEQ ID NO: 8699 - DNA, 1290 bp, synthetic construct
  source 1..1290: mol_type = other DNA
atggttgaggagaatagtaatatgctacttggggtgagagataagcctcccgcgctgaggtgggttttacttgctatacagcatgtctgtgcaatgttcggagccaccatcctggtgccgatagtggtgaacaccacggccggggcagatgttctgtcaattccggtcgccttggtcacatcggggataggtaccctgatctatcttgtgtgcacccgtggcaggagtcccgtgtacctgggaagcagctttgctttcatcgctcctatggtggccgggtatgccctggctggcaagagcagtgtgtttagcgctttgatgctagttggcctcgtctatgtggctgtgagctgcatcatccgcatctccggtaaagcctggattaacaaactgttgcctccggtaatcgttggccccatgattatggtcatcggcctgagccttgccccaactgcgatctccgaaatcggcctggacctcgcagtcgtcccatggaaaaacctggtcgtggcactgattgccttcctcactactgctttcctggcagtgcggggaaagggaatcttacgcgtcatcccttttctgatcgggataatcgtgggatacattgccgcggcggcgctgggtatggtcgacttcactcaggccctcacggccaacgtggttgaaatccccaagttctacctgccatttatgaattacaacttaaactttgccgccgtcctcaccatcgttccaattgctctggtaacaatggtggagcacatcggagaccacaaggtgctgagcgagatcattggccgggatctaattgaagatcctggcctcgacagaaccctcctcggggacgggctagccacattcctggcagccctgttgggaggtcccgcaaacaccacatacggtgagaacactagcgtggtaggcatgacccgagtggcctccgtttacgtgattgctctggcggctattatagccatcatattcgccttctcaggccacctcacgtcactgcttacagcaattcccgctcccgtgttgggcgggatctctgtcctgctgtacgggttcatttgcgtcaatggcctcaaaattttgatccacaaccaagtggactttaacaacacgaagaatgtggtggtagctgccaccatgcttgtgctgggtttggggggagccacactgtccgtggtgtatggcaatctctctctcgccatgtccggaatgtcgctcgcagcagtcatcggcgtaattctgaatcttgtgataccagaggagaagcatgaatga

SEQ ID NO: 8700 - DNA, 627 bp, synthetic construct
  source 1..627: mol_type = other DNA
atgaatgagttcgttctgaatcacccactcataacccacaagttggcatttctgcgcgatatcaatacgggaactaaagaatttcgggagctggtaaccgagatcagcaccattctggtgtacgaggccatgagggacgctcaactcgaaaagaccacgattgaaaccccccttgagaaaatggagaccggcaccctgaacgagaacaactatgcgattgtgcccatactgagagccggaatgggcatgattgacggcgtgctgaatgtcattccaaacgccaagattgggcacatcggcctctacagaaacgaagaaacattcgagcccgtggaatattattacaagatgcctgaagggataaaaaaccgcgaggtcctagtcgttgacccgatgctcgcaacagggggaagtgcaagcgccacaatctcccggctgaaacaggatggggtgactaaaatcaagttgctctgcatcgtagctgcgccacagggcatcgaaacaatcgagaacgaccatcctgatgtgaagatcttctgtgccacggtggaccgagagttaaacgagaatgcctacatccttcccggtctgggcgatgctggtgacagggtctacggaactaagtga

SEQ ID NO: 8701 - DNA, 993 bp, synthetic construct
  source 1..993: mol_type = other DNA
atggtgtccaaagaatttatcgaaaaggaatggattaaagcttataacgccctaaacccctttctcgacgtgaatggagcatacgagctccggaagctgctgtgcgacttgcgcaacaacgaaaagttcatttttatctcagataatgtcgattatacctgtatcattgaactggacgagctgaaggatgacatcccgattttcaaatatgcaagcgactgcttcaagatcttcggcatcttcagtaagtcccagttgagcaaacttcatttcgcctccgtgtacgacattatcgtgtacagttgtgtgagcgagctgaaaagagacctgtcctacaacgagcgcaaaaaaatttactactgcaacttaatccacaagctgactctcaaccaggatatcagctccaacttcaaccaaaactttaaatacaataacgagctatttaaccagatgaagaagatcaggtggaatagttctgccaataagcttaaaaatatcatatacagagacttgatgggtacactcaccctcgagctgaacactgacagcggagtgacctcttcgtttggcgagtgcgcggagtatctggcttgctgtaacgtatttaacgacaatcggctagaagtcatgcctgatgacgtggttaagagctggctcttaacactgaatctgttcctcatggatcttcgtccctatattaaggattttaattcagccagtgacatgattgccgacaccggctcagagttcaagccaatcaatatttcggaggggcagtctaacaataaatcctcatctatcatccgaaaggtccttgcgggcgtgctgagcataattattgtcttcctgctgcttatcgtaatgagcacgatcctgatactgatcttcggagacgctttggataacttcatcgggctgctgaggccagttggtataataggcttggccctcgctgcagccctcgggaagaagatatacgataaactggtgtga

SEQ ID NO: 8702 - DNA, 993 bp, synthetic construct
  source 1..993: mol_type = other DNA
atgtttgagttttattacgaaaaggacatccagaaaaacttcggcgatctggataaatttgatgacgtcctgaacctgtttgaacttaaaaatctgatcaatgacttcatcaacaatgaaaaatatgtgttcattatcgagaacatcgacttcgagatgttcgagacaatggagaagtcaaggaagtattccacattcataaacaatgcctttaacgggcttaaaagcttcaagtactggattcagcccagcatcatgaacttcaactcattcaccagcgtgtactcgataattgtgtattcctgcattattgcctacgggagaatgctgagtaatgacgaattagagtccatcatctttagcgacttcccaatcaaactgactttggtcatggacgatttttacaacatcaacaacgtgccactgctggacaaggatttcttcaggacaattcgggatgttaagttagataaaagcgcaaaaaagctggacaagtttatttaccatggatttctgcttaacctcgccgaacccggcaaccactacgtagcggttgtggtcgagttttcatattgcgccagctacttctcccggtgttacgcctattcacgaaaaaacaagtttgtgaccattaatgacatcgctgacggctggattctgacgttcaaactgttcctcaatgatatacgcggttatatcgatgggctcgagagcaatagtccgtgcgctatcgtcccttctctaaagtcgcacaagaagattaaggtggaggaggaaaacaatggaagtttcaacatcaagaagataatcgcgatattcctctccatcttgtttttttgttttctcatactcgtggtggaagacattagctacatcctaacgggcagttactactattctggtgctcccaccacccgctatgcaatctttggattcattctgttcttgacttccatgttctactctctggtaaagaatatcctcaaattctga

SEQ ID NO: 8703 - DNA, 990 bp, synthetic construct
  source 1..990: mol_type = other DNA
atgtttgactacaatttcaagaagagcatcgaaaaaaactttaatgaactggaaaagttcaattacctcaagaacttcaacgagctcaagaacttattgttgaccatatccgagaacgagcggtacatcttcatatcgaaaaacattgatttcaatgcgcaaccgctcatggataaaccaaagaaccattccaaatttatcatcaacgcctacaacggcctagagagctttaagtattggattaagctttcaattatgaattataactttttcgtgggcgtttattcaattatcatgtatagctgctcctgcagctacggacggcccatggatatcatcgagtttgagcacgtgctaaattccaatcttccatacaaactgaccgtgtatctggatgatttcgataagtacgacgacttcagcagtcttagtgaggaatttttcagaacaatcagagacatgaaactcgataaaaaggctaacgaaatcgaaaagatcatctacaggaagttctggtcaaacctcaccatcaattatggcacagagaaccgagtggacgtccagtttgcgtattgcgccaactacctgagcaggtgttacgccttcaatagggggcgtaatgtagtcagcgtggaggacattgctgacgcctggattctgactctgaaattattcctgaacgacctccggccatatattcgcggtctggaatccaacagtccctgtgctagcctgccttctgtaaactcttacaagaacattgaggtggacaatgacaacgggtcggtgaacgtcaaaaagatattcgcaatattgctgtcaatcttgttcttttccctgatcattatggtcttccagtacaccgccaatctgctcacgggggattattattaccctaattctccccaggaccgctacgttctggcaggcatctttcttttccccactagtatgttttacggaataatcaaaaagattctgaagatctga

SEQ ID NO: 8704 - DNA, 993 bp, synthetic construct
  source 1..993: mol_type = other DNA
atggtacagttcccccagaagactattgacgaatggatcaatgaagactatgagaagctggatgtatttatggatgcggacagcatggaggacctccgcgagctgatcctaagtttcaagtatgacgataaattcgctttccttagcgagaatatccactaccagacagacattaataactacagcgataataacaacctgtacctcgacgccaacgacgtgttgggagacttcgggttcattttcagtaactcccacctctcatctgtgtgcatcgattcactattttttgtgatcgagtgcagctgcattggtgaacttaggcgcgaattgtcaaatattgagaaggaaaaagtctattactccgatctggggtataaactcaccctgggccaggagaattttctgaagataaagaactatgaagtcatcaacaaaacatttttcaagaagctgagcaagatcaagtggagtagtaactccaagaatttggacaaatacatcaagaacttctgggatacgatcacactgcaatacgatacctactatcatattgtgtcctcctttagcgtgtgtgccaattacttcgcctgttgcagagcactgaccagcggtcggctggaggtgtcgaatgagggggtcattcaatcttggttactgaccctgaacctgttcctcatggacttacggccgtacatcaaagactttaacagcgctagtgccatgatctccgacactggcagcgagttcaaacctattaacatctcggaaggccagtctaacaataagtcttcatctatcatccgaaaagtgctcgcgggagtgctcagcataatcattgtctttctgttgctgtttgccatgtccgcaatactcatactaattttcggagacgccgtggataactatgtcgattcccttaggccagttgggataatcggcctggctctggccgcagctctcggcaagaaaatctacgacaagcttgtttga

SEQ ID NO: 8705 - DNA, 960 bp, synthetic construct
  source 1..960: mol_type = other DNA
atgaagcaggagaacacctattctccagttagtagtttgttttccaagcagctgaatcttagcgattttggcttcgaaaagcccgcactcaagaaaattaaagagattaacaaagagataaagcccaataagctcctgaagttcatcaagtatacctttaaatactccaaaattgtgcttaataagtatagcagtcacttctcgaagcacgacttcacgcagcctgccctgttcacgcttctggctgtgaagatctacacccgctccacatacagacagatcactgatctactggagctgtctgacaagatccaggaacatctgcacttgaaaaaggtcccccactacacgaccctccagaagttctttcaacggctgccaacatcaatcctgcaggagttaaacaagctcatcctgcagaatcaccagatcactgggaagatcattgctttggacggaagcggcttcactaatgactacgcagacaaatattacgccatcatgaggcgcaaagaacggaaaagctacatcaagaaccatatttcgatcgatgtcgatacaagattaatcctccatttcgcagctcagcggggcccaaggtttgacacacgatttgccatccctgccataagaaacatcaagaagtataaccctaagtacatactagcggaccgcgcctacgacaccgaacccatcaggaagtgcattaacgaggaagccaaggcggaggatcaaatcccgctgaagacccgtgccaaaaacgggcactaccgactgaaatccaaaaaacagttcaagcaggaaatatattcccgccgaaacaacgtggagtcaatattcagcgtaattaaaaggatctttaacggaacaaaccggagcagaagcctccaactgtcaaataaggagaccaaactcaaaaataccatttataatatttaccggagcactcagattcaatga

SEQ ID NO: 8706 - DNA, 777 bp, synthetic construct
  source 1..777: mol_type = other DNA
gtggaaaaaggaatccggttcgacgagaacttcatcagtgaagtgatcttccggattgagtttcccactattaaaaagctcacgggtaacgacgaggaggtagtgaaggactttgctaacaagatctcaggcaccttccccatcagcgaggtgattcctcacaacaagattaacctcgacattgacattaacagcgggcagctcccaaaaattacccgcgagggcgacctggtttggatatttaagagccacaacaacaagaagatcgtgacattgacagcgaatgaccttgttttggagtaccgagacagggtctatagtggcttcactaacttcttggatgaaatcctgttactgatggacgccttcaatcagttcgactaccagaaactaaactttctcggcctgagatatattaatcagattaccgataagaacgtgaacaataacgtctctgaatttttctccctggatctgacaaacatggccatcatcaataatcttgagaaaaataatgagaatctagtccagatatttaccaaggtaaacttcaaaaaggacgactacctgatgacgatgcaatacgggctcttcaacccgcgcttcccaaatgtggatgcagataagatgttcatactggactacgactgcgtgcttcacaatatctcccatgtcggggaaatcaaagataatctgatcgatatgaaccatctgatctttgataagtttgattattcgataaccgccaagtttgaaaaaatcatcaaaggagagtga

SEQ ID NO: 8707 - DNA, 447 bp, synthetic construct
  source 1..447: mol_type = other DNA
atgagcccccccgaggtgatccgcgacgacgacacatacattaccctgcctgcctccctcaaggacgagtatttcgagtcaaaaccgatatcctacagcaagtatttcgagagcttcgaatttaaatttaatgagctctctaatgactttaaccttatcaacatcatggagattcaggacttcattttacttcatgatgatctgtttgattatttgagtcagatcaagctgctgctccagaagtacttctccgaatatgactactgcctagaattttacagcgatccagaaatacagtcactgaaccaactggtcatctacatcaacggcgatgagagttctttcgacgaggattggagctccctgaaacggatgaatagcgaaattaacgacttgtgtaatttcccaaacagtgtaaagcacctgatctcggtggacctctggtga

SEQ ID NO: 8708 - DNA, 1275 bp, synthetic construct
  source 1..1275: mol_type = other DNA
atggtggttaaatatctgccccgtatactggatgatgatctggagaaatgtcttacaatgattggcgccattctcattgtgggaccaaagtggtgcggcaagaccactacggcagaacagcatgcaaacagtgtcctgaagctccaagacaaagacaattacaaatcaaacatgatgtgggccgacatcgaaccttcccgattgttgaagggggacaagccaaggctgatcgacgagtggcaggtggctccagtcctttgggacagcgtgcgcaccagcgtggatgagagcgaggactatggattgtatattctgaccggttcgacagtcgtcgacgaggacagtataatgcatagcggcaccggccgcatccacaggatgctgatgaggcccatgagcctatatgagagcggcgaatccaacgggcagatttcaatcatggatctgttcaacaatcctgacatcaacatcaacgagtgtgagtccgatctgacaatcgatgacctgatatttgcggcgtgccgcggcgggtggcctgattccctgaaccagaagacccgagagggcaagctgttcgtagcgtacaattatctcgagaacatctgtaatactgatgtgtctgccgtggatggggtgaaacgagatcccgatagagtccggctcttattgcggagcctggcacgcaacaactctactctcgctaaggaccagactatcatcgatgacatgaacgctaatttcatggatataagtaggccaacgtactactcatacgtggacgccctgaaaagactgttcgtaattgaagacaataggggctggagtccgaacatcaaatccaagagcgccatccgctcgggcaacaagaaggtgttcatcgacccgagtatcgccgtagctgccctaaacgctaaccctgaatccatgattaatgacttgaacacattcggtttcatttttgagaacctctgcattcgggacctgagcatctataccaattctcacgggggaaaggtttcctactaccacgacaagtcaggtctggaaatcgactgtgtggtgcacctccgggatggaagatacgcccttattgagtgcaaacttggaaatgatggaatagaagaaggctctcaaaacctactgaaaatcaatggtttaatcgagaagaatgacaagctggacaatcccacatttcttgcagtcctcaccgggggaaaatacgcctacacgcggcccgacggggttaaggtttttcccattggctgcctcagatga

SEQ ID NO: 8709 - DNA, 96 bp, synthetic construct
  source 1..96: mol_type = other DNA
atggtggagaaacagaacctgagcacaaccgaggaggggagggcctccataagtgaacggttcctagaaaagctcctgggcaagatccacagctga

SEQ ID NO: 8710 - DNA, 222 bp, synthetic construct
  source 1..222: mol_type = other DNA
atggccgagacaaccgacaaggttatcgtgattgtcggctacctcctggcgatctttatcccaatacttggcctgattgccggtatagtactatacttcgtgaagaaggaagatcccttctaccagaaacacgcaaaatatatcattatcgtgagcattgtcgtctgggctctgagcgccatctttgtggggatgctcaacgtgggattggacgggttctga

SEQ ID NO: 8711 - DNA, 1116 bp, synthetic construct
  source 1..1116: mol_type = other DNA
atgaataagtcggatttgaaacgggatttctatatgctcaaggggccgctagccaagaagggttatgactggtggtggcattccctgaccgcatatgataaagagacgggggaagagaagcccttcttcattgagtacttcgtctgtaatcccgaactggctgaggaggagcccactctgggacagttgcctgagaaccaaaaagccggcaagaagccatcatactgcatgatcaaggccggcacctgggggaaaaacgccaagcagatccacaacttttactcaatgaagtactttgaatgtccggacgatgaactaaatatcaaggtaggggactgcagcctgacggaaactcatatgagcggattcgccagagtcagtgaggaggaatcccgggatcacccagagtacatgtccgatgccggcgacatgatgtgggacctggacattgacaagcagatcgcatttaatgtggggtacggcgcgaacggtctgttcaggaagctcaattcatttgagatgttttggcacgctgagggcataaagactcagtatagtggaaccatctggcttgatggcagggaatacgaagtgatccctgagaaatcttatggctatgcagataagaactggggaggagacttcacaagcccctggctctggatttccagctgtaacctcacaagcctgaagaccgggaagaaacttaataactctgcttttgaggccggggggggacgaccaaaggccttcggcatatccatacctcgcaagctgctgatcggtttctactacgagggtaaaatgtatgaatataacttcgcgagattctggaacatggttaagattgactttgactttgaggaaggcgaggacgtccatacatggcacgtgaatgcaagtaacaaagacagcaaaatggagttggtgctttattgcaaacgtgaagacatgctgttaatcaactacgaggctcccacagggaaaaaactccacaaccgcctgtggaatggcggaaatggatggggtgaaatcaagctgtacaaaaaagatggcaccctcattgaccacgtgaagatggagaacaccggctgcgaatacggcgagtactgctga

SEQ ID NO: 8712 - DNA, 699 bp, synthetic construct
  source 1..699: mol_type = other DNA
atggttttcacagacatcattgccctaatcgtggtgtacatttacgtggcgatcatttttgtagtggctgaaatggttttgaagacgcggcccgagattagtcgcaaatttttgcacatcatggttgggaacatgatatttgccatgccatttttcgcaaatccgtggaacatggtgtggttcctgaccctgcccattacaatcgctctgttcttcttaactgactactcgccaattaagatagaaaacagtgtcactgagagcggccatgccctgggcctgttcttctacgctggaatctggaccatcctgattgcaatatttacaataatcgctcccgcgagcgactccaagctcttcctttggatcgtcgccctcgcgatcgtcccaatggtctacggtgatggatttgcagccctgattgggcagaagttcgggaaaatcaagtataccgtatttggaggaaccaaatctcttgagggctcactgacaatgttcgtggttacctcagtcatgggcgtctttgtgtggatggtattctattccatcggttgtacgatgcctgagtttaacatcgtgagcatcctagccatatccgcagtggccaccgcctgcgaagccttcagctacgggggcattgataatctcaccgtgcctgtgatcactagcattctgtatttcctcgtggctatcctctga

SEQ ID NO: 8713 - DNA, 420 bp, synthetic construct
  source 1..420: mol_type = other DNA
atgaaggtgaaattaatcgagaagttcgcactcggcgctttcgtgggttgctttattgtgatgtgtgtcatggtgctgatatccctctatcaggggcctcagaacatcaggtttagcggcattgacataatcaacagcttcttcgggagtatcgtcgcaggctggggattcaccttttcaggatttatttatgacaaggaagatttgcccctgaccttccaagtgatcattcagatgggtgtcggcatgacaatactactcctgatcgcgatctaccttaaatggatgccgattaacctgggcatcggaccaatagtaacgtggatcgccatcgcttgcatctttgccatcattttctggtttgggttctacatttactattacctggttgcccgggacttgaataataagctgaaatga

SEQ ID NO: 8714 - DNA, 1779 bp, synthetic construct
  source 1..1779: mol_type = other DNA
atggataataagaagatatttctgtcgttcatattgtttattctcattgcaatctctgtaagcgcagtgagcgccgtggatgccgataacgctacattggccgaggacgcaattccgactgacgcggatgtggtgcagactaaagtcaataacgcaaactcaggagacacaatcacattggaggacaaaacatacgactttgccaatcagaccgttacaatcgacggtagggataagatcaccattcgcgggacgggcaacaccatcatcaaagggcacggtggccaaaattcaaaaacaggcgccctatttatagtctccgagagcatcggggtcacattcaaggacatcacattcattgacaccaaccccaacaataatttcacttatgacggcaatgtggagggatatggtattacattcgacggctcaggcgccgaaaatggcgttgtggacaactgtagctttgcagattttaatactgctgttaacgtgaaatcatgcaactatgttactgttaagaacagtaagttctccgggggttacgccaccaagctgatcaacgatccaacagtcaacaaggaaaaggggtctaaggtggtctccgctggcggaagcctattcctcagtgtgctgaattgcacctttgatggaccaatgctcgacgccgtctccatctatggcggtagtggagatgccaagataattggaaacaccttcaaggacaatgtctatgccatcttcttcgggggggcatctacggaaggcaccttcatcaatgataatacattcatagaatgcgggcagtttgtgaaggacgccaacaccacctggggaggataccctgtaatctccatagagaaggcctctgacagtgtgtacatgaacaataacactttctatgcagttaataacaataagctgattgcagcggagagcgcgaacactgcccacggcgccccaagtaccctgggcgacattaacatcacgaacagcaacgtcaacctggccaatgacaacgtggtggctgggtccgtaactttcctgcacatcctgagccggacaggagacatcaatcccaaggcccctattacccttaccggaaacaaatatgccaagggcgtgaaggccgtggtggtctggtacaacgactggggcgtcgaggattcagagaacatcgtgatcccccaggctcctgaaccgacccccgctcccgtcgccgtgtcaacctcgatctctagcgctaacttagctatttacgcggggaactccggtaagatcaagctcacgctgaaggatgcaaacggggtggcggtggctaataaaaccgtaaatattgtaatcgacggtgttgccaagacggtcactaccgacgataatggcatcgccattctgtcggtgaaatactccaactctggaactcattacgcgacgcttgctttcaccggcgacaacgattacacgggaagcattaaaacagtgaagatcagcgtccttaaaaaagtcactgccctcaccattacgaaaaaaacatttaaagtgaaaactaagaacaaaaaggttaccaccgtgctgaagagcggtaagacagttctcaaatacaagaaggtgaccttaaaggtgaaaggcaaaacctacacggccaaaaccaattccaaagggatcgctacatttaacatcaagatagctaagaaagggacctttaaagcactgactaagttcgcgggcgatggcgcttacaaggcagccagtaagtattcctatgtgtacgtaagatga

SEQ ID NO: 8715 - DNA, 651 bp, synthetic construct
  source 1..651: mol_type = other DNA
atggatttgatcggggggtacctgctcgtcatcctgctattattcacagccaatatcgcgctgatactcggcgactataagcttgataatattaagctcgtggccctgtcttccatctgcttcatcgtttcattcatcctgatgtacgctagtagctttctcaacgtcagtctgtccttcctcattgacaccttcagctatgtcttctttattattttccttgcacttgttgttgtaataatcaagtacataaaaaataacaattttaaacacgccttgtatctaactctggtgaccttcctcatcacaatcttcctgttcgcttcgcagagtaacctgaacgtgtttaacatcatcgtgtacagcttattcatttttatcattctgttcgtggtgtaccagcttagcaaattgctgcaccatgccaagatgcaatacaacgtcatcacaagcgaatacatgtttctgttttccatagtgatcttcattttcgcgctgacgtatgactccacgaagtctctcaactatacctcattcaaggcctttttgatcctgacccccacttaccagctcatctacgtgattattgcatttgtggtaatcctgatcattggtgtctttataaatgagattaaaggcggaaacagctga

SEQ ID NO: 8716 - DNA, 642 bp, synthetic construct
  source 1..642: mol_type = other DNA
atgatcatccagggaaccgagacattaacttcgatcattcacatattttccgaaagcctactgacacccgtagtggtgctgcttgtggtgagcggagtaattatcattctggctttgggcggcttgatcaatgagtatatctcacgcaaaccgatttcctccaacgacctcgagaacttagttaggagaatcagcttcagcaataacgtggaccaaatgaagagtgaaatcaccaatagtaatctgttcaactaccagaaggaaattctgatccggattgctaacaactatgatatcggctgcgatgcccgaaaggcctttgcgagcgagctaatatctgctgaagagacaatactgatcaagaaaacgaataaaaccgacatcctggtccgggttgggccttccttggggcttctgggtacgctcattccactgggccccgggctcgcagcccttggaacgggggatatcgccactctggcccagtcactgaccattgcgttcgacacaaccgtcactggtctcaccattggcgcactcgccttcgtcgtcagcaagtacaaaaagcagtggtacgaggcagagctgatagacgtggagacactcgccgaaaccgagctggaagtgatcaacaactggtga

SEQ ID NO: 8717 - DNA, 300 bp, synthetic construct
  source 1..300: mol_type = other DNA
atgcttcgcaagaagcggaggattagcgagagcgtggacgacgatcccatggggggcctgaacaacctaagcgacgcgatgctcgttctggccctgggctttttgatattcgcaatcatggctctctccgtaaatccagacatgatcaccgagcagacccagaccaaggaggtgtcaacagccaatacattcactcaaaactatacggatgccggcggactggaagattccggatacagtgaagtggggaaagtgtacgaggacccgtcgactgggaaactggtcatggtcagcggttga

SEQ ID NO: 8718 - DNA, 402 bp, synthetic construct
  source 1..402: mol_type = other DNA
atgaagatgccagagacgctggatagcaagctgctcgcaccctgcggcattaactgcatcagctgcgagaaataccaaaatccgtgttccggatgcctgatatctaacgacgggaagagcaaagccagtttgaagtgcaagattaaaacatgtttcgactccaaatcgttctcatattgcgggcggtgctccgaatttccatgtcctctaatgaagaaacactcaaagaagtacgtcaagaggcacgatctgaacactcttgagtctgcgaagagaataaagaccaccggtatcggacgcatgatgagccaggaccatgacgaatggctctgtcccgagtgcggcggggtgatcaaattccagacaaaaaagtgtagtgagtgtggcatcaaaaaggaatga

SEQ ID NO: 8719 - DNA, 741 bp, synthetic construct
  source 1..741: mol_type = other DNA
atgagtatcatcatcagccccgagtttaagaagctcaagaaccgcttaagcgatctcatattgatccaccatgagctgctgctgcagatttgtccaaacatcgaacgcgagtacctgctaaagttcggaagtctcgaatatgagctctataagaaagacgtgaagttatccatgctcaagcgaaagcttcagctgatacagatccaaattagcacggaggaagaaattgatatcgaactgatcgacgagatactcgaggaggagttcttcaagtataaggagaacatcaagaagcacatggatgaactgaatggggccatggaggagcagcacatttgcctactttcaaaaaaagataccaaaaggcttaagctgatctacaaacagtgcgtattgaaactgcatccggacctgaatcctaacctgtctaatcgggagaaagacctcttcattcagattacagaagcattcaagaatggcaacttgaacgccttggagtccctgtactactttgtgccaaacaaaaaagtggaatttgaatcggagatagaacggctccaggagctgatcgaatgtgaggaaaaggagatcgctgagatcaaggagaagtacccctacaataaaaaagagctgctactggacgacaacgaaatctacgagtatgaggtcatgctgaataaccttatcacccaatttgacgacgatattcagagatgcatggatgaaattgacctgatttga

SEQ ID NO: 8720 - DNA, 558 bp, synthetic construct
  source 1..558: mol_type = other DNA
atgtataagtatatccgggatgcatggaagaatccggatgagtcttacgtgcgggagctcatgtggcagagggcccccaagtggcgacgacaaaaggtggtgcagagaattgacaggcccacaagactggacagggcgcgcagcctggggtacagagccaaaaaaggcttcgttctcgtaaggacccgagtgcgccgtgggggcaggagaaagacacggcgcttcaacggtcgtaagcctaaaaggatgggcgttaacaagatcacccaggcaaagtcccttcagcgcatcgcggaagagcgggtcgccaaaaaataccccaacctggaggtgctgaacagttactgggtctgggccgacggaaagtacaagtattttgaagtgattttggtcgatccacaatccccaagcattgtcaacgacaaaaaaatcaattggatatgcagcaagaagcacacgaatcgggccctccgggggctaactagtgctggtaacaagggaagaggcatcaaatcgaagggaaaaggctcagaacaggctcgccgcagaaagctgtga

SEQ ID NO: 8721 - DNA, 423 bp, synthetic construct
  source 1..423: mol_type = other DNA
atgatccataatatcaagtttcgggctttcgtgtatgaaaacgagagtgtggacgaaatctctcaggctattcttaacctgcttcccgaagcagagattaacgtggaggaggccgaggggttgctggaggacaggatactgattctgacgggcgtcgtaagcaaaaaaagatacacaaagacttttttcaacaagctcctggaatccgcggacttggacaagttaaacaatgacctcgagtgtaagatggatgagaagggaaattggtttctgcgattcgataagaccgatgccctagacgaaaagctcaccatactggataaaggcgacagcatccacctcaaaatcaaaatcgccgccttcccagccaaaaaacagatcgcagttgataaggtccgcaaggcgatttcaggttgcgtgtga

SEQ ID NO: 8722 - DNA, 378 bp, synthetic construct
  source 1..378: mol_type = other DNA
atggagaagcaaagtaagattctcatcgtgttgctgatcgtgtttctgatatgtgtgggtgtgttctggtttcagtttaacaacaatgtttcaacattcatgatcgtcaacgaaacccatgtaaccgagaacagctcgttctctgggatgctggtcgatagctatggcaacggcgtcgctaaccagaccatcgcctatcacgagcccggcgggaacgtgggaacactcacgactgacgagaacggggagtttactgttgaacttgccaagtacctatccaatagtacaagcgacaattactacggtgacttcaaattctccggcaatggcaaataccagggatgcgcatatgaagggaatgtgaccgtgggaatttga

SEQ ID NO: 8723 - DNA, 1191 bp, synthetic construct
  source 1..1191: mol_type = other DNA
atgactgatttgccatggggcaataaccagaacttgactgacgaagagttctacaaccgcgaaagcgaactgatcaacatcaagaatatcctgcacagtacgggtcagggccacgcccctgacctcctattgaccggtatcaggggagtggggaaaaccgtgtttctcaagaagctcaagagggagctggatggcgagtacctggttgtatatattgatttctcgaagtccaaatgctaccagaagaatcagatgagcattatcggactcatgggacacttcttcaaagagctgattctggaatcaaagaataaaggactcaacacacttgacaagcagatcgaaaagtatttcaagtccaatgacttcaaaatcagagagtttatacggcttgacaagatacccatcccaatattctccaaggagacaaacgaagaaaagcttattgattttgcgctcaatctgcccgaaaagatatatgatgagaaccaggacaagattaaaggggtgctgattttcattgacgagttccaaattataaaagagctcaacaattacaaggaatcgttcctgtggaagattagaagctacattcagaaccagagaaacatcgcatacatcttttcagggagcatgagcctccaggacaaactaatcagcgaaattgcgagccaaaacggggcatttggcgggcgcatgatttcaattaacatcaaccccttcgaaaaagagacagtcaggaactacttatccaagaaaaccccatatatccaattcacggatgacggctttgaccgattttacaaattcaccagcggcgtcccgagttacgtgaatatcttcgcctccctgcttcctatcaacgagcagctggatgatgatgccatcaagatgtattttgacaaaaagatccaggctatcagttctcatctgatcaatatctgggcccggctgtctttccgagagcagaccataatcatcactctactggagaaaccgctgcggcggatcgacatcgccaatgagtttgggatctccacaggctcattgagcaattatcttaacaacctgcagaatcaaggactgataagtctcaacaatggtttatacgagattgctgagcctattctgaagcgctggttggagctggagtttaaggaaaaaggcatttatccctaccgtaacatctga

SEQ ID NO: 8724 - DNA, 348 bp, synthetic construct
  source 1..348: mol_type = other DNA
atgaaaggggaagtattctacggaaagggaattagagagctggagggcgagtacccagacctctacgagctcgtcacagacattaatgacaccgtgtggaacgggaaggtgctggattataaaactcagaagctaattgccatcggtatcaccgctagtcgagcagatccccgcgcgatcaagaaacaaatacggagcgccatcgaggtcttgggcattaccaaagaggaaatcgtggacgtgctgagggtggtcctgctcacgtctggcatgccggccttttccaagtcacttcagatactgaacagcgttacagcagctatcgaagaagagaagcaggaggaatga

SEQ ID NO: 8725 - DNA, 933 bp, synthetic construct
  source 1..933: mol_type = other DNA
atgaacagcaacaaaaaatttttcagccggataggcttcaactacctgatttatgcagtgttctcactggtcattaccatgatcctcgccaacatcatcgcatacacgagtcccgaaatccttaataatatcaacacctccacaaccattactgcgatttgcaactacatcctgccactccccgttttcatatatttgatgggaaaactggattcaaagaagctcgaaatccacaagatcaacgctagaaccttcctgaaatatctctgcattacctttaccctgatgtggatcgggaatattatcggagtcataataactaccgcgcttagcggggctatccagagcgacatttccaaccccatccaggacctgattaatagcaccggcatctggctgaatatcgtgctgatcagtatcatcggccctgtgtttgaggagtttttctttaggaagctcctgatcgaccgaacaatcaagtacggtgcccgcactagcattgttctgagcgcagtcatgttcggcctgttccatggcaatttgaatcagttcttttactctgccctgatcgggggatttttcgcctatgtgtacattaaaaccggaaagatcacgtacacaatcctcttgcacatgatcattaacctactgggctctgtagtgtcgctgttcttaaacagttccgtgactaacctcatcaccggtacaatcaacccatttgatctgatttttgtacttttgtacctcgccatacttataattacactgattatcgggttaacgaaccttctgaattataagcaagccaagttcaacggccaaaagactgagatttccttgcagaaaccgctgaagacaatattcctaaatctcgggatgttctgtttcatcattttttttacgataaaaatggtcctacaggtgattaattga

SEQ ID NO: 8726 - DNA, 267 bp, synthetic construct
  source 1..267: mol_type = other DNA
atggtgcaccggaacattctgaaaaaatgtgttgagcacaagcatgcgctgctctttgcagccggaattgcgaccgcagtggtggggaagaaggtcatcgaaagcaaaagtgtaaagaacgccgccacaaagggcatggccaacgtgatgagcatcaagaaagacgctgaagaatgcttccaggacatgaaagagaatgctgaggacatagtggtcgacgcccacaaggaggataagaaggagatctacgatgagtcccaggaatga

SEQ ID NO: 8727 - DNA, 2130 bp, synthetic construct
  source 1..2130: mol_type = other DNA
atgaagtacgaggtggtgtacgataacggaagccgcctcagggtgcgttctggccagtgggctttcactaaggaggaaggttatggcctggcctcactgctgctcaaccagaacttcatccacgaggtgctgacctcccatcgcaatggtagtattctgatgtactacgatgaaggcatcgacaataaggataaaatttttgacatcctggataagattgggttggatgatctgtttgaggccgaacctactcagatccaaatctctaaggagatcagtgaggacttctataagaaaatagctaaaatgatcctaaacaggggcatctataagctttttctgccaatccccgtccgaaacgctctgacagtatatcatgccatgaagtacatatggaacggcttcgacagcctgactagctttaacgtggatgtggccctgcttgacggtgctgccgttgcgggcgccctcctgaacaaacattacaagccggcaagttcaatgatgttcctcctcagcatctccgatgccctagaggactacaccctgcagaaggctaaaagcaccctaaaggacagcctcgctctgaacatcgatacagtctgggtcgtcggagaagacggggaagagaaacagtgttcagccgtcgaaatcagcaagggggataagatcaaggttcacatgggggatgtcatccccgtagacggcaaggtcatcgaaggtgaaggactggtcaatgaagccagcatgaccggggaaccactggccgtgcataaaatgaacgggaagacggtgcacgcgggaacggttgtggaagagggcaatctgatcgtggaggtttactcgatgaataaggaaacacgactcaataaaatcattcacctgattgaaaactccgaggaactcaaagctgaaagccagagtaaagcggagaagctggccgattccattgtgccatacagcttcattgcaaccgctcttacctactttattaccggcagccccacaaaggcactgagcgtgttgatggtggatttctcatgcgccatcaaactgaccacacccctatccattatctcagcaatgcgggaagcatccgacaacagaatgatggtgaaagggggaaagttcctcgagaactacgccaacgccgacaccattgtatttgacaagacgggaaccctcaccaacgctgcccctaaggtggtggacgtaattagcatgtctaagaaatacgactgtgacgagatcctgcgcatggctgcatgcattgaggaacacttcgcccacagtattgctacggcgatcgttaaggaggccgaaaaacaaggcctcaaacatgaagaggaccactccgaagtggagtatattgtcgcacacgggattgtcactgagtatgagggcaaacgggcagtgattggctcccggcacttcctcttcgacgatgagaaggtcaaagtgactaagagtcaggagaagaaaatcaacgagaaaatcaaggagcattcggtcgtgtacctggccatcgatggcaaactggagggtatcatctgcattgacgaccctatacgcaaggaggccaaatatgttatagaagagcttaagtctttaggtatcgagaatattataatgctcaccggtgacagtgagagcggggcgcgggctggagccaacgctctgggaataacagactatagaagccaggtacttcctgaggataagtcaagaatcgtggaagagctgaaagccgaaggcaggattgtcataatggtgggggacggaatcaatgactctccagcgcttgccgctgcggacgtgtcggtttcgatgaaacacagctccgacatcgcccgggaggtggcagatatctccctgttgtccgatgatttgtatgacctcgtcactctgaggaagctcagtaccggcatgctggacaagattaataataactaccacaatattgttgcagtaaatggctctcttttagttttgggggtgttgggaataatcccgcccgcaacatcttcaatggtgcataacttatccacgatgttgtttggacttttgagcacaagatccgtgttaactgacgaggagtacataaaggatatagaggtgaaggccatctga

SEQ ID NO: 8728 - DNA, 750 bp, synthetic construct
  source 1..750: mol_type = other DNA
atgcttgataactataaaaacaagtttattcccttgatcctgccagtcgttctcatctttttctggtacatcataaccaatgccctggccctgttcagcagctacatcttgcccggaccgctagatgtggtaaattcagccctggtggttatcgagaacggcaagctcctcaccaatacgattgacacactgtacaaggtgtttgctggattgatcctcgcctccatagtcgctattcctctgggcatcgtgcttggatggtataaaaccctagaagatatatgtactttcgtcatcagcattttacgccccattccacctgtggcatggataccgttctccatcctgtggttcggcatagggaccttccccgcagtgttcatcatattcatgggctgcgtgtttccaatcttagtatacaccatcgacggcgttaagcggacagacaaggtgctggtggaatctgcgcagaccctcggtgcgaacgactggaacattctgagaagggtggtcctgccttctactatcccctacatcgtgtccggcctcaaagtcggtattgggattgctctgatgtgcacgatttcagccgagatgatcggatcgagtagtggcctcggttatatgatcctgatcgcaaccaaccttttcgatacagggacaactgtggttgggatggtggtcattgggctgattggactggtctttgactttgtatttagccgagcccaggacaaaatcttctggtga

SEQ ID NO: 8729 - DNA, 753 bp, synthetic construct
  source 1..753: mol_type = other DNA
atgagcatcgaggtgaaggatatctataagaaatttgagactaagaagtcagagaatctcagtgtcctcgaaaatatcaacctgaccatcgatgacggagaactcgtctgtctgctggggccctctggatgcgggaagacaacgctgctgagattgattgccggactcgacacccccactagcggggaaattgtggcaaacggcgaggtagttaaaaagccatccggtgatcgagcggtgattttccagcagtattccctgttcccatggctgaccgtgcttcagaacgtcaccttcggattggagatgacaaagccaggctccaaagaggagaatattgccgccgctgaacgctacctcaccagtgttgggctgatcgacttcaaggatagctaccctcacgaacttagcggcggcatgaaacagcgcgtggctatcatccgttcgttgcttaaccactcacctatcctcctgatggatgaaccgttttctgcgctggatatgcagaatagacatagtctgcaagaacagctaataggtgtctggaagcggtttgagaacacaatagttttcgtaacgcacgacgtggacgaggccatctacctggccgacaaaattgtcattttagacaagaaccccggcaggatcgcaaacatcgtggaagtggacctagagaggccccggaaacgggagagccaggagtttctcgctctgcaagaatctatagtgtcccagttaaatatggacgagtga

SEQ ID NO: 8730 - DNA, 372 bp, synthetic construct
  source 1..372: mol_type = other DNA
atgaacagggacgacctcgaagactacattgaagacaactattcagcggagcctgagttcccctggctgaagttcccaaattacgaagtgttccgccacgatgataaccggaaatggtttgctctgattatggacgtctccaagagtaagctgggcctcgacggggacgagatccttgatgtcgtgaatttcaagtgcgaccagatcctgatcgacagcctcaccacggaaccgggatttttccccgcataccatatgaataaagagaactggatcaccgtggccttggacggcagcgtatcggatgagaaaatcataatgctactggatataagctttgagttaacagcctccaacaagaaaattgattga

SEQ ID NO: 8731 - DNA, 813 bp, synthetic construct
  source 1..813: mol_type = other DNA
atgaacattctcatctctaacgatgacggggtcaatgcagccgggatcttagcggccaagcaggcagtggaggatctggccaatgtgtatgtggtagccccagacaaaaacaatagcagcgtcggccgccggatttccctattcaagcacctgaaaatagatagctgcgaactggaggacggcagtccagcgtgctctgtctcaggcagccctgctgacgcggtaatcgtgggagcagactacatcatggacgagaagcctgatctggttatcactgggatcaatcagggactgaatatctcatgtgacataacctcgagcggtacggtgtgtgccgctctggaggccgtgagtctgggcattcccgccatcgctgtgtccttgtttatcgacccaaagacttcctataaacaggatgaaaacggtgaatggtacatggattacgatttcaacttcgcaaaaaaggttctccacgatctggtcctcaagataatcgacgaaggatttcccaaaggggtggacctgtttaacttgaacataccgacaaattacaaatcccaagaggttaagattacctacctcagccataagatgattgacaagaaagtcattgataacaccaacgaagagaaaaaggagttgttcaactatcccctcgacgaaaaccaggagagtgacgaccttattatgatcgcttccgaccttatcaaagaatatgaggagggcagcgatggatacgccctgctggtggagaagtgcccttcgctaacaccccttaacgtgaatatgacctcaaagaagctcaattggtga

SEQ ID NO: 8732 - DNA, 735 bp, synthetic construct
  source 1..735: mol_type = other DNA
atgattgtcatgagcatcgccggggtcgatcccagcgccggcgcaggtatctatgccgacctgaagacctttcaggctattggagtgtacggcaccggaatcgtaactgccctaactgcacagaacccttataagttcttctccgctagcccagttctgcccgagtacatcgaggaacaaatggatagcgtgcttgacagttacgaggtggaatttatcaaaactggcatgctctattccccagagattattaagctcgtgtcaaaaaagatcaaggaatatgacctgaaagccgtcgtcgatcctgtgatggtggccacctcaagtggaaacctcacgaaagaggacattgccgatgcattcaacaagtatttacttcccaatagcatactgaccaccccgaacattgcggaggctgaaaaactaaccaaattcgagatcaagacgaaggaggatgcttttaaagcttccaagcggatagtatgcaataacattatcacaggggggcatctggacggcctcaacacgatcaatattgacggggaaatcacaactatcaagcaggagttgatcaagacagacaacctgcacggtacagggtgtaacctgagctcggcaatcgttgcctacctcgcgaaaaacaatgagctggacacaagcatcattaaggccttgaattacgtgtacgaaggaataaagaatggcaactacggcaccctgatcgcgaaaatatga

SEQ ID NO: 8733 - DNA, 672 bp, synthetic construct
  source 1..672: mol_type = other DNA
atggacaatatctatgccataattccagtcagtaagttcaagaacgccaaaaccagactctccccatttctctccgaggaggagagggagaagctactcaaggtcatgctccaggacgtcacggacactcttaagaagcacgtggacaaaatattcattatcagccgtgacgaggatgtgctgaagtatgctaagagcctaaacctggacacgatcctggagaacaaggacagcaacctgaacaaggccctcaagcaagccatgaaggaatgcaaaggcaaggtacgaaaagtgattatcgtgccctcagacgtacctttgattggaaagacaaatattagcatccttatcgaagcctccaagaacctggatttcatcatcgtgccgagtaagggtggcggcaccaatatgattatcatgaagcctatggcaatacccaccaaatttgaggggttctcgtaccgcgagcatgtgaatgtggctgagcgcaaaaaactgaatccacaggttcatgattcatttttcatggcactggatgttaacacagcgcaggatctgggggaaatcatgatccacggggaacacactcacaccaggaaatacttgaaagagctgaaggtgaaagtcgaaccctaccggggaaccgaacggttaaaagtgacaagaggctga

SEQ ID NO: 8734 - DNA, 1404 bp, synthetic construct
  source 1..1404: mol_type = other DNA
atggtggaaaatttcgacgagtggtttcatgatatactggaaaatgcgaacattactgattcgcgctacccgattaagggcatggccatctggatgccctacggttttcaaattcggaaacactcaatgaacattatcaagaaactactggataaagatcatgaggaagtcctttttccaatgctcgtgcctgaaagtgagcttgcaaaggagggcatccacgtaaagggattcgaagacgaagtctattgggttactaaaggtgggcagcgtgaactgaacgagcagcttgccctccgacccaccagtgaaactgccatctaccctatgtatagcctatggattcggacccacatggatctgccaatcaaatattaccagatcgtgaacacattccgatatgagacaaaacacacgagacctctgatccgggtccgcgagattacgacttttaaagaagcccataccgctcacagcactaaggaggagagcgacgagcaaattcaggacttcattgcaatctacaaggaatttttcgacgaactgggaatcccatacctaatcagcaagagacccgaatgggacaagttcccgggggccgattacaccatggccttcgacgtcattatgcctaatgggaagaccctgcagataggcaccatccataacctggggcagacttttgcaaaaacctttgatataacctttgaggataaggatggcgagcacaaactcgtatatcagacctgcgcaggagtgtctgacagggtaatcgcgtccgtgatcgggattcacggagatgaaaccggtttgcggctcccacctaaggtgtcaccaaaccaggtgacgatcattcccatcctgttcaagaagggcaaagaagaggtgttagcaaaatgtgcggagataaaggcccagctggaggaaaccggccttcgcgtcaatatcgacgatagggacataaggcccggcaagaaattccacgactgggagttgaagggaacacccctgaagctggagctgggcccccgggacttggagaacaatattacagtcgctatgagaagagacgagggaaagaaaatcgagatcgctctggacagcagcctcagtgacaacgttattgatctcctgaacaagacccaggaaaacttatctgagtctgcctggaacttccaaaaatcccatgtgaagttcacagagaggctcgacgagattaaggatctcgtggagacaggcaatgtggttaaattccactggtgcggcgacgaggccatcgggcgcgacatcgaggaaaagacgggatatgacatactgggtatccaggaggaaatatccgagggggagtgcatctccggcaaggggaatgccaagtacatcgctttgatggctaaaacatactga

SEQ ID NO: 8735 - DNA, 1044 bp, synthetic construct
  source 1..1044: mol_type = other DNA
atgacgaacaggaagatccagatgcctcgtgaagtgtacatagacccgggtattgtacatgacacggctgagatctgtaactcgctgcatttgggcaatgactttctgatagtcacaggcagccacacttatgatatcggggcacgccctgtgattgaaagcctagagaagaataacctttcttatgacgtcataaaggtggacgtggccagcgaggagtccattagcgaagtggaggagctgatcactcccgaaaccaccgtgctgggcgtgggtggaggaaaagtcattgatgtagctaaactcagctccttcaaccagggtgtctacttcgtatccatgccaacaaccgcctcacacgacggaatcgttagccctttggccagcatcaagaatccaaacaccagcatctctgctacagcacactcccccatcgcagtcattgctgacagcgagattatcgcccagagccccttccgacttcttgccgccggctgcgcggacttaatagccaacttcacagcgattaaagactgggagctggcccaccgcctcaaaaacgaggcgtttagtgaatctgccgccgcactctccatcatgtcagcccatctgatcacggataatatagctaatatcaagcctaacctcgaacccagtgcacggattgtcatgaagtcgctcttcagtggaggaatggccatcagtatcgctggctcctcacggcccgcgagtgggtccgagcacctgttttctcatgcactggataaaattctcgataaaccggccttgcacggcgaacagtgcggcatcggcaccataatgatgatgtatctacacgggggggattggagagtgatcaagaacgccctggaatcagtgcaagctccaacaaccgctgtggaggttggaatctctgacgaggaaattattgatgccctggtgatggcgaataagatcaggccagaaagatacaccattctgggggacaacggggtttcccgggaggcagcctacgagctggcttacaagactgaggtgatctga

SEQ ID NO: 8736 - DNA, 438 bp, synthetic construct
  source 1..438: mol_type = other DNA
atgattacactgatcggcaaagacctcgcgaaggaaggtcaagagtttgtgttcctagggccagctgacgagtgtgaaaactgcaggtttaaatcaagctgtgtgggcaacctggagcttaaccgcaaatacgtggtggtgaacgttaaggagaatgagcagaagtgcccgatccactccagtggacttgtcattcccgttgaaatcgatcgggcacagatcgacgtcctgactgccagcaaaaatatatttgagggaagcaccttcacgttcaacgcccctgattgtgacgaggtatgcgaatttcacgatttgtgcttccccgagggcctccaggaagatgacaagtgtctggtcctgaataacaatggcaagcataatggggagtgcaaaaaggggttcaagctcaacaagctgaccttaggattcgtgatatga

SEQ ID NO: 8737 - DNA, 690 bp, synthetic construct
  source 1..690: mol_type = other DNA
atgatgaagaatacgagcgggaacagttcctcgaagaagaatgccggctacaaagcggcagagtatgtcgaagacggaatggtgctcggactcggaaccggcagcacaactcactttttcattgagaaggtgggcatgaggatcaaggaggaaggaataagcatcaagggcattcccaccagtttccagtccctactgatcgccaagcagtggaacatcccaatcaccactttggaagagaatgacattgacctgtcagtggatggggcagacgaagtggaccgcgagtttaacctgatcaagggcgggggagcagctcatacaaaagaaaagatcgtcgattacgctgccaaacagttcatcgtgattgtggatgagagcaaattcgttgataaattaggtgatttcccggtacctgtcgaggtcctccctgacgcctcccggatggccattaaggagctggaggacatgggggcggagtgcgaaataagaatggctcaacgaaaggatggtcccgtaatcacagacaacggcaattttgtgattgacgccaagttcgataaaatcgaatcaccacggcaccttgagatcgacataaacacgattcccggcgtggtggaaaacgggatatttacccagatggtcgataaagttatcatcggtactgacgagggcaccaaagagctgtga

SEQ ID NO: 8738 - DNA, 222 bp, synthetic construct
  source 1..222: mol_type = other DNA
atgccgatcggtgccggaatgccattcgacctgaaagacatgagctacaagatcgcaattatcttcggcgctctgcttgtgatctatggggtcctctggctgctggcggagctgaaaataatccctgccatcctatttgtgatattcccccagatcgtactcattttgatcggcatttgcattatttactttgccttcgatcggaagaagaagtattactga

SEQ ID NO: 8739 - DNA, 2985 bp, synthetic construct
  source 1..2985: mol_type = other DNA
atgaataagaagggatatatactggttatctcactcgttcttatcatgctgttctgtctctccacagtctctgccaaagatacagatctcaacgcaaatacccttgaaaagagtaatgatgtgactatcctaaatgagggcgacagcaatgtgagtcagatccattcacagcataccgtgaaggttggcagcgacagtgattccatccaaaatacaatcgattgcatgaacgatggagacatactgaacttcgaaaccggaacgtacaaggatatatgtatctatgtaaacaaaagcattacaataaacgggaacggcgcggagcttataggatatgacactccgagcaaaagcaacactcctgaaattatctacaacgacaccggtaagggcggctatgccatcggaaattttgcgactctgtacattgtgaaggctgacaatgtggttattaacgggttgaagatcaccggcggtgcaaattccacctccacgtatagcaacgccctgatctacgcaatgaactcaaaaaatctgactttcaagagcaatgtgcttgagggcagcagctggggcctttacttccagtactgcactgacggtcacgtcacaaacaacatcattaagaaccaggcagtgacgggcttcttgaacttcggatctgcccgtacctcaattgagaacaacaaagtcatcaatgctaaaaaccatggcatcgacgtaagacacgggacaggcccaaacgtgaaaattatcaacaacacagttattggtagcaaggaaggcatctacctcatgcactctacaggccacgttgctgctaacaacaccttaatcaactgcaccatcagttcaattagttgctacggttcgaagaatattaaattaaacgggaacaagatgcagaagtctaggattggcgtgctcctcggaggaggatacgagaacatcactgtgggggaaaacatgttcacgctcgacaatctgccttatccgcctacatttgcatattatattgctgaggccaaatctgagtaccagaacgacgaggacatcatgggtactttctccgacagctcgctctatactcccaactttgtcgcattcactggaattgacgtccccaaagacattggaattaattatgatcccatcctggaaaagacaggaccagagtggatcgtgcctgaaggagcgagctcctctgagatccaaaatatgattaacaacatgaacaatggcgacaccctaagtttcacgcagaatgctatctacaacgagatcagcatctacacagacaagaacatcaaaatactggggaacaatgccactctggtcggctgcagtggcatcaactttaacaatacccactacttggataatgtagccgaaaaggtgcgcaagagcactaatgagggtgggtatgccataggatacaatgccgtactgtacatattgaatacaaccaacgtggtggtgagtgacctcaacatcaaggcacagtaccccaagtatgattccagcaaggtggaaacaaccacgaacgagtacaagacagtggggatctatgccgattccaactcaggactggtaatcactggttgcgatgtaaccggggcctcttgggggattttccaacagtactgtaaaaacagcaccattatcagaaacaatattcatgacatttacacgacaggcatcatgaactttgggagccccaacggcatcattgccggaaatacagttacggatgctgccaaccacggtatcgacgtcaggcatgggacaggaccgaacgtgacgatctttaataacacaatttccggggctaaggaagggatctacctgatgcactctaagggccactcggcttacaataacacgattctaaattgtaagatctccgggatcacagcctacggatcgggaaatgaggtgctgttcaacaacaccatctctggaagtaggctggggattttgctgggaggcggctactacaatataaccataggtaagaatacattcaagctggatagcctcccatttccccccactttcgtgacctatctggcccgggcggacaataagtatcagagcgaggacgacgtcatccgcacgtactccgataaggagactgccgccgtggatgccaacgacataacggtcggctataagaagggggaatttaacattacgctgattggccaaaacggtgataagctgtcatatgaggatctgtccatctctattaacggtgctaatttcaccgcgaagaccgacgagaagggcatcgcagttattcctctgtcattgacaaccggcatttacaatatgaccattaaatttgctgggaacgacaactatgccccaataaacgtgaccaagaccgtgacagttaatgacgaccgaatcaagaccatcttatccgccacctccaagaccctctacctcaccatcattagcaagggctattcctacaaagtcacattcaaagatatgaatggcaaagcaatcgctaataaaaaaataagttttaaaattgatgggaaaacctacagtgccaccacttcgtcaactggcatcgctaatatcaaaataaaagcgacaaccaccggcaataaaaaagccaccatcagctttaagggtgacgacaagtatgctccagtcaccaagaccctgaccgtcaaagtgatcaaacagtcatccaagatcagcgcgtataagaagactttcaaagtcaaaataaaaactaagaagtacaccattactctgaaaaacaataaagggaaagccatctacaagggcacggtgtacattaaagtgaagggcaagacgtataaagcagtgaccaattctaaggggaaggccacatttaagatcaccaagcttactaaaaagggtaagttcactgcaaccatcaagtattacgggaacaaatactacagttccacctccaagcaggtcctaatacgcacacggcggtga

SEQ ID NO: 8740 - DNA, 1716 bp, synthetic construct
  source 1..1716: mol_type = other DNA
ctcaacaaatccctcaacattctgttcatctgcttcgtggctctcctcgtcatctcctgcgttaatgcggcaaacgacaatccaaataattccgacgacatctccaactatcagataagtagcgatctcagcaatactgagatccagaccatgttggataacgccaaggagggagaccagttcgaatttactgacagggagtataagaatatcagcctggtggtagacaaaaagctaaatatcgtctcgaaaaagaatagtaacattcatacgagcaataagatcgccgataaggcccggaatttgggcctgaacaactcgttcggcttctacttcacctccaacagtggtggaagttttttatacgggctcacaattatatctaatagtgactacgggatcgtggtggataagagcgataacacgaccatcaagaatgtggtgatcaaaaacgggaacgtgggtatcctggtcaaaaactccaataacgcggatataatccagaacaacatctcaaaagcaaactccaacagcatccacctggaaaacgtctccaaatcaatcattagcaaaaacaccatctcctacaatgggcggagcggcatccacgctagcaatatatactattgtaatgtaaccaacaacaccgtgcatcacaataaattcaacggaatttcactgtacaacaagacaacgggcaatatcatcaagttcaaccttgcctacgagaaccccaacggaatctacatcaattcccagagtgactttgacgttgttaactcaaacacattcaccaagaaccgacgcaacactgattacgagctgggtgctttcgagagcggcaatggcctgctattcggggccgacttcaaaacggccaaggagggcaagtctagcagattggaggttaagtataatgtgttaacccataacgagggctaccaggcgaagaacaatccggatcttccaacatttaagctgggggacaactggtttgactcaactgatgatgagaacacttttgtgtgccccatgctgcttgcaggcattatgaaaatgggaacgatcagcgtgaagaacgggttcggactgcagatgtatgatacaaatggcgaagcagtcacagaatttggtacctttgacaccacagtgaatgtgaacggaaaccagtacacagccaagttcgtcaacggtaaggcaattattgacgccaacctggaccctgacaaggagtatgagattgaagtcattatcggggataaaccagtgaagtttacttatcgcaccagttcgggggacaaaaacgacgagtcagatagccaaacaagcaccgacggcgacttcggaataaatcaccatgactttattgacgctatgggaaacgacgccagcaaaggcgtggggaacagcgagaacggaaccagcagcgctcacttcgccaactcagaacagtccggcgcccacggaaccaatgcctcgggcaattttcaagatagctccgataatggtgatagtgtactgactaacgggaatgctaatgctggagactccagtaaaggtgagcaatctgaagaaggcaaagcatatgaaatagtgcctcagagcaagatctcaaaggaaatcactgatacctccggcattattgtcctcagcattgttagcatcctgggcatgattatttacgggtactggaggaagcccgaaatagagaattga

SEQ ID NO: 8741 - DNA, 405 bp, synthetic construct
  source 1..405: mol_type = other DNA
atgaaagtgaagtctgtgagcctgaagatcagtagcaacgagaagttcgagataattgatattaccagcaaaatcaacgagttaatcgagatcgacgaaggcatagtcagcatcttctcaaaacactccacatccgcaattgttgtgaatgagaatgaggatggactcctgaaggacttggaggtgagtcttgatgacatcatctccgacaagttcagctattcccatgatatgattgacaataacgcccgcagccacctgaagtcgtttctcctgtcttcaagtgaaaacctgcccatcaaaaacggcagactggacctagggacttggcagagcgtatttttcgtcgaattggatgggccacggtacgacaggaccataattctcacgatggtgggtgaatga

SEQ ID NO: 8742 - DNA, 1659 bp, synthetic construct
  source 1..1659: mol_type = other DNA
atgcccgtgataacattcaaatatcaagatcttaaggacctgggcatcaatatggagaagaatgaactaatagacaccctgccgatgatgagcagtgacatcgaggacttcaacgacgaagaaattaaggtcgaatttttccccaacagaccagacaacctgtcggttgaaggggtggcccgctcatttaaggggtttattgggcaggaggtgggtttcccagactacaagattgaagaaagcggagaatatgtgatcgtggataaggacgttgcagcaatcaggccctacatcggatttgcgaagattaataatgtggatttttctggagataaactaaagtatattatggacttccaggagaacctccactgggtcatcggcagagaccgcaagaaagtagccataggcattcacaatgcagacgccgtcaacggcccctttaaatacatcgcgacgccaaaagatgccaatgcgttcgtgccactggaaaaggatatagagatgacccctgacgaaatcctcaccgagcatgaaaaggggaaagattatgcccacctgatccgaaatttcgataagtaccccttgatccttgataaaaataataacgtgttgagcatgcccccaatcatcaacggagagctcacgaaactcaaggaggacacacataacattatcgtggacgtaaccggtaccgatgccaaagccgtgaaccagacattgaacattatctgctcctccttcgccgaggtggggggccagatcaagtccatggaggtgaagtatgaggataagacactcgtcactcctgatttaactccgcaggaaatgaatgtgcacgttgacactgctaatgagctgatcggtggcaccgatctcacggccgaagatattagagagctgctgctgaaggcccggttcgatgctgagattatcagtgagaacgagataaagaccattatcccctcgtaccgagtagacatcctgcatgaagtcgatatcatcgaaaacatcgccgtacagtaccatattaacgacgtgatagccgaactgccggatatcaatactgtcgcttatgagaataactggtttaaaagcgaggcgaccatccgggaagtcatgatcgcaatgggattccaagaagtgatgtcactgatgctcacgaacgaagaggctcactacaagaagatgaaccaggaggagaagcctcacgttcaagttgcccggcctattacaatcgacaggaccatgattcgcaccagcttaattaactccctgatggagtttctggaggacaacaaacacgaagatctgcctcagaagatatttgagatcggcgacgtgctgtacctggacgagaccaaggagaataaaacagtgagctctaaaaaacttgctgcactcgtttgtcactccactgctaacttcagtgagataaaatcaattatgagcagtgtgctttcaaacctaggatacactatggacattagcgactccgagaataagaccttcatcgagggcagggcagctgacgtggtgggtgaggcccagaaagggataatcaagggcttcttcggcgaggtcagccccgaggtcattacaaactttacattggactacccagtcatcgggttcgaaatcgagtttattaacaagtga

SEQ ID NO: 8743 - DNA, 357 bp, synthetic construct
  source 1..357: mol_type = other DNA
atgcagatgatctggttttacgtggcgattgtgctggcaataagtgacatcctgcacaccacactcatgtggaaggtgctcaacaacttttacatacttttgggcgtgtttattcaacagtctacccacagcacgtggcagacctgggtgatccacgagatcatggaggctgccttccactttatcattctgtcaatcgtgttcctgaaccccactattggactgctagcagccctgattcacttcgtcatcgatgtctcccatacagtactgatacgcaatatgggggaattagaacatcgggcccttcatttcgttgtcgagagcctcttcttcatcttgatctatggcctctga

SEQ ID NO: 8744 - DNA, 2712 bp, synthetic construct
  source 1..2712: mol_type = other DNA
atgtccaatgaggagattcccaaggactacgattttaagaaagagaagttttgggagaaaaagtgggaagatgaggatatctaccggtatatcggcgacggatctcggccccgctacataattgacacccccccaccctacccaacaggattgattcacttgggtcatgttctgaactgggtgtacattgatatgaatgcaagatatcgaaggctgaaaggccacgacgtcctgttcccacagggatgggattgccacggccttccaactgaggtgaaagtggaggaaacacacggcatcaaaaagaatgatgtgtcccgggcgcagttccgagagtattgtgtcgacttaactacaaaaaatattgccagcatgaagtcccagatgaaggcaatgggcttttcacaagattggaatcgtgaatttattaccatgactcccgagtaccgcaagaggacccagtattctttcttaaagatgtacgaggagggacttatctatcaaggcatccacccggtaaactggtgccctcgttgtgagaccgctatcgcttttgcggaggtcgaatatagcgacaatacgacatttttgaactatgtgaacttcccccctgcagttgacgatagctatgacgatattgtgagttcacagagttctggtaagcaggcgagtccgaacgatgagggtatcctgattgccacgacccgacctgaactgatggccgcttgcgtggcagtggtgatccacccagaagacgaaagatacactcatctgctcgggaagtacgtggaagtgcctctgtcacatcagaaagtgaagatcatcgccgacgaggaggtggaccccgagtttggcacaggggccgtgatgatctgtaccttcggcgataagaccgacgtgagctgggtcaataagtatgacctggagatcatcgacatcatggatgagacaggcattctcaccgaggccgccggcaggtatgctggcatggatttgccaagtgcgaagaagcagaccatagaagacctcgacgctgagggctacctgctgaaacaggaacaggttgaccagaacgtcgggcagtgctggcgatgcaagacccccatagaaatcctggtgaagaagcagtggttcgtggccgtcagggagctcatcaaaaagaccaaggatgcagcagaggagatgaactgggtcccggagcacatgaaatcgcggatggtgaactgggcagatagcatggaatgggactggtgtatctcaagacagagaatttttgctactccaattcccgtatggtactgcaaggactgtggcaaagtcattctgcctgatgtggaggatctgcccattgacccaacgcaagacaaacctaaacatgcctgtgagtgcggctgcgaagaatttatccctgaggaagacgtccttgacacgtggatggactccagcataagccccctcagcatcgccggatggcctaatgaagactatattaaccacttccccgcggacatacggccgcaggggcatgatataatccggacttgggcgttctacacaacactccgctgccttgctctcacagggcaaaagcccttctcggacattgtgatcaatggcatggtctttggtgaggatggatacaagatgagtaagtcccggggaaacgtcatcggtcccgaagaggtcatcgaacagtatggggctgacgccctccgcacttgggctgccaacagtgtaccgggatctgatgtaatatttgattggaaagacattaagcacgggtaccggttcttgaggaaattctggaacgccttcaggttcatcagcatgcaaatttttgacgaaaaggtctcctatgacgagatcaaagacgacctggggcctctagatctgtggattctcagcaagctcaacaacctgaataaaaatgtcgacaaggcatttgccgaatacaacttcgcagatacaatcagctcaatcgagggttttttctggcacgacttctgtgatgagtatatagaggccgtgaagtacagactatacactgatgtaagtgacgagagcaaacgcgccgctaagtacacgttacgctgcgttgttgagacctccctgaaattgctggccccaatcgtgcccttcttcgtggaagaagtttaccagtacttcgacaaccaatcaatccataccacttcctggccggaagtaattgaggagctgatcagcgaggaaatggaagtgaagggggagaccacagtggagctcatagacgaggtgagacgcttcaaatccgcctccaagatcccacttaacgccgaactctcagaagtcaatgtctacacctccaacaacgatctgattgacgtatttaatcagttcgatgatgacatcaagggtacgctgaagataaacaacctagaaatcagttctggcaaaccagaggttcatgagaaaaccattgaggttgagcccgatatgagccagatcggccctaaattcaagggagatgctgggaaaattatcggatacttgaagtccaccgacattgaggagatcgccaatgtgctagatgaatcgcacgaactgactatcggggagatagtggtgcctgaagacatgctgaatatcaaaaaggagattgtgggagcaagcgggaagaaggtggacatccttcagtcggagaacctggacatgatcgttgaagttattaggtga

SEQ ID NO: 8745 - DNA, 630 bp, synthetic construct
  source 1..630: mol_type = other DNA
atgcggtacctcgtacacgtccaggaagcggtttctgaaaataagaaactaatcctgctcatgtcagtgattttcatcatatccgtggcggtaggcttcatttttcaggacattatctataaagaaataagccccatttttgagaagatggtccgcgagtttgtgaacgacccgaatagtaatctgggcttcgaaatattcatcaacaacatcagagcatccctcctgacatatgtgctatcagtgttctttgccctgatggctgtctttagcctgatcctcaacggcattatccttggggccgtcggtggcgcatacatgtccgccgatccagtgtacaacgggatcatgtttttggctttaattctgcctcacgggatttttgagattcccgccctgatcttcagctcggtggccggaatccttcttttcaaattcatattcaaatacctcaagaccttcgtcaagagggacgatttgagtctgaaggagatcttggacatgcataaggtgatcattaaacacagcatcatcctgctgatcctgtctttcgttctcttcgtgattgccgcagctatcgagggaaacttcaccggagcttttgccaagtggatacaaacgctgttttga

SEQ ID NO: 8746 - DNA, 165 bp, synthetic construct
  source 1..165: mol_type = other DNA
atgacgaagattaaaatacggctcttcgggatcgtgcgcaacctcggcctactggatctgtgcgtccacttctaccccgaactgaaccagaaaacaaccgagtgtaagaaaatcggagacattatccataacaggaatattaagatcaagtttgagagcatctga

SEQ ID NO: 8747 - DNA, 405 bp, synthetic construct
  source 1..405: mol_type = other DNA
atgggactactcgacaaggtcgtaggacacgccgaggtggggggggacacccagattgtcgaagagtatctcgctcccggtgaggaaattatccagagcttccatttcctgcgggacgccgttatattgacgaattatgggatatacgacattgatgtccagggcctgtccggtaaaaaagtgcaggtgaaattttaccctaagaaaaccatcaagacaatctcattcgaaagtgcgggctcttttgattttgatgtggacatcaaaatcggcgtgtccaacaaccccgttgtgctgatggagggcggagccatgaacatgccaatcagcttcaaggtgccgaaggcacaggctgaagaggcaaagcaaatcattcacctggtcaaggagcactacctgctttga

SEQ ID NO: 8748 - DNA, 1317 bp, synthetic construct
  source 1..1317: mol_type = other DNA
atgattcttaaggtcaagaacatcagcaacatcggaggggaggtgaaggcccccccaagcaagagttactctcacagggccgtgatactggcttcactggccaaaggcacctctaaactgtatgacatgctattttcggaagacactttagcaagcatccgagtgtgtaaggccttgggggcccagattaacaagaaagacgggtacctagaagtgataggaactaacggcaggctccataactcctgcgacgggccaatcgacctggccaatagtggaacgacgctccggttgatgacaagcgtctccgccctgagtgataatgaagttatcctcaccggtgacgaatcccttaagacaagaccgatgggtctcttgatggatgctcttaaaccactcggagtcgaaaccgagtcgctgaacggcgacgacaaagctccgatcttgattaagcccggttatctgggcggtgagactaatatcatgggcaacgttagctcacagttcatcagcagcattttaatatccgcacccctgtcgaaatgtggcgtgaacctctacgtgctgcccgagttcaagtcaaagccttacgtgtatatgacgtgggacatcatgcgcaaattcggcatccgatcagtgaaggcgtactacttaaagcacgattcttgtaatcaggaacaccaaagctgccgcatcgacgaatttaaaatcaagaaacaggagtacattgcctgtgattataccgtcgagggagactattccagcgcaagctacctcctggcattgatcgccattaacggcggcagtgcccgggtgaagaacctgttccggacctccaaacagggtgataaatttattctggatattctgcaacgcatgggcgctaccatcgtacgtggggacgattacgtggagattaccagtaaggggaatcttaaggcgatagacgtcgacctgtccaatgctcctgacctgctcattaccgttgccgtgctggcggcaatggccgagggaacaaccaacatcacaggtgtagctcacgccagagtcaaggagacggatagaatcgataccacttgcagggagctggagaagcttggatgctgcctcgaggaacacgaggatgggatgagcataactggcggggtcagttccggcgttgtggattctcatggagaccaccggctcgcaatggctttttccctaatcggcctgaagcatgacatcaaaattacaaatggggaaatcttcgacgtgtcattccctgatttcatagaaacaatggcgaagctgggatttgagctggagctggtatga

SEQ ID NO: 8749 - DNA, 630 bp, synthetic construct
  source 1..630: mol_type = other DNA
atgaacaaggaagagcgaataatccgcctggtagaatgcttggacaacaccttcgagataaggacatttcagaatcacgatccctaccaggtgctcattcggaccattctcagtcagagaacccgggacgagaacacagaccaggctaccaataacctattcagcaaatacaaagatatttacgaggtggccgaggcacccattgacgacgtcaaggaactgatcaggcctgcgggattttataacgtaaaggccgcacgcatccaggaggtcagccaaattttaatcgaccagtacggcggcgaagtgccaaatacggtcgaggagatgataaagctgcccggggtgggccgtaaaacggccaattgtgtcatggtttttgctttcgaacttccagccattccggtggatacccatgttcaccggatctcaaatagactgggactggtggatactaaaaacccggaagacacagaggtggagctgactaaaatcgcccctaaggatctgtggatcaagctcaacgatttgatggtgcagttcgggcaaaacatctgcaagccaatgtccccccagtgtgagatctgtccttgcagcgaaatctgcgactatttcaaggagaacatctga

SEQ ID NO: 8750 - DNA, 948 bp, synthetic construct
  source 1..948: mol_type = other DNA
atggtaaatgtgccagagttgaagaggggcgtccttgacagcgtggtggatgcgattggaaacacaccaatcataaaactcaacaatctgacgaaggacctagatgcagagatcgatgtaaagatggaagcattcaaccccacaggcagcgtcaaggacagagtggctgtggcaatgattgaagatgccgaggagaaaggattgcttaaggacgattccgtcattatcgagcccactagtggcaataccggtatcggaataggtttcgccgccgctgcaaaaggttacaacgtgatactgaccatgcctgaaaccatgtccgttgaacggaggaagctgctcgcgatctatggggctgaaatcgtcttgaccccagggtcggaagggatggacggcgcgattgccaaggccgaagagctgcaccgcgaaaaccccaacagcgtgatcctgggccagtttgacaacgaggctaatgtggccatacactacaaaacaaccggccaggagatactgcgcgacaccgagggaaatgttgactatgtggtggccggggtcgggactggagggacggtgaccggcattgggaaagcactgaaagaggttcttcctgatgtgaagattgtcgccgtggaaccggaagagtcacaaacactggccaagggcgccaaaggcccccataagatccagggcatcggcgccggattcgttccgtccatctacgacagcgatgtgattgacgagatcatcccagtccctagtgatgaggccggaaaaacgttaatcgctctggcaaaggaggagggtatcttcgcaggtattagctcaggcgctgctacttgggccgccctccagctcgcgatgcggaaggagaacaagggaaaaagaatcattgctatcctacccgacaacggggaacgatacctctctgtagagtggctgtttgagtga

SEQ ID NO: 8751 - DNA, 714 bp, synthetic construct
  source 1..714: mol_type = other DNA
atgttcaataatctgagggcagagatcaaggctattaaggagaaggacccggccgcacgatcaacactggaaatcttcttgtgttaccctggattctacgccctgctcatgcataggatttctcattggctttggaatcgcagcctcaagctcctcgctcgtatgaacagtaacctggctcggtttataacgggcatcgaaatccaccctggtgccacattcggcaaacgggtgttcattgatcacggcatgggggttgttgtgggagagacagcaattgtcggggatgacgtcctgatctatcagggagtcatccttgggggaaccagcacggaaaagaccaaaagacaccccacagttgagaagggagtgattatcggtgccggtgcgaaagtaatgggcaacatcactattggggagtactccaagatcgggaccggcgccgtggtattgaaggacgtgccccccgaatccacttgcgtcggcgtgccaggccggatagtgaagcgcaaaggcgtgccacacgaaaaagtggatctggatcacaacaagctgccagaccccgtcgccgacgcgatcatcaccattaacaagcatctgcaagagaatgatgagcacataaagatactgtttgacaaaaacgagatctgcctcactgacgatatcagggacgaacaggagaccctagaagacttatttaaaagagaggagtga

SEQ ID NO: 8752 - DNA, 375 bp, synthetic construct
  source 1..375: mol_type = other DNA
atgaagccgccttgtgagattgtagtctggtatgtgatacccgccatccggtcagaactggcaaaggaactcttgaacctggggatgaagcaaaaagatgtgagcgagctgatggacatcactcagccagcggtctcccagtacataaccgacaaaagaggcagtggaattaagctagacgacaatgttagggacatgatcaagaacttcgcccgccagctcagcgtgggtgaggctacgaaagccgatcttatcagcaccacatgcaaaatttgcaaccacgtgaagctgtccgacgtgctcgatcagctgaacatcgacaagtcggagctgggcgaagattgccagagttgtttagggtctgaggtcaattga

SEQ ID NO: 8753 - DNA, 1347 bp, synthetic construct
  source 1..1347: mol_type = other DNA
atggatgtctattccaccttgacgcgtagcaaggagaactttgtgacgatcaataagaacagggtgaacttgtttgtatgcgggccaacagtttacgatgatgcccacatcgggcatggccgaacatacatctctttcgacacaatcaagcgatacctggaatacaagggttacgcagtgttttatattcagaatattacagatatcgacgacaagatcatcaacaggtcaaaagagagtggcatcccggcaagcatcctagcccggaagttcgaaaaacgatacatcgaagacatgcacaaattgaatgtcaacggtgtgaatctctttgcaagagccactgaccatgtggacgaaatactggatcaaatacagaggttgatcgataagggcttcgcttatgagaccgaagacggggtgtactttgagatcgataagttcccggagtttggaaagctgtccaaccggaacgtagaagagctagagtcccaccgcgacattgtcgagaccactaagaagaatcctcaggactttgcactgtggaaaaagcggattgatgtagacgaacccacttggccttccccctggggggagggcagacccggatggcatattgaggatacagccatcaccgagtattactttggctcgcagtatgacgcgcatgggggaggcttagacctcattttcccccaccacgaggccgagatcacccagatggaagccgtcagcggaaaggccccaatggtgaaattctggctgcacaccggcttcctgaacgtgaatggcgagaaaatgagcaaatcacttaacaacttcatcaccatacgggagttactcgaggattacgagccagacacgttccggttcttcgtgctttccacccactacaggagtcccatcgattttagcaaggagtcactgcaccagtcggaaaagagccttgaccgcatccgcaagtactatgagctcctggatgttgaggtggacgaaaataaatacgagtgtgacgttctggctcctcacatggaggaatttttcaatagtatggatgacgacttcaacacaccaaaagcgatcgccgctatttttggactgataaacgatactaaaaaagagctctccgaattttctagtgaagacaagagagctattaaatcattcctcgacgatgcctcccatattttcggggtgagcttcgaagctgaagaagtcaacgcgggactggacgatctgcttaacgtgatttctgaagtccgcagtgagctcagggccagcaagcagtatgacctgagcgacaagattagagacgagctgcaaaagctgggttatgagataaatgattga

SEQ ID NO: 8754 - DNA, 210 bp, synthetic construct
  source 1..210: mol_type = other DNA
atgctcaaagtgcggatatggaagctgctgctgggcgtcctgattctgtccaagtcattcgaaaaagagattatcagcgaagacaccgcaaacagcttatggatcgccatggtgaacaatggaatccacctccccaaggatttgttcctcgactactgtagtaggctttatgagatcgactgcgagaagttcctaatggattacttttga

SEQ ID NO: 8755 - DNA, 1299 bp, synthetic construct
  source 1..1299: mol_type = other DNA
atgaataacaaggattatggtctggccaccctcggagtccgggcagggcagcagcccgacccggccactggggcccaggcggtgcccatctaccagaccacctcctacgtgtttaaggacgccagtgaagcggccaggagattcgccctccaggagttcggtcaaatctattcccgccttacgaacccaaccagcgatgtctttgaagcacgcatagctgcgatcgaggggggcaattcaggcctgtcgacatcaagtggcctggccgctatttcatacgccatcttgaacgtgacaggtcccggcgacaacattgtgtctgccgacaacctctacggcggtacctaccaactgtttaactacactttcaaagacctagctcgggaagtcaagttcgtcaatagccaggacctccaggccttcgaagacgccatcgatgagaagaccaaggcaatctacgtggaatctattggcaatccaaagctggatgtgcccgactttgaagcacttgctgaaatagcccactcccatgatatccccttgattgtggacaacacggtgggcgtgggattagttaggccactgctccacggagcggacgtaatcgctgcgagtgccactaagtatgttggcggccacggaactgctgtgggggggtatatcgttgactccgggaagtttaactgggggaatggcaagttcgataatttcacaaaagccgatccatcgtaccacggactagtattttgggatgccttcggcgacgtgccagagctggggaacattgcctttactgtgcgcgcacgggcacgactgttgagagacctgggagctacccaggctccggtacacagcttcatcttcctgcagggacttgaatccctggacgtccgagtcaagagacactctgagaacgccctcaaggtcgcgaaattcttagagagccatcctaaagtgaactgggttaattatcctggattggaatctcacgcaacctatgagaataacaaaaaatacctcaaaaatcatttcgcaggcatccttggatttggggtgaaaggcggagaggaggctggtaagaaggtcattgagaacctcaaactgttctccatacttgcaaacattggggacgccaagagcctggccatacatcctgcaagcacaacccaccagcagctgacgcccgaggagcaggaggccacaggtgtgacacctgactttatcaggctgagcatcggcctcgaggacgctgatgatctgatcgaggatctgagtcaagctctagattgcattgactga

SEQ ID NO: 8756 - DNA, 1206 bp, synthetic construct
  source 1..1206: mol_type = other DNA
atgtatctcgacaacagcgctacaacacaagtgagcaaggaagtgttcgaagagatgaagccatacttccgcgaagagtttggaaaccccagcacgctctataagctgggtcgggaaagcaagaaagcgctggatcaagctcggcagagagtggcgaatgccatcaatgccaagcccgaggagatctatttcaccagtggcggctccgagagcgacaatctggcaattaaggggattgtatttaagctggccaaaaaggggaagcacataatcacaaccgaaatcgaacatcctgccgtcaagaggaccttacagttcctcgagtccctggactttaaagtcacttacctgccggtgtacgagaatggcatcatcaagattgacgacttgaaggaggcgatcaccgacgaaacgatcttaataagtgtcatgcacggcaacaacgagctcggcaccatacagccaattgaggaaatcggtaaggtggctcgggagaaaggaatcaacttccataccgatgctgtgcagactttcgggaagattgaggtggacgttgagaaactaaatgtggacctgctggccctgtcttctcacaaaatcaacggccccaagggtgtcggcgccctctacatcaaaaagggaacccgtctggagcccctgattcatgggggcgggcaggaaaagggcattaggtccggtactgaaaacgtccctggcatcgttggattcggcaaagcctgcgaactggccgccgatcagctggacgagcactatgagaagctaacaagcatccgcaacgagatctctgacaagatattgaacaccattccagaggcttacctgaacggtgacgcagaaaaaagactcccgaacctacttaatttccgctttaaagctattgaaggggagagccttatcttgctgcttgatgcaaaagggtaccaggcttcaacgggatcggcatgctcgtccaatacacttgaggcatcccccgtgctcacagcattgggactcgaccctgtggatgtccacggatcactgcgaatatccctggcccctgaaagtgaggagtttgatgtagatgattttgtgaatactgtggccgagagtgttgcccgacttagagaaatgtcaccactctggaaccaggagattgattacgacggggtaatgtgccggaagaatgacaactgtaaaaggtgttga

SEQ ID NO: 8757 - DNA, 372 bp, synthetic construct
  source 1..372: mol_type = other DNA
atggactactcagagaaagtaatggaccatttcgccaatcctcgcaactcccggaaaatggaggatgccaatggggtgggaaccgtcgggaaccccacatgcggcgacctgatgaccatatatatcaaggtggaggacaacattatcaaggatattagcttccagacgtttggttgcggcgcggctattgccaccagttccatgatcactgaaatagctgtcggaaagacactagaggaagcacttaagatcagcaggaatgacgttgcagaggagctcgatgggctcccaccggtgaaaatgcactgttctaacctggccgccgatggcctgcaagctgcgatcgaaaactactacgaaaacaatcagtga

SEQ ID NO: 8758 - DNA, 372 bp, synthetic construct
  source 1..372: mol_type = other DNA
atggcaaactttgtgaagtgcgataagtgtgggagtatactcggcatgttcgttaagggggagggagaagtctgcagccccgacctgctagagatccctgtacagaccgaaggcgacaaggccccgaaacacaagccagtggtggaggtggacggcgacaagctgacggtcaaagttggagaggtcgcgcaccccatggatgacgaccattatatccagtttgtggccgtggaaatcggtagcgagctctacgctaaatgcttcaaaccaggggatgtggcggaggccaccttcacaattggcgcagacaagtcagctgatgctgtcgcctacgccttctgtaatctgcacggactttggtccagcgaatga

SEQ ID NO: 8759 - DNA, 519 bp, synthetic construct
  source 1..519: mol_type = other DNA
gtgagcagctatagtaagctgataattttcatcctcgtgctgctgtttattagtgccgccattttcttcatcgacagcagcatggattccatcaacaggaccatgcccggagtgagcgattccatcgttaacggggacaaagagtacaacgaagcggtgcagctggtcaatgataaaagttttgacgaagcaaagaccaaggccgtatccgcagagaataactataacaactcccttattaagctcaacggcatacggaataatttttcgagcgacatcaacgaagtgcaggaggaatatattggcactgttatcaaggaattggagttaaagattaatgctgtcaacaacctaaaggaggctatcgactgcttcaaaatcaattcaaactacacaggtacgaattacgccagcaaagccaatgatctcatgtacgaggcgacagagtaccagcacgagcgcaactcaatagtcaaaaataacagcaatctgttcaagcagcaaaactttgtgatctga

SEQ ID NO: 8760 - DNA, 2283 bp, synthetic construct
  source 1..2283: mol_type = other DNA
atgaccaaggagtttttaaagttgaaaaccaagtgccccaagtgtaagggcattggtagtgtcgtggtggactataaggagtgtaaagcctgtgggggaactggctacgaagacgatgctttcaatattgggaaccattttaaaggggtaaacagcaatgccaaggcgaagtttgacttaggcggcgaagaggatattccatgtgaggcctgcaatggaaaagggcagatcgaggtgttcgaggagtgtagccattgccatggcaccggtcagattaacgtctgtcgggactgcgggaagtcaattggagatcaacacgacctgtgcgctgagtgcgaggagaagcggaaattggaaaaagctaagcacgataaattcgaagctcgtcgcagtgcggcccgtgacgtctacatcctggacagcctatgtaagatgagtgatatcgacaaagacaaactgtacaaaggaagaattacccgcgtcgaaaaatatggggcctttgtaactctaaacaataatgtgtggggcctgatgaggggtgacaactttgggtacaatgtgggagacgatgtcatcgtctacgtgacggccattaagagcagagagcggaaaatagacctggctcccgctcacgtggaaagctacaatattaaaaagctgacgaaaacattcccaaggactctgatagggaagctcgaggagaaaaaaggccggatggttcgcatcgacggggaggtgcagcagatccagcaaacctccgggccaaccatattcataatcagtgatgaaactggttctagtgaaatcgccgcgtttgacaaggcaggggagcgctcctatccggaaatcgagctgggcgatgccgtgcaggtggtcggtgaagtgaacgagcacgggggaaagacacaaatcgagtcctcgtccatggtaaaactcaacgaggaaaatacggccaagctccataagctcatcgacgatgccctcaacaagaaggccgagccacagcacgttgatttcctcgtcgaaagcgatattctgaaccggctaaagcctaagatgagggaagcggcccagaagatccgcagggccatacttgacgggaggaccatcttactccggcaccacaacgatgcagacggcatttgctcaggcgtggcaatggagaaggccatcattcccctcatagagaaggtcaaccctagcaatgacgctcagtactactacttcaagcgctctccatccaaagctccattttatgagctggaggacgttgtgaaagacctgtctttcgcactggaggaccaggagaggcacggccagaaattgcccctgattgtgctgctcgacaatggctcaaccgaggaggatatcgtggcgttgatgcaggccaagatttatgatatcgaggtggtggttattgaccaccactcgcccggagaactgctgaccaaaaacatccaagatggcaagatatatggagcgaccgttgccgtggacgaatacgttgactgccacgtcaatccttatttggtgggcggagattcccagctgactgccggagctctggccacagaagttgcccaccttatcaacccggacgtaaaagaagtaatcaaacacctgccggccgtggcagcactgggcgataaggccgaatgcagcgaggctgaccagtatttggagattgcgaaccagaagggtttcgagcgagagcacctagctaagatcgcagaatgtgtggactttgaagcatttttcctgagattcatgaatggccgaggaataatggacacaattcttgctgtggataacatcgataaacatgagaagatgatcgatgcactttacaaggaataccagaagagagttgacacgcaactcaaggccacacttcccaacattaaaagaactcagttcgaaaacggcatttactttaatctcatcgacgtggaaaagtacgcacacaagtttacattccccgctcccgggaagacctgcggtttcgtccatgacaacgtcaagcaggagctgggcgaggataaacctatcgtaacactggggcatggccctgattttggagtgttccgagccaccgatgctgtgaacgagcagtacggattcaatgtcaacgaaatcgtctctaagatgatggactccgtgcctcaagcaggtatcgatggcggaggtcatgagtgcgccggctcaatcaagtatatagagggacttggggaagaagtgctgagcaaagttatcggcgagatccagtccctctctaagaactga

SEQ ID NO: 8761 - DNA, 894 bp, synthetic construct
  source 1..894: mol_type = other DNA
atgacccttgagaattattgcaagaaatgcggccatcggattctcccaaacaatccctactgccccggatgcggctgtaagactatctacacagagaatgacgaatcctacgtgttcaccccaccggtacacgacattggcttcttcaatttttcaatcgacttttccccctatatcatgagcaatcgggatgatttcaagtatgacatatgccactgcgggtacctaaatgacgtcaccaacgagttttgttacatgtgtggggcgaagcgtttccacagcaaactcgcccgcttcttgaagaaccggtccaagccaaaatttaacctcgataatgtgctgtgtgaatgcggagccgttaacagcaaagagaacagtttctgcgagatgtgcgggaagcagctgcatgagcacgaaacgaaaatatacaaaagcaacaattacagcaattttaatctggagttcaagaacagtgtgttctgcttttgcggtgaggaaaacgaggaaagctctcaattctgcagaaactgcggactgccgctgataaattatggtcatctgtcggacatggcattattgtgtgtctgttccaccctcaatgatattaactcctccttttgtattgaatgtggcctgaacctcaagaaagagaatagccttatcgtgtgcgtgtgcggacacaagaaccctatctcggctaagttttgccagaactgtgagcgacccctgaatcctaagagactgattaactcaaagatcctttgttcatgtggggaaatcctggactggaacactgagttctgccctaactgtggcaaaaacatcaaaaacaggatgatcatccgcaatagtattaacaacacagtcaagagtctaaagagcatcttcaggtga

SEQ ID NO: 8762 - DNA, 978 bp, synthetic construct
  source 1..978: mol_type = other DNA
ctgaaaaagtgcgatgtgtgcggaacccttaactttaaggacaacaattactgcacccactgcggcaacaagttcatctttgagcatgtctgcccctactgtggttccattaacgaggactatgcgaatttctgtgctaattgcaacgggcagatcaatccgatttctattaatgatttcgatatactcttcagcgaatttaacgaaaactgtctcctcaacgctaaaataagtgatgagaaatataatgacttactacgcaatatctttctgcgggcagactttacagagatccatggcaacaccataaaagacaagattctaaaccttgccagcatcttcacgcagtgtaaacctaagtcccgaggctacgaaagaggattcatctttctgggcaactacatttactacgatgaccggctggacgaaagcgtgcagatcgcaacgatcattcacgagcttgcccactacctgatcttcagcatcatcgagtccctcctgtgcgatatattcaatgtaaagacatcaaccactttgcaaagcttcatatggtatttcctcatgatccccgagtttaagatcatgaacgaatactgcgcccacactgtggagggcaggttcatcccatacggataccagaactacggttccttcaacctcttggtcaagaacacatcttttgatgaggactcgatcaaaaccatggagatgttcgggaacagctttgccaatgaaataatcatttatctggaaaaatacattgggaacgacctgcgccaggagatcaagctgcaatataaaatggacctgaagagtcccagttatgactcaattctgatggaaactgatgagtgttttaacttaaatgacaagaataggatgctgctcaaaatcttgtatgatgtgttcaaggaagccagcaacccaaatgttatctgtgagctgaagaatattaaggaggggattgacctgaactga

SEQ ID NO: 8763 - DNA, 297 bp, synthetic construct
  source 1..297: mol_type = other DNA
atgggcaacgagaaggacgagcttttgaagctgaccagctatgtccagattagcaaataccgcgaaaagacactcaagtccatcggtgatgacgtgaaaatccccaccaacatcgccaaagactccggcatcagaactaatcacatttcaaaggtgctaagtgaactcaagagcaaagaaattgtggagtgcataaatgaagaggcacggaagggaaggctgtaccgactgacagatacggggaaggacgtactggaaaccatcaaagtcaaggaggagaaagagaacaaggattga

SEQ ID NO: 8764 - DNA, 612 bp, synthetic construct
  source 1..612: mol_type = other DNA
atgaagtgcaagtattgcggcatcgagaacaagaagagtgcaaaattttgtacatcctgcggtaagccactgaacgaatcccccgaaccgaccggagggaacagcaagctgatcatcattgcactcatcgccattataatcattctcgttggaaccatcggcttcttcgtcctgaacaataacttcaatagccatgacagtgagattccaaataacaccgtgagcagccaggagagtaacagtgccaatatccaagactccgacaacgggggggatgtcaaaacgcaggtgacatcatctcagaccacgaactctaaatcatgggagcccatcggaagctactcaggcagcggctcaggcagcaagaccattacggtccccgaaggcaaaataaaagtggagttttcggcgtatcctattaaaaattatgccactaattacctaacagtgtccggctctaacggtgagtcggggggagtagattgggggtctcacagtgctgtgaagaccaagtctgattccttcatctacacctccagctcctccgagacatttactatagactattacgaaactgtgagctgggaagttcacttctaccggtaccagtga

SEQ ID NO: 8765 - DNA, 711 bp, synthetic construct
  source 1..711: mol_type = other DNA
atgttcttcgatctgaatattaaggggagtaccttggagaataatatcaagctggctaaagaggcttccttttacggctggaatcacatcaatttcagttacaatgcgaacaactttctaaacgccctaaacttcaaggacgagctcaacaaggccctgggagatatcattgactttgactatactctcgagatcaagtcgagcaacattaacgatattcggaagtctgtgaacaagttccggaataggtccagctgcatctccgtggttggcggtgacctcaaggtcaaccgcgccacattagaaaacataaaaatagatgtgttgtcacgaccataccttagacgctatgactgcgggctgaaccatgtgcttgcaaaggaagccgagaagaacaatgtagccgtcgagttgtgtttcaaggacgtcctgaaaagctacctgtcttatcggtcaaaaatccttagtaatttcaaagatatatatacactgtaccgcaaatttgactttcccctcgtgctgagcagcagagcggagagcgtgtttgacatccgtactacccacgatttcatcacgttcttcaagcagaccggcctcaccgacgctgaaatcaacaaatcctttaaaacagcagataacattctgaaatacaacaagaatagggaaaacctgattctgaagggagtgatgagggttaccgacgaaacgtga

SEQ ID NO: 8766 - DNA, 357 bp, synthetic construct
  source 1..357: mol_type = other DNA
atgaaactgaaggtactgccacccacactcaggaagaacaatcgctatctgacggtggatgtgaaggtgacctgtcagatcacaaaagacgacctcgtggccattgtctgggacgcatgcatccggtttcagggggagctaaacaccgctaacttcaacctttgggtgatgaagttcttcgaaatcgaaaaacgtgacgattactataggtaccgaagcatcatcagatgccaacgggactatgttgatgaggtccgctcatcttttgccttgaccaatagatacggtaacaatatgattagcattactaccataggactgtccggcactataaaaagttccggcaagtacatctga

SEQ ID NO: 8767 - DNA, 768 bp, synthetic construct
  source 1..768: mol_type = other DNA
atgcagcccctccagaacgccggatatgaccgggccattactgtcttcagcccagatggcagactgttccaggtcgaatatgcaagggaagccgtgaagcgcggaacgacatctataggggtcaaaagtagcgaggggattgtgttggcggtggataaacgtaccacctccaagctggttgaagcctcatctatcgagaagatcttcaagatcgacgatcacattggagccgctactagcggtctggtggctgatgcaagagctcttgttgagagggcccgggtggaggcacagataaacaagataacctacagtgagcctattcgcgtgacaagcctgagcaaaaagctgtgcgacatgttgcagttatacacccagaatgggggagtgcgaccctttgggtcggccctcatcattggtggcgtctacgatggggtatgtaagctgttcgagaccgacccgagcggcgcactgatcgaatacaaggcgacagctatcggctcaggccggtccgccgctatggagatctttgaggagaaatacgaagacgacctcacactggacgaggccatcgagctcgcactgaccgccatcaatgaagctacggaccatgacactgtgtccaacaacgttgaaatcgccgtgattaaggtcgatggcgagaagtatgtgaaactttctcaagatgaagtccagaaatacatcgatgaggtactagtggaagaagaggaggaggagtccgcggacagtcaagaagacgaggaatga

SEQ ID NO: 8768 - DNA, 702 bp, synthetic construct
  source 1..702: mol_type = other DNA
atggtcaacattgacgaggctatcatcgcgaaatacgagtactgcggtgagcatttcgagatattggtggaccccgatctggcagccgacttcaggaaccctgacggcccagacgttgccattgaagatcttctggccgtggaggagatttttaaagactccaagaaaggggataaagccagcgacgaagctatgaataagatatttgaaaccacagatcccatcgaggtgagcaagattatactcgaaaaggggacggtccaactaactgctgaccagaaaaggaagatgcaggaggacaagcggaagctggtcatcaacaaaatcgccaaggaagcagtgaacccgcaaaacggcctgcctcaccccgtccagagaattgagaatgcctgtgacgaggcccgagtgaagttcgatcccttcacctctgtagaccagcaggtacagactgctttaaaagccatcaagccactgatcccaatccggttcgagcgcgtgaaagtggctgttcgcctccctggcgcatcggccggaagtgcgtattccatcatccacggatttggagaaattatcaatgaagaatggcagcaggatggctcatggataggtatcatcgagatgccgggcgggctccaagataagtttagtgcaaagatggccgagattagcgggggaaacgcggaaacaaaaaccattaagtga

SEQ ID NO: 8769 - DNA, 921 bp, synthetic construct
  source 1..921: mol_type = other DNA
atgatctatgtggaaaacaaggacctcgtgattcctggtcagatactggctgacgacgagtactattcgggaagagggacctttaaagagaacgggaaggtttgttctagcttgatgggccttgtgagcctcaggaacaaaaaacttcgggtgattccactgaagtccaaatacgttccaaagaagggcgatgtggtaatagggaagattagtgatgtgaggttcagcatgtggaacgtcgacatcaattcaccttattctggaatcctacccgctttcgaggtgttcggtcgggagaagaaggagctcaacaaagtctacgacatcggggatgtgctatttctgagagtggtcgacgtcgatgagatcaaaaaggcaaagctcggtctgaagggacgaggaatgggcaagtttaaaggaggaatcatcgtagatattgccccaacaaaggtgccccgcctgattggcaagaaagggagcatgatcaacatgattaaggacaaaactaattgcaaaatcgtcgtgggtcagaacggcctggtctgggtaaagggggacaaggacatggaacagctgacgaaaaatataattcacttaatagaggcggaggcgcacacaagcggcctgaccaacaagatcaaaaacaaattgtacctggccattgacggggagctgccccccgaggaagccgaagaagagcaagacttcgttctcgagaagccgaagcttcaggactttaaggaagagttggaacaggaagagcgcgcaaaacatgaagccaaggaaatcaaagaaaaaggcgataagcctaacatcgccgaggtgatcgaggagctgaagcgtaagaataagagtaaaaaagataatggcctgtcatacggcgataactccaataattccttcatcctcaacaataagtga

SEQ ID NO: 8770 - DNA, 696 bp, synthetic construct
  source 1..696: mol_type = other DNA
atgtcggagttcattagaaaggacggtaggaagtatgatgagttacgccccatcaagattgaagccggcgtgctcgaacgggcagatggctcagcttacctagagttcggcggaaacaaaatccttgtagctgtgtacgggcctcgagagagctacatccgcagactgctgaaaccaaacactggagtgattagatgcaggtataacatggccccattctccgtcgacgaccgcaaacgcccaggacccgaccggcggagctccgagatctctaagatcacagcggacgcactcaggcctgccctgatgttggaaaattacccgcggtcaatgattgacgtatatatcgaggtgatagaagccgagggcggcacccgttgtgctggcattaccgcggccagcgttgccctggttgacgcaggaatccctatgaaggatatcgtggtcgggtgcgccgcaggcaaggtggatgatgaggtcgtcctggacctgagtgaatacgaggataaagaagggcaggcggatatccccatcgctataatgccccgaacgggggaaattactctcctccagtccgacggtgacttgaccgaagaggagtttcagaaggccatagacctggccatggaggggtgccttaaagtgagtgagctgcaaaaggaggctctgatgaaaaagtacagcacagaacagtga

SEQ ID NO: 8771 - DNA, 786 bp, synthetic construct
  source 1..786: mol_type = other DNA
atggatatagtcccagagatcacaagacagagcattgctgacctgatcaagaatgacaagcgcgaagacggcagggacctgaccgaatatagggatattactatcgagacagacgtgatctccaaggcggagggctctgcgcgtgtaaagcttgggggcacgcaggtcatcgttgggatcaaaccacagctcggaacacccttccctgatactccggatctgggagtgctaatgaccaactgcgagatgctaccaatggccgatccttgttttgagcccggcccccccagcgaagacagcattgagctggcccgggtggtggatcgagggatacgggaatcgcagctgattgatctcgacaagctgtgcgtggaggagggaaagcatgtttggatgttgtttgtggacttacacattatcgacaactgcggaaatctgtttgacgcctgtgaattggccgtcatggccgctctcaaatccactaaattgccggtcgcaaacatcgtggatgatgaggtagtgataagtgacgatgaaaccttcgacctgcccattaataacgaacttgcactctgcaccttcgtgaaaatcgctgacaagatggtaatcgacccaacactggatgagcaaagagtcgcctgcgcccgcctgaatgttggtgtgacgaaagacgggcacatctgttcaatgcagaagggtggcgaggagcctcttaccaaggacgaaattttctactgtgtgaacaccgcaatgggcaaagtcaacgagctcatcgaaaacctgtga

SEQ ID NO: 8772 - DNA, 630 bp, synthetic construct
  source 1..630: mol_type = other DNA
atgagcaacacaattaaaaatgacgagaatataaaatcttgcatcatcctttgtggcgggcagagtaggagaatgggtcaggacaaagggtcgatgattatccaaaataagcctatgataaaacacatcctgtctactctgaacaagcatatcgatgaggtcataattgtgctgaatgaccaggtacgggttgataaatacgccaagttcatcaaccctgaggaatacacctactccatcacattcctcaaggataaaattaagagcaagggaccactgtccggcattatgactgggctcggcgagataaagagtgactacgcgttaattttgccctgcgacagcccctacgtgagcgaagactatatccaaacgattttctcccagatagatagcgattatcaggcaattgtcccctaccacgacgagaacaacaagttgaagacctcagagccgctgcactcaatctataagaaagacaccattaccgagatcgaaaagctagtgaacgaggacgtgctgcatatcaaaggacttatcgaaaagatcacgacaaagtttatcctgattgataacaaaaagatcgaaaaaaaggagtttcgcaatctcaaccgaccagaagacatctga

SEQ ID NO: 8773 - DNA, 762 bp, synthetic construct
  source 1..762: mol_type = other DNA
atggacgaacatgagaagtggaagattaaattcagcctgctgatggtggtgctcatcatcatcatctatggcagcaattacctcgtgctcggagacggtgaacatattattagctacgtgtggacacacctggggttcattcctgttgatattctcgtggtcgccttcctgcttgagggaatcatcgagcggaaagaaaaggaggccatgcttgagaagctggacatgctcatgagcactttcttctcagagttagggaacgacctgataacccagctaagtaccgcgaaccgacataaggcatccaccgccagtctgaaatcaattaaaaactgggatgacgaggattacgaagataagttggaggagctgaaaaattccccgatcgagtttacagccaatatcgcccccgaaaaccgggagaagtttttggaggatctgcgcgaattgctggtcaacaagagggaatttatcctgaatctcataaataacccaaacctacttgaaaaggaggaatttacttcgttgatcaatgctatccttcacttagacgaggagctggagcacaggaaagacctggctctcgtaaatgatatagacttcggccacctgaacggcgacatgaacagagtgtacaatattctagtccacgaatgggtgtattatctgaaatacctgaacaagcatcacccctacatgatcgcactcatgatacgcacgaacccattcgacgaagatgcgtccgtctatgttaccgagtga

SEQ ID NO: 8774 - DNA, 564 bp, synthetic construct
  source 1..564: mol_type = other DNA
atgctggacgataaggacttcatcaagtcctgtgatgtgccggggcctacaaaggaagctatcagggcgataatcctttacaagtccgaagtgacaagcaaagacaaggtcgtcgattgcggctgcggaacgggcgggattacttgcgagttttcccagcgggccggtgaagtaataagcatcgataccgaccccgaggccattgatgtgacaagtaagaacctgaaaaaattcgggcttggagacaacgtcactctgattaacgacaacggctcgaaggcactgaagaacatcaaagacattgacatagccatcgtgggaggcagcggcagacagctagaaaatatcctggacatcatcaatgagaacctcaattcaaagggccgcatcattatcaccgctatcctggtggacaccaaggttgaggccattaacaagctcaaagatttagggtataatcccaaaatcatggaggtgaacgtttctaatggaagggtcctcgatcggggtgtgttgatgattagtgagaacccaatagcaattatcaccgccaaaaagcgatga

SEQ ID NO: 8775 - DNA, 549 bp, synthetic construct
  source 1..549: mol_type = other DNA
atgatcgtggtcggcattactggcgccagcggagtaatttacgggatcaaactccttgaggcgctcaaggagctgaatatcgagagtgccctggtgataagtgacctggccaaggtggtgatcgaatccgaaaccgattatacctttgaggacgtcataaaactgtcaaacacctacttcgactttcatgatctcactgcatctataaacagcggttcattcaaaacagatggcctagtgatcgtgccatgcacaatgaaaaccttgtccagcattgctaatggatatggggctaataccatcacgcgcgtggccgacgtctccctgaaagaaaagcggccaacaattattgtccctcgagagactccccttagaagcatccacctgcagaacatgctcacactgagccaagagggagccaccatcttacccgcaatgcccgggttttacagcaatccgaagacgatcgatgaccagatcaacttcgttgttggcaagattttggactcgctgaagatcgaaaacaacctgttcaagaggtgggagtga

SEQ ID NO: 8776 - DNA, 1227 bp, synthetic construct
  source 1..1227: mol_type = other DNA
atgagtgagaaaaagaagtttatccgagatagtgtctatggagacattaacctaaacgactttgaagtcaaaattatggatatgccgcagttccaacgcctcagacgaattaagcagctggggttgattagcctgatttatcccggggccacccacactcgctttgagcacagcattggcacaatgaacctgggctccaaactcgcggaggagcttgacctgaagaaagatgagatagagctgatccggtcttcctcactgctccatgacatcggccacggtcccttctcacatgtatccgagggcgtgctatcggtgccccatgaggaactcacgaagtttgttgtcactaagacgtccatgagggaactgctggaagaaaagttcgatgttaacgagatcgtcgatattgtgaatgggaaaggatatcttggcccaatcgtgtctggggagctggacgttgatcgcatggattatctgctccgggactcgcacaacaccggtgtggcctacggcattatagactatgagaggatcatttccaatctgaaactggagaacggattgatactcgatatcaaaggagtccaggctgcggaaggcgcccttgtgagtagatacttcatgtaccctagtgtgtaccagcaccacacaactcgaatcgtcaatagcatgtttagacgggctttaaaaaagattatcgatgagaagataatcaacgaaaaggatatttacaaatacgacgacaccgacatgattagcatcttccggcactgcgacaataccttcgcaaacgacatcatgaaccggctagacaatagacgcatcatgaaaagagtgaaaaccatcaggctcaacaatttcaagtttccagagaagatgtacaagatcaaagcaaaaaccttgaggaaggccgaagaagagattgccgaagattatggtctcgataaggactatgtgttcatcaatatcgctgaataccctcgttttgatgagatgaagacacaagtgaatgtggacgggaagttatacccattgacaaagatatcaaacattatcggcgcactgagcaaggcccgcttcaatatacctgacatcagcgtatacgtagacaacagcgaaaggtccaagtttgataagttcaagctggagaactacctggagctgcccgagatcgaccgggagaagttccacggaatccattacgaccagatcaaacttatatga

SEQ ID NO: 8777 - DNA, 288 bp, synthetic construct
  source 1..288: mol_type = other DNA
atgaaaggctccgtcaaggccaaactaatcgtatttatggtgatcgcactcctcgcgttcgggattagctcggccttcgctagtctgataataagcgacagccctgattcctacaagctgatccccatcaagaacgactcattcgagcccaactacattaacaaggtcccgactatccttccaaaggtggaaacaaacaacacgacaaatattaccaccaataaaactaactataacatgaccaatctgaactataccaatcagtgggtggaaacatacgagaattga

SEQ ID NO: 8778 - DNA, 1218 bp, synthetic construct
  source 1..1218: mol_type = other DNA
atggtgatgttttccgcgggtgacactgcttgggtgcttgtgtgtacccttctggtcctcttgatgtccatccccgccgtcgccttcttttatggcggcctgagcaagcggaagaatgtgctgaacaccattttcctgacttttatcgccttttcaataatatccgtcatctgggtgatttttggttaccaatttgcatttggctcagatattaacggcctgatagggtcacccaccaatttcttcctccagggaatcggcattgatgacctcagtggcagcattcccacactactgttcgtcatgttccagtgcgccttcgccggactgacatgcgcaatcatgtctggcgctttggtcgggagaatgaagacaaaagcttgggttattttcaccgtcttgtgggtatgcctggtttatgtccctatcgctcactgggtctggggaggagggtggctaatgcagatgggagccctggactttgcagggggtgcggtcgttcacattaacagcgggatcagcgcattggctgtggcattagtcctgggacgccgaaagaacaccagcttaatcccacataacctgggatacgctgtgctcggggccgcactactctggttcggatggatgggattcaacggcggatctggccttgccgccaacggcctggcggcaaatgccataatcgtctctaacgttgcagccgccacggggcttattgtgtggacaatcattgatacgtacctggtgggcaagccaaccgtgctgggcgcgatcagcggggcggtggcgggactcgtaggtatcacgccggcagctggcttcgtggacgtttatggagccctgatcattggggctgtagctccactggtatcctactttgccgtatactacctgaagcccaaactcgggtacgacgacgccctggacgtgtggggcatacacggtatgtcgggtgtgtggggggccgtggccactgggatctttgcagtgcctgccgtcaacgaggccgccggcttgatcgctggcaacgcaaatcaggtggtgatccaggtgatgagcgtggtggctaccattgtgtatgccttcacaataagtttcatccttgctaaagtgctcgataaggctatggatggcatcagggttgaagaaagtgatgagatcggtggcctcgacaacaatctgcataaagagtcggcctataatttcaattcctga

SEQ ID NO: 8779 - DNA, 339 bp, synthetic construct
  source 1..339: mol_type = other DNA
atgaagcggatcgtggcaatcatcagaccagaaaaatttgaagatgttaagcgggagctgatcgaggtcggctgtgagggcatgaccgtgtcagaggtaaaaggacgaggcagccagaaaggcataagggagtcctaccgcggtagtaacttctgcatcgacctgatccccaagacgagaatcgagatagtggtcaacgacgaccgcctcgatctaattgtggacaagattattgaaggagcgtatacagggaacattggggacggaaagatcttcatacagagcgtcgataatgtgattaggatcaggaccaatgaacacggggatgaggccgtgtga

SEQ ID NO: 8780 - DNA, 612 bp, synthetic construct
  source 1..612: mol_type = other DNA
atgattcaaatggcgaaaaaaaatattctcgctctgatcatacttattctgatcatcatcatcttcggcatgaacctgtttaataacactgtaaacatctacctcgatggggaaaatgtgagcgtggaaacccagacgttcgaggacatcgattcaaacagtctgaacaaggatatctgtagttatacactgaacgtgatgaataatactacatccgacgtggagaccctgaagaatggagtagagaagctgtgctatcagcacggcttggaggacgccgagataaacatcgatagcagcttgggccacgaccagatcccaatcatcgtccatgtggacggcacctccatgcttcccaccttacagaacggccaaacggtgctcgtcaataaaactcacgacttcgaggttggtgacattgtggtcgcagaatccaaggaatacgggggaattattaagcgggttgacaaaattgacgaaaacaaggtgcatctcataagcgacaacaaaaatatttcatatgagtacatcgatggagccctataccagatcaagggtataacaacctgggtcgatatttcggatgtcaacggggtggttatcgactactga

SEQ ID NO: 8781 - DNA, 678 bp, synthetic construct
  source 1..678: mol_type = other DNA
atgtactcgcagaccaagatcgcaattcccatcttccagaacgattataagaacgtaatcgaggtcgcgaatgactgcatcaagaagggcgcagacgttctggaatttaggatcgatgctctggaaaatccaaacattcgagaaataaaacaaacaattgaagagataaattttcctattatcgctactaaccggataatcacagaaggtgggttcttcaagggaaccgaggaggagagatttaacatcctatacgagtgttgcgaccttgtcgactatgtggacatcgagctgcagtccaacgacgagtacatcaataagattcatgacactggagtgaccaccataatctcttaccacgacttcgagaaaacgcccaaactgagcgaaataacctatattgtggagaaagaacaggagctcggcgatattgccaaagtggcattcatgccgcaaaaccttgatgacacgttaacaatcctggccgtgctctcccactgcaaggatacaatcgccattagtatgggggagttgggcagctacacgcgcatcatggctagcaagttcgactcacccattacctttgcggccgggagcgatgtcaccgccccaggccagattgacatcgagactatgaaggccctgctcaacatgaacctgaatatcatggatgaatga

SEQ ID NO: 8782 - DNA, 726 bp, synthetic construct
  source 1..726: mol_type = other DNA
ttgaaaattactgcaataggcgccgacatctcaaaaaacgacgtcagttgcagtaccatgctagtcgaaaacattgagaaaagcctttacaaggtgaagaaactgggcgcccgcgatgttgcgctcactaatgtcacaggcgacgacgtggtggtaagcgcgttcgtggaagacgatctgcttgagatcgtcaacgaaggaatcgtgaacgtgctcaaggagagtgccgagaacttgggggacctcagcggaattagccagacacccgagggtgccggcgaaggaatctcctatgccgaaagcaccgtgcggaaagatagataccctgacgccattgttctgggctttgatacatatgggggggagccattcgtggcagacgtggctaactccaccatcgatgcggcaaaaggcatgaagaacttaacggatgtgtcggattacatcgagtccaagatccggaagatcccgggcgtcggctatgtgtcacccgagaccgacgaccctgttgtggtcgccaccgtggaaaacatcgagagcgtgggtgtaatcgcttccgcaatgattggggctgccctcggaaataagaatgtgtacctggttaagcgaggaacaacttgtaacgtcctgcccggtagcgtaatatttagcgctaccgccttcatgaatgggaatatcattgacctggctgtcccattcgagaataagacgaggatactgaggtga

SEQ ID NO: 8783 - DNA, 864 bp, synthetic construct
  source 1..864: mol_type = other DNA
atgattctcctgaacaaggacaccaaatgcttggtgcagggcataactggcaagcaagggtccttccacacagagcagatgctgaactacaacaccaatatcgtggccggcatcacgcccggtaagggcggacggatgtttttggaccagattccaatcttcaactccatagaagaagctaaagaggaaacagacatcaacgcctcgattatttttgttcccgccaagttcgccaaggacgctgcatttgaagcaataaggcacctcgatctggttgtgatcatctcagagcacattccagttcatgactccatgcagatcatggcctatgccaagcagatgggaaccaccatcattgggcccaacacgcctggaattatatcaccgggcattggcaaactgggcatcatgcctactcacatctttaaaaaaggtaacgtcggcctaattagccggagtggaacactcacatatgagatcgccaacgaacttacgaatgccggaatcggtcagagtacagcagtaggcattggtggggaccccgtcactggggataattacgtggatattttaaaacgcttcgacgaagacaaggataccgatgccgtggtgctgatcggggagatcggcggcacagctgaagagcgcgcgggaaagttcatcgctgaggagatgaccaaacccgtggtcagctacatagcaggacgaactgcacctccaggcaagaggatggggcatgctggagctatcatccaagggaatagcggtaccgtggagagcaagaccagagcgctgaacgaggcgggggtcgaggtcgccgccaagccgtctgagatcgtaaatctgcttaaaaaggtgatgtga

SEQ ID NO: 8784 - DNA, 1203 bp, synthetic construct
  source 1..1203: mol_type = other DNA
atgtcaaaccaggagattattgacaaactgctgaatggggagatgaagctgtatcaggtggacagggaggtgagcgccaaggaggctacagacattcgcagagaatttctggagcaaaaatatagcatcaagttagacaacatctccaactacactcttgatatggaaagagcctctgcgcgtaacatcgaaaattccatcggagtccttcagctccccatgggcatagccggcccactcaaaatcaatggggagtgctgcagtcgggaggtcttcgtccccctcgccacctcggagggagcactcgtcgcttccatcaataggggggcatcaaccatcactgcgtctgggggggccaacgtgcgaataacctcagacattatgactcgggcaccagtcattaagtgtgaaggcgtgggtgatgccttaaaaattaagcaatggtttatcgacaatttcgatgagctgaaaagcattgcggaaagcaccacctcccacgggaagctaatcaagatcgaccccatcctgatcgtgggaagctacgtttacccacgcttcgtgttctccaccggggacagtatgggcatgaacatggtaacaatcgcttctgagaagatcctcgataaactggcccaggacaccagcgctgtccatgtggccctctccggtaatgtatgtgtggataagaagcctgccgcgatcaacattgtggaaggccgaggcaaaagcgtcatagccgatatattggtgcctaaggatatcgtgctgaagaagctgaaaacaacggctgaggcaatcgtggaagtgaacatggcgaagaacctgatcggttcggcagccgcgggcagtatgggctttaatgcccattatgccaacatggttgctgcaatattcttggcaactgggcaggaccctgcccacgttgctgagggttcactgggcattacaacagccgaagacagggatggagacctgtacttcagcgtgaacctgccggacttgcccgtagctacggttggcggcggcaccagtctagaagtagctcacgagggattggagattcttggtgttgccgggtctgataaagcacgggaatttgcagagattgtggcctgcacggtcctggccggagaactctccctcgtgggagctctggccgcaggacaccttgctagagcccaccaggagctgggccgcggatga

SEQ ID NO: 8785 - DNA, 207 bp, synthetic construct
  source 1..207: mol_type = other DNA
atggacgacttcctggacgaactataccccgaaatcacgctcgaaaccgaggacattgtgatgacaatatccctgaaaaaggattatagtcagactaaggacgtcaacgtgcggaaaaaggaatttatcaaggatctgaatgatttcatcaaagagtttgaggagaccagcgagagcctcgagttcatgaggtacttcgacgattga

SEQ ID NO: 8786 - DNA, 639 bp, synthetic construct
  source 1..639: mol_type = other DNA
atgattttcgactccttctacacattcttaggtcagcttgtcgtgtttttggcaatcctcattatcatcctcttcattgtcatccttgtgctgggcgtgctgatagccaggaagaatgagatcaagttcccaagattcatcctttttgtggttgattccctctacttcccgttcaaatcaatcgcgaactttctcaaactggacgagtacctgattgatgatatctcgatcaaagtccgggatgagctgaacaaagagaaatttcgcagcatcccctccgagaaaaccctgatattcctaccccactgcctccgacacaagaattgtcctgcaaccctccaaaaggaggggctgaactgcactgaatgcgggctgtgtagcattggggtcgttaagaagaaggccgaaccaatgggctataagatgtatattgtgcccggaagcagttttgtaaagaagatcgtgaaggagaacaagttcaaggccgtgctgggcgtggcttgccatgaagacctgaaccagatgatgatgctgctgagtgacttttgccctcagggagtgttgctagaaaaaacaggctgttttgaaacgaaagtaaatattaagaaaatattcgagaagttggacagcaaatactga

SEQ ID NO: 8787 - DNA, 453 bp, synthetic construct
  source 1..453: mol_type = other DNA
atgaacatcgacttcaagaacaatgagatactcttcctggaaggggaaaccggcatcgtgggcattgttaaggtagcacatgataataaaatgctgtttattgccacacacgacaaccaggaaatagtccaatttctggaatcggacgatatcattgctgtgtccaacttcaagaaggataaacggacaatccgcagccaggcctacctcagtagggaggagtcttcacctctgatcatcctcaacaaggaccacccgtccactaagagattagagactgtcatcagcattggcgatgaggtgaacctaaactgcaatattatccccggaacccaccccgaacagaacgtgctgtgctcctgtgacagtctgagcggacttaaaataattaaaaccccaacggggatcaagttgaataaggagttcgacaattttaccatcgagaaattctga

SEQ ID NO: 8788 - DNA, 156 bp, synthetic construct
  source 1..156: mol_type = other DNA
atgtgctccggtggcgggcccatggccgatatcgacataaaaaaactgaagaccaaaaagtacttctgtaaagactgcggaaatagctttaagggcctcgggaagaaggtggtgtgtccaagctgccagagtgaaaacgtagagctggtcgagtga

SEQ ID NO: 8789 - DNA, 1017 bp, synthetic construct
  source 1..1017: mol_type = other DNA
atgtacgagaagatcatcaacaatatcaagctgaatctcggcgaaaacaaggatctgaatcggaagtatctggcatcacagatagagaactataaagatcacccatataacctggagatcacaaaagagatcagccgcatgatgtgggactgtctcagtgatgaggaaaaacgggagtttatagaaatcagcgagaatgagactcctgtcatcgacatcctggaggagatttacccaatgattgagatgggcaagtacgacaatgcactcgacaagcttaatgggttcatgaaaactttccaacccatgttcgaggacgacgccgtaaatgaataccacttcttcaccaaccagttggaggaggaaatcttcaacaaatatattggagctaagaaagaaatgcgctacatccccaacaaccaccctctcctggatttgtattacgtgtacggattcctcctcctcgaaaagcacgagctaaaagaggcggaattttacctaaagaaggccctgaagattaacccagtttctagtaggatactgttagagttatccgatatttataagaccaaagcacctaattttaacaagttttacatgtacacaatacaggctctggagtatgcctattacccgcaggacctggcgcgatgctacaggaacctagggcagttttacatggaagagatgaatttcgagatggccgccgccctgtacaattattccatgaaatacgaacttaaccccatcgtctacagcaaacttcagtatatcaagtcgaaaggcaccaacattgagttggagcttgaagaatgcctgaacacgctgaaggacaagaagatccagatcgatgtgaatccctttattctgaaaaccttggaggagctgtccgataagtatgacgaaaagcaggccctgcatcaagctctctacttctacgaactccagtatgacctgaaccacgaacaagacatccttgaaaagattaataacattaaaagagtgatgaaccattga

SEQ ID NO: 8790 - DNA, 1644 bp, synthetic construct
  source 1..1644: mol_type = other DNA
atggccaatcagccaattttcatcctgccggaggggaccgaacgctattccaagcgcgacgccctacgcatgaatatcactgccgccaaagtgctcgccgggattgtaagaaccacattaggccccaaaggtatggataaaatgctggttaactccctgggggatgtcacggtcactaacgacggggccacaatcatgagtgaaatggatattgcacagcctgcagcccggatgctggtggaaacagccaaaaagcaggaagaaatagttggcgatgggacgacatccgtggttgtcattgctggggaactgttatccaaggccgaggagctgctggacgacggaatcgccacctccgtggtggtaaaaggatttaggaacgcaacagagaaagccgtggaactgcttcaaggtattgcgattgacgctgacgacaaggagaccctgaagaaggtggcagttactgcaatgagtggtaaaggaagcgattacgccaaggagcatctggctgaccttgtggtggaggctgctctgcgaatcgaagaagatggaaaaagcgacattgagaatataaatatccaacgggtctccggagactcagtggaagatagcttcttggctgaaggcatcgtaatcgacaaagcccccctcagcaaggccatgcccaaggacataaagaacgcaaagatcgccatcatgaagtatcctatcgagctcaaggatattaacacggacgccaagatagatattaccagtcccgatcagtttgaaatgtttctgaaaaacgaggagcagatgataagggacttggtggataaggtggtggatagcggagctaatgtcctgttctgccagaagggtatcgacgacatggcggagcactacctgaaaaaggcaggcatcatgaccttcaaaagggtgaagaagagcgacatggagagaatcgcaaaggctacgggcgccaaactggtcaccgatattgaggatctctctgaagacaagctgggctcagccggccacgtctacctcgacaagctgtttgatcatgaattgacattcattgaggagtgcgagaacccaaaggcgtcgtctattgtgcttcgaggcagcacccggtatgtcaccgagcagatctcaagagccatcgacgacgcgctcggcgttgtggccgctaccatcgaggagggcaaagtcctcatcgggggcggcgcctgtgagatcgatttggtcaaacagctgagggattacggggaaacagtaaatggacgcgagcaactggcgatccttaagtacgctgaggccttagaagtgataccacgtaccctcgtggagaatgcaggtctggacactatcaacttgattgccgatcttaaagcagctcacgaggagtctaacctgatcggtatcaatgtcttcactggggaggttgtggacatgaaggaagctggggtgatcgagccgctacgggtgaagatccaggctctccagtcagcgggcgctgccagtgaaatgatactccggattgacgatatgattgcagcgagaaacgcactaaactctactggacccgacgagtcgggcaacgacgccagcgggatgccacctatgcctggcatgggcggaggaatgcccccaatgatgtga

SEQ ID NO: 8791 - DNA, 3939 bp, synthetic construct
  source 1..3939: mol_type = other DNA
ctcaacaaacagttgttgctcacctttctgtttgtcctggccgtgatattgtctgtaagtgcaatttccgccagtgatgtcaatgtgacagactcgtacacaacaagcgtcgcggatggcgcatcaaatgtctcagtgccaatcgaaaattctgatgactcaagcgtgcttagcctaagcagcgagtccgacgttggcaatgtatccagcaagaatagtgagtctgtaaagtcaaatactttatcaaccaactcggacacgaactcgttaagtaacaggggaaatgatgttctggaagtgaacaacaccgcctcgccaaccattaatgcctctgaaactattgctagcaaagatatcactaagtactacaagggcagcacagggtatactgcgaaatttctggatatgcatggtaaccccctgaacgggtccgatgttaaaattaccgttaacggggtgacctataccaagaagaccaacagcgtaggggtggcttccctggcgatcaaccttaagcccggaacttacaagatcgtgtccgaaaacctcataacaggctataagctgaccaatacgattaaagtcttgtcaaccattaacgcaaatgacgtgaccaaagtgtataccgacggcaagaagttctacgcaacctttttgaagagtaacggcaaggctctcgcgaacgcctatatcaagtttaagattaatggaaaaacatactctaagaagacgaacagcaagggggtggctagtctatccatgacgaacctgaaaaaagggacctataaaatggtctcctataacaaggatggcctaaccaagacgaatactgtgaaagtggtttccaagacgagttccaagctgaataccaatgcctatactttccttaaaagcgatagtaagaatatcaaggtgactttacttaacggcctgggctacgcaccaggctcaggcaagataatcaagttcaccgtcaatgggaaaacgtactccgccaaaaccaacagcaagggtgtcgcttcccttaaactgccttacctgaaggccggtacatatacagtcaagtacaagttttctggaaacacattttataccgcaagcagtgcatccaataagctgtacatccttccaagtaaaaccgccaccttcaccgtgaagagcacaacaactttcggcaagggtgctaatacgccgttcaaggtggccctcacctcaggtagcgtgccgttggtcaaaaagactattactctgacggtcaacggaaagtcatacgacaagaccaccgatagtaacggaatcgttagcataccgattgacctccagaacggcaagtatacagtaacctacaagttcaacggggactctaaagtcaatgctaaaaccggatcttcgagcattatcgtgaaggaaagaacttccaccaaagttacttggaagagtggaaccagcttctatcagggcgctcagtcttataaagtgcttctgcaggactcgaacggcaaagctctcgcaagtaaagtggtgaagctgacggtaaacggcaagacctattcagccacaacctcatcaaatggctatgctacattcaacgtcaatctcgcgcctggaaattacagcattagcctaaagtaccccggcgacaattcgtacgctcccagcaatggcaatgtgaaagtcagtgtggagaagaaggaaaacacaggatacgggtactgggtgtacggtgaggacatgagcaatgtggacctcaagtcactggcctccaaaggaaccagcgacctgttcctgaactttaaagccatcgagctgcatgggcagtctaaagtggaatcctggatcgccagcgctaataagctcggaatgcgcgtgcatatttggatgcagatattctacgaagggggcaaatgggtcaatcccgtgaaaaacggaaaaccctacgaggcattctttgagaagaaaatcaccgaagctcaaggatatgcaaagatcaaaggggtggccggcatacacttcgactacctgcggtatagcggaaacggggagagcgcggctcataaaactcctggcggtgcggccgcaataagtcagttcgtggaggatgcgacggaggccattcacaatatcgacagcaatatcatcgtttcagctgcactcatgcctgaaactaccagcatcctgaagtactacggtcaggactactcggtgatcagtaagtacctggacgtagtgattcccatgatttacaaaggcaactacggcaagacgtccgcttggattacgacaactacaaagtggtttgtcgataactctaatggggcccaagtctgggccggcttacagggatacaagtccgatagcaacgtgaccaagctgtccgcctccacaatcaagactgacgcacaggcggccctggatggtaaagcgccaggcgtcattatatttcgatggggcgtgaccaacttcgtcgatttcagttccctgtctgacaaatccacatccccaagtactactggatcggtaacgattgccgacatcatcgcagccgccaataatctgaaaaatgtgattaactcaaagaacacaatccctgccacagtgagcgttggggggtcaagttattctacggctcagtttctgtacatgatgaccgaggccgttaagaagatcaacgggggcaaaacgtccagccagatactgcctataagcgtgggagtgccaacaaacccctctggcagcttcaagtcagggaacatcgcctccagcgagtatgtgaacatggcaatcagtatcaatagcttcattatggagaacggtcgggcgccgaacttcgctagctcaagcagcctgggcactatcgactacgattctttagttgagatgtttgctgatatcctcacagactataaggacaacaataaactcccaacttccgtaaaagtggacaacgggacaaaatccgaggtcataaccgccaaaacaatatccatcaaggacatcgtgactggggcgaccaatttgaagaaatactacaacgattataagaagctgccctccactgtgactgcaggtaagattacattcaagctgtcggagtttgtttacttgatgagcaaggctatcaaccaaatcggcaagtccaatacaaaggccatcaccatcatcacggggatcggtaaccccaccaatccttctggcgataatattaattcaaaatacctgagcaagagcgagtaccttaaggttgccctcaacgtgactaattatatcaacaaaaacaaagtagcccctaactatgttagctccagtcttggtaaaatcatctactctgagtatgtcgatgcattctcccgtatcctggccttctatggcaacgagaatcggctgcccaacacagtcaccattagttattcaagcggcagcggaagcaacagcggaaccggtgccaccggaaccggcttgaatgaagccctaaagaatgggacggagctctcccaataccttaaggccaccaaaaactgccaggtggacaattctaagattaaagacatcgtgaacaaggtgaccaagggtttgacatctgttaaggacaaggctaccgcaatttacaactacgtcagagacaacctcgactattccttctactacaacaccaaatacggggccgtgggcgctctcaacgccaaaaagggaaactgcgtcgaccactcacacctgctggtcgccatgtttaggactgctgatattcacgccaggtatgtgcacggtaagtgtacattctccagtggatcgacttatgggcacgtatgggtgcaggtgctcgttgataagaaatggacagtggcagatgccacaagtagccgcaacagcctgggaaaggtcgccaactggaataccaacaaattttcctttaacaactactactccgaactcgggttctga

SEQ ID NO: 8792 - DNA, 714 bp, synthetic construct
  source 1..714: mol_type = other DNA
atggccaacggaaagatctccgaaaatatagaggaatacctagaggtgctctactgcaatggaagtaacggggaacaggtgtcgaccactaaactgtccgacgaacttggtatcgcacccggcagcgtcacacaaatgcttaaaaagctagaaaaactgggatacatcgactacactccatataagggggccaccctgacgcatgaaggcatgaagatagctcggaagatcacacgaaaacaccggattttagaaaaattcctcctggacgtgctcaaagtcaaggaggagaatatccatgagcaggcctgcgagatggagcacgcgttgagcgatgaggcggagagagctctgtgtaacatgctgcagcacccggatgtatctccagacgacaatgtgattcccgcttgtaatttcaactttgaaagctgcagtcagtgttttagccagaaggatttcgaccaaatcatcaacagggagtttaacctgctgtccatctcagaactcaccagcgatacggagggcacaatatcattcatccgcggcaacaccgaccttctggactccatcgcagacctcaacattaaggttgggtgccagctgaactatgccattaacgataacaaggacgaggacagctatttggtgttcattgatgatgaggagttcaatattcctaaggagatggccaataatatttttatccgcatctga

SEQ ID NO: 8793 - DNA, 516 bp, synthetic construct
  source 1..516: mol_type = other DNA
atgcgggggtccctgagcaacgatattgtcagcatcaagattgaggagggcagcaagaagccaatagccctgcacgagaagagtcttttcggcaagattgaggctgattcactgaatctctccctcatcgaggcctgctatctcttggagaaaggtcgcttgaatatttatgaagatgatttcgagtgttcggtggggtacatcatcgaccttctgaaagaacaggacctgtttggaaaatacgttgtctacagagacttaaaggaccgagggttcgtaataaagacgggcttcaaatatggaagtgaatttaggctgtataaccgcggccggggtcccgggcagggccattccgactacctcgtcaagatcatctttgaaaattatgaaatcaacgccctggacttcgcaagctacgtgagggtgtcacacggagtgaacaagaaactactgctggcgatagtggatgacgactttgatatcacatactacaacattgagtggaccagaccgtga

SEQ ID NO: 8794 - DNA, 1116 bp, synthetic construct
  source 1..1116: mol_type = other DNA
gtgtccgttggtgataatatggggaacttgatcgatccatgggcctcatttagtctggactatgataagctggtgaatcagttcggcatcggcaagttttcagacattatcaacgaaatcaaaaacccccaaagactgatgaagagaggcgtgatctttggacacagggaattttccgaaattaataacctcatcaatcagaacaaggacttcgcggtcgtgaccggcatgatgcccagcggccaaatgcatattggccacaagatggtggtggaccaactgaagtggtatcaggagaaaggcgcaatgctgtcgctgcctattgcagatctggaatcatacgcggctcgcggaatgagtttcgagaagggccgggaaattgcagtcaacgaatacctcacaaactggatagccctagggctggacttggaaaaagacaacgtcaacgtatacctgcagtctcaaaataaggcccttcaggatctcgcgttcatggcctccagcaagacgaacttcaaccagctcaagagcatctacggattcacaccttctaccaatatcgcccacatacaggccccactcgtgcaggtggctgacatactgctccctcagattgaggagttcggcggccccaagaaggttgtagtcccggtgggaatcgaccaggacccccacattcgcctcaccagggacattgctcagaaacttcacgaggatttggggctgctcactccggcatctacttatcatcggtttctgaccgggttgactggggacaagatgagttcctccaagccatcgacagccatctatcttaatgacgacacaaaagaggccgtgaaaaaagtccggagcgccaaaacgggtgggcgagagagcctgaaggagcagcaggagctaggtggagaggttgacaagtgcgtaatctacgaaatgctgctgtaccactttatcgatgatgatggtgagcttgaaaagatccgccatgaatgcctgagcggaaccctcagatgcggggactgtaaagtgaggaccgccgaactagtggagaagttcatggatgagctgaaagagaaacaggtcgaggctcgagagatagctaaaaccttattatga

SEQ ID NO: 8795 - DNA, 1197 bp, synthetic construct
  source 1..1197: mol_type = other DNA
atgatccggtgcgttagctgtggagaagaatacggggatgacgaggtcatctacacatgtgaaaaatgcggatcagtcctcgagctcgtcaacgaaatagacgtgagcaaagacatttttgatgggaggaaggacaccctctggaaatttaaagaatgcattcctgtagatgaaaacaaaattgtttcccttgaagagggtgggactccattctgcaagtgcgataaactgggaaaagagcttggcgttaatctctacgtgaaggtcgagggtagcaatcctaccggcagttttaaggacaggggcatgaccgtgggcatgacgaaagcaatggagcttggggtggataccgtgggctgcgcgtcaactggcaacacttccgcctcgctgtctgcctatgccgcccgggccggattgagatgtatcgtgttcctgccttccggcaaggttgctctgggcaagttagcccaggcaatgttccacggagcggaggtcatgtccattgatggcaacttcgacgaggccctggaggcaatgacagccctggccttggaaaaacatctgtacctgctcaacagcatcaatccgtacagactggaaggccagaagaccatagggtatgagattgtgcgggacttaggctggcaagctcccgacaggatcattctgccagttggcaacgctggaaatatctctgcaatctggaagggggtgtcagagttctacaatgccggattcatcaaagatctgccaatgatgacaggtatccaggctgaaggtgcttgtcctgtcaccaacgcatttaagaagggagatcgcaaggtggtacccgtcgagaacccagagacgattgccacagctatacgtataggagcccccgtaagtgatattaaagccctaaatgccatctatgatagtaacggctattccgaaacggtcacggacgaggaaatcctcgacgcgcagaagctgctcgcccgaacagaggggatcggtgtggagccggcgagcgccgctagcatcgcagggcttaagaagctggtggacgagggggtggtggacaagggggagacaatcacttgcgtggtgactggccacctgttgaaggaccccaataccgctattgaggcatgtaccaaacccacccaggtggatgctgacatagacaccctacgcaagatcttgatgaacaagtga

SEQ ID NO: 8796 - DNA, 201 bp, synthetic construct
  source 1..201: mol_type = other DNA
atggctgaactgcccttcgctccagtaggtagaattttgaagaatgccggggcacagcgcgtgagcgatgacgcaaaggtggccctggccgaggccatcgaagactacggaaacgatatcgcggccaaggccataggctttgcccggcacgctggcaggaaaaccgtcaaagcggaggacgtgaaactcgcaatcaagtga

SEQ ID NO: 8797 - DNA, 369 bp, synthetic construct
  source 1..369: mol_type = other DNA
atggcaaacatatatgtcaagtttgacacaccagaggagctggccaagcaggctgaagaggcactcgaaacagccttcaccaccgggaaggtggccaagggcaccaatgaagtcactaaattcatcgaacggggagacgccgccctagtcgtgatcgcagaagacgtcgatcctgcggagattgtggctcacatcccggtacttgctgacgagaaagaaataccctacgtttacctgcccaccaaagagcaggtggggggcgcggccggactcacggtgggtactgccagcgcatgcattgtggacgcgggcgatgccgaggctgccgttgctgagatcgtagagaaagtggccgagctgaaggattga

SEQ ID NO: 8798 - DNA, 207 bp, synthetic construct
  source 1..207: mol_type = other DNA
atggaggaaggaacaccggccgaagtcatcaaggtactgaagaggactggcatgaccggcgaggtgatgcagatcaaatgcagaatcctcgatgggcgcgacaaaggacgcatactgacccgaaacattatggggccagtgagggagggcgacatactaatgctcctggacacaatccgggaggcaaaggaaattcggacgccctga

SEQ ID NO: 8799 - DNA, 162 bp, synthetic construct
  source 1..162: mol_type = other DNA
atgagaacctgctccttctgcggtaaggagattgaagaggggacaggcaaaatgtacgtcaaaagggacggcagcatctatttcttttgtagcagtaaatgcgaaaaaaacatgatcaagctgggacgggtgccccgcaaggtaaagtgggtgaaggagtga

SEQ ID NO: 8800 - DNA, 453 bp, synthetic construct
  source 1..453: mol_type = other DNA
atgattcagaagagttttgtgatgatgaaacccgacgccgttcaaagacggttaatggggaaggtcttgagccggtttgagcagaagggcctcaaaatcgtcgcgtgtaaactgattcagatcgacgaagaactcgccaagacgcactacggtgagcatgccgataagccgttcttccccgggctggtggaatacattacctctagcccatcactcgctatggtaatagaaggcgacgaggctatcaccactattaggaaactggtgggcgcaacaaacccactagaggccgatcttggaaccatcaggggcgattttgggatggacacaggacgaaacattatacacgcatccgatgcccctgaatccgcggagcgcgagatcgctctgttcttcaatgaggacgagatctgcgactaccagatcgtggataacgacctgatctatgagtga

SEQ ID NO: 8801 - DNA, 1791 bp, synthetic construct
  source 1..1791: mol_type = other DNA
atgaaaatccgctccccgattgtctcagtcctgggacatgtggaccacggcaagaccaccctgctggattacatccgcggatcgaccattgccgataaagaagccggcgggatcactcaacacatcggggcgacagagattccaaacgacacgatcgaggaaatctgcggcaatttcataagcagactgaccatcaaagacttaatccccggcttgttcttcatcgatacgcctggccacgctgcctttacgtccctaaggaagcgtggtggagccctggctgacctggccattttgattgtggacatcaacgatggatttaagccacagacctatgaggccctgaacattcttaagatgtacaagaccccctttatcgttgtggcgaataagatcgaccgaatttttggctgggagacccatgagggcgcgtcctttagcgagagcttcaaccagcaggcccaaagtgtgaagcaggagctggatctgaaactttacgaactggtggggaccctccataaggagggcttccaatctgagagattcgacagagtcagtaattttgcctcccagatcagcatcattcctattagtgctcggtcaggggaaggcattattgaggtactggccatgctgctcggactcgcccaggaatacctcaccgaacagttggagattaatgaagatgcccctgctaaaggcaccatcctagaaataaaggaggaggtaggactcgggcttactgtggactccattatctacgacggggttctacgaacgaatgatgaaatagccctcatcaacagctcaaacgaggtggtcacaaccaagatcaggtctatcttgcggccactcccccttgaagagatgagagatagcaaaaagaagttccgaaaactcgatgaggttgtggcagctgcaggtataaagattgctgcaccaaacctggacgacgtggtctcaggatcaccactgagggtactaagtgaggaggaggacgtggaggagcaactcctgaaggagatcgaagatattacaatcaacacagaagacgagggactgctcgttaaagcagatacactggggtctctggaggctgtcgttaagttgctcagagacttgaatatacccatccgggaggccgacatcggcgatgtaagtcggagggatattatcaacagcaaaatcgcattgaatgaaaatgaggcgcatggggccataattgcgttcaacgtggacgtgcaccctaactcgctggacgacttaagcaactccgatgtcaaactgttcaaaggcgacgtgatatatcagatcattgaggactatcaggaatggactgacgaaatcgagcgcgctaagaagaaggcattctacgacgccatagtgaaacccgcaaaatttgtcgcactgcccaagctggtgttccggcagagcaagccggccatcataggcatcgagagccttagcggcacagtgaaacagggccaggtgttaatcaacaagaatggagagtatgttggggtcatagcctccatggaggacaaaggtgaaacactgccttctattccccgcggtcagagggtggccatggctattaaggatgctattgtgggaaaacacttcgatgagggtgatgaactttacatcgacgtgtccgagaagcactataagttcatcgaacgcgaatttaaggacaagctgactgaggatgaatttgaaactctgtacgaactcgtcgagatcaagcggaaaaaagatccggactggggtaagttcgggctttttgaatga

SEQ ID NO: 8802 - DNA, 384 bp, synthetic construct
  source 1..384: mol_type = other DNA
atggcattcaaagtggttgtatcccagggggctgagacccaccaaattgaggtcgatgagacaaaggcattcaatgggctgacgatcggtgaagagtttgacggcggactagtcggcctcgacgggtataccctgaaggttaccggcggtagcgataaaaacggattcactatgaaaaaggacgtgactggcacacgaaggatcaagagtctcctgaccggcgggatcggctaccatcccaaggctgacggagtgaagcgcagaaaaacggtgcggggaaacaccattgccgaagatatagtgcagatcaacacagtcgtgactcaggcgggaaataagagcatagccgacattatcggcgccggggaagaggaggaggaatga

SEQ ID NO: 8803 - DNA, 1215 bp, synthetic construct
  source 1..1215: mol_type = other DNA
gtgaacgtccagtccgacgttaacataggcctggtgggacacgtcgaccatgggaaaaccaccctgacaaaagccttgtcaggaatctggaccgacacccacagtgaggagacaaagagagggatttctatccggctgggatacgcagacatcgaatttaggaaatgtcccgagtgcggcgaacctgagtgctacaccactgatgacaagtgtccgatctgtgggagtgagacagagctcatcagaaaagtgagcttcgtagacgctccagggcacgaaacccttatggccactatgttgagcggtgcagcaattatggacggagccgtactggtgatagccgccaacgagacgtgcccacaaccacagacgaaggaacatctcatggcgctggacgtcatcggtgtgaaggatgttatcgtggtgcagaacaagattgatattgtgagcaaggagagggctattgaatcctataacgaaattaaggagtttgtgaaggggacttgcgcggaggatgctctgatcatccctgtgagcgcccagcagggagctaatgtagatattctgatagaagccatgctgaagcagattcaaccccccgaaaggaatgtggatgacaccgccctgatgcacgtcgcacgaagcttcgatattaataagcccgggtcaggcgcggacaagatcaaaggcggggttatcggaggcaccttgatccagggcaaattcaaactgggcgacacgatcgagatccggcctggcccaactaatgatggtaagcgcatgacgctgaccagcgagattatcgggctggaggccaacggggaacaggtggaggagataggacccggagggctcgtgggcatagcaactaagcttgatccatccctgaccaagtcagacagcctctccggcacagtggctggcgaagagggaacgcttcccgatgtcctagattcgttcaaaatggacgccaatttacttgaccgggtggtcggcactaaagaggagcgtgacgtggcccctatcaagctcaaagaacccctcatgataaactgcggtactacaaccacaatcggtgttgtcacaagcaccaagaaaaacgacgtcgaagtaacactaaagctccctgtgtgtgcatccccgggcgatcgcgtcgctttaagtcggcgcgttggagcccgatggagactgattggctacggtatcatcaagtga

SEQ ID NO: 8804 - DNA, 393 bp, synthetic construct
  source 1..393: mol_type = other DNA
atgaactccaaagaagtcgtaattgacaccaactttttcatggtgccgtttcagttcaatgtcgacatcatcactgagctggagaagctactcccatcctataatctgaccacacccagcttcgttatcaacgaactgaagggactcaagcgcaacaagaatgccaaaacaaggctcaatgccaacctggctttgaagcttgccaattcttcaaaagtggaaataaaggacatcagtctgctcgagaacgaaactgtggatgacgcgctgcttagagtgagcgaggtgttagctacgaacgatattgagctgaagaaccgagcaaaggacaaagggatcaccgtcgcctacttgcggcagaaaaaatacattgcagtggatggcaagatatga

SEQ ID NO: 8805 - DNA, 585 bp, synthetic construct
  source 1..585: mol_type = other DNA
ttgtattacagaacaaagattaaggacactgtccgaatcccaccttacaagtttgagagtcccataaatgaagtcgccatagaaactttaaacgagcagtatgctgggagactggataaaaaactgggcctgctcatctgcgtcaacgatatccttgagatcggtgaggggaagctcattataggcgacggagcgacataccacaatgttgttttcgaggcaatcttctttaagcccgagcagcacgaaatcttcgatggcgaagtaatcgatattgtggactacggagcctttgtgcgaatcggaagcatggacggccttatccatgtgtcccaggtaacggacgattatattacctacgacgccaaacgcggtgctctgctggcaaaagagtccaacaaagtgctagaagagggggacctggtgagggcgcgggccgtgtcggtgagcatcaaggacgagtcaaataacaacattgagaacagcaggaatagcaagattccgctcaccatgcggcaaaccaacctgggccgcttcgaatggatcgaggaagccaagcagaaaagtaagaaggtcaaagagtga

SEQ ID NO: 8806 - DNA, 177 bp, synthetic construct
  source 1..177: mol_type = other DNA
atgaaggcatgcaccgtgtgcaagatgatcagtaataaagatcactgccccaactgtgggaacccaaccagcgacaactggagcggactactcatcataacggacccggaagagtccaatgtggcccgggaactgaacattacagtagcgggcgagtactgtctgagggtccgctga

SEQ ID NO: 8807 - DNA, 507 bp, synthetic construct
  source 1..507: mol_type = other DNA
gtgctccgcttggatacagagaacaaagacataatgtccgagctcaagcggcctctcggcaagctctatccaaacttcgaggacgccatcgatgaaattaagtcttccgagttcctgattagcgtgggtgacgcaacattcggaaatctgacgaagtacgaactgtacccgaacattgggataatcgataatgtcattcagaggaaaaaccacactcatgagatcatcagagcagagcacatcttgaaagctgaaaatcccgcgggaaccatcaccgatgacctatgggaaaccataggacacgctctggagttaagcaactcaggcgaatgttacgtcattgaggtagccggggaagaggacctggccgtgctgccctgcatcatcatggccaaccccgagactaccatcctgtatggccagccaaatgagggccttgtgctgctcaaagttagtgacctgaagaacaaagccaagaagcttattgacgggtttatcaaggaatga

SEQ ID NO: 8808 - DNA, 315 bp, synthetic construct
  source 1..315: mol_type = other DNA
atggagatcgagtttatcgaagaaaaggagaataagctattcaaccggaaagagataaagttctacgtggactatgacggagaagcaacacccaagatcctggatatcaaaagcaagctcgtggccttgctcaacacgaagaaagatctgattgtagtggacaatgtccagcctcactacggggagccaaaggcacttggctatgccaaagtttacgccaccgtcgacgacctgaagtacattgagaccaaccatgtgctggcgaaaaacgaagagccggaagaagctgccgaagaggctgaggatgaggagtga

SEQ ID NO: 8809 - DNA, 153 bp, synthetic construct
  source 1..153: mol_type = other DNA
atggtgaagaaaagcgacctgtataaggtcgatggcgacaagatagagcgcaaaaaccccatctgcccacggtgtggggagggggtgttcatggccgatcacggtgacaggtttgcatgcggcaaatgcggatacaccgaaatgaagaagtga

SEQ ID NO: 8810 - DNA, 1422 bp, synthetic construct
  source 1..1422: mol_type = other DNA
ctcgataacatcagaaacggtcggttcaaaacgggaatgactgatgaggctgcaatctacaccagctcccttgaggcggataagcttcttttcgaggctgatataaaaactaatttcgcccacacatcaatgctcaaacacgaggggattgttgacgaggagattgcggacaagatcctgtgtgccctggactctcttaaggaggagggctatgatgccctggtattcgaccccagtgtcgaggacgtgcacatggctattgagaactacgtgaccagcaagatcggcccggatgcggggtttatgcacaccgccaaatcccggaacgatcaggtggcctgtgatgtgcgcttagtgttgcgcgaggagatcatcaacatacaggtggggatcttggaatttatggaaggcctcgtggagatggccggtgaacacctggaggatgtcttcatcggcttcacccacctgcagcacgcccagccaatcaccattgcccatcatctgatggcccatgtacaggccctgaagcgggactatgagcggttaaatgacacctataagagagtgaatctaaacccactggggtccgctgccatggcaaccacgagtttccccattaataggcagctaacaacagacttgctgggcttcgatgcatacttggaaaactcaatggatggagtttccacacgcgacttcatcgctgagagtgttttcgacctggtaagcctctgcactacactgtcgaaaatctgcgaagagctcgttttgtggagcacctacgaatttggcgtcattgaaatggccgatgagtattccagcacgagctccataatgcctcaaaagaagaatcccgacgtggccgaacttgcccgaggtaagtgcgcaattgtcaacggcgagctggtgacgatcctcactatcctgaaggccatagcatacacttacaatcgcgacttacaggagattaccccgcacctatggaacagtctgaaggtcacaaaagacaccctgtctatcgtgactaaaatgctgctgtctgttgaatttaaaaccgaaagatgcgctgagctcgcaggcaagaatttcgccaccgcaacggatctcgctgacataatggtgcgtgaaaaacaaatcccatttaggactgcgcataagatcgtcggacgaatcgtgaatgaggctacaacaaaaaacatggtggaagaggacatcacctcgaagttcatcgacgacatttcagccgagctcgggtttgacaagctgaacctggctgatgacctgatacagagagcgctcaaccccgtggaaaatgtcaggattaggagcgtgcctgggggacccgcacctgagatggtcgaaattgctcgggaaaacatcaaggaatttctgaacgccgaatttgagaaacatggaatttga

SEQ ID NO: 8811 - DNA, 189 bp, synthetic construct
  source 1..189: mol_type = other DNA
atgatgcataagatttgtccaaggtgcgggtcccggaaagtgaagtggatcatcccgcagaattggagccagtgggtgtgctacgactgcgattacaccggacccgtcatcgagggcaacgatgacctcgccgaggaaatacacgaaaactatctgaaaagcaagaacaagaagaacaaaaatgactga

SEQ ID NO: 8812 - DNA, 1017 bp, synthetic construct
  source 1..1017: mol_type = other DNA
atgtataccgaagagttcattctgaatgaggttaactccatcagggaagacatcggccatgataaagtaaacatttatattgaggaaatttactttaatgagaacaccaacgagctatggattatcactgaggacaggccagataaaagcgccattatcggcaagggcgggtgggtggtcggcaaactccgcgagaagctggggctggagagcattcacgtcgaaagctacggtgacttcctcaacaaaaaatacaagcttgacctgagcaaaaagacgatcctaaaccttaatagcgacagcgtcggcttaaagaacctggaaaaggtgatcgacgacaagatatccagtatctactcctttaatttcgagaactatctttcggagaatgaatttaagaagagctacaagcacgaagccgtagtggcattgtccggaggtgtggacagtagtttcagcctgatcctggctaagaagctcggattcaaccccattgctgtgacagttgatcctggaaccatcatactccccaaacagttcaagcggaatatcaaaaaaatatgcgatgaactggacatctctcatgagtacctcaggactgattacagtgaggtgattaacgagtcgtttacagggaaggtgcacccgtgcggccgttgttccaagaatacggaggagctcgtccgggagtacgccaagagcaaagaaatccccataattatctttggggatatgctggcgactggttcccagtgtatcaactcacaatatgactcattataccgattgaatctgcccgcaagcctgtccaccagcaagcaggagatcaaaagcttgatcgaaaagtacaacctgagtaccttcaaaggcttcgggtgcccactgctctatgaagtgcaccgcaagtttccacacatgaagaaattctcaatacagagaatcttgagagagacacggtcaggagcccttgaacctggagaggccctggatctgatctggagcttctataagatttga

SEQ ID NO: 8813 - DNA, 2049 bp, synthetic construct
  source 1..2049: mol_type = other DNA
atggggagaggctttaagctcaagatcgacaaattcctcctactgatcttgatattttttatcttgctgagctgcgtaagtctggtgagcgcctccaatacggttgataccaacttaacccatgacgcaagtagcgacgcgaatatcggaatcaatgatatcgaatcttacagctcgggtgtcttctctgacgacgtgaagtcaacaggtaacgtgattgtgaaccagcgaaattataagatgtatttcgacgatagcaatgtgctaaaaaaggagtacggcggcaagatcatcgcgtttagtgggaagttcactgataaaggtgtcatcacgatcgactccgaaaatactaaaatcaccgggcgcaatacactgttcaacaacaccgtttttaacatcaagagcaatggcgtgatgctgaccaacctgaatttcgttctcaataaggagttctccgacaacgagggggcctgtgtcctgattaatggggacaacgtcactgtctacaatgtggacattgattataacgtgccaaagaacgtgaccggatttggaatctactccaatggtctggacgagagcctgagcgatgttaaactggtcaacaacacggtgcggcttcatggcaacgccctgaatgatgggtataactacggggtggtattgacaaatacccgggacgccattgtgtatggtaatatcatcgattgccagcttccattgagggctgtgaactggatggccgagatatatggaggcataagcatggatgccgtatccgggctggctgcgggctcatgcaatggcttaagactttccaacaactacatccggtgcgtggtcaatggtgtggctcagggcgaacctacactggacgccgtactgatctacgcatgtcacaattcgacaatagaaaacaacacaattattgaaaatgactacgttaccaagaagggggatgttaattatctctacgggctggatctctatctctctaacgacgttgtcatctacggcaacgacattcatattcgcaccagcggagggaaagaggcccacgggactgcttatccgattcaggtaaccggacaggcagagaatatcctgattgctttcaacaatttgagctcctacagtaacggccccaacatagggatttactcacagaactactacggcgtaactcacctggacattataagcaatttcatcaacgttacagggcatgccagcaaacacagttgggctctggtggctggaatcgaagtgcaggattccgatgacaggataatgaacaacaccattatcgtggacacggtgaacaaattcgagaaaggatacaacgtgtacggcataagctattcacaacgaaccgatggagatcacaactacaacatccagtataacaacgtctcaaccaatagtgaccacgcggtcgccctgaagggctcgggcagttccacggtcagtaactccattgtggccaataacatcttgaagggcaggaagtatggtggaaaccgggcagcatacatcactggaggcacaggcaatgtgattatcaacaataccgacgggtcccgtcccgtgcataaaatgactgatgatgagtactccgacaatctcaagttctacctttcatcgccctttaagggaaacgggctgggactggggtggcttgacggtgatggaaactccataatcggcaacggggacagaaatggcaacagcctcaataatggaaatagcggtctcgtcaacaataaggtgtacggtaataaccttaactacagtgagtcgcaagcacgcaacggagtgttaaactccacatattacacctatggctcttcaggcacagacattgccagtgcttcttcaagctctggctcaggcgccggaagcagcaactctgagagctctgatgtgaaatcctatgaggtcactaagaagattaacgacaacctcatccacattcctatcgtcatcatggccgtgattgcactcattctgctaatcatcggctacaaacgcaaggaacacaaagaatga

SEQ ID NO: 8814 - DNA, 3300 bp, synthetic construct
  source 1..3300: mol_type = other DNA
ctcaagctgaataaaatcatcgtgctttcattattcctcgtactgatctgctttattggcgccgcaagtgccaccgaggatgtcaacgacacagcaatcgctgattcagagattgatgaggtaagtgcggtcgacattgaacaatctgtggacgacaacgagataacagaaatccagagcagcgacgagtcaaacaaggtcctggcaaggggcacacctacgactgcgaaggattggaacaccctccgcaccaaatgcgaaaaaaccaccgatcagtatatcacactgacggggacttcctatcccatcggcacttatataacttttaaaaatagtgctacaatcgtgggtagtgatgtcagttacattactggcgggtcgacgtccaacactcctttcgtcaacaacaacagcgctttgacactacattttattaacgtgaagttccttaatgtgaacgcgaagaatctgttggagctcgacggtacggtgtatttggataactgcactttcgacaatgtgcaaaccgcaaccggacacaacagcgtaatctataacaccaacaacctcatgtacctgactggttgtaacattaccaactgtcatactgggtacggggctgttagcaattacaactcgggaagtacaacatcccccgtaatgtacgttgacgactgcaggttcatcaataatagcgccagcgttgagccgggggctattaataattgcggcatcctgtacgtcaacaactcggaatttgacggtaaccacgcaaactggtgggccggagccatccatactcacacaaatgcccagacagaaattgagaacactaacttccggagaaacacagctggatggaatggaggggccctgttcacctacagcaaactgaagataaaaaattgtactttcgaggacaacaactgtaccaccaacaatggcgggggagcaatcggagcctacaactatggaagcggatacaatataaccatcgactcctctcgatttaactacaacacaaacctgtgctatgcatacacaaatatcagcaccacctcagttggacggggaggagccatcagcgtacttaacggcggttatttgacggtgtacaactcaaatttcactggaaactatgccaaaatcggtcaggccatcgcagcggccacctataactacgagaatggcactgggggcaacccacacattaagatctgcaacaataagtttacagaccacaccgcaactggcattgacaccgtagtgatcacgggcaatgactacatattcaacaacaacgtgtttatcaatagctatcagaacaccatttatacaggcactggaaacacctacaattctgccgccttgcccgggaatctgaatagtaagctgaatcttaagacaaagctcagagccaccaatactgagatcctgtctgactaccaggatcacgacgtggtctacgtgaacgtgagctcagacaaggatgcagaggatgacaatgtgcatgggcagagctgggacgacgcgtacggggggctggagtgttttgtcatggcgataaactacctacacaataatgggatcatttacattgcagacgggcgttacaatgaggactacggctatgaatactcaatagcccatggcaacttcacgatgatcgggcagggcccaaagactaacatagagaagattataaccacggtatatggcgggtccgaccaaaactctactcacaactttatcaatttatccttcaccggcaaagattttggcatcaatgctaatttcatcaactgcacatttctgggttccatcagcatctccaagggcctcacctaccacgaccctaatcatgttgtggagtacgggtatgctcagacctacttcatgaacttcaacaactgcgtgttcaaggatgtcaatacgaccaatgccctcgtgaccctctataagtacggggccgtgaacttcaccaactgtattttcgaaaatattaccgctgactccatcgtgtatcggaacgatatcaattattttgaagaggatggaatttcctttaaaaactgcactttcaccaactgtaagtacaacggtattgctgactccctggctaattttgatgatgctgtggttattgaggattgcacgtatgacagtgaagtggccctcggaacaactgaagtgaacggccattactatataaatgctacgaagcttaaggttaccgcggtgggcacaagtatttcaatcaaatcgaacgaaaacaatgtaattgtgaatttaactgatgttaacggcaatccggtggccaatgcagggataatttactccatcgccggcaccaatgccagtgcaaccacgggcgctgacggtactttcacgctgtctaacctgaaggggatcgtcaacatcaccgtgtactattcaggcaatgagagctatcttgcttcgaacaaaagcgacaatttcatatttaaatacaatacggccgtgtccagtgcggtgaatggtgatgacatcctaatcattctcaaggatgacgagaacaatccaattgcaaacgccaatgtcatctatacagtcaacggcattgactacaatgcaaccacagatgaaaacggaacagtcactgtgtccaacctgaaaggtaagtttgcattcaacgtcctgtataagggagacacactacacacagcctccaatgcgtcaaacaccttcatcttcaaatatggtacaaaaatcacagccaaaaaagtcacagccacttacaatgttgcgaaaaacctggttatcacactgaaggatgaaaacggaattgccattgccggcaagaaggtgaccgtgaaggtcggatctatccgcaagaccttgactacgaacgctaaggggcaggctaccttaaaagtcagcaaccttttgcccaagacatactctgccaccgttacgtatgctggcgatgatacccacatcaagtccagcgtgaaggtgaaggtggtggtgaaaaaagccaccctgaaggtctctgccaaggctaagaagttcaaaaagtccctgaaaaccaagaaatatagcatcgttctgaaaaacaatgtgggcaaagtcctgaagaagacgaaagtgacactgaagatcaagggaaagaccttcaaggcctacaccaacagcaagggcattgccacatttaaaatcaccaagctcaccaaaaaaggtaagtacaatgcctacattaagtttgctggcagcaaatactacaacagcctcaacaagaaagtcaaaataaccctcaagtga

SEQ ID NO: 8815 - DNA, 360 bp, synthetic construct
  source 1..360: mol_type = other DNA
ctgcggaaaataaagtccttaatcaatctgaggatcgtcaattgcacaaacaacgagcttaagtcagaacttaagaatattttgaccgacgacaagctagatgagaataagatctacaacaagctgaaagaggagaatacactggaaacgctcaagaacgagttcaatgaatttataagcaacagcaacagttctgaaaagcagttcctggtgaaaatcaagaacaaggccaacaaactcaaccccgagaaacacaccaacattgagaatatccagaaagaaatcatcattaaactgctcaacaaagacaatataatcaacaatctgcaaaagaagaagatttgtactaacattggctga

SEQ ID NO: 8816 - DNA, 5595 bp, synthetic construct
  source 1..5595: mol_type = other DNA
ctgaagaactccgacgacgttctcaacatcgacgtgttgaaccaaaactccactgtcaattacccaaggagccataaaacaatcgagatcacccaggacaattacgagaattactttaatattagaacaggaaagatcattgatgccagctgcatctctaagggcgacactttaaaaatcggcaacattagcaacagggcttttgttatagaccggcaacttatcctcatgcccatctcttctaatgacaagattagtaacggtttcatccatcttatcaagggctccgacggctccactgtaacaaatcttaccatcaataatacaaaagatagactcaacattctcgggggaaacgtagggcagctccacgggatctggctgtccaacagcaataataatcttatttcatataatacaatccgaatcgcaaatgccgcaggcgtctacgccatgcccatggggtggtcaagcaataacagaatcatttacaataatatgaaaacctatatcacatgcaatatggtgatgggacagtgccattacaatctgatctcacataatagtctggagttgctgagttactccgataccagcgttacaaacctgatttacttcaaccctttcgggcatgccgattatagcggtagcggcctgtgcaaatataacatgatctcattcaatgactttaagggcttttcgaacgggccgatgtccatccttctccagagtgtttacgaaaaccacgatggcactgtgatcgcaaacaacacttttagcaagggctcctacgccattcacctgtttgggaacaatatttcggtttacggcaatgtcgtgctcaatagtgggatcgggatcagcgtttttggacggaacttctctgtgcataataacgccgtgatcggcgactcccaggggtacgggatcatggcagaagcgaacggcggctcgctgtgtaatgtttataataataacatcacctttatagacgtttataacgccatatttattgggaaccatgtcaaggcctataacaactatatcaacatcaaagaatatggggtgtccatatttatcaagggcaactgctccaatattcacgataataggatcaataacaagcacgatgcggggatcagcgtcttaggcaacaacaacacgataaacaacaacatcatcaacaccaagaatatcggcatcacactacctgcgcgctccacgaactgccgctactacaacaacacattcaccaataacaagattaatagtgagagttacgggatttacattgacggcctggtgtataactgcataatactggataacatcattgagactaacagtaccatgggcattttcaaggacataaccgatgaactgtccaacattgaagaaaacaacatggtcaatggggtgatcctggatagcacatatatcattgtcaataataccaactaccataaatacttcgataaatacgggcatctgacattcaaattcgagaagaacaagactaaaataatatttctgacatttttgacaaacaaaaacctgatctttcaggaaaagataaacgtaattagtaacaaaatgaacaacttgctcatcaacgtgaccattacgtttgagaccaatgccagtggctccctgatccgtgactttaattttatcaatcacgacaaagaggctattattctaaatggtgtgaatgacgtgaccgtcaccaggaacaacatcacaaacttatttagaaatggcagcctgagcaattcagccgtattgattcaggacgtgtgtgagaaccttataatatcctataacaacatatatgtcaactcacgcacccactgctatacgtatgcaatcaacgcgccttccattaacccagctactcataaaatgaacaacaagctgtctaaacgcgtgaacattctggataatacaataatcatgatttctagcggtatcacagaggccatctacacggatactctcagcgaaagtaacttcatcagcaacaagattaacatcatttccaaaaactacggatacggtatcgccgtgtcgaacatgattggaaggttgtctgacattaacgtctccaataatgagattgttatccacagcgagcagatggcatatctgatcgaacttctccaagtggataattccaccatcgaaaataacaagctgtacggtaaaagtaatggagtctatgctattggtatctactggtctgataatatttccgtgaacaacaacgccattagcgtgtttggcggcaatttatctaaaattctcgagatatctgacgtcctgggtatcggcaacagcgcgatagccatccttaggaacagtagcaaaattatcatttccgagaacatcatttacgctaacctttcaaagacaatcttcgacaatacgacggacgggattatcaatgcatccttcaattcatttatcattgacaacgagaactataactgctattttaatgaggtgggagagctgtattccaatgtggtgataaagaacagtactttgctaatccacaatctgacaaaaaatcagttgctcatcataaatgacctagtgaaaatcagcagctacgatctcaacagcccctctagcatctccatcatcttcaagaacaatgccagcaacagcattatttccaacgcatctttcatcaactcgtcaatcgacctcatcaacgtgtcaaacattaacatcataaacaacactttcaactcgtccaacagttgcatactgaatattaatggtggagagaaaaatctgttcgtgaataatgagctcttcatcaacagcaccgacatctccgtgattaacctcaacaagactctgctcaacatcataaaaaataacaacatcaagttcaacaccagcaactctaagatcataaccatcaataactctaacttcaccctgattagtaataatgtaataataggcatctccgatagcctgatcttcatctgttctaaggggagcagttatgataatatctacaaaaatatcttgaacgctaatgcctcgagcatatgcggctacctggccagcaacgcaaaatggagcagtattagttataataacattctgatcaataaatccaccaaccagtcagcgatctattactgtaataactcatcgaacaatacaattaacgaaaactatatcattagctattcactcaacgctaatgactatgccgtcagcgtcatttcaaatgagagtttgagcaacctaataatcaagaactacctgataagttctaatggatttaagcgagctaattttgcagtgtacgctcccttcgatttggttaaggacaatagcccatttgacatttacgtttcatgtaatggaagtgacgttgtaggagacggtagtattgataacccttacgcgaccatcaagaaagcgattgagaacagcctcaacctgtatgtcatacacgtatttgacggaaactatactgagtctaacatcattatcgataagaatctgacccttgtggctgtcaacctgggtaaagttttcatcgacgtgcagattaatcagctctttgacatacttgaggataacactctgagcatttctggcttccttattggcaacgcacacaacgtggatggaggcagcgtgttcatcaacaacggcaagttgttcatcaacaatgtagtgatctttaattcctcatcctactttgataattcccaccccatattcgaccagaacataacctaccacgaggataacctgatcgataaggcacacaccgtggactgctccaatacagggaagggcggagcaatcctcaacaacggggaactgatcattaactcatctatcttcttcaataatttcgggcatcggggcggcgtaatcgctgactacggcaaaacgattatcaatagctccatcttttacaataatcggggaatccatggaggatgcatttactcagatagcaagaataatttgttcgtgatcaactctattttcaacaataacacagcagtgacttcaatagacttctgtaagatcatgttgcactccattggttggtcaattggagagaactatatctacaattataagagcgaatgtgacagccccattggtgctggtggcgtcatttatacgaaaaatacgtcagtgctcattaaaaacagcagcttcatctacaactctgcccggatcggtggtgtcatagccacccaatgtgacatcttcacccaactatccaatttcatttcggatgtgaacctgtatattgacaactgttacttcaacagtaataaggccaacgatactagatttaaggatgatccactttacctgaagaactacgactacttcaacgactacaatggaggcgtggtctatggaacctacaacaagctatacataaatgccagcaatttttattacaaccaggtgatcaacaacggaggagtgttatacgctaaagccaacgatggcaagatcatcgactctatcttcaacaataaccgggccggcagtaatggcggggccctggacatttcaaagaacttccttatcatgagaagtattatctccaacaatagcgcgcgctatgggggagccatcgaatacgactcctacacctactacgggcacattcaggacaactttaacatttataactccaccatctcgaataataaggctctgaatgccggcggggccttcaacatcggctctggaaacgtgtctgtccacgattccaacatcgtgaataattttgcccctagcgggaccaccataaactcccatggaatcaagtacgctatcgacatgcgatacaactattggggcgtgctgccaaatggtcacattggacctgacgactcagtttggaatgtgaatcacaatctgtttaaaccctggtacaagcagtgggtcgagtggaagcccaaggtcatcgaaagcaacaactcggggttcaacagcaactccagcaaccacaacccctatatcaatcctaattccaactctggcggaaacaaccataataatccaatctccaccggatctagttcgtccactacaacgtccattgggggcgctaatgggaataaccacggctacggcaacgggaaatactttggttcaggcgatggaaacaacctggggccgagtagtggcaatggaggcttctacttagccattccaggttacaataagtataacgggcagaatgtgaatagcaacacctcaagcaacagccacaagtcgcaaaaccgtggcaacgttgactccgatagcctcagtaagtccaatagctcaaaatacaatccggacttagtgtctgctgggttcacggtgaatgccgccagctcgccgtcaagctcccagcgcggcatagaacgggctagtaaggagagcggttcgctcagtgactcagcaagctacgagattactaagaaaattaaggaagtcttctatgatgagaaccacatcactacgttcatcctgttcatcatcattatcctgtttctgatcatcctgggatacaagtatggagtcggtaagttcgatgaatga

SEQ ID NO: 8817 - DNA, 6582 bp, synthetic construct
  source 1..6582: mol_type = other DNA
atgtcatatactaaatttattctgatattatcaatcatattcctactgtttgcttccatagccttcgttagtgctgctgacacgaacacgagcattgtagaggaaccaatggatgtgaaacataacctgtgcgacattaacaattccttggaaaaccaggagatctatgtcagtccactgggggacgatgatgccaacggaagttttcagaatcccgtctcctccattcaccacgcggtggccatggccaaaaacaattctaaggttattctgatggagggggaatacaagggtgcaaacaatacctttattttgattaataagaatctgaccattgaatctttctccaataatgtggtgatcaacggagagaacaagcatgcattcttcaaaataaccccctctagcagcctcatcctcaacaatatcaagttcattaatggctacacagatagctactctcagttggggatcattaacaacctcggaacactcgtgatcaacaattcgtcattcaataacatgaacagcatcatgggcacctttttcaatgaaggaacgttaaagatcgagaacaccaaggtgaccaatgccgtgagcctgaccatggcccaaatcctgactaatattgggaatactactatcctcaattcccagctcatcgagaacaacgagtattcttccattgacgttgtggtgtataactacaacaggatcagtatcgtcaatagccaagtgaataaccttttctccaataagaagtattccgaagactcctataatttagcctccattctgattaataactctaagttggacaacattgacctggaggacgcatttgtgtgcatccacaactctcagatcacatttaaatctatttttaacggttgcaatgtgagcgtcgatgagagtacatttctgtacaacaagagcctcttttcaataattaacgtcatgaacagtaactttacagcgattcacagcgtctttaattctccgatcagcaccaaacgttcgcatgtgaatataacatactcggcaattttacgctcaatctcgggcaacgcctacaagtgttacctctatgctccctataactggtggggtattaacagcggtccatcgtatcagtacttcacagacgtgaacgttagctactgggcaataagcaccttcgagtatgagagcgactacatccccatcaatcccaattccacgtttaccacaacactgaataagtggagtgatgggaatagtaccttcgagtttaagacagaggagtacctcccgttcagacacttgaaattcgaatctcaaaacggtaagttcctctattcctctgcaaatatcgagaaggtcttctccaattatttaattggcaacaacctggactgtcaggtgcatgtgatcatcgacttccagaggttgacccttagaattggagaaggtctgacgaactataactactttgtcagcaccgaggggcacgacggactgggcaatgggactttcgaacatccatttaagacaataaactatgctgtgtccaaagtaggaaacggaaacactatctgtctgctggaggggatttacaaaggcaattggaatagcaacgtgacaatcacgaagaatataacgattgtcggcctcggaaatgtaaacctgctaagatctaacgattacagtatcttcaacatcaaagaatggggcagtctgtctctcaagaacatcaacttctccgtcgatataatcgactacgcacatccactgattattctgaacggggggaacctgtctattatcaattgctccttctccaacatcacttctaccaacgttatccacacaagcaatgggatcgaacacaatggaattgtgaacatatctgactcgtactttgcagatatctcaggctccatacttatcgggtcggccaaagtaagtgtgtcaaatagcctctttgagaagatcaaatgctacaggataattcagggctacgagtattataatgtcctattcgcaatctcatcgtccatagaaatctacagttcctgtttccagaataacctcatgggcatcgtaaacctccatccctttttctattcatcctcaaagctgagatactctcaatatagtaatgcctattcaagatatgcttatatcaagaacaccaagtttgagaacaatgtattcttcgataagaacagttactacagcagcaacggaattggactcgatatctacaacgagaatgagcacttctatggaattatcgataactgcagcttcatcaataataaggggcaactggccatcgccaccagcgttaattcatccattttcatgaataattttgagtcccggtacggttatagtatggtgtacgcggatctgatcaacaactcagttttcattaataataaaaacctgtatgaggactacaacaatgtatttatcggtaatggcatcgctagtgccggatgcatattggagtctatcttcatgtacaatgaggctgcttttggtggagctattgcagataccaaagaagcccactattgcgtgtttgtcaacaacacttctaagtatgggggtaacgacatctactcgtactccggagacgtcgactactcttccaattggtggggtgacaatcagaaacctaacagcgacaaagtgttcattttcctgggcactcttactctgaataactgggtcatcatgacctttgagtctgtttcaaattcgatcattaaagcttcccttaacgcgcttaacaatggggaggggaacatctgtaaaatcaaccacaacatgcctagccgcatggtctatttcaagatcaaccacggcagcctcagccctgagaacactcttctgatcaacaactctgcctacaccaacatgacctacaatctgaatcttgacttcaaggtctacgcacgcattgacaatcagctattagagcttgacatccgcaacacaaagactctcttgataatggaagatgtgatttttaaagggaaaagcaacaacttcgccgtcgatcttatcaacatcaacgggtacaagatctttaaccagaccttggtggtggagattatcgacgagaacaacacacagaatatcttcacaattcagacggatgataatggtcacgccgaatttaatgtcgactatccagttggaatctaccaggtcaatattaattaccttggcaatggctacttcgataaatgcaattctacttctataatgaaaatcataaagagcaacacctacctcattagttacaaccaaacctactacggcaaaaataacctgtttaaatccgtcttgttcggcgagggaaacaagaagctgagcaacatgaccataaagttcacgatcatcgactctaagggtaacttgcgggagatctatagcctgaccaaccaagacgccactagtgaaattatcatcaatttggacgtcggggagtacacaatcaggtcggaatttcttggggatctgtggtactcttactcaagcagtatctcccacatactggtcaatccggttagttccacactaatcgttagcaacgtgacattatacggggtgggtgacgtgtataatatcactcttaaagatatccacggctcattgataaggggggaaaatattattgtcaccatcactcagggagcctcatgtgataagttcaccctgaagacagacaataatggtgttgccaagttaactatcaactatctgcctggagtgtacaacgttaaagcccagttcctgggcgacagtatatatgccccgacgagcggtgagggcgtgattaaggttgaaaaaattttcaccatcatttcagggttccaccattgcattctgccacttaacgggatctacacagtggttcttagtgatatgtatgggcgacgggtcaataacgagtcggtaacactgtccctgtataaaggcaatctcatcaagaaatacacaattaacaccgacgccaatggcgaggctgacttcgtgataaacctggaagagggaacgtacctaacaaccttcgagtacggcggaaataagtggtattgtgatgcaaccaacgccgcaacgattgtgatcagtaaaaaggtgaacctgtccaacattaacatcaactccacagacctggtgcagtactacggggaaaacaagtacttcataataaagttcaatgaccctaacgcatacagccagtacggcaaaaaaatcggcgtcaccatatctagcggctcctggtcccaaagctacgaagtgttcaccgatattttcgggcttgcccggttgaaaatcaacttgaaccctggcgaatacaacattacttacaagtattcaaacagccactataatatctttggcacatcgtcaaatactatccatgtttataagatgcccgctgtgcttatagcgaacaatattgtgatgaaaagtaatgagcagcagctatacgagatcaatctccgtgacatcaacaataatcctatcaaaaacatgctggtaaacattgacattgacggggtgaagtataactccactacaaacgacgagggcatagccaagatcttgcttagtctgggcgttggaaagcacattattagttacaacttcatcaatccaaactacttgtcctccaactccagctctgtgatcctagttgtggacagtgacaagataccgagcaatctgtactcacaggatattaacgcttttgacaatcagatcctgaatttcactatccgactgtccgacatgctgaacaatagcataagcagcagcgaagtaatactggagctgtttaccttctatggcgagagcattattaatattaccgggatcaccgattccaacggacgaattagctttgatttgaatctcgattacggaaagtatatagctaatctgcactacaacggaaacgccttgtatcttgctagctactcaacgaatacgattaacattgaaagcgccgacaatcgcacaaaaaccattctgttcaacgtcgagaccaagcttaccaatagcaagtactacgtgatcctctccgatatcaatggcactctccttgtcaacaaggaaatcaagttcatcattggcaacaagaccattacttccatcacggatgagaagggcagagcttacctggagttaaacctaaaccctaactactatatcatcaaggctatctttaacggggacaaggactacaaatcagtgtccagtctcaaaaagatcttcatctccggtgaactcacgcatctgtatgcgatcccattagtgaaatactataggaacggaactcagttccatgcccggctggtgaacagcaagggagtccccctcattaataaaatcctgtctatcctcttggaggggaactattataactgtacaaccgatgaaaacggctggatcaccctgaatatcgacctgaaacccggcttttacgacgtggaatgctactactattcaaataataccgacgaaaactcttttgacaagaccaacatcaccgtactgagcaccgtgctgggtcagagtgaagtgaagtattatggcgattacccctatctgacaatcaagttcctggacggcgcgggaaatctaatcaaaaacaccagttttgtgattgatattgatggcaagaaatactctgcacagaccaacgacgagggcatctttaactttaacctcaatctcaactcaggcagtcatctcatctcagtgaacaatccttacgatgggctgtttgtgacgtacaaactcgatattctgaccactatctgctccaacaatctcgtgaaagtctttaacaacggagtgtcatacaccgcgcagctgctggatagctttggcaacccactgaagaataaaaacgtaaaaataatcattaacggtgttctgtactataagaagacagatgtgaagggcatcctggaactgaacatggactttaatcccaaaatctacctggtgacagtgttcaatcccgtgactaaagagtatatcgaaaataccgtgaaaatcttgcccacactcatcaacaacaagaacataaatatgtatttctcgaactgtgctttttataaggttcgggccattggctccgacggcaaaattgtggagtcgggggtaattgtgaaaattaaagtgaacggaaaaagctacaagatcaagacaaacaaggacgggtacgccctgttcaagataaacctcaagcctggcaagtatatcatcactgcagaatacaactcctacatcgtcagcaacaagattaacgtcaagagcctcctaaccgcgaagaacatttttcacaagaaggccaagaagatcaagttcagctctaagctcgtcgatattaagggaaaagccctgaagggtaagaagatcactttcaagttcaagggaaaggtctacaaagtgaagacgaacaaaaatggcatcgccaccctcacgattaagaatctgaaagtgggcaagtatactatcatgagcatatggaacaaattccgcataaaaaacactatcaaaatcaaaaagtga

SEQ ID NO: 8818 - DNA, 5736 bp, synthetic construct
  source 1..5736: mol_type = other DNA
gtgagtaagatcctgaagatcaacaaaatcatcctagtggggattgtgctcttgactatcctgtcacttaatgccgtttccgcctatgataattcaaataacactgaggagtacctgagctcggaaaattacgaggaaatcctcagtgccgactccttcaatgataacaatattcttgcttcagcctcctataacaaaaccatctatgtgaattacactggcgatgactccggatcaggcagccaaaacagcccatacgctacacttaataaggccatatcaaacgtcaatgacagcgataacgcagttgtctacctgtccgccggacgctttagtggtgagaataatacggaccttagcatcaacctggcccacaggaattataacagtagtctgactattatcggcgccggtaatgggcagactatactcgatggcaacgatgaatcagccatcttcacaagcattagcgccgattctattgtcacgttgatcaatattacctttacccacggcaagagcgagatcgggtcagttatgacgacttccggaaacctgaccatcgacaactgcattttcgataacaactatgccacgtccagcgccgccatctacgccgagaacacagaggatataaagattaccaactcagtgttcaagaataactacggccatgagggatgtgcagatttttactgtgagggcagtgagtcaacaatcattgatattatcaattcgacatttataaattcaacaaccccctacctgtatagccttccctcttttctgatccagtattccaacgccaacatcattggcaacaagtttgaaaacatcacgggagtctatcactctggcacgttcgaactgaaatatggatacgggaagcggaaagtcattaacaacacctttattaattgcaattacactggcaacaacgacggaggcatcatctacatctcaaacacctacctcaagaataaccagttcataaactgtacttccaaaaaagcgttgatctactctctgacggaatttaatgcctacctcaagttcaaaaacgcgacaatcaatggaactgagtttaaattgtattgcgaggtcacagatgatctgaacaatagtgtgtccacgtatggcgaagtgcatttcttcatcaatgatgaaaaaatcaagtccagccgctccaacaacggtactgcttcaataagcgtgatcaagctcctggataatggtgattacaccttgagtggcacgtactactattatgaaaaccccttcgaagttaatgtgaaaaatgcaacactccacgttgattttaatcatgaccccctagagctgtgggtcagcaacgacgggaatgataccactgggaacggctcggaaaataatccatttaagacactgaagcatgccctcaattacggattcgaaaacacaatagacctgactattcacatgaaagacggagtttacacgggcagtgacaataaggaccttagctactctaacgtggggaagctgactattttcggtgaatcttacaggaacaccatcatcgacgcagaaaacaccaagaagatcttcaacttcggtgagtatctaaacgtgaccctggcaaacctgaccctcaggaacacaagcggaaatgtcatctcggcgtacatcctaaaaatctatgattctgtgatcgaacacgctgactctttgaacggagaatacagtgatacatcgaaaataatttttaataacctcacttacactaactccgggggcatctacatctacaatgcagagatttacaactccaagtttaagaactgtaacaatacgaagaataactgcctgctgcggatcgggagccttggaaacaacataatacacattgagaacactactatcatcaacaacaccgttaacgggcgacacgggtcttcgatcgtgtccatctcgggcaattccgtcctgataaataacgactacattaataatactgttattagcgaaaactcgaagtatatttttcaaagttatagcaacaagctgatatctgtcaacgagactttcataggcaacaacgtgtccagttatatcgcctattatgatatcaatggcaacaacgtagaaataataatcgagaatattactttcaaaaacaattatgtaaaaaccgatggcagcgggctcgctatcaagaccggacgcattaaaggggcaaagttcatcaacaatactgctttaaataacggcggagcgattattatcctgcctcattataccggcagtcaggtgccgaaatgcattcttgagaacgtatttttcgagaacaatagtgcaaataacgggaaggacatatttattgagaaggccaacatcgggtacgaaaacgggcaacttgacaacattaccgtaactttcaatagcttgattacacacaacctccaggacatcgtgatcgccaatatctcccatgtgtcgggagctgttatcgggggtggcatgattgaatttgacctgaacggcagctacatgggcgtggctgaggtgattaacggtgtcgcgaaactgaattacctgggcttcaccaagaacggcaattacactctgagcggtagctacaactatgagtcaaacaccaccatttacaatagcgccgtggtgaatgtgattctcaatcccctgaaagagaatatcacgagctatgtgtctgactccagaggagatgacgagaatggcaatgggtcatacgagaatccgtacaaaaccattgaaaatgccctcaacgagggttataaacagagcaaggtcattttcatcaaggtattggaggggaactataccgggaaattcaataataacatcaccatttacgactctctgaacatcacaatcattggtgagggcattgataagacaatcatcacaggaaataacactaaaaacaactggtttataaccgtcctgcacgcagggaacggctttctgaagttgatcaatatgaccattagtgagatcaactataactataaaaacatgaacagtcagaagtctgcggtggttatcgagaaaggggctaacgtatttatcgatagcgttaagttcactaaaaatcgcggctacaacggcggggccatcaataatcaggggacactgaacattatcaactctattttctacaacaatggggactcaagttatggtggctctatctacaacaaggggataacaatcattgacaacagcagcttcattgccaaccatgctaagtattgctcggacatgtttaatgagggtatcctgaatatttacaattcaaacatccaagattcgatgcgtaccaatggttggacaggcaacaccctggtcattggcggccttggcaatatcagcattattaattccaagatatttaggacaggtaaaatgcctttggagctcattgatcccgacgatacatatgccgacaatccagccttcacgataagcattggaaccatcggatcaataacactcatcaacaccaccatcgacgggcacgatgccaagtacactggacctaacttttacattacaaacaacgctgcgatctcctggagcgtctctacaaatatcaagattcacaactcctccttcctgaatctgaataacattctaaataatcagatgggaaatctgataataaagtccagcttcatcaagaacgtctccaacctgatcatgagcacaagcaactataatctcacggtaatcaactcttacttcgcagacggcaccatctccactgaaaagtacgatatatccaacatttacttaaacaacaactggtggggaagcaacagcaagcctacgtataaagtcgataacgttgacaccactcctgagacctggctcatactcaccctgaaccagagtaataaagagagtttactgaaagacatcatcttgtccttcaaagtgacggatggtgagaacatcaccgactataccggctacttatatccccggcccttcaccatgagcgctataaacgccacactggaatatgccaatggaaatatcattaaccaccttatcaaccagatcaatatggcgaagaatgctactagttattatatcgaagctaagatagacaaccagaccgtgaacctgaccagtaacataacccacaatgtgacgatcattgctaatgacatcgagtttgattatggcacgaagaccattactgtgaacgtgctgttcgacaacttgtctgccgacgacgaaatcatcacgctgaaggtgaacaataaggagtattctactaagatcaataatgggatcgctatcttcaatattgacaccttagttcgaggaacctacaccctgaactacagtataaacgctactgagctgcatgacaacgtaatcaactcatccacactaattgtaaacggcatagacccaaacattaatgccagtagcaaagccgtgctggtgggaaacaacgtgaccgtgaccatcaccatcccttctgacttgacaggcaccatcaatgtgatcttgaataataagacatatgtggcagagatacacgataataaagcgattgcaatcatccctaatttagcacagggaaattacctggcaaacgtgatctacagcggcgacgagaagtacctcgcgaagaataccacattaaacatcaaagtcctggaaatcaatatttcagcaccgaacgtggagaaatactacaaggggtctgagaaactacgagtgatcgtcatagacagtgaaggcaacgcaattgtgggtcagtccgtgcaaattaagcttaataatgtcaactacaccgagatcaccaaccaggaggggattgtctcagtaaatctcgacctgaatgttggaaagtactctgccacaattctagtgaacgataagaaaatcaacaccgaaatcactatcaaatccacaatccagggatttaacatgatcagggggtataactccggcttagattatcaggccacgctgctgaatgacgacggaacaccactcgacaacacactggtaaaactcaaaatcggaaactccatttacgaggtgcggagcaacgccaacggagttgtgaagttgaacaaaaaactcgccattggcacatacacggtcctgattacaaaccccagcaatttcgaaacacagacagctacgctgaagattgtgagcagaatcaataataataagaacataattggtgactacctcagcgggttcagctacaaggtgcgcatcatcggggacaatgggaagtccgtcggcgctagagaaattgtgaaatttaagattaacaagaaaacttacaacatcaagacagacaaaaacggctacgcatccttgaagataacacttactccaaaaacctatcagattactgctacctacaagggtcaaagcgtgaagaacaagatcaccgtgaaacagattcttaagaccgcgaaaaagattaacatccggaaatccgccaagaaactgacgctcaaagccaccctcaagaaatccaacaagaagccacttaagaacaagaagataaccttcaaattcaagggtaagacctacaccacgaagacaaacaacaaaggcatcgctaagattatcatcaaaaagaacgtgattaagaagctcaaggcaggtaagaaatacaccgtcaaagtgacctacgtcaaggacatcatcaccggatcagtcaaggttaagagatga

SEQ ID NO: 8819 - DNA, 1152 bp, synthetic construct
  source 1..1152: mol_type = other DNA
atgaaataccggaagctcggcaacacgggcgtagaagtctctgagatagcgtttggtgctgaatttctggtagagcgcccctacagggatacagaagttctgatcaaagcgtgtgaggaacacgggatcaatttcgtggactgctggatgtcagaacctgatgtccgaagccacttggggaaggctattaaacctaaccgggaaaaatgggtcatacaaggccacatcggagctacttggcaaaacaaccagtatgtaaggacgcgggaaatggacaaggtcatccctgccttcgaggactttatggagagattccagatcgacaccctcgacttcggcatgatccactacgtggatcagatcgatgactataacgagataatcaatggccagttcatcgaatatgtgcgcaagttgaaggaagagggaaccatcgcgcatatcggacttagtacccacaatccggacattggactgttagctgcccaaaatcccgaaattgaactgttgatgttcagcattaatcctgcctttgacatgttcggcccaatggaggatatcgaggagtatcgaaaagaggacgcctatggcgacgagaagctgtcctctattaacccccagcgcgccgaactctacgagtcatgcgagaagagtgggacggccctcacagtgatgaagggattcgccggcggaaacctcctgagcgctgaaacctccccattcggtgttgtcctcactcccgtgcagtgtattcattacgccctagagcagaaaggggtgtccagcatcttcgtgggtgtgaaaaccgttgatgaactgctggagtccctaaagtactgtgaggccacagagaacgagaaggactacgcagaaatccttagaacagccccaaagcactcgtttgagggccagtgcacctactgtgggcactgcactccctgcaccagcgaaatagacatatcaatggtcatcaagctgtttgaccttgcaaagaaccatgacgaggtgccggcaagcattagggagcattataataatctgaaatacgatgcaacagattgcagtgcatgcggggactgtgaggagagatgtccatttgatgtggctattgtggatgtgatggagaacattcagtgcctgttctcccagtga

SEQ ID NO: 8820 - DNA, 1452 bp, synthetic construct
  source 1..1452: mol_type = other DNA
atgtatgagaaggaagagattatcagcgactacattaaggaggaactttccgatgtacccaatatcctggataatgaactgacattggatggccgcagtttcgagcaccggaaagagtttgaatttattaaacatcatattgacgagtttctcgagaaaactaccaacaaccggtatttcgctctgcccggcttaagaggtgtggggaaaacgactctcctctaccaaacctatgagtacctgtttaagtccaaaaacatcaaccccaatcagatactgttcattagctgtgaaaacctaaatgacattgtggatttcaagatcatagatgttgtgaaacagttcctggaaacctaccacaacaccaccctacggcgtctggacaagaagatattcctgctcatcgacgagagccagcatgacaagaagtgggccttgtccgggaagaggatttacgacaaaaccaagaatatcttcatgattttcacgggtagctcagccttgaatctggagtacgacgcagatagcgcccgaagactgctcaaggagaacatcactccactcaactacaatcagcacctgaaattgaagtacaactacaacgccgccaacgtgtcagcatccctcaagaaattaatcttcgaaggcgacatcaccgatgccgtcagctgcgaacagcagataaatcaggatctgatcaacatcaatggctatagtacgaccgactggaacgagtttttgaagtacgggggattcccgacgtcactctttgaaaacaacccccacatcatctgcaaaaacataactggaatgatcaataaggtaattagtcacgatatgggtacaatctccagcattaccagtaccagccaaactcacgccaaccgccttctgcgatttctggctctccagaagccaggggacatctcgcaggagaagatgggaacataccttggaacctccaagggcaatgtgaggaacatcctagacatcctggagaagacccagctcatttttcactgcgaaccccatatcgcatcacctaaacgctccatcaagagctgggagtactttttcgcaacaagcagcatcaaacacatcctgacaagctcaataggcaatctgaacagtaacaagaacgcttatcttggggtgcttttggagaaccttgttgcttccacactgttctatctgagcaacgaggaagggaactatttcacgctgtactacgatccggaagacagagtcaatgtcgattttgtcatccagggcgagttccagaaggccatacctatcgaggtgagcatgggcaaaaagaagaaaaggcaaatcgcgactgccatcgagcggtacaatgcggactatggaattattatttcgaatacaactaaaacaatagctaagaaagacaatattatttatctgcctccaaagaccttcagctttttatga

SEQ ID NO: 8821 - DNA, 846 bp, synthetic construct
  source 1..846: mol_type = other DNA
atgcaattcctgatactaaacaatggaatcaagatgccgatcctcggattcggcacctaccaaataccccccgaggaaacaaaacaggccgtcctcgatgccatcgatgtagggtacagactgattgataccgcacagttctacaaaaatgagaaagaagttggcgaagcgattaaggagtgcggtgtggaccgtgaggagctgttcattaccacgaaggtgtggataaacaactatgggtacgaaaactgtctggattcgattaaggaatccttggagaaacttggtctggactatatcgacctggtcctgatccaccagcctttcagcgactattacggggcttatagcgctttggaagatctttacgaggccggcattatcaaggcgattggggtgtccaacttctacccagaccgcttaactgacatctgcctgtttaaccgccggatcatcccccagatcaatcaggtggaggtcaatccatttaatgggcagtatgctgcccaggccaacatggagaaaaatggagtgcagatgcaggcctgggcaccatttggacaaggcaggcatggcatgttcgagaatgaaacactcaagaagattggcgagaagaacggtggccggacacctgctcaggtcatcctgcgatggctagttgagagaagcatcgtagtgctcgcaaaatcaactcacaaggaacggatggccgaaaacatcgacattttcgactttgcacttgatgaggaggacatgatggagatcatgaacctcgataacggagaaaccctgtttttcaaccaccagaatcccgaagtggtggagaggtttgaggacataagttga

SEQ ID NO: 8822 - DNA, 1287 bp, synthetic construct
  source 1..1287: mol_type = other DNA
atggcatatgagatcaaaaacaagaagaatattagtaccattggagtgcatgcaggccaggaggaagtggatgagactgggagccgggttacgcccatctaccagactacatcgtacgtctttgactcacccgaacaggccgcaaaccggtttgccctgaaagagggcggcaacatttacagcagactgaccaaccccactacggaagcctttgaacgccgcatggccgctgtggaaggtggcacatctgcctacgcaacggccacgggcatgtctgccatcttttatgctatcatcaacataacctccgtgggcgataacattgtatctgccgacaacctctatggcggaacctacgagctgttcgaaaatacactggaggacttgggcaggagtgtcactttcgtggactcacagtcccccgagctgttcgaggaggcgattgatgacaagaccaaggccatttatgtggagagcataggcaatccaaagctggacatccccgattttgacaggttagccgagatagcccacagtcatggaatcccacttattgccgacaacactgtgggaatcgggagcgtaagacccttcgaccacgggaccgacattatcgcctcctccgctacaaaatacattggcgggcacggaaccacccttggcgggatcatcatcgagaagggtgactttgactggatgagtggaaaattcccaagcctgtccgaacctgacgctacatacaatggactcgttttcggcgaggccttcaaggatagcgcgtttacaacccgcatccgaacagtcgtgggaagagacaccggtgctgtccctagcccattcggcagcttcctgctgttacaagggctcgaaacactaggcctgcggatcgagaggcacgcctcaaacgcaatggccgtggcagagcacctggaggcacatcctaaggtcgcttgggtaacctactccggtttggaaagtagccctaaccacaagatagctaagaagtatgcggagaaaggatatgggggaatagtgtcattcgggcttaaagcaggttacgatggggcgctgaaattcatcgagaatgttgagctcatctcattcctggcgaatattggtgacgctaagagcctggttactcacccggcttccactacccattcccagttgagcgaagagcaacagctttctacgggggtcaccccggatctcatccgattttcggtgggcatcgaagatctcgaagatatactagctgacgtggatcaggccctcgataaaatttga

SEQ ID NO: 8823 - DNA, 5112 bp, synthetic construct
  source 1..5112: mol_type = other DNA
atgaagttttttcgcaagaagccaagaatcttcttgatcctcctcattgtcatgatctgcttctgcctcttcagccagctggctttcgccgagaacatcaatgagagtgaagtggtgggaaatgctgaaatcgagaacaacctcagcagtactaatgacaatttcgaagtgagcaaagatataggttataacgtctccaagaagatctccacggacaacagcaacgagaatctgagaaactctcagcacatgaccctttttatcattagtgacaaccccggaacaaatatcctggacaaagccatcctggaactctccaacgaaaacaagatcaacggcgtaaatcttattatccgcaatggcaaccaggtaaagtccatgaacgagaacgagcttagttacctgctatcggattgtgatgcttttatcggtgagtggatttccagtgatgtcgactctgtcttgaccagcgtgctcgtaaagaatcctgatctgtctaataaaaagctctttctggtcttggagcccccctcaggcaacctgaactcggggtccagtagcctcaacctaattaggaataacaccttgaattataacaagatattcacaaactattccaacgaggagctgatcaattatttcaagaatactaagaggggcaactcatattccaacattaataactacctcacaaatggcaacggcaaaaatttcgattccatcttcaatcgattggttctgtacaaggatctgaatgacaagaataacctgaaaaatcagatactgttcattcttaactacttgggcgttgatgtgtcctatgagcagcctacatttaccggggtgaagaactatggtatctaccgggatcgatggtactccctcgacgagtatatttctactttttttaaggctaccaacaaccggacggtggggattctcgagagtaagatgtacatcgagtctcagcagctcaacacgtgctacagcattataaacagcttggagagccggaactataacgtaattcctgtctttgcggacggcggatctgctgaacaattgaaggtcatggttgaatcctggacaagtgcgggagacgacatttccggcttcctttctaattcttctaatttcgacgtgtatattgacgcgatcgtatcgatggtggcttatggggtgggtggggaaaacttcaccaaagccacaagcttttttgaggaggctggggttcaggtctttagggcggtgcactcggatcacgtttcaaatgagcagtgggagttagggtctaccgggttaacgacagaaaagagtgacaaatggtggcacatcactattgccgaagcgcagggaataatcgacgccaccttcataggcggtaatagcagctatatctcaaatttgaccggcgcccagattaccacgtacattccgcacgaagggaacatcgggctgcttgcggacagaatcgattcgtgggtggaccttaaatacaccttgaacgaggataaactgatctcgatcatttactataactaccctccgggaaaacagaacatcggctccagttacttagatacaataaaaagcatttataacatcctgtacactctgaaggctgccggatacactgttggaagtctgccagttgatgtgagtgagctcgaatatctaatgctgacctgcggtataaatgtcgcgacatgggcacccggcgagctggagaaaatcgccaatcggtcgtgcataaccctgctccccgtcagtgagtacaactcctggttcaattcactggacgagatcgtaagaatccaagtgtccaacggcactgtggcctacattggggagctgactaaaagagccgttgaattagactacaccaagacaatcggaagcaccatcgacgactggtacaaccaggtggtgtccctgctgccagatgagaagtcagtggaggccaaagaggtgctgagtaatattgtccgggctctgaaggactatgccaacactcattcccaggactactatcgcctctacctgaagtacttcgacgaatttaaggaactgaacattcagggacttaatggatggggggagactccaggcaacgtcatggtcgttaacaaaaatggtaccgactacttcgtcatccccggattgacatttggcaatatattcgtggctccggaacctcaacgaggctgggagtcggacattaaaaacctttaccactgtactgccgtggccccaacccatcagtacttggccgcatattattacatgcagactcgcaacccaaatgccatgatcttcaccggacgccacgccacacacgagtggctgccaggcaaggagatcctgctgtctgccacggactacggatcagtggttgttggcgatgtccctcaattatacttttacatcagcgatggcctcggtgaggctatccaggctaagcgacggggctttgcagtgatcatcagccacctgacgtccccaatgtcctatactcatctctacggcaatctgacgttccttgctaatctgatcaacgattaccaaaaggcagggagcagctcagagaaaaataagattggagagaaaatccaggatctcataatcagcaacgattactcaaccaatctgggcctcaataagagccaaatcaaaagcatttctatcgactccctgatagagaagatcaacatctttctgaaatcaactcaggacaccctccacccgctgggcctgcacgcactcggcgagtactggtccgaggaggacatcgcgagtaccgtttctgccatgctgtcgcatgacttcgtgttggagaacaaccagggaacactgaatcttttcaccgagctgagcaactactactattcaaagagctacggtgaccttactccgtttgaaagggaatttgtcctcaataagagctacgatatctgtaaggcattgatttactgggacgtgaacagcgtaagcaatgtgttaattaacggcaatgttaagtttaacaattctaacttctatgcttgtctcaatttggccaaaagctacataaatctgattaaccaatccatttccaacgaactaaatgccatgctggatgggctgaacggccgctacatccctacaggcgaggggggggaaatcgtggtgaagccaagtattctcccaacaggcaccaacattttccaggaccagtcatccgagctaccaacacaggacgcctggaactacgcaaaaattcttgccctgctgactttagccgacttgaacgacaccacggaaaaaattatcatggggatatggtgtgtagaaacagctagggatgacggggccctcgtgtcaacggtgctctacctcctgggcatgaaacccgtgtggacaaactcctcaagcgccggctttgacgatgagggaaatcctacgggcaaaaaggtgggggcaatgcctgaagtcatcaaacttaacgacctgacccgtcccgagggatggaacaagaagcggatagatgtgaccataatcaccagcggactcttcagagatctctacagttctcagtctgttttaatggataacgcctttagggtcgcattggcccgctcatatctgacactgattaacaataaaactctgatgaacggaaaatatggcaaggaactgagacaggctctggactgtgtcatggaggggatcaactactacagggcttcgaatgaggctttgaaggacaactatgtcgcccagcattggatcaaagactgcctatattatctcagtattggttataatgcctcttacgccggggaatgcgccattacccgtatcttcgcaccacccaacggcgattatggtgcaggaatctcaaagttggtgtcaatgtcctggacctggaacaacaccgacgaactcgctcagttctacctcgggcgaatgggaaacatgtattctaaaaactactggggagatacaaatcccctggtattcctaaaggcactgtctaacagcgacacaataatcaccagccgcaatacaaatcagtacggtgtcatggacaatgatgacttcttcgattattggggggggttatccatggcggtggaacacgtgtccggtaagagccccaagatgaacgtgctaatgtacgccgataaggataacgcatatatcagctcgctcgaagaagtcatgtaccgggagatcgcctcaaggtatgacaaccccgagtggattaagggcatgatgaaagaaggatacagcggggctcgttatatgtccaacaagtttgtgagcaatctactggggtggcaagtgacccgcccggacagcgtgtcagatgatctgtggaacagggtgtacaatacctattacaaagacaagtacaacctgggggtgaaggactggctgatgagtggaaataatgcctactcccttattagcatgagtggcacaatgctcagctcaatccataagggatactggaacgctgacgatgcaaccataagagatatcgccaacacctgggcgcaggcaaccgtgaagaacggtgttgcctgttgcgactgcagctgcggtaatgtggccatgatgcagtgggccgtgcagtatgtaaaccccgatattctggcacagcttctgccgaaactgtatgacgccacggaaaatcctgtcttcctgaacaatacgcataaccccaatactaagcctgagaacaacaacgaccctcaagtcgagcccagcactcccaaccccaccgacggctcttcctctagttcaacgattagcaataacgcaacttccacaaattctaatcagcactccctgagcaatagtcagaatagccagggcaacgcggtgtctgatgtgggcgactccagttccagtgatagcggtactttctcctctgaaggggctgacgttaagaaggcaatcgaaattaaccctatcacccaacaatcggctagcgaagtgggtatgagtcttctggcagtgcttggcgtcatctgcctgatccttatagtgggagtcgggtattttcgggacaatggaaaagagaagaaaggctccaacctggatgagctattcaacgaaaaactgtga

SEQ ID NO: 8824 - DNA, 708 bp, synthetic construct
  source 1..708: mol_type = other DNA
atggacgtaatcaatatcctctggcagctgggcattctctctgccgtgctaatctttggcatcaagctgggactggctaccggattggctaatatgtcgaagaagtacctcgcactggtcagcatagggtacggtgggggtgtgctgatattgaccgagatctcctccttcttcaccgaacagatcacagggttaatttactcctacaatttcgaatttttcctcatcatggccatcataatgatactagcgggaattttcactattcgggagtacaaggtctttgagaaaaatactgccgccgctacatgtatggccgtggtcgcgccttgcccatgctgcttcggcagcataatcgtgagcattatgctcgtcgcccccgctgtggggctggggcttttaaacttgagtgtttatgtggcggccgccctggtgctcaccattgtcctcacatactttgcaagcaactatcttattaaattcatcaacaaaccctatcccatcgttctcggcaacttcatgctgttcctgggcatctacttcctgttgtcagcactgtttctgccaaacatcacgtctatgatccaaaaccctatggatgccattgagatcgcatcaccggaatatctggtggctgtgctggtacttatgattatcatgatgttccttggcggattttactttaagaataacagttatctggactga

SEQ ID NO: 8825 - DNA, 645 bp, synthetic construct
  source 1..645: mol_type = other DNA
atggtgacaaccatacccggaagcgagatactcacctcgggcctgaatatgatcagccagagcctgcaagtgcctgtaatcatctttcttgtcatcttcgcattcttcgccgtggtgactctgggcagcctcatcgcagagtacaccagccgtaaaaaagtctccccagacctacttgagaaactgatttacagcatctcccgagcagactccgtggaggagttgatgagtatcatcaagaacgccggaatatacgagaaccagaaggttattcttgtcaaaatactgcgggccgatagtttgcccaataagacaagagaaacattagccaggaagctgatcgaatttgaagagacggagctgggaaagaccatcgagaaaaccgatatcattactcggattgggcccaccctgggcctcatgggcacgctcattccaatgggtccgggactggctgctctgggggccggtgacgtaaatactctggccaacgccattatcgtggcgtttgacacaacggtggtcggcattggggctggggcggtgggctatttcgtttctaagatcagacgcaggtggtatgaagaagatctgtcaaactcagatgccctagctgacgcattgctcgacaagctcaaccgctga

SEQ ID NO: 8826 - DNA, 336 bp, synthetic construct
  source 1..336: mol_type = other DNA
atggcgaggcgcaaatgcaagaagcggttcagcgataatgaggaagatcccatgaccggaacctccaacctggtcgatgccatgctggtgattgcagtcggattcctcatctttgtggtaatatcatggaacatgcagagtatcgtgttctcagacacatcccacgaccaaagccagagcgttcaggatagccatatgaacgtgacagaggtcagcgagggtcaggagctaaatgacactctggactccgttgaaagttcggggcagggctacatggagatggggaaggtgtataaagacccaagcacgggcaagctcatcatggtggaaggctga

SEQ ID NO: 8827 - DNA, 2541 bp, synthetic construct
  source 1..2541: mol_type = other DNA
atgatagtgcttagcattagttccgtgtctgccgacgatctgcagacaaaatacgccggcgaagtgagcggggacgtgaatgtcgtgacggtgaacccctggaccacgagcggcagcctgacatacgacattcctagcgaagctaaggacatcaggtccgccgatgtgtatgtcaacgtgtacgggggcagtgctaagaacacctacggagcaaacgccaatgtaagtcttaaaactgcaaatggggagaatcaaatagccaacgaatcgctttggatcgaggagggaagtagtgatggaactatctacgctgtgaatgatcacatcaataagtgttattctgactaccagatgcactacgatattacaaatagcataaaggggctcaacgggtcgtcaattacaatcaaagtggacactttcaagatggagaataagtcgttcgatggtaaaattaagctcatagctctaatcctcgcatatgacgacggggacagtgatgtaatcaattattgggttgacgccacccagaagtggaccaagactaatgtgacaacaatcttcaatacagaaaaactgtccaacatcaatggtgccaacctgatcaatgtggctctgtctagcggggacggaagcttcaaagttaatggcgaaataataggagatcccatcgtccacgatagcggcaactactatcagtataatagctgggacatttccgataagatgaaaaagggtcagaacacggaattgctgtccatgaatgtggggagcggctcgtacgcaagccttaaaaatgtgttgtctgtgctgaaggtgaacccgatcaaggcgaatgtgtccctagcaaccgagtacgccgacacttgctacgcaggcaccaataatacaatcagcatcaacgttatctccgataagaaagagaagtattcaatcgagctgctggccgacggcaatgtggtaaacagcacggaaattgagctggatggcgagaaccagaccattctgttcttaaccgaccctacggtgcgggaggtggatgactctaccgtgaacggggccgataatgtgaaggtcaactacatggtcaacgtcagatttaacgacgtggttgtgtcaagtgccaacaagacggtgcctgtgttatacaacggtaatctgggcaaagatttgtcctatccctcaagcggattcgcctccttcgagaatatcagctttactggggatatcgtcattgacattaagaatgaaagtagctataaatccggcagtaccggcacaatcgaaatcttcaacgttaacctcggcaaggattccacgatcgtcaaaggatttatctacgtgccttacaactggtttaacggaaagaaatacgtggagaatgaaaccatgtttaacgtaacattcaacaaccagactatctgcccggctggattccatcgggaccagagtaacctcggcaactatggcaagtacggatacggggtcgtggtgtatgatgtcacaaactcaattaaaaacgggaacaacacattcgtcctgaataaaatcaacccaacaccaacgatatacccctccacgctgatctacatgtacaacaccaccggttccgaggtcattaagaacatctacattattaatggtgcggatctcctgtcaaacacaagtaacaacgcgggaagggtcgtgcaagccaactccaacatcaacattaactctaaggacattctcgacgccaagctctatgtatttgcttcgggggctcaaactaatgagggaaatataatcataaacaataacgtctttgagaatgtttggaatggaactagtaagaccacagacctcttcgcgacagacataaccgacatcgtcaaagactcaaacgacatccgctttgttgccactggctctaccatcttagccctgcagcagtttattgtaaccaccaaggacgctccaatcaagactagcgtcaagccaaccaagctgtccactacctatgattcaggtaaatattttaacattaaagttcttgacaaccacaagaaatcagttaaaggtctgaagctgaagttgaaagtgttcaccggcaaacgctatgcaaattattatgtcaccaccgggtcaaacggcgttgctagcttcaagaaagcttctaagctctccattggaactcacaaggtggagatcacaaccaataataagaactacgtggttaaaaagaccatctcttacattaaggtttataaagcgaaaaccatcgttaaggcacccaagataactgtcaaatttaaaaagagcaagtacttcaaagtcaacgtgaagaacaaggccactaagaaagcggtgaagaacattgcagtgaagctaaaagtcttcacaggcaaaaagtacaagatctacaagattaaaaccaacaagtacggtaccgcctacctgaagacgaaatacttgaaggtggggagccataaggtgattgtatattctggcaattctaagtatagcatcggcgccaaatcctccatcaaggtacgatggtga

SEQ ID NO: 8828 - DNA, 741 bp, synthetic construct
  source 1..741: mol_type = other DNA
atggccaaaaatgcgataattaccggcggatctagaggaattgggaaggccatggcactaaagctgggtgagcttggctataacgtggccatcaactacaggagtgactcatccaagcagctgacagaggacctcattgaagaaataaagtccgagtacggtgtggatgcgatcgccgttcaggcagacgtctcgaagtttgaggactgcaaaaagctggtggaggctgctgttgatgccttcggagatgagatcgacgccctggtcaacaatgccggcattaccaacaatagcaacttcatcgacctggaacccgagaagtatggggctgttatcaacacaaacctcgtgagcatgatgcacatgtgccatctctgtttgccatacatggtggaccgggataccgcaatcgtgtgcaccgcaagtgtaggcggcctgacgggcgtgatcaaccaagcagattactgtgcggccaaaacgggggtgatcgggctgtgccgagctctggcgcttgagtttgccccacgcaaagtgagggtcaatagcatcgctccgggcatgattatgactgatatgctccggggagtaaaccaggacgaactaaatgccctcgctgcaacaattcctcttggacacatcggcgaggtcgaggaaatagccggggctctggaatacatcctgaccgccggatatttaactgggcaggtgatttcccccaatggtggcttcgtcttgcagtga

SEQ ID NO: 8829 - DNA, 1806 bp, synthetic construct
  source 1..1806: mol_type = other DNA
atgtccccacgccctattaagcggaggcctcccgaaaaggcagtggacaataagaaagctatcatgaatatcttaagtatcctgaagtgccacaagttcaaattggccctcactatcgtgtgtgcggtgatcagcacggcctttacaataatagccccgctgattattgggaaagccacaaccaccatttttaatggaatcaatagcatttccaaacacaccggcaccatggatttcaacacactgttcaatctgctgactattgttgtgatattgtacatcatttccagcttgttcagttacctgcagagcttcttcctggtggaggtaagcaccaagataagctacgaactacgcgagcgactaatggataagattctcagcctgccaatggaatccgtggatgagaacaagcgcggcgatatcctatcacgaatcactaacgatgtcgattctctccagcacgggatcacccagtcgttcttacagctgactacagcagtgatcacccttatcggcgtatttgtcatgatgttaacgattaacatctggatgacgcttgccacagtcatcctcatccccattgcattcctcgtcattaggtctatcactaaattctctcaaagttatttcctgaagcaactcgtctttaaaggttcccttaacggtcagatcgaggagacttttactggccatgacatcatccgtatcttcaaccaagaagaaatctcaatgaacaagtttgagagtgacaacgagaattggttcgaccaggagtggaaatcccagttctactccagcctgaacggacctctgatgaacttcatttcaaacttcacctacgtgatcatagctgtgttgggcgccatatttgtgcttcagaaggcaatagctgttggcgatatcctcgccttttttcagtacacacagagtttcacacgcccaatccagcagatcacccgggtgatgaaccagattcaaacggcaatggccgccagcgaacggatattcgagtttctcgattatgacgatgaggagaacccctccgacaagcagttgactgagataaaagagggaattgcgttcgagaatgtgtccttcagctacacaccgaacgagaaaatcatcaagaacatgacctttgacattaaaaaggggcagaaaatagctatcgttggagaaacgggagctggcaaaacaactattgtgaagctcctgatgagattttatgaaatcgacagcggtagcataaaaatcgacggggtggacatcgaggaatatgacaagcattcgctgaggtcacacatagggatggtgctccaagattcctggctattctccgataccattgagagcaatattcggtatgggaacctggacgtcagtgaccatgagatcattaaggcgagcaagcaggtgtacgttgataactttgtaagaaagctctctgatgggtacaaaaccattctgaacgaagactcagacaatatttcccatggtcagaaacagttgatcaccatcgcccgaaccatcctttcgtcaaaagaggtcctgatcctggatgaagccacgtcgagtgttgacacacggaccgagaagctgattcagaaagcaatggacaagctgatggagaataagaccagctttattattgcccacagactgtcaacaatcaagaatgctgacaagattatcgtcattgaaaacggcaggatcatcgagaagggcagtcacgaggaactgcttagactgaagggatattactataatactctcaatacccaatctgaagacagccccatctga

SEQ ID NO: 8830 - DNA, 1707 bp, synthetic construct
  source 1..1707: mol_type = other DNA
atgaagaaattaatcgcccccctcaaaaacaaaatcggccaaatcttcgcaatcttcctgttcctcgtggtgcaggtgtattgtgacttgacactgccacagtacacctcagacattgtggacataggtattcagaacgcaaacttccagtttattatcgatacgggcatgatgatgcttctgatggtggctatatctgctctggccaccgtcggagtgtcctactttagcagccgcgtttccagcggttatgctaaggacctcagaaaaatagtgtacagcaaggtgttaaaattctccaatcacgaactaaacaagatcagccgatcttcgctgatcaccagatcaaccaacgacattaaccagctccagagcgtgctggctatgatcttcacaacaatactgtttgcccctctcctgggagttggaagtatcataaaagccttcgagttgggcacaaacctaagctggatcatcttcgtaacttttattggcgtggtcatcctcctggttatcgtgattgtccgcgtgctgccgtacttcaaggtcatccaggaaattatggacaagatcaatagaacatccagggagattcttataggcatccctgtgattaaggccttcgtacgccaggactacgaagaagagaagttccgaaagatcaacgaggagttttacgatgtcaacatctatgtgtttcggaatatgctgataatgctgccactgatgactctgcttatgaatttgatgattgttctgatcctgtatttcggcgcctacgatgccatgcgggggagcatcctcaccggcgatattatcgcattcattcagtattccacccaagtcgtaacctcatttctaatgattggggcctttttcatcatccttccacgattactggtgagcggcaggcgggtgaacgaggtcctgactactgatttaaccataacggatggggaactgacggacatttcagaaaaccccacaattgaatttaagaatgtttcatacaaataccccaatagcgagaaagagactataaaggacatcagcttctcccttaagcccagtaagaccacggccattattggtggcacaggtagtggaaaaagcactatcctgaacctgatcccccggcttcaagacccgagttcgggggaaatcctgatcgatgggaagaatatcaaactcttcaagctgaagggtctccgggataagatcagtttcacccctcagaaggctattctgtttcagggggacattaagtccaacatgttgactggaaaaaatgatgcaacagacgaggaaatcgaaaatgcgcttaagatggcccaagttgatttcgtgtccaacctcaaggaggaggtcagccagggcgggtccaattattctggaggccagaagcagcgtctaagcattgcgagggcgattattggaaaacatgacttttacttgtttgatgactgctttagcgcactggacatgaacacggagagactgataaaaaacaatctcaagaatctgaaagacagctccattctcatcgtctctcagaggatttccaccatcattgacgctgatgagatcctcgtaatcgacaacggggagatcatcgatcgcggcacacactcggagttggtgggaagttgcgagatatataccgaaatcgtgaacacccaaatcgacagtatggaggccttgtcatga

SEQ ID NO: 8831 - DNA, 645 bp, synthetic construct
  source 1..645: mol_type = other DNA
atgaaaaagcttgcaatcttcgactttgacggcaccatctttaacagcatcaccgatgtcataatctgctttaataaggccctgtctaccaatgacttccccacactgacatatgacgagtacgtggagattcttggtggcaacatagatgagctcgtgtcctcctgtctcaaggataacaatacgccgcagaacatggagctcgtgaaaaatacctataacacgatctacggcaaaagcaacaaggagaatagtctgcccttcgacggaatgcatgatgtgctgttaaagctgcaggagaagggaattttgctgaccatcaacagcaaccggaataacgacagcatcaggacttttgttgataaatattactccgacatcgatttccaggctatcgaagggcacaatcctgtgtacccctcgaagccaagtcctttcggaatcaataagattttgaaccagctaaacgtctcaaagaaagaagcgctctacattggggactcttcaactgacattaagacaactcagaacgccgaggtggactgcattattgttaaatggggttacgggaaccaaaacgattatggcaatgaatacgtactgaacgtcatcgaaaaaccatatgacatactgaattacttctga

SEQ ID NO: 8832 - DNA, 351 bp, synthetic construct
  source 1..351: mol_type = other DNA
atgctgttcgtgcagtacccaaagtgcagcacttgtagaaaagccaaaaactggctcgacgaacacaatattgagtatgagtccaagcatatcgtcgaggataaccccaccgcatctgaactacgagagtggtggaaaatctcagatttgcccctcaagcgctttttcaacacaagtgggatgaagtaccgggaacttaaactcaaggacaaactgcctgagatgagcgaagaggaacagctgaatcttttagcgacggacggcatgctggtgaagaggccgatagtagtcaccgacaactttgtgctggtgggattcaaggttaaggagtgggaggagaagctgctgtga

SEQ ID NO: 8833 - DNA, 372 bp, synthetic construct
  source 1..372: mol_type = other DNA
atgaatgcaaacgcccagctgatgaatttcccaatcgataacgtcattcagctgatcaggaaaaaatgggtggtacaaataataaacgacttgttcttcgggaagacccggttccacgaatttaaggagaacaagcccaaactgtccaacagagttctgagcagttgccttaaagacatggaggacaacggactgattcagcgcattgtcgacaagtacgacaagaagaatgtgcgatactacctcacggagaagggccagagcctaaataaaatcatctatgaaatggcgatctttagcgtggattcagaaaactatactgataagacaaagaccgagctcaagacagtgtttaaagagaaactcttatga

SEQ ID NO: 8834 - DNA, 1278 bp, synthetic construct
  source 1..1278: mol_type = other DNA
ctgttagatataaagcttttccgagagaaccccgagatcatcattgactcggagaagaagcgatttagagacaccataaatgtcgaaaaggtaatcgagtatgataacctttggagagagggtgagcgcaaactgaactcccttcggagcgagaaaaataaactgtccaagtcattcaaaaaggcaaaagaagagggcaattttgaagaggtgatcgccaagtccaagcaggtcgccagcgacattaaggaactaagtgctaagaacgtggagtatctgaaactgagggacgactaccggtataaagttggaaacctacttgatgaggatgtgcctatttcggatactgaagatgacaacgttgtcgtgcgcacatacggagagattccggaacatgatttcgaactgctaaaccacgtggacctcattaaaaagatcgacggagccgacctggagacggccgcagacattgccggggcccgtttttactacctcaagcgagatattctccacctgaatctggccttgatccaattcgctctgagcgaactggaagcggaggggtatattccaatgcaaaccccattcttcgtaaagggggaggtggcagccgagacatcagagctgggtgagtttgaggaaacattatacaaggtggaaaatgaggacatgtacctgatcgcgactgctgagcagaccttggccgctttgcacagaaatgaaataatatcacccgaagatctcccgctcaggtactgcgcccttagtacctgcttccgcaaagaagcgggatctcatgggaaagataccctgggaatattcagagtgcaccagtttgagaagattgagcagttcatctactccactcctgaagacagccgcaaccagcacgatcatctcatggaagtaaccgagggcatctatcagaagctgggcattccataccaggtgatcgctatcgtcagctctgccctcaatgacaatgccgccatcaagtatgatctggaggcatggtttcccgggagcaaagcattcagggaactcgtgtcctgtacaaactgcaaagactaccaagcacggaagaccaagacacggtatggccgggcaggtagcggcgacgctcaggttctgcacaccctgaacagtacagctatcgctacggagaggactatgtgctgtatcttggagaactatcagcaggcggacggcagcgtgaagatccctgaggtgctcgtcccctacatgaacggcaagacggtcatcgaagccaaatactga

SEQ ID NO: 8835 - DNA, 633 bp, synthetic construct
  source 1..633: mol_type = other DNA
atgaaaaccatcatcgtgaatgccagtccccggaaaaaatggaacaccgctgagatcatgcagtccgctcagaagggagcagagagcgtgggagcggaaactgagtatttcaacctctacgacctggtattcaccggctgccgatcctgccttgcctgcaagctcaaggaaaaaactaagggtaagtgctactggagagatgatctcacagaagtcatcgaaaagatcctggatgctgacgcactgcttatcgggtctccgatttacttcggccaaccaacgagtgagttcagggcattggtggagcgcctgatattctgtataatgtcctacgacgacggcagcagctatttcacaggcaacgtcaacgtggggattttttacaccatgaatgcccccttggacttttatgagcaggccatgaaggagagcctgtccagcacggagtttctgttctcattcctgaacggagaaattgttgcctatcctgtctgtgatacaatccaggtgagcgactactcgaaattcaatatggctggtttttcacaagaggccaaggagaaacagtggatcttacagtttccaaaagacctagaaaaggcgtttgaaattggggccaacctcagtaagtga

SEQ ID NO: 8836 - DNA, 876 bp, synthetic construct
  source 1..876: mol_type = other DNA
atgtacacattctacaaaaatgaatacatttacatctcctgccactacaatattgtattgtataccaaaatatactttgtcatacaggatgggtgtgatattgtgaccaaccagaagagaactaggaaattcgcgttcggtaacgagcgcttcggaggctcatatactccaggggaatttgagtttaacttcccggaagacatgacacgggaagagttcgagaagatctttaccagccggatgcaggctctgcacaagaaaggcaatgacctggccgaggagatgtttgaccataaatcacgtaaggagaacctcaagcccctcagtattcgcgtcaagcagcacacaaaggagtttttcaaaagccagtctatcttaagccccagggacgtgcttgagatgtacgaggaatacaataatggcagtgaagcatttataaatagcctgatcgaggaccaaaaggagctggaaaacgaactgacggaaatccaggagaagctacacaacgcaaagttgttcagagataagctgagcgagatgaaacctccaagcgagatctccaccgatgaggacaacataattaagctgcaaaacaagtatcagaactccgaaatcaagtccatcgggaatgagacatcggtgggaaaagccgaaagcgacattataagggatattcagatgtacaacacgctggacgttcatatccggaacaaccagtaccttatcatcactgtgtataccaatgcccaacccattctctattacttcaaaaatgaatattgcgaggaggatatcctcaatgtgatctcacgcattgaagagtattgcgagagcaacggcatcgacttctcccgaagtgaaaacgaggagatctga

SEQ ID NO: 8837 - DNA, 2235 bp, synthetic construct
  source 1..2235: mol_type = other DNA
gtgcgcaaactcagcaactcaacgaaggtcctgttactcatcttggtaacgttcctcagcctgaccgtggtttcagctcacgatgccaatgccacagagctgatcagcgataactcaaacggcacgtgtattgtctccagcgccgcggtggccgaggacaaccagatccttggggaggtggataaaccggatctggtggtgaacattacttcggacaacatcgatgattatttcattagggggcgactcaagtccatttacgcttacgcgacactctgcataagcgaggacatcgatgatttgggcatcctgacaatcaagtccaataacgttacaatcaacgggaacaatcacaccctgaaaaacacggtgttcagcattgaggccaatggcgtcacactgaacaacatcattctgaacataaccgaaaagtttgaggacaatgaaaacagcgcaatcctgatctggcgcgcaaacaatgtgaatatctacaatacaaacattaactatattcctccccaggataccaccgcctacggcatttacagcgaaggcaccaagcggagtctgaatagtaatctaaagatcattaacaacaccatcaactttgaaggcaacaacccctctgaggggagggattatgctgtgtgcctggagtactcccccaactgcatatttgagaacaacacggtgaacgccagactgcccctgagaaccatcgcattcgacctgacaaccgcttatctttactcagagtttgccctggccatggggatcagcaactgcaataactcaacctttaaagggaacatcatcaattgtgacgtgaacgagcggccggagtgcagctttcccacattggacgcaatattcatttgcgacagcaaagactgtgagtttatcggtaaccaattgacgcttactgatttcaagagctacaagaaccagccaaattacttgtacggtcttgacatctatcgagccgacaacctacttgttgaagggaataatattcatgtagagacctccggaggcactttcgcggcaggcactgcgtatccaattcagttaacagggcctgccagtggaatcatcattaaatacaacgagatattcagcaagtgtaatggtccaaatatcgggatatactcacagaacttcaatggtgaaaactacattactatcctgaacaatcacatcaacgtgactggcctggccggaaatcatagttgggcactggtcgcgggaatcgaagcccaggacgataacgacatcataatgaacaatatcatagagatccataatattcgcaaaaccaccaaggaggataacctgtacggcatcagctactcacaagagacaaaagggacccactcttataaagtcgtgaacaatactgtaattagcgacggctactacctttcgcacatgctggatgctgacaatacaaccgtaacgaataatacactcgtgcggacctacaagtatgcagataccaactatgaccccttcaagcgtggggatgcaatcggtaaggacactgacgaaatcaagaacaatgacttctccggcaatcgcgttatcaccatctttgaatatgaaattgaacaacagggcgatgagatcgacgaaggggacgagtttaactatgagccacccactaacactggcaaccactccaatattattaatggaagtggaatttcgccactgaagcctggcttccccggaggcaacccattaatccctggaagcaactcgggaggaaccatcaacaccggaggtaatgggaatgtgggcggattcacaaatcctgacgttgctgacggtgacaaggggtatattggtctgcctgacctcagcggagacgacgggaagagtctctcccggaaattcaaccagagggccaatgtgaaaacagtcaatagctttaataatcagggcgatgccagtaactcttataacaacctggtctcaactgagaactccacctcttctgagtccccctccgtgaacggagtcaccgcttccggcacgattagcaagtccgcctctagcgccggagcagctggctccagtggggctgcccaggagagtctaaaggcttacgaaataactaagaatattgtcgaaaatggtccgtacgatatgataagattcatcggcttggccatcatatgcgaactcctactcattgtgggctacaaaaggaaagaaacaaagaacctcgactga

SEQ ID NO: 8838 - DNA, 5568 bp, synthetic construct
  source 1..5568: mol_type = other DNA
atggaggcaatcattaaaatgaaaatcaagaagtacatgctgatcatcttcattctgttgacactggtgaacatcacttgcatcgctgctatggacaacgatacgttcacaacaaatgtgtcccagaacatttccaacatcaacacagatgagcagataaatatcctcacacagaagacggaaaacatcaatgagattcaccaaaccactgagaatgatcaactctcattctctatgcatccgccagacgacaattattataataataagaagggggaaatttatcacacccagttgatattaaccatcgagaacttcaccaccttctcgactgcgaatactacaatgaatgtccatctagattgggacctgtacatgtcaaaagattattatgatacctgccagatacgaatctacgagaacaacaccaaaatccacgcatttaacgtctccgaccaaaacaatgctgaatatgagcacaacgcccatcagacactcgacgtgacatttccctatacaatcaaagacagaactgaactgaaagccgtgattttacagatcgaatcaaacacactgagctttgaagaaatcaagaagatcaacttaactaatttgaacaacaataatattatagtcaataatacttatttttcaaatgaaaactggaccaatcagatcaagtacctgaaaaaggcaataaatgacgcgcccacaaatagtatcatctacctgaacaatatggaaatcctgaacgatgaggacattacgatcactatcgataagaacatcacaatcatcgcaaacaacaccataataaacggactcgaccacggcacgatctttaccataaactcccaagccaccctaaccttgataaacctcaccttcaccaacatctccactaattacataatgcagaacaatgggaacctcaaaattgtgaacaataatttcaacaacaatattggacgcctcataagtaataatggtaatctgactatagaggacagcattattgagaatacaacaaagtactatgccctgttcctgaacaatatcaaaaccacatccgagaacggcctgatatacaataagaagacacttaacattaaaaatacgacgtttaataatattaatttgaatccactgaccaacaataacaagaagctggactggaacgcaattatcgtgaactacgggaaagccattgtaacggactcaaaatttacaaacatcaattacagaactatttacaacaatgcgatccttgagatcaagaacaccattatggaaaacataaccagcacagacattttttctcacaccatccaatacacccggcagttaaacaacacgggaaaatattttagctacatccgggccaccagctctcttgagggaggcgcaatctacaacatcaagcactccactataacaaacaccacattccaaaagatcaccggcaagtcgggtgccatttacaataaaaaaacactcaacattacaaacaccaccttccaatcaataaacaacggagccatttacaacaacgaggatctgactattagcaactccaccttccagactataagcggagaagccatttatactaaaaacgccaatataaccaattcccgctttcaaaccatcagtggaaaggcactgtacaacatcggcaccctcaacataaacaacatactgattaacaagtccaccggaatccacaacgacggaatcctgaccataaataatacgataataaataaatgtggaggcatctataataacaaccaactgaatgtcaataataccctatttaaccgctgttcgggggtcggtgcagccgtctacaataataacattgcaaatatcgagaactgtgagattatcgagaaccacggcgatgctgacaccaagtggcggtatgtcgagcagcccaatggtcaggtctttagctacattgttgaagtctattccggtgtaatttataattataaaaatgctaagatcaacattacaaaatcaattatcaagaacaatgatatttcagaggaaagcaatggcaactgggatacctattatggaatcattaagaacgacggggaaatgaaaatcactggctgcattctcgatggcaataaaccacgtgagtggatcgctttctggggtggcgacggcagcatcaacatctacaacactggaaagcttacatacaagtacaactacctgctcaatacacagtattacaccggaaacattcataaacccagcagctttttgttcaatacggggaacggggcctgtgatgtcaattacaacttctactgcctgaaaccatccagtatcttcgccaacgccaattacaattattattttgtgccttatttcggtgagtacattccgattaagctgaacgaaacccggaatatcacgttgtcgcttggtctgaccaatggcgctgattacatgaccttcaacgattgggacaagttactgactcccggactgaacgcgaccattacaacaattgatgaaaacggcgagtacaagaacatcacaactctgctcaaagacaaatacacctttaatttcaactacacccacgtgaaaggcgagtacattatatacagcaacatcctcaactttaagagttcggctttggtggacgtgggaaaagagtttgccgaaatggaagtcaactacaacaacatcacctacaaggagggcaacatcacattccacattaagattaagggaaacctcaccacccagccaaccggaaacataacgcttcgctacaacaacgaaaaaatcatcctgaacctcacggattccgaatgcagcttcaccatccccgaaatcttaaagcctgacaattacactatgaggatcgactacgacggcgacgacgagtattttaagatcctaaatcagtattttatctttgctgtgtataagatccctaccaatattactgtggtggctcccgaagttaaatatgggcagaccgggctgattaccatcaccatcacaccaggggaggcgaagctcaaaggcaagctatacatcaacggaatctacactaagaatgctgacacacagggccataggattctgaggatcaataggaaccctggtgtgtataacattagtgtggtgtttgaaagtgatgagtattatatgggtggcgtggccaacactacgtttattgtaagcaaatggaaaaccaacctgaccctgaccggcaaggatattaacgctggggaggatgcaatcgtcaatattactattgatcccggcgacgtgcgaggggatgcgatactgatcattaacggggtgaaccagacaatatttataaacaacacagtaacacccatcactattagtaacctgcagaacggaacatatcacgtgagtgtgtactatccgggcgataaaaaatacgctccatctaacgccagcactacgttcactgtttcaatgaagacaacaaaacttactgtaaacatcactaacaatgatgacttgaccggcaatatccacgtgaatactgattataatgactgtactggcgaagtgggcgtgtatatcaataatgataacgttttgatcatgaatttgacgaacgggtcttgcaacttccccgtgaagttcaagcgtggcaacaattacatctacatccattatattggtgacaaatactactcctatgcctcttggaacacgaccagattcatcgagggaaaagccattatcaacacaaactacaaccataccatcgacgagcaggagctcgggtactacatcattaaaatctttgacagcgacaataacccctacgagtataccaatttcactgccctcttccagaacaaggagattcatcttactactgatgagaacggggtggcaaagctgccgatacagtgcagggccggaacctacaacatcactgtcaaatacaaaaataccgttaaaaagagtactgttgtggtgaacgccacccggatggacattgacattaaggacattctggcaggcgagaatgaaaccatcacaatccgactgccttacaacgccacgggaaacatcacattcaaggtagacaatacggtaattagtaaaagactgagtaacggtctcgcgatcgtcaacatctctgctttgacgcttggagagcacaaactgacagtcttctattccggcgacaacaactacactgatcagaagatagaaaaaatcttcagcatcaaacactccctatcccagatcattgcgtcaagctccggcgtcacatacggcgaggacgttatcgtcactagcaaggtgaccagcggcgccagcgggagcgtgacattcgtccttaaccatgagaccataactgtgaaccttacggacagccaggcaaacgctgcctttactaatgttcctgccggaaattatgttataactaccaggtataatggggacaagacatataaagggtctgtgtgcgacgttaagatcaacgttaagaaggcagtgcccaacatcatggttaatacatcgcctttgctgttaaacgagaatatcaggattgatgctctcctcaacaatgatgccatgggcaatgtcaccttccacatccagggccagtatagcccacggaaccgaaccgtgaacaacggggtcagttcatggctcatcagcccactgagtaaggggtcatacaatctgattgtcacatactgtggtgacagaaattacgaatccatcacaacgtccaaaatcctggtactcaatcagaacgagactgtcctgaatgtgaatattggcgacgtaaacgcggatgacgatctgatggtctatgccacactaaactcggacaataagtataaaatcaccggcaacattacgcttgagatcaacgacaagtactacaaggtggtggtgagtgatggtgtgggactgagaaatcttggggagttcaaagccggccggtacacttacacggccacctatacagggtcagatctgttcagcatgtccaccatcaagggttccttcaatgtgcgctgcaatagctataagatcacaggcaacaagaatattgtgcagtattatggcacctacaagtcttataaggtgcgcttgcttaacaataatgtccctgtgaagaaggcaatcattaccgtgaagataaataagaagaacattaaggtgaaaacggacaacaaagggtacgctaccctgaagctgaagctcaaggccggtaagtacagcattacggcttcttacaagaaggtcactgtgaagaacaaggtcaccgtgaagcctatcctgatcaccaagaacatggtggttaagaagggcaaaaccgtaacctacacggccaagctgctcaacaagtacgggaaaaaggttaaaaacaaaaaggtgatcttcaaggttaaagggaagaagtacattgttaaaacgaataagaaggggatcgccaagattaagattaaaaagctgaaagtgggaaagtacaaaatccagagcatctacgggaaggtgaaaaacaccaacaccatcaagatcaaatga

SEQ ID NO: 8839 - DNA, 2589 bp, synthetic construct
  source 1..2589: mol_type = other DNA
atgaagtacaaaaacattctgtttttttcaatcttcatcctgtttattgtcggaatcagttgtgtgtctgcccagaacatagacgaaattggcaattcatccagcgacgacacgatcagtctagatgacgatataagtaccatcaacatcgtggacaatgagatttcaactaatgtcgatggagaggtgatttgtgacgggaaatccacgcgcgacacctattcttgggctgacttcaaaagcgaggtcgaaaacgcgaacatcaatacaatagagttgaataagggaaacattgccccaagcagcgacagttccaatcagatcagtatcaaccacgacataaatatcattggcggttatggctattatatcgggggggacagctggagcagtagcaccaagtacaactacattcccattattacgtctggcagcaacctgaacgtcaagttcgagaatgtgaccttccaatacctttctgacaatgtgtttatgaaattgatggggaacggcaattatacattcaagaactgcgtctttagcaatatcaatgccactggctcccaccagtccgtcatctggctgaattatggacacgccttaatcgaaaactgcagcttcatcaaatgtaactgctccttcggggcggtaactaattactattcctcctggggcactgctgttaacaatgctaggatgacagtgcgggattcgacattcaaagataactatgctactactgaaccgggagcaattaataattgcggacagctcgtcgtgtacgactcaacatttgaaaataatgaagcagtgtggtgggctggagccatccacacccacagcaacgctaacacaaccatcatccgatcgaagttcaaaaacaactacgcaggatggaacggtggggcgttatacacctacagttacctgaccgtcatcaactcaaccttcacagccaacacggcaaagaccaatactgggggaggtgctattggagccagcagttatatgagcacaccaaaagtggtgattaaaaactcagaatttaaatacaacaccgctctcacaggtaatggtggcgcaatcgtgataagttcaggcacactgaatgtggagagtagcgagtttaccaacaatactgccctcgagttaaacggtggtgcaatctccagcagcagctgcactgccgccatctcgaactgcaagttcatcaacaacactctgaacaagacagccggaaaaggcggggccgtgtacggtacgggcaagggcagactgacagtggataagtgcgaatttattaacaacgcggcgaaggacaacaactctggccatgcactggcctattactatacgggcaacagcaacactgcagcctacttgacctataccaataacatattccggggaaaggataatggcactgggtctgtgtttgtagccaacgataaggtcaacattgtgcaatacaataacagcattgacgacattactaattacattgagccagaaaacaacacaaacggcaccagcagcggaaatataaccatccctataggcaccgatatactgtcctcgtcctgggacgtgatcctgggggacaacctgaatgggaccagcgtgattgccggtaactacattcttatccccgcaagtcatgatttgtactgttacaattacatcacccaggatctcgtttggaatttcacaaccgaatttggttacttccatgagctgttggtggatggaaatatcgtgtacgcacccgcctcatgggacgcactttacatcttcaacctgacaaatggggagtcgcttacctattcaaacatctaccagggaagcagcctctataagccagtaatctacaataacactctctatgtctcctccgagtacgggtatgggattaattccaacaattggatctccatgattaagcatgactctgactactactactatggcagtattctggagctcaacaacgtttcttatggcacgccggctatactgtcccagccctatatccacggcaataccctttacgtgaacaccatccaggggctgatcgcctataatttggtggacggcacgagccacaatgtgagtggcacggtcggcaaccctattatcgatgccaacggcaacatctgtatcctctcaaacaatggtgcggctatcagcctgctcaactccaatctggaggttgttgcctcaaccacactcgatgggacctgcaacaagctgattagcgatgccaacgggaatatctacactgtggataacaatggctatatctattatgctacatacacctccagctccatcacctgcagcaagactaagttcaacattaaccctgtttcctcagctatggcctgttacgacggcaagctttacataggagacaacaacggaatcctatgggccttcaacacgagcaaactagatgagcccgtactgaacaacgctgtctacagggttttcgacgctgggtcggccatcgtaggaaatattgcggttgacaatgatggcaccatatatatcggtacagataatgggcacttttacgccatagagtactga

SEQ ID NO: 8840 - DNA, 4578 bp, synthetic construct
  source 1..4578: mol_type = other DNA
atgagactgaataaatccgtgctgtttgtcttcatgattatcttcctgctgagtctgaactttattgtcgcaaaagatatcaacgaaactaacttaaacgccgactcttttgaaatagactatgatgatagcatctctagttcatacgataccaacttacagaagctgaaccagaacgacatcgagaagaccgacgagtcattagaaaaatcggacaactcgagcaatcgtctactcaacgaagacaataacaatgggttgctgggggatggcgatggtctgaagcatctgtatgtggctccaaacgctaccggcagcgggctcgatgaaaacgacccaggagacttcataaccatcctgaacaatactgaggataacacggtgatccacatgctggaaggaacttacctactttccaacatcacccccatttaccaggatggttactaccactttatttccattaagtcaaagaataacataagcatcgtgggagagaatccagacaaagtaaagataatttccaaccttacacctaaaaaacgaacttcgttcatattcagcctgcataacaccaataacttcaagttcgagaatatcaccttcagcgcgatcaaaaaagatcccaagaaagagaagacgaagagctatttcctcctcaataagaacaattacatctttgaaaactgcaaattcatagacgcctactccaaattcgctattatagaactggacgagggcacgcacctaaccattaataactgttattttacatccacggacggacatgttggaagggagatatctccaaggctcttttgctcagtcctgttgaacaacacgatctttaaaaattgttgcagatattctgattataagataggggtgatggggaactacagcatctttaacagccaattcctagagtatgacgacaatccactgttgtattttcaaccctactgtaacttgatttttgagaacaactatgttgaccacccatacaatttcgttttcttccagccctctgaccactacgagggttcaaatcgcatgttttgtagccacacgactctgactttcctcaatggggaggatagtgtcaacgttaattgcggagatgttatcaatcttaatgcctcgctcgtcgatgacctgggtaacattcttagtctctataagttgaagttcaacctgttcgagaacgacctcacctataccaatggggtctatcagaaggaggtgaccgtgcctgatgtgcccggcgaatattacatcgacgtgagtgatgagatgttcaccaaatacctgggcaattgtacagtgaaggcccctatttttattgtgaaagaggcgcctgaatttctatttgatgataaaaacagcagcacctacggcgaggacgttatcatcaacgtggactcactggatattcccgacggaaagttaactttccgcttcaacaacagcgaaatcatcaaaaacatcacagactaccgctgcagcatcaatctgggagtcctgcctgcaggggagtacgccatcaccgcgtactatgccggggatgaagtgtacggagctaaatcctacacaaaaacatttaacgtcaccaaggcaaaaagcacaatcagcctgacgaaaggccacgtggacgccattaaggataatggcgacgtgggcttctacttcagcacaactgagaacggcaacgaaaacaccataggcattatccttccggataatgcaaccgggaagctgacattcaaattggacaccgacacgtactccatcgacatcaccaaacgaaaagtactgctcggcaatctcgactacggctcctatatcatcgcggtgaagtacgatggggataacaacttcaatgaatccgaggagtgcaccttcaccttggtgaactccaagccaagcgtggaccttaccctgaattacagtaatatcaattacaccaacccgtttaacgttaacgtaaccctgaaccaggacgtggtgaaggatacaatcatcttcgaggtgagagacctggaggacaatctgattaactcaaccactggaattatcagcaacaagagcgccaatgccaccttcacaggcctaaatgcaggcgaatacaacatcattgccatttacgaaggcgacgagacttattgtaactccattgccagtcagcggttcaacgtgaacaagatcgacctcgaatacttcaccctcaaggctgacaagaccatcagtatccacgataatatcaaagtggaagctctgataccagtcaacgtggggggcagcataaccttccggatcaatgggcaggacatgacggtggagattttcaataatcgggcggaggctatcttcgataaccccggcctcggcaactatacagtgtatgcgacgttcaacggtgatgataattacaacccccacgaggaaaacatcaatatcactgtcattaaggccgacgccaatctgagtgtttctgccgagaatgtggattggggagaggagttagttgtggtggtgaaaaccgacaccaggttcacaggcaacctgagtgtgaagatagacggggtggagaagatcgttgagatcaccgaaggccaaggcaacgtgtcattctctaacctcaaggccggaaaatacaatgtggctgtggaatttaatgagagcgaatttttcacctcatcccaaaaggacattaatgtcacggtcaacaaaatagattccgccctcacgctggacaacgacgagatggtctttgactacggtggatcggcttcagtaacatttggctatgatggcgcagtgaatgtgacagccgaagtcgtgaatcaccccgaggctgtaattaagattaacgaggactgcattgtggtttctgatttggacgcggggcagtataccttgaaagtcactactgtgcccgacgagaaccacactggggtagataaggagtttgaagtgactgtcaacaagatagacagcgcactcactctggataacgacgagatggtcttcgattacggtggatcggctagcgtcacatttgactatgatggtgccgtgaacgtgacagccgaggtcgtcaaccaccctgaggctgtaatcaagatcaatgaggattgcattgtggtttctgacctggacgcggggcagtataccctgaaagtcactacggtgcccgacgagaaccacaatagtgtggataagacaatcagcattacagtaaataaggtaaacgccaacatcaatatcgaggacatcgttctggactatggttctcatgacattacagtctttacaggcgaaggtattgaaagtgtcaatgcaaatatccttaatcagagttacgcaaacgtcattgttagcggcaataatattagcatctacaatctgaatgtcggagagtacgtgcttcagctgattgtgaatccagatgaaaaccacaactccgtgagtaagaatgtgaaggtaactgttaataagatcgattctgtgatcgatatccggaatgaagtggtcttcacatacggagatgctgggtattgcgatgtgtatagtgagggggcggtggactttacggtaaaagtcatcaatcatccggaggccgtgatcaacatcaacaagaacgggatcgtcaaggtgtccgctctgaatgcaggaacatacattatggaagttaccacgaacccggacactaaccataactcagtgaccgggagagttaacgtcacggtaaacaaggctgactctaaaatcattatccccgatatcatctttgattacggtaacagcgggtccgtgaatatactcgtgtacaacgcaacgggaattggcaacgtcaacgttgtggggcatccggaagccataacaaccattaacggcactaagatctccgtgggcggtctgaacgccggatcatatattttaacagctaccgcactgaccggcgacaattacaaccctgtcaacgtctccgccaacgtcattgttaataaactcaccaccattattggcgtgaaaaaggtgaatggcgtttacggctcctccggtaagctgatcgtgactcttaaggacagcaacgggaaccttctcaccggcaagttgctccgggtgaaggtaggctcgatttccaagactttgactacgaatcgccatgggcaggtcagcgttaatgttgcatatcttattcctaagagctacaacgccaagatcagctttgccggtgacaacgacctggtcgagtcatccaacactgctaaggtggtgatcaagaaggccactcctaaattgacagccaaaactctcaagacaaaggtgaaaacaaaaaataaaaagcttaagataactctgaagaacaaaaagggaaaagctcttaagaataccaaggtgaccctgaaactcaagggcaagacctataaagccaagaccaacaagaaaggaatcgccacatttaagataacaaaactaaataagaggggaacatttaagggaaccgtcaagttcgcaggaaacaagtacttcaaagccatcaacaagaaagtaaaagttatagtgaaaaagtga

SEQ ID NO: 8841 - DNA, 486 bp, synthetic construct
  source 1..486: mol_type = other DNA
atggagcgcgagaacctgagcggcatttttagtattgttctcggtttgatcttcatacttttccccatgttttcaagcaacctcatttccatcatcgtggggttgagtctgctattcttcgggctgagcgcggccttcatggggtttacgatgaggcggaatggaatcccatactctctgatctccatcatcattggcattgtggccgtgatcctcggattcggattcatcttctatctcgatgcactttcatttttggtgggattccagctgtacattgtcggctttattatgattgtctttggcataaccggcctgatctcgaagctaaatagaatctccagctttacatccatacttgtcctgctgatgggtattgtgagcatagctctggccatcttcgctctcaaccagccgatatacattgcaatcatcatcgggatcgtgctgatcattgaaggcgtaagcttcctgttaaacgactga

SEQ ID NO: 8842 - DNA, 519 bp, synthetic construct
  source 1..519: mol_type = other DNA
atgagcgactttgaggagatcataaacaccagaaggagcgtgcgccagtatcaggacaaggacattgctgaggaactgattctaaagatcctgaaagccggcatgcaggcacccgggtcacgcctcggagctgagccttgggaatttgtggtcatcaagaaccgggagattttaagtaaactgggcgaaatcaagccgcgagtcacgaacgccccagttgccattgtactggtcgccaacattggaagggcattctacaaaaccgtgtggcaacaggacatgggtgccgcggccgagaacatgctgctggaagcagtgaatcttggattgggtgggctttggaatggggtggcgcccgacgaggagaaaatggctaagatcgggaatataatcggcatcgatgacatcgccgatctcaaaccattctgcattatcacactcggctatcccgctgagggctttgagaacaagttcatggataagttcgatgaatcccggatacactacgaaaagtactga

SEQ ID NO: 8843 - DNA, 1176 bp, synthetic construct
  source 1..1176: mol_type = other DNA
atgaaaaatacggactacgatttcgaaagtgtcatcgatcgccataacaccaactgcgtcaaatgggactactttgatgatgagttgcctatgtgggtcgcagatatggactttaaggtggccccggccatcgaaaacgctgttctcaagcgggcgatgcacccgatatatggctacacaattgtgtcagatgaactattcgagtcgtacataaactggtgggacagacgctacggattcaaaatgtatcgggaggacatgctgtatagcatcggcgtcatgccctccatcagcagcatgataaggtgcctgaccgatatcggagatgggattctgatccagagcccagtgtaccatgtgttttaccatgtgatcgaggagaacaaccgaaaagtggttgagaatgagttggtctatgaaaatgggagatataacattgactttgacgacttggacaagaaactgtccaaggtaaaaatgatgattgtgtgcaatccccacaatccaatcggcaagatctggtcacgcgaggaactggctaagatcgggtacctttgcagtaaatatgatgtgattctggtcagcgacgagattcactgcgacctcacagaccctgatatcaggtacaaccccttcgaaattagcagcggctacgaaaaggcagtaacttgcctctctcctagcaagagcttcaatatcgccggttttaagagttccattgtgcacaccaagaacaccgaactgttcgagaaaatcagaacccagctgcacattgacaactcggactcctgtaatgtcttcgccgcaagtgccgtaattgccgcttacaatgaatcagaggagtggctgaatcagcttaaggaagtgttattcgagaacaaacagatcgtgaaggagtatctggagaaggagctgccagtgataaagctcgtggactgtgatgccacttatctattgtggcttgattgttcagccctcaacgcgccctccaaggttctatccgagtttctccgaacaaatcacggactgtttttatctgcagggattgacttcggccagaacggtgacaacttcctgaggatgaacatcgcctgtccccaaatcctgctcaaagacgggctggaacggcttaaggctggcatcacggctctcagctacataaataacggactgtga

SEQ ID NO: 8844 - DNA, 801 bp, synthetic construct
  source 1..801: mol_type = other DNA
atgatcgagaagtccatctacgaaaactaccagatcgacttcaacgaggagatgacccccgccgacgatgattacatctttatttttaaccatgaccgggaactgtacctcaataaggacaaacagctcgcgaatagtctggatgacttcgacgtgaatttttgtttatacatcggcaaatataacaataagaaggctttcgtcgcaaacgttaacacttcagattcattctatcaactgatggaagtgtacgagtttaacaaatccctgtacttgatggggggaaaggccgttctggtcaacgattggtacatctcgcaccagtattgcggacgctgcggtacgaaaacccagatagatgagaaagacatgatgcttaagtgtcccgagtgcgggcagaaccactatcctcgcatcgctccggccattatcgtagctatcaggaagggggaggagctgctcatggcaaatcacagttatcatgagacaatacgatacgccctaatagccggtttcgtggaacctggcgagagcattgaggaagcggtcaaacgggaggtgagcgaggaggtgggcattgaaattaaaaatcttgaatacaaaagaagccagtcctggccattcccaaactccttgatggtgggattcacagcagaatatgagaacggcgacatcaaggtggacggcgatgaaattctcaaggccaagtggttcaagaaggacgaaataattaggtatgactctgacatcagcatcagcgattggctgattcaagattttatcgacagcgccaatccctga

SEQ ID NO: 8845 - DNA, 507 bp, synthetic construct
  source 1..507: mol_type = other DNA
atggtaagcaagaatatggagaaagccttgaatgctcagttgaacgccgaaatctactcaggatatctttacctgtccatggcggcgtatttcgaggacgaggacctagcaggctttgctaactggatgcgagtccaagcaaacgaagaactcgggcacggaatgaaattctatgattacataatcagacgcgggagctctgttaccctcaccgccatagatgcaccgcagactgaatgggacagtccactggccgccttcaagcacgtgctggagcacgaacagatggtgacgggccttatcaacgatctcgtgaacatctccattgaggagaaagaccatgccacaaataacttcctgcagtggtttgtggaggagcaagtggaagaggaggagaacgccatggacctcctggcaaaggctaagctggccgatggcgacaataggttaatttacgaactgaataaggagctggctacacgggtccccagcgaatcgcaggactga

SEQ ID NO: 8846 - DNA, 648 bp, synthetic construct
  source 1..648: mol_type = other DNA
atgaactaccccgatggccccacctccgaagctcaagtggattcaacggagtttgacgccgacttgctgcatgagaatgatttggggtcagtccacattcatggtcacttcggcaacgtcgagtctgaggtgaaaatagcctacctcattgggatgcaccctctcgagagcaaaagccaccgcgccctgtttgaaaagctgatctcgaaggaagacctgaagtattgctactatctgtataacatcaacgtcagcaacaagaacagtgagtccgagggacggaatgagggtcagctcctggcgcaggagagcgtgcagaaggacattatttctaagaattacgacctttttctagacatccacagcaatagggggcctgatggacccggagactataaaataaccaactttctgttcgctccaggcttcgatgacaaatccagtaaattcatgaatgaaatcctggatcagatcgacgaaatcgtatactatgcaccgaagttcagaagctcccccagttacattactgagccaaccgccgaggcaggcatccctactcttgtgtacgaatgttactcctcagagccaatggaatacacactatatctcgccgaaaagttaatctctgtggttgacacactgttctga

SEQ ID NO: 8847 - DNA, 981 bp, synthetic construct
  source 1..981: mol_type = other DNA
atgataatccgcgccccctcccgcatccacatgtccctgattgatctgaatggctcatataggcgagttgacgggggcatcggattagcactcgctgacccccagttcgtgctagaagtgaagcagattgaaaatggcatagaacttgagttcgccgacaacgtcacagacgaggaggccatcgaggagtgtcgggaaaaaatccccgatgccgccaggaagactatcgaacactttaacatcgactccggtttcaagtttattgttcacgaaacataccctccacactccggctttggcagcggaacccaaattgctatctcaaccgcccatctgataacagagacgatggacatagaagtcgagagcagagtactcagcagtgtggtgggacgggggggaacctccggtattggcacctacacacatgatctcggtggcttcatcttggacggcggccacagtaaggaggagaaaccactcttcctgccttcaggcgcaagccaggcaaaaccagccacgctgatcgccagatacgattttccggaggagtggaacattctgatcgcaattcccgaaatcgagaagcatatggagggggacgatgaggtggatgtgttccagacttactgccctatcccaaaggaggaggtggagcaggtgagccacctgatcctgatgaacctagtgcccttcatgctggaaaaggatattaaaaacttcggctgggcggtgagtgaacttcaaaaagttggatttaataagctggagcatagccttgacgccagctatttgcctaccatgcaggctattgaaaaggctggggcttatggggtggggatatctagcttcggaccggtcctctacaccttctttgacgaatcgaacgaggacatcgtcgaaaagacaaaagagatcatcggagagaatgggaccgtctttgtaacgaaagcgcagaaccacggtttcactattgaatga

SEQ ID NO: 8848 - DNA, 993 bp, synthetic construct
  source 1..993: mol_type = other DNA
atggaaaacaaccgcacggtgttcattgactacctgaaggtaatcggtctcctttgcattatcctggcccatatctcaactgatgagtccattctgcagattagaaactttgacgtgcccctgatggtcataatttcggggtttcttgcagtcaattcttttaagcgaaatctcaaacagaaccgctccttcctgaggtattactggaagagaattagccgtcttctgttccccacatggacctttctaatcattttctttattgtcatggcctttttaccaatcaatggcatctaccactatgatgccgacttcatcctcaacagcttcctcctccttgatgggctcccctacgtgtggatcataaggatcttcctgatttgtaccttcataacgcctgtaatctattacttcgacaagatcgagaatgactacatccaattcctcattctgctcctgatctacattttgtacgaactctcaatcttcttaaaaatcaacgagacaaacatcatttttgagtttatcctggcttatgttatcccttatgggattatatatttgctgggaatgatcagcaccaagacaagtccaaagatggacaggaatgtctccattatctgcctaatcgcattcatcattcaggcggtcataatttatctgaatactggcatattccagccgactcagattatgaagtacccgccaacagtgtactacataagctacgccctgtttgtttctttcatgctacttagcatcttcaaacggattgatttgaagcccaaccgggtgatagagttttgttctaaaagttccctgtggatctatctgtggcacatactgttcctgaccgtgattcctctgatctttggcgaactcaactggatcttgagttacatcatcattgtggtgtgcgcggtgggcgctacctatatccaaaataagatcctggacttgaccaacgccgatatcaaagttctgcggggatga

SEQ ID NO: 8849 - DNA, 432 bp, synthetic construct
  source 1..432: mol_type = other DNA
atgaagatcaagcagctgtctatatttctgcagaataggatgggcagcctgagcaagcccctggaagtgctttcaaagaacggcgtgaacatccgcgcaatgtgcatggccgatacttcggagttcggtattttgcggctggtagtggataaccctgagatgggaaaagaggtgctggaagagcacaacttcctggtcaagatcacagaaatcattggggttgaaatgaatgacaccccggggggcctcaccagtgtgttgaaagttatcaaggataacggaattgaccttgagtatctgtacgccttcacgcatgacaaagaggggaaagctattctcctgctccacgcggatgatatcgacaagctcatcagctccctacaagacaatgacatagtcatcgtgccatccgacgaggtctacaacttatga

SEQ ID NO: 8850 - DNA, 1302 bp, synthetic construct
  source 1..1302: mol_type = other DNA
atgttttggaatgaggagattgagacgatgagcaggcccgacctagaagaactgcagctgaagaaactgcaggcgaccgtcaaaagggcattcaacaagataccttactataataaacggtactcagaggtggaagtgtatccagaggacatcgagactctcaaggatattgaaaaactccccttcatcacaaaggatgacctgcgcgaaagctatccatttggcctgttcgccgtcgacataaaagacataaaagagttacatagcagttctggaaccacaggcaaaccagtagtttcgggctacactgaaaaggacttggacacatgggcggagacaacagcccgggggcttacaatgatggggctgggtgaaaacgacatcatccaaaatacccacggctacggaatgtttaccggggggtttggggttcattatggatctcacaagatcggggctgccatcattccgatctcaaccggccagacccgccgacagatcgaaattatgagtgatttcggcactaccggacttatttttactccatcctacggaatacacatcggggaggtggctctcgacgatggcattgatccgaagaaactcggcattaaggctatcggctttggcgctgaaatgtggacggaagagatcagacagagagtggaggagctattcggggccaaagcatacaatatctacgggctgaccgagctcatgggacctggtgtgggggtggaatgtgaggcccagaaaggactgcacattgcagaggatatctactatcctgaaatcatcgaccccaacacagagaaagtgattggtggagacaagcctggtgagctggtgctgactaacctcgaacgagagggaatgcccatcataagattccggaccaaggacctgaccaccctgacttatgagaagtgcagctgcggccgaactcacgccagaatgagtcggatcacgggccggtccgatgacatgatcaaggtaaagggtgtcgctattttccccagccagatcgagaaggccctgttgaaggttggtgatgtagagcctcattacatgattatagtgacccgccccggaacgctcgatgagatcgaagtgaaggtcgaggcatcccaagacattttcttcgatggcgtgaaggagatgatggccatccagaacaagataggcaaatccattgaaaacgagacaggcattcgtgtcaaagtgaccttggttgaacccaagacgcttccaaggttcgaagggaaggccaagcgcgtcatcgacgagaggaacttacactga

SEQ ID NO: 8851 - DNA, 711 bp, synthetic construct
  source 1..711: mol_type = other DNA
atggacatgatcagcgtgctgtggcaggttggaatctttgcgtccgtcctagttttcggcataaaaatcgggctggcaagcggtctggctaacttgccaaagaaactttttgccgtaatttgcatgtcttacggagggggagtgatcctgatttcgtacattgcttcgtttttcgccgagcagctggtgcaagctatatacagttataataccatcttttatatcatcatggcttccatcatgatcattgcgggcctcttcaccatcagggaatggaaaatacacgacaaaaacacatcaacggccacttctctagcgattattgcaccctgcccctgctgtttcggcagcatcatcgccagtgtgctcatcgtggcacccactataggtatcagttccctgaatctcagctggtacgcctcagcagcccttgtcgctgtgatggtcgtcacgtatttcgcatccaatacaatcatccgctttactaataagccataccctattgtgctcgggaatttcatgttattgctcggcgcctacttcttgcttagcgccatcgtaattccaaacattgcctcctcactgaccaagaacaccagcccgatcaccatcgcctctcctcagaacatactcatggtgattctgacattcgttatactgctggtgggaggcatggtcctgaacaagaaggggcggaacattctggattga

SEQ ID NO: 8852 - DNA, 645 bp, synthetic construct
  source 1..645: mol_type = other DNA
atggtgctgaacatcccaggcggagaatttctgactgggagcctggacgttatcagccagagcctgacaatccctgtccttgtgattctactcgtcattgtgatcataagtatcattacactgggaggcattatagcggagtatacttccagaaaaaaggtgcccataggaacaatccgcgacttgatttatgatatcaacctgtcggaatctattgacggccttaagaatataatctcaaaggccaaaatcccaaactcccagaaaaaggtgttaatcgaaatcgcatcagccgagtccctcggcgtgaatagccgggaggcgctggctcggaaactgttcgagtttgaggaggagaagaccatggaaacactcaagaagaccgacatcatcaccaggatcggcccgacccttggtctcatgggcaccctcattcccatggggcccggactggccgcactcggggccggggatataaataccctagccaactccctgacggttgcattcaacacgactattgtcggtattggcagtggggccttatgctacttcattggaaagatcaggtctagctggtacgatcgatacctgagtgacttggatgctctgatcgatagcgtattggactacatggacaaatga

SEQ ID NO: 8853 - DNA, 324 bp, synthetic construct
  source 1..324: mol_type = other DNA
atggtaagaaaaagtaataggcgccggtccaaacgagtcgaggaggaccctatggcaggcacaagcaacctggtcgatgccatgctggtgattgctgttgggttcctagtgtttgtgatcatatcctggaacatgcaggccatgatcgatcccgatcagagcatccaggaaaagatgcagcagcagaagaccaccgaggtggaccagggccaacagctcaatgagactccggacacatcaaacagctcgggtcaagggtataccgaaatgggaaaggtctacaaagacccagcgacgggaaagctgattatggtggaaggctga

SEQ ID NO: 8854 - DNA, 318 bp, synthetic construct
  source 1..318: mol_type = other DNA
atggagttttgccccgattgcggcgccatgctcatgccgaaaaagggtaagattaagtgtacatgtggctatgagaagtctctgagtgacgacgacctagtggagcagtaccacatgaagggggaaacgaaccctgagaccaaagtaatagtcacggatagcaacaatgtggcgctgcccaccaccaagatcacctgctacaaatgcggagggacaaaaggatactggtggaccgtgcagacaaggagcgccgacgaagcaccaactaatttcatccgctgtgctaagtgcggcaacacttggcggtcctcaaactga

SEQ ID NO: 8855 - DNA, 816 bp, synthetic construct
  source 1..816: mol_type = other DNA
atgaaaaatacaaaaaagatcgtgatcgtcgccattattatcgtgatcgtggcagggattgcccttctgagcggcgttggcagttcagagaacatagacatcgtaggctccacatcggtgcagcccgtcgcggagaaactcgtcgaaacttacaaacagacccatccggacgctaacattaatgtgcaaggcggagggtccagtgtaggaattaagtctgcccaagatggtagcgccgacattggcaccagctccaaggagctgaaagaggatgaaaagcaaggacttacggagtataacatcgggcaggatggcattgtcatagcggttaacaacgagaacactgttaacgatttatcaaaggatcagctcaaggacatattcagcggcaaaatcaccaattggaaccaggttggagggcaggacggtgagatcaacattatcacccgggaagagggtagcggtactctggacgcattcgaaaatattgtgatgggcaaggacaccaagatccgctccgatgccgtggtgcagagctcgacagaggctgtgaaacagtccgtcaagcaggactcaaacgccataggcttcgtgtcatttgctcacatgtccaatgacgtaaaggccctgagcatcgggggggtcagcccaagtaccgatacgatcgcagacggaagctacgagctgcagaggccttttttgttcctagtgaagggaacgcccagcggcgatctgaaagaatttatcgactgggtgaatagttccgaagggcagaaggtgctcaatgaggaaaagatcatcaaaagcacaaactga

SEQ ID NO: 8856 - DNA, 864 bp, synthetic construct
  source 1..864: mol_type = other DNA
atgagcgaacagttcatcgagaaaggtctgctgataaccgcgatgttctcaatctttatcatattgatcatcctgggattcatcataatcgagggactcccggcttttcaggactacgggttcatccagttcctcttcggacagacttggtctcccaatgaagggcaatatggcctattctcaatgatcataggctcgatttgtgtgaccatcttcgccctgattattgccgtgccactctccattctgtgcagcatatttatggcagaggtggccaatgaaaacattaagaatttcctgaagcctgtgattcagactctgtccggcatccctagcgtcgtgtatggattcttcgggcttatcgtgcttgttcccatcgtaagattctacttcggaggcacggggtttagtatttttacagcaggcattatcttatccgtgatgatcctgcccacgattattagcgtgagctttgacagcctctgcgccgtcccaaatgagtacaaggaggcctcccttgggctcggcgctacaaactggcaaaccatcaacaaggtcatatttccggccagtttgccagggatcgtgacggcaatcatcctcgggatgggtcgcgcgatcggcgagacactggcggtcatcatggtggccggtaacgtgcctggcatccccaactccatatttagccccgttaggactctgacctcaaatatcgctttggaaatgagttacgcaacaggactgcatcacaacgccctattcgccaccgctaccatcctgtttgttattattttattgctcctggtaattgctaactatattcagcggaaatacaaaatggatgtcggcggtggcaccctgtga

SEQ ID NO: 8857 - DNA, 852 bp, synthetic construct
  source 1..852: mol_type = other DNA
atgaaattcaactacatctcccccaagcgcagccaaaagataatgaacggcatattcatatttagtggcgttcttaccctctccatcctgattattattctcgggtacatcctgattaatgccgtgcctatacttagcttcgattttatcttcgggcaggtgattgacgcaggcaaaagcggcggcatttcccccatgattgtctccagtctatacgtgacctttatctcaatcctgatcgcgactcctctgggggttggtgcagcgatctacgtgacagaatacagcaagaacggattgttaatccgactgatccggttcggtgctgagacgctggcgtcgattccctcaattgtatttggcctgtttggactgacattctttgtagtgttcctgaacctcggatggtccattctcagcggtgggcttgtccttgccatcatggccatcccaacaatcttccaggtgacagaggtctccttgtcatctgtgcccagcagctataaagaaggaagtttcggcctaggagccaccaagtggcagacaatctgccacgtgattctccctgccgctatcccaggcattgtcaccggaattatcttgggcctgacgcggagtatttcggaggctgcagctgtgatgtatgccgtcggttctgccactaccataccgatatctatgtttgacccagggaggcccctcccactgcatttatatgtgctggcaaccgagggggtgtctctgccgaacgcttacggcactgccgccgtgctggttatcatcgtcctcatcatcacgttcttcaccaattacatcgtaaacagatatcagaagaaaatcatggggaattga

SEQ ID NO: 8858 - DNA, 753 bp, synthetic construct
  source 1..753: mol_type = other DNA
atggaccgcatcatcgtgaaggacttgaacacctatttcggtaactcccatatcctccgaaacattaacgtcacattccctgagaacaatgtcacggcattgatcggacccagcgggtgcggcaagtccacctttttaaggtccattaataggatgaacgacctgatctccacctttcaccacgacgggtacatttacatcgataataaagatatttacgacagcgatgtggatgttgtggagctgcggaagaaggtcgggatggtcttccagaaaccaaaccccttccctaaatcaatatttgagaacgtggcatatgggctgcgtatccatggttacgatgacgaggattttataaaggaacgggtaatcgagagcctgaaagcttcggccatctgggatgaagtaaaggacaaacttgaccagtctgccatgggcctatctggcggacagcaacagcggctttgtatcgccagaactatcgccaacaatccagaagtgatcctgatggacgaaccgtgcagcgctctcgaccccattagcacgctcaagatcgaagacctgatgcacgaactcaagaaagattacagtattattattgtgacacacaacatgcagcaagcgagccgcgttagtgactatacttcattcttcctgaatggcgagataatcgagagtggaaagaccgaacagatatttgtgaatccaaaggaggagaaaaccgaggagtacattacaggcagattcggatga

SEQ ID NO: 8859 - DNA, 657 bp, synthetic construct
  source 1..657: mol_type = other DNA
atggacaaggagtaccccagtatctcatttaaaaaccgctttaaaaaaatcgagagtgacatagaagagctaaacgacctggctatcaaaagcaacatggacgtggtgaagctctttgaagaatttaacgaaaatctttacttcgatatcctgaatcggagcaatgagatggacattaagaccattgatctcgagcgcgaatgcattaagttcatggccacagagcagcctgttgcgcatgaccttatcttcatggagtccgtaattcgggtcataagccacattaagcgaattgggcggctcttcctgaaaattgctcaaagcatcaagaacatcaaggatgtggagattccagaactgataataaaaaaattatgttacatgggagattatatcgaagtcatgctgaagaaatccatcttcgcattcttgaataaggacacccagaaggccaaggagctgtcccacgatgacgacgagatcgatgaactctatgagttcatcctgaacgattcgatcgacatgatcgaggatcgtaagattttgatcgagattatctcaatcgcaaggcacttcgagagaattgccgacaagacggtgaacatcggcagcagaatcttctttgtgatggattttaaaaggccggacatagaatga

SEQ ID NO: 8860 - DNA, 1299 bp, synthetic construct
  source 1..1299: mol_type = other DNA
atgtcaagaaatgcgtacattaacaaggacattccacttagcaaaattcacgaagtgaaagccgacctgaagcactacatagaggtgtatgagaaaatcacattcattgaggacatatatgctggtgagaccgtgaagtatgccatcgaaaagcgggggaagacaattcccactggccacacctggctcaagtcttggaacgaggaggggtttgacggactgctcaggaaagaaggatcggggcgcaaaaccaagctcactgagaatcagttcaaacagctaaaagaaaacatcataaagaaacaactgaccagcgtgcgggaagtgaagcatgaaatcttcgaggagtttagtgtgtcctattccgatcgacagattcgacgcattatgaagaagctgggctttggctacggtaagccttatgtcatacccgccgaagcgccaaaaaacgccagcgagcagctcaagaaaaacaccgaaaaaatcgatctgaagaaagacattctgatcttcactgatcagacagccgttcaaaacaaggacaatacgaacagaatatactacgaactgggaacaaagaatcgtcagaccaaaatcactacaagaataaagctgaacgctaacggctaccaggcagtaaacggcaactccctcatcctcttccagcagaatacccatacattcgaggaaatcaagtcactgatcaatcttaggattgtcaattgcatcaacaaggagttaaaatcagagcttaagaatattttgaccgacgatgaactcgacgaaaacaagatttacaataaactgaaagacgagaacacgctggagactctgaaaaatgagtttaacgaatttatctccaacagcaatagtagcgagaagcaatttttggttaagatcaagaataaggcaaataaattgaacccgaagaaacacaccaacatcgagaacattcagaaggagataatcattaagctgctaaataaggacaatatcatcaataacctgcagaacgagaggaagcttgtcgtggtattggataattacagcgttcacaaggctaacctcgtgattcaagcatgtgaaatcctgaatatcaagctcattcatctacctccccatagcccccacctgaacccaatcgaacaggtctggaaaagcatcaagaagtatatggcctactatttattcgatacgatcaaatttatggaggagctgttcgagaaggagttctaccgcatcgtcaaccgggattcctactacaaaaactggatcagtaaattcatcatggtgaactga

SEQ ID NO: 8861 - DNA, 888 bp, synthetic construct
  source 1..888: mol_type = other DNA
ctgacgcggtccaataagacactagaagacatcctcgacgttattttctacgacaagccctccacgcaggaggagatcgctgagacactgggcataagccgcaggtacgtgacccagctgcttaaacctctgattgaagaggacattgtaaaaaggagctatgtcatcgatctcaataagtacgatgagatctatggtagctcaaacccaatttttaactcgaagcagcatagcgcgtacttcttgatcgagaacatgctgaagaacatggccgaacacgtgaaaaaggaagtgcaaatgagcttcgatgcgatcttgaacaacgatgaaaagatggccgaagaggcattggaactggatttcaccacaaacaacatgtttgaaaaagtgcggtcgtctgtggagaccgtagtgaacatcgatcctcattccaaactttctaaaatcctcctattcaacgaggcagcctataattatgagcgaatcggagactactccgggcacatcgccaaattcgtcataaatgaaaagaccccggtggatgaggagctccttgacatactgaagaagatgcacaagtacgctcaaaagagcatttcatacgcaaccgacgcctttgtgagtgaaaagttagagctgcgtggcgacctcatggatattgaagagaaaatgcacgagaagcagcatgacgctctgaatctggttgctagtcagatggccgagaatagtttcgaggacattgaaaagtacaattattatatctacatttcaagagtcgtgaaatccttcgagcggatgggggacatcgccgtcgagataatcgagctggccgcagaatttcacaaagacatcccaaggcccactactccccgcagctttagaaagtga

SEQ ID NO: 8862 - DNA, 1062 bp, synthetic construct
  source 1..1062: mol_type = other DNA
atgaagggcctggccagaatagaccaggatgtaatggactgggtggagaaggacaaaccaaaatgtgggccatatgatgctattgtcaggcccatcgctctggccccctgcacgtctgacgtgcatattgtgtggggtaatgcttacatgagcgatgcacctaaccgcatcctcgggcatgagtccaccggtgtggtggaagaagtgggggacttcgtcactgatttcaagccgggagatcgggtgattgtcccagcaattaccccaaattggaaccgcgttcctagccagaaaggcttcggacagcactgcgacggaatgggcaccggaatgacatttatcacattcaaagatggcacatttgccgagtactttaacgtcaatcatgccgatggcaacttggcgcacctgccggacaatgtgagccttgaccaggcggtgatgatatcggacatgatgactaccggcttctacggtgctgagctcgctgagatcaaaccaggcgaaaccgttgcggtctttggcattgggcctgtgggactcatgggcgtggccggggcccacttcatgggggcctcaagaatcctggccgttggaagcaggcccgtctccgtgaaggtagctaaggagtacggtgcaaccgagattgtggactaccacgagggcgacacggtcgaacaaataatggacctgacagacggggagggggtcgacaaggtcgtggtagccggaggaaacgcaaatacggtgggtgaagccctgtccgttctgaaggttggagggatcttggggaacgtaaaccactacgatggcgtggaatcaatccccctacccgcacttgcatggggcgcgggactcgccgataagacaatcagagggggcgtgtgccctggcggccgggcccgaatggagcagctggtgaagctagttgaatatggtcggttcgatagtagtaagttaatcactcaccgctttaccaacttcgacgatctctatgaggccatgatccttatgagggacaaacctcgagatctgattaaacccgctgtgatcctggagtga

SEQ ID NO: 8863 - DNA, 1557 bp, synthetic construct
  source 1..1557: mol_type = other DNA
atgaagaatcttgaaaagacactgaaaagcgtgactgaaaacccaaagtacatcttccggctgaccgtgcagggattaatggtgggcatcttcgctgggctgatggtctgtctgtatcgatttctgctttatgggtcggaacatattctgagagattacctcaacattatacacggcaacatactatacatcattcttttcttcatcgcactggccatcatgggactcctggtcgattggcttatcaaatgggaagttgattcggctggcagtggcataccccaggtgtacgcggaggtaaaggggcacatggaggccaactgggtgaagattctcttttccaaaatggtcagcggcgtgctcaccgcgctgggcgggttgagcctggggcccgagggcccttcagtgcaaattgggggcatggccggaaagggggtggcccggctctttaagggctccaagacggatgagctgagactaatcttggttggttccgctgtaggcattaccgccgccttcaacgcgcccctggcaggagtcctgtttgtgctggaggaaatcaatcatggatttgacaaaacattggtcttcattgctctggtaagcgctatcgtcagcgattttataagcaaagttatctttggtcagtccactgccctgacattccccatccacaacatccccttaggaaactattggctcctgcttgtgctgggcgttctgatcggccttctgggctatgtgtacaatatcggtatgataaagtcaagtgatttcgtcaatcagctcaaaatcccgagctggcttaaatttgtcctcgtgttcatggtgtccggtgtggtggccctgctaatccctgaaataagtgacggcggacactttatgatggacatgctggatgtggctatgccctctctgggcgtgctcgtcttcctgctagttctcaaatacttgttctccctcttctcattctcctcaggtgcgcctggaggtatatttctcccgattctggtcctgggagcctatattggggcagtcttcggggtggtaatcgtttctgtattcggattggagcatacattgatctacaagttcgtggtcattagcatggcaggattcttcgccgcaaccgtccgcagccctatcaccggggttgttttaatcgctgagatgtgcggcagtaccgagagcctcattgcaatgatcatcgtgtctctgatagcctacgtggtgcctactctcttggggaatgagccgatttatgagagcctgtacgacaggctgctgttaaagaagaacagggaatttgtgaagaagccctcaaagcacgtgctttccgagtacctagtgccactggactgcaactatattaacttcaaggtcaaagacatcccatttccaaaaaacgccatcgtagtgagcgtgatccgtaatgggaagtacgtcattcccacggaggacttcaagatcaaatatagtgaccagatccacattttggccgacgtgaatgactacccatttgttcgcgaggaaattgaagagctctttggtggctga

SEQ ID NO: 8864 - DNA, 501 bp, synthetic construct
  source 1..501: mol_type = other DNA
atgagcctcattttcaagcgaaagtccgtgcggaaatttaaggatgagaaggtgtcggaggaggtgataaccaaccttctcaaggccggcatgcaggcaccttccagttgcaatagccaaccctgggagttcatcgtggtaagcaagaaggaagataagttagccatttcacagatgcaccagttcgcgaaacccgctgccaatgcaagccatttgatcatcacggtcggaaacctgaacgaagccaaagtcatcaggatgatcgagcaggacctgggggcttgcaatgagaacattctgctgcaggcgacccacgagggcctcggggctgtgtggctgggattccatccaatcgaagaccgcacactaaaactgaaagagtacttgaacatcccggaccactgcatcccattttcagtcatttgtgttggctaccccgcccacgagagtgaaataaagattagatatgacgaatccaaggtgcactttgataaatactga

SEQ ID NO: 8865 - DNA, 714 bp, synthetic construct
  source 1..714: mol_type = other DNA
atgtataagaggatattctcaatcctgattgtcatggtctttttgatgttctcagttagcgccgtgtttgcggagtcggacgccgtgcaagacacgggtggggagagtactagcagaatcatcaatgtcaaggtgatctggaatgacgatggccaaacaaacaatcgaccggacagcgtgacagtccgccttctgaacaatgggagtgtggttgacagcgtaatattaaatgaaagcaatttctggaacggaaccttcaaaatcctcgacaatggaaactacgacgttgaggagaccggcgatctgtcctcatactcgatttccctcaccggcgacatggataatggctttgtgattacgaacactattaagcaggccccaaacaacggcagcgacgatatgatcgtggacgaaaactctacagataatagctccgacgacgtgaacggtatcattgatgactccaaccacactgttgaccagaatgatgctaaggatgagaaccagaccgaaaacatctcccaggcaaagaacacaacctacaacaataacgataaagaaaaacaggtaattaaaaaggagaacaaatctgtgaaaaagaataacacaaacatcacggggatcaaactgaagaacaccggactgcctgtggtggtgctcgtagtcgtgctattcatcatagtcatcacccccattagtcggtggaagaagtga

SEQ ID NO: 8866 - DNA, 972 bp, synthetic construct
  source 1..972: mol_type = other DNA
atggtgagtgtcaacatcgaagccaaaaagaccgtcgacgtcatgattgagaaagccgacgccctgaacatcgctgtagaaaccctgaagaatggggccactgtgctggattgtggtgtaaatgtggatggaagttttaaagcaggggaactttatacgaaggtgtgcctcggcggccttgccgatgttggcatatctatcccaggagatctgagcgagaaattcgctctacctagcgtcaaaattaagacagacagcccatccatctcaacattgggttcgcagaaagccggatggtccgtctcagtgggcgatttctttgcactagggtccgggcccgcacgggcaatcgccctgaagccagctgagacttacgaggaaattgattatgtggacagtgaagccgacctggccatcttaacgctcgaggctgacgtactgcctggtgaggaggtggcccagtacattgctgatgaatgcaaagtggacgtgaaaaatgtgtacttgctcgtcgcccccacaagctcgctcgttggatctatacaaatatccgggcgcgtagttgagaacggaacctacaagatgttggaggcgatcaagttcgacgtgaccaaggtgaaacacgccgcggggatcgcacccatcgcccccattgacccggatggcctcaaggcgatgggcaagacaaacgacgcggtcctctttgggggcaggacctattactatgtggaaagcgacgagaacgatgacatcagcgacgttgcagctaagctgccctcatctgccgcagacggctatggcaagccgttctttgatgtcttcaaagaggctgagtttgacttctacaaaattgataagggaatgttcgcccctgctgaagtggtgatcaatgacctgactaccggtaagatttacaaggagggctttgttaacgtggagctgcttaagaagtccttcggactggatgaatga

SEQ ID NO: 8867 - DNA, 846 bp, synthetic construct
  source 1..846: mol_type = other DNA
atgaaggtgtttaacatggagatcatagacatcatcaaagaggcctttatcttcccatccaacaatctcgaaaagctcgcaatctatatcgtgctgaccttcgtcatgggaatgctcgtggtggggggaatattcagcttcgtcttcagtagccagagcagtgccctgctgattgttgggcttatcttgtgcattgcggcaatcattctggccttgatcatctcaggttatcagctgaaaatcatgaagtctgggattgaccaggatgaggaggcccccgcctttgactggaagaacgatggcataaacggcattaaagtcatcgtgctcggtatcgtatactttatcatccctgccatcatcgtgggaattgttgctctgatcacaaatgttccgggcaacttagtgcaaatcattcaggaatactcgacaagtataaatgcaactgccgctgtgaactccactgcttccgcaatgccagcggtatcaagcgcgagctgggccgcgctgggcacctccctcgctattaccgccattatcgcttttgtgctgttcataatcttcgccttcatccagaccatgggccaggcacgcctggccaatacggggtctctaggcaacggactaaatatcgtggaagcagccaaagacattagccggatcggcgtcgggaaggtcattgctgtcattctgctggtgtttatagtgatcatggttatccagggcattcttggatatatttacggtcagatcccccaactctcaattatttccatcataataacgccctacttcgtattctttacacaaagggcttacgggcttttgtactctgatattgcctga

SEQ ID NO: 8868 - DNA, 546 bp, synthetic construct
  source 1..546: mol_type = other DNA
atgtcagacctaaagggcaccaagactgaggagaacctgaaggccgccttcgccggcgagagccaggcacatacaaagtatcagtacttcgccgccaaggctaaggaagagggctatgtccaaatccacgacatcttcatggaaaccagtaagaatgaaagggaacacgctaaaatctggtttaaactgctgaatgatgaagctattcctgatacaatcgcgaacctcaacgctgccgcggacggtgaaaacgaggagtggacctccatgtacaaggagtttgccgagaccgctaaggaggaggggttcccaatgattgcattcctctttgaaaaagtgggggccatcgagaaagagcatgaggcacggtaccgcacattgctggacaatgtggaaaaagagacggtattcaacaaggccgaagatattgagtggaagtgcgaaaactgcggatttatatttagcgggcccaatgcccccgagaagtgtccagtgtgcggacttccgaaagcacacttcgaagagagagcgactaacttcaaatga

SEQ ID NO: 8869 - DNA, 546 bp, synthetic construct
  source 1..546: mol_type = other DNA
atggccgatctgaaaggcactaagaccgaagagaacctgaaggctgcactcgccggcgagagccaggctcgcgtaaagtatgagttttacgcatcccaggcgaaaaaggacggctatgtggaaatcaaggagattttccaggagtcatccgacaatgaaaaggagcacgcaaagatatggttcaagctgctaaatgggggaaaggtccccgataccaaaatcaaccttgcagacgccgcggctggtgagcacgaagaatggacaagcatgtacaaaggattcgccgcaacggcaagagaggaggggctggatgacattgccgacttgtttgacgctgccgccgctacagaaaaagcccacgaagaccggtacaatgctctgagcgacaagattaaagccgggaaggtgtttaaaaaggatgaggaaatcgcctggaaatgcaacaactgcggctacatccattatggaaaggaggccccggaggtgtgtcctctctgcgatcacccacaagcgcatttcaggaaacaggataccagttacatctga

SEQ ID NO: 8870 - DNA, 1410 bp, synthetic construct
  source 1..1410: mol_type = other DNA
atgatcgaaaataacatatgcctgttaacagatagctataaggtgacacaccattacttctaccccaaaggaacagagaagatctacagctacctggagagccggctgggttcggagtttaacaagactattttttatggcctccagtatatcatcaaaaagtatctggagggttccgtcgtcaaccagcagaaaattgaggaagctgacaaacttatttccaatcacattggggaagacatattcaacaaggatggctggtattacatccttgacaactacgatggttaccttccaattgaaataaaggcagtacccgagggaaccccagttaatgttagtaacgtcctcatgagcgtagaaaataccgataaaaaatcattctggcttgtgaattacctcgagtcgttgttactgcaagtctggtatccctcgactgtggcaaccctgagcgccgaggtgcgcaagctgagcaagttctacctggaggtgaccgggtcctcaaaagacaacttagacttcatgctgcatgacttcggctaccgcggcgctagttcaaccgagtccagcatgctggccgggagcgcccatctgctcagtttctccggcaccgacacgatccctgccctattgattcctaagaactactacaacgattccaacttgtacggatttagcgtgcaggcaacggaacacagtgtgatgacgagcctgggtcctaagggggaatttgaccagattctaaatgtgatcgataatgccaagaatggaatcctctctatggttatagatagctatgactacaagaactttttgaccgaggcgggaaaaagcgatagccaactcaacaaagctatcaacgattttttggccgtagaaggcaataaggtggtgtttagaccggacagtggggagcccgtgagcacaaccatcgactgtctgaacatcctgggaaaagggttcggctcttatctaactgacaaaggctataaggtgtttgactcaaatatcgggctgctgtggggtgatggcctcgactatcacaagattagggatatccttttcgcgatgaagtctaacggctgggcggctgagaacattatcttcggaatggggggcggcctccacacctatgtcaacagagatactcagcggaatgccttcaaatgctcagcccagctgcgtgacggcaagtggttcgacatttacaagaatccactggattccagtaagaagtctaaaacaggtaggttcaagctgatcaacgaaaacaattcctttaagacaatctcaattgatggatacggggacgactgcctccgaactgtctttaaaaatggaaagctgctcatcgaggacaccttcgcagacataaagtccaaaacgcttaactactccaacttcctgtga

SEQ ID NO: 8871 - DNA, 3657 bp, synthetic construct
  source 1..3657: mol_type = other DNA
cttcacaagattcgaaaagccattatcatctgcctgatattactgatcgtattcattccaactgcctacgctgcggacaatcaaacaaatttggggcttaacagcaacgatgtcatgctttcggattcatactattttgacgcgaacgttgacgatgacttggggaatggctcactggattttccttacaagcagctgaagagcaacagagtgatcgacaatagcaccatctacctcaacgatggaatatattacggctttaataaagagtttagtaatctgacggtcatcggtaaaaacagcgagaaaactatcataaagaacatccaattcgacattaagggttctctcatcattcagaatgtcaccctgatcaactctaaaattaccaataatgccaacatcaccctggtgaacagcatcttcaaggattctagctcattcatcggaggagttctcaagagcaacccaaatacttttgtaacgattacgaactgcacatttctcaacaatcatgcaaacaggtatgccggagtgatctacagcaacaattctaacttgaacatctgtaactcaagtttcgtgggcaattacgctaactactatgggggcgccatttactgcgagaagaacagcaagctgacaattataaacactgacttcacaaataaccacgcaaaaaacgacgctggaggagcaatctacggtatggattccgatattcttgccaactacctgagcatcagcaattccagctccacgttcggtggtgccataactgccctcaacacaaatctgaacctgactaacttcaacgcgtggaacaacaaagccaagtatcggggcggggtgatctattccgtgtacggatattatattgtgatgaactccacattcgagaacaacacagcatcggatggcggggcgttgttcatcgactccccccattcagtgaatgtgagctcgaacaagttcattaagaacaacgctctcaatattgggggagctgtttatataatctccaataaaaattacttcattcccgacaatctattcctgaataacagcgccagttttaacaatgacttctacaaaaccatgttgtccaatctgaccatcggcaacaacaactacgtgctcatcaactacaatggaagccacatagggaaccttcccagcagctacgacttgagggaactgaatcagacaacctcggtcaagaaccagggaagcgggggcaactgttgggcctttgccgcaatcgccagtctggagtcctgcattctgaaggcgaccggaaacgcatataacctgtctgaagaaaacatgaagaatctcatgacattatactccaattacggctggaaagtgtctcccaacgacgggggctacaccagcatgggcatcggatatcttacttcctggctcggcgccataaacgaaagtgacgatagttattacgagagtagcgcattatccccagtcctggacagttttattcacgtgcagaacattctatttcttaagcgcaacagttacacggacaatgacgaaatcaagagagctatcatcgaacacggtgctgtgtcaacaagtgtattctggaaggtcgagaagtatgctaatggggagaattactacaattacgagtatgcttcgggctctaatcacgcagtagttattgtcggctgggatgataattattccaagaacaactttattaagaaggctccaggcgatggagcctggatcattaaaaacagttggggtacggggagcggggacggcggatactattatgtgtcttattatgacgctcggctggcacctataaatacaagcagcgttacctacacattcgtgctggcagactcgattaaatatgataagaactatcagtatgatatccccggcatgacggactatctactgaatagttcggatcgtgtctggtacaaaaataagttcacagcgacggacgatgaatatttaaccgcggtgtccacatacttccagaaagaaacttcctgggacttgtcaatctatgtaaacaataagctgatgctgactcagtcaggcaattctagcgccagctactcaaccattgaattgaaccgattcatcattcttaagaaaggggacatctttgaaattgaatttaaaatcactgtggacggggatgcaggggtcccgatctccgagatagcttctcttaacaacctgttttacggtgaaaatatttcatacgtgagttatgatgggaagaagtggattgacttgtttgacgtccggtggacctaccctggccacacatataatgattcgcaggtcgcttgcatcaaggcattcacggtactgaataagatcaactccaccattgtcctaaccattacagatgagaacaaccctgtggaaataactgccaaagttttaaaccagtatggcaaccccatcaaaacgggtaaagtcaccttcaacatcgagggaaaagattacatcgctaagattaataacggctttgcaaaactcatccatattttcaacggcaatgagaacaagctaatcatcgcctccttcagcggggccggctttatcgagagcttctccgacatcactttttgtccagagcaggttagtattaaggccagtgacatggtgagctattacaacaagaactcttactccatcactctcctcgacatatacagcaagccggtggcagataaggaggtgaaattcaagatcaacaatctggaatacgtggccataacgaatgagaacgggattgccgccatcacctttaacctgtatcctaacgtgtatgacgtgatcatcgggttcaattctatcaatttcgataattacaacgtgaccaagaaaatcactatcaaatctacaatttccatcccagagaataccgtgtatacctataattcaaaatatcccatcaaactcctcaacaataatggaaatcccctgtccaattgtaagttcaaactggtgattaacggcataacaaactacgcccataccgacagcaacggggcctttaaatacaacattaacctgaagccgggaaagcacacgataacagttatcaacaccaaaacaggggagaaatctacccagaagattaaagtggtctcacgcatcactcaaaataaagacttttcaatgtattacggtgccggtaggaactacaaagtcaaggttgctgacgattacggcaaggttaagaagaacctcaagatctcctttcgcgtgaacggcaagacatactacagatacactaacgagaaaggttacgcttacctcaagatctccctgaagcctggcaagtacactataaccgccaattataaaggatacaaagtatccaataaaattcgggtgaaacccacaatcataactaaaagcattgccgtcaagaagggaaagaccggcaagttcaccgccaagctgctcaataacaaaggcaagatcctgaagtacaagaccatcaatttcaagttccgcggcaagacctacaaagtgaagaccaacaagtacggaatcgcgaccctgaagatcgctaaaaagtataaaatcaccaggtactcaataatcaccagttaccggagcgagaagataaagaataccattaagattaaaagatga

SEQ ID NO: 8872 - DNA, 699 bp, synthetic construct
  source 1..699: mol_type = other DNA
atgctcaccattaatcagtgctatttagattttgtggataagatcctgaagcaaggaaaggaaacttacaaagacagcaatcaccatctgatagagtcgctggggaacttctatatcatcgatgatccactcgatttgaagttcagggctaaatatcagcactacaccacaaagatgatgcttgacgacatcaagtctggaaagtttgacatagaggggtgtcccattaaaagcgatgcactctacgagtatgtcaagtccgcggagaatccggacgatcagggatttgtgtacacgtacccaaacaggatctttgcacattttgacgtggatcagttcaacactatgaagaaacgaatcttgactgccaccggtagtaaccgggccgtagccgtgacaatcgaccctgaactggacgctgacagagaggatattccctgcctccagttcctgcaatgtattgtccgggacaacgagctaaccattcactgcatattccgcagcaacgacatcttcggtgctttctactccaatatgtttttcattgcgtatcttggcctgaaaatgaaggaagaagtgaacaaagaaatcgtcggggagaagctgaacttcggcggcgttcactaccactcaaccagcggccatatctacaatacggacctgaaggccgcccgcaaactgatcaagacaaacaaatga

SEQ ID NO: 8873 - DNA, 573 bp, synthetic construct
  source 1..573: mol_type = other DNA
atggagctggaagaatatctggagtacgtaaacagcggaaagcggatctatgccggctccacacaacatctgttcatgcacgaatccctgaataacgccttgaagatcacccacaagatcaacagcgagtaccacactcctgaagaaattcagaagttatttgctgagctcaccaataaacccatcaacaagacccttgggctaattcctcccttcaatacagacttcggtaaaaacatccatattggggagaacgtgtttataaattcgggctgcaaaatgcaggaccagggtgggatcttcatcgatgacgaggtgctcatagggcacaacgtctgtctgctcacactgaaccatgcaaaagagcccgagaacagggctgacatgtacccaagccccatccacatcgaagacaaagtttggattggatcaaacgtgaccatccttccaggcgtgacgatcggcaagggcgccattgtggcggcaggcgccgttgtcactaagaatgtggagccagagacgattgtgggaggagtaccggtcaagtttataaagaatgtcagtgatgattga

SEQ ID NO: 8874 - DNA, 573 bp, synthetic construct
  source 1..573: mol_type = other DNA
atgacaaacgagaattttgcgaagaagattaaggacatacgcgctagacagaacatgaccattgaggatcttgcggagcgaagtggggtgaagcttgaagtgttgaaggccatggagtccggagaggttattccatccctcacccccctgaccaagatggccagggccctaggggtgcggttaggcacattcctggacgatactccggaactgggccccgtcgttacaaggaacggaaaaaccgaaaattccctgtacttctcagggcgcgaggatgtgacgaacgcaactaacctcgagtttcacagcttgggagctgggaagatcgatcggaacatagaccctttcatcattgacatcgagtttgaggagggtgaaaaagagctgagcagtcatgaaggcgaggaatttatctatgtgctggagggtgaaatcgaagtcatctacggaaaggacagcttcactattggcaaaggcgacaccatcttctacgactcggtagtgccacaccatctccacgccagcggcgaaaataaagcaaaaatcctcgccgtcctgtacacgccctattga

SEQ ID NO: 8875 - DNA, 156 bp, synthetic construct
  source 1..156: mol_type = other DNA
atgtttgagatagagcttaagcagcagaagattagcaacggcctgatccggtttttcaccagcatcctagacctccactccctcttgctgtgcctgcaagaatacttcacaagtatgaataacgtggaaatcaaaaaaatggaggtcttccagtga

SEQ ID NO: 8876 - DNA, 1665 bp, synthetic construct
  source 1..1665: mol_type = other DNA
atgagcgagctgttcaccgagctgcccctcgggaagttcttcgagtcaatggtggagaagcagcccgatcatgagtttatcatctatccggataggaacctgagattcacatataaggaatttgatgaacgagtggacaatctcgccaaaggaatgctagctattggcattgaaaaaggagatcacgtgggcatctgggctaagaatgtccctgaatggttaacctacatgtttgcaacggcaaagatcggagccaccattgttaccgtgaatactgcttatcagtcccatgaattggaatacgtgcttggccaatctgacatgcgcgccctggctatgactgatgcctttagggacattaactactttgatattataagtgagcttgtacctgaacttaagacgtgtgcccgcggccacttggttagtgagaaatttccccacctgaaattcgtgttccatgtcgggcaggaaaagcatcggggcatgtacaacaccaacgagctcctgctgctgggcatgagctacgacggagaaaagtaccaggaaatcaaggactcagtctcccagaacgatgtcatcaatatgcagtatacatcgggcacggaaggtttcccgaagggtgtcatgctgaccagccgcaacatcgtaaacgatggttattacatcggggagaatatgaattacacaagcaatgacaagctactgctccaggtgccactcttccactgcttcggaaccgtacttggggttatggcggttattacgcacggctccactatggtggtcctggaagagtacgaccccctgttggccatctcctccatccagaaggagaagtgcacagctatttacggggtccctacaatgtttatcggcatgatgaaccacccaatgttcgacatgttcgacatgagctcgctgcgtaccggtatcatggcaggaagcacttgtcccgtggagacaatgaaagatgcgatagaaaaaatgaacatgaaggagatcactagtgtatatggactgactgaagcggcccccggcttcacacagaccaacgctgccgacagctttgagaaaaagatcaacactgtgggacggaagttcccaaatatcgaagtcaagatagtggaccctgagacgggggaggaagtgggcgttggagagacaggcgagatcatgtgcagagggttcaacgtgatgaagggctattataacatgcccgagaagacagccgagaccatagagcccgacggatggctccactccggcgacctggcaaccgttgacgaggacggctattattcaattgtcggtcggatcaaagacatgatcattagggggggggaaaacatttacccgcgggaaatcgaggagtacctattcaccaatgaatgtgtgcaagatgtgcaagtggccgggatacctgacgagaagtacggcgaaatcgtcggggcctttatcattaaggaggacgggtttgatgatgtgactgaggcagacattcgggacttctgcattggcagcatcgcaagatacaaagtgccaaaatacgtgttctttgtggatgagtttccactcaccaccagtggtaaaatacagaaatacaaattgggagatctcggtctgcgattactcgacgagaggcgccagagaggagagctgtga

SEQ ID NO: 8877 - DNA, 3609 bp, synthetic construct
  source 1..3609: mol_type = other DNA
atgaggaagaataactatctggtcttcctactcatattctcactgtttctgacgatttcttccgtaagcgcccttaacgtggacgacaacgcgacaatagaagacacaaatttgaacagtatggatgtgaacttcgatatctccaatggcgagtttaatagtatcaatattgataaaacgttcgatacaaatatcgacgctgatgccggaaaagacacaaatatcgaggaaaagaccatctccatcactaattctaacaactccatcctgtccaccaaagagaacaatgtgaagaacaattttaagctgaactccggttccctgagagccggcaacataatctacatcagttctgacggcactggggatggcttgacgagtaataatccaacaaactgggcgaacggatacatcaatgcccagtcaggcgacacaattagcttcctggacggaacctataatctggtaaacgtcaacttaaacaaggaccttgtgctcaaagcgttcaacgaaggaaacgcaatcatcaacgccaatcgggccggaaacgtcttttcaattaacaacaaccgcaatataaccataaacggccttacatttatcaacgggaagtcgacgggaaatgggggcgccatctcctttaacagtggcgccctaactgtcattaattgtcgcttcatcaataacacggccagcagctatggtggagccatctacctgcgcgatggcaagcttaccatcgtcaatacaacgttcgtaaacaatagcgctgacgttggcggagctgccatcgcagacaccatcagtatcactcactctgatttcattaataacactgcagacggttctgggggcgcgatccgggcctatgacaacctgacaattgttgactcgatctttaccaacaacacgtctatcaacgggcagggtggcgccctgtacacgccaaacgttgacataaataactcaatctttgttaataatacttcactgaatggtggaggggccatatactccagcaacgagtatctgattaacaacagcgtattcgtgaataactcggctattgatggggacggtggcgcagtgtccagctaccgtaccggcaatatcaacaacagcaacttcaccaacaactctgcgaagaagagcggcggagccgcctacgccagagagagcattgagattgataattcgagcttcaacaaaaactatgccggggctggcggagccgtccgggcgcaaagcgaggttaatattactaactcaaacttcaccaacaacgtggccaacaacgagggcggagccatatattctaatggaaagatcgtggttaacaatctgacattcatcaacaactccgccattgaatccgatggtggagccatattcagcgtcgaggatgtggaagtcgataattccaatttcataaacaattatgcaggtgaactgggtggggcaatcagcgcttacaatgaactgaccgtgaacaattcgaatttcaccaacaacaacgccaagtattacgggggcggagtgtacgctaatgtgttgaatagtaaccgagataattttgttaacaacacggcagagtacaacggcggcggagcttacgtcttctctaatgctaacattaatgggtcaaattttgattcaaacaccgctgtgaatgggggaggcctgttcagcactggcaacagcagtgtgaataactctaacttcattaataacaatgcctatgacggaagcgccattatctccggaaacctgcatttaaacaacaacaacctggagaacaacacatcgcgaggctacggaatcgtctacgcggagaatgcaacgattgagaacaacaaatttatagataacgatgcactcgaagacaaagagatctacgtcctaaatgagttgagtcagagcaacaacacgctgagccctaaccagatagaaaacatcaatgctaacacagtcaaagtgaacactattaatggtacgacctatttggtggacctcgaggacgggctgaaaggctattgcctgcagaggacactcaacttccccgattacgtatatttactcaataatctgagtttagcacataaccaactgactggggaggacgtgagcgaatacttaaagattctgatctacaagtactacttcagcgacaagaaggacaatatcacctacagtctgtgggactttacagacagcgatttccgaaattccaataacaatctgactaagaaagtgattgcactgtataattcgggcttccgggtccccgacagcaatgctagcctcatcttggacaatgggactcaggtactctttgacttttatagtgctggaagttccacaacccagaaccttttcctctttaatattacatacatgggaaacaattatgacatgaaggtggaaaagattacacttaacaagtctgtcatcaacggaaacaaaacaaagttcatcattcgggtcacaaacattggcgatacaattctccacggcgttactgtctttgaaaaagagtacgatggtctggtttacgattcatacattgacgagggaaataattggaactataacaatgggaaatggatttacaagaaacaactcaacatcaatgaatctgcagagtttaccgtggtatttaaaacaatcaaatccggcaatttcacaaacatcatcatcagctcatccaacgaaactacaaacaagaccacgaacaacaccactaccgtgtacaccccgaatctaaccgtcgagaagctgagcttgaacagaaccgtgtatgtgggtaatcagactgtctttactattgttgtccgcaataccggtgactgcgacctcggcgaggtgtttgtcgtggaaaaggctccagagggtctggcttacagttcattcaaaggcaccgactggtcatacaacaacggcaaatttacctatgggaagactcttaaggtgggcgagtctgtgtcctttgagatcgtgttcgacgctgttagttctgggaattggacgaatgtggtggtggcggggtccaacctgacagggaataagactggtaataacaccaccaaggtgtacaaccctgggttgaaggtggagaaaatcaccttggaccccgtggtgtctgtgggggagatcacaagctttgagatcatagtgaccaacaccggggattgcaagcttggcgatgtttttgtccatgaagactcctatgaagggctgaggttccactccttcaggggtgatatgtggaagcagaagggggatactttctattaccagggcgtgcttaatcccggcgagtcagcctcattcgtcatcctctttactaccctcaagcctggaaacttcacaaacattgtaactgccgggtccaatgttaccaacaacaccaccaccgaaaacaagaccaaagtaatagaaaatcacacgaacaataatactaacggcatcaataaaacagtgaataatgaaaccaaggaggtgaacgtgcacaaggttgacacctccagagccaccggcaacccgctgctagcactcctcatggtgctgctcatgattagtgtgacctctgtgcgcaagttcaaaaaatga

SEQ ID NO: 8878 - DNA, 966 bp, synthetic construct
  source 1..966: mol_type = other DNA
atgacattccttgataacatcagcgacaaaattaactacgaaacgctgaacaacattataaaatttgagtttgacggtgtctcaaccaactggatggacgaaaacgatcccttcattgaacgaatccagaaatcgtccttgaacaaggtgttcttaaaagagcacatcctaaaggagatcgagatcaagaacattctcgatgagggcatcgactttttaaacagccaaaaatacgttaatgcaatcgaaagctttgacgaggtgctgttttacgatgaggggtatgccgaagctctcatcaataaatcatacgcccttttcggacagaaacactttgtcaagtctctgcggtattacaagcgggccatcaaggtgaataatgacctgaaagatgtggagtaccataaactgctgctcagctgctccaataaggaaagaagtaatttctcaaagcttaagctgaatatttactctggggacgaactcttcgccaaaggagagtacaagaaggcactcgaacgctatgatggtgctctggctaatccatcgctgttcaaagacaagatcctcttcaagttgctcaacaaaaaggcgaccacactgctcaagctcaacgactttgagaatgcactggcctgttttaaggagtctctgaacgctaagatttccgactacgcatattacggctgcggcgtatgccagtacgaactgaagcttgatggggcgagcgagagcctaagccacgccaacaatgtgaagaagaatcagctgctggaaaagggactgatcttcaacgagattggcttgtatgagaacgccctgagtactttcaacgagatattcaacaaccacttcaaggtcgacgagctgtatatcaagtcccttaatggcaaaatgcatgccatgaggagtttgaaaatggatatggacgaaatcgaggatatatattccatattgctaaactga

SEQ ID NO: 8879 - DNA, 375 bp, synthetic construct
  source 1..375: mol_type = other DNA
atgaagttttcaggcttcatgaacgtctaccagctggatgacatgagctgggaataccagttcggaggcaaatccctgaaggcccaaacattgaaagaactcgaggtgctggtgggtctatacgggctgaagtggggggtcctggacaaaaatctggtggagaagtctcttgagatcgataaaaacaacgtcaccgggttcctgaatgtttataaaaaggagggcttctggcactatcgcggaacggacttgaagtcccatagtctcgaggtgttaaagaagaaggtgctgagcgaaaacctcgattgggtagaaaccgacagggagcttgcatacaagaattggaaactggacctccggaagtttaaaaagtga

SEQ ID NO: 8880 - DNA, 843 bp, synthetic construct
  source 1..843: mol_type = other DNA
atgtccgtgttcgtgcccggtcacgtaaccggctttttcaatattgagaatcacgagtccaagctaaagaacggatcttgtggcgtgggattcctcctaacaaagggggtgatgacaacggttattgagtcagacaacttcgagtttgaggtgaatcttggcgacgacactatcgtctgcgaggtcctgaggattttgaacctggataacagcaactttaagatcatacaggatatccagctgcccatcggggcaggattcggaacctctgctgccagcgctcttagtctgaccctggccctgaacgatttcctgaatctgggttactcaaaagaactctgcgggcaaattgcacacatggctgaagtgaacttgggtgcggggctgggcgacgtaatagcgcagacaggcagcgggctcgtgctccggacaaaatccggcgcaccggggatcggcgagatcaaaagcttcaaccaggacgtgtacatagcctacaaaactttcggaccaattgaaacctcagagatcatcacggatgccaactataagaagatcatcagcgaagtcggtctgaagtatctggaactgtttgaagagaagcctagtctcgataactttctgatcttttcgaagaagttttcctgcgagactggactcatgtccccagaagtgaagaaacagatcgagtacttcgaatctatcgacgacgtcctgggcagtagcatggccatgcttggcaataccgtcttcgccctctcgtacaatgaggacaccttcaaaaagttaaacattgaagagttgcatatagataaattaaataataacgggattgtttatgactga

SEQ ID NO: 8881 - DNA, 534 bp, synthetic construct
  source 1..534: mol_type = other DNA
atgatcaaacttagctacgacataaagaactacagaaagcagatcctggacctgactcagaacggagatactattatagaactcgggtgtcatgtgggcaacacgacaaaaatcctactggacaatttccgagactccaagatcatggcactggataacagccctgaagccaccataaaaatgaatgaaatcttgtgcgataacttggagtttattaatgctgacgtccggctccacgaaaccctgctggaggtattcaagcgcatccagaagtgcgatattctgtccatcgatctgggtggaggctatcatcccgacacagtgttcaaggtgttctacatttggtcctcaacctttaaaccaaagcacacactgattcggaacaggggcattttagagttttttaactcggccgggagcagtgacgaggactacgagagttgcgagggcttcctcgactcatatcacgatagcggaatccccccacaaatcaaagagttcgaactctggaccccgaatcttgggaagtattga

SEQ ID NO: 8882 - DNA, 792 bp, synthetic construct
  source 1..792: mol_type = other DNA
atgataggtaagaagatccgcctggagaggatcatcaaccgaaataccggccgtactgtgattgcaccaatggatcacggagtgtcaagcggcccaatccctgggataataaacatggatgagaccgtggaggagatcgctcagggaggagctgatgccatcctgatgcacaagggcatcgtgcaacagggccaccggggttatggtaaggatatcggactaatcgtccatttatccgcttcgactagtcttgcaccggacccaaacgacaaagtcactgtcacaagtgtcgagaaggccattcagctgggagccgacgcggtctcaattcatgtcaatctaggaagcgagacagaaagcctgatgctgcaggagctgggccaggtggcagagacgtgcgactactgggggatgcctctccttgccatgatgtaccccagggggcagaaagtggaaaatgaacacgacgtggaatttgtaaaacacgcggcccgcgtagggtccgaactgggcgtggacattgtcaagaccaactacaccggcgaccctgatacattcaaggaggtggttgaaggtgctatcgtgcccgtggttattgccggcggccccaaagtcgaaacggacgaagagttgctccagatggtgagagacagcctcgacgttggcggggcaggggtggccttcggacggaacctgttccaagccgagaaccccgggaagattaccagagccatctccgaggtagttcaccatgatttggatgtggaagaggctctggagtttctcaaatga

SEQ ID NO: 8883 - DNA, 1131 bp, synthetic construct
  source 1..1131: mol_type = other DNA
atgcaaaacaagttcgcgtggataagtactcctgacgagctttgggatgataagaaggagatgatcaccaccgcactggagagcggtatcgactacgtgctggactttgacgacatcgaagagattaggaaacttggcaatgtgaagatcattgcaaatactgatgatgccgatatctacctcgtcgggattaacggggagggagacggctttgtggagttgaatgacgacttcaccgacagcattgacattgctaacgcaaagaaagccaagagcgaaggaaagactgtatgcgcctatataaagataacggacaaagcccatgagcaacttgccgtcagactgggtagcatcgtggattacattattctgattggcaccgactggacaatcatcccactagagaacattatcgccgacctgcagaagctggacgtcaagatcattgccgcggtgcgggacgtggatggggcccgtgtcgccctggagaccctggagcacggaacggatggcataatattcgaggcaaatgacttcaacaacatcaaaaaaatcgcccagaacgttatcgaagcctcacaggtaaagtacgaactcaagctagctacggtcaccaaagtcaaacccctggggtcaggcgatagggtttgtgttgatacaacggacatgatgaagcccggagaggggatgttaatcgggtcctactccaaatccatgtttctcgtgcacagtgaaagcctcgagagtgaatacgtcgctagccgaccattccgagtaaatgcgggccccgtgcaggcatatgtgatggtgcccggaaacaagacacgctacttgtctgagctggtggccggcgatgaaatcctcatcgtcaataccgaaggtgaaacacgcaccgcttatgttggccggtcgaagatcgagagaaggcctttactcctgctggaggcgaagtatgaaggtaaaactatcagaacactcctgcagaacgctgaaaccattcgcatagtggatgagaacaacaatccattgtccgtggctgacgttaaaccgggagataaagtgaaggtgtatattgagactaatgcacggcactttggcatcgctatcgacgagacaatcattgaacagtga

SEQ ID NO: 8884 - DNA, 558 bp, synthetic construct
  source 1..558: mol_type = other DNA
atgagtcagctccgggcatttttagctatcgaccttgacgacgggctgaagccgaagattaacaagattattaagcagttcaaacagattgacgccaaaataaggtatgtggagctgaataatatgcatctcaccctcaagttcttcggagagattgacaccgatggcttggagctgttggaaaataaaatcgccgatgtggtatctgaatttaaacccttcaatataaagattaagggctgcggcgcgttcccaaactacagccacataaaggtgatctggatcggaatcgatgaggattccatcatcaaggaactgcacgacaaccttgatggggagtttgtgaagctgggtttcggcaaagataaaaacttttcaacacacctgactatcggaagaatgaaaagtgccaagaacaaagttcaagtccgctccacgatcggggaatttagcgacattgagatcggcgagatgacagtgaacagcatcaccctgaaaaagtcgaccctaactccctccggtcctatctacgaagacctgaaggtcttcgagctctga

SEQ ID NO: 8885 - DNA, 1356 bp, synthetic construct
  source 1..1356: mol_type = other DNA
atggactacagtttaatcctgaatgacatcaagcctacaacagacgagaccaaagagatcaatgaagtaagctcaagaataatcaacttcctgcaagtgctgtgcgatgagaataacataaatgcgaaagttaacctcgtggggagcgtcgctaaaaacacggctcttaagggcaaatccgacattgatattttcatagcctttcccctggacactgataagctgtatctgaaggaaaccgggcttgacttggcccacaaatgttgcagggagtttaaaagcgtgccagaacaccattttgcctcacacccgtacgtcaccgctgacatcgaagggtacgaggtggatatcgtcccctgctacgcaatcgaggacggaagccagctaaagtctgccgtggatcgcacaatactgcacacgcggttcgtgaaaagcaatttggtggagggacaggaagacgaggtgctgctactcaagagattcatggcaatgaccggcacatacgggagcgagtttaaggttggtggattcgcagggtatctgtgcgagctgttgattatccattacggaactttcgaaaacacactcaagtcagcgatcaactggcagtatggccatgtcattgatctggagaattatggcacttccaggttattcaatgatcccctgattgtgattgatccaaccgacatgaaccgcaacgtaggcgctgcactgcggattaataagctctctgaatttatccagtcggcccgtaactacatcttctcggacaacaagaagaactacttttaccctataaagcgaaatctgaacaagaatgaactgataaaggagtttaatactagaaatagtgatattattgctattaaattcaacgttccgaatatccccatcgatacccttcatccccagctcaagaagaccacggaggccctcgaacgaaagcttaatgacgaggaatttaacgtgtttaaggccgactattggagtgatgaactgttttcctgtgtcattctccttgagatggcctccagcaacctaaacgacatcaaagtcaacgtaggccctaaaatcttcttcaataaagcgtgcgagaacttcgtgaaaaaatacggtcgggaaaactgttatatccaggaggatttcttggttcacacacaaaagagggacttcaacaacgccctgaagttgatcgagcacattttcacctccgaacacatcggtctgatcaaggtgggaaagaacctgaaaaagagcatcattaacacctatgagtttatcgatctcgacgaaatctccagtgaggagttcctcgacgactttatccatccaggccagcacataattcgctga

SEQ ID NO: 8886 - DNA, 552 bp, synthetic construct
  source 1..552: mol_type = other DNA
atgagtgagattaagaagctgaccgccgacgtggatgtcggggagtattttgaaaagtatgtggactttgagaagttcagcaagctttgcatcgaggagcaggaggagctcgggtacaattggaactaccctccctttgattttgacgtcgaggaactctggaaaagctacaacaagcttaaaattatcgcttttaaaatcgatttctccaaagaagaattggaccacaccttcgaggagaaggaactggagttcgtgttaaaaagattcgagcggataaaaggccgcctgatgaatgatgtttatatgctggaaaatgaagactcaatgggactctatatgggcaagtgcaacctctgcatgcgatgtacacgggagtttggcatgccctgtaagatgccagtgaagatgaggtacgccttcgaaggcctgggtgcagacgtggataaaacgattgaggacctattcgggtacaagatcctgtacgcgcataacggtaagctgccggaatacctgatcttcgtaggaggattgctgtatgacaagaaatga

SEQ ID NO: 8887 - DNA, 687 bp, synthetic construct
  source 1..687: mol_type = other DNA
atgatcgtcagtgtgatagggggcaccggcccacagggcctgggcatcgcagaaagactagccattgccggactcgaggttattgtggggtcccggaaggaggaaaaggcccttgacatagtggctaaggctaaggaagagtttgcggactatgacttgaacatgaccggtatggcaaatgaggatgccgcaaaggccggcgatgtactgatcatcaccgtccccctcgcggctcagaaaccgacgctggaggggatcaaagagttttgtaatgataagattgttatggacgccactgtgccattagaaacagcgattggtggaaaacccttccgcttcgtggacttgatggaagggagcgccgctgagaggacagccagcatactgaagggaaccggcgcaaaagtgatatgcgctttctgcaatatttcaaactcgcatctggccaacatccccgaggaaatcgactgtgactgcctgattgccggggatgataaggagagcaaagagattgcagctgaaatcatcgacaaaatccctggagtcaaaacaatcgactgcggcattctggagaaagcacggatcatcgagaagatcacgccactgctcataggacttaacatcaagtacaagtcccactacggtgggctccgaattactggcatccctgccctggataaggaatga

SEQ ID NO: 8888 - DNA, 624 bp, synthetic construct
  source 1..624: mol_type = other DNA
atgaaagaaatcaagttcaacctcgacgagaatccctttatcaacttcctaagcgcaaggtacagcatgagtgctaagatcaacgtggagaaattatggaagtggtgccatgagaacaacaagtcctttttcatcatgagtctgggctgtctgatgaacgccgtaaattcagtgccggaactcaaaaggcgcataatcaatgggaaggccattgagcacgactacctggacggcgtgtcgccaattatggatgaagggaataaaatttaccgagagatgcgggtcaaaacaccacaggagtttaatgacattcttaagtggcacgattatataaaggactactcaaagaacattctgagcgggaaggaagagggattcaccatcgaaatggagaagagagatttggagaatatcgcgaacttcagctgcatcccttgggttgacttcgatatgattactaactgcgtcctgtccggtaaccaaatccagcccctgattacctggggaaaagtgaatgaaaagtatgaaatgagcatatccatcacggtcagccacatcttcgtgaatggccgggagctcggctatttttacgagaacgcccagaaggagttcgacaaattttga

SEQ ID NO: 8889 - DNA, 1332 bp, synthetic construct
  source 1..1332: mol_type = other DNA
atgaaagtgataatcgtcggtgggggagctgggggtatatccaccgcttcaaacatacgtaaactggacgagaatatcgagattacagtcatcacacgagataataaagtcgcctactccccatgtgccattccctacgtattgtccggcacaatcgaatcttttgacgacattgtcatgcgcaccccggaggactataagaacaagaacattgatgtgattattgaggcagaggtgaccgctgtggacagcaataaaaaaacagttacctaccaaaagaacgggaaggaaaccgtcatggattacgacaagttagtgctggccactggcgggaatccttttatcccccccatgcagggcgtggacttggacggtgtattccggattaggaacatagacgatggcatgaaggtgcaggaagcgcttaaggatgctaaatgcgccattgtcactggcgccggcctaattggcatcgagatcgccttcgcactgaagaaacgcgggctcaacgtgatcctgagcgagatgctgccccagatagtcccaaggtcgctggacaaagacatgtctgatatcctggtgaagtatcttgagatggagggaatccaagttgtgctcggaaagcccatcaccaagttaatcggtgatggaaaggttgagaaggcatgctttggagatgaggatatctacgacgcagacatggtgatcatggccacgggtgtgcgcgcggagttggatctcgcggagatggccggctgtgaaatcggacggtgggcaattctggtcaatgaccgaatggaaacgagcgtcgaggacgtgtacgccgtgggagattgcgtggagtcgaaggatctgattctggggtcaaacaccatctcacagctaggcaccactgcagttcgggagtccaaaacactggctcgcaccatctgcggcaagaagtctaagttcaatccggtgctcaacagcatggtttccaaagtgggggacctggaatttggggccgtgggctacactaccagtttcgcccaacagaatagaatcatgcctgttgtccagaaggtacaggccctgacaagagctcggtattatcctaacgccaagcccatggacatcaaagtgatctgtgatgggaacggaacgattattggctgccagatcatagcggaagaaagggtagccgaaagaattgacactatgacgctggctatcactgagggcctcacctgtttcgatcttagcaacatggagttcgcttatgcaccacctgttagcatggtgacagacccactcatactcgccgtggaagaagtcagtaagaaattcagttga

SEQ ID NO: 8890 - DNA, 981 bp, synthetic construct
  source 1..981: mol_type = other DNA
atggcggcccatggacatggccatcacgggcacggaggccagatgacacctgagcagcagaaacagatgatagagcaggatctgagactggcgaagaatctcggccagatcaaacacaagattgtggtcatgagcgggaagggcggagtgggaaagtccaccgtggccgccaacatcgctgaaaccctgcagaaactcgggtttaagacaggaatccttgacgcagacattcacggcccgaatatacctaaaatgctcggggtggacctgtatggcgaacaattcaacgaataccaattcaaggtctttaaggagattactgaatccggaatggcagataaggacttcaagaacgacgaggaaaagctagcgttcatcgaggccaaaaaggaggaatataagcactccatgtttccagtagtcgctcccagcggtctaaaagtcatgagtatggccttcttgctggatgggatcgacaggcctatcatctggcgcggcccccagaaaacaggcgctatcaagcaattaatctcagatgctcattggggtagcctggattatctgatcatcgacaacccgccaggaaccggcgacgagcccctgaccgttttgcagaccatccctgatgccgatgcagttattatggtcactacgcccaatgtggtgagccaggaggacgtgctgaaatgcgtaaaaatggtggaaatgatgaacatcaagcagattggtctcatagaaaacatggcttactacatctgcccacactgtgacgagaagctttacatatttggcgaaggtaacggggaggcattcgccgaggaaatggagatcacgtacctgggcgacctccccattgaggaaaaggtgagtgatgccccaaataatgagggggccatttcggtcattgaccccaacgacgaggtgtcaaaacggttcgtggagatcgttaaagatattcagaaggagtttataaaggagtga

SEQ ID NO: 8891 - DNA, 396 bp, synthetic construct
  source 1..396: mol_type = other DNA
atgaaactcaaagaaattaaacaccccgagttgaagaatcacatcaacatgatctacatgcatggtgagaaccagaacaaaaccgcaatcaataagaccgaggaggagatcaagggctatatcaggaataaggaatttataatcagcattgaaaacggcaagccagtgcggattccctatgccaacgacggggagtatctcgtaccaatctatacagacgaaaaggagtacatcatcgccatggattacttcagcctaaatgacatggctgaaaacaaggagtacataattgagaaactggattacttcaagaagctgaaaaaggaccctaatttcctgggatacattgtgaacattgcgcgcgtctcctacatcataaacccgacgcttctgtga

SEQ ID NO: 8892 - DNA, 870 bp, synthetic construct
  source 1..870: mol_type = other DNA
atgttcgccaatcaaaaagtcatttacttggctggggggtgcttttggggcgtcgaggcattcatttcccgtctcaaaggagtgaaccagactgaggtcggctatgccaacggtagagatttagcgcccacctatgagaaggtgtgcagcggaaagaccgggcacgcagagacggttaaagtgacatacaaccctaagatcatcacactggaagagatcctcgagaattattacaaaataattgatcctttcagtgagaaccgccagggtaacgacatcggaacccagtacagaaccggaatctactggcaggaaaacccgcaaaagaatatcatcctcaagttcataaaagacaaacaaaaactcgaatcaaatcgcatatctattgaactgtctccaatcaactgtttttacgctgccgaggagtatcatcagaagtaccttgagaagaaccctcagggctactgtcacgtggatctgaatcttatcaacaacgaggaatttaaccacctgacgaaggaggagtacgagataacacagctatccatgacagaagcgccatttagtggcaagtatactaacttttttgaggacggcgtatatgtggatgtcgtgagcggggaagtgctgttcagcagccaggacaagttcgactccggctgcggctggccctcattctcgaagccgattaataaggaagccgttatcaaaaatagggactattcccacggtaccactcggatcgaaatccggagcgctaagagcaactcccatctggggcacttgttctacgatgggcccggcggaagtccccgatactgcattaattcaagcgccctgaggttcatcccaaaagacgaaattgagtga

SEQ ID NO: 8893 - DNA, 195 bp, synthetic construct
  source 1..195: mol_type = other DNA
atgttctactccacaatcatgaagattgacagcatcgatcggctgagggacatccgggacgccctactcgtggagcaggggataaaccccaccaggcagggcgagcaggccataaaagtcgtggtagaacgcatcgacgaaattcaagctaccctggataagagcgcaacgaaaaatctgaaccgaaacagatga

SEQ ID NO: 8894 - DNA, 276 bp, synthetic construct
  source 1..276: mol_type = other DNA
gtgataagacgtgtcaccagtggccgccggctgctgcgaaaacggatgtacaagagcccacacgcacgccacaagaatgccacatatcatcgggagaacaagagcctagtgaagattcaccagaataagttcaaagacatgaacggacccaacatcaaacctaaacgcaggccgaaaagggaggtactcgacgggtttaagatgtcttacagatataagtactacaacagggatatcgtggaagaaacggaggaatccgatgagaagtcagactga

SEQ ID NO: 8895 - DNA, 309 bp, synthetic construct
  source 1..309: mol_type = other DNA
atgtgtagagataaaaaactgctggagaagatcgcctacgtccaaggttcagagcacaggaagaatatcatcctgtacatggaatacaatctatatacgcccaaggagttgggagacgcgatcggcgtgcgcaccaaccatatcagtaacctcctcagccagctgaaaaagcagaatattgtgtattgcgcaacaccaaacatacacaagggcaagctgtattccctcaccgacgaagggaaacacattttcgagtaccttaaaagcaaggaggaagacaagataaaccggatcaacaacagcatttga

SEQ ID NO: 8896 - DNA, 264 bp, synthetic construct
  source 1..264: mol_type = other DNA
ctcgacaattcagtcaagtacatcctgaaaagcagctatcgggtacgagtgctgcaggcaatcgggcacgacgtgaagaccccctcccagatcgccaaagatagctccgtgctcaacaaccacatcagcaggacactgcgccaactgtacgagcacgacctcatagagctaattaacccagaaatgcattgcggccggttgtacagacttacggaaaagggactggttgtgttaagtataattaacaatgagtcggtccagtga

SEQ ID NO: 8897 - DNA, 4830 bp, synthetic construct
  source 1..4830: mol_type = other DNA
atgaagttatttaacaacaactttatctctgtccttctgatactgttcgttttagtgctggctgtcaattcagtgagtgcgacggacaacaatattacggacataaacaatgtgaacagcaacctgtccaatgtcttgaagagctcttctagtctgaatgacggagatgccatttcatatgatctgatggacaataaggatgtgatctcccagaaattctcctcaaacagcaatacaaacgataagtcaaacatgtccgacgtggtggactctatcgaatcggttgcagaacctacttccctcgattcccccatactcaggtccgtggtgcccagcggcatcacattcgacggagtgttccacgtggggactggacaacagtactcaaacatccaggacgcattagaccagtgcaggcgaggcggatacaattaccagattatcatccacgaaggcacatatactggatacggcaacaaaaatctggtcatcgagccgaccacttggtggaacccaaattttggctacctcgatatccgcactgcaaacgatggtgatgtggtcatcttaaatgcagaacgctctccaagcatcctcactattaacagccgcaatgttcatattaccggattgacattcatgaatgcgtataactatgggtcaggcggaacatctggcgccggggtcgccataaatatcaggaagggaacagtatccatcgataattgtagcttcatcaacaacgaggccagaaacctttggggaggggcagtccatattgactcatccataacaaatcgcatctctaacatagacattacaaactcgcttttcgtgaacaatagcgcggaggtagggggagccttccggagcgagcggtactcctccaacattaacataattaataccacattcatcaacaacaccgccaccgaacacgggggagtagcatgcctattctccacagacgtgacattcgcaaactgtacattcatcaacaactcggctccttcaagcggagggatacacttccacgttggcggatcacacatcgataattgtacgtttatcaacaacagcgcctatggtacgggctcctctgaagagggttatggaggagctatagcgctggtctattccactagtgacggcgtcatcatctccaactcgagcttctccaacaacttcgccggcaagtatggcggcgccattgatgtaaatggcagcggcagcaatgctaaaatactgaactgcaattttgagaacaataccgccggttatggcggcgccatccgtgtccaggggtcgaacaccgtgattgataacaacagcctaatcaataacaaggcgattaacaccgacggcgggggaatccatgtggaggggagtaacacccagattagcaataccattttccgcaacaactctgccgccgccaacggaggggccctggctattgtggctggcgacaacacatttgtgtccaattcagtcatcgccaataacaccgccgtgaatggtgcgggggcctacatccaaggaagaagagtaacaatatccgactccatcgtcgctaacaatacggcagaccaaaacggggcaggagtttacattgacggaagctacgccacgatcaaagactctacaatttacaacaataacgccaccgtgaatgggggcggagcttacataaatgggagggatgccaccatctccaacgtgaactttgtgctcaacaatgccattcccgacgaagaagctttggacgatgggctggggggagctatttttatcgctggcagcaatagctacattgaggattccaatttcacctacaacactgcccggaacggttctgctatctatatcgatccgacatcctcgatagcaaataattacatttataactgtaatttcaccgagaatcaggcttggagctattggttacctattttctacaatgatgtcaccaaaactatcgagtcgaacctgaccggcggaaacaacatactgaacgcgatttacaataacggaagtaaccttcacatcttcatcgacggcgtaaatcctgttttgggatgggagaactcccagaatggcacaataatgtaccaggataaccgggagttcaaccaaacgatcgtcacactcgtgtgggaccgacatggtaacctcgtctttaacgaaactgcagtgacggatttagcagggaatgtttgctatgacatccctcaggatacacacctttggtttatagtgagcatgactcaccttgaggacacttattataaagaaatcacgaacattacgggtatcaacatcaatccggggctgacaattaccgacgtcaccatgtatgagggcaattcaaccccccagacaatctacatcgttctggccgatgacgacgccaaccccatcccaaatgaaggtccaatcatgatctacgtcatggttaacgggaacaagatcctgcttgggagcgggaacaccagcaagaacgcagtattgattcttaacgagagcgctgtcttcaagacactgaaccccggcaattacactattattgcagagtgtacatatgcatattacaatgaaaccacccagtccatctcgaataagactgtatcaaccgagggcattctagaagtcctgccatatatctggtcacttaataagactatctctcatgtgaacggcatcccatatatcgagggcatggtgatccagataaacgacaatgtcactttcaacataactgtattcaatgaggttaataccacgctgtacggactcaagctcatcgacctgaacacagaaggactgagttacgtctcgaccctaccttccaattggaattacgaaggcaacaacgtatggacacttgataacctagttaactacggaaacagctcactgtttgtgacctttaaggtactgaaaacggggaacctgacaaatatcgttaattgcagtttcctggacgggttcaaaaacaagagcgccaacatcacctttgcagttaatctgaccgctgacctcggtgtttccaaggtggtgaacgttagcaatcctaattacggagactttatcaagtatacggtagtcgtgtctaatgctggccccgacgatgctactggcgtggtggtgaatgagacgttgcctgtgggtctcgtgtacgtgagcgatgacgctagcgtgggtagctacgaccacgtggctgggttgtggacggtggggagtctggccaagggtgatagtgctacattgatcgtggtggtgagggtgggggggactggcaatatccagaacttcgtgaatgtcagcggtgctgagtacgacaacaacaccggaaataacaaggccaatgtgaccgttgcggtgaacgcgtccgccgatctgggggtcagcaaggtggtcaatgtgtctaatccaaactacggcgatttcatcaagtataccgtagttgtgagcaacgctggacccgacgatgcgaccggggtcgtggtgaacgagaccctgcccgtgggtttggtgtacgtgtccgacgacgccagtgtgggcagttatgatcacgttgccggtctgtggaccgttgggagtctcgccaagggcgacagtgctacattgattgttgtggtgcgagtgggcggcactggcaacattcagaattttgtgaacgtaagcggtgccgagtacgataacaacaccggtaacaataaggccaatgtgaccgtggccgtcaatcagctgaagacgtacatcatcgtcttcaacaacaccgtctatcccggtgatgatgtcacggtgattgttacggtgaccacccaaaacggcagcctgtttaacggcaatgtgaacgtcgcgctcaatgataccgcaaacactacgaaggtggtgactattgttgacggcaccggctcctttaaggtgacagtggacaaaaacctcgttaacggctacgtcattggtattaacgccagttatgacggcaacgatacctatattggatctaaaggctttggttggattaaggtcctgccagtcaagttccatgttgagaaaaccattgtcaaaggcaacgaatttttcatcggagatgagataatctttaacatcactgtgtacaacgactgcaatgggaccctgtacaacctggtggtgagtgacgtcctccctaatggcgtcgtgctgatcaatagtggtttcgggctctggacctacgacggcggcagcagctggagctacggcgacctctcagcaggcgcctccgccactctgatcattaagtctagtgcagttaaagctggcagcttcaccaatgacgccaaagcgacagtaaacgacgtgcttgacaactccagtctagttgatttcagtatcagcaaattgaatactagcatcagcgtctctaacgtgacagggcaccccggggacgtcgtggtcataactattaaggtgagtaccggagacaacgtgccgttcaacggtgatgtggatgtgattctgctcgacgggaagaagattattgtgcacgtcaccaacgggatcgccaagtttaaatggacaatccccaaaaatgccaagaacaacactatatttagtattttcgtatcatttgccggctcctcaaagtactttggatcgaataataccggatttatcaaagtaatcgacaataagcagaacaaaactaaccatacagataacaatgattttaccgacaaatgcaataaagggatcattaagaatactggcaatccactcctggtgctgctcatctcaattgtgattctggtcataagcctgaaacggagaaaagactactga

SEQ ID NO: 8898 - DNA, 270 bp, synthetic construct
  source 1..270: mol_type = other DNA
atgaactttatctgccccaccataggcgagggtcacgaaaaggattttcttgtgacaggaagtctggacgacttcaagataatcgtgttcagcaacatggaagagtacaaaaaggggtttgaatacctgaagctcgcagattatatcccatacgaggtctcaatcgagttgttcaaaaagctcgccaataacgacgatgagttctccggcatcattctagacatccatagcaagaataagattattctgaaagaggaactgctgaaatga

SEQ ID NO: 8899 - DNA, 444 bp, synthetic construct
  source 1..444: mol_type = other DNA
atgaatatcaaggattacgaggactaccagaaaaacaatgtgaaagcttcaaaaagccagctgaaggagtatattcagatatatgccgatatggccaagaagctcaagagcgaaaacgctctagagcttgaagtcatcaagaaaaacattaagaacacctttcccaacgagatttatttcaccttagtggacgagagtgggaagcctgtgaaattgacgctgactgaaaagagcaaaaaatacattatcccgatcttcacagatatccgggagtacgccatcggcagtgcaaagatatccaaactcttcctggacaagctggagatgaatgtcctctcgccagaggacatctctaagctggcagacgaagatgaatacttccaaggattcgtaatcaacccccactcccagaactttaatatggacaggaatgcgtccttttga

SEQ ID NO: 8900 - DNA, 549 bp, synthetic construct
  source 1..549: mol_type = other DNA
atgttcatctgcttcaaaaaaaaaacttattttaacgattactacacctacggcgatataatgtccgagctcaaggaactggtgaagaagttcattgagatagatgacgacttgaacgagaagatcgaggcggcactaagcgagtcagaagagctggatgacacatttgaggaagagcacaaggaacagatcgaacagctggggaacatctatcatgacattgaacacatcgttttcagcgaagaatttattattgtctcgaacgccaagagtgagcagaaggagatcgtcgccctgatcatatccgaggaggacgaagaggtcgaggagtttgtgattcccgtgttcaccgatgaagaggaggctaataaggctatcgagctcttcaaggaacaattcgaagagaacgagtttgtgtgcgacaaaaaaacgggtaatgagattgtgagcgagtacgccgaagacgaggaatttatcggacttgccatcaatgcaccacagtgggatttcgtaatcgggggcgaagacgtgcacgaatgctgtgagtga

SEQ ID NO: 8901 - DNA, 1743 bp, synthetic construct
  source 1..1743: mol_type = other DNA
atgaacattaacaataatatgaagctgggtctaattgcagctatatccattatagctctgtttgtgctgagcctgtggatctcccagacacctgctaatgacgataatagcatccgttttggcattctcacattattgccgcccctggtcgctatcgggttggcgttcattactaaggagacaatcttgtccctatttatgggcgtctttgtgggggaatttatgctgtgcgtcaatgatctgaacattgtgtccacagcaatcaacgcatttctgcagatgggctctcaaatcatctcctgcatggccgacccctggaacgcagggatcatcctccagtgccttcttatcggagggataatccaactcgtgacaaaaatgggtggagcaaaggctctggccgatacatttgcccgccgcgcggacactccaagaaaagctcaattgttcacctggtttctcggcctgtgtgtcttcttcgatgattacgcaaactctctaatcgtgggtcctattatgagacccgtgatggacaaactgaaagtatctagggagaagctggccttcatcgtcgatgcaacggccgcgcctgtggccggtattgccattatctcgacgtggattggtctggaaatcagtctgatcgctgccggattcgagtctgttggcgtcaccaatgtcaccggcttcgggatattcctccagactatcccctacaggttctacaacatcttcatcctccttttcatagtgatctcatcaataacgctctatgaatttgggcccatgaagaaggcggaacagaccgcacggaagcgaaaggagaatgaagaaatcatcgtgccaaacgcccctggctttgacgaggttaaaccagtggaaggaattaagctaagcatatggaacgcaatcataccgattggcactctgattataggggctctgattgccttctattggagtggatacaccacgatcctgggtggagaggaccaggctctcattgcgatcatgaaaagcagcccactttcctttaacggggtgttcactgccttaagccagagcgacgcttccgttgcgcttttccaggccgccctgctcgcctcgatcgtggctatagtgatggccgttggggagcggatactcaccattgaggacgccatcagcgagtggattggagggatgaagactatcgtgatcaccggcgtaatcttgctgctcgcctggtctctgggcggagtcattggcgacgtgggaacagccaactatttggtgggcgtgctcaagaataccctgccccagttcattgtgccggcactgatcttcattctgggcgctttaatcagctttgcgaccgggaccgcctacggcacgatgagtatcctcatgcctctggccatcccattggcttgggccgtaggtagtggcgacatgagctttaccattgtctgtaccagtggcgtcctgactggcgctatcttcggcgatcactgttcgcctatttcagatacaaccatcctttccagcatgggaaccagttgcaaccacatcgatcatgttcagacacagatttattatgcaatattcgttgccagcgtggccatcttcatcggctacatcccagccgggcttggaatcccctggttcattagcatccccattggtgttgtggtaatgtacgtgggactgaaaattctggggcagaaggtcgactttgacgaggtggaggagtcatcctcatga

SEQ ID NO: 8902 - DNA, 711 bp, synthetic construct
  source 1..711: mol_type = other DNA
atgaagctgagcaagagcaaagttaacacgtacctcaagtgtcctctggagtttaaattccaatacatagatgaggtggaggtgccgcagaacaaatacatggctcttggcagtgacgtacacctcatcgccgaaaaattcgcgaagaagttcggggacaacctcgacaatattgacattgacaacgagctgttaaagatagtgcacgaagaggacatcggctacgacttgaccccccatgtggataatctatcctccttttttgaagaagtgttcgtggagaatgatttcaaactctattcacaggaggagtatctgctggacgaagaaaatcgcttctctggaatctgcgacattattttggaggacgagaatggcgagctggtagtcatcgattataagacctccaactcaagtagcttttcgaaataccggagagagctgtgttactacaagttgcttgtggagaatgtttgcaggaagcccgtcagccgagtgggagtcttctttacaaagaatgggcggctaaggctgctggatatctgcgacgaagaaaacaagcgcaaatatctgaactacaaagaaatcgatgaggcaatcaagacacttcatgaggtcagaaacaacatcaacaacgaaaagttcccagccaagaaacagtttctctgcaagtactgcacttataaacacctgtgtgatgcctatttctga

SEQ ID NO: 8903 - DNA, 507 bp, synthetic construct
  source 1..507: mol_type = other DNA
atgaaacggctgtacgccctgcttattatattgatcgtgatctacattgggataaactcgttcagtctgatcttcaacgataatgggactaatgacgccaatgatgtcaacgaaagcatgatcaccgtaggagccagctccctccccgagattgaaaactttacagacaacacgctcaacgataccaccatttctctggtggatagcaacaaaaacatgacaatcctcgtttccgagatcgataactcccagtcaatttccgacatcttcaacaattttgtcagcagcaatgacatctcctcaacccagactatcgaccaaaacggtgtgacaacgtatctagcatacagcagtggcagtgactcctataacgctgacattttctttaataagaatggccagaattattgcatcagcggcgacaacatcctgtctagcgacagcgattacttcatcaaccactgtaagggaattatagacgcgatctcgataaattcaaccagttga

SEQ ID NO: 8904 - DNA, 543 bp, synthetic construct
  source 1..543: mol_type = other DNA
atgaagattgtcgcactgcaagcgagtcctagaaaggacggaaattgtgacgtgctcatggatgaaatgatcagggggattgaagagaacggcggcaaggtgactaaatactatctagaaaatcaggagatcgccccatgcaaggcctgcctctactgcgctgagaatccggagtgtgtgcgggcagacgacggcaacaagatactggacgaaatgatcgaggctgacggagtcatattcgctaccccagtttactatggtcaaatgagcgctcagggtaaattgatcatcgatcgcttttactccatcggccagaaccctaacaagtccctgtctggcaaggcagccctcattttcacggaaaaccagcccgagcacacctatgatagctacatcgagcttacaaaggcctcacccttcgaatttatggggtatgatgtaattggacatgtggatgcggggaacgccggacccgcaggcatcgtggccgaggagcagaaagacaaattaaaagaagcctacgagctggggctgaagttctga

SEQ ID NO: 8905 - DNA, 240 bp, synthetic construct
  source 1..240: mol_type = other DNA
atgggactgtccagcttcttcaagagggtgaagaaagatgccaagaacgaagagattgtggagtgtcacatcgacatcaataccgacgactgtgacgggtgcgaaaaatgcggcattgcgtgcccaaataatgtgtttatgatggtagacaacgtgagtaaggtccgggatagccaggtctgcaagaactgcaaaatatgcatggcaatctgtcccaacgattgtatcacagttaactga

SEQ ID NO: 8906 - DNA, 297 bp, synthetic construct
  source 1..297: mol_type = other DNA
atggattttctcctggtgttagccaagatccagccgaaggaggggtgtcaggacagcatcctcgaacttgcggaagagctgatttacgagtcgctcttggaggaaggcaacatcgattaccagcttctgaagtccagtgaggacgacagcctaacctttgtcgagaaatgggagtccccagaatatctgaaaaaacatatggcctcaccccacttcctgaacttcaacgcagactgcgaagagttcatcgagagcaatgatattcaactgatcgaagctaataagatagagatttga

SEQ ID NO: 8907 - DNA, 693 bp, synthetic construct
  source 1..693: mol_type = other DNA
atgatatatagcacagaaattgagaatatgtgcctggtgcgcaaaggggccaaccatgaccccgcgcccatccctgaggaggggaaatgggtgaaagcaaaagagataagtgacatctcgggtttcacacacggtattgggtggtgcgccccgcaacaggggtgttgcaagctcaccctgaatgtgaaggatggaatcatcgaggaagcccttattgaaaccctcggatgttcaggaatgacccactccgcagctatggctggggaaattctcgtgggcaagacaattctggaggccctgaacactgacctagtatgcgacgctatcaacacggccatgcgagagttattcctgcagattgtttacgggcggactcagtctgccttttccgagggcggccttcagattggcgccggcctggaggacctcggcaagggccaccggagccaggtcggaaccatctacagtacaaaggagaagggcccaaggtacttggaactgaccgagggatatatcacggaaatcgggctcgatggagataacgaaatcatcggctacaagtatatcaatctgggcgtcatgctggattttatcaaggagggtatcgacccattggaagctataaagaaagcgactggtcaatacggaagattcgacgacgcagtgaagaaaatagatcccaggagcgagtga

SEQ ID NO: 8908 - DNA, 1002 bp, synthetic construct
  source 1..1002: mol_type = other DNA
atgagtctgtttgaaagctatgagaggcgcatcaatcagatcactccggtgctcgagaagtacgggattaaagacctggaggaagccaaacagatatgcctcgacaaggggtttaacccatacgatattgtgaagaatgtgcaacctatctgctttgagaacgcatgctgggcctacacgctgggcgccgcgattgccatcaaacagggctgtgtgaaggctagcgacgccgcaaaggccattggcgaaggcttacaggccttctgtatccccggaagcgttgccgacgaccgacaggtcggcctagggcatggcaacctggcttcaatgcttttgagcgacgaaagtgagtgcttcgcattccttgcaggccacgagagtttcgcagctgcggaaggagctattggcatcgccaacagcgccaacgaagtacgcaagaagcccctcagagttatcttgaacggactcggaaaggatgctgctctcattatcagccggatcaatggtttcacccacgtggaaacagagtttgactacttcacgggtgaggtaaaaatagtgaaagagaaggcatattccgacggcgagagggctaaagtcagatgttacggcgccgatgatgtgcgtgagggtgtcgctatcatgcatctggaaggagtggatgtctcgatcaccggcaactccaccaatcctacacggttccaacaccccgtcgccggaacctataagaaggaatgcattctgcaggggaagaagtacttttccgttgcttctgggggcggaaccgggaggactctgcacccagacaatatggcagcgggccctgcgtcatatgggatgactgacacactgggacggatgcacagcgatgcccagttcgccggttcttcatccgtgcccgctcatgtggagatgatgggactgatagggatgggtaacaacccaatggtgggggcctccgtagcagtggccgtcgcggttgagaaagccatgaaacagtga

SEQ ID NO: 8909 - DNA, 420 bp, synthetic construct
  source 1..420: mol_type = other DNA
atgtccacgctgtggggcctaactgcacgcggaatctgccagttcaacgataagattctcctgctgaagatccggtcgaacagcgctcacgacgcggagaaatgggagatccccggcgggaaggttaaaaaatgcgaatttttcgatgacgcccttaagagagaatacctggaggagacagggttggaaattgacgtccaggagctgtataatgtggtaaggaatgattacaccgcctgcaagacaaaggaggacgtcaagtcaattcaattaataatgaaagtgtcctgtgacaacgacgaagtgaaaatcagcggagagcatgacgattttggctggttcagctggaacgagatagatgaaatgatcgccggtgagctcctcaccccagctgcaatcatggccttcagtaaggactga

SEQ ID NO: 8910 - DNA, 798 bp, synthetic construct
  source 1..798: mol_type = other DNA
atgcagaagatcatcaacgcccactgccacatttacccagaaaagatagcctcaaaggccgtagttggcatcaaggacttctacgacctagatatgtctcttaacggcaaggtctcgggcctgatagaagatgggaacaaagtgggtgttacgcactacctgatccattcagtggccacaaccccaaaacaggtcaaatccattaatgaatttatcgctgagtctgtgaatacccacccagacatctttacaggcttcggaacgctacacccggacagcgaggacattcaaggggatttcgactacctcattgagctgggccttaaaggagtcaaaatccaccctgactttcagcagtttgcgatgaatgaggagcgcgcattcaagatcggcgacgtggtgaataaggggaatgtacctctgatggtgcattgtggcgacttccggtataactactccaaccctgatcaaataaaaccctttttggataagttccccaatatcacatttattggtgctcatttcgcagggtggagtgtgtgggaagaggctactgaaaagctcgctggaacccccaacctgtacgtggacctgagctccagtctctatgacctgaccccggaaactgccgtcaacctcatccatgcatatggggcggataaggtgttatggggaaccgattaccccatgtgggagagcgtcagcgagatggagtatttcaacaagctggatctgactgagaaagaaaagagccagattctgtatgagaacgccgccaaaatcctcggattgatttga

SEQ ID NO: 8911 - DNA, 651 bp, synthetic construct
  source 1..651: mol_type = other DNA
atgaccaacaacgagctcaagctagagactaaatgctacgacgctaacgaatatggctacctgtacggactgaacaagaagattccagatgaagagttcgagaaagtcaaacccttttttaaggattttcggagaatggacttcgtggaaggcaacgtccaagtcaccggaaggcctgagggttaccgatgccttgagaaggacgtgagcaaggtagaggagatcttgggaatcaccaacactctggaaaaaaggcagaataaggtgaaagaagcctttgcagaccccgtgaaaaaggccaatcttatcgaccagtcttatgaatggctcaagatactcttcgacaagggtggcacaagacccgagcaggatttgagccggttagccgtgcactcaacaaaaatctatgatccaaaagacagcttcaaacggggctgtgagaagggggagggagaactgttcatttacacccctcatggcatgtggtatatcatcaacaattgcggcgagttctccgataagtcgctgaacaatgttcagacgccgcaagggggggcggtggggtatcgcctgatgtactacgatctgatcgaccgcctgattcgtatttacagtgaagagaatatatactccgggaagcagctctattga

SEQ ID NO: 8912 - DNA, 948 bp, synthetic construct
  source 1..948: mol_type = other DNA
atggtcaaggtcagtatctttggcagcacgggcacaatagggaaaaatgtggcctttaccctagcacgcatggacacagtggatgagattgtgatggtgagccgcccaaaaagtctcgacaaagttaaaggggagacttacgatatgtacgacgcattggccgcccgtgatattgactgtaagctcatccccacctgcgatttcaatgagatccggggctctgaaatcgtactcattgccgcgggcatccaccggcagcccggaatgaataggcttgaactggctattccaaacgccaagattgtaaggtattattccaagcagatagctaaatacgccccagactcgatcatcctggtggctaccaaccctgtggacgtgatgactacaatcgccctggaagcaagcggcttcaacaagatgaaagtcatcggggtcggaaaccacctggactcgttgagactgaagaactatttcagcagaaagatcaatattaatagttccgaagtgcacacaagggtggtaggcgaacacggcaaccatatggtgcccctgttaagctcaacatccattggaggtatccctctcaagtacttcgagtttgctaagctggacgttgacgcactggtggagcaacttaagaacgcgggcaataccattatcagcaaaaagggagccactgagtatggtcctgcctttgcaatctcaaaccttatctcaaccatgataaccgactcccacaaagtgctaacggtgagcttctacctggagggtgaggttgaaggggttcgaaacgtctccctcggggtgccggccattacgtctaagaatggaatagaaatgatcgtccccatccatatgaatgatgtggagaaagagagcttcatagaggctgcgaacgtcgtccgggataccacttacaaggttaaggagaacctgaacatttga

SEQ ID NO: 8913 - DNA, 444 bp, synthetic construct
  source 1..444: mol_type = other DNA
atgaagctggtggttcagagagttacgcatgccagtgtggaagtcaataatgaggtggtgggtgagataggcaacgggttgatggtgcttgtaggcttcggcgtgaacgacactaaaaacgaggctgactatctgtcccggaagctggtcaaactgaggatctttcaagatgaaaatgggcgcatgaacaaaagcgtgaaagatattggaggaaagctgctactgatcccccagttcacactctacgcctcaaacaagaagaaccgaccttccttccacaaggcactgaccccagacatcgctaccaagttatttgactacttcgcgagcaaatgctctgaagaggtggatgtcgagaccggggagtttggagcatacatgaaggtagatctcttgaataacggcccggtcacaattcttctcgagaaggaagccgacgaatga

SEQ ID NO: 8914 - DNA, 1143 bp, synthetic construct
  source 1..1143: mol_type = other DNA
atgaccgaattttcactgaacgtggatgagataaaagaaaacgtggaaacaactctgaaagaggaggaaaagaaattagaggattccaacatcaagaatcaggctcaggacaacgccgtggcaatcttcgacgctgatttaaataacccgcaagcaagggaaaagatcttgaaaccactggacaatttcgggctcaacgagatgagccgcagcgccgcccacaacgaaatgctggccacgagatttgttgaccttacaaaaggaggcaaagagtcggacaacattggagagaacctgatggagctgaatcgcgagataaaggatttggaccccagtaagataaactttgccaaaaaggggctgctcggcaatctgatgaaccccgtgagaaaatactttgcgaaatatgaaaaggccgaaaacgctattagtgatatcgtacagtcactggacaaaagctccaaagtcctccagaatgacaacacaactctgctcaatgaggagaactacctcagggaagttaccaataagcttcttgcagacatcgaactggccaagcaaatggatgcctcgattgaagcacagatacagactgcagaaatcgaagggattgatgaggagaagattaagttcgtgcgagaagagatcctcttccctctgagacagcgaatcatggacatgcaacagatgattgtggtcaaccagcagggcattgtcagcctgaatgtaatccggaggaacaataaggagttgattcgcggcgtgaagcgggcgcagaacgtcaccgtttcagctcttcggaccggtgtaatggtggccagcgctctgtacgatcagaagatcgtcatggacaagattaatatcatcaacagcacaaccgagcacatcatagagtccacgtcccatatgctcaaagagcaaggaagtgaaatccagaagcacagtgcggagaccatgatcagccccgaggtgctaaaggtgagcttctccgaggcaattcaggctatcgaggatgtcagcacctataaagagcaggccctgccaaagatgaaagaaaccattgtgatgttctccgacctagccactgagggtcaaaaggttgtggagaagatcgagacaacgaacgaaaatttgctcaagtga

SEQ ID NO: 8915 - DNA, 459 bp, synthetic construct
  source 1..459: mol_type = other DNA
atgagacgcataaagcagcaactcactcaggaagagtgcattgagatcctgactaacgaacctcgcggagtactggcactgctcggggataatgagtacccctacacggtgccaatcagccatgtgtatgcggacggtaagatctacttccatggggcccaggaaggccacaaaaatgacgctgccaaaaagtatccgaaagtgagctattgtgtgatcgacaaaggcgtcaaaaagaaggagaactggtggtacaccttcaagtccgttatcgtctttggaaagattaagatactgacaaacaacaacgagaaaagggatcggctcacataccttggggataagtttttccccacacacgaagaaaccatcgacgaaattaataaactattggaccggaccgaggtgtacgagatcaccattgagcacatgagtggcaagctggtccgagagaagtga

SEQ ID NO: 8916 - DNA, 660 bp, synthetic construct
  source 1..660: mol_type = other DNA
atgattaacaacgattgggacctggccctgaacgacgagttcgaaaaggactacttcctcaaaattaaggattttgtcagtgaggaatacaactcaaagaccatctaccctccgtacgaggacatatttaactcattcaaactgaccccactgtccaatacaaaagtggtgatcctcggccaggacccctatcatgaggagggtcaagcgcacgggcttgcattttccacgccggaggggagaccaatccccaggtccttgaaaaacatcttcaaggaaatcaataatgagtatagctatcccattccagagagcggctgtctcgagaaatgggctaagcagggcgtctttctactgaatactgtgctgaccgtggagaagggcaatgccaacagccacagtaattgcggatggcagaccttcacagataacgtaatccggatactgaacaaccagactcgacctattgtgttcttgctttggggaaagcaggccgaaaagaagaaggaactgataacgaatcccaaccatctggttctaattacatcgcacccttctccctttagcgcacggcgcgggttcctgggatctaaccactttaaattagctaataaattcctcaaggaaaacaacatcgatgaaatcaattggaagctctga

SEQ ID NO: 8917 - DNA, 567 bp, synthetic construct
  source 1..567: mol_type = other DNA
atggaaatcactgcagacgagatgaagaaaaccatacggaagatatatgaccggctcgataaagtgagccccgttgattttgactgcggaaagttgtgtggcgagatctgctgtgtctacgacgccgacgactaccacaatgaggatttggccctatatcttctccccggtgaggaactcatgtacgaggacagtgacagctacaagctgtattacatcgactcatccgaaattaaatatcctcactcttggaaaggccaaatttacctggtgaagtgtattaaccctccaaagtgcgatcgcagtatccgacccatccagtgcagaacattcccactgattccgcacctgaataagaaaggggagttccatctgatcttcgatgagtccgaatttccttacaagtgccccattgtccagaaccatattaagcttaacgatgatttcatccaggtgacctacgagatctggagcatactgatcgctaacccactggtgtatgacttagtagacatggattcgcgcatgagggacaataggaaaacggattacgaaattatcatctga

SEQ ID NO: 8918 - DNA, 1386 bp, synthetic construct
  source 1..1386: mol_type = other DNA
atgaagatcgagtttgagacatatgtaatttttgtctcctttatcacttccttctttgccgtgtttttatcaaacggtataattatcggcgtgccagccatcgcacaggactttgctatgaacaacgttatccaaaattgggtgcctacgatcttcttccttgtggttgctgtctttacagttcccgcagggcaaatctcgggcaagttcggagtgaaaaagagcctcctggccggaatcacggtcttcctcttggggagtatcggagcgtgtcttgcctttagcacggaatcgttcctgatatttagaatcatccagggggccggagtggcttttctgaatgtctctgccatggcaatggtcgtgcacgcagttaaacctcagaaccgaggcaaagctttgggcttcaccgtgactggggtgtatctggctacaagccttagccccgtgatttgtgggttcctggtgcataacttgggttggagggccatgttttacttcgtaatccccttcctcgtgttgtgcatcatactgctgattctgaagattccacaggaatggaagacctatcagcacgataccatcgataaagtaggctcaataatttatgctattggcatcctactcttcatttacggcttcactactctgatcaccaccaatgggaagattctgaccgtgactggcatcatcttactggtgatattcggagcctacgaactgcggcagaaatcccccgtcttcaacatgaacctctttaaaaacaagaagttcacctcatccaatattgctgccctgtgcagttacctggccattatggtcgtgacaaccatcctaaactaccatcttcagtatgtcaggggttgggacgcacaaatgtctggaatgatactgattatcacccccatcatcatggccattatggcgccgaacgccggaaagctcagcgataaaatacacccgcagaagctggcggcaactggcatggcaattgccaccattgccctgggaattttgacattcctcaatggggagacaccaatttacttcgtgatcatagctatgatcctacagggtatcggtatggggctgttctcatctcccaatatgaatgccattatgagctccgttccacctaaggacgcccctaccgcatccgctagccaggccaccatgcgcacgatcggccaaaccatgagtctgggccttctgactctcgtatttgcttggataatggggaacctcgagttatctccacagtacacaaccatgatcatccaggcgtcccagacgatttgcggcatctgtacagccgcctgcattctggcgatcttcgcaagcctcatcggcatcaaatctagtgacaagtttaatacaggacggtga

SEQ ID NO: 8919 - DNA, 444 bp, synthetic construct
  source 1..444: mol_type = other DNA
atggacaagagcccggacgtgttcgacaatgctcctattattgggtggatacacaacatctccaaaaaccagctgaagtacctcaatagccaaatccaggagctgaatctagggcgcgaggtgcgctatataatgctgatccatgacaatcccaactgcagccaggatgacctcgtcaacatttacggtgagagtaaggcaaacgtagcgaagtcccttaagaaattggaaaacaacggctatatcaccagaaatatgaatcccgaaaaccgacggaagtacatgctgaaaacgacaaaaaaggccgatgaactcatcccaaaaataaggaaaatctcactggattgggaaatcaaggtgggaattgacgagaatgattacgagttaaaggagaagatccggcagattgccatcaacggcatgaaactgattgacaacaactga

SEQ ID NO: 8920 - DNA, 300 bp, synthetic construct
  source 1..300: mol_type = other DNA
atgaataaaatcgaaatcgagctaaccgacgaacagcttgagaaggtcaagcaactggaggcacagaacattagtgtgggccaggcgatagacatgctctttgaggtaaaggagaaggccctgttcgagatcgagaagatcgagaaatccgggctcatagataaggtgagcaacattaatgtcaacaataaaacggagaacctggaagagaactacggcgatagcgaaaaaacatatgaaatggaagtgcaggacatcaagcaccggattaaatggggaaaggacttctttaagttctga

SEQ ID NO: 8921 - DNA, 687 bp, synthetic construct
  source 1..687: mol_type = other DNA
ttgaacagaaagaccaaaatcattatcattgctatctttctaatcatagccagcatcctcttcgtgggcaaccggttcttcataccccattacgagacgattgctgacacggatatagggaccgtagaagtggctacgtacggaaacgcaaatgccacaaaatgcattgcactgattaccggcatccaccccagggaaaccctggctatcaaccctgaaatcgatgcagccaagcaatttgccaatgacgatgttaagatcattcactataaggtcactgtgacaaaaaatgcacaggactacagtaaaggccgcgccaatggggagtccctggttcataactacgtgaacccgaatgtcaccgcctccgacgctgacgcggtgatcatctcgcacagccacattcctgagtatggtgaaggattttacgtagccactccagccatggacaacgccagtgtgaagatcggtgagaatatcaatcagagcagcgatttcaactactatcccgtcaccgggaatgagacatacaaatcaacttccgcggtgctggtgtcaaagccaatcgccgaggcgggatacccaacattcgtctatgaggtgcccgagaacgtcatggagtttatcataaccggcaagacaaaggaccttttccagctcattattgaaaacacttatgataactga

SEQ ID NO: 8922 - DNA, 1455 bp, synthetic construct
  source 1..1455: mol_type = other DNA
atggattatgacgtgatctacatcggctcgggaaatgcggcctggcagggaggccggtttctgagaaaggcggggcttaagatactgatcattgaagagagcctgtttggcggagcatgtgctaacagaggttgtaactccaaagccttgctggatgcaccatacgaaatcaaagccctggcggacaactttgaaggggttgggaagtccggcaactttgaggtcaattggcccgacttaatgaaattcaagcagcagcggattagcggcatgagcaaattcctcgatggtaaattcaaggaatatgacttggacgttgcccacggaaaaggaatcctggtcgacgaacatacagttaaggtgggagatgacacattcaccacagataagatcgtaatctgcaccggtctcaaacccgtgatcccagatattaagggcaaggagtacctgcacgatagtacagactttttggacatcgcagagcttcctaagcacaccattatcataggggcaggattcgtgggcatggagttcgcatcgatcatcgcggaggccgggctagaggcagacgtgatcattcgaggcaacatggctcttaaatacttccaccagccttacgtgcaaaatgtgatcgaaattctaaagaagaagaatattcgtttccatttcaaccaaactgtaaaggaaatcattaaggacaacaacgtcataattgacgatcccgaaagtaaggtgtcaaacgtggaaaacagcatgaacagtgacgagctcctgcgcgaccctcaggccaagatcaataacaaggcctacgagaacgcttttactgtgaatctcgacagcggatgcagtataacgggcgattacgtgattgccgctatgggaagggaagctaacgtcgaggatatcgggctcgagaatgtgggcctgacctacaccaaaaaagggatcaaagtgaacgggcacctgcagacagccgtttccaatatctatgcttcaggcgacgtggcagatgtcggcattgctaaactggtcactgtggccatccatcactccaagtacctcgccaaagagctgctgggtaaggcagacgaaattacgtacccagtgatccccgccgtggcctataccatcccgcgcatcgccacagttggtgtaccggcctatattgcagaggagagcgacgattatgacgtgcacactatacggtacggcaattcctattcactcgagcttaagaacgataggacggctgaggccaaagtcattgttgataaggatctcaatattgtcggggctgaaatatacgcggccgacgctgagaatgtcgccaacatgtttaccttcattatcaataaaaagataaccctgaaggacctggacgagatgatctacgccttccccagcagcagctccgtatgcctgtataagttgcacaacatccattataaattatga

SEQ ID NO: 8923 - DNA, 2955 bp, synthetic construct
  source 1..2955: mol_type = other DNA
atgaacaaaaaaatactgatcctgctgctgatagccattctaaccttttccgtagctaccgttagtgcgtcagataacacaactgatgactctgtcatcgactcaagcaatcgcgacgtggtgagcgtcgacgataacaacgtggtgtcggacgagtacgcggtgaacaaagtgtctaatggggcgctggctgatgttaatggtgaggaaaacgtcaacaacgacgtggacatggttattgaccccatcaacaatgtatctgtccttcaaggcgacaacgttgacgtgaacatcactgtgaagaatataggggaaaacaatgcttctaacgtgacagtgaattttgagctccccgacggattttcacttattgactcgaacaacgtatcagacaatacgtggcacataggcgacttgcagagctccaaatccaccaacatcaccgtgaagctgaacaacagcggaattaacaacggtgactacgtgatcaacctgacactacgggccaatgaagggatcgaggagatctttaagcagaatgtcactgtgaacgttatcaagaaactcatccagaccaacctcactatcgacttcgataaagagagctacgtctacggggacgatgttggaattgatgtgaagttacctgacgacgctactggtaacgtgactataaaaatcaatggcacagaaaataatgcaagcatcaatgaggtcttgatcctgtctaacctgacacccggcaattatgaggtgaacgtcacctatagcggggacgacaagtacaatggaagctctgggaaggcccggttcaccatatccaaggccaacacaacagctgcaattgacattgtcagtattaaggtggatgatgagctcaatatcacgattaactacgattctgagattaacgggaatgccactatctatgtggacaatatcaaaaaccagaccattgagattattgatggcaacggaaatgttaccatcaaaggcctgtccaaaggcatgtacgacatcaaggtcgcctttgatggaaatgattgctataactcatccgaaacgaacaaaacgattgaaatctctaaaaacacagtcaacatgttgatcaatgtcggcgatatcgtgtacgggaatgatctggtgattaacctcaagctccccgataaccttacctcaaacgtcacggtatccctcggcgatattaatcgaagtatcaactgcagcggcaatgtaacctttaaagatatgaacgccggcaactacacggctattgtcagttatggcggtgatgagaattactttaatgaaacaaagtacgtggacttcaagatctataaggcctccacacagaccaccgtcaatacctcggacatcaacataggcggcgtgctcaatgtcagtgtcgaccctaagattgatggaacagcgactgtgtatcttaacggcacgaagtattccgacgacatcgtaatagttaatggtagtggcaacgtggttattagcaacctcatcgaaggaacttataatgtgcttgctgtcttcaacggaaatgataactacaattcctccctgaccaacaagtccatcaaggtatcaaggaatgtgttcaacattactgtgaacgtgaccgatgtgtgttatggtcaggatgtcataatcaacatcacactgccgggcgacgtgaccaacacagtcgacgttgtgttcgggtacaactcccagaatattaatctggaaaatggggtgggcaccgtgaagttctccgatttggatgtggggaactacaatgccactgtgatctattacggcgacgcgaagtacctaaagagcacccaaatcattagtttcaacgtgaccaaagctaagccaacagttgatgtgaatatttcaggcaataagctaggacaggacttagtgatcaatatcgcattgcctagcgacgtcaagaataacgtgacggtgggaatcgacaacatctcccaggacgtgaaagttacaaatggggtgggtaaggcaatatttaaggacttaaccatcggagagcatgtgctgatcatcgactacagtggtgactctaactacttgaacacgaccgagggcatttacttcaacgtctctaaggcaataccggtcatcgacatcgatgtgaaaaacatctatgtgaaggggaaggaggtgatagatatagcccttccagacgatgccacaggctcggtaaccatctttattaatggagtggagcagaagaccgttaatgacaacatcagcagcattgttttgaccaagtcggggctggccgccggaacgtataatgtgatggttagctacaccggagattccaagtatgaatcggccaacaccactgtgcaattcaaagtgtcaaagtacaaggctaaactgaccgcctcctcaaagacctataacgtgaaagtaaaaaccaagtactactacattactctgaagaacaacaagaataaggtaatgaaaaagatcaaggtctatctgaaggttaacggtgtcacatattccgccacaaccaacagctacggtaaagcaagcttcaagctgagcaagctgacgaagaaaggcacctatgatgctcttatcacatacaagggcacgagttactacaacaagctcactaaaaaagtcactattgcggttaaagcaactccaaaactgactgcttatagcgccaagctcaaaaaatctgtgaacgccaagaagtacagtgtaacgctcagaacagacaaatacaaggcaatgaagtatacaaaggtcactctgaaggttaacgggaaaatctataccctgaagacaaatagcctcggaaaagccactttcaaaattaccaacctgaataagaaagccaagttcctggcagtgattagttacagcgggagtaaatactactattctgcaaccaaaaaagtgatactgacagtcaggtga

SEQ ID NO: 8924 - DNA, 483 bp, synthetic construct
  source 1..483: mol_type = other DNA
atgagccagttctcaattaggtttgcggaaaaggaagatgtctccttagtcctgcagttcatcaccgaactcgccgaatacgaaaaaatgctgaacgaggtgatagctagtgaggagctcctgaacgagtggatttttgataagaaggtggccgaggtgatatttgcaatggaggacgacaaggagatcggttttgccctgttcttccacaacttcagcacgttcctggggcggggaggcatctatcttgaagatttgtatgttaaaccagaatatcgcggcaaagggtacgggaagaatctcattaaacgcctagccgagatcgcagtggacaggggttgcggacggctcgaatggtggtgtctggactggaatcgaacatccatcgagttctacctgtcgcttggagctgagcccatggaggactggactgtatacagaatcagcggcgataccctggaagagttgggcaagaaggagtga

SEQ ID NO: 8925 - DNA, 288 bp, synthetic construct
  source 1..288: mol_type = other DNA
atgaactccaacaagattaagatcgagtttgaaaaagaggacaacagcagtattgcttatgatgggaatcggcagatcggccaatgccacttcgcaaggctaaagcagaattggataattaccctgacagacgtggaaaaggactaccagggtcagggaatcggcaagaaactggtagaaaaggtcatcaacgaggcccgcaaagagaaagtcaaaatcgtgccaagctgctcatacgccaaaaagctgatgttcgaaaatcccaaggagtgtaaggatgtgctctga

SEQ ID NO: 8926 - DNA, 237 bp, synthetic construct
  source 1..237: mol_type = other DNA
ctcagtaaacaagaggaactagagcagaaaggctacaagacctactccaacgacgagatcaatgtgttttggaacccgaagctgtgtcagcacgccacggagtgcatcaggggaaataacaaagtgttcgacgtcagccgcagaccctgggtggatgtaagccaggctcctgcaaaggaaatagcggagattatcgaccggtgcccaacaggggccctgctgtatgaactcaagtga

SEQ ID NO: 8927 - DNA, 1650 bp, synthetic construct
  source 1..1650: mol_type = other DNA
atgaaagtgattgccagtaccagaaatgacgacctcaaaagactcaatgaaatctacaaggtgcttaagaagaacgatttcggctacctcatcgaggagaacaccttcttcaggaaatttccatttttacggaactacaaaatcgagaaggaagataacttctccgacgagtctgtccccctccgaatcagaaaggtgctggaagagctgggtccagcctacatcaaactggggcaaatgttgagcacaaggcccgatttggttggcctcgagatcgcagaagaacttcagcagttaagagacaatacccccataacgccttttgatgaaataaaagaagtcattgaagaggagctgggcaaacctatggaggacatctacagtgatattgaccagaatcccctgggatcggctagtatcgggcaggtgtttaaggcccagcttaagaggaatggggaggaggtggctattaaggtgcagaagcctaactcccgcgagatcatagaatcggatatcaagatcatgaaattcctggcaaagaggatagataaatacatttccagcagcaaaacattcaacctacccaccatagtgaacgagtttgagcgcagcattctcaaggaaattaactacctggaagaagtaatgaatatgcaaaacctgtcaaagaacttcaagaatgtgaattacatcaagattccaaacgtgtacattgactactgcagcgagaagataatcactatggagctgatcaaaggaattaccgtcacggagttaatcgagggggactatcctcatattaataagcgattgatcgccaattatggccttaagtcctatttcaaacagatcatgatcgacggttatttccatgccgatccccaccccggaaacctcatcgtaacacgggataataagctgtgttatattgacatgggtatgatggggatcttgagtgaggatttcaaagaaaatctggctgaatttatgttgctgttgataagtggaaatacagacaacatcataaaacaactcatctatatgaacataatctccccctcacagaatacaccggaactccgggcggacattaacgacctcctcaatctgtattacggggcggagctgaagaacatggacggcgccatggaagatctgcttaacgctatggtgaagaacaacgttgttctgccaaacgagttcgtgatgattggccggggtattgccctgattgaggatacgggcaagaagctcgacccaaacttcaacgcggctactgagttgaagaaactgtctcgcaagatcgtagtcaataagtacaaacctgaacgcctggcaaaagtcagcctgaactatcttctgcagctcgaacacctagcaaaggacttaccggacaccataaacagcaccatctccaagctggaggaggggaatattgaggtcaaactgaagcacgagggcatcggccacctaattaaccagctctccatctctctgatcctgtcaagcctgattattgggtcatctctggccctcatcactgacgtgggcccggacctatttgattttccaatccttggattgatcggattcgtgtttagcggagttcttggcgcctacctggtgctgatcaacgtcatcgagcgttga

SEQ ID NO: 8928 - DNA, 1338 bp, synthetic construct
  source 1..1338: mol_type = other DNA
atgctgaacgagtttttcaagctcagcgagaacaacaccgacgtgaagactgaagttattgccggactcacgacattccttgcgatgtcctacattttaggagtgaaccctggaatgctggctgagggaggaatgcccgcaaccggcgtatttttcgctacggccctggcgagcggcatcgcgtgtattatcatggggctggtgagcaagtatcccgtgggactggcgcctggtatgggtatgaatgccctctttacttacacgatcattctcggcatggggaacacatgggaggctgcccttgccgcagtcttcatttccagtatcatatttttactgataactgtttccggccttagggaagccattcttaatgctatcccgcacaacctgaaactagcgattggggcaggcattggtttcttcctcgcattcattggcctcaaaggtgccggaattatcgtggccgacccaagcacaatggttactctgggatcattgttctctgctccggcactgttggcactgatcgggatcgccgttacgctgatcttgtatgtccgcaaggtgcctgccgccgtctttatagggctcgtgattaccgccatactgggcatcatctttaccgctgccggctttggagtgggagacatagcgatgcccagcgtgccaactgagtttgtctcgacaacaatcgacacctcggtatttggggccttcgcaagcggatttagccagttgttcacaaatatccccaatctgatcctaatcctgttctcactgctgttcgtgacatttttcgacaccaccggcaccctgattcccctggcaaaccaatgcgggttcatcgatgaggagggcaacgctgatggaatagacaaggcattcctgggggatgccatcgggggcattatcggcgctattctcggtaccagcacactgactgcttatgtcgaaagtgcaactggcatcgggcttggtggccggaccggcttgactgccatagtcacaggcattctatttctcatttccatcatcttcgccccaaccgtcttagccctgtttacaagttctgtgacggctgctgcactggtgatcgtgggcatcctcatgatgattcagctgaaagacgtggattgggatgacttggtggtcgttgcctccgtattcatgaccatcatcatgatgcttctgacctactccatctcactcggtattgctttcgggttcgtcacctacgccatcaccagtatcgctgccgggaaagccaaggaactgaattggcttgtgtggataatggtgctcgtatttatcatatacctattcttcggcttgtga

SEQ ID NO: 8929 - DNA, 2079 bp, synthetic construct
  source 1..2079: mol_type = other DNA
atgctgaatatgtattacgacatgatgatcaataagtacattaaccaaatcgacacatccattgacgccctggagctgaagctacgcgtctgggactttatcaatagcctggataaaaccgatttgtctgaggaggagattaagaacatcgtgtctaacatagggaacctgggcactactctggaggagtccaacagccctaaattcgagtggtacttaaacaccatcgtggataatgatctctgcgccaaatgcggagcctgtagcattgtctgtccaaaccacatcgtggagtttgaggaaaaacctttcatcgttaaagagtgtctgcgtaaagggaacgggatgtgtcaggaagtatgtccgagagtaaacgcagggtcctacgaaattcgaacacggctcaattccttcgaagagtactactacggaaaatcagacatcaagggccagtcagggggggtcgtcactaagttcctggagtacctgttaaacgataagaagattgacggggccgtggtgatcggaggtagtcactggaagccctcaagtatgctagtgacaaactcgcaggatctgctgaatttgcacaagattgacattgacagcacacccaagagccgatacagcatctcgagccttaatgcaataatggaagccggagaaatggggtttgaaaagatcgctgtggtcggacttccatgtcaggtagcgggcctgagaaatatccagtatcaccagttcaattccaaacatgacgccgaacggggctggaatggtcggcccgccaagatcccaaagatcgaatacgtgctcggactcttctgcactgagaaatttgagtacagcaagattctggataagatcaacactcttggaattaatgtggatgatatagtgaagtttgacgttaagggccctaatttcctgatatccacagaaacagaagactacgagattaagctcaacgagatggaaccatcccccggctgtctgatgtgccgggactttgatgctgagcttgcagacattagttttggcgagaaagggagccccaaaggcttcagcaccgtggtgatcaggaccgagaaaggcaaaatcatcaaggactactttgatttcaacaacgatgtggatattgaagaaattgaatttatgaggaacttcaaggagaagcgtttccagaaggagatcaaacaccgcaaagagagtggcaaggccaattcttactactatctctggaggtttggtggtgttggcatgggtcaaaagggcagagcgtatctccggttcaggaccaccatcggaggctattatgacgctgatctgctgatggagatttccgctatcgctaaaaagtacgggggaatcatcaaactcacgtcccgcgaggagattgaaattcagggaatcaagctcgatgacgtggaagacatcgtctatgactgcaaggatctgccgttggttaacggcaccgaaggacccctcgtcaggtctttgatgtcttgtccggggaaagagagatgtctgcttggcttgatcaacaccagtgagatcgccgaaaagatagaggaaaagtatgcggagaagcccgcaaattacaagttcaaaataggaattacagggtgcccaaacaagtgcctgtcggtttctaccaccgactttggtattcacggggtgaagacacctcttactaatgacaactgcaacggctgcggacgctgtgaggatgtgtgtaaaataaacgcaatagagatcacgggcaagaacgctataacggactatgatagctgcatttcatgcggcaaatgcatccccgcatgccctaataatgccaaggacatcaaatacaagggctactgcctgtcaatcggtggaaaggggggccgggagacgatcctaggccatgaaatgtatgtggacagcgaagacgagatttataaaaccctcgacgccgtcttcgaggtgtataacaaacatgctaaaaacccacagcgagaacgcctggccagtaccataaaaagaatcggtcaattgaatttcttcaacgaggtcgagaaggtaaagttatccaagtga

SEQ ID NO: 8930 - DNA, 1386 bp, synthetic construct
  source 1..1386: mol_type = other DNA
atgatatacaagtgtctaatttgcggccacatccataatgaggaggccacgggagtactgttgaaggacctggacaagtgtcccacttgtaaacaggatatctcaaacttcgttgaatttgagaacagcgattccgactataaaattcaaaatgaacccaccgacctgtcataccccaaggagttcgccaaaagtgataaggatattcggcacatggataccatacatcagatcgccatcagcggtgaaagtataatctctagcatgtatacagagctccccatgcctaactgggatgacattctaatcttgggttgtcagctcaacccccagcctatcgaatcgaacatcgatgtcaacaccaccaccgtgatcggaaagaacgcgaagatccccttagtgatcgagagtccaatctatatcactcacatgtcattcggcgcactgagccgcgaaagcaagattgcacttgctaagggcagcgccagcgtgaaaactgcccagtgcagtggcgaggggggcatcctgccggaagaaatggagaatgcttacaaatacatttttgagtacgtgcccaataagtattccgtgaatgacgaaaatttgaagaacagtgacgccattgagataaaaataggccagtctaccaagcctggtctggggggccagctccagggcgtgaaagtcaccccggagatcgccaagatccggaacaagccagtagggcaggatattcacagcccggctacaatcccagaggtgaactccaagcatgacctgaaagagctggtgtcatacctccgcaagaagtcccgaggaaggcctatcggactgaaattcgcagcggggcgaattgaggaggacctggagtatgcgtgctatgcggaaccagacttcataacgattgatggtaggggcggatctacaggggcaagtccaaagatcattcgggacagcacatccgtccctaccatttacgctctctccagggccagaaagtaccttgatgaacatgacaaggacatttctctgattatcaccggtgggctgcgcgtttcatcggatttcgccaaagcccttgctatgggcgctgacgcaatagctattggaaccggggccctgatcgcctccgcatgccagcagtataaaatctgccagactggccactgccccgtcggggtggccacgcaagatatggagaaccgtgaaagatttaaaatcgaatctgctgccaaacgggttgaaaactacttaaaggtgtccaatgaggagctcaagcaattttcgagaattactggacacgacaatgtccacgacctgaacatgaacgacctctgcacaatcaactccgagatcagcaattacacaaatatcaaacacacgtga

SEQ ID NO: 8931 - DNA, 3186 bp, synthetic construct
  source 1..3186: mol_type = other DNA
atgctcatcacattgctttgcctgttcaccgtgagtgctaaagaaatatatgtgagcagcgatggtagcgatgacctcaacgggacagacctgaacaacccttgtagttttcataaggccatcaacatctccgaggacggcgactctatcaaaatgaaggcaggcaattattccataagcgaggaagttgacaagtccctgaacattagtgcctatagtgacgacgtggtcaacatcaagaacaagttcagctatgtgtttaaggtgaagaacaacaatagcctagttctcaacagcctgaacttcaagaatttcaacaccgccatcgagagttattcctacccaaacataatgatcaaaaactgccttttcgagaaaagcagctatatgtgtctaaatatgcggggaggcaccactatcatcacagactcaatatttcggaataataccggtagtcagggtagtgcaatcaacttccagaatacgctctacaagaatagatcctacctgcacatcaacaacaccattttcgattcaaaccacggcacaaacctgggaggagtgatctacattagcctctccaacatgtatctgtacaataatacattcattaacaataaggccgggtataccggcggagtcatcttcaatgatgtatcgaaagtgtatgataatcggtctagatatataaataacggtgcactgtactcggggggggcgatttacattaggggggataaggatctgggttcgtactatggagaccatgtggaatttatcaataattcggccccctataagaacggcgactctggaggctacgggactagcggaggagctttcaccgccgtagacgggggagagatagtgctgaagaacagcgtccttgagggaaataaagcaatgagcagagggggcgccatttggtccgatcagaaagtcagtatcataaacacgctcatttcaaataattcggcttataacgagaccggcctaacggtggggggcggactgtactgccccctgcttaaagtcaacataatcaattccacattctcaaacaatcacgccaaagaataccctgacatcttcaacgacataacatttccttcagtggacattgtggaaaatatcaataacaccgacggtaaaaaaatcagtatcaagaaccttacgaaacccgtaagctactgcttgcaacctggaattttgaacatcgcttcaagccccatcatcgagacgggcacaaataagctgctggggtctggaggctatttcaatgggaagcctattggcgaactgttgaaaatttttatcgttcaaaactaccagcgggtgcttgacaagaaaatcagtgaaaataccttcaagagcatgttgggttttatatcaagtggctgctcatccctacctagccccttcaacgattcttactacctgtcccaccgactgatcaaggagacccttgacgaatatgaaaagggcgttcgctacccagatgtaaacgcaacaggcccaatcaattggttaaccaaaaagtacttaacattcgacttctaccagttcagcaacgaagaccaccaggatttgattgtgttcaccttcaatgagtccaacacaactctcaacccccccattaatgtaactaaaaaatccaacaccacaaatcccgactttaacacggtggtctcctacgtcatcactgtaaaaaacactaacaaaacatcaatggtttttgacgcgctggttattgatactttaagtgagggacttgtgtacaatggtgcttcccataatggagtatataacaacacaaccaataccgtgacttggattctcaatatccccgctgattccgaaatcaacctgttcgtgaacgcaacagtggagaagtttggcaagctcaacaacacagtcaacgtgttcaataaaacggccaacgttaccgtgaacgtcccaaacactgatgtcacaaaggctgtgaatgtgacacgacctagtttcaacgatacgatctgctacaccatcacagtatttaatcgtaaccccaatgtggatctgatgaatctcgtcgtgagggatgttttagatgatggcctggttttcaacggagcctccagcgggggtgtgtttgaccctatctctcgcaccattatttggaccatcaacattacgaaagggggccaggccgtgatttacgtgaatgtcaccgttaacaaatatggcatgctggttaacaaggtgtttgtggataataagactgccaattctactgtgtacgtgccaatcgagcctcctgtaaacccggatatgactgttgtgaagctgtctttgaataggactgtttatgtggggaaccagactgtctttactattgtggtccgaaacacgggcgactgtgacctgggggaggtgtttgtggttgagaaggctccagaggggctggcctacagcagctttaagggcaccgactggtcctacagcaatggcaagtttacctacgggaaggtgctcaaagtcaacgagtctgccggctttgagattgtcttcgatgcggtgagccccgggaactggaccaacgtggtcgtggccggttcaaatctcacagacaacaagaccggaaacaacacgactaaggtgtacaagccggacatggctgttgagaagctgtctttgaacaggactgtgtatgtgggtaatcagaccgtatttaccattgttgtccggaacaccggggattgtgacctgggggatgtctttgtggtggaaaaggccccaatgggactcgtgtacaactccttcaagggcaccgactggtcctacagcaacggcaagttcacctatggcaaggtgctgaaagtcaatgagtcggcgagcttcgacatcgtatttgacaccatcagtcccggcaactggactaacgtggtcgtcgcaggctccaatgtcaccgataacaagacaggaaacaacaccacgaaggtctacaaacccccggtcaatccccccgtcaagccaccagtgaaccctccggtgaatccacacaaaatagagaaaccagacaatgaaaaggacaagatcattaaaaaggactccagcatcaatatcagaaaaacaggtaactcaatcttcctcatgatgctgtctgtgatcatttcaattccgctcatacgccgcaatcaaaagtga

SEQ ID NO: 8932 - DNA, 1350 bp, synthetic construct
  source 1..1350: mol_type = other DNA
atgaagacaaagtacgacgtcgtggtcattggatttggcaaggctggcaagactctggccgccaaattgggaaaaaacggtaagaacgtggcactgatcgaaaaagatgcgaatatgtatgggggaacctgcataaatgtaggttgcattccttcgaaacgactaataacggattctctcaatgctcccaagggggagttctcgctgaagagcgaatactaccgcaacgcgatcgatgagaagaggaaactgaccgcagccctgcggaaagctaactacgacaaactcgcccagtccggcgtggacattatagatggcatcgcctcattcaccaatgagaaccacatcagcgttcaaaccaatgacggcatcaggagtatagaggcagagcagtttgtcatcaatacaggctctgctcccgttatccctaaaatcgacggattaactgaaagccagaacgtgtacgtggctgaaactattatggatctggaggagttgccttcttccctgaccgtcgtggggggagggtatattggccttgagttcgcttctatgtacgccaatttcggcagccgggtgactatcattcaacgcggcaacatattcctccccaaagaggacgaagatatttccgagtccattcgggaggtcctggaagccaagggcgtacagattatcaccggggccaagacaaccaagatccaggacggctccctttactatgatgccaacggagaatcccacgtgctgaagggagatgccatcctactcgcaacgggccgcatgccaaacacagatggactgggatgtgaaaatgcagggatcgctctcacctccagaggtgctgttgtgacggatgagcacctgagaaccaccgcaaatcatatctgggctgccggtgacgtctgtggcaacctcatgtttacctacatttcacttgacgatagtagaatcatcttggacgacatgaacggcaacgggaagcggacaacggagaataggggtgcatttagctattctgtgttcatcgacccgccgttcagccgtgtggggatgagtgaaaaagaggctgaggacgcccagatcgaatatcatgtaactaaccttccagcgaactcaatccccaaggcaaaggtgctgcgagaaactgagggaatgctgaaggccataattgccgaggacgggacaattctgggtgccgagctcttttgcgccgaaagccccgagatcatcaatctgattaaattagccatggaccaccagttgaaggcggagacaatcggggatttcatattcacacacccaaccattagcgaaagtctgaacgacctcttttcaaacgcgaagtga

SEQ ID NO: 8933 - DNA, 246 bp, synthetic construct
  source 1..246: mol_type = other DNA
atgcagctaatcacaaaagacaataattaccggaggatcaacgagctgctcgaaaaaatactggacaagaccgtgaagcgcaagcacggtatcagccaggagcagcccattttcatgggggatgacaagccgataacgtggacagagctcaaggagagcgaaactggcactacctggtcccagggaaacatcacccttaccgccctgtttaaatataaccaaggcgggttcccaagattcatttga

SEQ ID NO: 8934 - DNA, 576 bp, synthetic construct
  source 1..576: mol_type = other DNA
atgaacaaaaaggtggtagtcgccatcgtggttgtggtgattgtggctattctggccatattgatgttcatcggaagctctaacgtgaccctgatggcaggtgatagctgcataacactgccttcggactacatgcttgacaacaaggggatcgcctataagaatgatatcggcatcttttttattagcgtctcagggaacagtccaaaagaccagaaagaactctttgatgccatcaaatctaacggcaagagctccggatataaaaacgtcacgaaggacaaagttaatgggttcaagctgtacgaatacgaagcaaatcccgataagctcaagaacgtgtcatccgaccggaaaattagcggcagttatgagacctggaagacctacagtccgtacactccctacgaagatgtttccgacatggatgtgactaagttcaggtacatcgcttatgtaaacgagaatacggacgacatctccgagctatacatattcaccaataacacaaatgtcgacctgtattctggcgagattacaaagatcattgacagcatcgcggtggtcgaggagtga

SEQ ID NO: 8935 - DNA, 357 bp, synthetic construct
  source 1..357: mol_type = other DNA
atgatgatcataacaactattctgggaacccttgtcgcactggagtttttctatattatgtatcttgagacgttcgcgaccaattccgataggacatcaaaagtgttcgacatggacaagtccgaattggaacgggagtcggtcaatactctctttaagaaccagggggtgtacaacggcctgctggccgtgatgattctactggcactcttcgtatttgttagtaaaaccgctttaagcgtgctgatggcctacatcatactcgtggctatctacggagggattacaagcaaccccaagatcatcttcatgcagggcggcttggccatcattaccctgatcagctgcatcttttga

SEQ ID NO: 8936 - DNA, 222 bp, synthetic construct
  source 1..222: mol_type = other DNA
atgttcaactcgaaattcctgatattaattcttggcgtgctaatcatcggtctggccctgtttgggtacttcggcctctcagacaatgcactggagtccgactccagcctgaacgaaagccacgacgacgtcgtgtatctctggatgttggatgataacgataatctgaagctcatccccaccacagaaacgtactctgaggggagcggaagtaacagttga

SEQ ID NO: 8937 - DNA, 1029 bp, synthetic construct
  source 1..1029: mol_type = other DNA
ctcataaataagcgcttcatcctggtatttgtaatcatcatgatcctgcactgcagtgcggtgagtgcatatgagaattatgacgacttcgtgtttaataacatcaccatcgacgatagcgggcatgacgataccaagctgattgacgaaaagagcttctactattatgaagaggactcggggtacctctccgacaacattgtggggggcaagaacatcaagaacactaccggagtcgtgatggctgatgatgagtatagttgtggtgcagcctctttcgccaccgttctgaacaacctcgggaataatattaccttatacgaagctaagatcgccactaataccactctgaacggcacgaccatgaagggcataatcgatgccactaagaagtatgacctgatgggagtgggagtgaaactggagaccgttcagctgaaggagaactatattgtgaatatgaacatcttgggcatcacgcactggtccgtcgtgaaggaaattaacgaggagttcatcattcttgccgactctaacttgggtaactataaattcgatatcatggaatttaatcaatactacacgaaccagacaattgttatccttaataaacaacagtataacaaccacatcagcatcgtctcaaacaatacgaattacatcagtaacattgaccagaagtacatctcggggaatggctacgccttctatgtcagcaaatctatgagctacatcaacgccaaccccaagggttacgcatttaaatacacaatcatagtacccaaatggggcggaaaagtcgtgaagctatccaccaaaaaactgacaaagcaccggataacagtgaaagtgatatacaagattaaggtgtactccaaatcacactttaagggaaaagtggagaccattcatcagccagctattttcaatctcgctcataaagcgggcacaaagtttagcgtctcaaggcctacatccttcccgatacagagcattaagtacactgtttcctactctcacttcccatga

SEQ ID NO: 8938 - DNA, 1512 bp, synthetic construct
  source 1..1512: mol_type = other DNA
atgattctcgccgtcgcatttcccgagtccttcagacaaatcactaactcaatcagggattttctaggcatccacttcggctggttttatctgatggtggtgttcttatgcgtcgtcattagtgtcattgtgatattccatcctatgggtaaaatccgactcggggaccccaattcaaagcctgagtatagcacgttcagctggatagcgatgctgttctcggccgggatgggcatcgggctggtcttttatggagccgccgagccactgagccactacgctgttatggctccggagaccacggtctttacgcagcaggcaatgcttgacgctttgaaatacagcttcttccactatgggattagcgcctgggccgtttacggcatggtagccttggcaatcgcctactttaaatacagaaagaaggaggtgcccaacatctcctccaccctgaagccaattttcggcaagtatactgaaggaaatatcgggtacgttgtggacgccctgacaatcttcgccaccgtggtgggtgtggccacttccctcggattgggtgcagttcagatcaacagtggattaaactatctgttcggtataacacagagcatcaatgtgcagattatcatcattatcattgccagcatcctctttctaaccagcgccgtctccggcatcaataagggggtgcgtatactgagcaatacaaacattcttctggctattcttctgatgctcattgcatttgtgattggacccagcctcgatatcgccaacttcttcattgaaagtattggcgcttacatgaatgacttcatccggatgagtttccgcacggccgcaagcggtacagtggctcagcaggggtgggtccaaagctggacaatctactactgggcctggtggatttcttggtcaccttttgtaggggtcttcattgcgaacatctccaagggcaggaccatccgcgaatttctcacttacattctactggtgccaagcatcttttcctttgtgtggttctcaatattcggcaccttggctatgaatgggactacccctggaagtcccatcatcaagatgccaatatctaatatgctgttcggaatcttcaaccaatatcctctggcgatcatcctgtccatattggcgattatcctgataatcatatactttatcacaagcgcagattcagctaccgtagtactggccatcttatcggaaaacggcaacgaggagacctccaagaaaattaaagtgatatggggcatcatcctcagcagtaccgcaaccatactcctcattaacggcggacttgacggcctgcagaacattctgattattactgcgtttccattttccatcatcctgatgcttatcgttgtgagcgtcttcaaggaactggtgtatgagaaagacgagatgcggctgtttgtgaaggctgaacggcatccgacagtggacaggcccttcaaatcgtacgagaaccagaataaggaggatgaagagtga

SEQ ID NO: 8939 - DNA, 402 bp, synthetic construct
  source 1..402: mol_type = other DNA
atgaaaatcttcctggatagctctttcctgatcgccctgatcaatgataacgattcattacataaaaaggcactggaatatgtcaaactcactgaagacaacgagtgctacattagcaacctaattattaatgaggtgataacaattatcgggaacaaacttggcctgaccgtggccatttcctcctatgacctcctgacgagcgtattcaacattgtgaacgaatacaagttggctgattttaatagcaaggtgatgcttatctacgaagtttacaacacaaagctcagtttcaccgactcaagtataatacacatcatggagaaagagaagatcaataacctcctgtcgtttgacaaggagtttaagcgggtcgaggacatcaatctgatctccttgtga

SEQ ID NO: 8940 - DNA, 237 bp, synthetic construct
  source 1..237: mol_type = other DNA
atggtgaatatcggcaccactaaaatatacaaaaacaaccagataaccatccccagcaaaatcaggaaagagctgaacatttcgaaggaaagcgtgattatttggagtttgaacccggacaagacaatcacactcaaagtggagaataagaagccatccgtcaaggatctgatcgggcttggaagctccaaggaagtcacgaatgccgtagacctaaagcggtcactgtatctctga

SEQ ID NO: 8941 - DNA, 333 bp, synthetic construct
  source 1..333: mol_type = other DNA
atggcagaatacacttccatcaggatacgcaaggacctagccgagcagatgcaaatcataaaaaagcagaacaactacaaaagcattaatgaacttctcgagaagacgctcgacaagacagtaaacgagaacatggaagtgatccaggagcaggccctgttctatattggcgaaacccccatcacatggacagagctgaaacagagcaccaatgggaccagatggaatcagggaaatgagaccgtcactatcctgttcaaggataaccaaggcgcttttatccggtttgaatatgagaacgaggtggaggtggaatactaccacttcatttga

SEQ ID NO: 8942 - DNA, 1206 bp, synthetic construct
  source 1..1206: mol_type = other DNA
atgatgaacattgaaactagagaatcacttttccaacccggacagccagtgagcgcggatcgcttcaagggacgggaagagatcatcgaagaaatactaaaatattttcctagtgtcaaatccggtaacccccaccatttcttcattacgggaaagagaggcatgggcaaaacctccctcgccaacttcatctccgactttgccaacaaaaattactctatgatcacagcccacatcatgaatgacggcgtccacagcatagatgaactgatagtgcagatcattgaggggattctgaactccatcaagtctgagaagtggtccgaaaagatatttggatttctggaggaccacattgaatcagtgggtcttggtggcatgaacatcaagttcaaaccctcaaatcaagagttaaagaacatcaaggataactttgcattctacctgtctgatctggtgaataattttaaggacaaagatggcttgtttattgtcatcgatgacattaacggactgtctgaaaccccggacttcgccaattggtacaagagcttcgttgatacgctcgcaacctcggtggataacgccccaatttgcattatgctgacaggataccctgagaagtttatcaagctgcatgagcagaatccttccgtgaaccgcatatttcacgttcatgagctgaaccgattggacgacgatgagatcaaaaatttctacacagatatcttcttaatatatgacattaacgtcgaggggatggctttggaggcaatgaccaagtactcttcgggcatgccgaccatgatgcaggaaatcggggacgccactttctggtcagacactgatggcttcatcgacagggaagacgcctttaaaggcatcatcgaggcgggcaatcggattggtcttaagtacctccagcccctcctggaccagaaaatccgtagtgagaactatctgagcctgtttaaaaagatcgggaatgagctcgctgcttcccccaacagcacatttaccaaaaaaacatttagcgatgtactcaacgacaatgagagtaaggtgttcaaggacttcattagtagggctaagaagctcgggatcattgaactggcaagcagcaagaagcaaggggagtatcagttcacgaaccagctgtatccaatgtacttcatgatccagaccttcaaagaggaggccctatga

SEQ ID NO: 8943 - DNA, 237 bp, synthetic construct
  source 1..237: mol_type = other DNA
atgagcggcaccgatgagctgctcctgaagatctttttccggaactacgacgaggaagaacgcaggaacggacttatcgacaacaagaatagtcagatgatcgtgctgacgggcacaatgctgactctccaggccacattgttctccgtggggctactcaatgagtttgtgtacaacaaaatcataattaatcccgtcaaattctggatttatgcagtactgaacaacagcacctga

SEQ ID NO: 8944 - DNA, 345 bp, synthetic construct
  source 1..345: mol_type = other DNA
atggagaaagtgtattgtaccgagtgcggaaatgagctagaagggggcagcaagttttgccccaaatgcggcaataaggtcgatgacgaaacattcagcatcgaggtatccccatcaaagagctacaaaagttatatcatcattggatacattcttgctatcctcggcataatcctgccgattttggcgatcttcggcgccatagtgggattttatctgatttacaggaactacggtgacctcctgtccgggaagtttaataagacgaacgtgaacgccctgctcatcctgatcttctcgatctttgcaattgttttcatgttcaacgtcgggttcatacggtga

SEQ ID NO: 8945 - DNA, 516 bp, synthetic construct
  source 1..516: mol_type = other DNA
atgaagattggcgactttgaaatcggcctgaagaccattatcctagtgatcgttgctctcatcgtgatcttcgggataatctccttttttagcggaggtgactcagttaacgtcacggacgtgggcatgactgtaaactataactacaagactaacgtggcgtttacaattataccaacggacacaatcacggaggtgaataacgtgcagctgaagaacatcgaggtgacctaccacaatgggaaaacccagcacctcgaagatgtgacattcaactccaaaaatacctacgtgaaggataatgagtatgggttcaagttcgactataccatcagcgatgactgcattgacgggctggatgaatatgatttcggacacgcaacacaccatattaaaggagacatcgtcataaacactgtcggtggaaatgagaaagtggttggccatattgattacgacgtccccgcctcggccaccgtatacaagtacagcagcggcagtggcagcgtcatctga

SEQ ID NO: 8946 - DNA, 477 bp, synthetic construct
  source 1..477: mol_type = other DNA
ctcagcaaaaagatcttcgctatactgatcgtggtaatggcatttgtcagtctcgcgagtgtgttcgcagtggagaccacaactcacgatttcgacggcctattcaacatgagcgtgccctcggatgaggagtttgtaacacttgactccaatatcaccggcgccagcgtcttcggatacaacttcaactatggcgacccaatcggggacaatataatcgtgtattactttaatgaatccattgtggacgacaatgacacgaacatcaccgagtacgtcatcaacattctggatgagaacagcacctttaaacacccgtcagttgaggatggcttcactgtcctgtataaccagatggtgcagcatgacggaggttacatgctgattgcctcaaatgataacgaaacggaagtggtggggattgttggggataatttggacgacctgaagacatacgccaactccatcgaattttga

SEQ ID NO: 8947 - DNA, 279 bp, synthetic construct
  source 1..279: mol_type = other DNA
atgtccgaaaacgagagcgaaccaaacttctggagcctgattggttatattaaagtgagtccggcgcgcctgaattgcatcacgtgcatcggcactgagtacaaaatgcccaaggaaattgtggatgccaccggcatgcggatcacacagatctcaaacgcactgcacgacctcaaagaaaagaagatagtagtctgtcttaatgaggagaacatcaaggggaggctataccaaaataccgagctgggactccagctgttggaggagctcaaaaagtga

SEQ ID NO: 8948 - DNA, 552 bp, synthetic construct
  source 1..552: mol_type = other DNA
atgcagagggagatggacgagcagaaagagcagtacgaaaaaaagatccggcatgtggaaagtgtcaatagcgccctttctagccaagtactggacattcagaaccaattagataacctggccaacgcgaacgacctcaaacgcatccaggagtacatcagtggacacgaattggtggagaaatacaatctcgcttcgactattatcggctattacaaggaagatgtgaagaaagaggactttaccggtgttacggattattacattgaggacctgataacacaggccttcaataccacaagcgcattccagtctaccgcaatccgggacgagtattatcgaaccgacgacaattggaagcgcatctacagcgagattggcctctacgaacacgactacattgagagcaacgggtatgtgctatcaaagtcccagagtaagaagatcactgatgagctggagtcctactcaatcaaactgtgggaagataacgaaaaggtgaagaagtccaaagtccaatccataatcgataacatagtcctgagacactga

SEQ ID NO: 8949 - DNA, 996 bp, synthetic construct
  source 1..996: mol_type = other DNA
atgaaaatcataatcgacgggtacaacaaatcaatccacaagaaggataacatgattatcatagaggagaacagccaaactattgacgcgattaaggccaacatgatcaccgacattacaatcactggaaagggatatgtgacgtttgacgcccttaatctcatggcccagaacaatatcaagctgatggccatcaatccccgcggacagctaaactatattctggagtcacccgattggcggaatgtaaagctcaaaaaacagcagtacatgctaagtgagaacacactgggcctggagctgtcgaaggagctcatcaagagcaagatgaagaaccaaaaagcaaccctgacaacactcaacaaaaataagcaacttaaaagggtgttcaatcacaggctgaagatcgatgaaatgatagctgagcttgagaaaattaacctgaatggcgacaacgagaaaattaggatgaagatcatgggcttggaaggaaaggccagcaacgagtactggcgggccataaaatatttcattcctggcgaaataggctttgacggtcgcaccaaaaagccaacggacctgctcaactccatgctgaactacgggtatgcaatccttgcaagcgaaattaccaagaacatcttgtatgccggtctcgacccatactgcgggttcctgcattacgacatggataagcgaaccagcctgacctttgacttaatcgagccgtttagacagcagatcgttgataagaccgtgatcagcctgatcaacaagaagcaggtcacgaataacgatttggacaaacggaacaatacaataaaactcgaagcgcgcaagctgattgctaataagattctcaagaaactgttctccaccatcacatacaatgatgaaactgtgacttactccgatctaattagaaagcagagcgagaatctggtcagtgctttattgtacggggaaaaattcatcggcttctatctgcgttggtga

SEQ ID NO: 8950 - DNA, 270 bp, synthetic construct
  source 1..270: mol_type = other DNA
atgctggtaagcttcgatataaaatttaagaccaaccgggaaaagattgaaagagtgttcgagtgcctggggctaaggaaaattcagaatgaactttatataggcgagatggacaacaaggagcagaataacttggtggagaagatcaacgccatcatcaaggactatgacagcgtcctcatcatgcccatttgtcaaaattgctacctgaaaaaagaaacatgcggacgagagatcaagttccagaacgatctctaccgcgtgtactga

SEQ ID NO: 8951 - DNA, 1083 bp, synthetic construct
  source 1..1083: mol_type = other DNA
atgattgaagtcaacgagctcacggactacctcgacgaatacctggaggaaaaacaagaggtcaaaaacttaaccgaggaaacaatcaagaagcagaccttcaatatctccaaattcattgagtaccttgaaaacgagggaatcgatgagctgaacaacagcaatgtcaaaaaacagctacgacactaccggcgctactgcttgaagcaacgagggaataagcgaacaacggtcaagacatatatgatgaatatcttggagttcatcaacagtgaggatgtgcaggaggaaatacagcacgaccccatcaagatgaaggacatcatcgaagttaaagcagaagatcctgaaaccgccaaaaaacgcattgagaaaatctccctcacgtggccacagtctaatttcttcctcgatacaatcaagcagagcgggaacataagagactatgccatttgcaggacgttcattgacagcggcatgaggctgaaggagctggtgttgctaaacaaggacgatatccaagtgccgatagacgacaacggattttacatcctgcccgaggacaccaatgagtttattgatgtgtacctcagagcggaaaccactaagggggaactgaaagaccgtactacttttataacctatgatacccttgtgagcctgaacgacatgatgatgaacaggatcaccaaacttcgcaagaatactcacaatgtgtaccggcccgtggtgcagaggaataaggccgccgaagaggtaaatcgggaggagctgttcaccaatatcaagggtaaccggattggtaagcgcggcgtgcaggatattatcaagaagcatgcacgcgagtgcgacgagagaattgagagtgaaggaatcgattgtccagtaaactacggcaagaacgtgagcgttcacatcctgagacacacagctctgtcgcattatgctgagattctgaccgtggccgaggttcagtcaatagcgggccattcaaactcccagacaactgataaatatattcacatcgaccgggaacagatgaagcagaagctcaaagtcaattctatgaggtttaacaactga

SEQ ID NO: 8952 - DNA, 258 bp, synthetic construct
  source 1..258: mol_type = other DNA
atgtctaacattgtctacctctacaactatgtgctcatctacatttacgtgttttataaggaaatacacttccggcatatcaaatacttcacaaaccgcatccactccaaagacaacgacagtatgaagctctttttcgataatatgagcaagtacctgatcttctcactgatcttgctgtatctaaacgagcttaacctgataattatcattagctttgtgctgacccacatcaatgtatatgccttcaagaattga

SEQ ID NO: 8953 - DNA, 555 bp, synthetic construct
  source 1..555: mol_type = other DNA
atgagcttcaacattatctccatcagcctgatcgccgtggctctggccatggatgcgttcagcgtatctatgacgaaggggtttacacagaaaaacctaagcaagagccagatcctgtattacgggctgttttttgggggcttccaggctttgatgcccgttttgggatacttctgcgggaatgctatcgccagtatcgtcgagaccctcgcctccattatcggattcatcctccttctgggcatcggactgaacatgattcgggaaagtttgtcttccgacgacgaggagattactgatgtcttttcatttaaagaagtcacattactggccattgcaacctccatcgatgccttcgctgtgggaattgcgatagcactgctgaaagacccaatcctcatctcaagcataatcattggcgccgtggcattcatattcagtgtgtcgggcatatttatcgggaaaaagatcggtcactttgtgggcgacaagttccaaattctgggtggcgtgatcctcatactaatcggcattaagattcttctcggattctga

SEQ ID NO: 8954 - DNA, 342 bp, synthetic construct
  source 1..342: mol_type = other DNA
atgaacgcaaagagtatattctccatttttgtgttctttgtgatccttatcgcctgcaccaacgtcgccttcgctagcgagaacatcgacgactcaaaatttagtgaagagtctgatctggacgaagtggactccgacctggacgaagtagactccgacttagatgaagtcgattctgacctggatgatctcaatgacgactcagacctagacgacctcaatgatgatagcgatctggacgagttcgacgatgacagcgatttggacgagttcgacgacgattcggatctcgatgagtttgacgacgacagcgatctggatgagttcgatgacgacagcgat

SEQ ID NO: 8955 - DNA, 360 bp, synthetic construct
  source 1..360: mol_type = other DNA
tacaccccgcaccggaacacaaagttcaaaaaggcatgcaagttgctcaatattattctggtgcatcttcctccatactcaccacagcttaatcccatagagcaggtgtggaaaagcatcaaaaggatcacatacacgactttcgtcgaaaccaaagaggagttaattaaactgtttaaaaaggaatactataagatcatcaacaataagagcttctttaacaaatgggtgtccaagtacattctgaagagtaaggtatttaactataagctgcgcaccatggggctgggcctctctgagaagtatttcctggacatcatcatatccctagccatgctgaaatgtctcatgaagccctga

SEQ ID NO: 8956 - DNA, 195 bp, synthetic construct
  source 1..195: mol_type = other DNA
atgatcaccattaacccagaacttacgaaaatgcagaaggagttcgagcagaacttgaagaaaatggacctaaatctctcagacaaccaaatcaaagaaaagctggccctgtccgatctcgtgctgatgtttagcttcgtggatttctgcacatctttcgaccccagtgatgtcgtaaagttttacagcgactga

SEQ ID NO: 8957 - DNA, 180 bp, synthetic construct
  source 1..180: mol_type = other DNA
atgaagcagaaaaccaacagcccagtgctcttcaacgcagaggagatatataagacgttcttttgcaacggccggtgtctcatcgacctggatttccccatgacatttctgtacttcctaaataatattgcccaagacgacgataaaatcattctgatcaacgtcaatcaggaaaagtga

SEQ ID NO: 8958 - DNA, 2664 bp, synthetic construct
  source 1..2664: mol_type = other DNA
atggccgtggtgatgccggcctacaattccgctaagtacatacagaaggctctcgatagcattattgatcagagcctggacttcagggatatccagatcattgtggtcaatgacgcaagtaatgacagtacaaaaagtgtggtggaagagtacatcaaggaataccctaaaaacatcactttaatcaacaacgacgagaacaggggcccggcatactccagaaacgtcggacttcaaaacgtaaacgccgagtttgtgaacttcctcgacagtgatgattgtattagccgcaatgcattcgaaaaggcatatctgttcctgaaaaataacgaggagatcgacattgcttcaattccaatctattattttggtatcaaaaacaggccccacaatctcaacttcaaattcagcaaaacgcaggtgataaacttggacgagcatcccgagtacatccagctttcaggaccctccagctttttccgattcgagaagctcaaacattacagattcaatgaaaacctgagggtaagtgaagaccctctactcatcaaccagatgctgatcgacaaccctaacattggcttcataaacggggctaagtactactaccgtcaggatactcttcaaaatagtctgattgctacgagcacaagtcacaagtcttacttcacgtcccgtgttgataattacttcatcggcctgattaattacgcgattaataagaagggctacgtgcccaggtttatccaacacattttgatgtacgacctgcaatggattgttgagatccggtttatccacctgctcctgagccagagcgagattgatgagctttacgataaaatattcttcatcttaaagtatatcgacagcgacgtgatttatcatcagctgtctcttccaatcgagctcaagcaccacctggccttactgaaggatcatgggactgcctatcgcctcaataaggacaatttccaggaggacttcaacttgaacaccgtatatatcgacaattacgagtttctcgacaaggataagatctacatctcgggggtcttgactaactttttgcgcagcaccgacgtgtatgcgatcgccgacggcaagatttacaacaccaacaagctgaatttcacccagcggcggaacttttcgcttgacttcgactatgggtacaatcacagcttcgacgtggtgctaccagtcaagcctggcatgaagatctccttcaagacgaacgcctctaatctgttgattgactataatcagacctcaagactgagcggaacttcccggtaccgcttttccaaggattatctgagcatcgattgccgcaaccatatccagattatcgagaagacaatcaccaaaggagttaagcttgaactgagcgttctgaagcagattctcaaggagaagaaacaggggtggcgtacaggtatcctcttacgcatattgtacttcatgttttatttttacttcaggaataagcacatctggatatttatggacctgccgaatagctccggggacaacggatatttcttgtttaaaaaagccattaagagcgataagctgaagaacattaaaaagtattatgtcttctcaaagtccaaaaaccttcatgagacattcgccgagcaggaaaataaatatgtggcaagttccaaatttatgaaagccagaaccctgagcggctttataacccccaatgaagaatttgaaagactcaagaaaataggcaatgtcctacagtacaaatcaatcaagcacaggctgtatctgttattcgccgattacatcattgcctcccacccagataacggaatcatctaccccttttggggaaactaccaccatttgtcggggctcgcccgatccaaaaccatatttctacagcacggtgttacaaaagacgatatctcctactggctcaaccggtacgacaaacggatagggctgattgtcaccgtatccgacctggagaaagaatcattcctcaaccccaagtacggatatgacgagagctgcatccaggtccttggttttccacgcttcgactttctcaaaaagggcgaggacaagaaggaaatcgtgctgatgccttcttggcgaagacagcactctcaactcagtgaggacgagttcatccagaccgactacttcaaatctataaacgaactgatgaataacgagtatctgattaaattccttaagagcaagggctacaggctaatattcaaacctcaccggaatgtgttgaaattcattgacagcttcgatatccccgacgaggcggaactgggcatcgagatgtcatacaacgagatattcaaccatgcgtcactgatgatcacagattattcgtccgttgcattcgattttgcttacctcaaaaagccactgatctattatcaccatgacgatgattatcactttaacctggatgacagttactttaagtacgataccatgggctttggtcccgtggctacacaaatcgacgagctgaaggatgaaatcatccgactggtcgaaaatgactgccagatggacgagaagtatattaagagagtggatgatttctttaagtacactgataaaaacaactctaagcgggtgattgataagattctggaatttgacgaaatgttttattactga

SEQ ID NO: 8959 - DNA, 519 bp, synthetic construct
  source 1..519: mol_type = other DNA
atgacattgatcgacatcatgcttaagagacggagtacaagaaccttcgccgacgagccagtcactaaagaggagctcgataaaatattgcaggcggcactgctggctcccacctcgatgaaccggaaaccgtgcaattttatggttgtggagcggagtgagactctacgacaacttgcgaattgcaaggaccacggcgcaaacctcctcgaaaacgccgataaggcaattgttgtgctcgccgacaccatgattgccgacacatggtgtgaagattcatccgtggctctgacctatatgcatttaatggccacggaactgggtctggggagctgctgggtgcaggtgcacctgcgctccaaggacaaaattcctgccgaagaggtggtaagggagatcctcaatgtggactcccactacaggatagtcggcatgctggctatcggacgctctgacaacatcccaaagccccacagcctagatgaactggataagagccgtatccatttcctggtctga

SEQ ID NO: 8960 - DNA, 396 bp, synthetic construct
  source 1..396: mol_type = other DNA
atgagtgagaagagcctgattgtgaaccacgacgctatcgacgaggacctcacagagaaattcattaacatgcacgacggacttccagtcctgcttatgaatattttggacgacttcgatgatggcatctggatcagaaggtatgagctatacctgaagtatccggagctggaaaacctggacgggaaggagatggaaatcacctccgagctcttaaaggaaggcaaaataaaagaagccgaggattttcagataaattacgccctggacttcctcgacaagcacccccaattcaaacagatgattgatggggtgcatcggcagggcagcaaggatctggaaatcttgctcaactcaatcaaggaggcattcatcggagattttgactacttttga

SEQ ID NO: 8961 - DNA, 291 bp, synthetic construct
  source 1..291: mol_type = other DNA
atgcatgttaaagacgtgctcgacgatctggacattagggtcaagctgccccagcactggtactccaccgacgtaagcaatgagtttgaggacgccgaacttgtgcgcaacgacgagataattaagatccgggtggaaggcgagaaaaacacaaaagttatcatcatcgatgtggatgacgggatgagtgtggtctcactactgccggataagaaggtcatcggagtgaagtacttgaaaaacaaggatgacttcgagtacattggcaagccaagcgaactctatttctga

SEQ ID NO: 8962 - DNA, 549 bp, synthetic construct
  source 1..549: mol_type = other DNA
atggtggataagaaagcacccgccgagggatggccgccaatttccggagactacattgtcggagaccctgaaagcccagtcgctgtgacaacactcgcctcccacatcgaagctgacctctctggcgcagccattgctggcccatgtaaaaccgaaaacctggggatagagaaggtcgtagcaaatgtgatctcaaatccgaatattcggttcctgatcctggcgggggctgaggtgcaaggtcacataactggtcagagttttaaggccctgcatgagaacggggcggaccctgacaaaaagaagatagtgggcgcaacgggagccatccccttcgtagagaacgtgcctcttgaaggcgttgagaggttccagcagcaactagaaatcgttgacctcatcgacaccgaggatatcggcaatattcagagcaagatcaacgagtgcattgaaaaggaccccggggccctggaggaagatcccatcgtcatggaagtggatgaggagaaccagaaattggtgatcgtgaacgatgacgccgaggattga

SEQ ID NO: 8963 - DNA, 354 bp, synthetic construct
  source 1..354: mol_type = other DNA
atgaacaattgccagagcagctccgtcaattggagtgaaaaggtgcgcatcctggacgaaaagatacggagagagatcggcctggaaggggagagcgaagcaaagcacattctcatcaaggttcagaccaaatccgccgagaccatcgagccagcgttcatagtgggagaggacgagactttcctggatctatttgtgctctcaccccaggagtcaaacattatttccacagccgtcctgaaaaacaacatccagagtatcggtgtaattggcgggatgtctgctgagaaaacggatgcctcggaaatccctgacaggccggcacttgacgatgctagcacattgtaccaatga

SEQ ID NO: 8964 - DNA, 609 bp, synthetic construct
  source 1..609: mol_type = other DNA
gtgaaacagaagctgattgccaaagcgcaagaactccggcagcacggctttacaaccggcgagatcgccgacgagctgaatgtctcgatggacaccgcccgatggttgactctgcagaaggcggaggaaaagaccgaggtccccgtcgacttcgccatcaactggaagagtatcgggggaaactccacccggcttagctacgtttcaggggctctgagcgatatggccttatcccatggtgaagtggacacggtggtgggtatcgcagtaagcggagtgccctttgcaacagtgatggctgatttcattgaggacatgacgggaattgacacctcaatagctatcttccacccgaacaagcaccgcaaaaatcaggactccagtgatgatgaaggcgccataagcacgaacttcggaaccgtggagggcaagaaggtggttatagtcgatgacgtcattacttccgggaagacagtaagggaggtgatccatacagttaaagacctcggcggggagccaacttgcgtcaccgtgctaattgataaagcagggctgtctgaaattgaaggcatccctgtggagtctctgatcaagatcagcagactctga

SEQ ID NO: 8965 - DNA, 954 bp, synthetic construct
  source 1..954: mol_type = other DNA
ctcaggacggtcaacgtcggagtgatcggggtaggggctatgggtgagaaccacgttcgggtctaccacaaaatggaggaggcaaacctggtcgccgtcagtgatgtgagcgaaagagccctgaagaagattgaaaagaagtatggggctacaggctacactgagtactctgaactccttgagaatcccgagatcgaggccgtgagcatatgtgtgccaaccaccttccaccatgcggcagtcatggaagccatcaagcatggaaaacacatactggtggaaaaaccgatcgccttcaccttggaagaggccgaggaaatgattgcagctgcgaaggaagccggagtgctgctggcaacagggcatgtggagcggttcaatcccgctgttagaaaggccaaggagctcattgacgacggagtaattggcgacatcgtaaccggatttgcaaagcgcgtgggtcctctaccccctcgaatcaaggatgttggcgtgtccatcgatctcgctatccatgacctggacattctgaattatctctttgaagaggagatcacacaagtgtacggcactatgaacagcatattggacgactgcgacttcgaagaccacgctgagatcatggtgaatttcgataacgaatcaacgggcattatcgaagtcaactggctaaccccatacaaacgtcgcgagttggaactgaccggtaccgccggcatcataagcgtggattatatccagcagagtatcgaggtgtacggcaaatttgcccaggatatcgagattaaacacgaggagcccttaaagtcagagcttacttccttcctgaatgcagtcgtgacagggagcgagccagagataacgggggaggacggcctgaaggcgcttaagatggttattgccgccaacaggtcctcgaaagaacacaaacctattagctttgatgaactgtga

SEQ ID NO: 8966 - DNA, 870 bp, synthetic construct
  source 1..870: mol_type = other DNA
atgattgtgggaacacgcggcagccagttagccttagcccagaccaagcaggtatgcgcctggctggaaaaaataacgggggaggctattgatctcgagattatcaagacaaaaggagataagatcaccacttcccaactatacaacatggactcgaaagggttgttcactaaagagttggacattgcccttcttgaagaggaagtcgacttcgctgtgcacagttttaaggacctcccgacggagctaaatgaggacctcgagattgccgcagttcccaaacgggagtctccaaacgaggtgctgatcagctcaaaaacctgggcggagctggggcccggcagcaagctgggcaccagcagcctgaggagagaagcattctgcaatcactacgagaaggaatttgagcttaagcctatccgggggaacatagaaaccaggatcgacaaggcgctcaacagtgacctggatgcaacaataatggctgaagccgggctcaagagactgaacctgacaaagtacatcaaagaggtgttcccaatagactatatcacgccacctgccggccagggtgccctcgcaatcatcactcggaaagactctgataagaaggagattatccaaaagctgaacgatcatatctccatgcaggaagtgcttgctgagaagatggtcctggaggagctcggtgtcggctgtcagtggcccattggcgctatcgcccgtgtgaataacaaagagtttaagctgtattccatcctgctgaccaaacaaggagaaatcttgaagaaggaaacccagaaaggatcaattaaggatgcggttgaactgggccgacgcattggagaacacttccagaattacgtgtga

SEQ ID NO: 8967 - DNA, 1419 bp, synthetic construct
  source 1..1419: mol_type = other DNA
atgaatcatcttgtcattgatctaacccacggcggagttaaaatcgccatcagcctggccaaaaaggggaaaaatgtgctggcatatgatatctacaacacgctcaacgacattgaggcgaaaatgttgtccatttacaaaatcgatctgatacagctgagtgatctggccagttttaagggcgacatgaacatcatctaccccatccacatgcctatcagctttaaagacattgctaagcacaatcccgacctcaactacaccttccagacccaccacgaaattatctgcgaactgttagaggattggggaggggacttcccaaaggttgaggtgactggagtgaagggcaagacatccagcgtgttcatgctcaaggagattctgatcgacgagaacccgctcattttatcaagccttggcgccatgctgtatgaagaccgaaagaagatcatgctcaagcagaatatcagcatagcgcctgcaaatatcaaggaaacaatcgacctggcctataaaatatccaatcccctctgtaagatcgccggcggcatcgcggaaagtgagaacccacgcaggtataactcggcaatttttgaatcatcccttggtgtgagcgggattggggatgtgggcgtactgctgaacatcgctgaggattacccgattgcaaaaggtaaatccagcgcaagtaaagccaaaagacaagtattccgctgcgggacggtcgtgtgtcagaaggaggcttatgacacatactacaacgacataaagcatgataaagtcaacacgttttccctaagcgacgaaaactcaaacctctatctggacgacgtgaaatacaccccagataagaccaagatggacatcatcttcagccacgtggaaaccatcaatggcaacataatctctggtgagattagcatgaccgctttcgcccctggtaagcataacgtgagcaatgtgttgggagctgtcctcactgccctaagtctggaaatcccaaaagacaaaattataaacgggattgagaactacaagggcatccccggcagaacaaataagaaacaaatcggcaatatcactgtaattgaggagatcaatcccgggatcaataccaagtcaattgaagagtccataaacatgatatgcaatctgaacgactacctgatcgccgttggtggagactacgggataacttgcgaggagattgatgaggagaaagtcagcgaacttctggacaacgtctcctgcaatattattctgacaggagatgttggaagctcgatccagaagaagatgtctaagaaatgtcagctgattgagaactacaatgacgtgtatgatatcgctttgaagaacaacaagaacctccttttcatctatcggtcagattacaggaagttgaagcagcggtga

SEQ ID NO: 8968 - DNA, 1872 bp, synthetic construct
  source 1..1872: mol_type = other DNA
atggatgccaaggacaaacagattgccaccgacctcgcctatgagattatccgggaggtgtcaagggtgattcgcccctacgttggcaagcccgaatctggtgagaaggtgaagatcggggctgacggcaccccaacctccctcattgacatcatcgccgaagacaagatgatcaacatcctcaaaaatgcccctgttctgagctacatcgtcagtgaggagatcggtgagttgaaactgggccggggcacgaagaggagcattaagctgacggatgaactccgccggactgaccttaaagaagatgaaatccccaagttcatcttcttagtcgatccaatcgatgggaccaataatgccatcaaggagattcctgctttcggtatcagcatagccgtctccagtgtcaaccaggggcgtcttgccactttaaatgatgtggagctggggttcatatccaacttcgccaatggtaacttttttgaggctgaaaaaggcaaaggctgctggctgaacaacgaggaagtccaccccagcaacatcataaacattagtgacatgacacttggcggatttacaaaaagcggcaccagccaagcttccaagttggtcgacaacgctcggcggatgcgagtgctgggctcggttgtgctggaattgtcttatgtcgccagcggaagatatgatgcgtttttggacctgagaggaagccgcatcattgatatcgccgcatccaagctgattcttgaagaggcgggttgcatcatcacaaacaagtacgggcagaaactcaacaatatactaagcatttatgagaaaaccattatcgtagctgccaacaacataatactccataagcagatgattgatatcctaaatgacaaccagaccgacttcatcggcaaggtaggaatagtctccagaattgaccagacccgcccgattctgtttgctgccaaaattattgactacctgctcacaaatggaagagaagtgacaattgaggagggcctggctcataggttgacggagctcaaggagaaccccgaaatcgataaaataatcaatgaggttaaggagaagcacccggagatggcggattcatttgaggatctcaacctgaatatcaatttcaagcagctgggagaaaagatctttgactttgattgtgacatggcaattatcctcggcggagacggcaccctgctacgcgcccagggtaagatgaatcctgagatcccactgttcggaatcaacatgggcacagtggggtttctgactgaaattgagacgccacacacattcgaggccctgaatagtattttaaagggagattattataaggagaagagaagcaggcttgtggtgtcgcacgagaacaaccagtacagtgtcatgaatgaggtagtggtaatgaccaacaagcctgcaaagatgatgcattttgagatccaggtggatggggagattatcgaggaagtgagggcagacggactgatcatttcaactcccagcgggtcaaccgcttacgcaatgtctgccggaggcccgatcgttgaccctaaagtggcggggttcgtgataataccaatttgcccatacaagctgggcgcacgacccttcgtggtgtcggactccagtgaaatcacagtcaaattgcttaagaaggggaaaactgcagtgttcgtgatcgacggtcaaatcaatgaagaggcggcatacgaagaagaaatcaagttcaaaaaatccgacaaagacgcttacttcatccgaacttcaaccaaatacttctatgaaaaggttaaagataaactgagcgaggggggcatccccaagatacaaggggccaacaacgagtcctcttgtcactga

SEQ ID NO: 8969 - DNA, 462 bp, synthetic construct
  source 1..462: mol_type = other DNA
atgaagatagctattgtgtctggcaaggacgaaggtcccagtaaactgaacgccttcgataacgccctaaccgatgctggaataggggatgtgaacctgatcaaagtcagctccatgcttgcaggcaatgcggagatcaataagctccctaagctcaaagcaggctcgatggtgaactgtgttctgagtgaggtgacaagcgacaacccaggagacgagattaccgcggtaattgccgtagccatcggggaggagctcggttgcgtggtggaaacgaccggaatcaatgaagacccgaatgagctgattgaagaagcagaaatgatggtcaactacatgatggacaagcggggcgtcaagatcaaaggggatttgatcgtggagagctccacagccactgtgcgcgagatcgcttcagtcgttgcctccgtcgtgtatctgaaggacgagttaatcgagtga

SEQ ID NO: 8970 - DNA, 354 bp, synthetic construct
  source 1..354: mol_type = other DNA
atgatcctcaataagtatctgtcaatgatcctctcggcatgctttttcatgctcctaatgatgattgtgagtgctgtgacagtggtgttctttaatgggggctccatcccctacgtgggcattgtttttgttgtcatcttctattttatggcacggatgttctacaactacctgcgcaacgacgaactgtacaaaaacaacaaaaattacaccagcgacgccccggatgaggagtacatgatcaagggtccaagggacgccaagaagatattcattatcttctgggtaataattgtgctgatcttggcggccgtctccctttggctgtatagcttcaacatgggaagcgtctga

SEQ ID NO: 8971 - DNA, 399 bp, synthetic construct
  source 1..399: mol_type = other DNA
atgagcacgaaagtcgtagagattaaaacactcaaggttggaaagtacatcgtgctggggggcgaagcatgcaagatcatcagctacaccacctcatcccccgggaagcacggcgcggccaaagcccgaattgaggcagtcggagtgttcgacaaccaaaagagaagtctcgtcaagccagtggataacaaagtcgatatcccgatcatcgataagcgcctggggcaggtgatttcgatccagggagccaatgtgcagctgatggacatggaaaactatgacactcttgatctgcccatgcctgaagacctaaaggactccatcgttgagggtattgaggtggagtacattgtggctttgggcaatatgaaaataatgaggatacggggcagcaactga

SEQ ID NO: 8972 - DNA, 867 bp, synthetic construct
  source 1..867: mol_type = other DNA
atgcttctcaacacatacgaaccatggaagttcgccttctccagtgagaacgagaacattaaagagaatagcttcgggataatcggcgtgccctttgacagcactacgagctatcactccggagcacggtcgggcccaattgtggtgagggaggccagcttcggtttcgagaagtacaatacgatcttcaataaggaactgaacaccgtgttttatgattttggcgatgtgaacgtagtgcccggaaattgcagtaagacctgccggatcatcgaggatacagtgaatgaactctccgacttgaaaattaaacctataatcatcggcggagaacatagcgcctcaatcggagctattaaggcactctccgaaaagtatgaaagactcaccgtcatacacatggacgcgcacagagacctggcttttgacttcatcggtgagaaatgtagccacgccacagttatgcgccgcgctcatgagctgggagtcaacctggttcagatcggcatccgaagctctagcaaggacgaggaggacttcgtcaaatcaacctacaacattcagacatttaagaacaaggacgtgcacaagcacatggacgcaattgaatactacttgaccaacatcgatggccctatttatatatccgtagacatggacgtcattgatccggccatcgcccccagtgttgggaatccaactcccggggggttattcgtctcggaaatggagaccctgcttaaaaccctgtcacataagaatgtggtgggcttcgatgtcgtggagacagcaagcgataggctgggggataacactgcggtggtagccgctaaactgatctacgattttctaacgctgatggactga

SEQ ID NO: 8973 - DNA, 1221 bp, synthetic construct
  source 1..1221: mol_type = other DNA
atgaataagagaaccattgagctgtcaggccatatcatcgatagcctgacgttgacaaagacaatgggcatcatcatggacaaggggggagaatttgacattcttgaaatagacgtgggacgcaagaaatccgatataagtcatgccaaaatcgaggtttcagcagactctcccgagctgttggagagcattttggacgaactgagcgtactgggtgctgcaatcgatgagatcaaggaggtcaacctcgtggccagcgtgaaagataaggtggcgccggagggcttttatagtagctcgaaccatagcactcatattttctacgacggggattggatacctgtggaggaaattgagatggactgcctggtagtggtggatgaagatgaaaagcgtgcttttgtcaaacccatcgccgacgtgaaggtgggcgacaaaatagtagttgggctggacggggttaaagtcacaccaccccaccgctcaagggacgagcagcaggtcttcgagttcatgaacagtgaggtcagcagcgagaagccactgatgaatctcatcaaggggattgcaagtgagatgaaggaaatcaaggcgaaaggcggaaaaatcgggattgtgggtggacctgctatcgtccacactggttccggcaagtacctggctgcactcgtcaaagaggggtacatcgacgtgataatggccggcaacgcccttgccacgcacgatattgagagcaacttattcggtacgagcctgggcattgaagtggaaacaggcaaaatcgtggctcacggccacacccaccatatgcgggccatcaacagaatcaatcggtccgggtcgatcaaaaatgcggtggaagacggcactctgaccggaggaattatgtatgaatgcattaagaatgatgtgccatatgtgcttgccgggtccatccgggatgacggcccgctccccgacgtcataaccgacaccgccgaatcacaaaagctgatgcgacactacgcccaggaggtcgacatggtgatcatgatcgcaacaatgctgcactccattgccaccggcaacctactccctagcagggtaaagagtatctgtgtggatatcaacccatccactgttaccaagttatccgaccgcggaagcgcacaggttgtgggtattgtcaccgatattggaacattcctacccctgctctacaacgctctccacgaggagtga

SEQ ID NO: 8974 - DNA, 1716 bp, synthetic construct
  source 1..1716: mol_type = other DNA
atggagtttacagcatacattctggacgtcctcacagactcggcatatcccgcaaggattaaaattgaggacggaattttcaaggagatcactccaatttccgccgactgtgagattgagttggacgtggaagggttattgctgccgggcttcattgatagccacatccacatcgagagtagcatgctgactccggcacagtttgccaaaatcgctgtaatgcacggcacgaccagcgtggtctgcgacccccatgaaatcgctaacgtgtgtggaatcgaggggattgaatttatgatcgaaaatgcaagtcaggtgccattcaacttctattttagcgccccttcctgtgttcctgccacttccttcgaaacatccggcgctgtgctggactcggaggacatcgaatttctactgaaaaaggatgaggtggtcgccctcggggaaatgatgaatttccctggtgttatagacggggatgtggaggtgatagagaaactcgagttggctcggaagtacaagaagcctattgacgggcatgctccactgctgagcggtaaggaactggacaagtacctggagcaatacataattactgaccatgagtgcagcaatttctctgaagctatcgagaagaagcagaagggtatgaagatcatggtgcgtgatggaagctctgcgaagaacatggaggcgctcttcgatttctcacaacggatcgaatacctccgcaaccaggatagctttggcataattccgagcgaagtgctggagagaagaatccacagccccatctttgactttatcgtaagtgacgacaagcaccccaacgacctgatcaaaggccatctgaacaaaagcgtgaaaaaggccgccgagctcggtgtggacatcatcaaggcgatcgaaatggtcaccataaaccccgcagcgcactacggtttggaagccgggtccatcgtcaccggcgccaaggccgactttgtcgtaatcgacaatctgatcgattttaacattctaaaaacatacgtggccggcaggtgcgtcttcgatggcgaaaaggttctgttcgatgctcccgaggttgatgcacgaaatagcatcaaaaccacgaagaagacggaagaggacttcgaagtctactttgatggggacgagtgcgaggttaacgtgatagagtgttataacggcgagctgctcacctccaaatctggggctaatctgaaggtgataaacggcgtcgtgaagcctgacatctacgatgatattctgaagatatccgtagtggagcgctatggcaaaaacaacatgaccaatgcgttcatcaagggctttggtctcaaaaaaggagccatcgcctcatcagtggctcacgactcccacaacattattgtggtgggatatgactcagccatgatggctgaagctgtcaacaccatcattgagaacaaggggggattcgccatcgccagtgaagacttcagtgagtcactctctctccccatcgccggacttatgagtaatgaggatgcattcgtggttgcaaataaattggaggtcttacataaaatgtctcaggccctaggatgcaagcttgactccccattcatgacaatggccttcatggcgctgcttgttatcccatctcttaagatatccgatctgggccttttcgatggagattcgtttgaatttattgatgtgattaaaaattga

SEQ ID NO: 8975 - DNA, 627 bp, synthetic construct
  source 1..627: mol_type = other DNA
atgaagacagatctggcgttaattggcatggaaaaaggtcgccagtacgaaacgatcatcacaacaaaaaattgcgagaatatcaagaatgccgccccaattggtgtcatctgcgcaggcagagacaagattctcaaccggatcttcaaaggcagtcagactctggagaacattatctctcagagagagttcatcgtaaatatcacgcacaatccggagctgtttaccgtgtcaaccattggaaagctgccccaggactacttcagcgaggacaactccctcaagtgtgcggatgcatacttcaaatgcgaagtgattagcctaaccgatgccatcaagcagtccgatcctattaagaagaacggcgccgctgttgtcatcaagtcgaaagtcacccaactcatgatcaacaaaccaactcaagccatgaaccgcggatttgggtacgtgatcgagagtctggctgacttgagccgttttgacatggctggagaagacaaaaaggaggagtatcttaaaaagttccgagaagcaaaccgggtggtgaccaaggtggggtatagggaggacataaaggccatgggcgaaataaaaaaggagctgataaggaaagggtataagccctga

SEQ ID NO: 8976 - DNA, 1011 bp, synthetic construct
  source 1..1011: mol_type = other DNA
atgaactacaaaatgtatgacgagatgatggagcagcctgaatcgctctcaaaaaccttcaaaagtgagctgtctaagatggaagatgtgtccaagttagtgagcgatgccgacaaggtgtatctcattggttgcggaagctcaatttcaacttgttatagtgtgcgggatgcaatccggatgtctagtaccaacatcaatattgaggtcttcacgggctacgagttctactacaacaagaagctagtggagaacgagaatagtgttgcgatatttaccagccagtccggcgagacagccgatacactggcgagcctccgcaggtgcaacgacctggggattcatacagtgtcaatctccaacgaatctgagtcctccatgaccaaagaagctatcaccagcattatcactcgatgtgaaactgagaccgcaatcctcgggacgaagacctacattacacaattggcctgtctgtaccagatactgttcgccgtaagtgactacgagaataaaaccgaattgctggctgagctgcgtgacctccccaagactctggagaagcttttggaaagcacggagtatgagaataaagccctagcccaggaatttaaagatgaggacatcctgtactgcctcggcagcggccctaacttcgggcttgcatacaagctggcaatgaccatgctgatggaaggagccatcaagcacgcctgccccctctatgctgctgaatttagacatggactaatcgagcgggctgaaaaggacgttcccgccatattcttaaaaagcggtattgagtctgacgaggtcacagataaagccatcgaattttccaagaacctggagctcaagtatcttgtgtacgacctggactcctacgcgggattggatcgcctgctgtcgccattcgtactggtcatcccactggagtggtttgtgtattatcttgctcacttcaatggggaagacccgggcgcaacaaggcacatcggcaaggtcagatactga

SEQ ID NO: 8977 - DNA, 582 bp, synthetic construct
  source 1..582: mol_type = other DNA
atggtcaaatctgaaacaatcgatgccgagtttagcgaaaaaaaggaaaaatttgatgagaagaaggaggaaacaaaggagagaatcaacgaaaccaaagagaaatttgatgagaagaaggagaagggcaagaacatcgcagataacgtaatcaatgatttctacaaaagtattgacgagtttaaggacagtatcaaaaacatgcaaaaaacagccgaccagcgctattcggagtacaagaagtcaaccgttcagactattgacattgacctggtcgagaccaaggagatgtatttcatcaaggcggcagttccaggggtgacgaaagaggatgtgagcatagaagccggggacaatgacctgactattgaaacgaccttcaagccctacatcgaagagttcgacgaagaagagggtgctgaggtcatcgtgtccgccatcaagtccggcaggtgcgtgaaaaccgtgcggttcagcaactccattgacatcgaaaagattactgctaaattcacaaacggaatcgtgaagataaccattcctaagctcatcataccgaaacacaaggtcaatgtggagtga

SEQ ID NO: 8978 - DNA, 1164 bp, synthetic construct
  source 1..1164: mol_type = other DNA
atgaaacacaatccttttagaaagcggaccggaatactgccctcttacttcacggggcgggagaacgaacttaatgaactgaacgaaatatactgctcgaccaagagaggaatccccggccacttaattctctacggaccgaagggcattgggaagacgagcctgctcctgaagttccaggatgaaatttccaacttcgatgacgtgtattccgtgaggatacctctgatggagggaaattttgacgacatctacacactgatcatcgaaaagtgctccgatgctctgaacatcaacattggtcatttctgggagaagattaattcacttggcattaacatacccctgattggtggcataagcttctcacgtgagattccaaagaccagccctgctgtggccttcgagaaaatcctgaacgtcatttatgacgagctagattcagacaaccccgtgctgatcctcttgctagatgatctgcagcgcatcatcggcgatgacgagacaatgaaaatcttgagcatcttgcagaatgccctggtcgaattaaatctgcagggaaaaaacattatgtttgttgccaccgggtctgaggacatcttctacaaaatccaggacaagctggacagcgcagtgcggatattcgagccttatctcatcgggcccctctcctatgatgaactgtgtgaagccattaacgttccaaacaagaaacagaacgtgagttttgaggaagatgtcctgaaggaaatctactacctgtccaatggcatcccatattacatgcaaatcctggcctacagttgctttgaagagataaatgcagacaacaaagtcaccatgactgagtttaaaaaggcctctgtacactccctgaatattctagctcagcgcgagtttaaggtattgttcagcaaatcgactacagaggagcgaaagatcctctgtctgatggcggagagtgacaagacagtgcttagctatagctatatcaaggacaacgcgaacctcaattcagagccgagcgcacttctcaagaatttgatcaacaaaaacatgattatcaagccaagtagggggaaatacaaattaaagaacaatcttttcaagctttacctccaaaacctgaggattaatcaggacactggcctcatcaacgagtga

SEQ ID NO: 8979 - DNA, 1029 bp, synthetic construct
  source 1..1029: mol_type = other DNA
atgatgatccccacaatccccacgccacaggagttgctcgataaaggcttcagccgcggcaaaaagcaagctgacctgcttcgggggcagaaaatccctaagcacctgaagggtaagagaattgaggagcggagggtggtcaccagttgtcaggtgatcaaagataagttaaagagcatcctggatgccgttccggaaattgaaagtcttcatcccttttatcaggattacattgatatcacagtgggcgtggacgacatgaagcaggcactgggtgctctgaactgggcctatggtataataacccagctcgagaaggaatacgggtccaaaatcaggaaaaaccctagcgaacgagcaactgcgattcaaaagcaggcctatggacggattgcctccgtggtaaacaagatcaaaaaagacctggacttcctagactttgctaaacagaatctccgcaatatgccaaccattgactttgatgccacgacgattgtgattgccgggttccctaacgtcggaaagtccacattgctcagacagatcaccggagccgatccccaagtggccaattacccattcaccacaaagggcatccagattgggcacactgagagacactggaagaacatccagattatcgacaccccgggactgctcgacaggcctgttttagaaatgaacgacatcgaaatgaatgccattgtcgcgctagagcatctggctgatgcaatcctgtttatcttcgatggctcagagacttgcggcttccacctggacaatcaatacaacctcctgaagcagatagagaagatcttctcggagatcccagtaatatatctttttaacaagatggacttggtcgaggatgcagagtacctgaaagaatacattgatgacgaggaaaactcaatattcatcagcgccatcgagggcgaagggatagacaagatcaatgcgaaaattgaccgaatcaagaaaatcgaccgcacccccgctgaagaggaggatgaagagggatattactga

SEQ ID NO: 8980 - DNA, 3516 bp, synthetic construct
  source 1..3516: mol_type = other DNA
atgctcaagttggaatcaatcgagtcaagcatctttgaggagctatcgaactccatcatttactttcagtacggtattaatatcatttcgacaggcctaaaccgggaaggcaagcccatcaaatgtcctatcgatgcaatcggcaccatcaagaacgatgataaaactgagtttgtatttatcgaagccaccaccacacaagtgaatagtttgaaagataaatggttaagtaagtccgatgataaacccggcgacattattaagacgtataaaaaggcaaaggagtttttcaacctcaacaaaaactcctccttcaagctcttcctgatgacaaaccgggacctgtctggggataaggggctggacctgataacagaggtggagaatgagaattttgatattcccctgaaaattgaaatcatggaacaggggtccatcaagcaattcctcgactacgacagcgacggccagtacttgcggaagaagtttctccagatcgatgtggaaaggctgtctaagccgttgctgcacaaaatctgtgacgagaacctgcaggcttatgagaacttcatcaacaccacgggattcaacaatctcatcgagagagaggagctccctagcattgaaaagcatatcagtaataataatctgagctttctgattggagagtccggatacggcaagagtgtcatcagcttccaaatactcaagcgccacatcaacaacggaggctatggtctctggatctctgaagaatttttgaaaaatagcagcaacctcaattacacactggatgaacttctgcaccagtactgtccaaaactggagaagaatagtggattcaaggccctgaacttcaactccaatgacaatttcctcctcattttcgatgacctgaataggagtgaaaaccctaaaaagctgatcgacaagatcatcaattggtcgaaaaacattaagtcggggaaggaaaacactgatgagaactaccacgataagatccggcttatttgtccaatctggcagaagaacatgaaaaactatgggagtaatctagacaacgactcaaatatcatcatcgagaagctaaaggacgaagacgggatcaagattctcaaaaacaccgccaaagacaagggcatcgtcctgagcgacctggaggtcaaaaactacctaaagaaactggataacgacccattttatattggtcttttcatcagcgagttgaacaagttcaagaattgggacgatctgatcaataacgcctttcagatcttcttaaaccgaaaattcgaggagctggatgaagaagagtttctgccgcaggactatgaaaggattctcctgaagctctcccagaacatgctggagaattatatcctgacccccaatctacttgaaatcgattcctggtttgtcagtgacagagataaaaaaattctgcgaatactgattaaggatagaaagatatgctacctgaacaataaccaaaacctgtactttattcatgacaggataaaattctactacctgatcagcgcatgcacaaagataattaatgataatcctcaatctgagatattcaaggaacctttctatgcagagatcattggggcttccctgtataacattgggaagaataaaaaattcatcgaatttctcgccaacaataaccttttagctcttttcgcgtccataaagtacatcgacgatgccaacgagaactacgaacaaatcctgggcatactgaccgagtggtccaacgaaaagcatgaatcatatcccagctttcaggaggaggtggtcaaaactttgtatacgtatgacagcgagctggtggtaacgctcttgggcaacattaattctcttttcaccagtattccttgttttagaaatggatcaacaatacatgggatcaagaaggcactaaacatattcggctacaattatccactgttcaagcagacaatagagcacgtgaagatccactacaaaagcaaaatcattgaggacatcaagcgcatattgtcgtctgataaactagacgacgacctgttatgcggtaccttcctgctggccggctacctcggctttgaggaactggaggagatcatcaagagctcagttaagctctttgagattaaagaggacaacctgtacatcatcctttttgccgccttcaggtgcataaataatgatatggattttattaagaaccttctggaaaaatgggacatgttcggaaagaaggacgacgagattcgatttcccttcatcgaggaactccggctgaccttccgcgactaccccgtcactgacaacgtgttaaattacctgggctttaactttcaggagttcagcaacattaagcattcaatctggtatatctgcagcgagctgaacaagccactcagctttaagatgactctggattacctttccgataacgagtacttgttcgacatccttccctttttccgcagaatccagatctctagcgagtcccggattttcctggagaactactataaaaaggaggacatcaagggtcacagcaaaaaatatgcgttccggttatgggccatgaattgtaacgagaacgatcttccaaagttacagaaaattgacaaggataacatccttttttctgagtcactcatcactcgcattagattgggtgacctcacggcgctcaattcatttattaagaacttcgatgaaaacgtggttttgaatgaaatccacaatgtgtggaacgacgaggccaagttgtttgttgaaaagtgcttcaaggatatggaacttaacgagaacaaggaaattcaggatggatatgactatgtgcatctgatgcagtgtcttgctaagattccgctggaggacgctgaatactacatcaagcaatactgggacaagattaagtactacagaatcttcattcagctgaacttttatttgtgcaccaacttaagcatcggcctcaataacgagctgttcgtggagatcaaacccgacgagaccctcttcgagcacttcaccatcaatttcctgtacatggaaggatacgacaaattcagcacagagtcccactttaacgaaataattcagtatctggtgtacttcaaaaattctgatcttgacctgatattccgtaaagctgaagagttggggtattgcaggtggattcgcaaagcctgccgaaatctggacaaaaatcagttctccaagtactgtaagaccgataaaaacatagtatccgacatggagctgtacgataattacagtttctggcagataaatttcgaaaacaactgcctcaacaagaacaggataaacaatatcctgcggctctatctcaacaacaatcagaacatcgaatcattcattaatgtggcaaaatttattaaagaaaacggaaatcgtgacgatttgaaaattctgtttgagtctaatatcaaggaagacaatatgctgtatgacgttgagtttagtgtcaagtgccgcactctggactga

SEQ ID NO: 8981 - DNA, 1311 bp, synthetic construct
  source 1..1311: mol_type = other DNA
atgattattatgggaattacagactatattaagacgagactcctgaacaaccgcgtggagcagtataacactaagcgcagctattgtggggaggacgagagacaacctcgcaccgatggaatcaacactggccttgacctgcccgatgcactgcccccagtgatcaacaagacaataaccaacgcccgttatgccgtgaaacttgacggatacacctcagggatcttgaaaaatcggatcgataaagccaacgttaatatggtgcttgttgataaggaaaacaaattgagccaagagcagaagctgactctgatcctctgggcgagaaaaattgacatctcccaagtcgctaagaacattctgcagggtggaatggtagatggggaaggtctgatcaagcctgtacagcggtgggacaagagcattggcaaatacattaaacccgtgtttttagaaataggcgcccacgggtacggcttgaaaaaagaatttaatgatgacaatgaggtgcagctatacctgcatgagatgcccaaggacattgttaatggatctccggaggagtttgataattatgtcagtgtcgaagagggcacactcacggtcaagtacgagcctgaggaagtgatcaacttcatgtacaatgagatatactgtgaagcccagagcatcatcctaaattgcctggatgacatataccacaagtgcaatctggaacgaaaccaagtggaacggatcaacaaggacaatattattgaggtaaagcctgcgatggacgcaaacggccagccatacatcaccgaactatcaagcaccgctaaggaaaacctgtatgcagactatggcaccaccgccggctccaatgtcgctatcgtgccaccaggaatcgagtccaaaatccttggggggaacaactaccagtctgactatacacgccaaacagaaatctttaggaacaatatcctcaggactttcgtcaccccgcagtctcaggcaggtaacgagaagtcgaatcagaacgtggccgagtacattaacgactcagctataacaggattcatcgttaatgtggccaacgaccagaaatgggtgctgaagtactgcaaccagctcttgaacctgcagctcgagttaatgggcatcagcgaaacgctggacatatatttcagctattcccgggatgatgtgctgcgatacatcatggaactgtcgtccgagggtgatgagatctacaagaattacctcagtaacttcgaagaggagcagcccgtcggggagaggattctcagtgagaatggcgtggaggtctga

SEQ ID NO: 8982 - DNA, 1899 bp, synthetic construct
  source 1..1899: mol_type = other DNA
atgaaggaaaaaatgggaatatatcaaagatacaacctgggccctcaacactatcacagttacttcgagttcgatttcaagaacaagaaggcacagctcatcagccaggacattacagaggatttccggaaggataatgccctgatttacaccgacgattctaatctgaagattgcaaactcccttctcatcgccgaagagaataaaatctttgacctcaatgaggatgactgccagaagctctacagcgaatttgacaaaattaagtactctcatgatgaggaaattcctggaatctggcagctgagcaacattacattcagcgagaaaaatttttacgacgacgccccggaaatatttaaaattcacgagagcaattaccaatacgtcaacaactaccccaaaaattggattccactgggcaacctgattatcgacctcctgggctttgacctactgaatatcaatctcaataacctgatcactcccctgtattataacataacgtcagagggggtgtacgaaaagcagacaaataataagctgaacctcaaaaaactcaacttcaacattgtgtcgtttgaggaaccattcaatccttttaacttttccatcgattcagaagatagtgactttgagaagatcattgaactattggaggattacggcgtgtataagtggtatgacaaagactacgctgaaaatatcatcgagagcgacgacttcaatgactttaagggaaattcatggttcatcgagttgatattcgagaacgggagggttctgaaccttcgaggcgacaatgcttatccagacacgtatatccatctcggaaacgaaatcctgaactttaaggaggacctgttgcgcattaatgagatagacaaggagcagcagaacttcattaaatccttcggtgagaacaagttagcgaaaaagaggaacataatcaaaaagattgagatctcgcagactattcttttggatgaccgcaagcactatgagttcactttagattgtgaaaacagcgtgattatcccttacgacaactatgatctttacgagccgcgggagcacatcagcagagacctcagcaagaagaattacagcgtgtccaaactgttctacgaaaacatcgtcaaagaagaaatcaagttggacgagcagaagctggacaacttcctaaatgagatcaatgagttgaagttcatcgatgagaagccccacatgtggttctatgacaagaactattatcagaaccttatcaccatccacacccccatgggtgagaaatcctacaacctgaccaacaactatgagctctggaaaaaactgggcagtctctttgaagagctgctaggcttcgacgtactgaacatcaaaaacttcaagaacataatcaatccattcgattacgacatttgcaatgatggtgtgtatgacaaggaaacgggggataagctgtcactggagtacatcgaatatgggcatgaggccgttttacattttggcatagggtacaacatctacgtggatttattgaaaggaaccacctccgggttgattgagaaggacgacctgtccaacgatgaaattgagaagatagtctctctgcttgagaagaaccgtgtgtatgaatgggtctttgatgagttttggaacaaggccatctaccataaatggtgcggcttcgatggctacaactggtatctgagtctcgttttcgaaggaaataaagtgcttaatattggagacgggaatgactaccccgatacctttgtcaacctcgcggaagaggtgatcgagttcagtggcaaggatatactgaaactgaaaacagtatacgaagatgacatcaagatctacaagaagtacgctgaacttcacctgaacggttga

SEQ ID NO: 8983 - DNA, 954 bp, synthetic construct
  source 1..954: mol_type = other DNA
atgcagtgctacaactgtaacggcatttataatgattacctgagctattgtccatactgcgggatcgagaaggtagagttcaacgtctgtagcaactgcgaggaaaagctgactaaggacattctggtgtgccccaagtgcggtggaaaacccatcgaagaaaccaacgaaatgaagtctgaccggttgaatagagaggggctcatgcacggaatgacaagttcccccagtgattactttaatgaggccatcaagtttaataagtacaatatcgacgcttgggtgaataagtcagaatttctgaacgatcgcacaatgcacaaggcgaaaaaatgctgtgacgcaggcctgaagatcaacaaagacaacatgaagctgttactgtctaaatcgaaggcccttaagaaagacgagcgcaggagcgatgagaacaatgcggagatcatcctcaataacttgctgaaacggtgtaaccaggaacttcaagaaaacgaattgaatgaggagatctggattctgaagggcgaggttctgaacgaactggacaaaaaggaagatgccatcgagtgctattccaaggccctcgagataaacccgaaaaatgaggagctctggatacgaaaggcattcctgtgctatcttaacaacgactattactgtgagatagagtcctacaaaaaggccattgaactgaatccaaccaatgagaaatactacgagaagattggagacgtgtatcatctttacatccacgataatgaaaaggcaattgaatattataacaaaagcttagagctcaaccctgataacaaacagctctgggacaccaaagggaggctagaaaaggaaattggcaagtatgaggaggccctcaaatcattcacggtcgacgctgagctgaaccctatcatgatggagcattactacctaaagcagaagtacttcgtgaattga

SEQ ID NO: 8984 - DNA, 237 bp, synthetic construct
  source 1..237: mol_type = other DNA
atgatgaggcacgaactttttgaagtggggtcctatgattatagtgacctcgatgaccggctggacaaaccggtaatatggagcgaagacgatctcaagctgatcgccgaaaactaccgcggcggtatcccattgaccagcgagcatgacaatatctacgtcggcatcgggaacaacattgagtacgagaaaggaaagctattcattgaggtgcccgacgagctggatatggagtga

SEQ ID NO: 8985 - DNA, 663 bp, synthetic construct
  source 1..663: mol_type = other DNA
atgagcttaatagatgtgggggtgactaaaaacccgcggaagatcaccttgctgaatagtgaaatcacgggaaacactggtgcaacaggaaatcccaatcccgcaccacagggacagccccagcccgcgcctagcaaggacgctaacgtcgctaccagcctcttgctggaaaagcttcagggcaaggacgtagagatcggaaagcttcaggacgagatcaataatctaaaggaagagtccaaaaagtatgatgagatcaaaaaagccattgaggaaaataaggaatttattgactctaaggacgatattctcaaagagctctctgaactgcgaaaagcggagaatgaaaggaagattaaagagtacgaggccaaatacaacttcaactacaacgagaacgcccaagacaaagagataatcgataagctcctgtcaggggatgtcgatatggaactgatggagaagctggccgaaaggcggatcaagattgaggctagtaacgacggctccacacctgggggtcgcaacccatcaaactccggggacgtgggggagaccggcgaaaccggcagcacgggcaacgaagacgccccatcgttcacaactcgcgaggagtataataagatactgaaggacatgggcttcaacagaaccagaatctga

SEQ ID NO: 8986 - DNA, 1959 bp, synthetic construct
  source 1..1959: mol_type = other DNA
gtggtgtcaaataatatcttcatctcacccatcgagtttaaagattgggagaattggaaaaacaagattaacaacagtaacgacaacgaagagctatgccacatcgcagaaacagaccgggaatggtacatccgcgccttagctgttaataagataaacgatgaaagcatattggcagatattgccattaacaacagcaattcgtacatatgcaggctggctgttagtaaggttcaaaacgacgagctcctgaaggagattgtagacaagagcccaatatacgaggtctgggaggacgcactcagccagatcgatgatgaatatatactgatggatttcgcagaaaatggacgcgatttccacatcaaatggcatgccatcaaaaagatcaagaacgagaatttgctagtgaatttcgtgaagaaacgcctgaaacatacccgaaaagatttcatcgacaaatccaagagctttgatgagagccgtgaatattcactgtgtacgatcgctgtagagaacattcacgatgagtcgctcttaaaagaaattgtcataaatgactataaccaggcgatgggcatcgaggccctaaagaatatacacaaccaggagtttctgattgacgtggccttgaacaattatgatgtgcactacaagctgtctgcgatccggaacattaccaatgacgacgtgctcatcgatatcgccaaaaaccacccccagcgattcgtgcgagagaaggccatagaaaaaatatctaatcaagccatcgccaccgacatcatcgccaatgatcatgaaattgaggtcgataagctggacatccaacacattgatgacagcctgctgttcaatcttgtgaagaaagacaacaactggcttcgcaggacatactttgtgaaggccattcagaacacagactacctgaaggaagtagtctgcaatgacgtggattcccatgtgtgcaaagccgccgtggagaagatccatgatgagtcctttctcaaagacctggttaatcgggatttcagttcagaagcatttgcgtgggatgtcatcccggctgcgctgaaaaacatccatgacgatagctttctgaaggacattgtgaacaacactaagtacggccgttacgctctcaagaacatcaccgacgaatccttcctcatccagattgcactcaattgtcgggacagccactgccgcagtgaggcgttggagaatatctatgacgaaagcattctgactcagatcgctctcactgaccctcagatgcacgttagacggaaggcagtcagtaagatctcgaatgatttcgccctcatcaacatctccattatggaccctgggttccaggagtacgatagaccatactgtgtcatctacttggtgcgccaagaggccgagtccagactgaaagtattacttgaaaatcccgacataaaaacgaacacagagtacgttgacgtgattcagagaatcaggtatgagcttgacgagaaaaggaagacatccacccagaagggaattatccacatcccttacaacgagatgaaagactttactcagaacaaaaccataatcaaagagaagaacaagaagcggaagatcacaaagaacaagagggacgaaaagtctaacctggaagtcgagatcaacaaactgcttgaaaactataagaatgacgtcctgatcaccattatatcatttaataacaagagcctgttcaagaagggctccattttcaacattgtcaaggagccagacaatccctatgatatggaggccattgctgttaaatccgacaacattaccatcgcttatgtggcaaacagtgtgagaacggtggtcaaagggaccatgagcgccgggagaatttacgataagtttggtgaagactgtgagattgaagtgatcttcgtgagggatcagattatcgctaagctgatcttcgactga

SEQ ID NO: 8987 - DNA, 273 bp, synthetic construct
  source 1..273: mol_type = other DNA
ctgattatccatttcacacggcagaaccactacgtgatcaagataataggcaagctgagttattacatcaatgactcacaggatgagaaaggcatcaagatcgagaagctcaaaaacaaaatgaggaactatgggctaaacgacctcgaatttgatgccctgatcaacaaattaattgacattggatacctcaataagagcaacgaatgcaatatttccctttgtgaggataattactacagcctgtatgacgtcctgaccttgcacaagtga

SEQ ID NO: 8988 - DNA, 1017 bp, synthetic construct
  source 1..1017: mol_type = other DNA
atgctgaacatcattaacaagaatcaggagattaaggaggagtttttttacctcgagaggaaggcgctgaggttctataaaagaaagaagtataagcaaagcttcgaatactataagaaggtgctgaaagccagtaacgagtttaagaataattccaatgaatcgcatttcaaatggtatgacgagatcctcagcaactgcctcaagaaatactctgacaattacgacgagttctttaaatgcatctattcaatgaacatagaaaattacgatgcctggttcgacaaggccaagttgtacggcaataataataagcgcaatgaagccatcatctactgttacaaattacttaagattcggccagatgatctggacctgcttgagttcaccggccacaacctctgtttctcacatagatatgacgaaagcctgaaaatctatgacatcgcactgagtatagacaaaaacaacaaagacctcattcaggacaagtggtatgtctactacaccagcgaccggatctacgatacactagaattttgcaaaaacctggagaacactgatgatattacgtccaccgattatcaggcattgggatttcgtttcgaggaaaaagaggagtacgaaactgctttgtggtgctataaaaaggggtttgagatcgaggagaccgaccacaaggagttcgatacggactctgtagacgctatcaagcgcatgctacttaagctgtccatcgacgactacagctacattaacgaattttacctggaatggattagcaagatcgagcacaagttcgaaaccacaaactgttccaagtgtggtggcaaactgactcccataatttacgggctcgtggtgggggatgaggtcttcgaggaacaggaaaagggcaacatcatcgtgggtggatgctccgttgatgagtcaagtcctacacactattgcaaaaagtgcgatgaagagtttaacttccgattcaacggactgaaaatagattacccgttctactga

SEQ ID NO: 8989 - DNA, 1668 bp, synthetic construct
  source 1..1668: mol_type = other DNA
atgacactccagaaaaaactgcaaatcaatattgtcatgagcaattacaaccagaggagcagtagctattcatccggccacgactacatcttcctggacaatctggccagcagctcttactccaactatttcagaagtgacttgaagaacctgaagatcaagacatccaatgggacggagtgtcaggtggtgtacatcccatcttatggatcgcaaggcgcagctatacttgccagggttagcgtggggcagatctcccagaacaccaagctactcctagacgtgcacgacaccggaacagcattcgctagcactctgtccacggggaatgaagtgttgatgtttgatgcaaacaacgatacatactcacagtttttcatgaactactccggtctgagttcaaacaatgactcaacagacgggggccagtttctccgcgctcgatttgtgcctaacctcgaaggcacttcgcccacggacctgttcaccaccttcgcgagcggccagcccctcgccaacaaccgtgtggttgtcgcccgcttcaagtacatcaacggtaacgtttttgtgaacgataatgcaacataccacgggtccaccattggaggcatcatgatgcagattgacggaactctcagccccgacgagagcaacgtaaaggctactgtcaactactgggggggggagaaagattattgcatgttcactggtgcgaagacgcttgtactggccagtagctttgatgcctacaaccagggaagtgacgaggagggaaactggaagcaataccattttcataatcgggttggcaccggaacctcgaatacatccgattatatagaggggttcagccgcaataatccgactaaaatttatctggggtgtttcaaaatgatcattgactatgacgtgaactcaaccatcggccatggccggggatacccaaccggcctggaacacacagagaaaatggatgtcatcgcctgcctcctggatgagggcgaacgaacatatgttaatgatgagcacactgcctggatttgttccaatcaatgtgctgtcggcgatatggtgactctggacatgtcttccacaatggagcacaccattgtgagaaaagcgcaagctggagaactggccttcggttatctgctgggtaaggtccaggttaagacctccggattaaccttagtggcggtggccgtgctaggtgatgtctttcggcttaagctcaaaaggccagtggctgaagacatattgccgaacaccagaatctacatcgacagtgccggggaatgcaaccccgtggaaggccatgaccttaggctgttgagcatcgtgaaccttcagaataacgaggatacggattacattagagtgtaccgccagatgtctgaggtggaaatgtatcgggagtctcagaactgcattgacctgggggactgcagtttcgaacaggatgagataacccacgttgtgaatatgatcgtgccttcagagagcaacatcatggcccaggcaaattacgtaaaggacgcagacggcgtcacctactgcgagctgcctgacgtggccatcgtcaataacgtccggttcgtatgggaggacaacaagctctacatggaatgggagggctgcgatgatggccagaatgtctattttatatga

SEQ ID NO: 8990 - DNA, 192 bp, synthetic construct
  source 1..192: mol_type = other DNA
atgaccatccggaagctggtggggacgctggagaacaaaggcccctacattgaccagagcacaggccactggttctactggaacggtactaggtatgtcgatagcgggtatccatacgccgtgaaactcattatcgaatttaagatcgaaaatggaatactatattactccatcacctgggaggcacagtga

SEQ ID NO: 8991 - DNA, 150 bp, synthetic construct
  source 1..150: mol_type = other DNA
atgaaatatataaaatacttcgaaaccatcgaagagtacgaatcctggatgaaggtggaagagaacgccgaggaggtctatcagagcgaggagaagattctggtggacggcgtaatcatcagccacacatacaaggaggaggaaatttga

SEQ ID NO: 8992 - DNA, 252 bp, synthetic construct
  source 1..252: mol_type = other DNA
atgatctacgagtttctggaagcaaacagaaaggacatagacattctaaccagcttccttgtaacagcgattccaatcgtcatgctctattccgaggctctgggtattacggagaataccatcccgtactgcattctgatgatcatcttgggaatcgccagtcactacgcaagccggataaggggcgagggggatgtggaagacgccaaacagaaggccaaacgcgtgctcggcttccccgaagagaagtga

SEQ ID NO: 8993 - DNA, 270 bp, synthetic construct
  source 1..270: mol_type = other DNA
atgaacaagatcaaaaagaagatcttcatatgcaactttaccaaaactattagcagcgccgtgctgacagcggtcgccatcaacatcataatgaccaacgcaacaaagtacgccctgatcgagggactgctccccttcacgcttgctatcgtaattgtgggcctcatcgatttgtacgagtataggtgtgagcgcgaggacaagattaatctagacgaactggaagagagaattgaaaaactggaaggcaatgtggacggggagcggtga

SEQ ID NO: 8994 - DNA, 357 bp, synthetic construct
  source 1..357: mol_type = other DNA
atgtggatggagaaaggcaagattctcattgcggtcccgacctttgaaaacataaaaccacagtgcttcaagagcatctatgggctgactaatcccaaggacttcaacctgtacttcgattatgtgaaaggctatgattgcgcacgggccaggaacgaaatcgccaaacttgccatcaaacacgactttgactacgtgctgatggtagattccgatgttagtgtgcagaaggacgcactagtgaagctgttggagtgtgagaccgacatagctctcggatggtacttcaagaagagaacacgaacggacgagtcagtcatctttgatttcggtaaggactacagcaatcaacgctga

SEQ ID NO: 8995 - DNA, 603 bp, synthetic construct
  source 1..603: mol_type = other DNA
atgatgaaatttatgatcaccatcaccatcaacaatatcgagaacaaggaactgaagtccaaactgaagaagataatcaataatgacgagctgctcctcgagaacatactgaatactataaacaaggagaagaactataacaagctgctgctcactttcaaaaacttgtcagagaaaaacaacacaattaaaaaactatacgaacgccttgaaaaaaatcccctcagtttcaagaccaaaagtaaatccgtcctcgagaaccttcagaagggcatgctgttggccttcttctcggacaatgagctcaaacacgagctgatcctggaaaagccaatcgcagtgattctggacaattacagcgtccaccacgcgatctttttcacggaactttgcaagattttaaatatggatttgattcatctgcctccctattccccgaagtataacccaatcgagcaagtatggcggacaatcaaggctaagatttctaggaagtacatctcaagcattgcccagttaaaatacctattcaagaccgaatttaaaaaggtggtggataatagcagcttttggaagaactgggaggaaaacttcctgcagtga

SEQ ID NO: 8996 - DNA, 489 bp, synthetic construct
  source 1..489: mol_type = other DNA
atgtccaaccaaaaactcatcaaggagtacctggggatcatttcggagatccaggcggagattaagaagctggagaacgatacacgagtcttgaacaagctttacgtgattcttgacgttttgcatgatgaaccaattccgtacatcgtggaaaagcacggtatcagccaaggaacagtctataattggatcagggagtggaatgaggggggcatggaaggcctgaaacgcaaaaagggctccaaggggcagtcaaagctaactgacgagcagctgatattactggacgagattatccaggaagagaacctccagacggcaagagaggtgaaggataaaatcgaaaaggaatttgaggtaaaatacagcattcggagtatagagcggataatgaagaaactgggatatagctacaccaaaccttacaaaatctatgccaaaatgcccgctgacgccgaagaacagctgaagaagaccctcgacatctga

SEQ ID NO: 8997 - DNA, 384 bp, synthetic construct
  source 1..384: mol_type = other DNA
ctctttaaaaccacatatgtatctaacttcggcgaaatcaaccacatcctgaattactgctatgaggagctcgagtggggagagctgatcaagttgtcaaacgagctgctggacattgaaaaaaaccatcagaacaatcggaggagtgacaatatccaatacagcgtcatcctgattgcaatagttacgctttgttcccagctgctgatttactattccaacttcaaggacgtgatacttttcattggcgggatcgcctttttatttttcctaagcctgatcttcaaggaaaagatttactacgtctggcagatcctcaagctggtgcccaaatttatttacaatttgatagtgctgctcctaaagcgcatcaaagatctctga

SEQ ID NO: 8998 - DNA, 993 bp, synthetic construct
  source 1..993: mol_type = other DNA
atgatcgaagggcactatactcagaagctgacaaatggagaatgtccatatgagctggtgtacttcgaggtcgacctgctcagaaatattatcgacaaccccaggtacgtgatcagcaacaactcgttcaagtacaatataagcatcacagagaaatatgacaatgatgagacacttgatgagaagtttaagtttatcttggacaatgtgggtctcggctttgatgaaaacaatgagcggattttcgcagtcctgctgaaagagctgtctgagctccaccctgagatgcaaaagcggttcagtgtgtatgaagtgaaaaagaagagttacgtcgacccatcatacatcaaatctatgaacgacggagaatggcccgaccccagcgtgttcagtgctatattataccagatcgaacaactgaacaacctctgctccgacaatgagattaagctgttcaaatccaactacaagaaaaagcccccgattgagtttaacatactggttctgtccaccaaaaaggagtatgacaatttcatcaagatctttgacatcatgctctccgataacatcaacaagaaattcttcgaagggaagttggatctcatcgaatttactaacaaagacggcaccaaaaagaaagataagggcaccatcacgttattcaaggagtggttgggggagattggcgttagcccagccaccatcaaaaagacgataaagattatcaataaagtacgtagcgagcgctctaaaccttcacacaacattcgagataacgaatttgacattaaataccttcagaagcagaacaaaattgtactggaagtgtacaataccttccgccttctaatcgatgagctatcgaggataaaccagatcaaggtcaagcattcaaagtggtacgtggaaaatagaatcgccatacagagcctggatgagattaagaatgaagacaacgagaactatcagctgaagatttgccagtccaagtga

SEQ ID NO: 8999 - DNA, 570 bp, synthetic construct
  source 1..570: mol_type = other DNA
atggacctgaactttatttcaatcatcctagacattattctcaccatcgtcacgggcttcatggcattcgccacgtataaaatggcccgcagcactaatgaatcggtggaagagatgaagaaaacaagagtggaggcgaacagcgctgaggtaataatgtactttaaggtcgaaaataacaggatgtacctcattgttgagaacatagggaacaccgtggcaaaggatatcagcatcgaggtcgaacccgaattaaaagacagccataacaaagactacgaacacctgaaggagatttcattcctgccgccaaattaccagatcaaagccttctttgatatgggatttaattacctgaaaaatgaggacaatcctgtgaagtacaagttcatcatcaccttcaccaacatctataacactaagataacccgggagtatatcagtgatttgagctatatcaagagtgtgtcttatctgacatccgagtccgactccattgaaatgtctctgactaaaattaaggacgagctcaagaacacaaatgattaccttaagaagcttaacaactga

SEQ ID NO: 9000 - DNA, 165 bp, synthetic construct
  source 1..165: mol_type = other DNA
atgaagatcaacgaagagacaaaggtgcggaaccagggcgagatcagcctcatcacaaccatccccaagacgtacgtcaaagccctaaatattaaaagcggggacatcctggaatggattctggatactgaaaaggagaccctggagctcaaaataattaagtga

SEQ ID NO: 9001 - DNA, 1002 bp, synthetic construct
  source 1..1002: mol_type = other DNA
atgattaaggttatagaactgtgtgccggggcgggcgggcttgcgcttggatttgaaaaagccggtctcgagcatgaggtgctggtggaaattgacaaggattgtgtggccaccctgaacaagaatagacctgattggaatgtgctgcacgctgacataaaggaagttgacttcacccagtaccacccagatatcgtggtcgcaggcctgccttgccagccatttagctacgctgggaagaagctgggattcgatgacacacgcggcaccttgttcttcgattatgccagatgcattaaggagacgaaccccaaaatgtgcatcatcgaaaacgtcgaagggttagtgaggcatgacaaagggcgaacaatggagacaatagtgaacgtcttggagaacgagctgggttatgatgtgcagtataaagtcctaaacgcagtggactacggggtagcacagaaacggaaaaggatgtttctggtcggaactaagaagggaatcatcttcaactatccgaaaaaggttaaaggcaatcctgtgctgcgtgacgccttgaaagatgtgccggagagtgagggaaccgagtactccgacaagaagaaggaggtccttgagctcgttccccctggcggctgttgggtggacctgcccgaagacgtgcaaaaggagtacatggggaaaagcttctattcgggtgggggcaagcgcggtatggctcggcgaatcagctgggatgagccatgtctcacactcaccacgtcaccctgccagaagcagaccgagcggtgccacccagaagaagtacggccattcacggtcagggagtacgccagaatccagtccttccccgacgactgggaatttgagggcggaattacttctaagtacaagcagattggcaatgccgtacccgttaaagtggctgaggccgtcggaaaagaggtgatcaaggcactcaacggcgaaaataaacgcaaggaaggccaaaccactctattttga

SEQ ID NO: 9002 - DNA, 729 bp, synthetic construct
  source 1..729: mol_type = other DNA
atgaataagtacgtcaccttcgtgagcgatgaaatctttctcgaggaggtgaagaaggttgtagacgcctatgcaacggatgaagacctgtcaaaaacaccttgggaggttctgagcaacagcagggaaaccattgaccagttcaagacactctttgacatttacagcaataggttcagcttaagtgagtggatcaactttgaaattcccagacaacatgataagacggcaagtaaccgggtgggcgatttccaccagaaccttctgggtcgggtggatgggtgggtcaatctgggccgcgggcacccatccggcatggacttgaaaaaggaggatgacaccatatggatcgagctgaaaaacaaatacaacaccatgaatagctcgtctctcagagacactcgattcaaatgcgaggagctcgccgagaaatatccaaatgctaagatctattgggcgtacatagtgtcccaaaactacgagtcattcgataaaacatgggtgtaccgcgacaataaagagaacgtggtgcatgaaatcaacgacaatattcgtaacatcgccggaaaggacgtgtatacacttgtcactggagatgaaactgctttcgagcagctgtttgacgccctgcccaacgccatcaatgatattaagaagtccaagcacatcttgaccccgaaggaccaggtagtcttcgaaaagtacaagcagctaatatttaaagactga

SEQ ID NO: 9003 - DNA, 495 bp, synthetic construct
  source 1..495: mol_type = other DNA
atggccgactccataattctcctggaagagaggaaggaggtgacaaccttcctactggacgaggggaccatcaccgcaaccacagtgacgactcccacaggtgaaactccagggtacgagtacgccggcaccaagataaaagtcgacgatgtggtgaccctctccgtcaatagtgacatcggaaaaccgactgtcaagaagtttacgggcgcggaaggcgagatcatcctgggcattgccgtgaacgatcccgttacaatgaccggagggaaacgaaagacagctatcctcgtgttggggcaccttttccggctgaaactggccagcggaattagcaacattgctgttaataacagaatagccttaaccagtacaggcgcgatcaagtctgatgagggcgaatatattgcaatgcatcctgtaactagctcagatgactacaagtacatcgaggtgttccgcccatatgacatcggaacgaccggttcgacttga

SEQ ID NO: 9004 - DNA, 939 bp, synthetic construct
  source 1..939: mol_type = other DNA
atgattaccaaaggaaatgataccaaagttcagaatgaggtaatagcgcagaccattactgatgaaactgctaagaggctcaagttagcccgcctctttccgaaacaagaaatcaaagagaacagcgactactacacatactttagacagaacatcaatctcgatgaggctatcaagaagggcctgcttggcgaagccaaagacatcgcccccggggcaagcttgcaagaactgaacatccgcaaacctgtgaccgacaccatcagtatcgatactgtggggggagtcttgaatgtcaataaggacgtgttcgactcggatatcgtgagttttgaggacctgctcggcgatgtggctaccgtgatcgcgaaccgaattgaatacaacatctacgacaccttaataagctcaccgaacgtgccccagtataacacaacgcagaccgatgacacgatggatgccttcgggaactttgtcatcaaggcccaggaggcattcaagggcaatgctggggcgggcgccgatctcaccataatggccgagtcctacaaaacactctcatacgtgaagcagttggcttactcctccaacaagctggttcagcctgtggaagacattaaggagtactatggtattgacaacatcgatcttctaggaacgacccaggccgacggcggatctctaataggggaaaaacagtatattggtttcgatctgcggaatgcaccactgacggtactgtattccaagtctagcggcactacagtcgcacccattacaagcgacgagaacattgccgacttctatcccatcattgagatcatgcggaaggacatctacgacgagctgcctcagtatacaaaactgttcatacaaagtaaggtcggcatcctgctgaataagccaggacttgccctgaagggtacttgcaggccatga

SEQ ID NO: 9005 - DNA, 927 bp, synthetic construct
  source 1..927: mol_type = other DNA
atgctgacaaaaggaaatgatgctaaggtacaaaatgaggtgatggcacagattgtggccgatacttctgcaaagtggatgaaatttacacgtttattgccaaagcaggaaattgaagagaactcacagtattacacgtacatgtctcaacgcgtcaacatagaggaagctattcagtcgggcgttctcggcgaagccaaagacattgcgcccggcgccactcttcaggagctgaacgtccgaaaacccataagtgagacgatctccatcgacacaattgggggcgtgctcaacgtgtccgctcaaatgctggattccaatctaatctccgtgaatgacatgctgcaggatgtgggaatcctcataggcaggagcattgaaaaggcagccattgacatgattatgaatagttctaaagtggcgacctacaacttcgagagtggcgatgacactggtatgaccatcctcaaagcccaggagaagttcaaggaatcggctggtagctatgccaacctgaacagcatggccgtcagctacaagtctttgacaaccctgaaatcagacatattcagtagcaacagacaggtcgaaccggtggagcttatcaaaagctattacggggttgacaacatcgatatcctgggaacagcagtatgcgacggcgggtccgagatgggggacaagacctacatcggtatggactacatcaacccaggaatgaagctactttactcccgcacgaccggcactaccgtggctcccctgggacctgacggggagatgtatgatttctatccattgattgagtttatgagaaaggacatcagggatgagctgcccatgtacaccaagctctttatcctgtcaagcgttggagtcctgatgaatgcccctaaccggatcatcaaggggaatttccgggcctga

SEQ ID NO: 9006 - DNA, 417 bp, synthetic construct
  source 1..417: mol_type = other DNA
atgaaactgatcctcgatacggaaaattcacaccccactaccattactgtcaagggaaaggaaattacacttctgctcattgagtctagtatactgattgatagctcccagatcgccaagatcttcgacaaaaaggagaagacagtagttaccaaagtcctgaaaagcaaactggagaagtacgagaccgagaacgtgaagctactcaagaactacggcttgatgcaccctgacgcagtgaagccaagaccgttctatgacttaaggcagatgctggagggtcccgcttattactacttcaagaaagaagacgaagtggatataatcaaggtgatcatccgagtcgccatcggcaaacatcgggagtggattcacaaccggtgcatcgacaagtttagggtggggtgtgtgcgctga

SEQ ID NO: 9007 - DNA, 1638 bp, synthetic construct
  source 1..1638: mol_type = other DNA
atgctgggtatcaaagagtttctcaagccttccgttttgggatactataaacgttgcgaagtgactcagatcagcttttacaaagacaaccacgaagaggagagcaacttgttaaccctgtttatcttcgacgaagaaaatttccaggggaggaacgaaatcttcttgacgggcaagaagaataagatcaactccaagtacaaactgtgcatcaaacggttttacctgtcgattgaagaaagcatcgagcttttcaactgtctgaaccagggcgtgagcaagaccagctccctcaagaagtacatttttaatgacaaccccctgaagctgctgcctcagcagttcatcacaaccaatgaggacatcagattcaataagatccttaaaaacaacttccattccgggagctatatatttgagttttttgacgaagaaaaggactttgagttactcttcggcctaaataagtcgggaaggttgaaaaagattagcaagatgatcggggaagttgtcccaattgatctgctcagctgtaccgactgcctcggaaactacatcttccagctgcccatcaccatcctcaatgtgcacacaaacaagaataagaacatccttggcatcgatttttactggcacaacaacttgattaacgaggtcaagcccaactgcctgatcaacatctatagtaaggtggacaacaattatctattcgatattttcgaggaatataacaaagaaaatcatcagaaaatcaacatactgccctccggcaagaattatgtgctgaaaatatggaacaacgatctgaagatactcctatacgaaatgaacagtaaatacttcgaaaagttcagggtgtcactgagtatgagtgagtgtgagcggaagttcattgaggataacggagaatctgaggtcacgatcatgagcaaccccaaattgagcgacgacattagttatctgaattaccgcaacgatgcaatgtataagaagaacttgaaggagctggaggataaccttaaattcaacacatatatgcagaatgagaacgccctggaagacataaaaactctaattaatgagtacgggaaaaatggtgtgaacatcattgacccttacctcgagccgaatgacctcatccgaacagtagtccacctcaaattctacgacgcgccaataaaggcaattacctctttaaaaaattcattcaatgaactgctcattatgaaggaaatgctggagcaacttccaaaccagaatatcgtgcaaaatttcaagaatgtgctgaatgagaaaattgagaaggagaaaaagtctaaccttgagtgcatcgaggattacaaaaaggagctggacgagaaaatcattaatagctgtggcctgaacctggtatttcgggcccagtttgatagatacggccaaccattccatgaccgcttcctgattttccctggagatgacgagaagctccttgaacccatagtcttttccctgggcacttcactgaatgcctttggtaaacacttccacatactccaagaggtttcacacccgcagcatgtggctgatgtgtttgataagttatgggggattctcgaacagaaggaggagtgcctgatctggaactccaaggagtga

SEQ ID NO: 9008 - DNA, 1521 bp, synthetic construct
  source 1..1521: mol_type = other DNA
atgggggacatccggactaaacgcggagtgagcgacttggaatttaaaggcatcattgataacttcgacgagtttaacatgattctcgttaatgaagagctgatactcttatttgagagtctgcatgacttttccttcgacgaacttatgtactttgaagaccccctccattacgaaaacatcggtgtgcagaagatcatgagccagattgatgagatcataagcgtgctgttctacaacattgacattaaaacaaccgacgatgtcatcagcatcgtcaaaagtgatattctattgttcaagcgggctatggaccagatcgatctgaaatactttattttcttctcgtacctaaactcctatttgaacgttgatgtggactatctcatcaaccactttaactacgaactaaacatgatcaagatggaggaaaagatcaatgagctgttcaatcaaattcaggtgttccctaagccgaacgacaacaacctctcaccacttctgaagaacgtgctcttcaagtccctcaaaaaggacgacatcatgcactcctcactgaagctgctgaacatcagtaaagaccccttcattttttacaacttcaagatttactgtccaaagctgctcacttccatgctgatacttattaagaagataaactatgatttctttctgcggaatatgtttgacgtaaacaacctgatcatggcagtacttttctgtaaagaactcgacataagcgagatcttagagtgctactacgagaacgacatcagcaacattgatctgctgttcacctttttgaagaagtccatagattctaatgagttgatagatgataacatcgtgttcatcaaggacatcctacttgacatcctcgagctgaacgagaacctgtttcgtaaaattatcagattattcaagcacaaaaagctctttaatagaagcatcgggctcctgctgtccggcatcaacaaatgggaagtggaactcatcgttaatgaatttgaccttaacttcggggccaataatcacctaatcaatcttagggagaatatcctgatcaacctcgataaaaagtcggacaactttaaattagtcctgaaactggtgtataagaattgggatctcaacctcaattctctgattgatgacgatgagaatggatgggatctgctgtgcagtgactttaacagcttcatcctggagtattacaatcaattttatgacgacgacatgctggtcgaggagatgaagttgaatttcaacttccttgaaaaaatcaactcaacctggtcatctaacttcacaaattacaagaataggatacacgtgtactacacgaaattgtatctgttgagtagcatttataaaaaacgcaatattaataatatagagatcctgggctgctatgagaatttcttcaagaacaagtacctgattgaggtcctgctgcgagataaggccaagaagagcatcattgatttcaaaaaggattataatatgatgaagattcagtga

SEQ ID NO: 9009 - DNA, 1488 bp, synthetic construct
  source 1..1488: mol_type = other DNA
atgttcaaggagggcatcaataccatcataatcgaaagttatgatgaactggcatgcatcataaagggcaagcatgaaaagaacaagatggaccttcgtgaggactttatattttggggcctgagcaacatcgagtatgaactgatcccttctgctctccggcgcaacaagctgaaccagcttgaaatcaatgagctgatcgagtctgaccacatcttcaaggtgtcaatcgatgaaaatgatgccaaaatgttcaacctggagtattccgagtcaataaatgatggggaagttatcattggcgtcgacaaatacgggaatctgattcacgacgtgaagtcggattacaaagttctcgaatgtgacctgcagagagagcgcgagaactaccttctactgaagttctttaattgcgcagacaagtcaggtctgaaagttaaaagtgagggcttcctgcgcgagctgattcacaactatagcagtaagcgactggaagagtactggctggattttgacattttagagaccatctccctggcccagcactacggtctgccgaccaaagcgctagattggtcctatgactacaaggtgagcctctattttgccgtgaaagacgtcatcgaatccaatctgagttccgatggcgtcttgtgggccctgaattacaagctgattgaaaaccacaacttcaatgaggaatattatgtgaacctccacattcacaggcccgagtataacacaaaccctaacttaaatgctcaaaaaggactcttcactttcctggagaggtacgtgggagattacgacaagccactgaacaaaataatttcggacgaactgaataaaactcttgaccaaatgccatgggacaatctttacgaatctaagatcaggacaatccccgatgacatatccaaaaatgacacgattttctataaattcattattccaaaggagatcaaacagaacatcctcaacgagctgtatctcgaggggtactctgaggagtacctctttcccggatacaagggagtgtgtgaaagcgtaatcaaccgggtcaagctcaacgagatacttaagaataacgacgaacatatcaaaaagagcatcctcttgtccgtggactggaacttgaacgaaatcattaacaagaatcagctttacgtcttcgtaaacctggatttcaaagaagagatcgataagatctttatttaccataacaatgacgtggtcggctactttcggggaaacgagatcattaaagatagcctaaacgtgttatgggaacagttcggggagcatagcggtctgagtgaggataagtttgatgagtgctttaaggggaacgatgagtcattcgccattagaattaacgatttgaatatctttaagcacagcattaaactctgcgacttcgagttggagaacgacttctgtttcgtggaggacaatgaagacctcaagttcctattgaattttaattga

SEQ ID NO: 9010 - DNA, 819 bp, synthetic construct
  source 1..819: mol_type = other DNA
atgtcagataacaaaaacaataacattagttggacatccttttgccaggctatgaatagcatcgcctactggctcctccaaaataaaaagaagtacaagaaacgcgaccattaccaaatcctgacgcttaaggggagttgcagcgacatagagaagaaggccaagaagttggggaacgataaactagtgtcgatgtatacaatggccctaatcaaagataatacgtctttagacttcctgccaaactatgtgaccctgaagaacggcgagcagattgataaggccgaatatgtggacatggccattaggaccgaggcatatatccgcgccaacaaaaggcttccggctattgtgtacagaatgagcaccctgcccgactacaaagattccaccatgaagctctttatcaatgtcttcaacttcaaaggaaacacaatcgatgaagcactggctattatcagcaagatgaagctgtacagcaaatacttcgattcgcagaagaccgacaagaaaaccatcaatgacgctagcctgggtaagggtagcaattgtgtggactggggacaggtatactatcgaatcgcgaaatcactggggtacgacgtgcagtttgtccacgtcaagtgccgggtgagtggcactggccatataaaactcagattgaagcacaagaagcacactggaggcaactggattaaccgggaccccgcagcagttgcggacaccacttccggcaatgttaaatcaatctggtgtgaggatgggtacctcatcgcctatgacccttcctggatattcacagatctgtatagctcctga

SEQ ID NO: 9011 - DNA, 789 bp, synthetic construct
  source 1..789: mol_type = other DNA
atgggagcctttgaggattacagaaagcgcatcagaaaggagatccccgactctacagagtacttcaattacttctttaataacgattatgacaatgccatcaaagtggtgaagagggacatggacaagtacaaccagaagtatggcatcgtcccgttggaactggaaagacggctggaagacgccaagatgatgaaatattccaacatttattacaagaacaacgagaaagctgaagagctggagaaagaaggcaaaattgatgaggcaatcgaggtgctggagagcaatattcttattcatacggacaccccattcacatattaccacctctccagcatatatcaggaccgcaacgaaatcgacaacagtatccgcgtattaaagcatggtatcaagaactgcaggaagatccctaacaaatctcacgttaatagtcttaagcgagatctggagaaagcaaagaagattaagaaggagaccaaatcgcagcggttgccatccgcaaacgaggaacacaagcagcgtgataaggaggccgacgacctcctcaagcaggggaaacaggacgaggcgattaagctgtacgaaataaatctaaatgaaaggactatcagcaacaactcctatagcaaactgtttaagatctacttcgattcagagaaatatgacgatgcccagcgggtgtgtgaacaagctatcgaaatttacaaacccataaatgcggccaaggtcagccagtaccgacaatacctctcaaaagtgtacaacaagaaagaggatctgtga

SEQ ID NO: 9012 - DNA, 198 bp, synthetic construct
  source 1..198: mol_type = other DNA
atggccaacataaataacacatcatcctacatggacgaggacaaaaagcaaattatcaaggagagcaactacacctttcgggatgcactggaagtcagtagctacctcatcgaagtgggcaagttcgagaggttctataaagaaatgcagatccacgatctacagaaggagctggacgaaatggatgacggggagtga

SEQ ID NO: 9013 - DNA, 249 bp, synthetic construct
  source 1..249: mol_type = other DNA
atgttgctggaaaagaccaacatcagcgcccgcgtggacatcacgctcaagaagattgtcgaggatagcaccttcacacacaaggacgcctatgaactgggggcaaaactgatagctatgggcaatgcggaagagacaattgtactaataaacaccaaccccgactttgagcggatcatgaaacagactgagtactcccttatcgaggccaggaaactggagctggaacgagagctcagagtgctctga

SEQ ID NO: 9014 - DNA, 813 bp, synthetic construct
  source 1..813: mol_type = other DNA
atggggcgcggaaatagcgatatcatctattttttagagcagcacgagcaggaaataattaactgttgcaagaagggaatgagcaacaacgaagtcatcgagctcctaaaaacaaagtacggccgtgatgtggcagatattacttatcgaaagttcaaggcgggcctcaatctcaccaagagtgatttcctggagacattgttggacgagattatggtcatgaagacctctggggccacagatgccaatgtccggcgatggctggaggaggagcatgagatcgaagtgagccgctccaccttcagtagattcaagaagaaatatcacataacagacaaagagaaggaccccagggcacgggataaagattccctcaccaacagggccatcactcagggccagattatagacaatgaagttcacaccgacaacatcgacctggctattgatacgatacttcagcaacaggtgactgatatcaaaacgggtctggacaaccttgacaagattaccaaaaacgctgtggggatcgagattgactttgccaagctcgaccaggaggtaagatacaatgccaacgagaaatccctggcgagatacctgatcgacctcaccgaactgaagattcgctacttggaactgtcagtgaaagcctttgaggctaaaaacaggctgttcaaggatgaaatggaccggctatttaaaaatcgggttcttgaactggaggacaagaagatcgaaatctcgcagaaagacatcatgaacgaaattgagatcctggcaaagcaaatcgatgacaacaatgtgcaatga

SEQ ID NO: 9015 - DNA, 1419 bp, synthetic construct
  source 1..1419: mol_type = other DNA
atgatcaccatgtacaacgagaacaacgaattttacttggacgctagggacaaggtcattctccagaaatgtgtgtatgagaatccctatattcctttctctccatttccaaagcaggccgaaatgatcttggctcgcgaaaaggaagtcctgatcgggggggcggcgggagattccaagagcacaagtctcttgatgagggccctgttctacgtgcaggatgacatgaatgaataccatgccctcatcctgaggcggaccctttctgacttgaagcggaagggcgctctgattcacaaggctagtcaatggctcaatcgaaaggaaattcagaataatgccagtatcaaaccgaagtgggacggaaccgagcacagctggaccttccccaatggaaacagcctaactttcggctatctccgtaacatcaatgacctcgatacctatcagggttccgagtaccagttcattggcattgatgagctgacacagctggagaggtttaaatacatctacatgaggtcaagggttcggaagaccaaagacaataagcttcctacacagctgatggccagcagcaatcccggtaagcgcggcaacaagtgggtgcgggagcgcttcatcgagaaaatagacactgacatccaggataaatcgcaaataagattcatttcctccagctacttggacaacatctatctagacagaaacgactacgaagaatatctgatgggcctggatagagtaacaagagagcaactgatgaacggaaactggtatgcctcagtcaaaggccagctttttgacgagtcagacttccacataatctctcaggacgagtgcctgaaaattccaatcgtgcgagtcatccgctactgggatctggcaacgaccgaagtactgaacgacgacaaactgagaggaagtgatcctgattatacggctggtgttcttcttgcgaaagatctaaacgggaatatctacatctgggactcctacgagtttcagctcgagtcgcgaaacctgatcaatgaaatactgaacacggcagcacgtgacaagagcgatgtccagtatatcgaactcgacggcagcaccgggaaaaacttcggattattaatcattgatgagctcaacagacgaggcttcactaccggtaccgggaactcacgcgagaataaggtggaccgggcccgccgggtgtccgcagatattcagaagaacggaatattcctggtggggaaggatcgcacagggtttacgaagaaatgggccatggagtttctggagaagattactgcttaccccaatgaggccatccatgatgactgcgtggtggcatttactggcggctacgaaaagatagtggccgagaaacagagccaacgggttaacgtggataagtggtactccacatga

SEQ ID NO: 9016 - DNA, 267 bp, synthetic construct
  source 1..267: mol_type = other DNA
atgaccgaccggagcgcggaaatcagcaaaatcaacgacgagaatcaggaagaagacgaggagctcttcaatagcctggatgagatcattagtcaaaacatagatgaaatcgacggggtcgtgatttcctttccagagaaaattaactcaaagaatggcatcgcccacacagcaagggctttcatgtggatatgcgacctcgcccttaagtcgatcctagatgagaagtactcccagcccgtgtggattctgatgaacaacctgtga

SEQ ID NO: 9017 - DNA, 1779 bp, synthetic construct
  source 1..1779: mol_type = other DNA
atgaagaatgcccctaagaattggtctctggctgagcctagtgaagattacggtaacgactatttcgtgaaagtgtttgataaagatactgacgaggccacaaagatctcattcataatccagctaaaaggtaccgaagattacaaaaaggatgagaaacacgtgaagttctcaatccgcacggactatctcaaatactactacagtaaggttgacatgcccgtgttcctggttgtggtagacacaattaacgaggagtactgctggctgtttgtgcagaaatacattaacgaagagctcaatgtcgaaaagccaaactggcactcgcaggagaccgtgaccctgtatattccgatcgaaaatgattttagcaaccccaaaattatagaacaaacagctgagaaggggagccagtattgtaacattctcgtaaatggcacccccacacaggagctgatttggaaagtgaagaatattattgacaatcctctcgagaaatctaaggacttaaaaaagcaatatagcgagatattcaacgccgagacaaaggtgggcttcgagtttatccataaccaaaataatccccaaaacgcaaagaagcacttccggagcgtttatgacaagaccaaagacgacaatgactacgtactagcccatttgaacagcatcatcggattaaccccgtttcttgattgtcagaacaaaatcgaggccgagaagctttttgaatacatcaaggagggcgagacattgtccaaaaagaacaacatcaaatatctagaacactatttttacgggctcagactggagaagctgtgcttcatcctgcagagtcagcttcgagacctgctggtcacccagaagatatctaacctaggcaaaacaatcttatcctttgtggtcgaccccgagacgactgaagggatcaaggagatctttgagatcctccataagctctacgccgacttttgcaagaacttgatcgagaccctggatgacaaggacttgtttatattcctggagttacttcgcatgctgatcgggatgcagctccaccacatagaagcggtgttcacctccactgatgataacaccaaaaaggcactgttcaaccagatggatcagctgctgtctatcttccgtgacttgattaacttcacctccgaatttgatattttcaggtacgaccttctgtcattcgagaccacttacctctacttgatcggagataaacagtataatgagacggtggatgaatacatcaacttcgcaaaggaaaacaagtcccagtaccacctcaagagagccgaatcacttaaagaaaagctgtccaagccactgaacaggcaaaaagacattagtgagatgagcgatgaagaaatccatgatctcttcaagacgctgattttgatcattgaaaagatcgatattgatgtcgatgagactgacgaagctatggtcctgaggtgcgcagtgcgggacctgaatccaaagcgcgtcctggacaattgcaagcaccttgagctccattatggacacgggggacagtacgcgaaattcttcggactggctagcgacggcctcaaaacgatctattgtgagcacggcggcattatcacaaaccggaatctggacaacacttatgaagaattttacaataagtactgcaaggagtgtgagcataagatcaaacaggacttcaagtggaatcctgacaagctgtcgtatgtcaaaagcaagaaatttaaagagatactggacaagaacccattcatttga

SEQ ID NO: 9018 - DNA, 348 bp, synthetic construct
  source 1..348: mol_type = other DNA
atgactaatattgagatcaacgcagaaaccaagaataagctagaggcgatcgggaagatactcagcccatacctcgacatcggttacgacgactttgatgaaattatcggcattttgatcaataacttcaataatcacaaactgaaagccgagtacgatgagaaggaaaacatcattaagatcggatatgaaaacagcaaaatatactccatccccattctgatattcgagcttaagaaggggtgctatgagaagatcggcatttggatgcagaaaaacaactttattccggagatcaacaccgatgtgacggaatatatcaaaaagtgtgaggacacattcctgtga

SEQ ID NO: 9019 - DNA, 657 bp, synthetic construct
  source 1..657: mol_type = other DNA
atgaaggggtatgtgggcccggagtttaagaaggacgcattcaactgtccctactgcgaggtgtacgctcatcagaagtggagatatcggctgatgatattcaacagcaacggggagcaccctgccgaccccatctacgaccaactgggagtcagggggtggtccacaagcaagtgcgaccactgcggcgaaatctcgttttggcatgatgagcaactcatctatccaaaatcaagtatcgccccactgcctaatgacgacatgcccaatgatgtgaaggaagattacatcgaggcccgcaacattgtcaatgattcaccacgcggggcttgtgcgcttctgcgactggcgttgcagaaattaatgccgcacctcggcgagtccggaaagaatctgaacgaggatattggcaatctcgttaaaaaaggtatttccagtgaagtgcagaaagcattcgatagcgttagagtcattggaaacaacgctgtgcaccctggtgaactcgacttgaaggacgatgtacagaccgccattagcctattccggctgatcaattacattgtggacaaccagatcagcagcaaaaaagagatcgacggaatatttgaaggccttccccagataaacatcgaggccatcaagcgtagggacaagtga

SEQ ID NO: 9020 - DNA, 987 bp, synthetic construct
  source 1..987: mol_type = other DNA
atggagtacaagttgaaaaagtacttcattcatgacgtgctgaccccctggatgcacctggaagacatctaccttaacgagaatcacccggctcacgaggatttgaagtatgacttggacgcgattaaggaacaggaagtgctcacatactacaagaagcacgaagagcgaataaattttttgaaccggaaaatcaagaacaagataatctacagcaagatcctcctattcggagaactgcttgccaactccatctttgaagataggctcgaggcactcctgaagaacgagccctatgacaggaaagagttcgagaacttttatgataaggagaatctgatcaaggtggataagttttccaaagtgtatgactcgatcattattaacggcaatagatacggcctgtgtctccctatcaatgccttcaactcaagctattggattagtcaggaactgaacaagcttaacctggacgatgtggacctgaagatccgagtcgaccccttcctgaagaatttctccctgatctgtcaaaaatccacggtcttctcaaagccactcaactggaacaagatccgcgacttaaaaaccgttgataagggccagttccggaattacaagaccggggaacttaccgagtacatgtggaaacctagaaaaaacaaccgggttgtatttacttgcgaggaactgccaagcgaagatttaataaatctccgcgggagcagatatttccatgccatttttgagaaagatagtggtcgctttattcactgcgacggaagcataaaaatttacaacaaaaatagctttaagaaaaggtgcaagtacacaatcaataacaacgagatcaatgacatcgggaaggaggtgaaaatcttccgtgtcgacaaaaatattccaaaagagatgttcatgagcctaataaacagttatttctattggaactacgatctgatcgactactttctgaagaaaactatttga

SEQ ID NO: 9021 - DNA, 417 bp, synthetic construct
  source 1..417: mol_type = other DNA
atgttcaggtgtgggtgctaccccaatcacgagatctgcaagaacaagaacacatgcgaattttggataccgctgaaccagaagctcaagcaactgaatcagcagatcagttacgagttgaaaatcctggagagcctcaaccagagaaaacgcgactacttccgtattttatccgagattcaacagggaaggtataccgaaatcgtggcaattgacggtcgactaaagcgggtgcctaaaaagaatgcccgcggcgagtcaatcctgaagccagatgatgtacaggtcggcctgaacttcaatgtgatcagcaaagagatcacggacacagaaaccatcattcatgaactccggattagagagaagaacatacttaaaatactgaagaaacagtattggactatcgcgtgtaagtga

SEQ ID NO: 9022 - DNA, 639 bp, synthetic construct
  source 1..639: mol_type = other DNA
atggacagtcccaaagattgtctgttccatcacctgaagtacctggcggactttgtggtgaacgaaattaacgaggatatcgagctccttagactgccttggcaggaactgagcaatcaactgatcaagcgggcatacgcccagtgtgagcgggaatgccccgactggctgctcacttttgccgaaagcgtaacccctgaggatctggacgatgaggagatagaatatctgcgaatgtttttcattgacgagatcaacaagcacaacaaaagcattaaggtctactccgccgaagacggatatccgataaaatatcacgactacttcaccgattcggtgaaagactcaaacgacttctatgagagggtctttaacatcatcaatgagcgcctagtgccatatatggtgctgcaccatggccgcgacgggctcgactacgtctgctttacaagcggccttaaaaaggcattgaagaatgctaatgaggtgtgctacgatgtgaaggggatcgctgaattgttaggttgggagtacaaatccgttaagattccaaaatccacgaaggttatggtggtaaggttcgataagttcctaacattcctctaccccaacctcagtgaaaaggaggtcaataagtga

SEQ ID NO: 9023 - DNA, 681 bp, synthetic construct
  source 1..681: mol_type = other DNA
atgtccgagggaagttcagccattcagatcaaaaaggctatcggtaatgtctataagcccgactacgagtttacatactttaaaaacataatcagtgcgttctatctgcaggggaccgacccagaggtggtggagaagattcttactgagttatacaaccagcttccttctcacgagaagacactggatgaaatcatcaaactgttcgaggacatttatctgggtgacgagaaccctaacagcgggataaagggcatcgaaaggttcattagcgataagtacgataaaaagaccagcattctcgtggggcgagagttgaatagggcaatcattccatatgataccaacaagatttacaaactccaaactggctccaacaagtatatcgtgatggactaccgcaacaatgaggtcactacacagacgatcgaatggaaaaagggaaatgaggtggccgattacaccagagtactgttctgctaccccatgcggatcacgatccacgacaatccgatatcggaagccggcataaccttcagcatcgaatggcggaccacagacggagggcattttcacaccaaggacatgaacatcgttgaaattgaacattatctcatcgagcacggctacgtcctatcacgctaccagtccaaagatgtggttcccggcctgattcaatga

SEQ ID NO: 9024 - DNA, 501 bp, synthetic construct
  source 1..501: mol_type = other DNA
atgagcttcgagaacagcaaacagacaatttttaccggtacacaactggactacgaggagattgtcgaaatccccgagggatatgaaaaggcagagctgaaagactttgaagacgggaccctaataaggggccgcccagagatggcttcagtgtcctcgtttaccttcgacgacgacggcgaagagaagacagtgaacagattcaagctctacatcttccaggatgccgacaaaatatatgtggaaatcaatgttaatcttaagaatgatggagatatccacaagaacgtcaggaagggcagcgtactgtttgatttcttaaccagcattctcgagttggagaacgccgggagcgttggcaaatccaacattctgagaaatgtggatctgtccgagtatcgggagtttgtgaaccgactcagtgaaatgactatccaggtcaaggaacggtcagggacttacacgttctacagtttcatcgtgcgcgacgtgcaggtctga

SEQ ID NO: 9025 - DNA, 549 bp, synthetic construct
  source 1..549: mol_type = other DNA
atggtaaaagccgagctgatagagaatccacaggaaactgagatcgtcaaagtggataccgtcccggatgtagatgttgcgattgagcagtgggacgcctatcagcggctgtgcaagggcctattgaacgacaacgactaccaggagatcatcgtgaaggaaaaagatgagaacggaaactacgtgaaggtgaagcgccacttcaagaaaaagtcagcatggcagaagctctcccgggcattcaatgtcgataccgaaattgtggaccgggacattgagcgaacaaagatggggagagtcagggaagcgtattactgtgttagagcaagccttcccaacggccgcagcgtggagagcgatgctctctgctcgaggtccgagaaaggtaaggacaaagtgagtgaccataccatcatgtccactgccaagacacgcgctacgaaccgtgccatagctgagctgatcggcgccggagaagtgagcgccgaagaaatgtcagctgagaagatcgccgggcaaagtaaatttctgaaggaggacaatagctga

SEQ ID NO: 9026 - DNA, 300 bp, synthetic construct
  source 1..300: mol_type = other DNA
atggacagctatctacccgattgcgggatcgaacataatcagttcgaagacaactaccacggcattcttacgcacagcggagagatcaaagtggccaaaggcgatgtggagcaggagatcctctacattgacgatgacggtatagtactggtggacggcggcaagaaggcataccagacactgatccacaccaagctgttggccctgattcaatatgccaaagcgggggatatcggactcatcaagttcatacggggagaggctttcattgtcgggtttaggaagaaacgctccgactga

SEQ ID NO: 9027 - DNA, 105 bp, synthetic construct
  source 1..105: mol_type = other DNA
atgctcgaacaggaggtgaacgggaagacccacgtgctggtccccaaggacatatgggacgatatcatggccatgttcaatgagcatctgaacaaaggcgaatga

SEQ ID NO: 9028 - DNA, 159 bp, synthetic construct
  source 1..159: mol_type = other DNA
atgtgcgaagtgataaaacccagaatgaacgaaattatcattttcaataacttcagggccctcgaggaggtcatcgcagagattcaggaaaccgagaacatccgcaatgagcgggaatttttccagagctacaagatcaagatcatgaaactggactga

SEQ ID NO: 9029 - DNA, 1038 bp, synthetic construct
  source 1..1038: mol_type = other DNA
atgaagaagtactgcgaatttaatgggatgagcctgcaggagctgcttgacgaggcggagaaggaagaagcagacaatgtcaagtggaagcaccgccgtgttaaaaccaaactactgaagtaccggcaattccttttagacaactatagcatcaacacagtcagaatacacatgtcggccgtctccaaattttaccgcttttacgacatcgaaatcaatcccctaccaagactgaacatgaaggcggtgaagaagccaacatcaatctattacaaagatctccctgataaggaaattattagggaggctctggccatttccccacccgtgatgaaggccatcatattgttttcctgcagcagcgggtgtgcccgggctgaaaccctctccctgacgattcaggactatatcgatgccttatcagagtacctgcccaacaaaagaatggacatctaccagattatcgattatctcaacgacaatgacaacgtgataccgacctttaacctcaggaggattaaaaccaacaagtattacacgacttactgcagtcccgaggctgtgaaagccatcaacgcatacattctgaccaggactgacaatgtaactcccgagagtcaactcttcaagatgtacgagtcttatttcattggatacttccagcgcatcaatgatgagcttggcctgggtagagtggggcactacagccgcttccgaagccacatgctccgaaagttccatgcgtcagcactgtacaacgacggcatgagtttggataacgtgaatgatttgcagggaaaggccaagaacaagaccgaccaggcctacttcatgatcaaccctgacgatctcaaatatgaatatatcaagcatctgcctgccattacaatcaatacagatgttgaaaaactgtccatcaaatctccggagtatatgcagatggagaaggagaataacgagtataaacaaaaggtggagcggatggaagctaatatagctaacatcatggaacggctgggccaggaggaggcaaaatga

SEQ ID NO: 9030 - DNA, 558 bp, synthetic construct
  source 1..558: mol_type = other DNA
atgatctccgacaaggccggccagtacttagtgaagctggctggaaatgcgatccggcaatatctggaaacgggggagaaaatcaaaaagagcgaagactaccctattgaactagatgagaaactcggtgtctttgttactctgaacaagaacagtaatctgagagggtgtatcggatacgccgagccaatcatgtcggcaattgaagctaccatagacgtggccatcgcagccgccgtgaacgatccacgattcccccaagtgtccctggatgagttggagacacttgacttggaagtgaccgtgcttacaaagccggagctcattcccgtcgcacattataaccagtacttcgacgagattgaaataggccgcgatgggctgatcattcagaaaggctattcaaggggtctgctcctcccccaggtagccaccgaaaatcggttcagtgttgaggactttctggagcacacctgcatgaaggcgggaatcagcactgacagctggatggacgagagctgcgatgtctacaagttccagggccagatatttaaatga

SEQ ID NO: 9031 - DNA, 1395 bp, synthetic construct
  source 1..1395: mol_type = other DNA
atgatcaatctgctgagtgataaaatggaagagtacatcgatttgttcgaaaaagtgattgccaagacaagcagccagatcgactacattgacatcagggcgggcatcggagacaacacgtcaatacttatgaaagacggcaatgtagatgagatcaacaccggtatgagcctggccgcacgggtgagggtgcttaacaatggcgcctggggtttcgcgtacaccacagatttgagcaaaataaatgagattacagatactgctatccgattttccaactccctcaagggcgacgtcgagctatccgagaccgacattatcaaagacaagataagcgttgacgttaaaattccatttagcgatatttctattgaggagaaaaaggacatcatgaagcaagccaatgacgctgcgattatcgataaggtcaacagcaccactgtgagttacggagactccgaggtcaacgagctcttcatgagcagcgaggggagtgagatccaggtaaagaccagccgggtccgcatggctctaaacgcatctgccacaaacggggagataatccagttcggacatgggagtctcggcggcgtgaagggcttcgaggcaatctcggataaggacctggaagaatttggaagaacgattgggcagaaggctgttagactgctcgacgccaagcctgcaccgtctggaaactttccagtgatagccgatcctgagctgactggtgtgcttgtccacgaggccctgggccacgccgtggagggggacttgatcctgcagaatgattcgatccttaaggataagatgggttgtcagattgcctcagacattgtcaatatcttcgatgatgcaagtctgaaggaaggattcggatattatccctatgatgttgaaggcgtgaagacttccccaaaccagttagtgaaagatggcaagctcgtgtccctcctcaattcacgggaaacctcatctaaactgaacatgaaatcttccggtaatgcccgttccttgatcgcagaccagcccatcgtacgcatgagcaacacatacctccagcctcgcgacaacagctttgaggaactgctggaagacattcaagacgggatttacctgaaaggctcaagaggcgggcaagtggataccgggaagggcatcttccagttcaacgctgctgaagggtatctgattaaggacggggaaatcacaaccccgctcagggacgtgtcgctatccggcaacatcctggagactctgaaaaacatagatgctgtcggcaatgactttaagctgagtgtgggattctgcggaaaggacgggcagacggcgcccgtgggtgacgggggcccccacacccgaatcttaaatgcccttgtcggaggcatgggatga

SEQ ID NO: 9032 - DNA, 1206 bp, synthetic construct
  source 1..1206: mol_type = other DNA
atgattgtgattgtcggaactggtgctggtggcggaatattggcccgggagatcgccaaggaaggtattgacgtaacaatccttgagaagggaccatacatccactcaaaagacgcctttaattattatgatacgtacagcggcgacgtggacctcctcacaacgacttgcatcggcggttccaccatcgtgtccatgtcgaacatggtaagggccctcgacgatgaactgctcgattacgacattgacctgagcgacgcctatgagtacgttgaggacttgatcaatgtgcaccctattgatgattcgcatattggaaagggcaccaaggcatttctggacgcaggcaatgagcttggcctgcagacaatgaaaatgccaaaggcgattagggaggaggaatgcattcaatgtggaaaatgcgccttcggatgccccgtggatgctaaattttctggaaaggatttcatcgacgaggcagtggagtacggggccgcactgatctgcgaagctgatgttcgggaagtgacaagcaacgatggggtggtatacggcgtcaagtacatcaaggacgggaaagaagagatcataaaggctgataaggtggtcttgtctgctggggccattggcagcaccctcatcttaagaaaatccggcatttccaaggcgggcagagaaatattcttcgatcccttcgtcagtgtgggcggatacttaaaagatgttaacttcaatagtgaggttcagatggccgggctgattatagggaaaaacttcgtgctggcgccccactactcctcatttattccgggaaacatcgacgacgactcagtaaccgaaaacgacatccttagtataatggtcaagacctctgatgagtgtaagggctatgtgaccgacgatggtgatgtggtgaaaatcaacaccatccaggacatccgctatctggctgagggaaccgccactgcaggttttgtgctagagcgtgctggcgttgacccgaacactatcgggtccacggtgtatcgaggcgcccatcctgggggcaccgccaagattggggaaatcgtcaacagtaacctcgagacagaaatcgacaatctgttcgtctgtgacgcaagcgtcctccctatcagccccgggaaacccccaatcctaacaatactggccctgagcaagcgcctggcggactacctgaagaattga

SEQ ID NO: 9033 - DNA, 477 bp, synthetic construct
  source 1..477: mol_type = other DNA
atggccaacaacaaaagcgagctcaagatcaaagctattgagaacgggacggtgatcgaccacattacagccaataagacattgcacatcttaaaaatactgggccttcctgacaacgagaccaagaacatcaccgtcgcaatgaacgtgagttccaaagagctcggacggaaggacatcctcaagattgagaacagggaactaggccatgaagaactgaatcaggtggcgctgatcgccccggaggcaacaatcaatataatccgcgatttcaaacctatcaagaagaacaagatcgtactgcccaagaagatcacgagcatcattaagtgcaccaacccaaaatgcattactaactacgaaaatgaaccaataaccaccatttttaatgtggttactgagaatccccccgtggtcagatgccactattgtgagaagctgataaaaactgaagatatttacaaacagttcgagtga

SEQ ID NO: 9034 - DNA, 495 bp, synthetic construct
  source 1..495: mol_type = other DNA
atggcgacactaatcatttactacagccagagcgggaagacggaattagtcgctcacactctggccaagaacctccgcgccaatgtgctgcgtatccaggacttgaagaatcgaaacggattcaagaacaaattcattgcctcaatctccgcatttagggaaagtaagacggatatcactccggccagagtggatctcaccgattatgacacaatcatctttggcacacctacatgggccggaaatccaactcccgccattctgactataatagaccggtgcaacctgaccgggaaagacgtgatcctgttcgctaccatggacggcagccggggtgataccaacatcgagagacttgaggaaaaagtaaaaatgcggggcgcgcgcgtcattgaatccttcaccatagcaaccaaggacaaagattcggagaagctcattaccgacacggaggcagttatcgagatgaaggacctgaagatgtacacaaggtga

SEQ ID NO: 9035 - DNA, 1023 bp, synthetic construct
  source 1..1023: mol_type = other DNA
atgaagaacgtcgccatcgtcggggcaagcggatataccggcggcgagctgctccgcatgctcagtgtgcatccggaagttgaggtgaccgagatcacatcccgaaaattggacggacagccggtgcacaaaacccacccccatatccgtgacacaggacttgttttcaaggacaagaaaccaagtgatatagacgccgacgtcatcttcactgctacgccccacggcgcctcaatgaagattgtgccagaactgctcgagaccggcgctaaggtggtggacctaagtggtgattaccggtatcgcaacaccgaggtgtacgaaaaatggtacggaatgaaacacacggataaaaagaataagggggcttttggcctgcctgagctgtacagggacgaaatagagaaggccaacttggtatcgaatccaggctgcttcccaaccggggcaatactgtcctcatatcctctggttaaaaatgatttggtggaaaagatcgtcattgactcgaaatccggagttagcggtgcgggggtgaccccctccggtactacacactatcctaacatagcagacaatgtaaacccctacaagatcagcgcccacaggcacacatccgagattcagcaggagctgcacggcttcgatgatgtgaaggtgagctttaccccccacttagtcccagtcaacagaggcatccaaactacaagtcacagcttcctgaaggaagagcatctggacatcacgcccgatgaaatccggagcctttacgaggaggaatacggagacgagtactttattaaactcatggatgagggtgaaattcctcatcttagcagcgtgagaggctctaactttgtccatatcggagggttcgagattgacgagactggtcggatcgtaatgctctcctgtatcgataacctggtgaagggcgcctcagggcaagcgattcagaatatgaacatcgtgctaggcctgaaggaacagctcgggctgcagcatttagggatttatccttga

SEQ ID NO: 9036 - DNA, 453 bp, synthetic construct
  source 1..453: mol_type = other DNA
atgaaggtcatggcgaccggcaccttcgatatcctccatcccggccacgtccttttcctcaaaaaggctaaggaactggggggagaagacgccgtcctagcagttgtaatcgccagagactcaaccgtggagaagcgcaaacggacaccaatcataccccaggaacaaaggctggagatgatcaagagtctgaaacctgtggatgaagcctatctcgggcatgctggtgacatgtttaagatcgtggaggagattaagccggacattatcgcaatagggagcgatcaggaccacaatgtggataagttacaggagtccctggacaagcgaggcattaacgccaaagccatgcgcgtggaggactacatgttcggagaactggacagcacttgcaaaatcattaagcggatcaaacacacggattttaaggataaaacaggcgagttgtactga

SEQ ID NO: 9037 - DNA, 738 bp, synthetic construct
  source 1..738: mol_type = other DNA
atgtccttcaagaaagatgagatgctgatcatgcccgcagtggacatcaagaacggcaagtgcgtacagcttgtgcagggcgaacctgggtcggagatggtcgaactcgagaatcccgaactggtggccaaacattgggaggatctaggagcccggaacatccacgtgattgacctcgatggaacaattaacggtattgcttccttggacaccatcgaaaaaatcctaaacgaaatcagcattccaatccagctgggtgggggtattaggagcttggactatgcccgacagctgctgaaccttgatatagagcgcctcataatcggaaccatgggcatccagcacccagaaaccattactgagctctccgatgagtatgggtcagatagaataatgatttcactggactccaaggacaacaaggtcgttattaagggatggcgggaaaagatcgacaaaagtccggtggagctgagcagtgagtttaaggaatatggggctggcagtatcctgttcacaaatgttgatgtcgaaggactgctgggcggcttctacaccgaccctgtggtcgagctcaaagagtctgtggacatccccattgtgtacagcggaggcatcacaactatagatgacatcaagaaattaaatgagagcggggtggacggcatagtaatcgggtctgcactttacaaggataaaatcgacctgacggaggcgttgaagtaccaaaagaggtga

SEQ ID NO: 9038 - DNA, 951 bp, synthetic construct
  source 1..951: mol_type = other DNA
atgaacgagaaactctacgaactgtttgatgttgtgctcaagtccgaattttcaataaaggagtatgatgacaagaccatcatcgagttgggggaaaacagcaaatacggcaagatggaaacgtattcgctttttccggggatcatcctggcctatatcgacgtgaatattgaaaacgtggaggacgtgttcatcgaggaaaaaatggagagcagactcctagaaatcaatcactgtgccaggggccgctatgcatatgctgtcggtgatgataagataatttactttggacggggagacctttgcgtgagcatttacgatttaacgaaatcactgagcgagttcccattaggttactacgagggactcgagattttcattgacgtggatatggctgacgaatacataaaggactatgtacctgacttcgacctgattgagttttacgaaacactagagaagaataacgggttcgtcctcctgagggccaatgaaaagattgatcatgtaatcggggagctgtacgatgtggacgagcgaatcaaacaatcgtattacaagctcaaatgcctggaactcctgctgttcttttccatcactaacttcactaagacagagagcttcagcctgtctaagaagcaggtcaaaatcatcgagtccgtgaaaaacgatttgaccgagaacctggaaaccaaaataaccattgaccagcttgccaacaagtacggcatgagtaaaaccacactgaagaactgctttaaggaaatctatggaaagcccatattcaaatggagaaaggagtatcgcttggactacgcctgtcacctgatcgaggagggccactactctatcagtgagatctcaaaaattgttggctactctagccattccaagttcagtcaggcgttccgggagtatgtcggctgcgcaccctccaagtacaagaattga

SEQ ID NO: 9039 - DNA, 1791 bp, synthetic construct
  source 1..1791: mol_type = other DNA
atgtccaacaaccagaacaagaataagttcatacgactgctgaattattcgggaaactataaatatctgaccattctgggtatgatctttagcggcctgagtgccattagcctcctggtcccattcatatacatctggaacgtggtcaacgctctgcttgttgtcgctccagactttgccaaagcccagaatttggaaagctatgcggtgggggcgttcttctacgcgtttctcgggattgccctgaacttttgcggactgatgtgcactcacctgtccgcttttaaaaacgagaagaacatgaaggatgccacaatcaaccatctgctcaatctccctcttggttacttctcaaaccacaccagtggcggcctgcggaaggtaatcgattttagtactgccaaaactgaaggcttcttagctcataatcttttcgatctggtgggggccatagtcacccccatcgtatttctcatattgctgttcagctttgatttgttgctgggcctgatctgcatcatccccattatcctatgtttcctattcatgtaccccatgttttctaaggacagccaaaacatcatggcccagtatcagagttacctggagaaaatgaatagcgaggcggtggaatacgtcaggggaatcccagttaccaaagccttccagcagactgtctacagcttccgcaacttcattgacgcaattaagaactacggaaaattcgctgccgactattctctatcaacacagctccccatgacggcatttacagtatccatcaatggctttttcgccctcctgatccctgccggcatactcattgccggaactcttgttgatgtgaagtttctggctaatttcattttctatgtgattttcaccccgatatgcgccgtgatgatgaacaagataatgacaatatcccaagactggatgctggcaagctatgcactcgatggtattgaagccatcctgaatgaaaagccattagccgagcccgcaaaccctcagaaacctaaaaaccactccatcaaatttgagggagtcttcttcgactatgaagagtcgaactccgaagagcacatccttaatgatatcaatctcaagataaacgagaacgactctgttgcgctcgtcgggccaagcggtggcggcaagaccaccattgcttccttgatccccagattttgggatgtggacgaggggtcaattaagattggggaggttgatgtgcgtgacatctcaacaaaggacttgatggagaatatctcctttgtattccagaacacgcggctgttcaaagactcaatctacaataatgtcgccatcggcaaaaagggcgcttcccgggaagagattctaaatgcactgagcctcgctcaatgtgacgacatcatcgatgagttgccggatggaatcgacacagtcattggcacagagggaacctaccttagcggcgggcagcagcagcgcatcgcccttgccagggcaattctgaaggatgcccctatcatcattctggacgaagcaaccgcactggcggaccccgaaaacgaatacatgattcaaaaggctatttcggagatcaccaaagataagacggtgataatgatcgctcataggttatctaccgtgaagaacgtggacaagatttacgtggtggaaaacgggagagtggtggaggaaggtaatcacagtacgctggtggagaatgaggggctctactctaaaatgtgggacgagtttaaccgcagcatccagtggaaggtgaagagtgaggtgatctga

SEQ ID NO: 9040 - DNA, 1746 bp, synthetic construct
  source 1..1746: mol_type = other DNA
atgctgtctgaattgtttattgagagattcggcctcactaaggaggggtctgataatctcatcaaaggaattatctacaccgccctgcagaacattagcttcatgttcccagtgggactgtatgctgcgctgctctatatctggatcaatccccttatggggggggagataatcagtcccgatctcggaatctttattctcggcattctcatcatactgggaattatattcgccttttcctggaaacagtatcacttcgtctacaacacaacctacgtggagagtacaaacagacgaataaacctaggtgaaaacttgagaaaactccctctgagcttttttgaacggagggacctggctgacctgaccgccaccatcatgaacgattgcactgacctcgaacatgtgttctcccacgccatccctcaattgctcgggtccatactgtccctgattctggtgtccattggtcttctgatctttgactggaggctggccgtcgcccttctctgggtcgttcccgtatcgttcataatactgtacatctccaagcgcatgatctaccgcggcagtaaaattgtgacaaacgatctgcttgaatgcggcgactcaatgcaggagtgtatcgattccattcgggacctaaaatcatataactacgagaacgagtatctctcgaagttgaatgatatcaccagcaaaatagaaaagagccgcattaaatcagaactgatgcttagcagtggagttatcaccggaaaggtcattctcaacctcggaatagttagcgtcatcctgctaggttcaaatctaatcatgaatggccaggtgacaatctacacgttcttgatcttcctgatcgctagcgccactatttatgctccagttgaaaacggacttatgttcctgagcgagatcctcatgatggatatcaaaattgagcgcgcgaaggaaatagaaatgctggtgacagaagaggggctgaaggactactctcttgacggttacgacctggaatttcggaatgtaaagtttaactacgacaatttaaaggacgtgttatctgacatcgatttcattgcaaaacagggtgaggtgactgcactggtcggacccagcggcggcgggaaatcaacggtgagtaagctcgccgcccgattctgggacccggtgagcggtgaggtttccattggagggcagaatctggcagagctcgattcagagaaactcctggagaacttctcgatcgtattccaggacgtaattttgtttaataacaccatcatggagaatatccgggtgggcaagaaggatgcaagtgacgatgaggtgattaacgcagccaagctggccgagtgcgaggagtttgtgcagaagctgcctaatggctataataccattatcggggagaacggggagttactgtccggcggccagcgacagagaatctctatcgcgcgggctctgctgaagaacgccaatatcgtccttttagatgaagccactagtttcttggacgtggaaaacgaatctaaaatccaaaaggctatttccaccctaattaagaacaaaacggtcatcatcattgcgcataggatgcgtacaatcgcaaatgccgataagatcgtggtcttggacgacggcaggatcgtggagcaaggcagcccagacgagctgcttgctcagaacggcctgtttaagcacatggtggaattgcagaagctgagcgggaagtgggagatatga

SEQ ID NO: 9041 - DNA, 582 bp, synthetic construct
  source 1..582: mol_type = other DNA
atgtccgaaattctgaacgtgaaggacctcattactgtggggatcttcagcgtgatcatggtggtactaattttcctgttcggaatgctgggatacatcccaatactgatgctggctcttcccatcatcgccgccttgatttgtggagtgccatacatgctgttcctcacaagagtcaccaagttcggaatggtgacgttgctggggctcgtgttgggcattgtcatgttcctcagcggtcatacctgggtgcctatcgtaatattcaccctgtttgcttttgtcgccgactgcatcttaaaaatgggcgactatagctctgtcaaaaattccattattagttacagttgctttatagtgggtatcatggggaatatgctccccttcttcgttctcagggattatttcatcggctcgatccgcaattcaatggggaacgattacgtgaacgtgatcgcaccgtttcttaactatgaggtttttatcattctagttattctgacatttatctttggcctgatctccgcataccttggcaagatagtcctgaagaaacacttcgagcgggcgggcatcgcctga

SEQ ID NO: 9042 - DNA, 723 bp, synthetic construct
  source 1..723: mol_type = other DNA
gtggagctgaaactaaacaataaccctggcctcaatgtggaccctcggaccaaaatcatccttctgatcattataagtttcatggttttcaacgaggcacccctgtacgtgagcggcatcctcgtcttaattccatttttctgcctgttcttcagtgattacaagaaggtcgccctaatttacattgccgtatactccatggccatttatgtccagatttatttgatcccgacttccacaggcatcttgtcgatcatcctgatcaccttcagctataccagctccaggatgctcccgattttcatgatggggtactatacaatcagctccactaaggtgtccgaatttataacctcaatggagaatattaacgtgccaaaggagatcattatccccctctccgtcgtattccgctacgtgccatcagtttatgacgaaatcaagagcataacgaacgcaatgaagatgaggggttttgggctgacagtcaaaagccttaagtcgcccctgaagatgattgagttttacatgattcccatcttgataagcgctgtgaagactagtgatgaactgtcagccgcgtctcttacccgaggactgagtaaccctcggaaaagaacgcacctcctggaagtgaaattcagcaaaatagactactttctgatcatgatcgccgtgatcgggttcatcatctttgcttactattttataggaggccattga

SEQ ID NO: 9043 - DNA, 1434 bp, synthetic construct
  source 1..1434: mol_type = other DNA
ttgataaacattaacaatgtgagcttctcatacaacgatgacatcaatctggagaacattaacctcaacatcaaaaaaggcgaggtgattctgctttgcggcgaaagcggctgcggaaaaacaacactgactcggtttctcaacggactgatcccaaatttcttcgacggaaataggaagggttcagtctacatgaacggcaacctgatcgacgagatgaagatctatgaaatatcggaatacatcggctcggtgttccagaatcctaaaacccagtttttcaatgtggatacaaccagcgagctggtctttggctgtgagaatctcgctattgacaaggacgagatcgagaggcgactcgagatggtggtcaacgactttgaccttgaacatctgttaaacaagaacattttcgagctttccgggggtgagaaacagaaaatcgcatgcgcatccgttagcgcggttttcccagatatattggttttggatgaaccctcctccaatctggatagccaatcaacgtggtatctgggagaaataatcaaaaagtggaagagtcagggcaagacggtgattatcgccgaacacaagctgttctttctcgaaaatgtggtagataaggtcatcttcatcaagaacgggcgcattactaacatttggccaatttcagaatttaagaacatttctcataaagactggggtctgcggcaactgaacctcgggaatttaaccgcaaaatgtggggaatactattccaatgcccaggagtttctcgagttcaaaaattttaaattcaaatacaaaaaaatccccgtgctggatatgggtaatttcaaagtccccaaaaatgagatcatcgccattattggcaagaacggggctggaaagtctacctttgcgaattgcttgtgcggtcttaagcgtagcttcaacggggagctcattttcaacaataactccctaaagagaaaggatagattgaaaaagagttatatggtgatgcaggacgtcaaccaccaattattcaccgaaagcgtgctcgatgaggtactcctgagtatggatgaagaagacatagactttgctgagtctattttgacgaacctgaaccttatccacctaaaggacgctcaccctatggtgctgagcggcggggagaagcagcgcgtggccatcgcatctgccatcgccagcaagaaggagatactgatcttcgacgagccgacaagtggcctcgacctaaacaatatgatgaaggtaagcgagaatctgaagtacctgcagagcctggggatgacttccttcatcataacccacgattttgagctaatcatggaagcctgttcccatatcatccacctggaggacggcaagcttattggaaactacaagatcaacggagaaaagctgagtgagttctttctgaactga

SEQ ID NO: 9044 - DNA, 705 bp, synthetic construct
  source 1..705: mol_type = other DNA
atgagtacaatcattgagttcaagaacgtgtgcaaggagtacaaatcaggagaccacatcctgaaggccatggataacgttaatttcacaatcggcgagggggagttcgtggtcatacttgggccgagcggcgcagggaaatccacactactgaacctgttaggaggcctcgatagtgtgacttcgggtcagatcatcgtgaatgataaccacgtggaatccttcaccgacaatcaacttaccgagtaccgcgccaagaatgtcggctttatcttccagttttataacctgatcccaaatctgaccgctctggagaacgtggaactcatgaaggacatcgtggatgtcaaaatcaatggactggacgtgctaaattcagtgggcctcgaggaccatgccaaccagtttccagcacagttgtccggcggggagcagcagagagtatctattgcacgggctgttgccaaacagcctacaatgctgctgtgtgacgagcccaccggtgcccttgacagcaaaacgggggtcctgatcctcaatctgctccaggacatgagcaacaacaagaatactaccgtggttattgtaactcacaacgcgattttggcggatgccgccgataaggtcatcaggattaagaacggacaaatagaaagcattgctataaacgaaaaccccaacaaggtgacggacttggaatggtga

SEQ ID NO: 9045 - DNA, 2271 bp, synthetic construct
  source 1..2271: mol_type = other DNA
atgctggcaaagaagatgctgcgcgacatcaaaaagcacaaaactcaattcctgagcatctttctgatggccttccttggagtctttgtgttcgccggcgttggcggggagtccgtcggcctcgaggtaaatgtaaataattactataacgatactaacttggcggacggttggatctattcacccaacctagatatgaacttcattgacgatgtgaacaacttaactccaacgactcagagtgagcggcagctggtgttagacagcattgcggatttcagcaacaatcccgagatcaaactgcacttcatcgagaacaacactatctccaaattctacctaatggatggcgaaccactcaatatcagtgacgaggacggggtgtggctggacaaaagttttgccgacgctaagaacttgaaggtgggcgacaacattactttcgagttcaacggatttaaaatcaagaaggaaattaagggaatcggatattcgccggaatacgtgtatcatgccagcacctcctcagtcatccctgactttaacaagattggttttgcttacatgtcttacaaggctttccccaccgataatatcccatacaacgttcttaatgtgaaattcaccggaagccccgaggagtacaacaatctgttgagcgataaactcgacggggagtacaactctttcgttgagcagtccgaacattctagtgtgagccagttctcagaagaaatcaaccagcacaagatgatgggggatattttccctgtcgtctttatcttgatcgccatgctgatcctcctgaccacaatgactcgcattattgcacatcagcgaacgcaaatcggcattcttaaagcaagtggattcaccaataaaagcatcatgattcattacgttagctacggtttctggttggtactgattggcagcatcttaggcctgatcattgggcccgtgacactccctcagctattctacccaagcatgagtagcacttacaagttaccctcatggaatcccgcttggagtatggattttgtgtatgtggccgtggtcatgattatcatgagcctgctcgtaagctattttgcagtgagaagcatcagcaaggagaaccctgctgataccatcaagccaaagatccccaaaatcagtagttccggcctggtggagaagatcggcttctggaaacacctgagcttcaattcccgctggaactatcgggacgccaagagaaataaattcagggcccttatgacaataatcggagtcattggctgcactgccctcctagtcagcgccttcgggatgtacgacggcatgaatgacctgaaggaatgggagtttaaccagataaatcactatgattcaaagctggtcattgacaacgacgcctccctttccgagatcgacgatgttgcccgggacgtggacggggacaaaataatggaatcagctatcgaaattgaatcggattcggctaagaagagcggctctctgatagctctcaaccacacggatctcatcacaccaacagactatgactggaataaaatggagataggagacgacgaagtttctatttcacaaaagatggcggacatgctcgatatcagtgttggggacaccgtcaaatggcacattatcggttcggataagtggattaagaccaaaattgacaagattcacgccgatccgacctcacagggcatcgtgatgagcagcgataagctagagaatctggatctgaactacacccccaccagcattgtgaccgaacagcatgtggacaagaactactctattattaaaacagtcaacagcatgaaggatataacctccagctgggatgagctgaccgagtccatgtggctcctgatttatatcttgatattctttgcatccctgctggccatcgtggtactgtacaaccttggtttgctgtccttcacagagatcgaaagggagatagcaacccttaaggtgctcggattcaaaaccggttcactgaggaagcttctgctcacacagaacctgtggtttacgttcgcaggatttatcttggggcttcctgtggggtactatgtgctgaagatgatgtgggactccagcggcgactccttttacatattgccttccatatccccgatgaattttatcctcacggcgacaatcacatttacgctgtcgatactggtcaatctcatgttttcacgtaaaatcaagaagctgaatatggtggaatccctcaaaagtggggagtga

SEQ ID NO: 9046 - DNA, 222 bp, synthetic construct
  source 1..222: mol_type = other DNA
atggccaagataacggcagactccaagtatatggagcttctaaacaagtaccccctgctgaagcgggatctgtctcagaaaaactggaaattcgagttcctcgtgaccccaatgggcaagatcagcctctgggaagctaatctggaagaagtcagcaaacacgccgagttgagtgtagatgagacagtgaccctgtttcaggacctcgtggactcatactga

SEQ ID NO: 9047 - DNA, 2259 bp, synthetic construct
  source 1..2259: mol_type = other DNA
atgtcgttatccaaaaagatgctgagggacatacgcatcaatagaacccaatttattgccatatttctcatggctttcttaggcatctttgcttattgcggcatctgtagcgaatactatggactcgaacagaccagtgcggatttctataacgaaaccaatctggctgacggttggatctacaagaccagtttcgataacgccgatctggacaagataaataatctggcaatgcaaaccgagagacaacatgtcatttcaagcgtcggggagtttgataacgaccctgacatcacactgcacttcgttgaaaacaataccatctccaaatttcacgtgttccagggaaaggatttcgacattaatgacgagtccggggtctggttggataagcggttcgcggactcaaaagagctgaatgtcggagacaatattacttttaagtttgatgggaagaccatcgaaaaagagattaaaggtatcggctacagccccgagtacgtgtacgagtcatcggccactagcatcacgccaaatttcgaggacgtgggtttcgcctacctgtcatacaagagctaccccgacaacgtggaatttaaccggctcctggtaaagtacaatcagagcgatgatagcttcaaagagaagctggacgattccattagctacttgtcatttacaaagcaggaggaccacgtgagcgtggcccagtttagtgaggagatggcgcagcacaagatgatgggggacgtgttccccattctgtttatcctgattacatttctaacacttctaacaacaatgacaagggtggtaacataccagcgaactcagatcggcatcttgaaggccgtcggcttcaaagatcgaaccataatcctgcacttcatctcctacggattcttccccgtgctgataggctctatactcggactcatcgcaggcccgatggttattcccaagatgttctatccaagcatgactacgcgttatactttaccttcctggaatcccgggttcgatatgagctttgtttatgtggccgcagcacttgtgatctccagcgtcatcgttacgtacctgacctgcagacgcatttccaaggagaaccctgccaacaccatgcgccctaaggccccaaacgtctcctcaaacagcttttttgagaaaagcaaactttggaaccatctaagtttcaatttccggtggaactggagagacgcacgacggaataaattcagggccctgatggccatcattggcgtgatgggctgtgtgagcctcctcatcgcagcctttgggatgaacgacagtatggatgacctgaaaacgtgggaatacgatgacattaaccatttcgagagcaagctggtgatttccaataacgcttctcaggaggagttgtattacgtcatcaatggcaccaacggcagttttataatgcagatgccgatcgagatcaagtcgaacaatcacgaaaacacgggtgtactgctcgtcagcaacaacaccgacttgatcagctacacggacagtaacaaaaacccaatcgaaattaaggagggggatatctcaatttccaccaaactcgctcaggactttaacctcagcatcggtgacaagatcaagtggcacatcgttggaaacgatgactgggtgaaaagcgagattggtcaaattcatgccgagcccattagccagggccttataatgtcgcccgataccttggaagacgagggcctgaactttacaccaaccagtatcctaacttccgagaagttcggggaaaacatcaattcaattaaatccgtaagcactctggaagacatggaggagagttggagtgagatgacttcttcggtgatgatgatggtgtatgtgataaccgtggtcgcctgccttcttgctatcctcgtcctttacaatctgggcatcctgagcttcacggaaatggaaagggaggtggccacattaaaggtgctcggattcaagaccaacttcctgcggcgcctcctgctgactcagaacctgatcttcacagccattgggtttattcttggaatcccgctcggattctatttcatgacattgatgatggacgctgcaggggaatctttgtattatgtgcctatgctgacttggggaaacatcatgctgtctgctgtgataaccttctcaatatccatcgctgttaatctgatgttttccgacaaaattcgcgatctcaatatggttgaagcgctgaaggatgtagaatga

SEQ ID NO: 9048 - DNA, 717 bp, synthetic construct
  source 1..717: mol_type = other DNA
atgaagagaagcaagaagctaattatcgccatcctgctggtgatcctgctcggcttggtcgcgttcattgtgggtactttattcatgacccccgaccttagccatgagacgaagaacatactggtactggcatcggacaaggaggagcagccaaacgggggcgttgacatggcattcatgatccggctcgagaacgggtcccttaaaaactacacccccatctaccctggtggaatgacgcacccgaccaagtcagcccccggcggccttcagggaccaatgatgctccacgactgcctatggaacgggctgggggagggtatgcaaaacgccaaggaaattgtcgaggttcgaaccggcatgcatgctgacgccgtcgtggtggtgtatgataaaggcattgacagcattattgattcaatcaggcccctgaaaataaatgggactgaaacaaacctgagtgcaaccgacatcatacggcagaacgatgcctataatgggtacccaggaaatgaacacgtgcagggaacaatgtctcgctccgatgcggtaatggtcttggctaaagccctggctaatacagctaaagatcctgtgaagaaaagtactatggtgcagacagccctcaaggaatactccaatggaaacatcatcatggagcctcaaggcagctttaccaaactgctcgcaacgaagggctttgaaagcatcacctga

SEQ ID NO: 9049 - DNA, 378 bp, synthetic construct
  source 1..378: mol_type = other DNA
atgaccatggagaataacaaccttggaaacaaggatgatttgtgtgaagtgttcgattcccacgaggacgtggtaaaccgggtgaaggaacgaatccccgacgaaagtgactttactgaactcagcgagttctttaagatcttcggcaacccaacaagactgaagatcatctccctgcttagcatcgaggatctgtgcgtctgcgacatctgcgaggcactggacctcaatcaaaccacggtttcaaaccagctaaggatactgcgggcgaataatattgtcaagtaccagaaagagggcaaaatggcccgctattctctcacagacctgcacattgagatgatttacaaagtggggctggaacatatattagagtga

SEQ ID NO: 9050 - DNA, 2355 bp, synthetic construct
  source 1..2355: mol_type = other DNA
atggtcaagaaccggtgctacgatgccgattgtgacaaagataactgtcacaatcccgaacactacaattatatctgttttgaccccaactgtgatgaaatcaagtgcaatgacagcgaccattatgacaagcagctcttgcgggattaccagaagaatacagatttaagtgtgtatgatcacggagaggagatagattacgacgaggatgttgatataagcctgtgcggctgtcctgactgcgccgacgaccacgaccacgaccatgatcaccaccacgatcacagccacgaccaccatgagcacgacgaggacgattcctgttctgatgaaagttgtagttgccatgaccatgacgagcacgaccatcacgaccatgacgatgtggacataagtctttgcggctgccctgactgcgcagacgatggccatgaacatggccacggagacgaagaactgctcgctgaaggaaaaccacttatcgctaacaggccaatacaaatcatcgtgtccagcggcatattgtttgtcctgggtcatgtgttcgagtggctatcattcagccccgccgtcgttacaataatctacatgctcggcgctttaatcgccggctacgaaatagccgtgttggcatacaactccctggtgaaaagacacacggtgggtccggccatgcttatgtgcgttgcctgtgtcgcttcattcatcatcgggcatcccgaagagggcgctgccgtcacttttttatattacatagcggagtttctggaggactacgcggagcacagagccaagcggagcattaagtcgcttgtggagattgctcctgaaactgcacgcgtcaaactgaacgactccgaggagctgagaaatgtggacgacgttgacatcggtgagatcgtgattgtcaaacctggagacaaagttcctctggatggcgaggtggttttgggaagttccagcattaaccagtcttccattactggggaaagtgtgccagtgctaaaggagactggcgatgaagtattctccggaaccgtgaatgaagacggctacctggaaatcgcggtcacgaagaaggcgaaggatagcgtgatttcaaaaattgtcactctggtgaagcgaagccagctcaacaggtctgaaaccgagtccctcgttgagaaggtggctaaatactatacgcctatcatgatggttgcagctatttgcgtggcattaatcccctcgtttgtctttggtcaaaacctcgtggattgggtgtataaggcgctttcactgctggtaatcagctgtccatgcgcattcctgatctcaacaccggtagggatggtatccgccatcaccagcgctaccaaaaatggtgttctgattaagggctccacctatgtggaggagatgcgggatgtcaaggctgtcatcttcgacaaaacggggactctcacagagggaaaactgatactctccgatgtggaggtgctggacgaaaacttcagtaaagaagacattatcaggatcgccgcaagcctggagaaccaatcttcccacccaatcgcacaggccatcgtcaattatgccaccgtaaacgggatcaagtttagtgagattaatgacttcaagaacgtgcccggaaagggcattgtcgctaatatcggggaggaacagtactacgcggccaacgaaagcctgatagaggacgggagctttgaggtgtcaagagacgaaatcaataggtattctgccgagggcaaaacgatcgtcttcattggaaactcaaagaacgtgctggccattattacagtctctgataaaatccgcccaaacgctcacgaggtcatttctgacctgaaggagcagggtgtacagacaatcatgctcaccggggacaataaactcgccgcaaagagtgtggcatcggagatcggaatggattacgtgtatagcaatctaatgcccgaagataagctcaacattctggacaccatccgaaacaagtttggtgatgtggccatggtgggggacggcattaacgacgccccggccctcgcccgcgccaacatcgggattgccatgggcgctgctggttcggatgtggccatcgagaccgcggatgtggcattgatgcaggacgatatttcaaaactcccctacctgttcaccttgagccgtaagaccatggggattattaagcagaatatcaccgtggccatcgcagttaagctgctgtgcgtaatactggccatccttggcatcattacattgatgatgagcgtcggcttcggggacctgggactgacaatgcttgttatcctcaattccttccgcatcggaatggtgaaagatcccctattctga

SEQ ID NO: 9051 - DNA, 1371 bp, synthetic construct
  source 1..1371: mol_type = other DNA
atgctgagcaacgacttggtgaatggtgtggaactgatgctgcaaaaccccaagaaagcactgatcgagatgtccataccattgatcatttccctcctcatcactagtttctacaacctgattgacgctgcttgggtgtctggtctgggcgccgacgccctggcaggggtaggattctttacaccaatcttcatgattctggtgggctttggaaacggccttggctctggagccgcgttcgccctgtccaaatacctggggggaaacaataaacagaaggcggacaacgcagcgattcattccatcatcatcgatctaattgcctcactcatcatcactcttgccttactggtgctattaaacccgatactgaatgcgatgggcgcgggccagactatcggttatgccacggattatggcatgatcatcatccttggctctgcctttattatactctccaacgcactgtacggcatctccagaggagagggggataccacccggcccatgtacgctataatcgccagcgccattctcaatatgatcttggaccccatctttatctacaatctcaacttgggggttaagggcgccgctatcgccacgatcgttagcagcgtttttgtcattctaattctgctctactggttttatattaagggcgacacatacctcaagcctaatctgagtaattttgattttaaaaaggatattagcatagacatcattaaggtgggagtgcctgccagcatccagcttctgaataacgctttcttcgctgcagtgttcagcgccctcctgaccttcgtcgggagtaccgactcggtggccgtctactcgacagggtggcggatagtcaccattggcacaacacccttaatagccataggaacggccctgatcagcgtcattgctgccaactatggggcaaagaactataaaaacatccaaatcgtgcacaggtacgccatgaaagtatcaatcgcactggctattattgtggctattttgaccaatgtcttcgcaggagatatctcctcagtgtttgcttcttccggaagcagtgtacgaatcgctgccgagcttacaggcttcctgtcatggatcgtcatttactatccaaccatggctgtgggtgtggccagcacctacgttttccaggggatcgggaaggggatcactgcaatgttccagaccatcatacgcgagacagggttcaccataactttcgcagtgttgtttgctgtagtgctcaattacggcgtctggggagcctggatgggtattgttcttggcgaaattgtcagcaacaacctgacgatgctgtgggcggactatctggtgaagaaactcatcgacattagtggttga

SEQ ID NO: 9052 - DNA, 615 bp, synthetic construct
  source 1..615: mol_type = other DNA
atggagcttaaagggagcaatatcagctttaagtatcccagtactaagaagtacatcttgaaagatatcgacatatgcatcgacaacaccaagatcaccgctttagtcggcgatagcggtagcggaaaatcgacgctttgcaaaatcctctccggttacacaaataatttcgagggggcagtcactctggacgggaaagaactccctaagaaagaattttgccctgtgcagctgattttccaacatccagaaaaggtgatgaaccccaaatggaagatgaaccacattctagaggagtcatggatgccggacgataacctcctgaaggaatttggcatccagaagacgtggctgacaagattcccccaggaactgtcaggaggcgagctgcagcgcttctccgtgctgagggccctgaacccaaagacccagttcatcatagccgatgagatgaccaccatgctcgacgcgataacacaagtccagatcctaacttccgtgattgagatcgttaagaagcggaacatgggaatgctcatcgtaagtcacgacatgccactggtggagacaatctgtgacgagattatttacttgaaagatattaatggcatttga

SEQ ID NO: 9053 - DNA, 960 bp, synthetic construct
  source 1..960: mol_type = other DNA
atggagaagttactggatgtggagaatgtgtccatcagcttcatccagtatacgcaggggctgaatcagcgcgatctgaaggttatcacagacctcactttggatgtttttgaaggcgagatcctggccattctcgggagcagcggttctggcaaaagtctgctcgcccatgcgatattcggcattttacccgagaacgcaaacctgaacgggaccatcaaatacaagggaaaggaactgtcacagaaggacaaagaggagatccgtggaaaggagatcgcccttatcccacagagcgtaaacttcctagaccccttgatgaagattagcgatcaggcaatcggggagactaaagatgatgctgagaagaaggaaaagaagcagaagcagagagagatttttgaacattacaatctcggtcctgaagtggatgacatgtaccccttccaactttccggcggtatggcaaggcgagtgcttgtaagtacagccctgctctccaatcccaagctcgtcgtggcagacgaaccgaccccaggactggaccaaaagaccgtcaaagaaaccttgaatcacttcaagcacatgaaagaagacggagtgggagtcctcctgattacacacgacattcacgcggctttggaggtggctgataggatcggcatattctattcgggctacgtgatagagattgccgagaacaaagacttctcaggcaacggagaaaacctcctgcacccctacacgaaggccctatacaaagctctgcctgccaacgggtttgagctgacagagggacaccaaccactgcatggggagatccctaaaggctgtccatattatgacagatgcgagatgcggatgggcatctgcaaggaagaacggccggagctgaccgaccttggcaacaagaaagtccgctgctttaaatacgaaggcgggctgaaaaatggtacttga

SEQ ID NO: 9054 - DNA, 855 bp, synthetic construct
  source 1..855: mol_type = other DNA
atgaacaactcaaataagagcatctatagcccaattagcaagatgaatctccgaaccaagactttgctcacaatcgggcttaccgtgagcctgttaataattgttatgatcacgtccctgctgattaattctacagacatcacaactaacttcagtgccatgaacttacctcccagctttgagcacctattcggtaccgattggctggggcgcgacatgttcatacggactttgaaaggcctgggcctgtccgtgcagattggtgccggagcatcaatactgagttccctcattgccattatcctgtcctttgtgtgcagcattaacaaaaagttcgacagcttcgtcgcgtggatcgtggatctgtttctgtccataccccacattttgcttatcattctcatcagcatctcactgggcgggggagcctttggcgtcacggtgggcgtcgcacttactcactggaccaccctcaccagggtcctgcgggcggagatcaaacagatcaaaacctcggattacgttaagctatctgaacaattcggaaaatcgaaattttggattgccagaaagcatatcttgcctttggtgattacgcagatcatagtaggcaccatcctgatctttccccacgcaatcatgcacgaggctagtgtgacattcctcgggttcgggctcgcaccacatgagccggccatcggaattatcctatctgaatccatgaagtaccttgctacaggtaactggtggctcgccctgttcccaggcctcgctctgctgatcctggtactgctgttcgacatcgctggagagaacattaagaagatacttgaccccacaagtgccaatgaatga

SEQ ID NO: 9055 - DNA, 996 bp, synthetic construct
  source 1..996: mol_type = other DNA
atgctgaaaaatgagaagattcttaagtttctggggaagaaaattatccggtttataatccttctcatctttgtgatcatcctgtcgtttatcctcattgacatgtccccgattaaccccgtgaaaacctacatctccgctctcgggtcagttagctctgaaaagattgctatcctggaggcctactggggggtgaatgaacccattaccacgaaggtcattagttggttaggaaagatagtgcaaggcgactttggaacaagcctgatcttcagaatgcctgttatcgacgtgatcaaggagaggtttattgcctctctggtcctgatgctgacttcctggctattcagcggccttctgggattcatactgggcacgatcgccgggtttaaaaaggacaccattatcgataaagcaataaaagtgtattgctacattctccagagcgcccccactttctggattgcgcttctcttcctcatgattttcagcgtctacctgggttggttcccaaccggcttaggcgtacccatcggaacactgagcgagaatgtgtctatctgggagtggctgcacaggctgattctccctatgattaccttgagcgtcgtgggaatcgcctccatcactctgtatacccgtgataagttgatcgaagtgatgaacagtgattatttcttgtttgcaaaggcccgaggagagtcaggttggaacctaattaagcgccatgggatacggaacatcctactcccagcaataacaatccagtttttgggcttctcagaattgttcggcggggctgtcctggtagaacagatcttcacatatccgggtatcggccaggccgcagtgtccgctggcctgaaaagtgacgtgcctcttctgctgggcattgtaatcttctcggcgatattcgtttactgtgggaacctcatcgccgacatcctctacaacttcgtcgacccaagaatccgcgagggtgaagaggatgagtga

SEQ ID NO: 9056 - DNA, 1629 bp, synthetic construct
  source 1..1629: mol_type = other DNA
atggaacagaagtacattatcggcataattgtactgatcctgattgcaattattggtggcactctttttatgagcggaggcaataccagcaccagggctgataatgagctggtcgtgagcgcgtttgtccacggcagtgagccagaaaccgggtacgacccgatgtatgggtggggagaccggggagagccactgatccagagcacgttgatgaagatgaaccgcaacatgacctatgacaatgatctggctacaagttggtcttctaacaacaactttaccgagtatactgtcaatatcagagacggcgttaagttcactgacaacacaaccctcgacgcggaagatgtggccttttcatataaccaagccaaaagcaccggaaataccattgatctcagtagtctggacaacgtgagtgcaatcaataagaccactattaagttcaagctgaataagccggactcgacatttaccgacaagctgctccacgtggggatcgtcccttccgactcatatgacaataatacgtatggatcgaaccccataggatctggacccttcaaacttgcccaatgggacaagggtcagcaggtgatcttcgagaaaaaccccaactattatggcaaacagccaaaatttgataagttgaccatcagcttccagaaaaacgaggcgagcttcaatgccgctaaaaatcacgagctggatattgctgccgttccactctcgtacgcaaatgagacaatcgatgggtaccactcatttctgtccgaatccaacgacgtgcgaggcatttccttacccatgaagaacaatactggggaaacgaacgaagatggcatagcactgggaaataatgtgacggccgataaatcaatcaggctcgccctaaactatgggattaacagagaagacatatgcaagggtgcactgaacggcgccggcgtacctaactacgacgggatcgcgcatttcctgccctggtacaataatgactccacgatcaaggatgctgatattgacaaagcgaaagatttcttgaagaaggggggctggaaagacacagacggggatggaatagttgagaaggacggtaagaaggccagctttaacctatactactcctccgacgcaccggagcgccaggccattgccgtcgccgtgagcgagcaggcaaaggagtttggcatcgaaattaatgccacagggagcaattgggacgagatagataagatcaaattctccgaaccagtggtttggggattcggtagcactgatccttacgtgatgtacggcgaatactatagtaaccaggctggtatcggctacaacaacccctcccttgtaaacaacagtgctgtggatagccacatcgacaaggccatgagcgagccccgggagcaatcctacgctgactggtctgcagtgtcatgggatgggcagaccggcatttcacccaagggtgacgccgcctggctctggatcagcgagatcaagtacacatacttcgtcgatgacagcctcgatatctccaaagacaccttcaaactgcagcctcatggcggcgacttattcggaaacatctacgattggactcgtatctctcctatcaacgctacaaactga

SEQ ID NO: 9057 - DNA, 1620 bp, synthetic construct
  source 1..1620: mol_type = other DNA
atggaacagaagtacatcataggaatcatcgcagtgattctgattgcaatcgtgggtggggctatcctaatcggcggcccttctaccgagcgagcagacaatgagcttatcgtggcggcgtacagtcacggtggagagcccgaagctgggtttgacccaatcctgggctggaactactactcagagcccctgatccagtccactctgctgaagatgacaaggggtatggagtatgaaaacgatctcgctaagagctgggaggccaacagcgattttacagagtatacagtcaagatcagggacgacgttaaattcacagacaacaccactttggatgcagaagatgtggccttcacatacaacgaagctaaaaagtccggagctagcctggacctcagttccatggagaacgccacggcagtcgacaagcaaaccattaaatttgagctgaaccggcctgactccaccttcgtggataagtttgcctacattgggattgtgcccagcgatagttacaacaatgagacctatggggcaaatcccataggaagcggaccatttaagttcgtacagtgggacaaaggccagcaggtcatcctggagaagaacccagattactatggcaaagagatcaagttcgacaagttaacaatcctattcgagcaaaatgaagccgccttcaatgcggcgaagaataaagaagtggatatcgctgccgtaccgctctcgtatgccaacgaaactgtcgatggctacaatatgcacctcatggataccattgatgtccgcggccttagcttgcccgtgcagaacaacaccggtaaattgagcgaagacggcaatcccataggcaacaacattaccgccgacaagagcatccgggaagcccttaactatggggttaatagaaccgccatatgcaaaggcgcactgaatggcataggagtgccaaactacgacgggatcgcccatctgctcccctgggcgaataacgagagcgcaattgacgatggcgatgtggataaagcgaaggacatcctgaagaaggggggatggaaggataccgatggcgatggaatcgtggaaaaagacgggaagaaggccagcataaatgtctattacagctcaaatgcacctgagagacaggctattgccgtgacgatcgccgaggaggccaaggagtttggtattgaagtgaatgccacggggtcaaactgggacgaaatggacaaaattaaaaacacggacccagtcgtttggggattcgggtcaactgacccgagcacaatgtggtccgagtactacagtgaccaagcaactgtcggctataataatccggctctgattaacaatagtgctgttgacaagcatatcgataacgctatgaagtctgatcgtgagtcctcatatgccgaatggtcggctgtatcctgggacgggcagactgggatcagccctaagggtgacgccgcctggctgtgggttggagaaattaaatacggctatttcgtggacgagagtttagacatctccaacaacaccgagctcatccagcctcacggcggagacatcttcggcaacatatacgactggtcccgcgtgtcgagcattgagaaatga

SEQ ID NO: 9058 - DNA, 615 bp, synthetic construct
  source 1..615: mol_type = other DNA
atggaacttaaagggaacaatgttagcttcaagtatccatccactaagaagtacatcctgaaggatatagacatatgcatcgacaacaccaagatcaccgctctggtcggagacagcggcagcggaaaatcaacgctatgcaaaattctcgccggatacgtgcagaacttcgagggcgaggtgacattaaataataacaagttgcccaagaaggagttttgccctgtgcagctgattttccagcatcccgagaaagtgatgaatcctaaatggaagatgaaccgcattctcgaggaaagttggatgccggacgataacctcctgaaggagtttggcatccagaaaacttggctaactcgatttccccaggagctgtctggtggggaactgcaacggttctccgtgctgagggcactgaacccaaaaacccagttcatcatcgccgatgagatgaccacgatgcttgacgcgattacacaagtccagatcctcacctcggtcatcgaaatcgtgaagaaaagaaacatgggcatgctcattgttagtcacgacatgccactggtagagacaatctgtgacgaaataatctacttgaaggatattaatgggatttga

SEQ ID NO: 9059 - DNA, 960 bp, synthetic construct
  source 1..960: mol_type = other DNA
atggagaaactgttggacgtggagaatgtttcaatcagttttatccagtatacgcagggtctgaaccaaagggatctgaaggttattacagacctcactctggatgtatttgaaggcgagatcctggccatcctaggtagcagcggatctggcaagagtttgctcgcacatgcgattttcgggattttaccagagaatgccaatctgaatgggaccatcaagtacaagggcaaggagctttcacagaaggataaggaggagatccgtggcaaagagatagccctgattccgcagagcgtaaacttcctcgatcccttaatgaaaattagcgatcagtccatcgggcagaccgagaacgaggaggaaaagaaggagaagaaacagaagcagcgagaaatttttgaacaatacaatctcggtcccgaggtggatgacatgtacccctttcagctttccgggggcatggctcgcagagtcctggtctcgacagcgctcctgtccaatccaaaactagtggtggccgacgagccaacaccaggattggaccaaaagaccgtgatggaaactcttaaccacttcaagcatatgaaggaggacggcgtgggagtgctgctcatcacccatgacatccacgccgcactggaagtcgctgatcggatcggcatcttctattctggatacgtgatagaaattgccgaaaacaaggacttcagcggaaacggcgagaacctcctccacccctacacgaaagccctgtacaaagctcttcctgcaaacgggttcgaactgaccgagggacaccagcctttgcacggggagatccctaaggggtgcccctattatgaccgctgcgagatgcggatgggaatatgcaaggaagaaagaccggaactgacagacctgggcaacaaaaaagtcaggtgtttcaaatacgagggcggtctgaaaaacggcacttga

SEQ ID NO: 9060 - DNA, 561 bp, synthetic construct
  source 1..561: mol_type = other DNA
atggatgtgataatcaaggagttaggcaaaaatagcaaagaaattgccgaagtccaggagtttctgttcaagatgatcaagctcgagtttggctacgactacgtcccgcaatggcatcaggatattatcaaccttgagaagtattacatcgacccaaaaagaaataacttcttcatcgcgtataccaagactggtgaaatcatcgccaccatcgggattcgggcctacgacaaagactttcccgagttcaggcatctatactccatagataacacttcatccatttggcgactgttcgtcgaccggcgctataggcgctgcggattggcttctaaaatgttcggcatagtggaaaactttgccaataccctggggtacgacaatatttacctgcacacgcacaagacactcgatggggctattgagttttggacaaagatgggcttcgtggtggcactggacagcaacgatgagctggaaaccgttcacatggataagaagatccagggagtgaacatcagtgacaacatcgtggactataaatatgcagtaaagctctga

SEQ ID NO: 9061 - DNA, 693 bp, synthetic construct
  source 1..693: mol_type = other DNA
atgagcctctctctgaagctgaagcagtaccttaccgaccaaggtgctgatgaggtagggttcgccgacatcaccaacttcacccccaagaagaacttaaataaaggggtggtgttttacatcacatatcagaaagagaccctaaggcagatgcagaatgcacccaccaaggagtacctgaatgaactgatcaatctaaatctcaaactggatgaactcggtatgaaatgcgaggagttccttattgagcggggctacaacgcatacgcgcaaacaaagaaacgcctgggatatgactttggggagtttaactccttcgaactgcctcataagactatcgcaacgcgagccggcattggctggatcgggaagtcagcgctccttatcacagaaaagcacgggtgtgctttgagactcagttccgtgttgactgacgccccactgaacccgggcaagcccattctgaaatcgaaatgcggaaagtgtatggaatgtaagacggcctgtttcggaggcgccataagcggaaaaaagtggaactataagatcaaccggacagatttttatgacgacaaaaagtgcgagaagtacgccttgaagataagcaaagagaacctgggcaaatccgataccgtctgcggcaagtgcatctacgcttgcccatacactcagaaatatattaagaagagttga

SEQ ID NO: 9062 - DNA, 1617 bp, synthetic construct
  source 1..1617: mol_type = other DNA
atggataaaaagataatcatcggcgcgatcgtcgtggtgctggtggtgattataggcgccttcgccttcatgggcgggagccatgacagtgatccaacccacctgactgtagctgcccacagcaacatcaaagagcccgaggcggggttcaacccgctgactggctggggatgtggacaccagaactataacccacttgtgcagagttgtctcttcaagacggacaagaacggaagcattgtgccagatctggctacgggttactccgtaagcggggacggcaaaacctggaccgttaacgtgagggacgatgtgaaattttccgataacagcacgtttgatgctgaagacgtggcattcacattcaacacagcaaaacagactgagagcgagttggacctgacaaacatcgccaatgtgactgcagtaaacaacacatgcgttaaatttaacctggtggaagcccgctcaacctttatctacgatctgcgatatcttggaatcgtgccgagcgactcgtacgacaatagtacgtacggcgagaaccccattggcaccggaccttacgtcctggaccattgggataagggtcaacaggctatatttaagatcaatgataattactatggggataaaccgtactttacccaaatcaccctcctgttccccgaggaggctacatggctggaactagctaagtccggggaaatagatgtcgtgcccgttgcaacctctgcactcaaccagacagtcgatggctaccagtttattgagaagtcagccggcagagcccagggcgtcagcctcccatatcttaacgacaccggaatcatgtacaatggcaccatgaaagtcgggaacaacgtgaccgcggataagtccatccgtgaggccttgaacgttggtatcaaccggcaaactatgtgcgacgaaattttcgcaggacacgcttctcctgagtttaccggggttgatacacggacttatgccaatcctgacgccaaggtcgcggacggggacgtatccaaagcaaagcagatcttgaaggatgggggctggactgatactgacggcgatggaattgtcgagaagaatggcctgaaggcatcattcgacctctactatcctccagattatctcgacagacagagtatgtcgacggtgttcgccgaacaggcaaaggaattagggatcgaggtgaagctcgtcggggccgactgggacacaatttataagaacctatatagctcagccgccctgatgcagcaaacctcccccgacccatacaagagtatctaccagcaataccacagcaaagagatggacggattctacatgaaccccaacctgtataataattccgcctctgaccgcttaatggacgaagctatgcataccagtgacctgaaccaggccgactcattgtggtcgcagtctgcccttgtgaatggtggagggtggggccctgccggagacgctccctgggtttggattgctaattacgattataattacttcattaaggacggtattgatatcggcaaacagcccgatggtctcggcaatgacgtgctgatcaatatatgcgactggtccaggaccaattccacagcgtga

SEQ ID NO: 9063 - DNA, 990 bp, synthetic construct
  source 1..990: mol_type = other DNA
ctgaataaaaatcaattgctcaagttcttcgggtacaagttgatacggtttctcatcttgatgatcgccgtgtcaattttcagttttgtcctgttagatctatcccctatagaccctgtgaacgcgtatctcaaacaggcggccgtgagcgaagctcaacgacagatccttcaggagtattttggcacaaacgtccccctgaccactaagatctttcattggttaatcgacttattccagggtaatctgggcacttccctcatataccgcgctccagtggtcgacattatcctggagaaagcttcggcttctatcgtgctgatggcgatcagctggctgctgtccggaatcatcggatttttgctgggggttgtggccggtaaaaacaagggaagctggattgacaaagccgtcaaggtttactgctacgcaattcagtctgccccatccttctgggttggtatgcttattctgatggtgttcgccgtgtatctgggatggtttccaattggatttggggtgcccattggcgtgcgcagtaccgacgtaaccttcgcagagtgggccacccggctcgttcttcctacgctgaccctgagtctggtggggctcgccccgattgcaatgtacacgagaaacgaactgatccaggttttgagctctgacttcgtcttgtttgcaaaatccaggggagaaaagggctggaacctggtaaagaaccacggcatcagaaatatcctgctgcccgcaataacacttcagttcctcagcttcagcgaactgttcgggggggccgtgctcgtggagcaggtcttctcatatccgggcatcggccaaacagctgtggccgcaggccttcagaacgatgtgcccctgtttctgggtatcgtactattctcggctatatttgtcttcgtcggcaatctactcgccgatctttcatactacctcattgaccccaggatcaaggagaaggagttcaacgattga

SEQ ID NO: 9064 - DNA, 852 bp, synthetic construct
  source 1..852: mol_type = other DNA
atgatcaaaaaggctgacgacaagaagcaatggtttctctaccctgccaacctgaggaccaagaccattgtcattatcattctgtcggcattggtgatcctaagcatttttatctccgggtacttcatacgggacatccccacaagtttcatcaatgccaaccagatgccctccttagagcacctcttcggcaccgactggatgggccgggacatgttccagagaaccatcgccggcctcggacttagcctgatggttgggtttatcgcgagcatcgtgagtactgtcatcagcattatcctgggcctgttttccagtttcaataagttcaccgatgagttcgtggccggcatcatcgatctgtttggttcaatacctcatattctgttgataatcctcatttcgatgatgtttggagggggcgtaatcggagtagtgatgggtgtcgggctcacgcactggacgccgctggcacgagtgctgcgctctgaggttaaagaaatcaggacaaaggagtacatttcccttgccgagaatctgggaaagagcaaaatgtggatagcgataaaacatattctgccactggttatatcacagatcatcgtgggggtgattctaatgtttccccacgccatcatgcacgaggctgccattacattcctcgggttcggcttgcctccacacgagccagctattggcgtcatcttaagcgaatcaatgaactatctttcctctggatactggtggctggcattttatccgggtatgagccttttgattgtggtcctcctgttcgatttcatcggagagaacgtggaaaaactgctcaaccccgaaactgctcaggaatga

SEQ ID NO: 9065 - DNA, 693 bp, synthetic construct
  source 1..693: mol_type = other DNA
atggatctgactcagaagctgaggaagtatctgattaagaacggcgctacggaagtcggattcgcagatatcatcaattttactccaatcaccggtttgaacaacggcatcgtgttctacataacctatccaaaagagaccattaggaacatgaaaaatgcgcccacgaaagagtacaacgaagaatatgacaaaatcaattacaaactcgatgagttaggcatgaagtgcgaggagtttctaatcaagtatggttacaatgcctacgcccaaacacgccagagacttgggaacgacttcggggagcacaactcattcaagctgcctcataagacgatcgccacccgagccggcatcggctggattggaaaatccgcgcttctgatcacaaagaaatacggcagcgctctgcggctctcctctgtgttgactgacgcccccataaagaccggactcccgacaattaagagcgagtgtggaaagtgtatggaatgtaaaaacgcctgtagcgggggggcaatcagtgggacagaatggaactacaagctcaaccggaatgatttttacgacgacaaaaagtgcgagaaatatgccctgaaggtatcgaaagaaaatctgggcgacgagaagacaatatgcggaaaatgcatttatgcttgcaccttcacccagaagtacattaagaaggcatga

SEQ ID NO: 9066 - DNA, 867 bp, synthetic construct
  source 1..867: mol_type = other DNA
atgaaacgcacagccctcaagattgggtatattggcaccaatttccacgggtttcagcggcaacccgacctgcgaaccgtggaagaagaactcatatatcacctccgtaaacttaattacatcgacgatttgaaaaagagcagatttcgcatagccgggcggacggacgccggtgtgcacagtttaggcaatgtgattagctttcagtctgaaaaggatgtgaggataaacgagatcaacaactccctccctgatgacattcaaatccttgccagtgcacccgtacggtacgcctttaagccgcgctatgcccagatgcgacagtatcgatacatgctgttccaggatctggacattgataagctgaaggagtgtgcggacatttttaaaggaacgcatgacttcactaactttaccaagagattccagaagacaaccacccgcactattgacgacatcaagatcaaaaagtttgacctagaggattaccacaagaaaggcttcccaaaccttcatgatacactgtccccaatcttcgttgacatctacggcgagtcattcctgtggaatatggtcaggaaaatgatgagggttttcgtggatgtggctataggaaaaatggacctggatgaggtcgaaagactcctaaaccccgaggagaacgagtcacgggcgaacatcaaggtgatggaggcagaatacttgatcctgatgaatatccagtacgacggaatcaagttcaggtacgatgactacgcttgcgagagattcaagcgggatctggtcgatagcctgtccgacttgcaaaaacgctatgcaatcagggagtcgatgatcaagagcctccaggacctgcacgaatggtga

SEQ ID NO: 9067 - DNA, 1323 bp, synthetic construct
  source 1..1323: mol_type = other DNA
atgaaaatcgctaccattctgggaacccggccagagatcatcaagatggcccctattattgacgagatctccaagaggaacattgaccaaatcgtgctgcacacaggccagcactacgatgaggagatgtctgacaccttctttagggacttggatattcgcacccccgactataatattcaggtgggttccggcacacatgggaaacagacaggcttaatgatgaagggcatcgagaaggtgctactcgacgagaagccggacatcgtcctggttcagggggataccaatgcggttctggccggtgcgcttgtcgcctctaaactccacatcgcaatcggccacgtggaagccggactcagaagctttgatatgacgatgcctgaggaaataaaccgtcgagctgctgatgtctgctcaacaatgtactttatacccaccgccgagtccgctatcaacctgttggccgaggggtattcgcgaaagaatctgttcataactggcaatactgtggtggatgcctgtttcagacatctgaagattgccaaaaaacggggaattaaagagaaaagcctgaaggaacttaatatcgataaaatggacaacatcctcaccctgaccatgcatagggcagagaacgtggatgtgaaggaacgcgtggtcggtatcatcgaagcactcaaggaactggatgacgcggatattattttccccatccacccacgaacaaagaacacactggagaaatttggactcttcgatgagctgaataacttggagcatgtgcacatcataaagccattgggctacctggacttcttgctgctgacgagcgctagcactctcatcctgaccgacagcggcggccttcaggaggaggcaataacactcagtgttcccagtttaaccctgagatataacaccgagcggccggaaacggtaactgccggcggaaatatccttgtcgggtcagatagggaagcgatcgtctccaatgcccggaaaattcttgataataagaatttcgcagacaagatgaagaacgctatcaacccatacggtcaaggggacagcgccaaactgacggtagacgcaattgaagactaccacgcccgcggactactcgacatcgtggctcctgaggatataatgaacagtttcaagagaaagatgaagaacattcgggaagacatttctgtgaaagacttcgaaaggaaagagaacgccctggtacacatggtttttgacgggaagaatatgcagtttcccactgacgagctaaacctcaacgggatggtgatcaactacgacaagcgcgaatga

SEQ ID NO: 9068 - DNA, 1089 bp, synthetic construct
  source 1..1089: mol_type = other DNA
atgacaaaagagaatgagtccatcttggtcttcgagtacttcacggcttctggggaaaaggacaagtgcattatctccgaagccgaagccctcctattctcactgttagacgaccttaaagagtttaacgtagatttgatcatcaatgagtcttacggcagtgtggtcaaaaactacgggaatgtaaacccaatcctaatcaaccaggatgtcgtgagctggcttgaggagaatgcagatcagtttaacaaggctatcttcatcagcgcagaaaacaacaacaatctctacaacattaccaagattctggaagagaacgacgtgaagatatacaattcttcagccgaggcctgcctgaagtcctccgacaaatatgagacttacgaagccctgccgaataccattccccaaccacgaagcttcaggttcaagattgatagcaagggctactggaaaagagcaatcgagaatctccacgaacgttggcaggctgaagatcctctgactcccctgaaactgatcatcaaaccactcatgggcgtggactgtgaggatatagtgatcatcgagaaaatcgaagacctgaccttggacctggacaaaatttttacccccggctctcgggttctggttcaggaatatatcgagggcagcgatattagtgtgagcctcatctcagacggtaagaacgccctgcctataagtctgaatgaacagtacgtggagctgaaggagaacaaaggaatttatatgggcggccggctcccttttgagtctaagttcaaggatgaggcgtttgacattgccaccaaggcgatcgagtccatagaggggatgaagggatttgtcggggtggacctgcgcattaattcggatgaaaaggacatttattccctttaccttctcgaaatcaacagccgcttcacaacgccctatgtgggattaagcaaaatagctaatttcaacataagtaagacaatcatcgacctgattgatggaaacatcaacattggggacttggacatctcgctcgatggtgaaatcgagttcaagaagtcaggaaactccctggagattaggagaatatga

SEQ ID NO: 9069 - DNA, 1023 bp, synthetic construct
  source 1..1023: mol_type = other DNA
atgaaggtggccggatttgacatcggcggagcgaacaccgatctcgcagtcatcgacttcgacggtgaggaaatcaaaaacattgaagtggactttgcataccttccgatgtggagtaacaatgacgatctctcacgagtgttgaccgaactgatcgagaatatctgtccagtgtccgaaattgacgctgtaggcattagcatgacggccgagcttgtggatgcctacgacactaagaaggacggagtgctggatgtggtgaagaaatgtgaaaaaacattcgactgtcccatagcatacgtggggatcgacgggatgctcagtaaggaggagatcatcaagacgccactaaaagctgctgcggccaattggattgccaccgctcagattgccacactgatttcggataactgcatttttattgacaccggcagcacaacaacagatatcatacccatcaaggatggagttgaatgcgcaatcggcaaatccgacttcgacaggtctgctaccggcgagctagtctacaccggtaccttgcgcacgaacttaacaagcttcttggataagatagaattaaatggcaaggagtatcgggtagctagcgaactgtttgcccagactgccgacgtgtacacggtgctggacctgattaccgaggaggattatgtttgtgacactttcgacggggagggcaagtcaaagatcgagtgcgcaaaaagaatagctcgggtagtctgcgccgatctggagatgatgactatggatgagattgtgggcatgtctaaattcatccaccagaagcaagttgaacaaatcgccgatgggctgaagcaggtcgtcgagacccagaacctcgacctgatcgtgacaaccgggcttggaaaagacatcctggacaagaaggcggcagaactgctcggtctggaagtcaaatccatgggggatatactgactgatgaggagtgcgttgtggcccctgccatcggaaccagcgtcatgatgaataaatatctcaactga

SEQ ID NO: 9070 - DNA, 567 bp, synthetic construct
  source 1..567: mol_type = other DNA
atgactatcaatatccagatcctgctgattgcctgcgtcacaacgctctatttcatcctgccagcgtacttctcaaacggggcgggactgttgtttggtggaggcatgcctgtggattttgccaaatctgacaggtacggtatccgatggatcggcgatggcgtcacctggcggggattattcgccggcaccattattgggattatcaccgggatcgtgcagggcttcattgctccgcacatactgccagcttatggacaatacataataactcccatagtcacaaacattaactccgggatcttgatcggcttcctgctcgggtttggcgccctacttggagacgccatgggcagctttctgaagcgcagactggggattggtcggggaaagcccgctccccttttggaccagttagacttcctcatcatcgcactcattctcgtgagccttgtggtaaagatcgatctgctgttcattgcaattagtatcatcctaacactggttatacatctgatcgccaatacctgtgcatatctcctgggcatcaaagacgtgtggtactga

SEQ ID NO: 9071 - DNA, 1509 bp, synthetic construct
  source 1..1509: mol_type = other DNA
ttgaagatcaaaagcaccaagtccctctgccccgagtgtgggaagccaatcgacgccgaggtgtacgatgaagacggcaaagtgttcatcaaaaaaacgtgcgatgagcatggcgagtttatcaacacttattggggggacgatgagttgtataacagggccaacaactacctgccatccatcacctcgatcgaaaacccatgcatcgaggataccgccagctgccccagcaattgtggcctgtgttcaaaacacgaaacaagcactgttctgggtctgatcgatgtaacaaatcgatgcaatctcagatgccctgtttgttttgcgaatgcggctgccgccggatacgtatatgagcctacacaggatgagattcgacagatgctcaagaacctaaggaatctaaagcccaatccaaccccggctatacagtacgccggcggagaacctacggtgagaaaggacattgttgaactgattgcaatggccaaggaagagggctttactcacgtgcagatagctaccaatggaataaggctggctaaaagggaaaacttggccaaagatttaaaggcggccgggctcaacaccgtgtacttggcatttgacggggtcaccccagagccttatattaacaaccggggcaaggacttactcccctttaaactcgaggcaattgagaattgcagaaaggccggcctgggcgtcgtactggtgcccacactcatcaaaggaatcaacgaccaccagattggggagataattaagttcgcatttgacaacaatgatattatttacggagtgaatttccagcctgtttcattctctggacgcactcctgccgatcaagtggaagcccaaagaattacaatccccgacttcgtgaaaatcatcgaagagcagacggagggtcaggttaagaccacggatttctacccgccctccgccgtggagcccgtcgcacggttcatcagcgcccttgacggtgaagagcgacctccagtgacactgaactgccaccagcactgtggtgtcggcacctatgtgttccgggagaagaccgaagggagcggccgggataagctgatcccaattacaaactttatcgacgtggagggactctttgaaaaactggacgagtatgctgacaagcttatcgaaggcaagttcggtgcgcgcaagaaggtgatagctagtgtgactaagaacctgccaaagctgatccatcccagtaagaccccggattacctggacattaagaagattcttttcgacgtctttgctaagcggtcctactccgctcttggggacttctctaaagacgcaatgctgatcagctgcatgcatttcatggaccccttcaacttcgatgaagaccgcgtcaagaaatgtgtcatccactatgccactccggatgggcgcatcatccctttctgtaccatgaatagtatataccgtcagtcagtcgagcagaactttgcaaagcccctgaaacaaaaaaaagagtga

SEQ ID NO: 9072 - DNA, 486 bp, synthetic construct
  source 1..486: mol_type = other DNA
atggacattatcaagggaaagacctggacgtttggggagaacatcgacaccgacgtgattatccccggacgatacctgcggacattcaacccacaagacctggccgatcacgtcctcgagggcgagaggcctgacttcacacagaatgtccagaagggagatatcatcgtcgcggatgaaaactttggctgcggctcctcacgcgagcaggcacccgtggccattaaaaccgccggtgtgagtgcaatcgttgctaagtcgtttgcccggattttttatagaaacgctatcaacatcgggctgccagtgattgttagcgacatcgaggccgaagacggggacgtaataagcatagatctgtctgaaggcaaactggtgaatgagactactggtgatagcaagaatttcgaaccgttcaaagagttcatgctcaacatattggaagatggcgggctagtgaatcattaccttaacgagtccgactga

SEQ ID NO: 9073 - DNA, 630 bp, synthetic construct
  source 1..630: mol_type = other DNA
atggaatgcccaatttgcggctctgataatgtagagatcctgaacgctaaacagaaatcaagtaagaagaagcttatggaggaatatctgctgaagtgtgaggactgcggacatgtgtttaaggacatcttctccgcaaaaaagcctaaaccctacaggctcatcattagcgcccatgataagtcccacaagaccaccattgacctaagcccaagcgacgagctgaagagtggtgacgtcctccttagcgacctggggcaggtggaagtgaccagtattgaggttggggacaagcgggtcaataaagctaagatcgaggacatcaacacgatatgggccgccagcactgagattccggcacgaatcggcttcagcgtagatctccacggcgaggtggattcttacaagttagatctggaacgcgatttcgagatagcccccggggacatcgtgaagatcgacaaacacatcgtcaaagttcacgtgatcaaaacaaaggacagaaaactgacatcgggatttgccaaggcggaagtgattaaacgggtgtattcaaagcccgtcaagtttaacaacttcgattacgatttgactaaggacatattcaagaaaaccaaaaagtcctcctga

SEQ ID NO: 9074 - DNA, 1278 bp, synthetic construct
  source 1..1278: mol_type = other DNA
atgaaggtctatattgaatcctacggttgcaccttcaacaaggctgacggccagatcatagctgggaacctccaagaaaatgatattgatatcgtcgggagcatggaggaggccgacgtgatcatcgtgaatacatgttacgtgaagctccccaccgaaaacaaagtgacgtatcgcatccagaagcttcaaaacgattttccagataaaaaaatcatcgttgggggctgcatggtcgagatcgaccctgaaaagttggataaagtagcccccaatgcgtcatggatcggccctcatcagctgaacaaaagcgcagaggttgtgaaatccacatactgtggggaggtcgtgcgggagtccggatttagcaaggagtctaaggtggatgtgcccaaagtcatggatgacagcctgattcatatcatccaaatatgcgagggttgcctgggcgcctgcacattctgttgcacacgcttcgcccggggcccactgaacagctatccgattgaggacattaaggaagaagctcgaaaggccattgagcagggggcctgtgagatccagctgaccgcacaggacactgccgcgttcggcaaggatagtggcgaaaagctatccgacctcatcaaagaggtggctaacctagacggggactttcgcatccgggtgggaatgatgcaccctaagaacattctcaacgatgtggatgaaatcatcgatgcgatgaagcacccgaaggtatataatttcatccatctgcccatccagagcggatcggacaaagtgctgtcagacatgaggagagggcacagtgtgaatcagtacctggacatcgtctccaaattcaagtccgagatccccagcctcacgctggctgtggacattattgtgggttatccaaccgagtccgaggaggactttaatctgaccgttgaattacttgaaaagataaagccaagtctgattcacctgagcaagtaccagcacaggaaaggtgcagtgtctagctcacttcccgaaattccacacgaaaccatgaagagacgtagtaaattcttatctgagattaagtcaaaaataacggaggaggagaataaggaactcgtcaattccaaccagaaggtcctggtcattgagaaaggctcgaaaggaggatttatagcaaagacaaacagctacatccctgtaatcgtggacaacgttagcctgggaaccttcgttgacgtaaaaataactgatgccactgccacttacttgaagagtgaactcttgggctga

SEQ ID NO: 9075 - DNA, 201 bp, synthetic construct
  source 1..201: mol_type = other DNA
atgagcgagctccccatagccccagtcgggaggatcttgaagaatgcgggcgcacagcggattagcgatgacgctaagattgccctggccgaagccctagaggagaagggcgacgagatcgcacagaaagccgtgaacttcgcacgccacgctggaagaaagaccgtgaaagccgaagacatcaagctggcgatcaaatga

SEQ ID NO: 9076 - DNA, 723 bp, synthetic construct
  source 1..723: mol_type = other DNA
atgacatacaatataaaaaattccaaggagctcgccgggctcattaattacactaacctgaataacataatcactgaaagcgagatggtggagtttctcgagaaggccaaagagaccaacttcaattcagtggtggtgtctcctacttacgtcaagctggccaaggaaacactgaaagacaccaatatcaaggtgggatcggtcattggcttccccttaggtttcgaagacacggagagcaaggtcgaggctgccaaatccctcctggacaagggggtggatgagtttgaggtagtccttaacctgagctacctaaaggatgagaaatacgaactgctggaaaacgagatcaaacagataaaggaggcaatcggcgataaggtgctgaaagttattattgagaccaaagcgttggaagactaccaaaaggctaacgccgccaagttggctgagaagagtggtgccgactacgtaaagacctccaccgggttcgtttcaccaagccacatctttgagaatgtgaatgacattaacatcatccagaagcatgcaccgacaatcaagatcgaaatttatggcggaatcaacaactataaattcgcgaaccagatcctcacgggcggagcagatgtcatagggagtgaccagggctatgaaattgtgaagaggtataaagatcttcgggaaaacacacaggttaagcccaaaccaatcaccctgtga

SEQ ID NO: 9077 - DNA, 1674 bp, synthetic construct
  source 1..1674: mol_type = other DNA
atggagaaggcatgccgaattataattaacgatatccttaacggggagataagcacgcgacgtgatcttgaggtggcaaaaaggcagctatgcagggacctgaacctgagccgcttcatgagcaacgccgacatactcgaatttgccaagccggaggagaaagaactggtttcgggcatcctgaagaagaaaccaactaggaccatgtccggtgtggcggtggtcgctgtaatgtgccatccacacaaatgccctcacggaaggtgtttctattgtccggagagcgacatcgcgcctccaagttatactggtgaggaacccgccgcactgcgcgggagaatgtacgaatttcacccctacatccagtgttttaaccgactgaagcagctcaagaaaatcggccaccctattgataaggtggagctaatcatcatgggcgggacatttcctagcagagacttgtgttatcaagagtggttcgtcagccagtgcttgaaggccatgaccgactttgggctgattcttgagaataagccaaccaactacgagtacaatttggatttcaatgagattcgcagcttcgagaaaggtatcctgaagacatatcctccgaatgattacgttttaataagtgatgtgcagaaagctaacgaaaacagcaaggtaagatgtgtgggcatgactttcgagacacggcccgactactgtaaaaaagatcacattaacagaatgctggacttcggggtaacgcgcgttgagctcggggttcaaacactgtctgacgacatctactccaaaataaaacgggggcataaaatcgctgacgtgatcgagtcaaaccagctcctgcgggattcggccattaaagtcgccatgcacatgatgcccggtctgtttagcgacgagaagcaagatctgaagatgtttaagcagctgttccatgacgataattttaagcctgacatgttaaagatttatccctgcctggtgaccaaaggcagtgaactgtatgacttgtgggcggagggcaagtacgcaccatataccgacgaggaagccgtcgaactcattgtcaagatcaagaaaattcttcccaagtgggtgaggactatgcgaatccagcgtgatatcccctccaccctcattgaggctggcgtgaaaaagtcaaacttaggggagctggtgtacaacaggctggacgaggagcacatcaactgccagtgcatacggtgccgggaaattggccataaaaagacatcaaagcagtatagccttgacgagttcgagctcttcaatgagagttacaaggcctgtggaggagtggaaaacttcctgtccatcgaagacatcaatgaagagtccgtcgccggatttctgaggttgcggttcccctcaaaggatcacttccgcgatgagatctccgacaagaccgcacttgtccgcgaactccatgtgtacggcaatatgatcaagatcggcaacagaaacccccacataggccagcacacgggatttggcgaacggctgctaaaagaggctgaaaatctcgctattgataatggtaaggaagaagtggccatcatcagcggaattggaaccagaaattactaccgcaaattcgggtacgaaaaagtgggaccatacatggtcaagaagctctataagaacatctga

SEQ ID NO: 9078 - DNA, 276 bp, synthetic construct
  source 1..276: mol_type = other DNA
atgcagataaaagagtttctggggagcgtggtgctggataagaatgcctatgaggtcggcaaggtcagtaatgtggagttcgatgcagcaacgggcaaaataaacgagattaccctcaccctacagaagaacatcttcagcaaagacgaactcgtaatttccttcgacgatatcgctacaatcggagcgtacgttatcctgaacaaagaaattcccaaggacgccgagtttgaggaggccgaagctgtggaagtggagatcgaagaggacaagtga

SEQ ID NO: 9079 - DNA, 297 bp, synthetic construct
  source 1..297: mol_type = other DNA
atggtgtttgatgcacgcgacattgagatccccctgaatagccatgtccggtacgtcgacaccgggacaatgggcgaagtggtggatgaaaggatcaccgacggcattggatgggttaaactgggcaaaacgggcctatggtataagtcaagccacgtggagttgctcgccgagaaggatatcaaaaagtcgtcctggggtgctgggaaggacctggatgtagaagacctgaaggagaaagccataagcttcgaggagctcgaactttccagtgacgcggggaacggaggaggttga

SEQ ID NO: 9080 - DNA, 2070 bp, synthetic construct
  source 1..2070: mol_type = other DNA
atggaaaacctagatacggatatcaagaaaataatcaacagcgcctatccctacatcaaagatttcaatcctgcccaaaaagccgtgatcgagtccggctacctcgaggacaactccaattacatcattagcatccctactgcaagtggcaaaacggttctgggagttttacctgccctgaagaccatattgaacgggggcaaggccgtttacgccgcaccgctcctctcaattcagaacgagaaggttaaggaatttaaggccttcgaggagtacggcatcaatgtagggaaacatccatcaagcgccgacctctcagtgatggtgttcgagtcattcgacgcactgacacgcttttcctggaatgtattgcgagaggtcgacaccctgataatcgacgagttccacatgattggagagtactcccggggccccaccctggaagcggccatcacaagggcgaagatcataaaccctaacattaaaatcatcgctctttcagctactctacgaaatattgaggaaatagaggggtggcttgacggaacgtgtgtggagcacgattatcgcccagtgcccctgcacaaggaggtcctcgatgcggaaatgtttaatacaaagaataaaaacgatgtgatcgtgaagattgttgagaaggccatgaaagacagctcccaggcactggctttcgtctctactagaagattcaccgaaagtctcgcgacctatgtggctaagaaaattaataaaaagatcgacaaaaagcagcgagagaagttcaaggaggtggctgagaaactattggacgtgccaaagaaaaaaggctcgctgcccaccagcacctgcctgaagctcgctgagtctgtagaacttggggtggcatttcaccatgccggactgttcaacgagcagaaggagatcatcgaagatgagtttcgcaacggaaacatcctgatgattacagctactccaagtcttatgtacggagtgaatttgcccagcaagacggttgtcattcgcgaccacacacgttggacaagtaacggcccgcaaccaatacccgtgtttgactacgaacaaatgtccggcagagcaggtagaccccagtacgacgatgtggggtattcttacctcattgccaagaccatggatgaagcgcagaatctcgaggagtattatgtggaaggagagatcgaaaagaccaacagcaaactggtggacaataaagatgccatctacaagcagattattgcccagatcgcttccagcctgagcaaaaacctggacgagcttgtcgacttcttcgggaaaactctgtacggttaccagatgaacaacaatcccagtatgtcttcttttgcagagtacaccatcaagtatgaactggaaacggcactcgaatttctcctgcagaacgggatcatcagggccacaccggaggggctgaagactaccgatttcggttacctgattgctaaatccaactatgccgtagaaaccgccgtgaagattaaagagtatataagcaacatgaacgagatcaacgtcgaagagtttatctacgcgctgagcgagacacctgatttgcccttaatcagctttaagggcaggaagagcaaagatcctgtgcgggacagacttagcgagtgcggattgttcgccatggacatcggtgtctccgaggcaactacagtctcactgattgaatggattgacgagaggaatgaatacgagatagaaaacaagtataatgtttattcggcaagtaccaggcgctctgcctacgaagcctcccgtctggtgaagttcgccaaagacacttcggagatccttggcgactactctaatttaaaagaatatgatatcctctccgctcggctgtactatggcgtgaagaccgacattattccactggtcatcggcgtgaagcggctcggccgcaagcgggctcggaatctggtcaagttgttcgggaacaacctgagtaacattagcgagaatgaactgcagaaggtcgaaggaatcggtcctaaactagctgagaagataaggttatttgtgaagaactga

SEQ ID NO: 9081 - DNA, 264 bp, synthetic construct
  source 1..264: mol_type = other DNA
atggcaattaaggtcgaggtttttagcacctccacatgcccccactgtcctgccgccatcgatgccgctatgaaggcaaaggacaaactgggaaacgccatcgacgtggagagcgtgaaaatagatgggaatatggataaccggcagagggccatggactaccagataatggctgtaccaacgattgtgatcgacggcgaagtggctttcgtcggcgcgccggcggaatcagagctaatcgaaaagctcgagagtatgctgtga

SEQ ID NO: 9082 - DNA, 1077 bp, synthetic construct
  source 1..1077: mol_type = other DNA
atgaccaatgacaactacacctgtgtcacaacgggcaccgtcgcaaccgcatgtagccttgccgcactcgacgcgatactgaacactccggatatcgcctgcgtcaaagtggaaactcccaaaaaggtattgaatattatcatcgacgagtgcaaatgcatcagcaacaataaggcttatgccatcgctcacaaaaatccatataatgaccctgatgtgacagtaaacctcgacatcatcagcacagtggagctgttggacaaaaatgacgaggaatctaacgtgattattacgggaggggaaggggtgggcgtaatcaccaagccgggcctgcagatccctgtgggagagtacgccataaacccagtgccccggcgaatgattattaagaatctttcctccaagatccctaaggggaaggtcgctaaggtcacaatctcaatccccgagggcagaaagatagcgaagaaaactatgaacccaaaactaggtatcgtgaatggcatatccgtgctgggaaccactgggatcgcacggagcatgtcgagtgaggcttacaaaaattccatcgtgacacaaattgatgttgccatcgcctctgatatcgacgatctgattttcgtgcccggcaacattggcgagaagttggcactcaagcaacttgatgttaaaaaagagcagatcatccagaccgggaactttgtggggttcatgtttgacgaggcggctaaacgcggaatcgccaagtttaccttctttggtcatatcggtaagctcattaaggtcgccgggggcattttcgacacgaagcacgccattgccgacggcaggcgcgaaataatggtgacccacgctgcactgtgtggtgtcgataaaattaacctgcagaagttattcgatagcaagacaactgatgaaatgatgagcattctggatggactaggagtgagtgtggaagtttcaaatagtattgccagcgccatccatgacaggtgcatgcagagattcgacctggacctgaacgtcatactcgttgacatggagggcaactacctgaacaacaacttcatcatatga

SEQ ID NO: 9083 - DNA, 1083 bp, synthetic construct
  source 1..1083: mol_type = other DNA
atgaagatagctatggtaggccagttcccgcctcatgtaggcggcgtgggggtccatatccatacgctctcaaaaaagttggtggacgaagggcacgaggtgtatgtgatcacttatcctcaccgcaacatcgaggacattgatggaatccatgtcattggaaccaaaggactaaatctgccaggcgtgcgggggctgatgtttaagatgaatgctaagaaggccctggaagacctcctggagaaagaggatatcgacattattcacggccactacttgttccccgcaggagccgcggcggtggaggttggccgggagcacaacatcaaaacatacgtaactgcccacggttccgacatgtttgagctgtacaagaagcagccctttatgagaagccccatcaaaaaagtgctgcgcgatgccgacggggtgtttgccgtcagcaacgctctgcgacacgagataatcgcaaccggggttaccggtatcgccaataagacaaagctcagctggaacagtgttgacatcaataaattttcctccaagacaaacgacctctttaagaaggaaaataaacttgaggacaagccaatagtgcttttcgtgggaaatctgattaaaaggaagaacgtcgatagcctcctggacgccaagaaggtctcacagagtgagtactacctggtcattgtgggtgacggcccccagttcaaaaaacttaacaagaaagtggaagaagaaaacatccacgatgtgattttcaccgggtctaggaatgatgttgagaatatcataccaagttgcgacgtcctaatcctcccgagcttcagcgaaagcttcggtctcgtgttaattgaagctttggcatgtggaaagcctgtgattggctccgatgttgggggcataactgagattatcaatgatgatgtcggcctgctggtaaacccaaacaagatttcatctatagccaaggccatcgatacgatcatccaagacgatgacttaagactggtgttctccctgaacgctcgtaaccgggcattcgacttctcggaagtcaccatcccctatgacgaggtgaactga

SEQ ID NO: 9084 - DNA, 867 bp, synthetic construct
  source 1..867: mol_type = other DNA
atgaagactatcgtgagaagcccagggtccgcaacaatcattaacgcgattgccaccggcttcggcagcgcattcgggattgatctggacatcaaatgcatcgccaaaaccacggacaagggcatcacttgcctcaatgacgtcggggcagatattgggtttatggagctctgcgtgcagcgcgtgttcaaccactacaatattgacacgtcagaatttgggatcgacctaaaaacagagagcaatctgccaatggcctcaggactgtcgagtagcagtgccagctctaacgctattgttaaggccgttagcagtgtcatctccgaggagtttaacttaaaacctctggacgacttggagttgatcaatatggccattgacgcaagccttgaggccggcgtgaccatcaccggttccttcgatgatgcgaccgcatcctacttcggcggggtggtggtaaccaacaacaagaaccgagagttcatcatcagggagaagatggaagagtatcccgtgctcgtctacatgccgaattattactccaagtctggagatagcaattcggaccggatgaagctgcttgctccccttgtggaaactgcttttgagttcgcctgtaataaggactactttaaagccctgaacctaaatggactgctgtatagtgctgcgctgggattcaactcatcaatcgctatcgatgccctcgaaagtggagccatagcttccggtctgtctggcacaggcagctcctttgtagcagtgagcaacgaagacaccatcgacgatattatatacagctgggagaaatatgaaggcacggtcatagaaacaaagattgataacgtcggttgtaagatactctga

SEQ ID NO: 9085 - DNA, 1272 bp, synthetic construct
  source 1..1272: mol_type = other DNA
atgaagaaaatatattcgatgctgctcctgatcgtgatgctgtgcagcctgagcatcgtcagcgcctccgagaatctatctacgagcgacaaccccgtggtcgtggacaacgtggatatgagcagtaaaaacatcggaagcatcccggatgtgacatctgcatcaaatgacgtcgtagtttcagaaaattcgtcggttgaatggaagagctatgagaacgagaaggacgataacgtctccgacaaccaatctaacagctccagtaactcaacgtccaacggcagttacaaagaggagtccgtggtaagtaatgtcgtcaccaagaatgtgtcctccagctacgggactgtggtgaactacaacatcaaggtgctggatcagtttaagaaaccaatggttgggaagaccgtgagcgttaccattggcaagaagactgtggagaagatcaccgatagcgatggcatggtgacattcaccctcaactgtcaggcgggcaaatacgtaatcaaatacaaggtggataatataaacggttccaacagctatatagtgaagaataagatttcacttaccgtcctcaactggaatctgaagggcgacgtttctaagattaatttaatcaagaagaacatgcccaacaatacctgggtgaagaaggcggtcgcagctacgaaaaaaggcattcctctgcttaaattcaagggtggaaaaggcaagattgtgttcatgactgccggtgtgcacgggaacgaactatcctcccaggtggctgcaatgaaaatgattaaatacttgtcagataatccaatcagtggaaccgtgtatataatgccgttcgtgaatgtgaaggccattgctaaaaaggtcaggtatacagacaaggactataaccggatagcttctagttccggcactatcccaaacaagatcgttaaactggtcgtcaaatacaaatgcaattcctacggggacttccacacgaccaaacccggtggagcccctgggaaggacatcgtaatgggaagcaagagcctgaaatcaaagagtgccgacctcaccaactacattgccaagaaatgcaaggtgaacaagcgcatctacagtcatattggccaggaatatcctggagcattgtttgagaacgtgaataagaaggggatcacctcagttatctgtgaagttgcccttccccacaatactgtaacaacaaaaacagtcaaaacatcgtttaacatgatgaagtacctcctgaaatacaatagcgtgatctga

SEQ ID NO: 9086 - DNA, 351 bp, synthetic construct
  source 1..351: mol_type = other DNA
gtgatcttcctcaacagaagctatgagatcaaaagctttaagaacaaaaaggaagccgaggagcttctaaagaaatcacgaaagagcattgacgagatcgacaatcaattattcgatctcatctcgcagaggaccgctctggccaaggacatagcgagttctaaagagtacctggaaattcccatcttcgataagtcccgcgagaaagtcattcacgacaagattcggcgcctgtccgaagagaaagggctggatgtggatatcattaatcagatagtggacatgttgacaatcctgaataagaacgcacagaaggaaatcctcaggcggaacgtagacggcaagtactga

SEQ ID NO: 9087 - DNA, 198 bp, synthetic construct
  source 1..198: mol_type = other DNA
atgggcaatattcgcaccagcttcgtgaagcggctcgccaaggagctgatcgagacacacaagggggtgttcacgaccgactttgagcagaacaaaaagctggtccaggaatacagcactgtgtccactaaacatctgagaaacaaaatagcaggatatgtaacaaggctaatccgactcgagcaaacccgggaatga

SEQ ID NO: 9088 - DNA, 1221 bp, synthetic construct
  source 1..1221: mol_type = other DNA
atggatctcatagtagtcaaattcggaggaaccagcgtgggtgacgggtccaggatcaaaaaggcggcgcagtccgtcgtaaacgagtacatgaagggcagccaggttgtcgtggtagtgtcagctgtcaacaagaccacggatgagctcatcggcctctctaatgacgctatcggcactggtctgacggacaagcagaaggcggagattatggccatgggtgagttgacgagtgctcgactattcagtgccaccattgagtctctgggggttaagtcggagtttatcgacccttacaataagttatggccaataataacagatagcaattctttggaagccaaaatagacctcaacactagcaacaagaaaaccgaagggattaaacagctggtgaaccagggggtgattccggtgatctgcggctttctgggaaaagggcccagcggtgaaatcacaacactgggaaggggcggaagtgatatcaccgcattcttgatggggcattgcctggacgccaacgaggtggtgatcgtgactgatgtcgatggggtaatgtccaccgatcctaacaagatcgaagacgccgaactcttggatacaatctctgtggaggagctgcgggacctggctacccacggcgcccaggtgttgcacccgcatgcactgaagtacaaagacccacttatcagcgcaaaaatcattaacttcgctaatgaggacttaagctccaagggtactcggatcgtcgggcccttcgagggcgaaatgctgaaatgtgttacactgtataaggaccctatctcactcatcgccattgtgggagaggccatgctcaagaaagttggacttatggccaagctcactacagcccttgcagatgacggcatcaatatttttggcatgagtgcaggccaaaactcaattacagttttcgtcaacaaggtggactcaaataaggcatatcttctgcttcaccaactggtcatcgacacggacgtgctaagctcgctgtccctgggaagagacactgccatgataacctttgtgagtcccgatattatcgaaacccccggcattatatccgatatcaccgagccactgcgcaaaaataacattaatattctcgaaattacctccagccagaccgctgtcgtgctgttcgtggattgggaagacggcgagaaggcccacaagctgatcacagaggtgctagaatga

SEQ ID NO: 9089 - DNA, 894 bp, synthetic construct
  source 1..894: mol_type = other DNA
atgaattttgagggcacatacgttgccatggtcactcccttcacaaaagacggaaccttcgatgaggaaggcttccggtcaaacataaattacctgatcgaccagggggtcaatggtcttgtgggggccggcacgaccggggagagcgctaccatgacgcatgaggaacatcacaaagtcatcgaagttttagtagatgaagtggacgggaaggtggacacaatagccggaaccggcagcaactccacatccgaggccttgtctctcaccaagtttgcgtgcgatgctggcgtggacgcagctctgctcatcactccatactacaacaaaccacaacagcacgctttagtaaagcactatggcactatcgccgaagcttgcgatctgcccattatcgcgtataacgtgcccagccgaactggatgtgatattgaggtcgagaccgcagtggagttggccaaaattgacggtgtggacgctatcaaggaggccagcgggagtgttgacaaggtgtcggacatttatcgggcactggccaatgaagacctggaatctgagttcaacatcctctccggggaggactccctgaccctacctattatgtccgtgggaggcaccggagtcatcagtgccagcgccaacatcgatgcaaagagaatggtgttgatggtggatagtatcctgaacgatgattacacacgcgcacttgaactgcactacgagatgctggaactaatcagggcgatctttgtggaatcaaatccggtccctgtaaagacggcaatgaacctcatgggcctgccttcaggtcccctgagggagccactgtgcgagatgaaggacgagaacctggagattctcaagatagccctcaaaaatagcaaccttatttga

SEQ ID NO: 9090 - DNA, 822 bp, synthetic construct
  source 1..822: mol_type = other DNA
atgatcaaggtggccgtcactggcgccgctggacgcatgggctccggcattatcaagaagatcacggagcaggatgatatggaagtagttgcagccatcgaaatgccaaacacccccctggccgggaaagatgcaggtctccaagcaggcattggggagatcggcgtgggaatcgtgggctctgaacgactcgaagagacactgaagagctcgggtgcggaggtcttagttgattttacgatagcccctgccgccgtggaaaccattaagacagcgaccagctgcggagtgaatgtcgtggtgggcaccacaggctttacagacgaccagatggctttgaatatcaagaacgttgaggacaacaaggtcggggctgtgatttcaagcaatatggctattggggtgaacgtgttcttcaacacactcaaaaaactggctccccttctgtacgacttcgacatcgagatcattgaggcccaccacaaccagaagaaagacgccccaagcggaaccgctatgactgccttcgaagtaataactgatgcacttaataggaaccccgaagaggtgggagtattcggacggaaggggctggtgggaaagagaacgcctgaggaaattggcgtgcatgccatccgtgggggggacatagtgggcgaccacaccgtcatgtttgttggtgagggggaaagatttgaggtgaaacaccaggcacatactagggaggtcttcatcgcgggcgtcatccgcgccgtccggtatgtgccgaccgcacagaaaggtgttgtcagttccatgaatgatgtgctgggtctagagtga

SEQ ID NO: 9091 - DNA, 1050 bp, synthetic construct
  source 1..1050: mol_type = other DNA
atggtgaaggtcggggtacttggggcaacgggaatggtggggcagcgctttatccagctgctcgaaaaccacccagatttcgaggtcactgctttagccgcctcctcccgttcggccggcaagcggtacgaggacgctacaacatggtatctggatagtgaaatgccaaatagcgtaaaagatatcattgtctgtgaaaccaaccttgaggatatggacaacgacatagacataatattttcatcgttgcccacggagtttgcctccaaggtggaaaagaagttcgcgaaggactatgtggtggctagcaacgctagtgcacacaggatgaagaaaaatattccactggtgattccggaggttaaccccgaatatctggacatgattgatgctcagcagaaggagaataactgggatggcttcattgtcaccaatccgaactgcagcactatcgccctcaccctcacattgaaacctatcgtggacaattttaatgtaaacagcatcagggtatcaaccatgcaagcagtgtctggagccggctacaacggagtgccctccatggcgatcgttgacaacttggttccctacatcgggaatgaggaggagaaaatggagtccgagacactacacctgctgggtagctacgacggaaacgtggtcactaacgcggatttccgactgagtgcctcttgccaccgggtgcctgtgattgacggccataccgaagccgtctttgtggagctggatgacgagttcgacatcggcgacgttaagaacaagatggcaaactttaaggcactcccccagaagctgaatctgttcagcgcccccgagaatcctgtcatcgtcaaagaagaaaatgaccggccacaacctcgcatggatagaaacgcaggcaatggcatggccgtgaccgtgggtaggatgagaaaggacaaaatattcgagaacagcttcaaatacgttcttgtggggcataatacgatccgcggtgccgctggagcttcaattctaaacgccgaactgatcaacgataaaatcctctga

SEQ ID NO: 9092 - DNA, 1158 bp, synthetic construct
  source 1..1158: mol_type = other DNA
atggagttaggaatggatgttgaaaaggataccctgcagtccctgatccgaagttgcttactggagcttaataaactgaagtacgacttaactgagctcgaagtggaaagggccaacgataacacaccacagaggattaaggagctagagaaggacatcgtggataaggagaaagaggtgtccgtcatcaagttcaaagccgaagacgaaattaacctgttgaaaaagcagctcggggaaaaagacatactgatcaaaaatcaggaagatcgaatctacgagttggattacgtcaacaactcactggatgagataaaggagtattttgcggagcagctgcgggactacaagaaaaaagaattggccgacgtaaatgagcgcctgactgactctttcaaaagcattgctgagaaggaggccactattaacacgctatcacgcaccatcgacgactataagatcaaggttatcaagctcgaaaacaatgtggagagccaggcgcagatcctggagcttgaaaagcagctggagcttaaagagaatgagattcgcataaaggacagtgaaatcaacaagatggatggtgagttggataatctgaaacaacagaccatccccaaagatgagtacgtgaacctgcaaagcaagttcaagtccgaaattacggcaatggacgctgaaataacgaacctgaagcaggaaaccatccccaagaaggactatgagcaccttcaaagcaagtttgactcagaaatcaaaaacctggacaatcagattaacagcctcaaagaaaacactatccctaaagatgaatatgtgagcctccagacacggtttgagaacgaactgtcggcccgtaatagtgaactggagtacctcaaagaaagatccatccccaaagaggactacctgaccctcaagacccaactgcagaatgaaataagctccagggagaatgagcttagatttctgaaggagcagaccgtcccacgggaggattatctcaagctgcagaatgagctcacaaagaaagacggcaagattaagcgcttggaggagattaacgcattcttcaacgagctacaggaagagcaggaggcttacgagacccaggaaacaacaccgcctttcagactcgagaagaaacaaggccggtga

SEQ ID NO: 9093 - DNA, 1611 bp, synthetic construct
  source 1..1611: mol_type = other DNA
atggcccagggacagccaatctttatcctgcctgaaggcactaacaggagcgtcggccgcgacgcacagcgaaataacatcctggctggtaaggtccttgctgaaaccgttcgcaccacactggggcccaagggcatggacaagatgttagttgacggacttggggacattgtggtaaccaacgatggggtgacaatactgaaagaaatggatattgagcatccagccgcaaaaatgctcgtggaggtcgccaaaacgcaggaagacgaagtgggcgatggaactacaacagcagtgatcattgctggcgaactgctgaagaagagcgaaaatctgctcgattccgacattcacccaacgatcatagctatgggctacagaaaagctgccgaaaaagcccaagaagttctagacgaaatcgccattgacgatgtggatagcgagaccctggttaaggtggccatgaccgcaatgaccgggaagggcaccgaggcagcccgggagccactcgccaagctcatcgtggacgcggtcgaggccgttgccgaggatggcgaggtggatatagacaacatcaagatcgagaagaaggacggggctgtggtggaggagagcaccctggtggagggggtgatagtcgacaaagagcgggtccaccccggtatgccttcagagatcaaagatgccaagatcgccctggtgaacgctccgttggaggttaaagagacagaggtggacgcggagatcaggatcacagatcccgcccaaatgcaagcgttcatagagcaggaagagaagatggtgaaggacatggtggaccaaatcgtggccgccggggcaaatgtactgttcgcccagaagggaatcgacgatctggcccagcattacctttctaaggctggcgtgctggctgtccgcagggttaaaaaatcagacatccagaagctatcgagggccactggcgccaacgtcatcaccaatctggacgacctcactgccgaggacctcggccaggccggcattgtggaggaaagaaaggtctccggtgaggaaatgatctttgtcgaagagtgcagcggagcgaagtcagtgactctcttcgtgcgtggaagtactaagcacattgtggatgagattgtacgagcaattgaggacgccattggtgtcgtggcggccacagtggaagatgataaggttgtggctgggggaggagccccggaaattgccatggctaagaaactcaaagattatgcagaaagcatcagtggacgggagcagctggccgtgaatgcttttgcagaagcgctagaggttgtacccaaaaccttggcggagaacgctggcttggacagtatcgatagcctggtagatcttcgcgcagctcaggagacgtcccactacatgggattggatgtgttcacgggggaagtcgccgacatgaaggaagcgggggtaatagagcccaaacgggtcaaaaagcaggctatccagtcggcatccgaggcagctgaaatgattttaagaatcgatgacgtcattgcctctaccaaaggtccagaggacgcaggtatggacccttccgcaatgggcggcatgcctcccatgatgtga

SEQ ID NO: 9094 - DNA, 219 bp, synthetic construct
  source 1..219: mol_type = other DNA
atggagaacctgagcttcgaagaatccctggagaagctcgagcggattgtgaacaacctcgagaacggcaatgtgccacttgataatgcgatcgacgagttcaacaatgccatgaaattggtgaagatctgcaacgagaaactgaacgcagccgaggaaagcatagctaagatcgtaaaggagaatggggaactagtcgaatttaatcccaccgagtga

SEQ ID NO: 9095 - DNA, 1257 bp, synthetic construct
  source 1..1257: mol_type = other DNA
atggagaaagagactataacagtgtctcagatcaactcatacatcaatcggaagttgaagaccgatccgaatttgaaaaatattctcatcaaaggtgagatttccaactacaagtcgagctttagcggccacagttatttcacccttaaagacgagaaatcccagatcgatgcagtgatgtttaaaggcaataaagaccgattccttaaatttgagcctgaaaacgggatgaaggtcatcgtcaaggggaagatcgaagtgtatgagaagacaggcaagtaccagttatacgctactaagattacggaagacggaatcggaaatctacaccttgcttatgagcagctgaagaagaagctggacaaggagggcctgttcgataatgcacataagaaggagatacccaagtaccctaaaattatcggggtagtcaccgcccagagcggggcggccatccgcgatatcattacaaccataaagaaaagatatccagtgtccaacattctcgtattctccactctggtgcagggcgaccaggcagcccaacagattgtcaagcagatcaaatacgcacaagagtttaatatagacacactgatcgttggaagaggtggcgggagtatcgaagatctgtggcccttcaatgaggagattgttgcccatgctatctacaactgtaagatcccaataatcagtgctgtgggccacgagatcgattacaccatatctgatttcgtagcggataaaagggccccgacccccacgggagctgccgtgcttgccgtccccgacataaacgaagttaagaacaacctgaacaatctctcaaacagggcgaacaagaatatcacaaaccggatcaagcaaaacaagactaaactgacacacattagcgagaagcagattctcaaaaacccagaatccatctacgaaatcaaaggaatggggctggacaacattgtcaacaagttgcacttcatcagcaagaacataatcaacagcaacaagactaaactattcaagctcgaaaattcaattgttctgaagaaccccattgagatcaccaaaagcaagcgtgacgcctgcctgcgcaatattgaaaaattagagatcctcaatcctctgctgaccttgaagcggggttataccctcgccaaaacgaacgacaaagtggtgagctcggccaaagacgtgaagaccggcgaccagctggacattgaatttgatgacggaattgtgaatacgaaggtgatctga

SEQ ID NO: 9096 - DNA, 231 bp, synthetic construct
  source 1..231: mol_type = other DNA
atgcggattaaggaggaactattcggcaaagaggtgctcgacgcagaaatccagattgtggggaaggtgaacgatgtgatcttcgacaaggacacgtttgaaatcaccgatcttgtaatcaaaaaaacaggactgagcgaacagattaaggccagcgagaatatagtccccatagagctggtcaaggttattggcgacaagatcctcctgaaaggtgaggatgacatctga

SEQ ID NO: 9097 - DNA, 528 bp, synthetic construct
  source 1..528: mol_type = other DNA
atggtgtccagggaatacctgatcaatctactgaaagacaacaacgtatttctcgaaggtgacttcacactgagcagcggacagaagagtaactattacatcaatatgaaaaaggcgatcacggagcccgagattctcagcacaatttcgaaactgatcacttcaaaaatcgatttggatgacatcgacaaggtggccgggcctgcactgggggcagttccaatcgccaccgctgtttccttggagtccaagattccgctcctgatgattagaaaagaaaagaagggctacgggaccagcaagttaattgagggcgaacttaacgaaggcgacaatgtgatcgtcgtggaggacgtctcaaccactggaggaagtctgcttaaagccataaaggctatcaatgataatggcgggaacgtgatacgggccttcgtcgtcgtggaccgccaggagggtgccattgagaagttcgaaaaagagggcatcaagctcgagcccctgataaacgtgaacgagtttttcgattga

SEQ ID NO: 9098 - DNA, 507 bp, synthetic construct
  source 1..507: mol_type = other DNA
atgaaaagtaagacaaccatcgaacaccagaaaatgtcatccaatgacattacgtgcggtgtaatcacgctctccgatagtaggaagagcaagaaggtggacctctcgggccagtacatggccgaagaaattgaggctcggtacactctgaaatctagaagcctcattccagacgagaaggaggacttgatcaacaccatcgagaccatgatagacgatgacatcgatgtgattctgacaactggcggaaccgggctggacagccgggacatcacagtggagaccgtggaaagcctattcgagaaaaagctggatgggtttggcgagatgttccgagccaagtcttatgatgagattggggctgcggcactgctttcacgcgccaccgccggaatctacaagaaaacagttatattttccatgccgggcagccccaacgcagtgaagactgccttcaacataatcattgatgaaatccctcacttcgtccatcacgtcaagaaatga

SEQ ID NO: 9099 - DNA, 339 bp, synthetic construct
  source 1..339: mol_type = other DNA
atgttcaataccgagctcatctcaaagatggggaagatcaaggacaagaagctttccaacctgctgatcggcagaaaaggcggagccaccacaattaagattaccgatcagatattgcaccaaccatccaatgcaaaccagctgtctaaacgcctgcacttagactacaagacaataacgtaccacctcaacatcatgatcgaccataagtatgtggaaaaagagaaaattactaacagctacatctattaccccagcaagaagctgtataactgcatcgaggaatatagtctaatcaggaattttctcaaaattgaatacgagcggtacaaaaaatga

SEQ ID NO: 9100 - DNA, 801 bp, synthetic construct
  source 1..801: mol_type = other DNA
atgaccaacatccagaccaagaaggagctgaatgaagagtacaaaaatgtgaaatacattctgacctccagtatgcgcactaaactgctcctggcgctttacgagcacagtaagaagttagaggagataagaaaggacctgaaaaaaccgtcagccactatcttgcatgggcttaaggagttggagaacaagaacttaattcggaaaattcagaagcactatgaactgacttcaaatggatacattctcacaacaaacatgataaagctgattgaaaattggtattctatcaataaaagcaagcaattttggaataagcacgatctgtcggacatccccaaggagatgctgaaagacatctatctgctgaaaaacgtagaatacgagaccagcacaacaagcgacctatccaacgccttcaacaaatatatcaaacttcttctcaaaagtacggagctaaaaatcattctcccaatctactctgaaaatcactttaagcacatgatagatttcctcaacaagcatgaacaggcaaagttggagctgatcgtcaatgagaagattctaaattccatcaaacagaacaagaacctcgaaaggaagcttctcgagaatgaaaaggtgatcgtgaaatgcatcgaacaggatctgaagctgttcctcacctgtagcgataacttcatgtccctgacgttgttcctgaacgatggccattacgacgactctcagatcctcatcggcaaggacaagaacgccataaagtgggctctgaacctgattcaatgctttagccacaactga

SEQ ID NO: 9101 - DNA, 792 bp, synthetic construct
  source 1..792: mol_type = other DNA
atggacattcacaatgaaattaacaacaatatcaaattccttgccaagtcagagattcgcctgaaaatcctgagcgagttgcagaacagccccaacagcgtccatggcctcgtgaagaagactaagataacatacagttctgtctccagcaacatcaacaagttggagcagaacaactacattaagaaaataaagtccaagtactacctaaacccgatgacgaaaatctatttccagacactgatggattttaaaaactcggtagagatcataactagctattccgagttttgggacaagcacaatctgaatcagatcaacatcgacagcttaaaaaatattacggatttgaaagattccaaactgattgaaaccaccccccttgacatctataaacctcacaacaccattaagagccaaataagtaacagcaagtcacttaaagccatattcccatacctccatccagaataccctcaactgatcgaaaacatcctgaaggacaatggacaggtggagctcattatccccaagagcatctccaatgcaatcacatcaaagattgatctgaagacccggaagactgccatcaaagagaagaagctgacaatttacccaattgaaaacaatctcaagatctatctaaccatctgcgataagagcatgagtttcgggctctttaaaaatgacgagagtttcgaccagaacaggatactgatctcggattccgagaaatcacaggcgtgggctgacaatctgtttaagaatatcaagtatgacgtgatcaaatga

SEQ ID NO: 9102 - DNA, 507 bp, synthetic construct
  source 1..507: mol_type = other DNA
atggaaatttgctacatcctggatgcctccgctttcatcaatgggtttaagctggactccaacaacaacttcacggtccccgaaatcactgccgagatcaaagacttcgaaagccggttgatgttcgacatggccatcgacgagtgtaaactgaccatccaggacgtgccaaataagtacacaaattgcgtgaacaagattatctccgagagcggggatatcctgaggctatcatttccggacaagaaactcatagcactcgcgtacatgttcagtaaggaggggagaaacgtaaaagtcatcagtgacgactataccattcagaatacacttaagattatgggtattccttacagcggcattataaccgagggcatcaaaggaatctacaactggaaaaaggtttgcgagggctgcaagaaggaatatgacgatgattatccctttgatgattgtgagatttgtggatcgaaaatatacaagaaacgcatcaaggtgagcaagtga

SEQ ID NO: 9103 - DNA, 1116 bp, synthetic construct
  source 1..1116: mol_type = other DNA
atgcgcattgggatcgttgtgcacggccccaacatcatcgattcaggctacgcgctcaagctcattgatctacttaagaactacggcaatattagcgtcagacttgggggcaccatgggccgcacagcggtgattgacgctagcttggagaatataattgacataactcgtaagctggtgcccagcgattccttaaagatcttctccgacgagggggtcgacttgatttttctcctcaactacggtaaatccaacgttaccggacaagttttcggctataaggtgtataaccattacgccgacaaggtaacagaaaataacgttccagtgattcagatcgagcgacctggtgaggaagacggtagcatcatcccatggaataatgatctggacattgtgcatgatctgtctaaaaagctgaacttggccattgtctatccaaatgaagtctatgagaaccacatcaaacaggacaacgctaatgttaatcagagaattgtccacggtgtaagtccggacgaaaatatcatggtgaatagtgtggtcatcggcaagactaactcggataaactgacacttatagcccgggacaaccacatcgtggatatcatcggaggggagctgaagcagcacggactggagaagctcggggaagtggacctggacagcgcaatcgtcaagaccggcctcctgagacatgcaaaagtaacccctcgggtgatttcaaccaacaagtccaacgattacaagattacgttcttagaccacgccggggaggacgtctacaaattccgcgattcatctctggtaattactgtgggggatgatacaaccctaattagctcggatatcctgtataggttcgatatacccgtcatcggaataacggatggagacctggacaaggtggtggaggatggattcaaggtgaaaaattccatcatcttcgaggtggagaggggctttgacgacgttgtgggacgggacatcaaaaggataatgtttgacggcgcccaggaaagctttaattacctgaacattgaggaggtgcgagacaaaatcatcgaaatcatcaacaacatcaactgcaagtacaaaataagttacatcgaatga

SEQ ID NO: 9104 - DNA, 975 bp, synthetic construct
  source 1..975: mol_type = other DNA
ctaaattttaaaaatctggtgaaggagatccaggagtttaagggcgtgtcccggaaaagtagcattaataacgtcattagcctgttagaggagtcatacaatgtgagcggtgatgttgtaatcgaaattggggatgacgcttccgccatcgacatcggaaataaccaggtcatgctcattgccgccgacggtatttggggcgacatcatgaacgtgaacccctattgggccggatactgcagcgttctggtgaacgtaaatgacattgcagcgatggggggcaagccactggcgatggtcaacataatgtccataagcaacgatgaaatttacgaggacctgttgaaaggcatcaaggacggatgtctcaagttcggggtgccaatggtgggtgggcatctgcaccccgatggggaggtagacagcttgggagtcgcgatagtcggaatcgctcagaaagataagatcataacaagttttggagccgaagtgggggacaaggtgatcgtcgcaatcgatctggacggcaaacctcacgagatgttcaatctcaactgggacacaacctacgacaaggacagccagcttgtgagggatcagattactgctgtgcaatacctcgccgaacacgactatatcaaatctggcaaggatatctccaaccctggaatcttgggcactctcgaaatgctacttgagacctcaaaaaagggcgctatcgtcaatctggaagatatcccgcgaaacgaaacgctggggtgggcagattggctccgctcatacccaggttccggctttgtgttcaccgcagatgaggacaaatgcgaatatattcgggagtatcttgccaagtattcgatcgaagccgccgttgtgggcgagataaccgacagcaatagtctgtacctgaactacgccgacgagcaagctgagattttcaaccaggataagaaccccgttttcatcttcagatga

SEQ ID NO: 9105 - DNA, 741 bp, synthetic construct
  source 1..741: mol_type = other DNA
atggccattactaaaaaacatgtcttctccttactcatcatcttgattatcgctcttggcactatctctatatctagtgcttacgtgggcaccgggttttcccatgatattcccacctcaaaatatcacgatctgtctgcctcagacattctgaacaagtataacacgacaaattgccacgtcgaagaaaacggcgtctgcacaaaagtggttgatggcgacaccatctaccttgataacgggaagaagattcggttcgtgggagtaaacaccccagaaaggggggtggaggggtacattacctcgaagaatttcgtgcagaagctatgcctcaacaagaaggtcgggctggatatcgacgacagcaaatttacggaccgatatggaagaactctggccgttgtgatcgtggacggaaagaatgtgaatgagatgctcctgaaggaaggtctggccgagatcatgtacatgccgccttccgagtttaatccattcgagtggggcaccaccaacacacatgtggacaccacacactcgagctcttccacaacgcataccagtacagagtccaccagcagtagcgatagcgcaaaatacatcggcaatgcaaacactggcaagttccacactgcgggttgtagcagtgtcaaccacatgtccgagcacaataaagtatttttctcaagccgcacggacgccataaaccagggatacacaccctgcgaaatatgtaacccctga

SEQ ID NO: 9106 - DNA, 1548 bp, synthetic construct
  source 1..1548: mol_type = other DNA
atgctgattaagattaacggcgaggagatggacgtggccgaggcttccacaatccaggacgtgatcgaggagaccaacgccccatatactcctggcagcattgtttgtctgataaaggggaagaaggaacttgagaagaatatcagtaagtataaaatccgaaccaacaagggcagcattgttatccaattggacgaatctgacgaagccaagcctcttgtggatatttggaagaatcagtatgatgaatttgtggacctcaacatccggtggtcgacgacaactgaggtggccattgggcctatcgtaaccgatctcgaaccaacttcagaggaatacaagtactacgagggagatgttgttttaagtttatcaagtttctccaacgagtcgacccatcttatattgctcaaagacaacaccactaatgtctatagtgtccccccattcaacaagggcatcttcgctcgcgtgatcggggggaagaaaacgctggataacctgactgacgacgacagcgtatcctccatcgagcccattatcgagcgcagcacaaccaaggatatcgtctcagtctctgacctcacgaccgtgcttgaagaaggcaacgaactctacacctacatgagcttcgacattgatgaggagtccccagtgtgcgtggagcacctctttgcactgataaaagatggcaagatgaaggtgagctacgaatccgaatcattcctgggtttctatgaactagccagcctggagaagcccaaggagcacgtgacaaagaggaatagaggaacaatcaccgtgcgcagcgacggcgtcggggtgggaaaactgttcatctaccgagagaacagagtgttgagccccaatcacaccaccgtgggaaatgtagtgaaggggatggagctgatcgatgccgcaaaagaaaacgaatttattacagtgaaagctgagcaaggcaggctgatgctcctgaacaaaacgcaggcggaggcgaccgaaatgctgtctgccgcaggtgtcgaacatatgatagatggactcgtggatgacaatgccatcatcgtggagcagacgccccagcacacaattgatatcctaaaagagggtaaagttatcactaaagctattaataaggacgacctatgcacaattaagttcaccgacaacgccccacggagcgtccggtactttaaactgctgtccggtctcctggagaatcctgtagggcagattaagatccacttcgcagtcccgggaatgcatatcgtcattttcgaaggggacaagaaagcagctaaagggttggtccctgagaataatcccgtggacaaagtcataaggggccagataggaattactaacatggcttcaaaaagtgcaggtctgatcggcatcagatttgaggataattctgactttggcccgaccgccgagacctttgatgcgacaaacataatcggagacatcacttcggactacgattaccttgagaacctgaaggaaggcgttgtggtgtatgttgccgaatctaacaacgagtcctga

SEQ ID NO: 9107 - DNA, 474 bp, synthetic construct
  source 1..474: mol_type = other DNA
atgctgccgaacctcaccatgtcccccaatttggggacagaggactgggaccctgatgtcatcactcgcatgatctttataggccccggcgcccacgtctcagaacagcaagtagtgaacgagtttcatatgcttggactcccactgacaatcaagaatacctgctatggctctatgatctccggaaagagtgaggatgtgtacaaagccattaaagagattcggaagctggaccctagccacattttcacgaaagagcgaggattcgcacctggcgatccccgccggtgcagaggtcatagattcgggccaagggaaggtttccaccagatggaaaaagagtacaagatactagggttcgtgagcgaggctctggagaaccccaaggaggtggaaattgaagagaagaaaccaatcgacgttgacgaatttaagaagatcatgaacaaatgtctggataagaagaataggtga

SEQ ID NO: 9108 - DNA, 456 bp, synthetic construct
  source 1..456: mol_type = other DNA
atggttaagatcgccctctaccctccaaactcattgattttagcagatctcctggagaggaaagggcacgtccctctggtccttcagaagcagattcgccaaaaaataaaggacccggagatcgattctcccccaatgaatattacggaagaagatcctctcaacgggctgaaatacgccgccatcgaagtgccgtccggagtgcgaggacggatgagcctaattggtcccctcatagatgaggccgaagcggctatcatagtggacggcgccccatacggcttcggatgcatcggctgtgcaagaacaaatgaactgagtatctttttgcttcggaacaagggcatccccgtgctggagctgaagtatcccgacaatcaggacgagacctatgtcatggtgaacgctatcaacgagttcgtagacagcctggaagagaccattggggaggagtga

SEQ ID NO: 9109 - DNA, 1242 bp, synthetic construct
  source 1..1242: mol_type = other DNA
atggtcaaaatcgccctggtgtcgtgcgggaccgaatatagtgggatacaaaaggaaattgaaaaggccgccaacaagtttggtgccgagatcatccttccggaaatcgacctggactacatcgatgagagctatgtcaaattcggattcagcgcgcaaagctcaagcctgaaactgatgatcgcacgcgcaatggctatcgtggaaggaagatgcaggcccgacgccgtcttcattgcaacgtgtttcaggtgtgcagaggcagcactagttaggaacgaggttagacgattcatacagaataatacacggattccagttgttacgtattcatttaccgaacggacaaaggccgacgaactgttcattcggatggaggccttggctaccaccgtcactcggagaaatatcctggcgcgggagaagcaagaggggctgactctgggcctggactcgggctccaccacaacaaaagcagtgctcatggaaaacaacaatgtgatagggaccgggtggacaagtacgaaggacatcatcgaaagcgcaaatatcgccgctgctgaggccttcgagggcactggctacacctgggatgatatcgatggtatcggaacgaccggttacgggcgctttacaatgggtgagaagttcggtgctgagcttgtccaggaagaattgagcgttaatgccaagggcgccgtctacctggccgactgccagaagggagaggctaccgtattagatattggcggcatggataacaaagtgatcaccgtgaacaacggcattcccgacaactttactatgggaggcatttgtgccggcgccagcggaaggtttctcgatatgacttcccgtcgactagacgtggatataaccgagttaggcccactcgctgtgcagggggactggagaaacgctatgctcaactcatactgtatcgtgtttggcatccaggacctggtgaccacactggcggcgggcgggtctaaggctgacgtggcggccgccgcctgccactccgtgtccgagcaggtgtatgagcagcagctccaggagatcgatattcgcgagcccttgatacaggtggggggaacaagtctcatttctggcctggtggaagccgtcagtgagactctgggaggaatcgacgtgattgtacctgagtactcccagcatattggggctgtaggctgcgcacttctcgtctccggtatgggacaccgccaggacgataaatga

SEQ ID NO: 9110 - DNA, 561 bp, synthetic construct
  source 1..561: mol_type = other DNA
atgctcgtggagtgctacgatgagaggggcgccgaggtctatgagatcatcattaaacagatcttccaggatctggtgctaggttccagcgttgatgacctgaaggcctacgtgaacccagacgacccggtctttgtgctggcgatcaaaatgcggaagaccagtaatgtgatcaagtttgaagacgtggctaatttaatgtacaacaaacagaacgacgttaccacaattttgattgataacgagaattaccttcccaatattctcaaggagctctggaagagattctcaagagacgaaatctatcaaccaaacaggtatcagctggagatcaaaggggatttcacggagctggggagcattgtggtagacgacccccacagcaaccttcgacgccgcatctacgacgcagtcttccggatactgcctgaaggattcaagatcattaaagatttgtccactgaagatatcgtgacagtagtcgcaaccgacgagctgatcaaggatgcctggattgaaaaggctctggaatttatagacgagctcaacaagggcatatga

SEQ ID NO: 9111 - DNA, 867 bp, synthetic construct
  source 1..867: mol_type = other DNA
atgaatgagcacaagggcagtcgcttcgctcatatcacacgcgcccacccatgttttaacgaaaagatgcacgacaaggtcggacgggcacacgtgccagttgcaccaaaatgcaacatcttttgtaacttctgcacccgggatatcaacaacgaagaagacaggcctggtgtgaccagctgcattatgcagcccgatgacgccatcaatcatattaacgatgtgaccgccgacggtcccatctcagttgtaggggtcgcggggcccggcgacagcctagccaatgacgagactttcgagttttttgagaagctggccaccgaacagcctgatctgattaaatgcatgtccacaaatgggctgttactgccaaaatacgcagatcgactcgccgagctgggcgtgaactccgtcacggtgacaataaatgcgattgatccggatatcgctgtagacatctattcgttcatcaagtacgaaggcaaagtctacaagggatatgaggctgtggagattctcatcaaaaaccagttggaaggggtggagaaggccgcagccaatgggctggtagtgaaggtcaattccgtgctgatacccggagtcaacgacgagcacatagttgaaattgcccgtgaggtggagaagcggggcgcagctctcatgaacatcctgcccctcatcccgcttggaaaaatgaaacacttgcaaaggcctgactgctctatgatggagaaggtcagagaggaggtggaagagattatacctgtgttcagggcctgtacgcagtgtagagcggacgcttatggaatcccaggcaagaagagcgaagaccatcaccttggcatgactccccagagtcattactga

SEQ ID NO: 9112 - DNA, 921 bp, synthetic construct
  source 1..921: mol_type = other DNA
atggtcaagacgtacgtgtttggacacaagagcccggactccgatagcatcactagcagtctggtcatgaccaaccttgagaaggagctcgggaatacagaagttcaagcgtataggctcggaaacatcaacaaagaaacagagttcatcctgaactacctggatattgacgcgcctgagctgctggagaatatcgaagatgacgctaacgtgatcttagtcgatcataactccccttccgaatctgtggagaacctagaaaatgccaacatcctgaaggttgttgaccaccacaaactggctctcaaaactagctatcccttgttcctgcggtttgaaccagtgggctgcaccgagactattttatgtaagttgtacgaagagaacaacgtggagatcacaaaggaaatggccaccctgatgctgtcggccattatctctgacacgctactcctgaagtcccccaccacgaccgaggacgataaaaaagctgtgacaaaactttctaagatagccgagatcgatgtcgaagagtacgggctgaaaatgctgaaagccggcaccgacttgagcagtttctccattgaggagatcctagcccttgacgcaaagcagatagactttaagaacgtaaagtcgatcgtaaatcaggtaaatacagctagtattcccgacgttctcgagatgaaggatgaactcgaggagggtatgaataaaatcattgagaaggagaaccttgatttgttcatgctgctcataaccgacatcgtcaatagcaattcacaggtcattgcactcggcaaaaatgccgatctggtggaaaagtcatatgacattaaactggaggacaacatggtgctgctcgaaggggtggtgtcacgcaagaagcaggtggtgccaataatgactgaaaacgcatga

SEQ ID NO: 9113 - DNA, 930 bp, synthetic construct
  source 1..930: mol_type = other DNA
atgaaaacactggaatgggaggataacaagctcaagctgatagatcaaacaaagctgcctgacgagctcacctatgtgtactgcgaaaactaccaggacgtgataatagccattaaggacatgatcgttcggggcgccccagctataggggtgtcagctgcgttcggaatggcactcgccgatattgagggtgtggacttaaataaagccgctctcgaaatcaagaccgcccgcccaactgcggtcaacctattctgggcagtggacagagtgctcaactcggacgatgccctgaccgaagcactgcgcatgtatgaagaggacatggccacaaacagggctattggaaaattcggctctgagatcatcgacgatggggataccgtgttgacgcactgtaatgctggggctcttgcatgtgtggactacggcacagcactgggagtattcagagcggcccacgagcagggaaaaaacattaatgtcatctgcgacgagacccggcctcggggacagggggcaagcctgagtgtctgggaaatgcagcaagagaacattcctgtcaagctgattcccgacgtggcgtccggctttctgatgtcccagggaaaaatagacaaggtggtcattggcgccgataggattgctcgcggcggtgttgtcaacaaagttggcagctttatggtggcccttgctgccaagcaccatgacatccccttctacgtagccgccccatacagcacctttgacaacgatattagcatctttgacactgtgatcgaggaaagggatggtgatgaggttcgttactatgggggggcacgaatttgccccaagaataccgaggtaatcaatcccgccttcgatatcactccgaaagagttgatcacgggcatcatcacggaaaagggcatcatcgacccgatctga

SEQ ID NO: 9114 - DNA, 447 bp, synthetic construct
  source 1..447: mol_type = other DNA
atgaacaagaaaatcgtaatactagtcattgtggtaatcattgctgtgctgctcttattcctggtttacgccaacaatgactcatcaagtaatagcaacaggacgatcctcaatgtgagttccgagggtcccatcgagcttagcaaaatcaccgacgacatcaaaaacaattcctactacgagggatatgacgtcgaaaccctgcgctggatggaatcgctgggggacaagtatgttttcaagagcaacgatgaaattgtcatcatggacaagtgggacgcagacaaaattccatccgcctatgtgtgtgatgcgtacttccgggagatatttagctgcaacgtgttggagaacagaacactgggcgatggcaatcacttcaaggatgtcctctttatcaagaacgtggaatttatcgatgaggaggtgcattacatacagatttga

SEQ ID NO: 9115 - DNA, 999 bp, synthetic construct
  source 1..999: mol_type = other DNA
atgaagtgtgtcaaggttcccctgaggcaactgaatgacactcgcataaagctgatggagaacggtctgatgaacatggagtataaaatcaagaccgatgataagtgggggtacatcccagtaaatgaatatgtgaacgattatgaaatcgtggatgtagaactcgaagctatgaaaaagttcccacataactttgcggaactcctcaaagacgagcttagcagcgaagaaattgagaatcttaggacaagctttgacacaattggcgacattgtcatcctagagatccctgaaaacctgcaggataagaaacagataatcggcgatgccgcccttgagtttacaaagagaagatcaatttacatgaagaagagcgccgtgaaaggaactacacgggtccgggacctggaatttctgagcggggtggacgataccgtgaccattcacaaggaacatagcgctcgcctgaaattagacgtgcgcgaggtgtacttcagcccccgactggcaacggagagaaaacgagtgatggagagtgtcgaggatggtgagaagatcctcgatatgttttgtggaatcggacccttcccaatagtcatcgcacacaataagaacgtggatatcgtggccgttgacattaataagtcggccatcaaatacttggacgagaacatcaagctcaataagttgaaggggaatgtaaaaacttattgcggggatatcaggcaggtgagtgacgatttcaacctgaaattcgaccgcataattatgaacttgcctggcctggcttacacgttcctcgacgtcgcagttgacctgattgaggacgggggcatcatcaattactatgagttctccgactcatacgaccggggcgtgaagcggctaaccgacgcctgcagtgcggttggcaaaaaggtcgacataattaactgccgtaaggtgaaatccacctccccgggcgagtggcacatctccattgatggaaaaatcaactga

SEQ ID NO: 9116 - DNA, 792 bp, synthetic construct
  source 1..792: mol_type = other DNA
atgttttacctcgtggggcttggactcttcgacgaaaaggatatctccctcaagggcctggaatgcttgagaaacgttgataagatatacgccgaatttttcacctcccgcctgttcggcagcaacttcaacgcgattgaagagctggtcggccagaaaatcgagatcttagttcgaggagaggtggaggaggagagtaagttcatcgaggaggccaagacacaggacgtggctttgatcatggggggcgaccccctcatagcaactacccacagtgattttctggtgcagtgcagcaaaaaagggattgactacgaggtaattcacggctcatccatcctgtctagcgcaccagccatatcaggtctccaaggatataagttcggtaaggtcaccacaattccgtttccagactacaatttttatcccaaatcgccttatgaggctatcgaggaaaacctaaaaatggacctgcacacactcgtgctccttgacatccaggctcataaggaccggtatatgacggtgaaccagggtctggagtacctgatgaatattcatgatacgttggacagggacgggctgattaatgaaaatactcttgccgtgggcatcgcccgggtcggcagcaaagatgtgtgtgttaaagcgggaaccataaacgagttaattgatttcgacttcgggggccccctgcactgcatcgtaatccctagcaagctgcacattgtcgaagccgaatacctagtggaaatcgccggagcaaactctaagctgctggatatcgtctga

SEQ ID NO: 9117 - DNA, 516 bp, synthetic construct
  source 1..516: mol_type = other DNA
atgtgcagcatctacaatatttataactgtctgtacaaactctacctgatgaagttcgagaagaccatgggcttttatgactcaaataggatgggagacatcctattcatcttccacaagaatcacaagaagtacctgaacgacgagcttagcaagtacaacatgtcgctgatacatgccctttgcattatcatgattcatgaatccgacgaactcaatcagaaggacctctccgatgggttgcacctcacaaaaagtgcaatcaccaaagctgtgaagaaactggaggacgagggttggattttgcgcgaaagaagcattgaagataagcgacacttcatcctgaagctgacggacaaaggcaacgatttcatacccatcatgaacgacatcaacaagaaatgggagtctgagatggggttatatgagctcgatccaaactttatgcagatatttaacgaactgactcaccgggccatcaatctaaacctgaagaaagagatgaaaaaggattga

SEQ ID NO: 9118 - DNA, 936 bp, synthetic construct
  source 1..936: mol_type = other DNA
atgagcataaaaaaggtcgtggtcgccggcggcggcgtactcggtagccagattgctctgcagaccgcatactgtgggtttgatgtgacaatctggctgcggagtgaaggatcgatcgaacgcgctcagccaaaactggaacgatttaagaacatctatgttgacactctggagaagatgaagacagatgcctccgcatactgcagaggtttgtctaaaaaggctgatctgagttctgaagagctcgatgccctaaaggagcaagcgcaaaacgcgtacgattccctgaagctcaccacgagctacgaagaggccgcaaaggacgcggacttaatcatagaggcgatctccgagaaccccgagcagaaaattgccttctaccaggagttagccaaacatatggaagacaaaaccatactggtcaccaatagttcaacattgctccccagcatgttcgctgagtatactggcaggcctgagaaatatctgagcttgcacttcgccaacaccatctgggctaataataccgccgaggtgatgggacaccccggcaccgagcagaagtactacgacgaagttgtcaagtttgctgaggatattaacatgattcctctcaaacttaaaaaggaacagccagggtatatcctgaactcacttctggtgccattcctaaacgccgggcaggcactccttgcaaatgacgtggccgatcatgagacaatcgacaaaacgtggatactggccacagggtctccggccggacccttccacattctcgacatcgtgggcctggagactgcctacaacattgtgatcatgaatcctgaatccaaggacccggagactacccccgggaagatcgccaagatgctgaaggaaaaaatcgacgcaggagagacgggtattaacgctggaaagggcttttatgaatactga

SEQ ID NO: 9119 - DNA, 525 bp, synthetic construct
  source 1..525: mol_type = other DNA
atggtcaggcctcggcgcatgagaagagtggtggaatgtcacaagtacaatcttaatgaaaaccgaaagccaatcgagctgagcgtcgacgaatttgaggccattaggttcaaagattatcgcaacataaaacaaattgacgccgcggaatttatgggcatttcgcagtccaccttccataggattctcaactctgcacgccacaaattggctatctccctcatcgaggggcgccggatcgtggtggtgcggggagacacaatgatcgatcagaacaaatacctgtgcaacgactgtggattccagtggtcaaaccctgagaagacgtacgagaagtgcccagattgcgggagcaagaatatccagcgactaaatagagacaagctgaggggcagtagccccgataagtgtcgttgccccgagtgcgggtatgaagagcccaaggtaaagggtgttccgtgccggaccaaaatctgcccagagtgtggctccagtctgcagggcagaggaatgtgtcggatatga

SEQ ID NO: 9120 - DNA, 285 bp, synthetic construct
  source 1..285: mol_type = other DNA
atgaacgacaatctgaagtacaactgtaacgagtgcggcttcacgtggatcaccctcaacggccagcattccatctgtcctaagtgtcacagcgagaaaattgaatatctgggtgaagtggaggacctggatataaactcaatcctagagcacaacaagagacgcgggggatgctgcgggagtgcccgggggaaaggaccactcacatgcggcaagccctaccccgaccaccatgatcccaatattccgcacgacccaagcaggtgttgcggccacaatgaatga

SEQ ID NO: 9121 - DNA, 231 bp, synthetic construct
  source 1..231: mol_type = other DNA
atgaaccatgtcaagaccgtaaagaacgaaacaaatgtggcacagcctcacaagcacacagaaccaagccagaacaccgatcataagatgcaaaaagccatgaaccagaagatggagaaaaacaggaatataaaggacgaatacactaaaagatccagcgtggaggagcccatcctggagaatatcaagcgaacgattccgaaccggaaacgctcaagtcaccggaaatga

SEQ ID NO: 9122 - DNA, 918 bp, synthetic construct
  source 1..918: mol_type = other DNA
atggataacgaggagcttcggactgtgagagtttacacaaagaagtataccagtaaagacaaggagggaaacatcgtggagaaagagtctcaacagaagcaggtcagcctgaagaaagaagatcccttcgaagacaatgatttggtaaaggtcttggccaaaagggagtacgagtcactcctggacaaccaattctctgatagcaagctcgatgagttctacaataggctcgaggcaaaggacgctgagatcgagaagttaaacagtcagattcagacactcaagggctcgtttttcgacgacgtcaatagtctgaaggaacagctcacttataaggatgaactactgaacgccaaagatgagatccataaactgaataagaagataactaagatcgacgacgaacgtgtggccatctttaaggagctggattacaagaacaagatgatcctggcctacaatgtcgagctcaataagtctatcctgaatgcgataaacgtggtgatcgatgaggcacgcgacaacattaaccgcagaaacgcacagctggtggaggacttggaaaaaagcattgaaaaatccaagcacgacgtgaatgagaagaacaaagccatagcctacgagatcaagagcacggttgaggacatgaacgaacagattcggaacaccagcacccttaaaatgatcctgaacaaaaagcggattaatttacgagtgcccaccgatgacctgcttaaaccatttgacttcgactttgatgtggagcaactgctgtccggccaggctctggaacttgacgctgcggagattctaaaagaggtcatgccgaagctccccgaaccattctccaaatatatcgatacgatcgaagaagaacctgaaaccattgaggtatcctcaacaaaacagggggaatga

SEQ ID NO: 9123 - DNA, 417 bp, synthetic construct
  source 1..417: mol_type = other DNA
atgagaaccttcaatgcgggaaagatcacttttgaatacccggataactgggaggtggaaaaagccgacatcttgagcaacccagattgcattgccaccctgtccaaagggcaggataatctgttcaatgcagtgagttttcccacggctacaaacctcgacgactataagattttcatggaggatgtaatctcggacgacggcggtgtgatcctgagctccgatttcgtgcagatcgcagataagaacgctatcaaagttcacgccaacatggacacccctgaaatcaacttcgacatccatacttacgtctttatagagaacagggagatttacattttcgagctccggacacttgacgtcagtggcgagagcgagcgcgaatttaagaatatgataagctcactacgattctga

SEQ ID NO: 9124 - DNA, 744 bp, synthetic construct
  source 1..744: mol_type = other DNA
atgatcaagaagttcgaaatcaagagccatgatggccctggacggatcggaaaggtggacggtgaactgaccccccggatattttttaaggaggagctgaaaatcgctccaaaccagggtagcgcccacaatatcgaccgcgaaatcgccgagtttaacgtaaaagaaacactgaaactcgctaaagagaacgcggaaacctgtaacatcgccgtgattcaggggtcgaagtacattgacctgcgaattgaatgcctcaaaaagctggaggagatcggctacaatggatttataatagcgaacggggatgcactgctaactaattcaagggagctggtggatattatcatctcccttaagaaggaagctaaaaagacaagttatttcatatttccattcgccgagctgtccttcatgccgctcctaacatatatggggatcgatggcttcttagccgacagcgcaaattattacagctacatgaatgtgctgcagacgcccactaaaagctacgacttgaacaattaccctatttatgagaatattagtcagaaggacctggagaaaaagaacctcgagaacatgaagttcgtcatcaaagagattcacgtccacatgaagaacaaatcccttagaaacctggttgaagaacgcagcggcaccaccccccaaaacatctcaaccttgaagattcttgacaagaatcatatgaactacttgctcgagtatacgcagatcttctga

SEQ ID NO: 9125 - DNA, 951 bp, synthetic construct
  source 1..951: mol_type = other DNA
atgattgtccgaggggtgttcttgatgtcgataataaatcggcttaaatccctatttaaaggcgacatcgataaggaggaaactgacatcaacaacgatgtgagcaacacatctgacgacgtcgaagtcacatctagcaagatggaggaatccatcagtcccgaaatggaggacagtaagaaggacctgactttcaagaaggacatcgagatcgtggaggactcatccgagattgcggaggaggttgaggccttcgaaaagacaatcccggaggagcaagagatcgtggccgaggaagccaagacaatagaagatgaggagaagacaaccgatgaagacgtggttgaggaagttgaggagaacagcaatgacaaagacaaaaagagagatacgatgacgctgctgaccgataaggaactgctaaacgatacgaaccgcgatccagattttactgctgagttcatcgacgctggaattgaaacagtaaagcactgtttccagtgcgggacctgcagcggttcatgcccatccggaagaaggacgccttacaaagtcaggcagattgtccgcaagtgtctgctcgggctgaaagaggaggtgatcgccgacgatgctctgtggatgtgcactacctgctacacctgtcaggagcggtgtctcaggagtgtgaaaatcgtggagatcatcaagaaggcccgtaacatcgcagctcatgcaggctacatggccaagagccacaaaatgaccggcgtctatgtactgaataccgggcatgccgtgcctattaatgacaagataaaagcgttacgggtgaaaattggccttcccgaagtgcccccaacaacccacacttatcccgaagcactcgaggaggtaaagaaattgtgcaagattaccgcctttgacgaactcattggttacgatgaagcaaccggcggactgaaagaatga

SEQ ID NO: 9126 - DNA, 888 bp, synthetic construct
  source 1..888: mol_type = other DNA
atggagatagcatacttcctagggtgcataatgaacaaccgctatcctggtgttgagaaagccacccggaaactctttgaagccctggatattgagctgaaagacatggaaggcgctagctgttgtccggcccccggagtattcggttcgttcgatgaggagacgtgggccaccgtcgccgcaaggaacctaaccctggctgaggatatgggtgtcgacatagtgacagaatgcaatggatgcttcgggtcactctttgaatgtaatcatatcttgaaggaggacgaggataagaaggctaagatcaatgccaacctggcggaaatcggcagggaatacaagggaactacgaacgtgaagcatatcgctcaggtgttgcgagacgatgtggggtttgagaaacttgcttcccttattgagaaacccctggacctgaacgtggctgtgcactatggatgccacttcttaaagccaaccgagactattggcatcgaagaccaggctgagaacccaagcatcctcgacgatcttgtcgagattactggcgcaaagagtgtggactacaaggacaaaatgatgtgctgcggggcaggcgggggcctgcgctcccgggacctcgatgtgacagccagttacaccaaggaaaagctggaacacatgtctgaggccggggtggacgccatcgtgaatgtctgtcccttctgccacatgcagttcgaccagggccaagttgaagttaatgaaagatacggaaccgactttgcaatccctgtattccacctggcccagctctatggcctcgccattggactgccagtggaggatttgacatttgacgcgcaaaaaatcgatgccacaagcgcggtcaaaaaggcactgggcgagtga

SEQ ID NO: 9127 - DNA, 267 bp, synthetic construct
  source 1..267: mol_type = other DNA
atgttcgtggccacattggacggaatcttcaaatacagcgacctgccagaagagtacgaaccctacgtccagtttaaggccactatagataagcgggagctaaagccgaccgacgaaatggcgatcctcaacattgctggcacgagcacacaccatgtgcttttcctggatgcctattccagtatcgcagagatcgaggccgaactgaaagaggcagacgctaagattaatcacaccaccctcaaaatcattgggggccacctgtga

SEQ ID NO: 9128 - DNA, 528 bp, synthetic construct
  source 1..528: mol_type = other DNA
atgagcctgccatctgagcagaactggctagtacttcagaatctcataatcgaccttacaaaaaaggggtacgaaatacccaacggaattaaccctgagatgggcctgatccggtcctcaatcagcagctacaagcgcgatccttcccatcccgagttgatcaacggcctggcaaaggcggaaatggccttgaataatatccagggaaccctgctgacgattgccgaagaagaaggggagaattatgtggattactggctcgatctacttaaacaggtcatgaaaggggaggaactgttcgaatttgccaagagtaggagcaagttcttggttaacacaccaccgggtttaaccaccggcaaaattaacctcaaggtgcccctggctgaggagagagtccaagaaattgcagagtggaacggcctgatcatcgagtttgaggatgacatgactgtgcaactccacggcgaccaggaggacctcaaaactggtctgaaggagatgggatcgttcttcctggacgactga

SEQ ID NO: 9129 - DNA, 690 bp, synthetic construct
  source 1..690: mol_type = other DNA
atgacaaagatcctcgcaatcagtgacattcacggcgaagagaacgagaatctctacacttacctgggcaataacgatatcgatctcgtgctgattctgggcgacatcactgacttcgggcccttggactttgtagagacatttattaacaagctgtatgaatatgacgtggacgtgatcgcgatccccggaaactgtgatccacaggggatatgcaacgcaattaacgatgtcgcattctgcctccacaacaatatcgtggcctacggggacgccattctgttcgggtacggcggaagcaatccaaccccattcaacacgcccggcgagacagacgatgatcacatctataagtcagtgtacgatttattggccaattatgactatgtctacaataccgaggtgccgaaagtcaaaatccttgccacccatgcccctcctttcaatactgacgctgaccgggtttccaacggcgagcacgtaggctcgtcaggaatccagaagagcattcacgagtttgaacccgaaatcaacgtgtgcgggcatatacatgaggcgaaaagtctatccaagatcggaaccaccacggacgttgccaaccctggaatgcttaaggataatggtgctgtcctgatcgacattaaagatggttccaactacgacataagcatagtgagcctggatgaatga

SEQ ID NO: 9130 - DNA, 903 bp, synthetic construct
  source 1..903: mol_type = other DNA
atgatctgggtgacttccaatgtggatggcgaggagtacaaagagccattctccaagggaattatgagccgttcactcaatatctcttacattggctctaaaagagcatacgaactcgcctccgagatcgaggaggaactcatcaaaaaggacatgagcgtgattagccgggatgagctggccgacattgtcctgaaccatctgatcacggtagaccccaagatcgccgaaaaatataaaagcctacgacttctgaggaactctaaaaagccgctgattatactgatcggaggctcctcgggggtcgggacctctagcatggcgttcgaactggctaatagattaaggctcaagaacatcataagtaccgacatgattcgggaagtaatgcggaagattgtgtcaaaagatttgagccccgtcatccacaagtcctcatatgatgcttacgaaagtatacgaaccccatcgctgaagatggacaagattgttgaaggttttatcacccatgcggacgtggtgaatgtgggaatcgaggccatcatcgaaaggagcattaaggaaggcatctccatcattatagagggcgtccacgtcgtgcccgggttcatcagtaaagacctgatggagaacaacaacattatcatgtttacactaatgatagacgacgaggagctgcacaagcagcggttctacctcagatgcagtcaaccttgggtgaaacgctctcttgagaactatatggagaacttcgaatcaatccgcaagactcaggattttttcgttgagcaggcaaagatttacgacagccacataatcaataacatcgagattaatgaaacaatcaatcagatggtttccgccatcttggagaagtttgtcggtgtgaacgatgtgcgctga

SEQ ID NO: 9131 - DNA, 387 bp, synthetic construct
  source 1..387: mol_type = other DNA
atgctggacaagaaggtcaaggagatcatgacatctgatgtcctaaccaccacgtcagacgtggacgtggtcttcgcatttgagaaactgatggagaacaaaatttccagcctgcccgtggtggaagacgacgagcttattggcatcattaccgccactgacgttgggcacaatctcattctggataaatacgaactcggcacaagcgtgaaggaaatcatgataactcctgtggtgacagtgagtccagacagcaccatcgaagaggcggtttgcataatgaaggataacgtctcgagcgggatactgaatcagctcccggtggtagagaacggaaaattggtaggaatcatttccgatggcgatatcatccaggagatcttctga

SEQ ID NO: 9132 - DNA, 909 bp, synthetic construct
  source 1..909: mol_type = other DNA
atggatgagctgcgcaacaagggtgggaagaaggcggtgactgttgcaataatcgccaatacttttctgaccgtgtttaacatcattgtgggaatgctgtctggcagttatgccctgatcagcgaaggcgggcatactctgagcgatatcaccacaacaatcattgcctatattggcttcaagatcggtcagaagcccgcagacaaggaacaccccctaggccacggacgggccgaggccatcagtggactgataatcatgctcttcctgaccatggtcgcttacgaaattatgtccggcgctattgaaaaattattcaacccctccacaatcaccacccccgacatttacgcggcagtgatggctatcttcggaatatttatcaactacataatctcggagtacattattagactgggtaaacagatcaacagcccggccatcgtggctgacggaaagcatcagaagacggacatcttttcctcaattgcaatcctcattggcgtacttgtgagcaacatagggtaccctatcctcgatccaatcattgggttgattatcggattcctcatcctcaaaaccgcctacggcatcgggaaggagaatcttgacaacattatgggtaagattccatctgagaaattcgttaatgagatcaggaaaatagccaacgagagtagcgattatgccaacaacgcgcataatatcaaagtagactacctagggtcctatgctgcagtgacactgcacatcgaaatcgatggcaacatgacgctgaatgagtcacacaaaattgtgcatattgtccagaacaatatcatcgaacgaatacctgacgtcaaatatgtgaacgtccacgcctgcccaaagggcttggactacaatcacaatcaagagatagataagtga

SEQ ID NO: 9133 - DNA, 1122 bp, synthetic construct
  source 1..1122: mol_type = other DNA
atgatcaatccggcaagcaggaccaagagcatcgagctgagcctcataagaaaaatgtttgaagtgaccaaccccaatgctataaatctgggcatcggcgaaccggacttcgacgttcccgagaacatcaagaatgctatgaagagaagcattgatgagaacgacactcactacacacccaacaaggggtatattgaactcagggaggaaattagcaagaaattcaagaaggagaatgacataaacacaaatcctgatgatattatcgtgacggtcggggccagtgaaggcctgtatatgtgcacccaggccttcgtggagaagggagatgaggtcctcctgcccaaccctagctttctctcgtacgaatcatgcatcaagctagctgacgggaacatcgtgccagtggattgtaagatggagaacgagtttaagctgaaggccgaagatgtgcaggagaagataagcaacaaaacaaaggcaataattcttaacagtccatctaacccaaccggtgcggtgatggagaaagaagacatcaaagctatcgcagacttatccatcgatgaaaatttccttattatctccgacgagatatacgagaagattatctacgggaaaaaaaactactcccctgcaaaatacagtgacaatgttattactctgaatggcttctcaaagacatatgccatgaccggcctgcgcatcggttatctggcgacgactaacgaaaactacaccgagcagttgctgaaaattcaccagtacaacatcgcctgcgccaataccactgcacaaaggggagcctatgaggcattgaccggccctcaggatgaggtggagaaaatggttttcgaatttcaaaagcgacgggatctgattatccgccggctcaacgagatggaatacgaaacggtaaacgccgagggtgctttttatgtatttcccaaaatcgaggacgaggacttcgtcatgaaggccgctgacgccggagtcatcacagtgccagggatcgcgttcggaacaaatggcaaaaatcatgtgcgtatgtcttacgccaattcctatgaaaacattgagaaggccatgaacatcctagaagagcgggtcgtgaacggatga

SEQ ID NO: 9134 - DNA, 1551 bp, synthetic construct
  source 1..1551: mol_type = other DNA
atgctctacgagaagaacatcttccagaaaaacatcaaaaacatgaacattcacatgggcctggcctatcccaatatctataggacggccatgtcttccctgggatataacattctgtacaataagattaacgaacgggaaaacacttggtgtgagcggatcatcttccccaataccaacagcatcgagtcaaacacccccagcaagtattttaatattataagcttcaccgtccaattcgaagaggactactttaatgttctgaagatgctcaaggacgccgaaatccccctcaaacgtgaggacagaagtgagagcgatcctctcattatcgccggagggccctgtgtgaccgcgaacccgatgcctctttacgattacattgatatctttgtcatcggtgagggcgaatttgtgattgatgaaatcctgaacacctacaagaagcatggaaaaaacttggaaaaatatcttgggctgcttggcgtgtacatcccaaagtacaacaacaggacaaagataaacatcatcccaaacatggacaacacttaccacatcacagaacatattgtgagtaagagtgatgacgagaattaccagaccattttcaataacaccataatgctgaatgtgtcccgcggctgcacacgcgggtgcagattttgcatgtcaggctacttatacaggcccatgcgggaaaccaagtataaaaagctcatcgacatagctattaaaaatcgggaaaacacgggcttgaacaaaattacactgataggggctgccgtgtcagattattcggacctgaagaatcttattgatggtctggagaaagagggcttccagatctccaccccgtccctccggatcgagagcataaccaaggagactttagagtcgttaaagagaagcggactgaaaacgatcacgcttgcactggagtcaacggagaagttgcgaaaagtgatcaataaggagatactggaggaaaagatcttcacagtaataaaaaacgctatcgaactcgacttcaagatcaaactatattttctgatcggaatccctggggaaactatggaagacattgaggagctgtgccagtacatgaagaagattgcaaacatgcacaaaagtatcaaaaacgtcaagttctccgtaaatccactgattccaaagccacacacacctttgcagtgggagccttacgacttcaaggacattaagaagaaaactcgatatatcaataaagaaatgaggaaatacaatgtgaagtgtgaaagccctaagaagggtctgatccaatatatactgtcttgtggaaatcgcagcatcggggcgatcattgagaagactctcacaaagaatccgacactgaaagagtggaaggagctactaccaaaatatgacattgatgatgttctgccctgggacaatattgacgtcggcgtgaataagagatttttgaaaatcgagaacaagcgcctccgatccctcaaacagaccccctggtgtgagaccaacccctgctacaactgcggctcttgcgagaagtga

SEQ ID NO: 9135 - DNA, 2877 bp, synthetic construct
  source 1..2877: mol_type = other DNA
atgttcttcctggtcttgggggtcgtgggtgccacagagtttaataacgcctccaatacagaggactcaaacctgatgactgacaacgttgacagcctgagcgtggaaaataaactagaggttagcaacgaggatagcatctcagaggctaatctagtgaactctcacgacgataacttgaacaactattctgacagtgatgttctgagcaactacgaggacgattacggcaacgtgcaggccagcaattacgctgaaatagggaataccaactctgttcggagcgatgtgttgagcgttagcaatgacgataacctggccgctagttctaaggtatccgccaaggttgacgtcgtggacacacattactccaaatccgctacatatttcaaagtgactttgaaggacactaagggtaattctatcagcaatcagaaaatcagcttcaaggtgaacggcgtgacttacacggctactaccgacaagaatgggatcgcaagcgtgaagaccgccgctctctctgtcggaacatacactgtggcaatcaagtacgctggcagttccaaatatgccgcggtcgccctctcaaagaaggtgaaagtcctctcatcggtgagtggaagcgatatcaccaaatattatggccctgtggtccagtactcagtcaaattctggaagaattacaacgcccttgcaaatactaaggtatcctttaaggttaatgggataacctataccaaaaccactgacaaaaatggagtcgccaagctgcccgttaatctcgcccctggaaagtatgtgattaccacaatcaacccctacagcggcgaaaaactgtccaacaagtgtatctccctgcgagacggcacaacccttacccacggctcaacgaatacatacattactcccaataagaagcactcatttaccgtcaccctgaagtccaaacacgggatcttaatcaagaacaaaaacgtcgtatttaaatataacaacaaaaaggtaaccgtgaagactaactcgaatgggaaggcgacgctgtccattcctgcccttagcaagggtacgtactatatcagttatagctacagcggagacaaatattacagcgggtcctccggatctggcaaattgtacgtcaagaatccaacgacgaagatcacatcttccaagctgaagatgcaatataaggacggctctaagttcgcggtgaagctcacaaagaatggcaaagtgctggcgaacaaaaaagtgaagctgacctttaacggcaagacgtataccgagaaaaccaacagcaaggggatcgcctatctcaccgtccctacagtaaagccagccacctacaacattaaataccagtatctgactccaagctatttcaattattgttacggcagcaacaagatcgttgtgtcgaagcagaccgccaaggtcagcgccggggacttggtgatgaactataaggatggcagcgtttacaaggtggtggtcaagaacaaattcggaaaccctcttaagaatatcaaagtcaaatttacaataaacggaaagacctacactaagactacggactccaatggagtggctaagcagtcgattggcttaaatattgggtactacagcgtgaagacagtactgtcgaacaactactacgcccatggcgccatatataaacacatttccgtgaagggcacgaagttcgtcggcggaaacatccatgtcgccgtaggtaagacggcatactattccgtcaagctcttggattataagaacaacccgattaagagtaccgaagtgacctttattctggacggtaaaaaatacacagccacaaccagttcaaaaggtgtggctaaagtaaatcttggggtgctctctgcaggtacccataatgtgaagtattcccaaggagagtacagcgggtcctccaacatatacgtagctgataaagtgaccatcaagcagattattgcggcaagcggcaacgtgcagaagtatatccagaagaaccacagactgccatccacagtgaacattgggggtgtgacatattcaaccaaccagtatctgtacctggtgtcaaaagctatcgtcaacctgaaatctaatgttaaaagcgcaatctacgtcaagaacgtcgacggcccaagtaatcccagcagcacctacgctgccgggaatctttacgactacctgtcagttgcaaatagtgttgtgaagaactctgattcaaaaggtagtgtaccgaataccgttagttcgaaagtgggaacgatcggctataaaagtctcgtgtacgcgtttgcgcgggtggtggccttctacggcgatgacgatcgcctcccctcatttgtggaaataaagtccctaagtggcacctcctccgatagtaatattaactccaaaaatactatctcaaacttaaaggcctacctggcagcctcaactaattgccaggtgaacaacgctaagatcaagcaactagtgggcaaattaactaatgggctcaagagcgagaaaagcaaagccaccgcaatttacaactacgtgcgtgatacaatttcctacagcttctactatgataccaaacacggcgcggttggcacactgaacgccaagtcgggaaattgcgtggaccattcccacctgctggccgctatgttcaggacggccggtcttgcaaccagatacgtgcacgggagctgcacattctctagtggaagtacatatgggcacgtgtggactcaggtcctcatcgacaacacttggaccgtcgctgatgcaacaagctctcgcaactcgctgggaaaaatagcaaactggaataccaagtcttacaggctcaacggatactattccagtctgcccttctga

SEQ ID NO: 9136 - DNA, 459 bp, synthetic construct
  source 1..459: mol_type = other DNA
atgaatagtaagaaatattccaaagtggctgtcgggggcaccttcgataagtttcatgatgggcacaagaagctgctcacaaccgccttcgaactgggtaaccagatcgaaatcggtgtgaccagcgacgcattcggcgggttgaaaggagacatcgacccatgcaaagagcgaatgagcaacctaaaggcgttctttagcgacaagtcagattttgttgtcattcctctgaatgacccctacggaactacaatttacgatgaggactttgacgccatagtggtgagtgaagagacggagccaactgcagttgaaatcaacgagatccgcatctctaagggcatgaaaccgcttgacattgtcgtagtctccttcgtgctcgcctacgatggaaatcccatatcgtccaccaggatcagacggggcgagattaaccagaagggcaacgtggtggagtga

SEQ ID NO: 9137 - DNA, 192 bp, synthetic construct
  source 1..192: mol_type = other DNA
atggccgtaaagatcgattccgacctctgcggccacatcaaggactgccccgtccaggggctgtgcattaaactgtgcgagcagggcgcaatcatcgagaaggatggagacgtgagcattatcccggaaaactgcgatgactgtgacctatgtattcagaactgtccaaatcaagcgataagcaaagtgtga

SEQ ID NO: 9138 - DNA, 1011 bp, synthetic construct
  source 1..1011: mol_type = other DNA
atgtttaacatagagcgcaatggggaagagcaccgcaacctgagctataatgatataaactgtgtggggtgtggtatttgtacggacatctgcccgaccagctccctccggctgggacccatagtgcccgtcgcgaggggactgattgaaatggacctggtctccattaaagaggactcatgcgtgttctgtggactgtgttcgatcgcttgccccttcgacgcactctccatgagcgtcgatggggaatatatcaaaaacattgagtcgtatcctatttggaacaaagagagcgtggtggacgacggcgagtgtatgtactgtagtaagtgttacaacatatgtcctagtgacgccattatctttgagaggaatcttccaaaccctgccgacctcgtgcggggggagatcgaaataaatgaggaagattgcatatactgcagcttttgcgccgatatgtgccctgcggaggcaatcacaatcaagaatatccccatctcctccgttgataaactcaacaatttcattgatgtcgactcttctaagtgtattttctgcggagtttgtaagaaggtttgccccgagaatgctatcaagcagatctgctcaacatgcatgctgaatgaggagatcgaagtgccggagatcaccggcaacgtaatgattctcgaagacctgtgtgtctactgcagctggtgctccgaggtgtgtcccgtcgatgccatcgacatcaccaagccatttgacggcactctagaactggtggaaagtgaggagaagatctgtaagggtgatagttgccatgcctgccaggacgtatgcccatgcaacgccgttagcatcgtggacggcaagtcagtaacagatctgtctttctgcaacttatgtggcgcttgcgtgaaagcatgcccacaagatattagaattttgacccgaacggacttgaaccttgaaaacatcaactctgaaagctggaatgatatcctgacttcaattctagtgggcaaatga

SEQ ID NO: 9139 - DNA, 183 bp, synthetic construct
  source 1..183: mol_type = other DNA
atgtttaggaaacgcatcgacagcaaaggccaggggtccgcagagctgatccttatcattggcggactgattgtggtggtcctcctgatcgccagttacattagcaacatcacggagaagacacagaccaatatccaaaacctcctaaagaccgaacgggatttcttgataaacaagatatga

SEQ ID NO: 9140 - DNA, 207 bp, synthetic construct
  source 1..207: mol_type = other DNA
atgaaaaacatgaagaagctcatcaaggagaatagcggccagggggctgccgagtacatcttgctgttcggaggcgtgctcgtaatcgcactgctagcccttacgatttaccggagctatatggaaacaagtgacgtctccctgaaagcgaaggatgacataattgatgtgaggaacaccatcctggacaaccgcacccacgtgtga

SEQ ID NO: 9141 - DNA, 1149 bp, synthetic construct
  source 1..1149: mol_type = other DNA
gtgggaaacaccataaagttagtaagcgggtttattctcttcgtcattggtgtcctcatagcttacgaggccagcgtgtacaacctactcgatatcctgctgataattgggctgatcatcgcaattgtaggcataatcatgatgatcagccattttgtggaatccaacgcggataggacaacaaataaaattaaagagtttctggagtccaaggagagtaattcaagtttcgagagaaagaatttcacgggtgaggagcccctcaaaatccgtcacgattataacgactttgacgatgcagagtatgatgacctgggcatcgaggactataatgactccacccccagtgagtactacggagacagctttgaagacaaccccaatagagtcctgcgcaccgttccaaggcaagaaaaggaacttaatctggataaccagctagtgttcactcccaattacggcaggccattgaaggttacccgcactcctaaaaagcggcaatccgattacttcgagaaagaaatgcccccgttcgtggtggaaacggacaagtcagatgaaattaagcgggccttagaggaaccaacccctgtcgagaaggccgttaacaatcacaccttggccccagaagtgaagcagcctagagacattaaaatagacatcaacgaccctgagagtctgccggtgccaaaatccctcagtagccatatcctttgcaatgactccgtgatcacttcacaggaagctttcgaccagctggccatctacgtgaataaggagatcatgttggagattccttcgctgaacgagctgtcagaccgcttcctgtctcacgtgcccacatcctatagccgagtaatcattgacgaatttgataccagcgacatgtcttacatgttcctgatcagctcgcttctcaaacagggggtgcacatcaagacggtccccaaagtccacacagtgaacctcatcactgatgattcccatgcaatgatcataagcgagggacagaacgacatggaatatggcgccatctacgatgaccgaaagtcgatttcaaacatccgggctagcttcgagaagacatggaacatcgcctctaacctggatgagaacattattatgggcagcgttgggggaagcgcgtga

SEQ ID NO: 9142 - DNA, 720 bp, synthetic construct
  source 1..720: mol_type = other DNA
atggaaataagatggctgggccactcggcattcgaaatcatctcagatgataacgtgcgcatactgatagatccgttcatcagcaacaaccctacatgccaggtccctgtggaggagctcaatccagatattattctgcttacccacggacactctgaccattttggggacgcgctagagatctccaatagtactaatgcccccattgcctgcattcacgagatctcactcttcttggccaaacaaggaattaggaacattagtgttaacatcggcggtagcttcgtctaccggaacatcaagttcacaatgctcgaagctaaacactctagcgacattgacatggtggaagagatcgccccaggcggcaccgccgcaagcttcttaatcacctttgaagacggaactaagatatatcattgtggtgacaccggactgttcggggatatgaagaacattatcggcgccatctacaaacccgacgtggtcatgatcccaataggggataagtttacgatggggcccttcgaagctgctctggcctccatgtggatgaatcccaaggtggtgatccccatgcattacaatacatttccaccaattgagcaggaccctgcaatctttgcgaactttgtatcccagttcaacccgaacatcgatatcgtggttatgaatcctgacgagtacttcgagtataatcccgaggactatcaggactga

SEQ ID NO: 9143 - DNA, 2007 bp, synthetic construct
  source 1..2007: mol_type = other DNA
atgaaatccatgtccaacgtcgacatttatacgatctccgatgaactaaataacctcttgagcggggccagggtcgataagtcgttccagcctgccaacgacattgttgtaatcaggttccacgttcctggcactggccgcatcgacctggtaatgcagtgcgggtctagaatccacaccagccaatacccacttgagaaccccaccattcccccatcattccccatgctgttacggaagaggatcaagggcgcgcatgtggaaagtatcaaacagcacgagtttgaccgggtcattgagattaaagtgaagaaagacaagtattacaccataattgttgagttattcgacaaaggcaatataatcctgctggatgatgagaacaacatcatccagcccctgaaaagaaaacagctcagtgcacgcgacattagttccaaacgtgaatacaagttcccggagaagcgaggcataaaccctatcacaattacggaagaggagctcaagaaattgttcaagaacgccgagagtgacgtggttcgtacgctcgctatgaatgggcttggaagcttatacgctgaagagatcatccagcgcgccaacggaatcatcgagattgataagaacaccctcacatcacaacttaccgacactcaaacggcagagatctataagtgccttaaagagctgttcgataaccttaagaagggagccattaagccacaaatcgtaaagaaagactcaaaagaagatgtgatcccattggatctggtgaagtacgctgattttgaaaagactttttataaggactttaacgaggcctgtgacgaattttactctaaaaaggtcaacagcaccatcaaaaacgtcaaagaggctgcttggaataaaaaggtcaataagttcgagaaaaggctgaagctgcagcaggagaccctggataattttacacgaactatcgaagaaagtcagcataagggagaggtgatctactctaattactccaccattgaaaacataatcaacgttatcaacactgcctggagcaacgactacagcttcaaagaaattggcaagatactcaagaaagccaagaaggagggaatgcccgaagcccagatttatgagtccattgacaagatggggattctgacactgaatattgatgacacggccttgaacataaatcccaaaagcaccatacctgaaaatgcggaaatatactacgagaaagctaaaaaggccaaaagaaaaacaaagggtgcaatcattgctatcgagaatactaagaagcagctcgacgacattaagtccaaaaaggacatagcgatggaacaggtcgaattgcctaagaagagaattaaaaaggacttgaagtggtatgagaagctccgctggttcatcagcagcgataacatcctggtgatcggtggccgggatgctaacagcaacgaaatggtggtgaagaagtacctggagcccaacgacatttacctgcacgccgacatccatggtgcaagctccaccgcaatcaagctgaacgggaatgagctgaatgacaatatcatcaaagagtccggggaatttgccgccgcattcagctcggcctggtcaatgggattcacaacccaggacgtgttctgggtgcacccagaccaggtgacaaagacaccggaggcaggggagtttctctcgaagggctcttttgtcatccggggacaccggaattatatccgcagtgccagggtcaagctggctatcgggattgtggattatgagggtaagcggatcatggcgggccccgtggaggcactggaggcccactgtgacaactatgtggtgctcaaaccgggcttcgccaagaaagaggcgatcgctaagaagataataaacaagattaatgaagatgatctactgacccttgatgacattatcagagtgctgccatcaggcaaatgcgatatcgatgaggagtaccatctacgaaaaaaatacgaaaagaattga

SEQ ID NO: 9144 - DNA, 273 bp, synthetic construct
  source 1..273: mol_type = other DNA
atggacataactgtgaaggtcacaagtatccacattgtggcagggataattgccgctctcatctccaccgggctaacgctgggctggttcggattcaaaaacgacatcttcgccttttttattgcggtaatcattctctacttcgtcggtcaggcttgccaaaagatcgccggcgatgagattagcggctttagccagtggctgtgggacggaatcgcacccttctattttacatgggtgatagcctacaccatcttcgccatctacctgtga

SEQ ID NO: 9145 - DNA, 1821 bp, synthetic construct
  source 1..1821: mol_type = other DNA
atgtcctcgatgtcctcggtggccggactctcaaagtacattaaaaccctccccaagaccaaattcagcataatcgggatgctaattattagtttcttgattggcagcatctattatttgatagatttgaacccgaccatgggcatcctcgaagattttattgccggcgggctgttcgggttaatcgtatttggaatctcttccataatgagcggagcactgaatcagcagacaatcagcgtggtgcacggcatcaacctgaaaattaaacacagcatgtttctctctgttctgtccatgaccatcctcggcataatcatcattatcggctgtatcatttcccagatactaaaaatcgatttatttctcaacagcatgctcttcggttgtgttcttatttacggcttcggcacactggtgttctgggccacatcaaaggtgcggtttgtcactgctgccattacggggctgattcagccactgctcattctggcgatgtatacactcattacattcctgttcattgacacatcgttcatcggacctgcaattttgcagataactctgaaggccatagtagctgccataatctttgtgatggccatatatgccttcattaaggtgattgcctccccctttaagaagaacttgggtattggtgtgctcgatctgctgagtctctttattgcccacatgaatgagggcagcaactccctggaaggactgttcgagaacatgagtgaggctatcgacaccatcgtcaccttcgttagtttcaagactgagaatgggatcaaagcgctgtttatatctccttctgtgcaccctgggcctcttggggatctggggggctccaatatgccaacgctgctggctaataagttcgaccatttcactatggttgctcatggaccatccacccatgacttcaaccccattgccgtaagcgagatcgacaagatcgaagagtctgtgcgcaacggcctcaagaccgtcgaatactcaagcaacgccagccgttttatcaggtataatgttgagaaggcaaacatcggtgtgcagttgtttaataagggtatggtgattctttcaactttcgctccggatgcggtggatgacatcgaatttggggtgggcctgactatgatggctcaaagcagaagccggtgcaatgtggaggactcgataatcgtagactgccacaactccttcacccccgagtccggcgaaatcctgcccggaaactcagaggtcttccagctgatcgacgttattgacacaatcaaccctaagcagggacggtacgatgtaaaggtcggctgctacgaggataaccttgaatccctcgacaaacacgacggggtcggagacagcgggatcaaaaccatgatcgtggaggtcggcaatcaaagaaccgcgtacgtccttttcgatgcaaacaacatggagatcggatttcgacaagagattattgatgccgtcagtgacctggagatagacgaaatcgaagtgatgaccactgacacccatactgtgaatacactttctaggggatacaatcccatcggcatcgcaaaaaggcccgaaatcatcgaatacgtccgcattagtatcgaggaggccataaaggatttggaaaaggtggaggtgggaacggggacggagaaaatcgagaatctgaacaccttcggcccaaaaaactcaacggaactaatcagcaccatcagttcagtcgtggccgtgagtaagattatcgctccagttctgctgattacagcattactaatcgcatttatctggatcttctttggtggtctttga

SEQ ID NO: 9146 - DNA, 522 bp, synthetic construct
  source 1..522: mol_type = other DNA
atggaacggaagcttaatgtgccgattaaagatgaaaacctaaatgaactcaaagccggagacgtggtttatttaacaggcaacattctgaccgcacgggaccaggctcacaaacgcatcatcgagcaaggcgcgccctttgatatctccggggccgcattgttccatgctggacccatcgtcacaaaggaggatgagaactacaagatggtcgccatcggaccaacgaccagcatgagaatgaatccatatcagagcgatgtactggacatgggggctaagattataatcggtaagggcggcatggacgataccgtcagggaagcactcgtgcgaaataacgccatctacgtcgtggcaactggagggtgcgctgccctgtacgtagacgccgtggagaaaattgagggtgttgactggctggacctcggcatgcccgaggccatctggaacctgaaggtgaagaacttcggccctcttatagtggcgatggacagtgaggggaactcactgtacgattga

SEQ ID NO: 9147 - DNA, 330 bp, synthetic construct
  source 1..330: mol_type = other DNA
atggctgatattaacgagctcgcggaaaagaagctgaagtcaaggatgaccaagatacgcaagtgcaacagagaacccgaggaaaaggcaaagttcagcgagaaattgggagtcagcttcgacgtggaatttcacaacaaaaatccagacaaacttgccgacgggatcactttcatcacaacgcctgagggccggatcttactcgccgagtactactatgagatccccgaaacccaggagtatacatccctgccgattgacgagaagaagctgaaaagtatactggagtttttcgatgagtacaaactagaatttgatgactctgattga

SEQ ID NO: 9148 - DNA, 1155 bp, synthetic construct
  source 1..1155: mol_type = other DNA
atgatcgtgaacaactcgttggacgaggttaagaagagagataatgctctgaccatcatcaaaaatcttgttgagaccaaaggccgctcttccctcttcgatctgactggtctggccggtggatttatcgccagctctagcgaaattagtctgctggagacctatgtgggtccggccatctttgaagacgccattcaggaggtgggaaaggagcacatgggcggggaaaaagtcctggcagtaaacaggacctcttccggcatacttgctacaatattgtctctggtgagtaaggactccaacgtcgtgcattacctggcggaattacctgcccacccatcgattccacggagctgcaacctcgtgggcgcgaactacttcgagacggacgtgttcgaggagttctcaatcccgaataatacttcactggtggtcatcaccggctccacgatggatcataaggtcattgacgaagaggagttcaaacagattattgagatggcacacgccaaagacattcctgtcatggtcgacgatgcttctggggccaggcttagaaccgttgtgtttaaccaagccaaggcctgtgatctgggcgcggacatcgctatcacgagcactgacaagctcatgcctgggccccgaggaggattgatgtccgggcgtgccgagctaatcgacgaaatcaagattaaagtgaaccagttcggacttgaagctcagccccccgcagtactcgcaatggtgaacgggatcaagaacttcaaggaagagaacctcattaaaagtttcaagcggaaagacgagctgtacaaactgctcagcttgaagttcagcaattttaagaagagccccacaggggtcatgatttaccctgaaggcctgagcagtgaaatcaacgttccacacaagctgagcgacgacgatctcgcctatgtgttctcgttcattctactgcgggattatggaataatcacaatccccccagtgtcaatgcccggcgcttcagccacaatacgctttgagttatcctcaagtgacgcagtgaatctggatctgaactccctaggcaaaaagatcgtctccgcatttgagaagctccaggatataatcaccaatgaagagaaatgcagggagatcgtatttaatagctga

SEQ ID NO: 9149 - DNA, 918 bp, synthetic construct
  source 1..918: mol_type = other DNA
atgaaggaggaaataatgaacttgctgaagaaggagggtaagctgagcactgagactatcgatgagataaagcaagtggacatcaatgacttcaagaacctagtggaggaaatcggaaagcagaaaacagagcacattatcgctgacgagatttccaagaatctgaatacaaaatacattggcaagaacctctacgtattcaacgaagtcaagtcaacaaacactatcgccaagttcctgagcaccaataacattgcggacggaagcgtgatcatctctgaaaagcagacagccgcaaggggccgatctgggaagtcctggaaatccccactggggggagtatggctctccatcgttctgaatccccatgtcgatcactcgaagctacccctcatcaccttggccaccggggtggctgtggccaaaacgcttgagaaagttggaatcaaaaatcctgagatcaagtggcccaacgacatcctgattaacggtaaaaagatctgcggcatattaaccgaggctgtggccaagtttaacacgattgaaaatgtcatcatcggcgtgggtatagatgcaaatgtggatatcgaaaaattcccggaggaactgaaaaacggcagcaccaccctcgagatagaactggggaggaaagagaacgaaaacctcctcattaaacttttcttagaagagtttgagaaaattagtgagctgtttgaccacgaaggctatgaggagatcttgaaggaatggcggaagcggtcatacagtatcggaaaaattgtggaagtccgcgagccatttaacaaatattatgatggctacgtgctgggcattagtagagaaggggcgcttgtggttgagaagattgacgggaccctggagaaggtcattagcggagagtgtataatcaagaattga

SEQ ID NO: 9150 - DNA, 1494 bp, synthetic construct
  source 1..1494: mol_type = other DNA
atgttcgaaaaggtgctgatcgcaaatcgcggagaaatcgcaatccgagtgatgcgggcttgtcgggaacttgacatcaagagcgtctccatatactccgatgccgataagacttcgctatacaccaactacgcagatgagagctacccactgggcaatccgtcaccggcgaaaagctacctcaatatcgagaagatcattaacattgcactggaatccggggccgatgcaatccacccaggctacggatttctggctgagaacagcaagttcggggaggagtgcaaaaagaacggaattaaactcatcggcccaagtggagacgtcatcaataagatgggcgataagatcacctccaaagccctcatgaagaaggctggcgtgcctgtaatcgagggtacacccgaagggattacagacattgaggaggcgaaggacatagcccggcagattggctaccctgtaattgtaaaggctagtgcaggtgggggcggtattggtatgcgagctgtgtacgaggaggatgaactggttcgggccatcgagagcacccagtctgtggcgtccacgaacttcggggattccaccgtgtttatcgaaaagtatctggaaaagccccgccacattgaatttcaactcttggccgatgaacatggaaacgtcatccacgtgggcgatcgggaatgctcgatccagaggcgccatcagaagctactcgaggaggcgccctccccgattatgaccgaggagttgagagacgagatgggcggcagtgccgtgaaggctgccgagtatataggttacactagtgcaggtacagtggagttcctctatgacaatggacaatattacttcctggagatgaatacaaggattcaggtcgagcaccccattactgaactggtgaccaacactgacttaataaagcagcaaatcctgatagccaatggggatgaactgagctacgagcagaaggatatcaaaataacaggccatgccattgaatgccgtattaacgccgaggaccctctgaacgactttgcccccaaccccggaaaaatcaccgggtaccgaagccccggaggcccaggggtccgcctcgacagtggagtctacatgaattacaccatcccaacattctatgacagcatgatctcaaaactgatcgcctacggaagggacaggaatgacgccattaacaggatgaaaagagctcttagcgaatatatcatcttaggcgtgaaaacgaccatccccttccataaggcgatattgcgcaatcctaacttcatctcaggcgacctgaacacgcactttatcgacacttataaaaaggggattgagaaggagatggagaatgttattgccgaggaccacgaatatgttaacagacttaaatcaacctttatgcctggcaagaaaatagccgcaatctctgctgctgtggggtcttatcagaacatggccagaagccacaacatgcagaaaaaatga

SEQ ID NO: 9151 - DNA, 828 bp, synthetic construct
  source 1..828: mol_type = other DNA
atgtacaaagacgagctatccatatttattccgaactcatttctgtcggagagcaaagaccttaaaatccggacttataaggtgggtattctaggcagggctttagccattttccaagcggataatgtaatcatctacaatgatgataatgtcaagaatgaggatggagaaatggacggagagttcatcgctgagattttgaactacatgaacacgcctcagtacttgaggaaaaaggcattccctatacggagcgaactgaagcacgtgggaatcctcccccctctccgaaccccgcatcaccccatcaacagtcaaccagacgtgggggattaccgtcaggggtttaccgtgaagagaaacaagaagggcacctatgtggacataggtatggacaaactggcattctgtaaagagcagctgagcgtgaaacgcatctttgactttaagattacaaagattgccaagaaggaagtaatagtcacacccgataagcccgacgacgtgtactggggctataacgttatctccagcacgaagagtcttaagaatagcctgaaactcatcaagccagaccttgtcgtggaaactacacggtacggggattatatcaattccatcttcgatgaactgaaaagcaaactcaacgagagcaaatccattgccatcctgttcgggggcccatattcctcaattcaggaggacgtgtcaaacccaaactgggacctgttcaagctcaataccatccccggccagggaaccgaaactgttagaagtgaggaggccgtcgtcgccacactgtctctgttcaactgcatgcgcttttga

SEQ ID NO: 9152 - DNA, 1011 bp, synthetic construct
  source 1..1011: mol_type = other DNA
atggtgcggcatcaccagccaagaaaggggtctgttgcttttagcccaaggaaacgcgcggccaaggagaccccgcgggtcaaatcgtggcctcagatcgatgaacccaagctgctcggcctcgctggctataaagtcgggatgactcatgttctgatgactgactccgataagaacagtcccacaaacgggatggaggttttcacaccagtcactgtactagaggtaccgccggtcgtggtgatgggcattcgcgcttacgaaaagacctctcgtggactgaaagtgatcaccgaagtgctggcagacaacttagataaggaacttagtaggaaaatctccctgcccaaggagtacaataaatctgaggccattgccaagatacaaggcgccctggagaacacagaagagatcagggtcctcgtgcacacaaacccaaaagtgacgagcgtccctaagaagaagccagacatatttgagtgcggtattggcggctccaatcccgaagaaaaactgaacacagccctcgagttgctgggcaatgaggtgaaagctagtgagatcttcaatgagggcgagttcgtggacgcgatcgcaacgaccaagggaaaaggcttccagggtgtcgttaaacgctggggaattagaatccaatacggcaaggcggtgcgggccggtaaagggagacacgtaggttccatcgggccttggactccccgaagaaccatgtggacggtcgcccaggcagggcagatgggctaccacaagcggaccgaatttaacaagaggattctcaagatagcctcagcagatgaagtggatcagatcaaccctgacgggggattcataaagtatggactggtgaagaatgactacgtgcttgtgaaaggatcactgccaggacctagcaagcgcctagtgattttgcgacaacccattcggcccaacaataaggctgaggacatcccccagatcaactatatcagcaccaaaagcaagcagggggcctga

SEQ ID NO: 9153 - DNA, 765 bp, synthetic construct
  source 1..765: mol_type = other DNA
atgaaggtaaatgtttatagcatcaatggggaagtgaaggaagagattgaacttcccgctatcttcgacgaagtctacaggccagatctgatcaagagggccgtactctccgcccaaagtgctcgagtacagccatggggcaacgatcccatggccgggaagagaacctcggcgaaggggtggggcagcggccggggaaccgcgcgcgtgcccaggattaagaacggttccaaggcagcatttgtcccaatggccgtgggtgggcggaaggcccaccctacgcgagctgagaaaaaccaccacgagaaaatcaacataaaggagcggcgctttgccatcagatcagccgtggcagccacgactaataaagagattgtggaaaacagaggccacaaggtcgcagacctggagcaggtgcctatcattgttgaggatgaaatcgaagctgttaagacagccaagcagacacgggagattttccagaacctgggcgtgtatgacgacatactccgtgccaaggaaggaaagagaatccgcgccgggcgaggcaaaacccgcggaaggaaatacaagaaagtcaaaggaccgcttgtcgtggttggtgagaataaaggcatccacctgggcgctcggaaccatgcaggtgtcgacgtggtggtggctgagaacctgaatgcggagctactcgcccccgggacccatgcaggaaggctgactatatacacaaaaagcgctgtggagaaattgggaggcttattccagtga

SEQ ID NO: 9154 - DNA, 261 bp, synthetic construct
  source 1..261: mol_type = other DNA
atgaatgcatatagcattatcattaaaccccatgttacagaaaagaccatgaacctgattgaccagaacaacgtgatcacctttgtggtcaatcgggagtccaacaaaagccagatcaagcgcgctttcgaggaactatacgaggaaaaagtagccaaggtgaatacacacatcactacgaaaggggtgaaggtggcctacatcaagctggtggaggaggaaatggccgaggagctcgcggtcaggataggcgtcttctga

SEQ ID NO: 9155 - DNA, 726 bp, synthetic construct
  source 1..726: mol_type = other DNA
atgggcaagcgactgatacatcaacgacgcggaaggggaactcccgcccaccgggtcgctagccaccgtttcaaggataaaatccgctacagatcctacgatgccctggaaaaggagggcagcatcaaagggaaagtgatagacatactgcatgaccctgcaaggaccgccccgattgcggaggtgaaattcgagaatggtgaaaagaaatatatcctagcacctgaaagcatccagattaacgacgaaatcgagtgtggtatctccgctcccattaagtttgggaacacactgccactcgcggagatccccgagggaacccccatctatgacattgagaacacacctggcgacggcggacggtttgtgcgctcaagcggaacgtatgcctcggtagtgactcatgacgccaaccaggcggtagtggagctgcccagtggagaattgaagtacctcaaccccaattgccgagcaagtattggcgtcgtggccggcggagggcggaaagataaaccattccttaaggctggcaagagatggcacgcctacaaagctaaggggaagaaattcatgacagttaggggcgtcgcaatgaatgccgtcgatcaccctcacgggggcgggaaccgccagcacccagggcggccaacgaccgtttccagacatgccccgccaggcaggaaggtgggttcaatcgccgctaagagaaccggtctcaagcggtga

SEQ ID NO: 9156 - DNA, 411 bp, synthetic construct
  source 1..411: mol_type = other DNA
ctcgcacgcaagatattcaagtacaagggttatacactagaggagctccagcaaatgagcctggaggaggtcatggagctgttcccggccaggcaacggcggagtctgaaacggggcttccttcccagacagcagattgtcttggacaaaatgcgaaagctgaataaggaaggcacgaaagatggccgtcctgttgtgatcaggacccactgccgcgacatgattgtcatccctgagatggtgggaaccacttttgggatctatgatgggcagaactttgtggaagtgactatagcgcccgaaatgatcgggcattacttcggagaatacgccccaacaagaaaacgcgtgcagcacggagaccccggcatgggtgctaccaggagctccatgtttgtaccactgaagtga

SEQ ID NO: 9157 - DNA, 465 bp, synthetic construct
  source 1..465: mol_type = other DNA
atggctaacaagtatgcctacaatgaggaagtggatgaagccaaaacggcccgggctatggcaaagagcctgaagatttcccccaagcactccgtggagatttgctcagcaatccgaggcatggatgtagggaaagcgaaggactacctggaagacgttatagagatgaaaaaagccgtgcccttcaagaggcacaacaaaaaggtcggccacagaaaaggcctcaagggatgggcgtctggcaggtacccggtcaaggctgctgagcaaatactaaaagtgctcgaaaacgcagaggccaatgccgagtacaagggtatggacacagaaaagcttttcatcgagcatatcagcagtcataagggggtggtgatccccggatatatcccacgggcctttgggcgcatgaccccattcaatacacctactacccacatccagattgtcctgcaggaggcaaactga

SEQ ID NO: 9158 - DNA, 756 bp, synthetic construct
  source 1..756: mol_type = other DNA
atgatagaaaaggactttgtcacagagggcctcaaacgaacgagaatcgatgagtacctggagaaggaactagagcgcgcgggatacggtgggatggacgtgcagattactcccctgggaaccatggtggtggtgtatgcagaaagaccagggatggttatcggcagggggggcaagaacgtaagggctattaccaacacacttaaaactgattttggcctggataatcctcagattgaagtgaaggaggtggaggttcccgagcttaatcctaagatcatggcctataagataagcaacatgttgcaaaggggaatgcacttccggcgcgttgcctactcaaccatccgtcgcatcatgggcgcaggagcgcagggtgtggaagtcaccatatccgggaagattagaggcagccggtccgccgtcgccaagttcgttgaaggatacattaaaaaatgcggcgaaccaagcatccggctcgtggaagaagggttcgctacagcccagctgaagccgggtgtgctgggcatctatgtccgaatcatgcccccagagactgtgctgcctgattctgtggaaattttacccccgaaaataatcatcgaggaggacggggaggtgacagaggaggaaattgacatcgagaccgaggaagtcatcgaggaggacatcattgaggaagtcgaggacctcgatgagctggaggaagtggtagaggaagagtcgacggaggaagtagaggaggacgacagttga

SEQ ID NO: 9159 - DNA, 207 bp, synthetic construct
  source 1..207: mol_type = other DNA
atggcgattctgaggagtaaggagatctgggacatggaggtcgatgagatccaggacaaactagtggaactcagagccgaactgagcaagaacatcagcaagtccgcagccgccgggattaatgaaaaccccggcaagatccgcgaactcaaacgaaccatagctcgggtgctgacaataatgaacgagaaacagaaggagaattga

SEQ ID NO: 9160 - DNA, 339 bp, synthetic construct
  source 1..339: mol_type = other DNA
atgagcaagatttgcgacgtctgtgggctgcccgaagagctttgcgtgtgcgaagaaatcgccagggaggttcagagtttgaaggtgttcacagtacgacggagatttggaaaactcatgacgatcatcgagggtatagacgagcacgatatcgacatacgggagctgacaaagaccctaaaggcaaagtgcgcctgtgggggcaccgctaaaaacggccaaatcgaactccagggagatcataaagtgaaggtcaagaaagtgctgtctgacatgggcttctcctcagatactattgagattcgcgagagcaagaaaaacaataagaaaaggcgctga

SEQ ID NO: 9161 - DNA, 279 bp, synthetic construct
  source 1..279: mol_type = other DNA
atgatcacgagcaacaatctggtccaccacgagtttatcggcctgcgcatccatgccatgaatcccaagaatcccagcctaaatctgaaaggaacagtgattgatgagaccaagaacaccatcattatcgaggaggaagacaacaacgaaaagatgatcccgaagaacggtactttcttcgtgtttgaactcccaaacggggaaaagattaaaattgacggcaacatcctctccatcagacctgaggaccggataaaaaaaaggttcaagaagatatga

SEQ ID NO: 9162 - DNA, 318 bp, synthetic construct
  source 1..318: mol_type = other DNA
atggtggggctgaacgtccaggaacccgagaccacatgcaatgaccctaactgcccgttccacggaacactcagcgtaagagggcaggtcctagagggcatcgttgtgtccaacaaagccgaacgcactattacggtggagcggagctactataaattcataaagaagtacgagcggtacgaaaagaggaagagcaagatcaatgtccacaagccagattgcctcaatgtgaacgtgggcgactcagtcaaaatcgcagaatgtcgacccctgagtaaaaccaagcattttgtgctggttgaggtgaaaggtgagtga

SEQ ID NO: 9163 - DNA, 399 bp, synthetic construct
  source 1..399: mol_type = other DNA
atgaaacccctaacctcaagtgtaacgaaagccctgccgattggagcaaccctccagtgcgtggataacacaggggctcgtgagatcgagatcattagcgtcaagggatttaagggagtgagacgacgcctcgatgtggccggggtgggcgaccttgtggtggcctccgtgaaaaaaggcacagccgacatgcggagggaggtggtcaatgccgttgtagtcagacagaagaaggaatacaggcgggcggatggcctgcgggtgaagttcgaagacaacgccgcggttattatcactccagagggtatcctgaagggctccgagatccgcggtcccgttgcaaaggaagcagctgacaggtggcctagcgtcgggtctgctgccaacatattggtctga

SEQ ID NO: 9164 - DNA, 351 bp, synthetic construct
  source 1..351: mol_type = other DNA
atgtcaatccagccaaggaaacagcgtaaagctcggtatacagcgcccgcccacgcccggggtaaatacctgagtgcctccgtgagcaaggacctcagggagaaggtggggaagcgaagcctaccggtgataacaggcgacaaggtgagagtggtccgcggagactttaagggacatgaaggcgaggttctcaccgtagattacacgtcctacaaggttactatcgaggaagtgacccttagcaaacctgacgggactgtcaccttcctgccagtcgatccctcgaacctggtgattattgatgcaaacttgaaagacgacagacgcatcaagaacaagggcgataattga

SEQ ID NO: 9165 - DNA, 729 bp, synthetic construct
  source 1..729: mol_type = other DNA
atggcgaagatgggatctcggaaacatctcaagcggtacaaagcacccaaaagctggccgattcatcctaaagaggacacttggactgtcaaacctagcgcaggctcacactccataaatgatagcataccccttacgctggtgattcgagacgtgcttaaattggccgacaacgcccgcgaggcaaaaaggattatcaactccgggaacatctttataaacggcatcatcgtgaaggattataagttccctgtcggcttcatggacgtcctggacatcccaaagaccgaggagagctacagggtgctcctagaccgcaagggaagactgcagctcaagctgatagaggacgctagtgccaagctctcaaagattgtgaacaaaaccacaattaagggcggcaaaacccaactgaacctccacgacggcaagaacgtgatcattgacgaagatgcgtactcggttggggatgtgatttgcctgaaagtccccgagcaggaaatcgttgaagcctaccccttacaggagggagctacaatcctggttacaggtggtaagcacaccggggagctgggaacggtatctgagattatcgaaaacaagtccacaaacccaaatactatcatcatcgaaaatagtgccaaggacgaatttctaaccctgaaggaatatgccttcgtagtggggaatgatgctccagtcatcgatctgttggaggtgaataagtga

SEQ ID NO: 9166 - DNA, 513 bp, synthetic construct
  source 1..513: mol_type = other DNA
atgaaccccatgaatgaggttcggatcgagaaagccacggtgagtatcggagtgggtgaggccggcgagaaactctcccgggcaattaccctgctggaaaacatgttcgaccagacacctgtgaagacattttccaaggtcactaaccccgagtggggaatcaggaagaagcaacctatcgcgtgcaaactaacccttcgtggagagaaggccgataaagctatcgacatggtactggagggcattagccgaaatatcaagcccacccagttcgatgcacaaggcaacctcagctttgggattaaggagcatattgacataccaggtatgagatataacccagacattgggatcttcggcatgaatgtgtcggtgactttcgaaaaaccagggtaccgcatatcacgcagaaaaatccagcagaagaaggtgccgcagaagcacaggataagcaaggaggaaacaatgaaattcatggaagaaaactttaaggtcaattacgtcaccgaatga

SEQ ID NO: 9167 - DNA, 144 bp, synthetic construct
  source 1..144: mol_type = other DNA
ctgccaagaaaatacggcaaggccgccaagaaatgcagccggtgcggcgaccactccgctatgattagccgatatggactgaacctctgccgccagtgtttcagggagatcgcacccaagatcgggtttaaaaagtacaattga

SEQ ID NO: 9168 - DNA, 393 bp, synthetic construct
  source 1..393: mol_type = other DNA
atgtccctgatggacccccttgccgacgctctaaccaatatccgaaataacgagctgcaagtgaacgggagttgcgttattagccccgcgtcaaagctcattggccaggtgctcagcacaatgcagaaggagaactatatcggcaattttgagtacgtcgatgacaacagggcagggaaattcacggtggaactgataggaaacataaacaagtgtggtgtgatcaagccgcggcatgctgtaaagaaagatgagtttgaaaaattcgaaaagcgctacctcccagccaaaaacttcggcattttgatcgtcactacccctcagggaatcatgacacacaatgaggccaaggaaagaggcatcgggggacggctgctggcatacatgtattga

SEQ ID NO: 9169 - DNA, 537 bp, synthetic construct
  source 1..537: mol_type = other DNA
atggtcgtggctgccgctatacgagaggagattgccatccccgagggcgtggaggtgataatagaaaacaacgaggtgagtgtaaaaggccctaatggagaggactccaggaagtttacttatcccaatgtcaacattaaggaagaagaaaacgttgtgatcctcgagactgtgtttccgaagaagaaggataaggcaatgattggaaccacaagggcacatatcaacaatatgattgtcggcgtcacggatggctttacctaccacatgaagatcgtattcgctcacttcccaatgactgtgaaagtgcagaaagacaccgtcgttattgacaacttcctgggggaacgccacccacggacagcgaaaatcgttgggagcgccaaagtggccgtcaagggtgatgaggtgacaatcaccggtattaacaaggaacatgtggggcagacgatggcgaatctagagcaggccaccaagatcaaaggccgcgaccccagagtattccaagacggaatctacctgatcagccgggagtga

SEQ ID NO: 9170 - DNA, 330 bp, synthetic construct
  source 1..330: mol_type = other DNA
atggcgaataagagatttaagcgccaggagtacgcccgttacaaaaaactgggaatcaagtggcgccgcccccggggaaagacatccaagatgagaaggtatgaagctggcaaaccagacatgcccgccatcgggtaccgaacccctcgggccattagggacctccacccgagcggcttcaaagatgtcctcgtgcataacatgcaggaactggaggaccttgatccagcgacggaggctgcccggataagtgccagcatcgggaaaaggaagaaggacctgatgctggcaaaagcactagagctgggcattaaggtgttgaacaagtga

SEQ ID NO: 9171 - DNA, 456 bp, synthetic construct
  source 1..456: mol_type = other DNA
atgaatctgacaactcagaaacgattggctgctagtatcctcaaggtggggctgaaccgggtgtggattgacccagaaagactggaagaagtgagcatggcgataacacgagagggagtcaagcagctgatcaacgacggcgcaatcaaggcaaaaccgcaaaaaggtatcagcagctaccgctcgaagaagattaaagaacagaaggccaagggcaagaggaaggggaggggatcaattaagggcgccaagaaagcccgtacccccaagaaaaaggcctggatgaccacgatcagggccctaagaaaggatcttaaagagatgcgcgaggatgaggtaatcgacgtcactacctaccggaagctctataaaatggcgaaggggggcgcattcagatccaaatcctacatgcgcaactatgcccgggaccacgatctgataaaaggagacgagtga

SEQ ID NO: 9172 - DNA, 582 bp, synthetic construct
  source 1..582: mol_type = other DNA
atggcacacggaaccaactacaaggtggctttccgcaggcgccgagagggcaagacagactacgcagcacgtatgaaactggtcagttacgacaaaccccggctggtggtgagggtgagcaactcccatgccactgtgcaggttattaattatgctccagagggcgacttgactgtagcgtcagcggtctcgaagcagctggccaagtatgggtacctgggccacacggggaacctaacaagcttttacttaaccgcttatctttgcgccaagagagcactggctaagggcgtggagtccgcaatactggacatcggtcttaaaagtccaataaaaggaagcaaagtctttgccgctctgaagggtgccgtggatgccgggctcgaaatcccccacggcgatttcatcttcccggaggacgaccggattaatggcggacatatcgccgcctatgccgagtccctcgacgcggaggaagttgctaagaaattcagcaagtacttcgaaagaggactcaaccccaaggatttgcctgccaactttgaggaaaccattaaaaatatcgatgaggccggggaatga

SEQ ID NO: 9173 - DNA, 642 bp, synthetic construct
  source 1..642: mol_type = other DNA
atgtcgtttaacattgacgaatgggagccaaaaacaaagttgggtcgcctggtgaaagatggcaccatcactgacatcgatgaaatcttcgaaaaggggctcccgataatggaactggagatagtggatgccctgatcccagatctggaggaggaggtcatggacgtgaacttagtgcagaggatgcacaagtctggtcggaaagtgaatttccgcgtcatcgttgcggtaggcaataagaatgggtatgtgggactgggccagggcaaagctaaggaggttggccccgccattcggaaggctgtcgacaatgctaaatacaatctgattaaggtcagaaggggctgtggagactgggggtgcgtgtgcggacgagagcataccgtgccctttaaagtacagggtaagaccagtagcgtgagcgtcaaccttatccctgcacccgccggagtcgggcttgtgatcggggatgtggggaagacaattttgaagctcgccggcatccacgacgtatggtcccagtcattcggacaaacccaaacgactgtcaacttcgcgaacgcagtgtttgccgccctgaaggagctatccaacgttaaagcaagccaggaagacctcaagaaaatgggcgtgaactactga

SEQ ID NO: 9174 - DNA, 459 bp, synthetic construct
  source 1..459: mol_type = other DNA
atgtttttggtgatccgagtgcgcggcacgaccggtgtgatcaagaatattgcgaacaccctggacatgctgagacttaacagaatcagccatgccgtactcgtggaagagaatcctagtttcgagggtatgctgcagaaagctaaggattacatcacatggggagagatagacgccgagacactgtcagcactcattgctaaaaggggccggctcccagggaatgtgaaagtcactgacgagtacgttgcagaaaacaccgactacaaggacattgccgatctggcgcaggctctgattgagtccaaagttaagttagccgatgtgggcatcaagcccgtcttccgtctccacccgccccgcaaaggctataaggatatccggttgtctgtccaagaggggggaagcctggggtataggggagaaaacataaaggaactagccaagaagatgctttga

SEQ ID NO: 9175 - DNA, 438 bp, synthetic construct
  source 1..438: mol_type = other DNA
atgatcaggacgaaacggaagattaacaagcagcggggcagcagatccaacggcggcggctgcaccaagaagcgccgcggggcaggcaacaagggcggaaagggaaaggccggtatgggcaagcagcattggacctggactgtaatccacgaccccaaccacttcgggaaacacgggttcaagcgaccgcagaaaatgatcaataaggtcaacgcggtcaacctgaattatctagaagagcaggctgacaaactgcttgccaatggtaaggccagccaagatggggacgcgattgtgatcgatgttacagagttgggttacgacaaagtgctcggaaaagggaaaattacaaagaccttcaaaatcagtgccccacagttttcagcatctgctgtggagaagatagaagagctcggaggagaggccatagaactgtga

SEQ ID NO: 9176 - DNA, 1362 bp, synthetic construct
  source 1..1362: mol_type = other DNA
atgtcatccctagagtttctggagcctgtctttaaaatcgtgcccgaggtcaagtctcccgtgcatcgcgaagactttaatgagaaactgaagtggaccgctctggtgttagtgctatattttatactcactcaaattccactctacgggctcgcgcctggagctatcgattcattcgcccagctgcgggccgtgatggcaggaagtttcggctccatcctgacattaggtatcgggccgattgtgaccgccagcatcgtgctccagctgctggttggctccaatctcttggatctggatctttcttctcataaggataagtctcacttccaggctactcagaaaatcctgtctatcgttttcacattttttgaagcaagtgtgttggtactcaccggcaacttggtaccaatcgacggcagctacactctgatactgatcatccagctggttgtcggggccctcgtaattatctatctggacgaagtggtgagcaagtggggattcggcagcggcattgggttgttcatcgcggccggcgtctgccaggccatcatcgtaggcacattcagcatcctgaatgggtccgacggactgctggcaggtattatccccaagttcatccaactggctaccggcggaacatttgacttctcaattctcgttccattaatagccaccattatcgtatttgtggtggtgctgtacggggaggctatgaaagtcgaaattcctatatcgcacgggcaagttaagggtcacggccggattaggggaagcgtgggcaagtaccccctgaaattcgtgtactcaagcaacatgcccgtcattttaacgtccgcactgcttgtcaacgttacgctctttgccaacgtgttccagaaaatcggcgttccaatcctaggacaccttcagaacggcaaggctgtggacgggatcgcctggttgttgtccacacctaacctgaccatgtttatcacagagccgatccatgtgctggtctatgccctattcttcattgcctgctgtatattgttctcctacctgtgggtggaaatcagtggactcaacgcgaagaagattagcgagcagctgcacaagtccggcatccagataccagggtttagaagtagtaaacgacagctctataaaattctgaagaaatatattcccgcacttaccattataagcggggtgtacgtcgggctcattgccttcctcgccgacttgactggtgcgctgggtggaggcaccggtgtcctgctcacggtcggcatccttcacaagctttacgaggaaatggctcaagagcagcttatgtcggcaaatcctgtgctgaggaaggtgcttggaggagattga

SEQ ID NO: 9177 - DNA, 576 bp, synthetic construct
  source 1..576: mol_type = other DNA
atgcggggaatcaagttgaagctcgtcgtccttactggcatacccggcagcggaagtacaaccctgctcaataaggcgttggagcaggtggactacgtgcatctaaattacggggacataatgaccgagattgcaattaatgagaatatcgccgataaccgggattccctccgaaaactgccagccgaaacacagaaaaaaatacaagctaaggcagcgaaggagattaagcagagatcggagaacgacaacgttattgtagatactcactgcacgatcaacacacctgccggctttctgcccgggctaccaaactgggtgctggaacagctgcagccggaccttttcatcctgatcgaggccaatgccgatgaaatcatctacaggcgcctgaatgacgatacgcgccagagagacgtgcagaaagctaaggaaattcagctccatcaagaaatgaacagggccactagcatggcttatgcaaccctgaccggtgccaccgttaaaatcgtcgagaaccacgacaaccacctggatagctccgtgtcaaagttagtggacgtgctgaacctctga

SEQ ID NO: 9178 - DNA, 579 bp, synthetic construct
  source 1..579: mol_type = other DNA
atgtttgatatcatgggaatgatctatggtgtgctgaacacaattttcgacccaattctggcgatggaccccaacccaagtaacccggccctgacagtcttgataatcgcctttatcgtaagcctgatcacaaccatcgctaacaagtacctggttgaccaggacgcattgaatgagaaacaggcaaagatgaaggagttcaataaagaactgagggatgctcagaagcgcggcgatgggaagaaaattgccgaactgcaagcccggcagaccgagatgatgaaggagaataccgcgatgatgtcagaacaatttaaaccaatgattgtgacgtttgtccccatcatcttaatatttttctggatgagagcctctgcaattcacgacctcgtcatcatactccctaccactgtgtactgggtgactctcacgcctctctggcatgtgatcggcagcatgttctacggcggtcaggccactatcccctatgggattggctggctgctttggtacatgatttgcaccttcggaatgtcccagatccttcgaaagttcctaggattcaaacaggggttctga

SEQ ID NO: 9179 - DNA, 267 bp, synthetic construct
  source 1..267: mol_type = other DNA
atgcccgctaacaggtttagatcacggagttacaagagagtgcacaagaagacgcctggaggcgtaaatgtgctacgctataaaaagaaaaagccatctaagcacgtgtgcgcggaatgtggcgcagtcctgcacggcgtcccccgcggacgcccatatgagatccgaaagctgtccaaaacagcccggaggccgagccgtccctacggggggtacctctgcagcgcctgcacccggaagcatttcaaaaaagaggccaggaagtga

SEQ ID NO: 9180 - DNA, 522 bp, synthetic construct
  source 1..522: mol_type = other DNA
atgattataacaatcggcggactagccgggactggaacaactaccctggccgaggtcctgagtgagaaattaaacgtgccctatatttccgcaggttttatcttcagggaaatggccgctgagagagggatgagcgtactggagtttagtgagtttgctgaggggaacgccgaaatcgacaaggaaattgacaagcggcaggcagaaaaagccaagtcctcagacaatctgatcctcgagggccgcctgtctgcattcttcgttgaaaacgccgatttgaagatttgcctgatgacgccattcgaggtgcgatctaagagaatcgcgcagagggagggcaagagcgtcgatgtggcgaaaaacgagattatcattcgtgaagagtcagaatccctccgctacaaagaaatccacaacattgacatccggaacatggaaatctacgacctcatcataaataccgatagcttcaatccggagagcatatcggagatcatcaccacaacccttaaggtgatatga

SEQ ID NO: 9181 - DNA, 222 bp, synthetic construct
  source 1..222: mol_type = other DNA
atggccagcatagaggtgggcagggtgtgcgtgaaaaccgctgggcgcgaggcaggcaagaagtgtgcgattgtggagatcatcgacgaaaatttcgtcgaagtgattggtgaggcggtaaaaaaccggagatgcaacgtcgctcacctggagcccacagcagatagtatcgatgttagcggagacgccgaatccatcaaggccgccctcgccgacctgtga

SEQ ID NO: 9182 - DNA, 966 bp, synthetic construct
  source 1..966: mol_type = other DNA
atgaagttcaataggatggtcaagtctaagagtttcactagtccggacttcgggtgcaagccagaggaaagagagatttccgagtacatttccaaaggcgtaatcaatctagataagccctccggcccaacgagccacgaaatcgacagctgggtaaaacgaattttgagtctggagaagagcgggcatggtggaacattggaccctaaggtgactggaatattaccagtggggttaaatgacgccaccagagccatacagctgctgctgactgccccaaaggagtatgtgtgcctgctgacactccaccaagatgttcccgaagagagaatccgtgaagtgttcgctgagtttaccggcaagatttaccagctccctcccgtgaaatccgctgtgaaacgagaacttaggacacggaatatttactatgcaacaatctacgaaatagatgggcgggatgttctcttcaggatagggtgtgaggcaggaacttacgtgcgcacgtactgccacaacatcggtgaggcgcttggcgtgggagcccacatggcggaactccgccgcacccaggtcggtagctttaacgaaaagaacaacctggtaaccctgcaagatgtcacggacgcatatcatttttatatcgaggatggcgatgagtcgtttttgcggcaggcgatcatgcccatggagatggctgctgactatctgccgaaagtcatcgtgaaagacagcgccgtggacgccatctgccacggggccgacctggcttgtggaggcatcgcagaactgacagataacatccagaagaacgacattgtcgccatcctgaccctcaagggagagctcgtgggcgccgggtccagccttctgacctcaggcgagattctcgagtcagactcaggtttcgccgtgaacgtttctaaagtcctaatgaagcccggcacctaccctcggttctggaaatga

SEQ ID NO: 9183 - DNA, 1767 bp, synthetic construct
  source 1..1767: mol_type = other DNA
atgaacgttaagaacacattcgtgattatcctgctgtttctaatcctgttctcaacagttacctttgtgtctgcagatgacgatcgcagctattccatcgatcaggtgattaccgacctcactgtgaaaaacaacggcctactccacgtggaagagcagtacgactacagctttgacggcgccttcaatggcgtgtacagggacatccccctaaaatccggagaaagcattgagaacattaaaattcacgtggacggggcatatgccacatatgaagaaagtgacgatgacggctacaagcacgtcaaaatttatctctattccgacgccgcccatactaaagggatcaaggattgcaatgtgaaggtctacatcagctacgatttgatcggtgcagtcacgattttcaatgatgtgagtggtcttcagtacaaactctggggggaggagtgggacgttggagcgaacaatctgaaagctaccgtccacctgcctggcaataatggaaacgagtactatctgaccccctccgagtacaatgacacttcctcccttaaaggcaacaccataactgcagagagttcttacatcccaaagggcgaatactacgagctgcttgtgcttatgcctgtggacgacttcaataagtcccccaacgccaagcatgtaaatcaaaatgggcatgacatgatcatgaagaacctcaagaacaccattaacgaacgggacttttggaacacaacttacctggtgctgggcttactgacgcttataagccccatcagtgctatcatagtctacttgaaatacggtagagagccagaagtgaattatgacgggatctacgagagggatttgcccaccaacgatcctccggagatcgtgaacgctctgatcgagaacaagatcagcattggacatccgaatattaagggtttcgaagcctcgattatgaatcttattgatcgtaagttcatcactctctccagccaggagaacattgagagcaataccaaagacctgatgctcaccttgaataacaaggccggattgagcgcaagtgaacaaatcgtctttgacacgctcaaccactttagcacaaataacattttaaatctgtcaaccctgaacggccagctgtcttcggaaacaaatggtaagtggtttatggaaaagatccgggaatgggagtcctccgttgagaatgatatggacgtctcaagatttttcgatgaccggggttcttcaataatgaacgtaatcgggttactcggcatacccttcgccatcgctctgatcgttctgggatttatcacaaacctaaataacggactgtatagtatcgcgggcggcatattcctgataatcttcagcatcgtaatcaccatgagcgatgacgatatcttcggccgatggaccgaggagggtcgcgtatactatctcaagtggaaaaacttgaagaactttctggaagacaacagtctgattaaggagcaccctccagaatcaataatcatttggaagaagtacctcatctatggtgctgctctcggagtcgccgacaaagtgtacgagtcaatgaaactgcaggtgccaaacattagcgattacgataacgatggcctgttcatgtatcactattacgggggatatggcatgatgaatatggccttctccacgggggagatttcggccaacccatctgactctagcgggttcggggggtctggcggaggctctggcgggggagggggcggagcgttttga

SEQ ID NO: 9184 - DNA, 558 bp, synthetic construct
  source 1..558: mol_type = other DNA
atggattttatcctaacgattgtcattatcatagtcgtcctgtttattattgtgacactgatacacatgtacaataatctggtgggactcagaaatcgggttaagaactcgtacgcccaaattgatgtgcagctgaagcggcgcaacgacttgatccccaatcttgttgaaacagtaaaagggtatgcttcacatgagaaaggcgtgctcgaggaggtgaccaaggcccgcaacagtgtgatgaacgcgtcctccatcaaagaaaccagcgtcgcagacaaccaattgactggcgcactcaagtccctgttcgccgtagctgaaaattaccctgaccttaaggcgaatagcaacttccagcagttacagaacgagctgagtgagaccgaggacaaaatcgcttattcaaggcagttctataacgatgtggtgctcaagtacaacaacgcctgccagcagtttccaagcagcatcctggcacgaatcttcggttacaagatcgaggactacttcgaagcccccgaggccgagaggactgtgccgaaagtcgaattttga

SEQ ID NO: 9185 - DNA, 450 bp, synthetic construct
  source 1..450: mol_type = other DNA
atggaagacgactttaagcacttagtgcgcattagccgaaaggacgtgaacggcaataaaaccattgagcaggcactcactgaaatcaaaggggtcggaatctcgctctctaagacgatgtgccgtactttggacctggatctagatgccaagataggatacatcgcggatgaagatgttctgaggattgaggagatcctggagaacccgcaaaaattcgacatcccccgctggatgttgaaccggagggaggactatgaaacaggggacgacatccacctgatagagagcgatcttgacatgaccctgagagacgatctgaatcgcatgaagaagaccaggtcctacaagggccggagacatgaggtggggctcccagtaagaggccagcgcaccaagtccacattccgaaaaagtagtagcgtgggtgtcaaacggtcacggggctga

SEQ ID NO: 9186 - DNA, 540 bp, synthetic construct
  source 1..540: mol_type = other DNA
atgggccaacctcgcaaatcaaggaagaagtataacacaccaccccacccgtggaacgcggagaggataaagaacgagaacaagctgatgacgaagtacggcctcaaaaataaaaaggaaatttggaaagccgacacactcgtccgcagatacagtagggaggcaagatatttgcttggcttctccaccgatcagatgcaggaggagaagctggaattactgggccacctggcccgaaccggaattttgcctgaaggggccgcccttgaagagatcctagatctgaacgtggaagacatcctgagacggcggctccagaccatcgtgtacaataaggggctggcccggactcccaaagaagcacgaatgtttgtggtacatggacacatagctctcaatgggaaaaagatcaactccccaagctatgtggtgctgaagggtcaggaagacgatatcggattctaccgctctagccccgtcgctaaacagattgaggagtacaacaatagcaagtcggacaaggttaatactgaggagtga

SEQ ID NO: 9187 - DNA, 393 bp, synthetic construct
  source 1..393: mol_type = other DNA
atggcaaaagacgaaaagtgggggatcgctaatatctactcaagcttcaacaacaccattatcacggtcacagacatcaccggggccgagaccatctcccagtggtctgggggaaaggtcgtgcgggcagacaggcagcaggccagcccgtttgcggccatggctgccgcaacccgtattgcggatgatgccaaggaaaaaggattcgtaggtctccatattaaagtgagagctcccggcggcaacggcccccgcagtccaggccctggggcacaagccactatccgggccctggctcgcgccggcatcaaaataggaaagatagaggatatcacaccaattcctcacgacggtactggcaggcccgggggcaagagaggacggcgagtgtga

SEQ ID NO: 9188 - DNA, 819 bp, synthetic construct
  source 1..819: mol_type = other DNA
atggaggggttcaacatggagatcgaagttaaaagtcagaaggatgacgagatcgtcttcattgtgcgggatgcggaagtccccttcgtgaacgccattcgcaggtgcgctatggtgaacgtcccaaaaatagccatcgaagacgtgaatattatccggaacgacagcgccatgtttaatgaggtgctggcgcaccgtctgggtctcactcccttagtgagcgatcttgatgccctggaagggctatctttgccggaggacgacgattgggaagagtataccaatggcatcatgttcacacttaaggaggagggcccgaaggtagtttactccaaggatctgataagctcagactcaaaaattaagccagtgtacgacaccatccctctggtaaagctgaaagacaatgagaaactcaacatagaatccgtggcaaaagttggatacggaaaggaccatgccaagtggatgccaaccactgtctgcgcttacaagcagtatcctgaaatcaccttcaacgatgacttggagatcgattacgactgcgcctctgcatgccctaggggtgtgctgaagtcggataagagaagcaagaagattaagattctggacattgagaactgctccatgtgtaaaagctgtgtgcgagcttccacgaacggctacatcaatgtcgggtatcgggaaaacgacttcatctttcgcatcgagacagacggcagcatgccccccaaagaagtgctcctcaaagcctgtgaggtcctgggggagaaggcagataagtttatcagatttagtgaggaaggcggaagtaaatga

SEQ ID NO: 9189 - DNA, 366 bp, synthetic construct
  source 1..366: mol_type = other DNA
atggctaagaagatcataaagaccaatcccaacctcatcgagctcattaataaactgtacgagcagtcacggaacgaaaacgcagccatctggaaggacgttgccaaaaggctggaaaggtcgaaccgaagaaccgccgaggtgaacttgagcgacatcgcccgccacgctgaggccggtgaaacgattctagtcccggggaaagtgctttccaatggcaatctgacagagaaggtggacgtcgtagcactgaaattcagcgccaaggcgcaggaaaaaatcgagagtgcgggcggagagtgcattgcaatcgatgagataatcgagtccaacccaaaggggagcaacattcggatcatggaatga

SEQ ID NO: 9190 - DNA, 423 bp, synthetic construct
  source 1..423: mol_type = other DNA
atgattattgacggagaggggtgcgtgctgggccggctggcctcagtcacaagtaaaaatctactggaaggcgaggaggtgattatcatcaacgctgagaaaataatgctgacgggtaataaggattgggcctacgccaagtacaaacagagagtggacagggctagcatctctaacccccgagacctcgggccaaagtatccacggagaccggacgatatattcaggcgcaccgtgcgcggcatgttgcctttcaagaagagcaaggggaaaactgcattcaagggactcaaagcgtttgtgggcgtccccgccgaatatgctgatgtagaactcacagcagttcccgaagcggagtacaagaacatcaagaagggtatcgagttaggagagatctccaaacttctgggcgccaccttttga

SEQ ID NO: 9191 - DNA, 402 bp, synthetic construct
  source 1..402: mol_type = other DNA
atggtcaaagtgattcacaccagcggcaagcgcaaaacagcgatcgcaagaggcactgtccgggaaggaacgggtaaggtgaggataaaccgaatccccctagagctctacagccctgagctcgctaacctcaaactgcaggagccactgaccctggccggcgacctggcgaatgaggtggacataaacatccatgtgatcggcggaggagtaatgggccaggccgaagctgcccggatggttattgccaaggggcttgtgcagtggtcacaagatatggatttgaaggaaaagttcacccagtacgacaggacaatgctggtcggtgacccaaggcggtccgagccgaaaaagtatggggggcccggggcaagagcccgcaaacagaagagttaccgttga

SEQ ID NO: 9192 - DNA, 171 bp, synthetic construct
  source 1..171: mol_type = other DNA
atgattccaatccggtgtctcagctgcggaaaacccgtaagtgcagtcttcgacgagtataacaaacgcgtggcggccggggagaagagcaaggatgtgctggacgacctgggcctgacccgatactgctgcaggagaatgctaatctcccacgtgcagacatgggaatga

SEQ ID NO: 9193 - DNA, 183 bp, synthetic construct
  source 1..183: mol_type = other DNA
atggatgtggagaagaaactgaccaggttcgagcgagcccgcctcctcggggctagagcaatccagatcagcatgggcgccaagcccctggtcgagattaaggacagcctggacccgattgatatagcctacgaagagctaaaagcgggagtacttccattggacgtgatccggtatgaatga

SEQ ID NO: 9194 - DNA, 1245 bp, synthetic construct
  source 1..1245: mol_type = other DNA
ctcgtgagtataatagaggacgtccaggtccgaaagattttggatagccgcggcaaccccaccatagaggtggatgtcattacttggaacagtaagggcagagccgccgcccctagcggcgcgagtacaggctcctatgaggtcgtaccctatcctaagggggggattgacgaggttgttagcgaaatggaagacctgatcgcttctgaactgattggaatggatgctgaggacctggtaacaattgatgaagtcctgaaggaggtggacggcacagacaacctcagcgccatcgggggtaataccaccgtggccatctcaatggcagtggccaaagctgcagctgcatcctacaatatgcccctttataaatacattggcggaaaccttgtcaatgagctgcctttccccctcggaaacatgatgaacggtggagcacacgcgggtatcaacgccccggatattcaggagtttctggtggtgcctgtgggagctactaacatatctgatgcagttttcgccaatgcctccgttcacaaaagactgaaggagctgatccagagcaaggacagcaactttactggcggaaagggggatgaaggtggctgggtgcccaacatctcaaatgatgcggctttagaaatccaggcccgggcctgcgaggaggttggggatgaacttggtatcgaaatccgcccatccctcgacatcgccgcatccgaattatggaacgcagccgagcaaaagtacatatacgctcaggatgggattaagagggacaccggagatcaaatcgacttcgtaaaagacatcatcgatacatacaacatgttttatgtggaagacccattcgacgagtctgacttcggcggattctcgcagttgacggcgaaggtgggcgacaagtgcctgatctgtggcgacgacctgtttgtgacaaacaaggaactgctggctaaggggattgaaatgaaggccgcaaacgccatcatcattaagcccaatcagattggctccctgagcgagacgtacgctaccgtgaaactcgctaaagagaataatattgtcccggtggtcagtcacaggagcggcgagaccaccgacgagacgatcgcccatctcgcggtggggttctcatcgccattgatcaaaaccggagccatcggtggggagcgtatagccaaactcaatgagctaatccggattgaagaggagctaccaaatccaactatgaacaaattttga

SEQ ID NO: 9195 - DNA, 195 bp, synthetic construct
  source 1..195: mol_type = other DNA
atggcgaaagtaaccatcgattatgataaatgcgacggcgccgactgtgcagaatgcagcgacgtctgtccgatggaggtgctggtgctcaagggggacaagatcgaaattgtcgatcccagcgagtgctcctactgcgaggtgtgcatggacgtttgtccaaacgattgtatcaagatagaggacgacttctga

SEQ ID NO: 9196 - DNA, 603 bp, synthetic construct
  source 1..603: mol_type = other DNA
atggccaatgatgagctgctaatagatctggataactacctggcagctgggttacacatcggaacacaacagaaaaccagcgatatggagaaatatatattccgggtccggtcagacgggctatacgtcttggacattcagaaaactgatgaacgtatccggcagattgctaagctcctggccaagtacgacccagaggacatcctggtagtggccaccagacagtatggtcaggctcctgttaagaaattcggcgagatcaccggggctaagacgatcccgggcaggttcatccccggcaccctgacaaaccccaattatgcgaagtttatcgagccaaaggtgatcgtggtcacggacccaaggtctgatgcacaggccgtgctggagagcaagcagaacggaatattggttgtggccctctgcgacactgaaaatctccttagtttcgtggacattgccgtgcccgtaaacaacaagggtagaaaagccattgcgctcgtctactggctgcttgcacgccaaattctgcgagagcgcggagacattcctgaagacggcgacctggatatcgattccacagactttgaactcaagttttga

SEQ ID NO: 9197 - DNA, 849 bp, synthetic construct
  source 1..849: mol_type = other DNA
atgcttcgccagcctgctgtagccggctcattttaccccaacgatgcggaaaatctcaaaaaaatcattgagagctgctttctggacaagtcgggtgtggggttcatacccgagctcaacaagttcaacggcaaggactacccgatcaacgtgatggtgccacatgcaggctatcagtattccggtgccatcgcgtcccatagctactgtgacatcgtcaggaacggcttccctgaggtgttcatcattatcagtccaaaccacactggacttggaagtgaaatctctgtgtttaatgaaggtgagtggataacacccctgggggatgtcgaggtggacaacgagttcgccaatgagataatctctatcagcgatattgcatcgtccgatttccatgcccacgtccacgaacacagtatcgaagtgcagctacccttcctgcagtacttctcaagcgactttaagattgttccaattacgatgggaacacagaccttcgcaacttcaaacgacctggctaatgccattttcgaggccggcaataagctgagcaagtcttattgcgtgatcgcaagcaccgacctcagccacttcaacaaccaagagaaggctaacaaggtggatggcttcgttctggaggacattgaggagatgaatgaatttaaattgtttgaagaggtggttcaatacaatatcacaatgtgcggctatgggcctgtaatgaccaatatctccctgtccaaacggtgcgggaaaaactcttgtgaaatattagcctaccagacgagtggggatgtcaccggcgactttagctccgtcgtgggatacgcttcaggagtctttaagtga

SEQ ID NO: 9198 - DNA, 963 bp, synthetic construct
  source 1..963: mol_type = other DNA
atgatcgccaaggcttccgctcctgccaaaactatactgtttggggagcactcagtggtatacgatgaacctgccatcgcaggcgcggtgaacaagagggcctatattacaattaaggagtccaagagcgacaagagcatctttagagcgccagatataggtttcgaggctgagctgctcagcaaacagaagaagtacatcctgacaaagggaaagcccggcattatcagatatattctggagagcctgtaccgcgcacacgaccactcgcccatcgacataaccctttcatccaacgtccccatcggttctgggctgggtagctcagcggccgtgactgtagctacactagcggcactgtataggtatcataatattcggtttaacaagaaaagccttgcacacgacgcccacatggtggaacaggctgtgcagggggtcgccagtcccctcgacacactcgttagcacttacggggggctggtctacttgtctcgaaacaaaaaagttgaacacttcaaggtcaacttcaacgctccactcgtcgtaggctttaccaccaagcatggaaacacgggaaagatggttaaggacgtgaagaatttaaagaatcgcaatccaaaaattatcaatcctgtgattaccgcaatgggcaatctgacgaactatgccaagcaagctatcctgaaaaaagattacaataaagttggcgagctcatgaacatcaaccatggattcttggatgtgatcggtgtgaataccctagaactttcgcgtatggtctacaacgccagagaagccggagctatcgggtctaaaacgaccggcgccgggggcggcggcagtataattgccctgtgcccgggaaaagtggacgaggtggcaaacgccatcgcccgggacgatagtatcttgaaagtgcgattcacccgccggggcgtctcctccagggtgtacaagtga

SEQ ID NO: 9199 - DNA, 801 bp, synthetic construct
  source 1..801: mol_type = other DNA
atgatcatccttaagattggtggaagcagtctgactaataaggactcctccaagagtgaggtgaactccgacagcctgaagagaatcgctctggaaatcaagtcgtcactggacaactctgcaaaggagttgattgttgtgcacggtgcaggcagcttcggacacccacccgccaaaaaatataaaatcggcgaggtatttgataagtcagaatacccgcagaagcgcatcggcttctgtgaaactcagaacgcggttaagaaactcaacatgtatgtctgcgaggccttcatcgagcaggggctgcccgtggtggcaattcctgcttccagtttcatgacagccaccaataagaggataacccacggggacctcgactctttcaataaatacttggagaaaggttttatccctgtcatctacggcgatgtggtgctagacgacgaactggagttctgcgttatcagcggcgatcagctcattcaatacctggccatgaacttaaatcccaatcaggtgatcctcggaacagacgtggacggcgtgtataataaaaacccaaagacgcatgacgatgctatattttttgataaacttagctcccttgaagagctagacgcctttgaaggaacaaccaacgtcgatgtcacggggggaatgattgggaagatcaaagagctcctgtacctggccgatctgggcatagagagcaagataatcaacgcggaagtggaggacaacattttcaaagtattggagaacgaagatgtcaagggcaccgtgatttcacgggggaagtga

SEQ ID NO: 9200 - DNA, 1047 bp, synthetic construct
  source 1..1047: mol_type = other DNA
atgatctcagaccgaaagctcgagcaccttctcatttgcgagaattatgatgtaagcttcaagaacaaaaccaatgggttcgaagatatcgaattgatccacaacgttctgcctgaaatcgacaagcaggaaatcgacttgtccacgtccaccttcggcaaaaaactggacagccccctctttatcaccgccattactgggggccatcccgctgccaaagaaatcaacaaacagcttgccatcgctgctgaaaataacaatatagctctcggtgtcggatctcaacgcgccgcctgtgaacatccggagctcgaggatacgtacactgtcgtgcgagagaatgcccctaactgcttactggtggggaacataggcgccccgcagctgaatttagcggagaaggcagttgagatattggacgccgacattctagcaatccacctgaacccccttcaggagagcatacagcctgagggggatttggacgccaggggctatctggacctcatcagtcagattacaaattcagtcaacattccaatcattgcaaaggaaactggctgcggtatatccgcagagagcgcagaggcactagtcgaggctggtgtggactttatcgacatcgaaggggccggcggcaccagctgggcggccgtggagacataccgggctgaagacagatacctgggagagatattttgggattggggcatcccaacggcggtctccaccgttgaggtgaccaatgccatcgatgtgccagtaatcagctcgggcggaattaggagtggtctggaggcggccaaggccattgctctgggagcagatgctgtggggatggccctgcccttcctgaagaatagcacctcacaggaacaacttaacaagttcattagccgcttcaacgagtccctgcgcatcgccatgtttctcgtgggagctagtaacattgatgaactgaaagagtcgaagctggtgattcggggaaaaacaagggagtggctgaacgagagagggatcaacacaaagaactacagccggagatga

SEQ ID NO: 9201 - DNA, 1344 bp, synthetic construct
  source 1..1344: mol_type = other DNA
atgagcgtcgaagtaatcgcgattggcggataccaggaggtggggaagaacatgaccgctgtcaaggtaggcgaggatgtcatcatttttgacatgggcatccacctggaccggatcagtatgcatgaggacaccgatatcgatcgcatgcacagtctggacctcatcgaaagaggagtgattcctgacgatacactgatgaaagacgtggacggcaaagtcaaaggcataatctttagccacgggcatctggaccacattggggctgttgcgaagttagcccatagatacgatgcacccctgattggaacgccctacactgcggccctaattgagaagcagatcaaaggtgagcgcaagttcaaggtgaataatccaattcgccctttaaacgccgggtccaaactgaaactgtcaaaggacatcaccctggagtttgtccagtccacccatagcattccacaagcagtgttcccggttcttcacaccccggagggcatcatagtttacgctctggattttaagtttgacaatcaccaaaaagtaagccctccgcctgattataagagactccgggaactgggtagggaaggagtccttgctctcatagtggagacaacgaatagcactaactataacgaggttaaaacccactccgagcgtatcgctcgaaacatactcgaagacgtgatgcgaggcccccttcaggagaagaccgggatgatcgtcactaccttcagcagccatgtggaacgtgtgcaggccatcgccgatatcgccaagaagagccacagagagatatttttcctaggcagatccatggaaaggttctgcggtatcgcccagaagctcggcattttgaagttgcccaagaacgcctcaatctatggcagccccaaggcaataaaccgagccctgttgagggccgacgaggatagggctaactatctccttgtgacgacaggtcaccaaggggagccagacgcactcctgcccaggatcgccaacggacggacaccattcaatattaagaaaggagataacgtgattatctcagcccctattattccaaatcccactaacgctgcaaataggcatatcatggagagacggttgaagctgaaaggggcacggatctaccccaatgcgcatgtgtcggggcatgctggccgggaagaccaccgcgagttcctgcgcatgctcaaacctcagcacatcataccagcccacggagacctgacaatgctgtccgcctacgccgaactagcagaagaggaaggataccggattggctatgatatccacatcctgcgcaacgctcaggcccaggtgttcaaaagttga

SEQ ID NO: 9202 - DNA, 981 bp, synthetic construct
  source 1..981: mol_type = other DNA
atgagtgacgtaaaaaaaatactgggaaactattccaccgacatcacccgcacaattgaggaggaactttcagccatcactccgaataatctggcagaggccagcgtgtacctgacacgagcgggcggtaagatgctgaggcccgctttaacactgatcgctgccgaggctgttggcggtaatcgggaatctgcattgaaatccgccgccgccattgaactgatccacacattttcactgattcacgacgacattatggaccaggatgacatgaggcggggaatgcctagcgtgcataaggtgtggggggacgatgtcgccattctggccggagataccttattcagcaaggctttcgaaatcatcattggcaacaaaggaactaccagcgatcagaacaacaagagcctcgctacggtagccgatgcttgcgtcaagatctgtgagggtcaggccctcgacatgggctttgaggagagattcgatgtgacagaagatgagtacatggagatgattttcaagaagacgggggccctgattgcagcggccacgaaagtgggagctataatggggggggcatccgagggagtcatcgatgcgatgtatgagtacgggcggctcataggtctagctttccagatccaggacgactaccttgatctcgtgtcggacgaagaaaccctgggcaagccaatcggcagcgacatcgggaagggcaagatgaccgttattgcaattaaagggctggccagtgatgatactggcagactcctcgaaatcctgaaggatgacgagaactccaacgaagatataactgaggcaatcgacatcctgaccaaatgcggcgcgatcgaatatgctcgtaatttggccttggagagcatcaagcaagcaaaggaggtgcttgaaatactcgacgactcctcaagcaaacaaatgctagtcgacatcgccgactttgtgctggagcgcagtgcctga

SEQ ID NO: 9203 - DNA, 1014 bp, synthetic construct
  source 1..1014: mol_type = other DNA
atgctggagatcaagcacacactctgcccttcctgtagcgtgggctgcgggattaatgtcgtgctgaaggaggggaatgtggtcggcacttttccctataaaagacacccggtgaactcgggaaaaaactgcctgaatgggcgcaatagcatcgagtgctacctcaacaaattcgaggatattaacgtggacgacgtggtagccgacgtgctcaaggagttgaaatccgccgatgcatccagtgtgaccgtggtttgttcaggtaataacgatgttgaggaaatcaaggccatcaaagaatttgctgagtccaacaactttaatctggccttctatgccgataacctgaagaactttgacgacgtggcaacctacgacgatgtggcggacgccagcaagatattcgtcatcggcgatcttttgtttgagaacccacttattggccggaggattgttcatgccaagcagaacggagctaaaatctacgcactcgggaagacggaaaagtctgtgacattcaacattgctgacgagacgttcaacacgtctgtcgttgattttctggatgcgaatgacagcaacattgacgaatccagtgtcattgtattcaattacgtggacagcgccgaggatttagacaaaatcgagtcaatcggatgtaagtcttttcccgtgttcagcaaatccaattctaagggcgccctggatattgtggaggttaagtccctggacgaaatgatggaattgctggagaatactaaggtgctcctagtattcaacgacgacatcgctgatgaaatagactttgacttcactaaaatctcgaaaatcataagtttcgctccatgcgaaaataacaccaccaaaatctcagatattgtggtacccatcaagacatggcttgagaaggacggaagcttcgtcaatgcaatgggtgacacacagaccttcaccaccgtcatagattcagatgtcctgagtgaaatcgaggtcatcgaaaagctaaacagctga

SEQ ID NO: 9204 - DNA, 1143 bp, synthetic construct
  source 1..1143: mol_type = other DNA
atgagctatgtgctcgcaaaatcgaaggacgacgacatcctgtccgccggtgagtgtggcggagcggtcacgagtattctcaaatacttgctggatgagaagctggtggacggggttctcaccctcaggccatttgatgacatttacgacgctatgcccgtgtatgtgactgactctgacgatctaatatccacagcggggagctaccactgcgcccccacaatgatcggggatataattgaacggttcatcgatgacgacactaagatcgcagtcactgtgaagccttgtgacatgagggccatgaaagagcttataaagaggcacagaatcaatgacgataatgtttacttcatcggcttgaattgtggcggcaccgtgtctccggtgtccggcagaaaaatgatcgatctgttctatgaagcagaccctaacgacgtggtcagtgaggagatagataaaggtaagttcattatcgagcttgctgacggtggggaagaagccgtcaaaatccatgatctggaggccgagggatatgggcgccggaacaactgtcagagatgcgacgtaaaaattccacggatggccgacattgcttgtggaaactggggcgccgaggatggctggacattcattgagatcaatgacgagaaaggccagaagctggtggatggcgccaaaaaggtgggcatccttgaaacgaaaacccctaatgatgccgcggtggaaggacgcagcaaggtggaaaacatcatgataaagatggcaaagaagaaccaggatgcaacctacccactggttagcgagcgggacgaatggagccgctgcatcggatgctacgcttgccgtgacatttgcccggtctgctggtgctttgaaaactgcgaattaaacaagtcttacttcaaggacgaggccaacgccttttcaagtcccatcgcttttcagggggtacgactgtcccacatgagcttctcgtgttgcgattgcggtcaatgtgaggacgtctgtcccatggatatccccgtttcactaatttttgacaagctgcagaagaaatactatggacgaaccgggtatgtagctggagtgtcagaggatatcaagcctcccctctactccccagaaaagacagagctgtga

SEQ ID NO: 9205 - DNA, 402 bp, synthetic construct
  source 1..402: mol_type = other DNA
atgtccgaagacctaaagattgtggggctgttgtgcaactggtgttgctacggcggcgcggacactgcaggaacagcacgcatgcaatatcccagcaatatccggatcattagggtgatgtgctccgggcgaattaacccgagcatggtcttcaaggccttccaggagggtgctgacggcgtctttgtaggcgggtgtcatatcggagactgccactacgatgccgggaactacaaatggtcgagaaggagcaagatagtggaggatatccttgaggagtttggtatagagaaggaacgcttccggcacgagtggatctcagccagtgagggcgagaaattccagacgaccatggaagaatttcacaagacactcaccaaactcggaccactggaactgtga

SEQ ID NO: 9206 - DNA, 366 bp, synthetic construct
  source 1..366: mol_type = other DNA
atggagatctacatgcagaagatcggactaatcagacagagcttgaaccccaagaacagcagtctcgatctggacatcgattggaatatcgagtacgtacataggaatcagaacgaaataaacttcgacatcaatctgcgaagcattgagaacttcaacctcaacttcaaaattgagggggtgatcgtcctggacctgtttgaaatttttatccaggaagacgtgtcccaaataattttccaccgcgcctgcaatgtgcttatggatatgatatctctgacccggcagagttcgcacattttatcaaatgaggataaatacccggacattggctccgaacacatcccaaagacactctataactga

SEQ ID NO: 9207 - DNA, 1017 bp, synthetic construct
  source 1..1017: mol_type = other DNA
atgctggagattaagcacaccttgtgcccgtcctgtagtgttggctgtgggatcaacgtagtgctgaaggatggagacatcgtcgggacgttcccctacaaacggcatcccgtcaactccggcaaaaactgcctcaacgggagaaacagcattgagtgctacctaaacaagtttgaagacattaatgtggacgacgtggtggcagacgtgttaaaagagctgaaatctgctgatgcctctagtgtcaccgtggtttgctccggcaataatgatgtggaggagattaaggcgattaaagagttcgcagagtcgaataacttcaacctcgccttttacgccgacaatctcaaaaacttcgatgatgttgcaacctatgacgatgtggccggagccagcaagatattcgtgattggcgatcttctctttgagaatccactcatcggtaggcgcatcgttcacgcgaagcagaatggcgctaagatttacgccttggggaagagcgaaaaaagcgtcaccttcaatatcgccgacgaaactttcaacacttctgtggaggagtttctagacaagaacgcaaacgagtttgatgactcctccgtcattgtatttaattatgtggattcagtggatgatctcgacaagatcaatgaacttaactgcaagaaactgcccgtgttcagcaagtccaactctaagggcacactggacattgtcgaggttaagagcctggacgaaatgatggaactgctggagaataccaaagtgctgttggtattcaacgatgacatcgcggacgaaatagactttgacttcacaaaaatctcgaagatcataagcttcgctccatgtgagaacaacaccacaaagatctcagacataatcgtgcctatcaaaacatggcttgaaaaggacggaagttttgtcaatgccatgggtacgtgtcaggagttcactgctgtggtggaatcagatgtcctgagtgagatcgaagtcatcgaaaagctgaacggaaactga

SEQ ID NO: 9208 - DNA, 1143 bp, synthetic construct
  source 1..1143: mol_type = other DNA
atgtcctatgtgctggctaaatcgaaggacgatgacatcctcagtgcaggagaatgcggcggagccataaccagcattctgaagtatttgctagacgaaaagctggttgatggaatcttcgcactcaggccctttgacgacatctatgacgccatgccagtatttataacagatagcgaagatttgataagcacggcggggtcctaccactgcgctccaaccatgattggggacatcatagagcgctttatcgatgatgatactaaaatcgccgtcaccgtgaaaccttgcgacatgcgagctatgcatgagctcgttattaggcacagaattaacgacgacaacgtgtatttcattgggctcaattgtggcggcaccgtgtcacccgtgagtggcagaaaaatgattgacctcttctacgaggcagaccctaatgacgtggtcagcgaggagatagataagggtaaattcatcatcgagcttgcagatgggggggaggaggcagtcaaaatccatgaccttgaagctgaaggatacgggcgccgaaacaattgtcagcggtgtgacgtaaagatcccacggatggcggacattgcctgtggcaactggggcgccgaggacggctggacattcattgagatcaacagcgaaaaaggccaaaagctggttgatggggccaagaaggtgggcattctggaaactaagactccgaatgatgcggctgtggagggaagaagcaaagtggagaacatcatgattaagatggccaagaagaaccaggatgccacctacccactggtgagcgagatggacgaatggagccgctgcatcggttgctacgcctgccgtgacatttgccccgtctgctggtgcttcgagaactgcgagctgaacaaatcctacttcaaagacggaacaaatatgcctccgagtcctatcgcctttcagggtgtcaggctgtcgcacatgagcttctcctgttgtgattgcggtcagtgtgaggatgtatgtcccatggacatccccgtgtcactaatctttgacaaactgcagaagaagtactatgaacggacgggctacgtcgctggagtgtcagaggatatcaagccccctctgtactccccagaaaagacagaattatga

SEQ ID NO: 9209 - DNA, 405 bp, synthetic construct
  source 1..405: mol_type = other DNA
atgtccgaagaccttaagatcgtgggcctcctgtgtaactggtgctgttacgggggggccgacaccgccggaactgcccgaatgcagtaccctccgaatatccgcatcattcgggtgatgtgctccggaaggattaaccccagtatggtctttaaagcatttcaggaaggggctgacggcgtattcgtgggcgggtgccacataggcgactgccactatgatgcgggtaactacaaatggtcaagaaggagcaagattgtcgaagatatcctcgaggagttcggcatagagaaggagcgcttccggcatgagtggatcagcgcatctgaaggtgagaagttccaaacaacgatggaggagtttcacaagacactgaccaaactgggaccactagaattgaaatga

SEQ ID NO: 9210 - DNA, 1656 bp, synthetic construct
  source 1..1656: mol_type = other DNA
atggggttggagaacaaaaaattcttgagcgcactgaataagaagttcaaaggcgaggatcaggagaatgaccacaccagtttctactgcttcgacggctggaaacagagcgctaggaaacgcgaatttaacgaagctgctgagaagttggctaaggagaggaacatccctttttataatcctgatatcggcgtacctctgggtcagagacaacttatggcctataagatttcaggcaccgaggactacgtcgaaggcgatgatttgcacttctgcaacaactcggccatccagcaactcgtggacgatatcaagcggacaatcattgttggaatggacacggcgcatagcgtactccaagaacggctaggtgtagaggtcacgcccgaaacaataaacgagtatatggaaaacattaaccacgcccttcccgggggcgccgtcgtgcaagagcacatggtggaagtgcacccggggctcgtggatgactgctatgccaagatatttactggcaatgatgatttagctgacgaattagacaagcgactactgatcgacatcaacaaggagttcccagaagagcaggctgagatgctgaaaagctacgtgggaaataagacctatcaggtcagtcgggttccaacactggtcgtccgcgcttgcgacggcggtacagtttcccgctggtccgccatgcagatcgggatgtcctttattaatgcatacaaactgtgtgcaggagaggccgccattgccgatttcagttatgctgcaaagcacgccgacgtgatcggaatgggcgcatttctgccaagcagacgtgccagaggccccaacgagcctgggggtgtggccttcgggaccctcgccgatatggtgcagacatccaggatctcagatgacccctgcgaagtttccctagaagtgatcgccgcagctgcagccctgtacgaccaggtgtggctcggaagctacatgagcgggggggtgggatttacccagtacgccagtgcggcctacactgatgatattctcgacgacttcctttactacggcaaggactacgtggaaaagaagtacggaatgtgtcaggctgacctgagtatggacaccgtgcgtgacatatcaactgaggtcactctgtacggactggagcagtatgagaccccgaccctcctggaaacgcacttcggagggagccaacgggcttcggtcgtgagcgcggcagccggctgtagcaccgcctttgctactggcaattccaatgcaggcgtgaatggttggtatctcagcatgatcctgcacaaagagacacatagcaggctgggattctacggctacgatctgcaggaccaggcgggtgcgagcaactctctttccatacgctccgatgaggggctgatccacgagctgcgaggtcccaactacccgaactatgccatgaatgttggccatcagcccgagtatgctgggattgcacaggctccccatgcggcccggagggacgccttctgtaccaacccactcatcaagattgcctttgcggaccaccatcttacgttcgatttccgccatccacgaaaagagattgccaaaggcgccctgagagaatttatgcctgcaggagagcgggaaataatcatcccctcaagatga

SEQ ID NO: 9211 - DNA, 795 bp, synthetic construct
  source 1..795: mol_type = other DNA
atggaatacaaagcccagtattgccctggcgagaccataatcgctgagaacagacgcaagcatatgaacccagaacacgagtttaaaaaaattagatccgtgagcgacgaggggctggtgaagatcctgggccacagaaacccgggggaaagctataagactgtccacccccccttggcagagatggaggatgatggcgatattattaaaagtatcatagagcctacgccaggagccgcggagggaatcagggtgcggtacatccagttcgccgattcaatgtacaatgccccagcacagccctacgatcgagcccggacctatatgtggaggtacaggggagtagacacaggcaccttaagcggacgccaagtgattgagatccgggagcaggacctggaaaaaatctcgaaagaactcgtcgaaaccgacattttcgaccctgccaggtgtgggatgcgaggcgctacggtgcatggacactccctacgccttgacgaaaacgggctcatgttcgatggtcttcaaagatacatctttaatgaagaggacggacacgtttactacatcaaggaccaggtcggccggcagctggatgaagctatagacgtcggggttcccctggatgaggagtatctcaaggagatcaccacaatctaccgtgaggacaatatcggtatgcgccaggacaaggaggcgctggaggtgattgagaacattcatactgcacggacagaaggcggctatggtatgggcgtgtttttcaaggacttgaagaagaagctgggggaatga

SEQ ID NO: 9212 - DNA, 495 bp, synthetic construct
  source 1..495: mol_type = other DNA
atggacgagtcggaacaaattaacgtgatcgatgtgaaaatcactccatacaggtttctgaaacccaagacaaccgaaaagattctcaacgagatctataagttgaaagggcagcagagagtccttatacatggcccttccattcccaagaaggttttctacggcccgggtaagggacacgtggtgaaccacaccgatcgcaaggaaatcaatgtgaaaggatgtgacgtagagctgcgagtgatggtgggggagataatcgtgaccgtcgacatgagcgagctgaaggagtttatgaacaacctaaaggacatcctcgagacccacatgccatgcgattactatatactgatcggcgtattcacgcggacaaaaacaacgatctccgattatctgaagtacggcaacaatttcgaaaatagcatcgacaggcggtacattgggctcgtcgactcacatagtaaaactagcgaaaccgtcaaggttattaaatga

SEQ ID NO: 9213 - DNA, 1332 bp, synthetic construct
  source 1..1332: mol_type = other DNA
atgaagatatatgatgacaatctggacctgtacgggcctgacgggaaaattatcgaagaaagcgtccccctggagtctattagtcccctcaaaaattctgcaatacagcagatgatatatgacattaaacggtccgccgctgtgaacctggtggggatcgagaagggcttgaagagcggggccatgggtggaaagtccacttacatcccaggccgtgaactggacctgcctatcgtgaagaatgccgagcttattgcaacaaaaatcaagaagatactacaggtgaacgaggatgatgacaccaccgtcaacctcatcaatgggggccagcagctcttagtgcaactcccattcgagcgcctgaacgtggccgccgattacagtgtttctactctccagaccagtgccgccaccattcagtcaatcattgacagctttgaaatcaatatgtttgatgcatccaccatcaagacggccgtaatgggcgcctacccaaggacagttgacctttccgggtccaatatcagcgccctccttggcccccccgttctcctagaaggattgggctacggcctgcggaacattatggccaatcacgtcgtggctatcaccaacaagcagacgttgaacgctgctgcattatcttcaatcatggagcagactgcaatgtttgagacaggggatgctaccggagcttttgaacggatgcacctgttgacgctggcttatcagggcctgaatgcgaacaacctggttttcgatatcgttaaagaaaacggtaaaggaacagtcggtaccgtgatccaaacacttgtgggacgagccattgaggataagatcatcaaggtagctaaaaaaatgccgtccggctacaacatgtacgaacctattgactgggcgctgtggaacgcctatgctgctgcaggcctgctggccgccgtcattattaacgtcggggctgcgagagccgcccaggcggtcgcatcaacagtcctgtactacaatgacatgcttgagtacgagactggactcccgggagtggactatgggagaaccgagggggtgggtgtaggcttcagcttcttcagccactcgatatatggtggtggaggccccggcactttccatggcaaccacgtggtgacaaggcatgccaagggcactgcaatcccttgcgcaagtgccgcgatgtgtctggacgccgggacccagatgttctcggtgcaaaggaccagcgcactaatcggaacggtgtatggcaccatagacaatctgcgcaacccaatccccaacgtggccaaaattgcgggagagatcaaggataagctctga

SEQ ID NO: 9214 - DNA, 822 bp, synthetic construct
  source 1..822: mol_type = other DNA
atgagttgttacaaatactgggggaaactcgaggagattgcgaataagctgtcctcatacggcgacttagacaagtatggggactctgcactcgatgatgtggatattaacgagatcattgagatcctggacgacgtagaaattatcgctcatgacaaaacgatcgactttgactctgccaagcacattcttgacgatgaaaagatgaataaggcgttgaaactgatacgcaaattctacgtctacgtgggggccagactcgaaaccgagaaggcaatcgagatgttggaaagcgatgacctggacacaaacctggagagcttcgagttttatgaccgctacgtgggcctgctgaacaacgaaagtcaactggccaagttcaacgaaaacaagacattcgtgtttttgggctccggtccactcccgattactctcatgatgtttaatgaactgttcggatgcaagtgcattggaatcgagcagcaggaggatgtggctgagctcagcagaaaactgctgaagaagcttggtcttgagaacgaaatcgaaattatagtgggggacgagaccacgatcgaatcactggaatatgacatcctgatggtggccgccctggcagagcccaaagagagggtattcagcaatatctggcagtatgttgatgagaagacccctgtcatatacaggacttataccggcatgcgggccatcctctactcccccgttctagataaggatacacggggattccacaaagaggtcatgatcctaccaacaggcaataccaacaacacttcggtgttaatccgaaaaatagtctga

SEQ ID NO: 9215 - DNA, 786 bp, synthetic construct
  source 1..786: mol_type = other DNA
atgaagggcatcctgggcgccatctgcggagacatcattggatcgactcgcgagtttaacccaattaagacaaaagacttcaagctgttcaaacgcaaatctaccttcaccgacgacacggtaatgaccctcgctatcgccaactggctgatcgaagataccgccagcgagagtatcttgatcaagcagctgcagtattggggaaacaaatatcctgactcagggtacggcggacggtttcgaaattggctgaaggagatagacccgaagccatacgggagttgggctaacggctccgccatgagagtttccccctgtccctgggtggccaactccctccaggaaagccaaaaacttgctaaattgtccgccattgtcactcacaatcatcctgagggcatcaaaggggcactggctacgtcagatgcaatctatcttgcaaagactggtgcggggaaagagaagataaagcaccacattgagagccattacagttacgacttatctcggagcgtcgatgaaataaggaccaactacagctttgacgtctcctgcgccggcagcgtgccagagtccataatctgcttcctggagggagtgtcatttgaggacacaatcaggaacgcggtgagcctgggtggggatgccgatacacaggcagctattgcgggcagcattgccagtgcctactgggacatccccaagaatatctcgtataagagcattaacagactcaactacgatctgctaaatgtgctcgtgaatttcgaagaaaagttcatgtga

SEQ ID NO: 9216 - DNA, 783 bp, synthetic construct
  source 1..783: mol_type = other DNA
atggacgagaacatagccattctgaagggcatcggcctgacgatgtatgaggcgcaagcatatgtaacactcgtgagcttgatcagcagcaacgcgacggagatatctgagaaatcggggattcctcgatccaagatatatgatgtcctcaaaggcctaatccagaaaaattacattgatgttgaagatggacgccccctcacttacaatgtcaaatcccctgtggaagtcctaagtcttgagaagaaccggttgaccacagagctggatgacacaatcacgcggctcacaaatgtctacgagaatggaatgagtcaggtacaggccccgatctggaggatttacggggtggataaaatcataaaccaagagttagaaatcatcactcgcgctaagcattccatcaacatgaggatcggttttctgttcgaagaagaaggcgaagccctggttaaaatactcaaaaagagaaagaacctgaacatcaatatcctggccagcccaacctgctgtattaacaataagaccttcaacatcatcaagttcttcaaggacaatgacatgcccgtgcacaaagccgacattccatttgtgaaggtgctgatttctgactcaaaggagatgatgcacacatataccaaattttcagaggacaagcgtactgtgcttcccgagaccgcaattgggatctggaacaagtacgaagacattgctagaaactacgatgagcggttcatgaaccagctgcacaagatccagaataaaaagaagaaaaccacctga

SEQ ID NO: 9217 - DNA, 1308 bp, synthetic construct
  source 1..1308: mol_type = other DNA
atggcagatggcctggacatgttttgctatcagtgctctcagacagcgcatgggaccggctgcacaataagtggcgtttgtgggaagaagccaaccgtggcccggctgcaagataatctgatctttacaatgaagggcattagtgcctacaactacaatgcaaatgttctgggcaagtacaaccctgagattgatgcctttctgactaaagggttgtatacgactctgaccaacgtgaacttcgatgcggaggacctggtggctctggctttggaggccggtaaaatcagcgtggatgtcatgcggttgcttaaagacgcacacatcgaagcatatggcgagccacagcctgtggaggtcaaggtcggggctcaggagggccccgctataatcgtaacgggtcacgaccttaaagccttggaggaattacttaagcaggtggagggcacagatgtgaaagtgtacactcattccgagatgctcccagcgcacggatacccgggccttaacaagtacgaaaacctcgtaggccagctgggcggagcatggcacgaccagagaacaatcttcaagaagtacaacgcagctattgttggaaccagcaactgcgtcttaccggcactagacgcttataaggagcgcatgttcaccatggatgttgccaagctggagggcgtcaagacgattgagaattatgatttctccgaggtcatagagtgcgctaagtcattaggatcactagaacctgaagaactgaccaccctcacgacagggtggtccgcaggggctattgtggagcatgccgacgccatcaaaaagctggttgaagaaggtaaaataaggcgattcttcgtggtcggtggatgcgacaaggcttcgaaacacaacaactactatagggagtttgtgcagaacctgccccaggataccgtgatcctcacactggcctgcggaaagtacaagtttaacgacctggatctgggtgacatcgagggaatcccacgcctgctggacctcgggcaatgtaatgacaccatcgtggcggtggacgtggccctagccctgtgtgagctcttcgacatggagctgaatgaactgcccctcaccatcgtgctcagctggatggaacaaaaagccgcggccgtcctatgggccctgctctatcttggaaaaaccgacatgtggctcggccctattctgcccgcctggtgtaatgaagacattcttaatgtcctcgtggagaactacaacttgactcccactagcgggaatgccttggtagatatcaaaaagatcatgggggaatga

SEQ ID NO: 9218 - DNA, 330 bp, synthetic construct
  source 1..330: mol_type = other DNA
gtgaatgaggatatcaaagccaagtctctgaacatccagttcctcctggactaccagaaggatagtgtggtcagccgggagataatcaagaaagagctggggacggtcaccttctttgcttttgatcagggtcagggattgtcagaacacagcgctcctttcgacgccatggtgcagattattgacggcgaagcggaaatcacaatttccggcaaaaagaacactgtatgtgccggggagatcataatcatgccggcaaatgagccccatgcactacaagccgaaaactgcccattcaaaatgatcctcaccatgattaagtccgactga

SEQ ID NO: 9219 - DNA, 813 bp, synthetic construct
  source 1..813: mol_type = other DNA
atgaaacagtgcatcgacaacccgaatgatgtggattgggtgaatttttgggccgagcgcctgaagaacaaaaagaataaggattgggacaaagccgcgcccggtttttataagaggacccggaaggatgactatcaggacgccctgttcgaaaagctgatacttgatgagaacgacaccgtgctagatgtcggctgtggcgaggggtccgtcaccatcccaatagccgagaaagtgaggaaggtcatcggaattgatagctctcctaaaatgctggaatacctcaaaaagcgagctatcgaaaataacataaacaacattgagacaatcctaaaaccaatcgaagacatcacctacgacgaaattggaaacgtggacgtagtgatctgctcaagaagcctcaacggcattgtgcccatcgataaaacactgtcggagctcaataaaatcgccaacaagtatgttttcatcactattttcggacctgaaaacaagaagatcgagaaagattttgaaaaggagatagggattaagacggaggacttccccgattacaacttcttcttcaacatactgtttaatttaggcatttacgcaaacatcgagaggtttgacctcagcaattatcgggaatacgacagtatcaaggaggcaatggacaatgggaagttccggctggatctttacaatgacaaggagaaagagctcctggagaagtacctggaacgtattttgacttacaaccgcaagtccaagaaatactataatgttaaagacaaggctgactggatcttgatttggtggagaaagtga

SEQ ID NO: 9220 - DNA, 1020 bp, synthetic construct
  source 1..1020: mol_type = other DNA
atggtgattaaaatgcgcctgggcaagactaattttaaagtaaacaagaatggattcggagccctaccaatccaacgacgcaatgaaaaggatagcatcgaaatacttaagaaagcatacgataacgggattaacttctatgattcagctcggttctacacagacagcgaagggaagctcggcaaagcatttgaggacattcgtgagaacatctacatcgccacaaagacgggcaccgagacccctgaagagttctggaatgatttggaaacctcccttaaagagctcaagacggattacgtggacctgtaccagttccacaacatcagcttctgccccaaggaagacgacgagctgtataaagccatgcttgaggctaaggaagagggcactgtgaaacacatcggaatcacaacccataaaatcacccatgcgcacgaggccctcgacagcggactctatgaaaccttgcagtaccccttttcgtacctgagtggtgaagaggagctgaacctggtggaaaagtgtaggcagctggacgttggttttatcgcgatgaaaggaatgggcgggggcctcattaaaaactcccaggcctccttcgcatacatgaatcaatttgataacgtccttcccatatgggggattcaggagctggaggagctggacgaatttctatcttacgacgccaatactatcctgaccgctgatctgaaggagtacatcgagaaggataaggaagaactgggcgtgaacttctgtagaggttgcggctactgcatgccttgtccagaggaaatcaacattagtttatgtagcaggatgtctttatggctgagacggttcccgacagagcccagcttggatgagaagacgcagaagattatggaaaagaccaaagactgcactgagtgctattcctgcgtcgacaaatgcccatatgagctcgacatacctgagctgttgaagtcaaactatgaggactatcagaatgtcctcagtgggaagacaaaggtgtga

SEQ ID NO: 9221 - DNA, 1005 bp, synthetic construct
  source 1..1005: mol_type = other DNA
atgaatacagacattaacaaggcccaaaaatacatcgacgatgaaaattacaaagatgctatcattctagctcgcaaaaaacatagcaaggacgatgtggagacttatctctcaattctggatctgcttattgaagcggactacataatagctatcgaagagaaaggaatgtattatcagtactacgataagacacacgacaatggagattatggtgagaaatacttcgacgagtatctcaaaaaacagcccaagtccatcaacgccctgtgtgacaaggcgatgtccagattcaacaagggccaaattgacgaaagcctgaagtacatggacacggcctacaaaaactataaaaactatagcaagattgagaaaccacggatctctaagaaagagctcctcattgcaaagatagagctcctcatgcaggccaagcgctatgatgatgcattgaagtatctcaataattacgaaaatcagttcggcggcaaccagaagagcgacctttacaaggggcagatgctgcagaagaacgggaaaaacaaagaggccctggtatatctgaacaagagcttgctggaggaggatacccttgtgggattcaatgccaagggtgacgccctgttcgacctgggaaggtatgaagacgcactgaaggagtacaagaactgcctaaattacgagagtaagatcgagggggatctggaactgatcaccaattttaactacaaatctgcattctgttgcgtcaatctgggcgacgatggggaggctataaagtacttaaacaaaactattaacatgctcaacgagcacggcagacttccgaggaatatcgaggccatctaccagaagtgctcctttgaaaaggaacggatcatgaaaaagggcaacgtgacagacgaagaatttcgaaagagtaagttcttctcaaccaagacctcgttaatcatcttgttcatcatttttatattttttatcatcctgaaattgaacgggtactga

SEQ ID NO: 9222 - DNA, 1671 bp, synthetic construct
  source 1..1671: mol_type = other DNA
atgaatgatttagagaagattgttttcaagcacgctttgctgaacgcggctaagcataaaggcagtgcaaatcccggggctgtcatgggcagcatcatgtccaacgaggtcgaactccgctccaaggcaaaagaaataggttcactggcggggaagatcgtcgccaaggtgaatgccctatcccccgaggaacaggcctccgagatggaaaagttcggggtggaggtgcaggataaaaaacccaaaaccaaggactcgggccttcaggaactgcctggaactcatgagaatatagtacttcggtttgctccaaacccaagcggccctctccacatcggacacagccgcgccgccgtgcccaatgccgagtacgtgaagcgtcatgatggcaagcttattctgcgcattgaagacaccgacccgaaacgtgtgtttgaacccgcttacgagatgatccctgaggacctcgcctggctgggaatagagccaaatgaaatcgtgtaccagtcagaccgcttcgagatctattacgactacgcccgccagctgatcgaaaaaggggctgcctatatgtgcacttgtgacggggagacattcaaagagctcaaggataattgtaagccttgcctatgcagagataacagcgtcgaagagaaccttgctctgtgggagaagttcgacactatggaatccggcgaagcagtactgagaatcaagaccgacattaaccacaaaaacccagctattcgggattgggtcgcaatgcggttggtggacgaagagcaccctcgggtcgggaccaagtacaggatctatccaatgatgaacttctctgttagcgtggatgatcatctcatgggcatgacccacgttctaaggggtaaggaccacctggccaacagtgagaaacaaaaatacctgtacaatcacatgggctgggatctcccagagtttatccactacggaagactgaaaatggaggacatagctctcagtacgagcaaggcgatggcgggcatcgaggatggcacatacagcggatgggacgacccgaggctgggcaccctcagagccatcgcacgaaggggaattgacccccgcacaatttataaccttatcacggagattggtgtgaaaatggccgattctgccatcagctggaaaaaaatctatggactgaaccggaacttcgtcgaacccatcgcaaacagatatttcttctgcgaagatcctgtggagattaaaattgacggttacaatgacggcgaggtctcaatcgagcgaccgctccatgccgaccacatagacagggggaacaggatcttgtcctttgacggaagtgcctacttagcaaaggaagatattgccgacgggatctttagactgatggacgcagtaaacgtggagattgatgggaataaaataatctatcactcaacatctttcgaggacgcgaagaaggtcaaggctaagatcattcaatgggttcccacaaaagacaacgtaaatgtgaagatagtgatggacgacgcctcggccaagacgggagtgggtgaggacaccctgcgggatttggaagtgggcgatattgttcagttcgagcgagtgggttttgcccggctggatgaaatcaaggatgataagctggtgttttattacgcacataagtga

SEQ ID NO: 9223 - DNA, 483 bp, synthetic construct
  source 1..483: mol_type = other DNA
atgcacatcagcagtgataagatgactatgtttagcaatggctattcgacgcttcgaatgccggaggacttcgaaccagtcaacgccaaggacgagttcaacgacctgtacttggtcaacaccaagattcctatgtcaatcaaattctcaacaacccccacactggttgggctcccttccataaaagaggatattgaaaagaatattaacgataacccccgcattaacgtaatactctctgacttcatcccaataaacgaggacatttactacctaattgtgtccagtttttccgacggcgaaaaagagatcagacggaacgaatttctctatgtggaggataataacttatacatcttcgaatttacctacccctatgcagacagggagctggacgatttctacctgaatatcatccggagcttcaagatcagcgtgccaaagtacatcgtggaggatggaaattataaactgaatgagtga
